United States Patent Application Publication US 2021/0199660 A1 - sequence listing, part 44

SEQ ID NO: 627438 - DNA, 120 bp, Artificial Sequence
  ENSG00000179010_12 (sequence is synthesized)
ggtgctgaaggagctgcattaattctggaagacgactccatgcagcaactactgaagaaaggaccagacttcaacggggagtgtggatgggccgacctggctgggactcgtgaatctgga

SEQ ID NO: 627439 - DNA, 120 bp, Artificial Sequence
  ENSG00000179010_13 (sequence is synthesized)
gaagagctggagaatggatagtattgtctgtatttggagactttaatttctgtgtgagaccaaaggaggagagatgtgttttgttcaaaatttaaatttgttgtggtacactatcttatg

SEQ ID NO: 627440 - DNA, 120 bp, Artificial Sequence
  ENSG00000179010_14 (sequence is synthesized)
taacctgtctggtgagtttgtttggacaacctaactcagctttatttgacatggaacctaaaatagaagataagatcttgatattctgtacaagttgatgtaataccctgatgcgtttta

SEQ ID NO: 627441 - DNA, 120 bp, Artificial Sequence
  ENSG00000179010_15 (sequence is synthesized)
gaggacttggcataaaatgaaagattggcaaaggcccttgaggggcttggggatgacagtatggaactgtctgcattggaccctaaactggactagaagaggcatcttcaaggttcatac

SEQ ID NO: 627442 - DNA, 120 bp, Artificial Sequence
  ENSG00000179010_16 (sequence is synthesized)
gttgtccagctgtaagttcatttgagtagcagacctaacaaatatttgaggtcagaaccctaccatgttaaaacaaacaaaaacttaccatgttaataaaagtattcatttgcttgaaaa

SEQ ID NO: 627443 - DNA, 120 bp, Artificial Sequence
  ENSG00000179010_17 (sequence is synthesized)
ttcgccgttactctgcgcgtaagtcgcttgtccgtggcttctctgagaagaaaagttgaaaaagggtaaaagttttcaggaatattcgggctctctattgctaagcatagcgagtgtcgg

SEQ ID NO: 627444 - DNA, 120 bp, Artificial Sequence
  ENSG00000179010_18 (sequence is synthesized)
agagcgatgatttcatcgagatgcaccggaatcgggggtggggcgggagaataaaggcgtgctcgggtcagggccgatctgggccccgtcttcgtgttttgttttttgacggtggcggcg

SEQ ID NO: 627445 - DNA, 120 bp, Artificial Sequence
  ENSG00000179010_19 (sequence is synthesized)
tgggataatcagagtggccgggtttgggcgtgatgcgtgttcagtggaagggtcataaatctcagagtcgccaaggaaacagaaacggacaaggtcccgggccgtccagcaagcgggggt

SEQ ID NO: 627446 - DNA, 120 bp, Artificial Sequence
  ENSG00000179010_20 (sequence is synthesized)
ggaaatagaggattttcggggaagacgttggacaagtcaacgttgctagagactggagtgagtcaggtggtggccagaagaggtggcgtcctgcacagtggcgttcgtgagggtttgggg

SEQ ID NO: 627447 - DNA, 120 bp, Artificial Sequence
  ENSG00000179021_0 (sequence is synthesized)
aagaaaggcacttccggtgtctgttgccaggcgcgggcccagtgggccgtaggggcgacattgttgccgttgtctttcccccccagtcccggggatggagatgtcgggactcagcttttc

SEQ ID NO: 627448 - DNA, 120 bp, Artificial Sequence
  ENSG00000179021_1 (sequence is synthesized)
agagatggagggctgccgtaacctacttggcctactggacaacgacgagatcatggccctatgcgacactgtcaccaaccgcctggtgcagcctcaggaccgccaagatgctgttcatgc

SEQ ID NO: 627449 - DNA, 120 bp, Artificial Sequence
  ENSG00000179021_2 (sequence is synthesized)
aatattagcatacagtcaaagtgcagaagaacttctgaggcgtagaaaagtccaccgagaagttatatttaagtacttggcaacacaggggattgttatacctccagctactgaaaaaca

SEQ ID NO: 627450 - DNA, 120 bp, Artificial Sequence
  ENSG00000179021_3 (sequence is synthesized)
caatcttattcagcatgcaaaagattactggcaaaagcaaccacaactgaaattgaaggaaacgccagagccagttacaaagacagaggacatccacctatttcaacagcaggtgaaaga

SEQ ID NO: 627451 - DNA, 120 bp, Artificial Sequence
  ENSG00000179021_4 (sequence is synthesized)
agataaaaaagctgaaaaagttgattttcgtcgcctaggagaagaattctgtcattggttctttggacttcttaattctcagaatccttttctaggaccacctcaagatgaatggggacc

SEQ ID NO: 627452 - DNA, 120 bp, Artificial Sequence
  ENSG00000179021_5 (sequence is synthesized)
acagcacttctggcatgatgtgaagcttaggttttattacaacacatcagaacaaaatgttatggactaccatggagcagaaatcgtgagccttcgtttgctgtcactagtaaaagaaga

SEQ ID NO: 627453 - DNA, 120 bp, Artificial Sequence
  ENSG00000179021_6 (sequence is synthesized)
atttctttttctcagccccaacctagattcacatggactgaaatgtgcatcttctcctcatgggctggttatggttggagttgctgggactgtccatcgaggaaacacttgtttgggcat

SEQ ID NO: 627454 - DNA, 120 bp, Artificial Sequence
  ENSG00000179021_7 (sequence is synthesized)
ttttgaacaaatttttggactcatccgctgcccttttgtggagaatacttggaaaatcaaatttatcaacctgaaaattatgggagagagttcccttgctcctggaacattaccgaaacc

SEQ ID NO: 627455 - DNA, 120 bp, Artificial Sequence
  ENSG00000179021_8 (sequence is synthesized)
atctgttaaatttgaacaaagtgatctagaggccttttataatgtaatcactgtatgtggtaccaatgaagtacgacataatgtaaagcaggcttcggatagtggaactggggaccaagt

SEQ ID NO: 627456 - DNA, 120 bp, Artificial Sequence
  ENSG00000179021_9 (sequence is synthesized)
ttgaggtagtggaaatgagacattgctgaacaaaagagaactgggtttacctgaccctctaaagcgctaagtactgtcagcctgaaaaaaatcttctatacagaaactcttccaaatact

SEQ ID NO: 627457 - DNA, 120 bp, Artificial Sequence
  ENSG00000179021_10 (sequence is synthesized)
tgaatgatttcagatgtgaaaattgacatattttagttgaaatacctttctggactacagacttacatatcatgtgaatacttacctatttctacccgagttgcagcaagtattctgaaa

SEQ ID NO: 627458 - DNA, 120 bp, Artificial Sequence
  ENSG00000179021_11 (sequence is synthesized)
gcttaatgcaaataaatcccactttagatcttacagctaactgtgtgccttagaaaccaggtaatattttccttttacttagtgaatattctgctaatatctgcacttttcatgtgggaa

SEQ ID NO: 627459 - DNA, 120 bp, Artificial Sequence
  ENSG00000179021_12 (sequence is synthesized)
aggattaataatggtccaggcttcccctctttaagtttcatgtttacttttgtctaactctggataattgtattttacaaatgcatctcactgtagtatatttttaaaactattaaatat

SEQ ID NO: 627460 - DNA, 120 bp, Artificial Sequence
  ENSG00000179021_13 (sequence is synthesized)
tttagagatgtttaacgtaaactcaaagttctcattttagaaaatttaaataacattctttttgcaaaaaagtccaataatttaacagttgaagaaaaacttactacctctttaaagatt

SEQ ID NO: 627461 - DNA, 120 bp, Artificial Sequence
  ENSG00000179021_14 (sequence is synthesized)
tgagaaacatttttcaaagttatcagctgtagtccaagctaaatatcttttgtaatctgcaacattttccttactgtttttgggcagtgataaatgctgttctcgaaatagactttattc

SEQ ID NO: 627462 - DNA, 120 bp, Artificial Sequence
  ENSG00000179021_15 (sequence is synthesized)
ttacctaggcttcagacaacagttttatagagcagttactgtaatacaatataaaggaaatatgctgttgaaattttaaaggtatgcccagttcctaacttttaaacgaattaccgttct

SEQ ID NO: 627463 - DNA, 120 bp, Artificial Sequence
  ENSG00000179021_16 (sequence is synthesized)
tcctcttggctgatcttggcagagatgacaaaaaaaaccccaaaacaacccatgcatgtataatgtgtgtatacacatatacataagtatacatatactcccacattataacttagaata

SEQ ID NO: 627464 - DNA, 120 bp, Artificial Sequence
  ENSG00000179021_17 (sequence is synthesized)
tttagttttttacctgttactaggtttgagttacatggttgagttgccaaattatttacatgctttgtttaaattcttcatcacctagcaactgtttgctgatcatggatttacttagtt

SEQ ID NO: 627465 - DNA, 120 bp, Artificial Sequence
  ENSG00000179021_18 (sequence is synthesized)
actttaatttataaaattaccatttggaaaagaactcaattgggaaatgtgatgacgtattgtacatgttactttttcctttgctataatcatctagggagactgataagaattttggaa

SEQ ID NO: 627466 - DNA, 120 bp, Artificial Sequence
  ENSG00000179021_19 (sequence is synthesized)
atgggagcctggaaactcatctttgtttttttaatgctatgcctcttacgaggaatacgaattggtatgtcctaaaataagaacttaataaaggagggaaatcccttttgtctgctataa

SEQ ID NO: 627467 - DNA, 120 bp, Artificial Sequence
  ENSG00000179021_20 (sequence is synthesized)
taatgcaaataaatcccactttagatcttacagctaactgtgtgccttagaaaccagataccttgcgcaagtggcctatcagctaatccagtgtcttgaagagccatcactccaagtctt

SEQ ID NO: 627468 - DNA, 120 bp, Artificial Sequence
  ENSG00000179021_21 (sequence is synthesized)
agagcttcattttttcccccatcgtctcattatttttgcttaccacagaaacataaggtatgtgggggcttatttaaaactgtatctaaatacagcataaaaacaatataataacatgaa

SEQ ID NO: 627469 - DNA, 120 bp, Artificial Sequence
  ENSG00000179021_22 (sequence is synthesized)
agaatgcttccctgagttgaatgcaaaggacagattgggaacccatttaacatcatctacaggtagattttttggtgacctgagtgaaaagtttattttgagagaaagtatgtaaccaaa

SEQ ID NO: 627470 - DNA, 120 bp, Artificial Sequence
  ENSG00000179021_23 (sequence is synthesized)
atggcaggcaccttgaatccatgtctccttttggaggcaaaatttttctgagatgattttcgtactaggaatacacacaagcgagctaaatacatataccggtggatttttaaggggtat

SEQ ID NO: 627471 - DNA, 120 bp, Artificial Sequence
  ENSG00000179021_24 (sequence is synthesized)
tagtgctaagtctgattgtgactagtccatataaaaatgtaaagcgtttgttcattttgtgtgtcgggtagctagttttattttaaatttgctgaattttacttcaaaacgtgaaaaatt

SEQ ID NO: 627472 - DNA, 120 bp, Artificial Sequence
  ENSG00000179021_25 (sequence is synthesized)
ttgtcactccgaaccatggacactaaaagaggaagttccaaagaattaagaccgaaaatagctttagacttatatggttcttcagcgtttattttacatggctttcaccttcttataatc

SEQ ID NO: 627473 - DNA, 120 bp, Artificial Sequence
  ENSG00000179021_26 (sequence is synthesized)
atgatgctgttcatgcaatattagcatacagtcaaagtgcagaagaacttctgaggcgtagaaaagtccaccgagaagttatatttaagtacttggcaacacaggggattgttatacctc

SEQ ID NO: 627474 - DNA, 120 bp, Artificial Sequence
  ENSG00000179023_0 (sequence is synthesized)
atgttccccagaggagcagaggcccaggactggcatttggatatgcagctgaccggcaaggtggtgctgtcagccgctgccctgctcctggtgactgtggcctacaggctgtacaagtcg

SEQ ID NO: 627475 - DNA, 120 bp, Artificial Sequence
  ENSG00000179023_1 (sequence is synthesized)
aggcctgccccagcccagcggtggggtgggaatggccaggcagaagccaaggaggaagcagagggctcagggcagcctgctgtacaggaggcttctcctggggtgctcctgagggggcca

SEQ ID NO: 627476 - DNA, 120 bp, Artificial Sequence
  ENSG00000179023_2 (sequence is synthesized)
agacgtcggaggagcagcaagcgggctgaagcaccacagggctgcagctgtgagaatccaagaggcccctatgtcctggtcacgggggccacttccacagacaggaagccccagagaaaa

SEQ ID NO: 627477 - DNA, 120 bp, Artificial Sequence
  ENSG00000179023_3 (sequence is synthesized)
ggctcaggtgaggagcggggcgggcagggctcggactctgagcaggtgcctccttgctgccccagccaggaaaccagaacagctgttggcagtaaccctgaccctccccatttcccccgc

SEQ ID NO: 627478 - DNA, 120 bp, Artificial Sequence
  ENSG00000179023_4 (sequence is synthesized)
ttgggcagcgaaccgaagagctccccagctggactcattgcagcagccgacggcagctgtgccggtggtgagccttctccatggcaggacagtaaaccccgtgagcatccaggactgggg

SEQ ID NO: 627479 - DNA, 120 bp, Artificial Sequence
  ENSG00000179023_5 (sequence is synthesized)
caactagaacctccccactgtcactacgtggctcccttgcaaggcagcagtgacatgaaccagagctgggtcttcacccgtgtgataggggtcagcagagaagaggctggggctctcgag

SEQ ID NO: 627480 - DNA, 120 bp, Artificial Sequence
  ENSG00000179023_6 (sequence is synthesized)
gctgcctccgatgttgacctgaccctgcatcagcaggagggcgcccccaactcctcctataccttctcatccatagcccgcgtccgaatggaggagcatttcatacagaaggcggagggg

SEQ ID NO: 627481 - DNA, 120 bp, Artificial Sequence
  ENSG00000179023_7 (sequence is synthesized)
gttgagccccggctcaagggcaaggtgtacgactactatgtggaatctacctctcaggccatcttccagggcaggctggctcccaggacagcagccctgactgaggttccatcccctagg

SEQ ID NO: 627482 - DNA, 120 bp, Artificial Sequence
  ENSG00000179023_8 (sequence is synthesized)
ccaccgccagggtccctgggaacaggggctgcctcgggaggccaagccggtgacacaaagggtgcagccgaaagagccgcctccccgcagacagggccgtggccctccacccgaggcttc

SEQ ID NO: 627483 - DNA, 120 bp, Artificial Sequence
  ENSG00000179023_9 (sequence is synthesized)
agccggaaggagagccttctgcagatagcggagaacccagagctgcagctgcagccagatggcttccggctccccgctccaccctgcccagacccgggcgccctgcctggcttaggcaga

SEQ ID NO: 627484 - DNA, 120 bp, Artificial Sequence
  ENSG00000179023_10 (sequence is synthesized)
agcagccgggagccccatgtgcagccggtggccgggaccaatttcttccatatcccgctcacccctgcttcagccccacaggtccgcctggatctgggcaattgctatgaggtgctgacc

SEQ ID NO: 627485 - DNA, 120 bp, Artificial Sequence
  ENSG00000179023_11 (sequence is synthesized)
ttggccaagaggcagaacctggaggccctgaaagaggcggcctacaaggtgatgagcgaaaactacctgcaggtgctgcgcagcccggacatctacgggtgcctgagcggggcagagcgc

SEQ ID NO: 627486 - DNA, 120 bp, Artificial Sequence
  ENSG00000179023_12 (sequence is synthesized)
gagctgatcctgcagcgccggctccggggccgccagtacctggtggtggctgacgtgtgccccaaggaagactccggcggcctctgttgctatgacgatgagcaggatgtctggcgcccg

SEQ ID NO: 627487 - DNA, 120 bp, Artificial Sequence
  ENSG00000179023_13 (sequence is synthesized)
ctggctcgcatgccccccgaggccgtgtcccggggctgtgccatctgcagtctcttcaattatctcttcgtggtgtccggctgccaggggcccgggcaccagccctccagccgcgtcttc

SEQ ID NO: 627488 - DNA, 120 bp, Artificial Sequence
  ENSG00000179023_14 (sequence is synthesized)
tgctacaacccgctcacggggatctggagcgaggtgtgcccgctgaaccaggcccggccgcactgccggctggtggccctggacgggcacctgtatgccatcggcggagagtgtctgaac

SEQ ID NO: 627489 - DNA, 120 bp, Artificial Sequence
  ENSG00000179023_15 (sequence is synthesized)
tcggtggagcgttacgacccccgcctggaccgctgggactttgccccgccgctccccagtgacacgttcgccctggcgcacacggccacggtgcgtgccaaggaaatcttcgtcaccggc

SEQ ID NO: 627490 - DNA, 120 bp, Artificial Sequence
  ENSG00000179023_16 (sequence is synthesized)
ggctcgctgcgcttcctgctgttccgcttctctgcgcaggagcagcgctggtgggccggccccaccgggggcagcaaggaccgcacggccgagatggtggcggtcaacggctttctctac

SEQ ID NO: 627491 - DNA, 120 bp, Artificial Sequence
  ENSG00000179023_17 (sequence is synthesized)
cgctttgacctcaaccgcagcctgggcatcgccgtgtaccgctgcagcgccagcacccggctctggtacgagtgcgccacgtaccggacgccttacccggatgccttccagtgcgccgtg

SEQ ID NO: 627492 - DNA, 120 bp, Artificial Sequence
  ENSG00000179023_18 (sequence is synthesized)
gtggacaacctcatctactgcgtgggacgccggagcaccctctgcttcctagcagactctgtctcacccaggtttgtgcccaaggagctgcggagtttcccggccccgcagggcaccctc

SEQ ID NO: 627493 - DNA, 120 bp, Artificial Sequence
  ENSG00000179023_19 (sequence is synthesized)
ctgcccaccgtcctgaccttgcccacccccgatttgcctcagaccagggtctagcagtccctcaactgagctcctcatgcaaagctgggggccaccgggctccactgccagccgtccctc

SEQ ID NO: 627494 - DNA, 120 bp, Artificial Sequence
  ENSG00000179023_20 (sequence is synthesized)
tgggggccatttctaggcaaacaggcaacccaggaatgtggccatcaagaggtgaattccggtcctttctcctcccctagctggggagagagggatcttagatgagtcttacccttcatg

SEQ ID NO: 627495 - DNA, 120 bp, Artificial Sequence
  ENSG00000179023_21 (sequence is synthesized)
ttggggggatacaccgggaccccaccaaagcttagggggcatagtctttttgcaatcacaattctaggagccagttgaccccagcagcccctcgctagttgctctggagaggggttggct

SEQ ID NO: 627496 - DNA, 120 bp, Artificial Sequence
  ENSG00000179023_22 (sequence is synthesized)
ctctgagccatcagtgccccttcctaaacatcagccactgggccccacctccacagttcccagaagcaccgggacacacaggtgggaaagatggaggcaggtgacttgggcagggccagg

SEQ ID NO: 627497 - DNA, 120 bp, Artificial Sequence
  ENSG00000179023_23 (sequence is synthesized)
aaggagccgagggagccccaggggccctggccagagggagtggtggtttgaaaagtagaacagctgaagctggggccagcctaggagactcttgcttgcgagaaaatataccaaagccca

SEQ ID NO: 627498 - DNA, 120 bp, Artificial Sequence
  ENSG00000179023_24 (sequence is synthesized)
cattacttttctccttattggaagaaagagaagcagccattgtaccaagctatcttctggtggaggtctgctaaggatacacggaggtctcagcaaagggaagaaactatgtgatccaag

SEQ ID NO: 627499 - DNA, 120 bp, Artificial Sequence
  ENSG00000179023_25 (sequence is synthesized)
ggccaccctgctcctcggccctgcccatgttaactgaccattgcactcattctcagatctgtagccgtcttcctgtctggaagctggggcaaccaccaccagtcagcacttcagggtgac

SEQ ID NO: 627500 - DNA, 120 bp, Artificial Sequence
  ENSG00000179023_26 (sequence is synthesized)
agcataatttgccctccttgtgccaggtacggtcacctggtttgccgcattcacattttcaggtggatgaccaagcggaggaactagaagagtctagtgaagcatccagagactggatct

SEQ ID NO: 627501 - DNA, 120 bp, Artificial Sequence
  ENSG00000179023_27 (sequence is synthesized)
cctttcacatctggtttgataaactccgaatgaaggagacccccagcctcaggaaagcacctgtccttccaggagggacgggagagagcctgacccagtgtattaccacagcccttgttc

SEQ ID NO: 627502 - DNA, 120 bp, Artificial Sequence
  ENSG00000179023_28 (sequence is synthesized)
cacctctgagggagacagtgacagatgggaaggcagtgatgctcttggtcccagccagaagccaggggagatgggaggtacaccagagcagggcctgacaaggaagaaaataaggatgct

SEQ ID NO: 627503 - DNA, 120 bp, Artificial Sequence
  ENSG00000179023_29 (sequence is synthesized)
ttggacctcagtgtccttgtcttgaaaatgggaaggacaattcatgtccctgtctgccctggggataaatgagaggataaaagagaaagttcttcccagtttcccaggtggtcccagcta

SEQ ID NO: 627504 - DNA, 120 bp, Artificial Sequence
  ENSG00000179023_30 (sequence is synthesized)
gatcctgtgtccacggaagctgctggtgcccaggctgtgggtcttgttggaagaagcaggactggaacaaaggatgaaaaggaggttggcatggacataagaggagagcttgcactggac

SEQ ID NO: 627505 - DNA, 120 bp, Artificial Sequence
  ENSG00000179023_31 (sequence is synthesized)
caccgaagaccaccatccctggtctgggctctggcaccaggctctgccagtggcagctcagaggccacagggtgacattggccacacccccaccccacttccctggcctgggcctcgaaa

SEQ ID NO: 627506 - DNA, 120 bp, Artificial Sequence
  ENSG00000179023_32 (sequence is synthesized)
gatgaagcaactgaatttattcttaaatcagagaccaggaagggaaagtcagctggggccatggctaccttcttgggagagtgacccctgaacccagccaaggccacattcaagctcagt

SEQ ID NO: 627507 - DNA, 120 bp, Artificial Sequence
  ENSG00000179023_33 (sequence is synthesized)
gtcaacactaggcatgaacctccaagggacctgtgggctggggcagaatggcttcagtgacaagactcaaaggaggcactagcattgtgctgctggactgggggaaggacttgcttggga

SEQ ID NO: 627508 - DNA, 120 bp, Artificial Sequence
  ENSG00000179023_34 (sequence is synthesized)
ggagaactctacataggagctgggggcaggtggacctagatccaaccttcaacccctagtgaggggccaggcagaggacaaggcaacaactaagctaggtaaagttctggaaagtttcca

SEQ ID NO: 627509 - DNA, 120 bp, Artificial Sequence
  ENSG00000179023_35 (sequence is synthesized)
agcccaggaggaacaaggaccactctggaaaaacattccaaagcccattgcatacctgtggtagagactaggggagtgattccagggataagacggacaaatgtgttccaggccccagct

SEQ ID NO: 627510 - DNA, 120 bp, Artificial Sequence
  ENSG00000179023_36 (sequence is synthesized)
gatggtgggtgtggtcttcataatgagaggtggagctgagatttgggcctgggctgggaagaggagtacacagtccatctgatccacctctcttatggttccattggcaaaatcattcat

SEQ ID NO: 627511 - DNA, 120 bp, Artificial Sequence
  ENSG00000179023_37 (sequence is synthesized)
cagtcgtcctatcttttcctggcgagcgctcacaatggcttcataagtgtttcaatacagtgtcccaggcagtcactacctatagattagagctgatgtgctggcctggggctctagagc

SEQ ID NO: 627512 - DNA, 120 bp, Artificial Sequence
  ENSG00000179023_38 (sequence is synthesized)
tgggcttcaggaagaatgtggtcagggccatcagggtggaacaaggtagctcaagaccttggaaagacaccctgagggcacaatcgtccttgcagtttaagatgacactttaaaaataaa

SEQ ID NO: 627513 - DNA, 120 bp, Artificial Sequence
  ENSG00000179023_39 (sequence is synthesized)
cttgcagtttaagatgacactttaaaaataaattctttcctaatgatggcttgagtcctgccactcaatgggagcatcagcggaacccgtagcatcttatttggaattgacattctctat

SEQ ID NO: 627514 - DNA, 120 bp, Artificial Sequence
  ENSG00000179023_40 (sequence is synthesized)
ctttttgtttcactggaaaggaaagatgatgctctgttttaaacattaaaagtatacaagttgctttgttacaataaaactaaatatgtacacacaccaaaaaaaaaaaaaaatgatcag

SEQ ID NO: 627515 - DNA, 120 bp, Artificial Sequence
  ENSG00000179023_41 (sequence is synthesized)
gatgcattcattcactcctgaaataaacatttacagaatatttggactgggcagtgttctaggtgctggagatgcagcagatccctgccttaatggagctcacattctagcaaaggaaaa

SEQ ID NO: 627516 - DNA, 120 bp, Artificial Sequence
  ENSG00000179029_0 (sequence is synthesized)
gttcgtctagatttgtcggcttgcggggagacttcaggagtcgctgtctctgaacttccagcctcagagaccgccgcccttgtccccgagggccatgggccgggtctcagggcttgtgcc

SEQ ID NO: 627517 - DNA, 120 bp, Artificial Sequence
  ENSG00000179029_1 (sequence is synthesized)
ctctcgcttcctgacgctcctggcgcatctggtggtcgtcatcaccttattctggtcccgggacagcaacatacaggcctgcctgcctctcacgttcacccccgaggagtatgacaagca

SEQ ID NO: 627518 - DNA, 120 bp, Artificial Sequence
  ENSG00000179029_2 (sequence is synthesized)
ggacattcagctggtggccgcgctctctgtcaccctgggcctctttgcagtggagctggccggtttcctctcaggagtctccatgttcaacagcacccagagcctcatctccattggggc

SEQ ID NO: 627519 - DNA, 120 bp, Artificial Sequence
  ENSG00000179029_3 (sequence is synthesized)
tcactgtagtgcatccgtggccctgtccttcttcatattcgagcgttgggagtgcactacgtattggtacatttttgtcttctgcagtgcccttccagctgtcactgaaatggctttatt

SEQ ID NO: 627520 - DNA, 120 bp, Artificial Sequence
  ENSG00000179029_4 (sequence is synthesized)
cgtcaccgtctttgggctgaaaaagaaacccttctgattaccttcatgacgggaacctaaggacgaagcctacaggggcaagggccgcttcgtattcctggaagaaggaaggcataggct

SEQ ID NO: 627521 - DNA, 120 bp, Artificial Sequence
  ENSG00000179029_5 (sequence is synthesized)
tcggttttcccctcggaaactgcttctgctggaggatatgtgttggaataattacgtcttgagtctgggattatccgcattgtatttagtgctttgtaataaaatatgttttgtagtaac

SEQ ID NO: 627522 - DNA, 120 bp, Artificial Sequence
  ENSG00000179029_6 (sequence is synthesized)
attaagacttatatacagttttaggggacaattgagatggctgaactactgaataaaaaaaaaacaacgctgttttctagtcctgcagaccgtaagatacttggtatcgcttctattttg

SEQ ID NO: 627523 - DNA, 120 bp, Artificial Sequence
  ENSG00000179029_7 (sequence is synthesized)
gttactacggtaggtgcctggcggaagggagtgggcggagatatgtaaatagaaagtgcgtacagttagaacgtccggcacgtaactgatcggagcattctgggaagaagtaatttattc

SEQ ID NO: 627524 - DNA, 120 bp, Artificial Sequence
  ENSG00000179029_8 (sequence is synthesized)
cttttcggcagccgaatgaaaaaaaaatttaaaaaaatgtgcgagctaatatggcaaaacaactggaaggacgctaaataataggattgctcataccagcgcgttatgaactcaccctag

SEQ ID NO: 627525 - DNA, 120 bp, Artificial Sequence
  ENSG00000179029_9 (sequence is synthesized)
acatgatgattggagatgcatgaaacgtgattaacgtctctgcgtaatcaggacttgcaacaccctgattgctcctgtctgattctttctgacgatcacttacatttgtgttatgctgat

SEQ ID NO: 627526 - DNA, 120 bp, Artificial Sequence
  ENSG00000179029_10 (sequence is synthesized)
tagcagatatccacaaacatagctatgaagttctgactgggataaccttgctgtttgtctattttgcagtcttgctattgctgtttgtctattttgcagtcttgctaaatttgtttgttc

SEQ ID NO: 627527 - DNA, 120 bp, Artificial Sequence
  ENSG00000179029_11 (sequence is synthesized)
ttgaaaattgtgatttggtttttgttgctttctggaatttaggcagtgaaataatacaaatgggctctttgttttttgtcgtttgataactttaatcctcacttctcaggaaacattgca

SEQ ID NO: 627528 - DNA, 120 bp, Artificial Sequence
  ENSG00000179029_12 (sequence is synthesized)
catcagtaaatatctgcagtcttgtgcacatggtggttgccctcaggatggtattcaataggaactgtatttctttttccttgaggtagggtcttggtctgtcgccaaggcaggagtgca

SEQ ID NO: 627529 - DNA, 120 bp, Artificial Sequence
  ENSG00000179029_13 (sequence is synthesized)
cggcgcagatgtatatacatggatacatttgtttttggagagttggttgttaaaaatctaccagtacacccccaagaaactcatcatcaccaatgacttcttcccaaatccagagtcact

SEQ ID NO: 627530 - DNA, 120 bp, Artificial Sequence
  ENSG00000179029_14 (sequence is synthesized)
tcatcatcaccaatgacttcttcccaaatccagagtcacttttcagacttgagattgacctctcttcagcatatggtatgttgaccacccccctcttttggttttttttttttttttttt

SEQ ID NO: 627531 - DNA, 70 bp, Artificial Sequence
  ENSG00000179029_15 (sequence is synthesized)
caggctcagatgatcacctggttgttttaaaatttttctatagagacagggtctcactgtgttgcccaag

SEQ ID NO: 627532 - DNA, 120 bp, Artificial Sequence
  ENSG00000179029_16 (sequence is synthesized)
aatttttctatagagacagggtctcactgtgttgcccaagctggtcccaaactcctgggctcaagccgtcctccccactaggcctctaggcctcctaaagtgctaggatacaggcatgag

SEQ ID NO: 627533 - DNA, 120 bp, Artificial Sequence
  ENSG00000179029_17 (sequence is synthesized)
ccaccgcgtttctcccactcccctcttttgcacttttttctcccttagttttgaaacagtggttcacctggtttgcctactattatactgttctggttgttccttcttacattaattcaa

SEQ ID NO: 627534 - DNA, 120 bp, Artificial Sequence
  ENSG00000179029_18 (sequence is synthesized)
tggtcctagtcctaccctgccccctcccagtgtcttaccctcttgggttttcttgtttcccgccgcccccaggcctgccctgcagcctgcccctttttcacttctcttcctgtgccctgc

SEQ ID NO: 627535 - DNA, 120 bp, Artificial Sequence
  ENSG00000179029_19 (sequence is synthesized)
tttttcccctacccagccctttcctccatgtgtgagataccagatccactcaacatcctgtaggcttttaaagtttcatcccctaccccccatgccacctgccctacactttcagaggtg

SEQ ID NO: 627536 - DNA, 120 bp, Artificial Sequence
  ENSG00000179029_20 (sequence is synthesized)
ccacctttcccacacgacccacttctatcaggactcccttcagccacctgacacaatagtgtctgctgtagccaatccttccagttcaaagatcttcaacgatgtgctaaatcctgctgt

SEQ ID NO: 627537 - DNA, 120 bp, Artificial Sequence
  ENSG00000179029_21 (sequence is synthesized)
ttactaggcacttaaaatcccaaaatgagagtaaaatacagtttttggccaggcatgttggctcacgtctgtaatcccagcactgtgggaggcgcaggcaggaggcaacatagtgagaac

SEQ ID NO: 627538 - DNA, 120 bp, Artificial Sequence
  ENSG00000179029_22 (sequence is synthesized)
ccaagtctacaaaaataataggaataataaaaaccccaccgtttctttttacaatgaggaggaggtagatacaaatctgtaattcagtgtgataagcactgtgctatagaagtgtgtgaa

SEQ ID NO: 627539 - DNA, 64 bp, Artificial Sequence
  ENSG00000179029_23 (sequence is synthesized)
aattcagtgtgataagcactgtgctatagaagtgtgtgaagatagaaagcacaggcagggcgcg

SEQ ID NO: 627540 - DNA, 120 bp, Artificial Sequence
  ENSG00000179029_24 (sequence is synthesized)
ccagggcaacagagcaagactctgtcaaaaaacaaacaaaagatataaagcacaatgggaactcagaagaggcaacggaagcgagcactgggaactcagaagaggcaaaggagatgaggc

SEQ ID NO: 627541 - DNA, 120 bp, Artificial Sequence
  ENSG00000179029_25 (sequence is synthesized)
ttccagcgcatattaagtcgctgtcagcactcctttgtggcatagcagaaggagagcctactcttacctctcatctgaaggatccaggctggcccacagataaggggtagggtagcctga

SEQ ID NO: 627542 - DNA, 120 bp, Artificial Sequence
  ENSG00000179029_26 (sequence is synthesized)
ggtccgatctgtgcagtcacttctggtctctcctcacatgactgtcctaaaattcagaagtcagagctgctgactctagcccttgaaacatggtgagggagcaagggatgaacctgaatg

SEQ ID NO: 627543 - DNA, 120 bp, Artificial Sequence
  ENSG00000179029_27 (sequence is synthesized)
cagatgccagccccaccactggccttttctgacccatcactgtctgtcgatccaaagactttccttaatctcgtgccttcccaagccattggggctcactgtagtgcatccgtggccctg

SEQ ID NO: 627544 - DNA, 120 bp, Artificial Sequence
  ENSG00000179041_0 (sequence is synthesized)
cttttccggattgggcatcccggcatctgcacgtggttatgctgccggagtttgggccgccactgtaggaaaagtaacttcagctgcagccccaaagcgagtgagccgagccggagccat

SEQ ID NO: 627545 - DNA, 120 bp, Artificial Sequence
  ENSG00000179041_1 (sequence is synthesized)
ggagggccagagcgtggaggagctgctcgcaaaggcagagcaggacgaggcagagaagttgcaacgcatcacggtgcacaaggagctggagctgcagtttgacctgggcaacctgctggc

SEQ ID NO: 627546 - DNA, 120 bp, Artificial Sequence
  ENSG00000179041_2 (sequence is synthesized)
gtcggaccggaaccccccgaccgggctgcggtgcgccggacccacgccggaggccgagctacaggccctggcgcgggacaacacgcaactgctcatcaaccagctgtggcagctgcccac

SEQ ID NO: 627547 - DNA, 120 bp, Artificial Sequence
  ENSG00000179041_3 (sequence is synthesized)
ggagcgcgtggaagaggcgatagtggcgcggctgccggagcccaccacacgcctgccgcgagagaagcctctgccccgaccgcggccacttacacgctggcagcagttcgcgcgcctcaa

SEQ ID NO: 627548 - DNA, 120 bp, Artificial Sequence
  ENSG00000179041_4 (sequence is synthesized)
gggcatccgtcccaagaagaagaccaacctggtgtgggacgaggtgagtggccagtggcggcggcgctggggctaccagcgcgcccgggacgacaccaaagaatggctgattgaggtgcc

SEQ ID NO: 627549 - DNA, 120 bp, Artificial Sequence
  ENSG00000179041_5 (sequence is synthesized)
cggcaatgccgaccccttggaggaccagttcgccaagcggattcaggccaagaaggaaagggtggccaagaacgagctgaaccggctgcgtaacctggcccgcgcgcacaagatgcagct

SEQ ID NO: 627550 - DNA, 120 bp, Artificial Sequence
  ENSG00000179041_6 (sequence is synthesized)
gcccagcgcggccggcttgcaccctaccggacaccagagtaaggaggagctgggccgcgccatgcaagtggccaaggtctccaccgcctctgtggggcgctttcaggagcgcctccccaa

SEQ ID NO: 627551 - DNA, 120 bp, Artificial Sequence
  ENSG00000179041_7 (sequence is synthesized)
caaccccttttcggggactttgcagccgagaaaaagaaccagttggagctgcttcgtgtcatgaacagcaagaagcctcagctggatgtgactagggccaccaataagcagatgagggag

SEQ ID NO: 627552 - DNA, 120 bp, Artificial Sequence
  ENSG00000179041_8 (sequence is synthesized)
gaggaccaggaggaggccgccaagaggaggaaaatgagccagaagggcaagagaaagggaggccggcaggggcctgggggcaagaggaaagggggcccgcccagccagggagggaagagg

SEQ ID NO: 627553 - DNA, 120 bp, Artificial Sequence
  ENSG00000179041_9 (sequence is synthesized)
aaagggggcttgggaggcaagatgaattctgggccgcctggcttgggtggcaagagaaaaggaggacagcgcccaggaggaaagaggaggaagtaatagtttctaactgtcggacccgtc

SEQ ID NO: 627554 - DNA, 120 bp, Artificial Sequence
  ENSG00000179041_10 (sequence is synthesized)
tgtaaaccaaggactatgaatactaaatgttaagttctaggcaattatacggggactcagaaggacctggccgctgccttcattgagtttaaagggacaggattgcccttccgtcaagaa

SEQ ID NO: 627555 - DNA, 120 bp, Artificial Sequence
  ENSG00000179041_11 (sequence is synthesized)
agtatgtaagtgttggactgcacaaattaatgtttttcccacaaccgagactttggagattaagaacttatttgaggatttaagaattagggaaataatttggtggaaaccgggaatgag

SEQ ID NO: 627556 - DNA, 120 bp, Artificial Sequence
  ENSG00000179041_12 (sequence is synthesized)
ttctattcttaaacagcctttttttttctttttaatgttggatatacggcgaggtagagttggccatatttcagagacttagattgacgtatatgtttctgcattatttttacaacaagt

SEQ ID NO: 627557 - DNA, 120 bp, Artificial Sequence
  ENSG00000179041_13 (sequence is synthesized)
ttgtgtatcagagcgggagtgcgggggagggaaagaaaacaaacagtttcagaattgaataggcaagtgactgttttaaagattaagtaataaagatgtcttatctagtgtgacttttaa

SEQ ID NO: 627558 - DNA, 120 bp, Artificial Sequence
  ENSG00000179044_0 (sequence is synthesized)
gagagagacttccttggggagaggaattcagctgcacgctggagtcagctggagttgcccaggccctgtgagcaagtggcaggcgtgcccagctgcattggggagagggctgttctcaag

SEQ ID NO: 627559 - DNA, 120 bp, Artificial Sequence
  ENSG00000179044_1 (sequence is synthesized)
gccaaggtcatttttggagggagaactggacgcctgatcaaatctggcccacaatggactcagcagccaaggatgagatgcagccggcgttgtcccctggacctgagtggccagagcagg

SEQ ID NO: 627560 - DNA, 120 bp, Artificial Sequence
  ENSG00000179044_2 (sequence is synthesized)
agcgggcagagcagctggcccggggtgcagcgctcaagtgggcctcaggcatcttctaccggccggagcagctggccaggctaggccagtaccgcagccgcgaggtgcagcgtacctgct

SEQ ID NO: 627561 - DNA, 120 bp, Artificial Sequence
  ENSG00000179044_3 (sequence is synthesized)
ccctggaatcgcgcctcaagtcagtgatgcagtcatacctggaaggcgtgcagactggtgtgtggcagctggcccaggccattgaggtggtgcagggaacccgggaggccctgagccagg

SEQ ID NO: 627562 - DNA, 120 bp, Artificial Sequence
  ENSG00000179044_4 (sequence is synthesized)
cccgtgggttgctccagggcatgtcccaggccttacagactctagagcccctacgggagcgggttgcccagcacaagcaactgcaggccctgtctcacctgctgcctcggctgcgggcag

SEQ ID NO: 627563 - DNA, 120 bp, Artificial Sequence
  ENSG00000179044_5 (sequence is synthesized)
tgccggctgcagtgtcccacacacagactctgattgatggccaacagttcttggaggcatatgtgagccttcgggagctggagcagctgcgagaggatacgtgggcacccctggggggcc

SEQ ID NO: 627564 - DNA, 120 bp, Artificial Sequence
  ENSG00000179044_6 (sequence is synthesized)
tggagttgccagtcttccaggggctggaccttctgttcgaggcactgggccaggctgtggaagcagctgcaggggccgcagggaagctggcacgggaggacccagccctgttggtggctg

SEQ ID NO: 627565 - DNA, 120 bp, Artificial Sequence
  ENSG00000179044_7 (sequence is synthesized)
ctgtgcgtgtggcggaggtggagactggacgaacaacccccctgggccaggtcccccgggactggcgtcagcgctgtctgagggcactacaggagggcctggagcaggcccactttgggt

SEQ ID NO: 627566 - DNA, 120 bp, Artificial Sequence
  ENSG00000179044_8 (sequence is synthesized)
cacctctgctgcctgcaccaggggccctaccagggtggctggaggctctgcgagtggccctgccagtcgagttggccacagctgaggcactagtagcgccttgctgcccgccacagtaca

SEQ ID NO: 627567 - DNA, 120 bp, Artificial Sequence
  ENSG00000179044_9 (sequence is synthesized)
acgtggtccagctatgggcccacacgctgcatagtggtttgcgccgcagcctgcagaacctccttgcagggcctgagctagaagctgcggatgccttcgccttgctgcactgggcactgc

SEQ ID NO: 627568 - DNA, 120 bp, Artificial Sequence
  ENSG00000179044_10 (sequence is synthesized)
agcctggagttggggcctgaggctgatgtgtcccagctggagccccttctgaccttggagaacattgagcagctggaggcaacatttgtggccaacatccaggcaagtgtgtctcagtgg

SEQ ID NO: 627569 - DNA, 120 bp, Artificial Sequence
  ENSG00000179044_11 (sequence is synthesized)
ctgcagaatgcactggatggggaggtagctgagtggggccgggagcatgggcccaacacagacccgtctggctcctattactcaccaatgccagccattgtgctgcagatcctggaagag

SEQ ID NO: 627570 - DNA, 120 bp, Artificial Sequence
  ENSG00000179044_12 (sequence is synthesized)
aacattcgtgtggccagcctggtcagtgagtcactgcaacagcgagtgcatggcatggcactgtcagaactgggcacattcttgaggagcttcagtgatgctctgatccgattctcccga

SEQ ID NO: 627571 - DNA, 120 bp, Artificial Sequence
  ENSG00000179044_13 (sequence is synthesized)
gaccacttcagggggaaatcaatggcccctcattacgtgccctacctactggccgccctcaaccacaagtcagcactcagctcctcagtgtctgtcctgcagctggacggggcgccttca

SEQ ID NO: 627572 - DNA, 120 bp, Artificial Sequence
  ENSG00000179044_14 (sequence is synthesized)
ggggccttggctccagtggaagctgcgctggacgagttgcagaggaggatctaccgcttggtgttggaggcgctgcaggcggagctccagcccctgttcgcggatctgccctcgcgccaa

SEQ ID NO: 627573 - DNA, 120 bp, Artificial Sequence
  ENSG00000179044_15 (sequence is synthesized)
tggctgtcgagccctgagctcctgcaaagtgtgtgtgaacggacggggcgcttctgccgggacttctggcgcgtgcggaaccccacggttcagctgctgctggctgaggccgagcgtgcc

SEQ ID NO: 627574 - DNA, 120 bp, Artificial Sequence
  ENSG00000179044_16 (sequence is synthesized)
gtggtgctccagtacctgagcgcgctgatgcaaggccgcctggtgtgccgcggagccgacgagaggacccaggcggccgagcgcctgcggcacgatgctgcccagcttcagcagcttttc

SEQ ID NO: 627575 - DNA, 120 bp, Artificial Sequence
  ENSG00000179044_17 (sequence is synthesized)
ctcagtttgggcctggaggagaacgcgcactgcgcgccggtgctgctcgccctgagggagctgctaaacctccgcgaccccgcgctgctgggcctggaggtggctggcctgcggcaacaa

SEQ ID NO: 627576 - DNA, 120 bp, Artificial Sequence
  ENSG00000179044_18 (sequence is synthesized)
tttcccgacgtgagcgaggaccacgtctccgccctcttgggcctgcgcggggacttgtcccgggagcagcacctggccgcgctcagctccctgcaggctgcgctgccgccgtcgccccgc

SEQ ID NO: 627577 - DNA, 120 bp, Artificial Sequence
  ENSG00000179044_19 (sequence is synthesized)
gcgagccgccgcgtcctcttcagcctagtgcccgcgcccgcgctcgcgccggcctcctgcctgccctcggggtcctgcgcccgagccctgctgctcgcagaataaaccacggctgccgga

SEQ ID NO: 627578 - DNA, 120 bp, Artificial Sequence
  ENSG00000179044_20 (sequence is synthesized)
tcaaatctggtaagttctgtaccaaactgtcctgtgcagctcagagcaggaccagggtccagtggaggcctgtgcccactctgtctcgcttgacatctgcaggggcacgactgggaaacc

SEQ ID NO: 627579 - DNA, 120 bp, Artificial Sequence
  ENSG00000179044_21 (sequence is synthesized)
tagcaggcaaagcctcccaggtgccctccgcatcacacccgctccctctcacttcccgagggggccgggaagaacctccttcctcctctcagaagggcttagacagaggcagcagctcac

SEQ ID NO: 627580 - DNA, 120 bp, Artificial Sequence
  ENSG00000179044_22 (sequence is synthesized)
aagcgcccgtctcccagccctggtccatgcctgggaccagaagtgcagagagccgctgttctcgctccctcccgtcaaacacttgccccacaaggtggcgccggagggtctggaccaccg

SEQ ID NO: 627581 - DNA, 120 bp, Artificial Sequence
  ENSG00000179046_0 (sequence is synthesized)
aagcaggcagctgccagaaatttgttggatttgaggagtccagagcgccgacccgctctgtctgcgtggacttatttccttggatcttcgtggactctgaagttgccaagtgtgtgtgcc

SEQ ID NO: 627582 - DNA, 120 bp, Artificial Sequence
  ENSG00000179046_1 (sequence is synthesized)
tgctccagaaaacaaaggaagccaccattttttctcattcacagtgcagggagatacctcagtagaagcatacagtccagtcttcaactagggacccctaccaggatgtccaaaaggctc

SEQ ID NO: 627583 - DNA, 120 bp, Artificial Sequence
  ENSG00000179046_2 (sequence is synthesized)
agccctcagttacagcacaacatcacagaagatgcctattgtgaaacacacctggaaccaacacggctgttctgtgatgttgaccaaatcacactctgcagcaaatgcttccagtcccag

SEQ ID NO: 627584 - DNA, 120 bp, Artificial Sequence
  ENSG00000179046_3 (sequence is synthesized)
gagcacaaacatcacatggtgtgtgggatacaagaggctgctgagaattacaggaagttattccaggaaatattgaacacatcgagggagaaacttgaagcagctaaaagcatattgact

SEQ ID NO: 627585 - DNA, 120 bp, Artificial Sequence
  ENSG00000179046_4 (sequence is synthesized)
gatgagcaagaaagaatggcgatgattcaggaagaggaacaaaattttaaaaagatgattgagtctgagtatagtatgagactccggttgttgaatgaagagtgtgagcagaatctccag

SEQ ID NO: 627586 - DNA, 120 bp, Artificial Sequence
  ENSG00000179046_5 (sequence is synthesized)
agacagcaggaatgcatatctgacttgaacctgagagaaacccttctgaatcaagcgatcaagcttgccaccgagctagaggagatgttccaggaaatgctacagagactgggccgtgtg

SEQ ID NO: 627587 - DNA, 120 bp, Artificial Sequence
  ENSG00000179046_6 (sequence is synthesized)
tggagcttgagaaaaagtgtggggaaggcaccttggcattgctcaagaatgcaaaatactctttagaaaggagcaagtcactgctgcttgagcatctggagcccgctcatatcacagacc

SEQ ID NO: 627588 - DNA, 120 bp, Artificial Sequence
  ENSG00000179046_7 (sequence is synthesized)
tgagtttatgccacataagaggactcagcagcatgttcagagtactccagagacatttaacattggatcctgaaacagctcatccctgcctggcactatctgaggacctgagaactatga

SEQ ID NO: 627589 - DNA, 120 bp, Artificial Sequence
  ENSG00000179046_8 (sequence is synthesized)
gattgagacatgggcagcaggatggggctggcaacccagaaagattggatttcagtgccatggtgctggctgcggagagcttcacctcagggaggcactactgggaggtggacgtggaaa

SEQ ID NO: 627590 - DNA, 120 bp, Artificial Sequence
  ENSG00000179046_9 (sequence is synthesized)
aggcaaccaggtggcaagtgggcatataccacggctctgcagacgcgaagggcagcacggccagagcttccggagagaaagtcttgctcacggggtcggtgatggggaccgagtggactc

SEQ ID NO: 627591 - DNA, 120 bp, Artificial Sequence
  ENSG00000179046_10 (sequence is synthesized)
tctgggtcttcccccctctgaaaaggctcttcctggaaaagaagttggacacagttggcgttttccttgactgcgaacacgggcagatatcattctacaatgtgaccgagatgtccctca

SEQ ID NO: 627592 - DNA, 120 bp, Artificial Sequence
  ENSG00000179046_11 (sequence is synthesized)
tttacaatttctcccattgcgccttccaaggagctctcaggcctgtgttttccctctgtatcccaaatggagacacaagtccagactccctcaccatcttacaacatggtccttcttgtg

SEQ ID NO: 627593 - DNA, 120 bp, Artificial Sequence
  ENSG00000179046_12 (sequence is synthesized)
atgctactgttagcccttaatcttctgtgtgtaaaatccaagaccacgagacaccagaaagttggagaacaagactttgaaagaatttgtgtaaactaacccaataaaaagcgttccagg

SEQ ID NO: 627594 - DNA, 120 bp, Artificial Sequence
  ENSG00000179046_13 (sequence is synthesized)
aaatgagaagtggacagtactcattaggggttgctgtcagaacacaatatccaatgatcttcaaccacaaaagaaggctacatgactttctttcagctgccaaaagctttaggaatggtc

SEQ ID NO: 627595 - DNA, 120 bp, Artificial Sequence
  ENSG00000179046_14 (sequence is synthesized)
atagctttgtgggatagtgtggagctgcttcatgagatgaattctcaccttaaaattatcagcagtaagttagggttgagatgtgacacaatgtggttaatacctccatgcaatgaaata

SEQ ID NO: 627596 - DNA, 120 bp, Artificial Sequence
  ENSG00000179046_15 (sequence is synthesized)
ttctgtgatcataaagaataaaacagctctataggcactaacagtatttcaagcactcattaagtgaaaaagaaagatgcagactgctttttgtttgatctttggataataagtatatat

SEQ ID NO: 627597 - DNA, 120 bp, Artificial Sequence
  ENSG00000179046_16 (sequence is synthesized)
cttatttgcttccccattccttctgttgcatgtgttttgtcccagctgtagtcccagctactccggaagctgaggtgggaggatcgctggagcctgggagttccagaggctgcagtgagc

SEQ ID NO: 627598 - DNA, 120 bp, Artificial Sequence
  ENSG00000179046_17 (sequence is synthesized)
cgtggtcacgccactgtactctagactgggcaacagagcaagaccctgtctctcaaagggaaagtattttaataactttttcagatacttgtggtttttttctgtaattctatcaacgaa

SEQ ID NO: 627599 - DNA, 76 bp, Artificial Sequence
  ENSG00000179046_18 (sequence is synthesized)
agctttttccctaaaggaaataccttggttcggtgtggtgactcattcctgtaatcccagtactttgggaggctga

SEQ ID NO: 627600 - DNA, 120 bp, Artificial Sequence
  ENSG00000179046_19 (sequence is synthesized)
aaatacaaaaattagccgggtgtggtcgtgcagcgcctgtaatcccagctactcaggaggtcaaggtgggagaatcacttgagcctgggagctcgaggctgtagtgagccgagattgcgc

SEQ ID NO: 627601 - DNA, 120 bp, Artificial Sequence
  ENSG00000179046_20 (sequence is synthesized)
ctgaagctatgcacagttacctgggggcagtgaaggagaatatactacttgaaagaagaagtcccaggaccaagccctgaaagatcacaatagttagaggctgggcagaaagagatgaga

SEQ ID NO: 627602 - DNA, 120 bp, Artificial Sequence
  ENSG00000179046_21 (sequence is synthesized)
ggcaccttggcattgctcaagtgccttgatcttgaaattcggcctccagaactgcgagaaatgaatttctgctgtgcagaagctactcagtctatgaatgcaaaatactctttagaaagg

SEQ ID NO: 627603 - DNA, 120 bp, Artificial Sequence
  ENSG00000179051_0 (sequence is synthesized)
cccgtccattgtgcgccgctgccccgtgtctccctccagccgcgaccatgcccaggaagaaggcggcggcggcggcctgggaggagccgagctcgggcaacggcactgcccgcgccgggc

SEQ ID NO: 627604 - DNA, 80 bp, Artificial Sequence
  ENSG00000179051_1 (sequence is synthesized)
ccaggaaacgcggcggcccggcgggcaggaagcgcgagcggcccgagcgctgcagtagcagcagcggcggcggcagcagc

SEQ ID NO: 627605 - DNA, 120 bp, Artificial Sequence
  ENSG00000179051_2 (sequence is synthesized)
ggggcaagcgcgcggcgcggccggcgacagcaggcaaggcgggcggcgcggccgtggtcatcaccgaacccgagcacaccaaggagcgcgtcaaacttgaagggtcaaagtgcaaagggc

SEQ ID NO: 627606 - DNA, 120 bp, Artificial Sequence
  ENSG00000179051_3 (sequence is synthesized)
agcttttgatttttggggcaaccaactgggacttgattggtcgaaaagaagtgcctaaacagcaagctgcttaccgcaatctcggtcagaatttgtgggggccccacagatatgggtgcc

SEQ ID NO: 627607 - DNA, 120 bp, Artificial Sequence
  ENSG00000179051_4 (sequence is synthesized)
tggcgggggtccgggtgcggacagtggtctcgggctcgtgtgctgcacacagcctcctcatcaccacggaagggaagctgtggagctggggtcgaaatgagaaggggcagctgggacatg

SEQ ID NO: 627608 - DNA, 120 bp, Artificial Sequence
  ENSG00000179051_5 (sequence is synthesized)
gtgacaccaagagagtagaagcccctagactcatcgagggtcttagccacgaagtgattgtgtctgcagcatgtgggcggaaccacaccttggccttgacggaaacgggctccgtgtttg

SEQ ID NO: 627609 - DNA, 120 bp, Artificial Sequence
  ENSG00000179051_6 (sequence is synthesized)
cgtttggggaaaacaagatggggcagctgggccttggcaaccagacagacgctgttcccagccccgcgcagataatgtacaacggccagccaattaccaaaatggcctgtggggctgaat

SEQ ID NO: 627610 - DNA, 120 bp, Artificial Sequence
  ENSG00000179051_7 (sequence is synthesized)
tcagtatgataatggactgcaaaggaaacctctattcctttgggtgccctgaatatggtcagctgggacacaactcagatgggaagttcatcgcccgggcacagcggatagagtacgact

SEQ ID NO: 627611 - DNA, 120 bp, Artificial Sequence
  ENSG00000179051_8 (sequence is synthesized)
acgctggtcctggactcccagaagcgagtcttctcctggggctttggtggctatggccggctgggccacgcagagcagaaggatgagatggtcccccgcctggtgaagctgtttgacttc

SEQ ID NO: 627612 - DNA, 120 bp, Artificial Sequence
  ENSG00000179051_9 (sequence is synthesized)
cctgggcgtggggcttcccagatctatgctggttacacctgctcctttgctgtcagtgaagtgggtggtctgtttttctggggggccaccaacacctcccgtgaatctaccatgtaccca

SEQ ID NO: 627613 - DNA, 120 bp, Artificial Sequence
  ENSG00000179051_10 (sequence is synthesized)
aaagcagtgcaggacctctgcggctggagaatccggagcctggcttgtgggaagagcagcatcattgtggccgccgatgagagcaccatcagctggggtccgtcaccgacctttggggaa

SEQ ID NO: 627614 - DNA, 120 bp, Artificial Sequence
  ENSG00000179051_11 (sequence is synthesized)
ctgggctacggggaccacaagcccaagtcttccactgcagcccaggaggtaaagactctggatggcattttctcagagcaggtcgccatgggctactcacactccttggtgatagcaaga

SEQ ID NO: 627615 - DNA, 120 bp, Artificial Sequence
  ENSG00000179051_12 (sequence is synthesized)
gatgaaagtgagactgagaaagagaagatcaagaaactgccagaatacaacccccgaaccctctgatgctcccggagactcctccgactccacacctctcgcggcagctgtcatttccat

SEQ ID NO: 627616 - DNA, 120 bp, Artificial Sequence
  ENSG00000179051_13 (sequence is synthesized)
gtgcactgggacgggaagtcaaacgaggaatttaaaaaagcaaaagttgaccgaaggtgcatttttgtttagactccctgaggttccgttttacacatgatccaacgttaactacctttt

SEQ ID NO: 627617 - DNA, 120 bp, Artificial Sequence
  ENSG00000179051_14 (sequence is synthesized)
tttctgtatgctttccaaagtccttttttttcccttaatgttgaattaaaatacttgctcatagttgatttaccattcctacaaaagaggcagaaactttgagcaatctaggtttttttt

SEQ ID NO: 627618 - DNA, 120 bp, Artificial Sequence
  ENSG00000179051_15 (sequence is synthesized)
ttttttaagttttttctttcttcctctcctgaatacactccccaaaacacccctttccagttacaattagcatcgtgatccaagcagatgccacatggaagaggaatcgccatttactca

SEQ ID NO: 627619 - DNA, 120 bp, Artificial Sequence
  ENSG00000179051_16 (sequence is synthesized)
gtatttacattttaagtgtatctggtgagtgggctggagccctcgtctgggccggaaaaaaaaaagccctccgatccgtcttttagttgcttctcttccttttttctctccggtttctca

SEQ ID NO: 627620 - DNA, 120 bp, Artificial Sequence
  ENSG00000179051_17 (sequence is synthesized)
tgcagatgggcctaggccggtgtcggttctgtttctccccttggctgcctgtacgcccacagccttctggctgcgacattatagaatcggccgtgtcccccctggtgggggattggggat

SEQ ID NO: 627621 - DNA, 120 bp, Artificial Sequence
  ENSG00000179051_18 (sequence is synthesized)
ctgtgtttagccatttatatctactttagctgttaaagaggtccaaatgaaaatcaggtgattgtggaaccatggggacttgggggtggggcagaggtgggaacatttgtatcagttgag

SEQ ID NO: 627622 - DNA, 120 bp, Artificial Sequence
  ENSG00000179051_19 (sequence is synthesized)
tcagcttggtggctccctgtggagccagggctgagccttgtcacgcgcactcgccaattaagagatggaccagccagcagtcaagtgcattctccagtccttgcaagaaggatcagccct

SEQ ID NO: 627623 - DNA, 120 bp, Artificial Sequence
  ENSG00000179051_20 (sequence is synthesized)
ttctgtgccagcctcgatcgccttgtgctttggtctctttttctcccccccgcctggatcctgcctcgcgcgggccgtcctgttgctgagactcggggtaccgttctgctgacccagctc

SEQ ID NO: 627624 - DNA, 120 bp, Artificial Sequence
  ENSG00000179051_21 (sequence is synthesized)
cctttagtcacgtttgcttggctctggtaccaaatagttgggattaccgaagagtccccttccttgcgtgtcagcacggatgctgtgactgccacctgcgtcctcgtcaagtgcccgagc

SEQ ID NO: 627625 - DNA, 120 bp, Artificial Sequence
  ENSG00000179051_22 (sequence is synthesized)
tcgccgccgtgtgtgctgcgctgagtgagttatgaggtgcctttcccggaaccctcctctcgcctggacccaagagaggcgacagctgtggctggggctcttggtttccagagggtctgg

SEQ ID NO: 627626 - DNA, 120 bp, Artificial Sequence
  ENSG00000179051_23 (sequence is synthesized)
actggtttgggtgctttaaaatagatatttagttcagtggtgcttatgggggagatgggactagaacttaagtgtgagacttgggtggatgggaaagttaaatattggtctcttcaagtt

SEQ ID NO: 627627 - DNA, 120 bp, Artificial Sequence
  ENSG00000179051_24 (sequence is synthesized)
ttttttttcttttgctttgttaccacttgtcactgtctccatgttaaaatgccaaaaatgatgtagttgttgttgcttttttccctattttccaccccagtcgctccttaccgtgactcc

SEQ ID NO: 627628 - DNA, 120 bp, Artificial Sequence
  ENSG00000179051_25 (sequence is synthesized)
tgcccttggagggcatgtagcagtgtctgtcctgccagtcccaaggccctgtgggaggagactggcctgcatctctctaagacttagtctgacgccacgcgcatctcttgttctgtgttc

SEQ ID NO: 627629 - DNA, 120 bp, Artificial Sequence
  ENSG00000179051_26 (sequence is synthesized)
aatcagtagtccaggggagaagcttctgctacttcagagctttgctaaactaacctaatttgtccaaatcaccccaaaaccaccatctctgacgtaagcttccatgcgacagcctgatcc

SEQ ID NO: 627630 - DNA, 120 bp, Artificial Sequence
  ENSG00000179051_27 (sequence is synthesized)
gtttccctggacaggtctctttcctggaatgcagcccaggcacctgtgctcctggcacccttgaggtctctcctttgagccgtggtcaccgagagggttgaggacgcagcacccgaggtc

SEQ ID NO: 627631 - DNA, 120 bp, Artificial Sequence
  ENSG00000179051_28 (sequence is synthesized)
ccagcctttgcaggagcctccctgggcttagctggacttagatcttcggtggcctcatgtaaacgtggcagccagcctcttctagaaccctagcccagggactggagcaggaaagggacc

SEQ ID NO: 627632 - DNA, 120 bp, Artificial Sequence
  ENSG00000179051_29 (sequence is synthesized)
ttcaaagtgaagactgccttgtcccgcagctccttctggcttagattgaaaaatgggcttcctaatgggttaaatcctttaaaacaaggagttgtgggggaagggtgtcgtgcactccta

SEQ ID NO: 627633 - DNA, 120 bp, Artificial Sequence
  ENSG00000179051_30 (sequence is synthesized)
gagaaaggtacacagttgcccggttgggaatgtgcttggcgctgaccctgcgggcatctgactggtcttccagctcaggaaaaagaatttgaaagaggcttagcgtgaaggggaatcaaa

SEQ ID NO: 627634 - DNA, 120 bp, Artificial Sequence
  ENSG00000179051_31 (sequence is synthesized)
gaggaggttgtgatttggtcgaaggtgcctggtttagtgctgtaattgtcttattattttttttatatatatatttcttggagtaaacattttaaataaacaacaacattgtctactgtc

SEQ ID NO: 627635 - DNA, 120 bp, Artificial Sequence
  ENSG00000179055_0 (sequence is synthesized)
tcaaacacaatatcggaagcaaatttgtattgaaaatttgtagatgtacagatttacagattttgatgtatcaaacatttcaatttacctgaatcatgtccttttctatactacccagca

SEQ ID NO: 627636 - DNA, 120 bp, Artificial Sequence
  ENSG00000179055_1 (sequence is synthesized)
ggcaggtgacctagaacacatggagacaagaaattactctgccatgactgaattctttctggtggggctttcccaatatccagagctccagctttttctgttcctgctctgcctcatcat

SEQ ID NO: 627637 - DNA, 120 bp, Artificial Sequence
  ENSG00000179055_2 (sequence is synthesized)
gtacatgataatcctcctgggaaatagcctcctcattatcatcaccatcttggattctcgcctccatactcccatgtatttctttcttggaaacctctcattcttggacatctgttacac

SEQ ID NO: 627638 - DNA, 120 bp, Artificial Sequence
  ENSG00000179055_3 (sequence is synthesized)
atcctcatccattcctccaatgcttattatatttatgtctgagagaaaatccatctccttcattggctgtgctctgcagatggttgtgtcccttggcttgggctccactgagtgtgtcct

SEQ ID NO: 627639 - DNA, 120 bp, Artificial Sequence
  ENSG00000179055_4 (sequence is synthesized)
tgtggccatctgcaacccactgaggtactccatcatcatgaacggagtgctgtatgtgcaaatggctgcatggtcctggatcataggctgtctgacctccctattgcaaacagttctgac

SEQ ID NO: 627640 - DNA, 120 bp, Artificial Sequence
  ENSG00000179055_5 (sequence is synthesized)
aatgatgttgcctttctgtgggaataatgtcattgatcatattacctgtgaaattttggcccttctaaaacttgtttgttcagatatcaccatcaatgtgcttatcatgacagtgacaaa

SEQ ID NO: 627641 - DNA, 120 bp, Artificial Sequence
  ENSG00000179055_6 (sequence is synthesized)
tattgtttcactggtgattcttctactgttaattttcatctcctatgtgtttattctctcttccatcctgagaattaattgtgctgagggaagaaagaaagccttctctacctgttcagc

SEQ ID NO: 627642 - DNA, 120 bp, Artificial Sequence
  ENSG00000179055_7 (sequence is synthesized)
gcactcgattgtggtcatcttattctacggttcagccctttttatgtacatgaaacccaagtcaaagaacactaatacatctgatgagattattgggctgtcttatggagtggtaagccc

SEQ ID NO: 627643 - DNA, 120 bp, Artificial Sequence
  ENSG00000179055_8 (sequence is synthesized)
aatgttaaatcccatcatctatagcctcaggaataaagaggtcaaagaggctgtaaagaaagtcctgagcagacatctgcatttattgaaaatgtgaaaaaccttgggcatgcgatatcc

SEQ ID NO: 627644 - DNA, 120 bp, Artificial Sequence
  ENSG00000179057_0 (sequence is synthesized)
ggcaaaggaagaaggagacgggccaccctacagtccaggcactagctgagcctccaaagccgtggacacagcattcgagtgttgggagggactggtcagtgctgaagtctcacaggtgag

SEQ ID NO: 627645 - DNA, 120 bp, Artificial Sequence
  ENSG00000179057_1 (sequence is synthesized)
tgcccacgcctgctgtcaccatgacaaccattcacagccggcagatgctgcaggagcacgtgtccatggagttctccagctccaccacccacgtgcagaccttctcccagacaaccaaga

SEQ ID NO: 627646 - DNA, 120 bp, Artificial Sequence
  ENSG00000179057_2 (sequence is synthesized)
tcgtgggagaggaggtcgtgaggaggaagtcctcgagcatagtggagttcttcagcttagtgacccggagctcaaacatccctgcgggcgacagcgtccctgagttcgtggagaagcctc

SEQ ID NO: 627647 - DNA, 120 bp, Artificial Sequence
  ENSG00000179057_3 (sequence is synthesized)
aaccggtcaccgcgcccgagggggacaaagccgtgttccgagcccgggtgcaggggaacgccaaaccccacatctcctggaagagggagagcggcatccccatcaaggagtccgccaaga

SEQ ID NO: 627648 - DNA, 120 bp, Artificial Sequence
  ENSG00000179057_4 (sequence is synthesized)
tattctacgacagcattaacaaggaacacgtgctgaagctggagccactgacttcggatgactctgacaactataagtgcattgcaagcaatgaccatgcagatgccatctataccgtat

SEQ ID NO: 627649 - DNA, 120 bp, Artificial Sequence
  ENSG00000179057_5 (sequence is synthesized)
ctctgctggtaacagaaggtcaagagaaaatggacttcaaaaagatgctgaagaagagggcaccccctgctcccaagaagaagcagaagaaggtggcaaatgagaaagagatgctggaga

SEQ ID NO: 627650 - DNA, 120 bp, Artificial Sequence
  ENSG00000179057_6 (sequence is synthesized)
ttttgtccaaagtgcccaagaaagactttgagaaggtgtgcatggagtatggtttcaccgactttcgggggctgctcaggaagctcaaagagatgaagaagaaagtagaggtggaggcca

SEQ ID NO: 627651 - DNA, 120 bp, Artificial Sequence
  ENSG00000179057_7 (sequence is synthesized)
tccggattctgaagcccctggaagacaaagagaccaaggttgacaccacagtggtctttgactgcataatggaactgaaagaccccaatgtcaagatgatatggatcaagggtactgagc

SEQ ID NO: 627652 - DNA, 120 bp, Artificial Sequence
  ENSG00000179057_8 (sequence is synthesized)
cactgaggatccagtactccctgggcaagtacgatgtgaagcagatgggcaccaagtacatgctggttattagcaacgtgaacatgaacgatgctggcatctacagcctgtccgtgggcg

SEQ ID NO: 627653 - DNA, 120 bp, Artificial Sequence
  ENSG00000179057_9 (sequence is synthesized)
ataagcggatgagtgcagagctcacagtgctggatgagccactgaagttcctgggagagatgaagcctgtgaaggtgacagagcgccagacagctgtgtttgagatccgcctctccaaga

SEQ ID NO: 627654 - DNA, 120 bp, Artificial Sequence
  ENSG00000179057_10 (sequence is synthesized)
aagagcccaactttgtgtggaagttcaatgggaaggagctgaagagggatgacaagtatgaaatcacggtgtccgaagatggtctgacgcacacgcttaagattaaggatgccagactca

SEQ ID NO: 627655 - DNA, 120 bp, Artificial Sequence
  ENSG00000179057_11 (sequence is synthesized)
gtgacagcggcgagttctctgctgaggcggggaacctggtacaaaaggcccagctcactgttgaccgcatccccatcaagtttgtgagcaacctcaaaaatgtacgtgtgaaagagagga

SEQ ID NO: 627656 - DNA, 120 bp, Artificial Sequence
  ENSG00000179057_12 (sequence is synthesized)
gtcgcgcatgcctggagtgtgagctgacatccaaggatgtgacactgcgctggaagaaggatgggcagctgctgatgcatggcactaagtacagcatgaaccatgagggcaagcgagcag

SEQ ID NO: 627657 - DNA, 120 bp, Artificial Sequence
  ENSG00000179057_13 (sequence is synthesized)
agctgatcattgaggatgcacagctcagtgatggtggcgagtacactgtggtggccatgcaggatggagaccctactgaatactacagtactgccatcgtcactgtggaggagcgtctgg

SEQ ID NO: 627658 - DNA, 120 bp, Artificial Sequence
  ENSG00000179057_14 (sequence is synthesized)
ccacagtgaagagcgggatgtccgacgtgcacgcggccactgggagcccagctgagttgtgtgtagtgctgaatgacgagaaggtggagggtgtgtggctgaaggatggcaaggagatca

SEQ ID NO: 627659 - DNA, 120 bp, Artificial Sequence
  ENSG00000179057_15 (sequence is synthesized)
cggacttgccaggcatgcagattgtgaagcagggtgcagtgcacaagctcatctttcccagtatgggccctgagcacgagggcaagtacacattccgggccaagggcacggaaagtgaag

SEQ ID NO: 627660 - DNA, 120 bp, Artificial Sequence
  ENSG00000179057_16 (sequence is synthesized)
cctctgtattcatcgcagatcctcctaccatcgacccgtcagtactggaggcactggctgcgcacgccatcactgtgaaggtaggccacacggcccacatcaaggtccccttccggggaa

SEQ ID NO: 627661 - DNA, 120 bp, Artificial Sequence
  ENSG00000179057_17 (sequence is synthesized)
aggcactgctcaccatctccaactgtgtgcgtgaagacagcggcctcatcctgctcaagctcaagaatgaccacggctcagccacggccactctgcaccttagtgtgctggaccgtccaa

SEQ ID NO: 627662 - DNA, 120 bp, Artificial Sequence
  ENSG00000179057_18 (sequence is synthesized)
agcctccacagggccgggtggagttcctggagctctcaggtagttgtgtgcacatgaagtggaaggccccaaaggacaatggtggacgacctgtgacacagttcatagtggaacggaggg

SEQ ID NO: 627663 - DNA, 120 bp, Artificial Sequence
  ENSG00000179057_19 (sequence is synthesized)
cagttggcaagaagtcctggattaagataggcgaggtggacggcaaagtcaccaacttctccaccaacaaggtggaagagggaaaagcctaccagttccgtatcctggcagtcaattcag

SEQ ID NO: 627664 - DNA, 120 bp, Artificial Sequence
  ENSG00000179057_20 (sequence is synthesized)
aaggtgtgagtgacccactggagacagaagaagtgtttgcaggaaatcccatagagcctcctggttttgcctcccagcctcaagtgactgatgtgactaaagaagccgtgaccatcacgt

SEQ ID NO: 627665 - DNA, 120 bp, Artificial Sequence
  ENSG00000179057_21 (sequence is synthesized)
ggaatgcccctacccaggatgggggagccccagtgctcggctacattgtagaacgaaggaagaaaggcagcaacctgtgggtgccagtcaacaaggaccccatccagggcaccaagtgca

SEQ ID NO: 627666 - DNA, 120 bp, Artificial Sequence
  ENSG00000179057_22 (sequence is synthesized)
ctgtggatggtctcctggaggacacagaatatgaattccgagttatagctgtaaataaggcaggccctggacagcccagtgtgccatccagctcagtagtggccaaggatcctgttaaac

SEQ ID NO: 627667 - DNA, 120 bp, Artificial Sequence
  ENSG00000179057_23 (sequence is synthesized)
ccccaggcctggtccaggacctgcatgtatctgattcctccaactccagcatttccctggcctggcgggagcctgcagagggagacccaccctctggctacatccttgagatgagggctg

SEQ ID NO: 627668 - DNA, 120 bp, Artificial Sequence
  ENSG00000179057_24 (sequence is synthesized)
aagacacaaaggagtggtccaagtgcacaaagatccccatctcaggcacctgctacacagtgggaggactcatcgagaggcagaaatacttcttccgaatccgggctgtgaatgaggctg

SEQ ID NO: 627669 - DNA, 120 bp, Artificial Sequence
  ENSG00000179057_25 (sequence is synthesized)
gggttggggagcctgtggagctagacaagggggtccgtgccatgccaccaccagctgcacccaagtttgacctcagtgcccggctgaagagtcacatggtggttcgcgctgggacagccc

SEQ ID NO: 627670 - DNA, 120 bp, Artificial Sequence
  ENSG00000179057_26 (sequence is synthesized)
tctgcatccatgcagccttctctggctcaccaccacctgacgtgatctggcagaaagatggcgttcccaccaagggccgagagacaattaccaagagcaaaaaccactcccagttcctca

SEQ ID NO: 627671 - DNA, 120 bp, Artificial Sequence
  ENSG00000179057_27 (sequence is synthesized)
ttaatagcaccaagcgctctgactcaggggtgtaccgaatcttgcttcagaatgagtttggagaagcacgctatgacatccatgtgcgcgtggcagatttccctcggccccccacaaacc

SEQ ID NO: 627672 - DNA, 120 bp, Artificial Sequence
  ENSG00000179057_28 (sequence is synthesized)
tacggttgtttgaggaagtccccaacacagtgactctgacctggaaccacagcccagatgtgcaggaggacggtgaggctcactacatcatcatgaagcgggatgcaagcacagccacct

SEQ ID NO: 627673 - DNA, 120 bp, Artificial Sequence
  ENSG00000179057_29 (sequence is synthesized)
ggtacacggcagccgagcgtgtcttcagcaacaagtacacagtgacggggctgctcccaggcaggaagtactacttcagagtggtggctcggaatgaaatcggtgacagtgagccacttg

SEQ ID NO: 627674 - DNA, 120 bp, Artificial Sequence
  ENSG00000179057_30 (sequence is synthesized)
actccagggacacctggctcatcaataaggaccagatccaggacctgagcgccaagctcaagccctacgagaagaaggactggcgccacgcgccgcgcttcgtgacgcccctcaagccac

SEQ ID NO: 627675 - DNA, 120 bp, Artificial Sequence
  ENSG00000179057_31 (sequence is synthesized)
acacggtgctccgcggccaggactgcaccatgacctgcgccttccttgggaacccgcggcccacagtgaccctctacaagggcgacgtcaacatcacggccaactccaagttctggtaca

SEQ ID NO: 627676 - DNA, 120 bp, Artificial Sequence
  ENSG00000179057_32 (sequence is synthesized)
actccaccagcggcgtgtgcaccctcgtcatccccacctgcacgctcaaggacagcggcgattacagcgtgctggtggagaacgagctgggcaaggaccgcagcagctgcacgctcaccg

SEQ ID NO: 627677 - DNA, 120 bp, Artificial Sequence
  ENSG00000179057_33 (sequence is synthesized)
tctatgacaaagatgataagtcagttgtagcatccatcaccgagagtctgcagaagaaatcaaagcacctcatgtgagctccagccaagcccaggcatcaggaggctgttatgatgtgga

SEQ ID NO: 627678 - DNA, 120 bp, Artificial Sequence
  ENSG00000179057_34 (sequence is synthesized)
gtttcttggcctgtcctctgcatggcccagtgtaggaagcccagtttgctctctggtgtttgttaatgtaaacattcagtgaagggatggggcaataaacgtaactcatcctttcccgtt

SEQ ID NO: 627679 - DNA, 120 bp, Artificial Sequence
  ENSG00000179057_35 (sequence is synthesized)
gtgaggtccttggaacagaggcccaggagtgaccaaaggaggtcttgctgagtggacccattaactactgacacagtccctcatccaactcttctggaagttttaacaacatcccatgac

SEQ ID NO: 627680 - DNA, 120 bp, Artificial Sequence
  ENSG00000179057_36 (sequence is synthesized)
tggtgatcaggactcaaccagactcaccaatcacgatctctctggcacggttctggaaataacctatatgtttacaaaattttgcgggtgattctgatgtgcaataaaaattaaaactgg

SEQ ID NO: 627681 - DNA, 120 bp, Artificial Sequence
  ENSG00000179057_37 (sequence is synthesized)
ccgcgcccgagggtgtgttgctgcctgtggctcaccgggctccagtgcttcgctttctaatcgagtgcccccaccctccgtcctaccccaacgacctccaatgctaaaccctggcagagc

SEQ ID NO: 627682 - DNA, 120 bp, Artificial Sequence
  ENSG00000179058_0 (sequence is synthesized)
atttttcaggtgaggaaacagaggctctgggagctctcgcctgaagccactcgctgtccgccgggccggtggcgttcaccccgcaccgcgctgccccgcccggggcactatggcctgggg

SEQ ID NO: 627683 - DNA, 120 bp, Artificial Sequence
  ENSG00000179058_1 (sequence is synthesized)
ctggactatgccctccccacctcagccggcgccccccacccacgcgcgctgagggtgcggtgagctgagtgcggggccaagcatgttctggcgtcgacttcgcccaggggcccaggacct

SEQ ID NO: 627684 - DNA, 120 bp, Artificial Sequence
  ENSG00000179058_2 (sequence is synthesized)
ggcgcccaaggggctccctggcgacggagacttccgacgcagcagcgacccgcggctgcccaagctgaccccgcccgcgctccgagcggctctgggcgcgcggggctccggggactggag

SEQ ID NO: 627685 - DNA, 80 bp, Artificial Sequence
  ENSG00000179058_3 (sequence is synthesized)
gactggaggatcccggggggcggcgccgcgtggtggccggaaggggacgccaagcccggggtgggcgtcggacgcctccc

SEQ ID NO: 627686 - DNA, 120 bp, Artificial Sequence
  ENSG00000179058_4 (sequence is synthesized)
cctcccctgctgtcggccggcgcgtcccgggaatcggcgcccaggcagccagggcctggagagcgcgagcgcccccggaggcgcgtggccagggaggaccccgacttcttgggcgccttc

SEQ ID NO: 627687 - DNA, 120 bp, Artificial Sequence
  ENSG00000179058_5 (sequence is synthesized)
ggaggaccccgacttcttgggcgccttcctaggagagctcctccccagcaggttccgtgagttcctgcaccagctccaggagaagtgcgccgaggagccggagccactgacatccccagc

SEQ ID NO: 627688 - DNA, 120 bp, Artificial Sequence
  ENSG00000179058_6 (sequence is synthesized)
ttcattcctcccagacctgtggggccagtcatcgcacctccaggatagtcttacgaagatttcgctccagcagacacctattctggggcccctgaagggtgatcactcacaattcaccac

SEQ ID NO: 627689 - DNA, 120 bp, Artificial Sequence
  ENSG00000179058_7 (sequence is synthesized)
tgtcagaaaggccaaccacaggccccacggtgcacaggtccccaggctcaaggctgcgctgacccacaacccctcgggggaaggctctaggccctgcaggcagcgttgccctttccgggt

SEQ ID NO: 627690 - DNA, 120 bp, Artificial Sequence
  ENSG00000179058_8 (sequence is synthesized)
gcgattcgctgacgagaccctgcaggacacaacgctccgctactgggagcgcagacgctcagtccaacagagcgtcattgtgaaccagaaggccgccctgccagtggcgtccgagcgggt

SEQ ID NO: 627691 - DNA, 120 bp, Artificial Sequence
  ENSG00000179058_9 (sequence is synthesized)
gtttgggagtgtcggaaaacggctggagagtttgcccaaagccctgtaccctggggccaaggaggagaccctggccagctcctcgtgttgggactgcgctggcctgtccacccagaagac

SEQ ID NO: 627692 - DNA, 120 bp, Artificial Sequence
  ENSG00000179058_10 (sequence is synthesized)
acagggctacctttctgaggacacctccatgaacagcagcctgcccttctgttcatggaagaaggccgctgctcagaggccgcgaagcagcctccgagccttcttggacccgcacagaaa

SEQ ID NO: 627693 - DNA, 120 bp, Artificial Sequence
  ENSG00000179058_11 (sequence is synthesized)
cctggagcaggagtccctcctgcccaaccgggtgctgcagtcggtcctgaagcaaggctgccctaaggggtaccatctcctcctggcctccgcaacactgcagccagataagaggtgaac

SEQ ID NO: 627694 - DNA, 120 bp, Artificial Sequence
  ENSG00000179058_12 (sequence is synthesized)
actcgcgaacccaaggccaggggcacacatgggccaggcaatgaggagcgtccttccttgccccacaaataaaggcacatcccaggtggctgggacctgccagtaggtgtcacaccacaa

SEQ ID NO: 627695 - DNA, 120 bp, Artificial Sequence
  ENSG00000179058_13 (sequence is synthesized)
gctactgggagcgcagacgctcaggtaagcagacaggatggggagcctcgagactcccgaaagttctagccaggagggcagagaggctgtagctccgggcccctagagtgagggactggc

SEQ ID NO: 627696 - DNA, 120 bp, Artificial Sequence
  ENSG00000179058_14 (sequence is synthesized)
tttgcaaaggccaagagatcagtgatcctgcagaggatgtgcctgaactggcctccttggaggatgtcaggttgaccttcgaagaccaagtagagggtccagagtccagtggaggtgttc

SEQ ID NO: 627697 - DNA, 120 bp, Artificial Sequence
  ENSG00000179058_15 (sequence is synthesized)
caacgcaggcagcaccttggactgctcgctgccaaggggttcccatatgctgtatctgcccaccttgagacccgtagccggagcctccagagcccacacttgctcccctccgcagtcccc

SEQ ID NO: 627698 - DNA, 120 bp, Artificial Sequence
  ENSG00000179058_16 (sequence is synthesized)
acagcctacaggggctggaggaggtccagatgccattggaagcatcttcctttgacatccatgaaggcagacctcgaagcctgcctgaggaggtgcccagaaaagccgcgaagcggaaac

SEQ ID NO: 627699 - DNA, 120 bp, Artificial Sequence
  ENSG00000179058_17 (sequence is synthesized)
tttctctctcctggagacagttggcactgccaggtccagcaaggaagctaagagccaccagaccctggatgtaatggtgtctgttttgcagttcccagtgagttttctttttcttttttt

SEQ ID NO: 627700 - DNA, 120 bp, Artificial Sequence
  ENSG00000179058_18 (sequence is synthesized)
accgcgcctggccattcccagtgaattttctgaagtgtgtctcgagaagcaggcgagaagtccctgttcttactctggtataaccttgactaagctccacctttttctgtgtgcccagcc

SEQ ID NO: 627701 - DNA, 120 bp, Artificial Sequence
  ENSG00000179058_19 (sequence is synthesized)
tcttctcaggatccagcagcccccagggtccccaacagtcaatgtcctctagctgtttattgagcacccactatgtgcagtttcaggaaatgtctgcctcaaggtctagctgtgggcgat

SEQ ID NO: 627702 - DNA, 120 bp, Artificial Sequence
  ENSG00000179058_20 (sequence is synthesized)
gccctgcaaacctaggaccttcgctgatttgggagggatctgacgcagcctccttagcgtgacaggaagctggagttagaagctgtgatttttgcccaacttctgtttgtttggtgggga

SEQ ID NO: 627703 - DNA, 120 bp, Artificial Sequence
  ENSG00000179058_21 (sequence is synthesized)
aaccaaggccccagaagcaggatgggcttgtgtgggtgacgcagagccacatatagaagccagagtgaccccgggcccctcttgggaatccaaggccaggacaagcccaagagaaacaat

SEQ ID NO: 627704 - DNA, 120 bp, Artificial Sequence
  ENSG00000179058_22 (sequence is synthesized)
ttcatgtgaatggcagttggtgcatacaggagatgattccgtgtcagccactggccataaggagctatcatggtgtcccgggcagcagggtgcccaggagacgtgggggccagcctgctg

SEQ ID NO: 627705 - DNA, 120 bp, Artificial Sequence
  ENSG00000179058_23 (sequence is synthesized)
cttcccagccctttccatcctggggcagccattggggaactcagggtccttggaccacctcgcatggctgctgttggacaggaagagcccccatccctgagacagccctccctgaagccc

SEQ ID NO: 627706 - DNA, 120 bp, Artificial Sequence
  ENSG00000179058_24 (sequence is synthesized)
tcaacgctctcagcatggtttctgggatttctatgatggggtaagtggtctccccactgcgagaaagggggcacgcttccggctgcagcgtgagtgggggtgcgcaggggcacagcttgg

SEQ ID NO: 627707 - DNA, 120 bp, Artificial Sequence
  ENSG00000179058_25 (sequence is synthesized)
gtataacagaaatggtcacgcaaggtggttttaaaacccaaggcttctctggaggcagccagaaggcgctggggagcctggggttgccatggagacagggctctgaccggccctgcctgc

SEQ ID NO: 627708 - DNA, 120 bp, Artificial Sequence
  ENSG00000179058_26 (sequence is synthesized)
cagagggaggaaaagagggtgggggcaccagtgccctcctcctgggcagagatctcaccctgccctctttcctgcagtccaacagagcgtcattgtgaaccagaaggccgccctgccagt

SEQ ID NO: 627709 - DNA, 68 bp, Artificial Sequence
  ENSG00000179059_0 (sequence is synthesized)
agtttctcctttgttttacgtttgggaggaggtggcattggaaatagcagagtgcttcgcggtaacag

SEQ ID NO: 627710 - DNA, 120 bp, Artificial Sequence
  ENSG00000179059_1 (sequence is synthesized)
ctcccacctcagcctcctgaatagctgaccaccagcacactaggcaaacccaccccactcacggcctcccttgggaattcagacctaaccatcgctgagctgaaacaaatgtactgaggc

SEQ ID NO: 627711 - DNA, 120 bp, Artificial Sequence
  ENSG00000179059_2 (sequence is synthesized)
atgtactgaggctggagcctgtgtgaacagaacagaagaggccttcactctagtagtgctcacagtccagcaggtgtttgctgaagacagcttactcagatcactactgcctggaggtgg

SEQ ID NO: 627712 - DNA, 120 bp, Artificial Sequence
  ENSG00000179059_3 (sequence is synthesized)
ttgatatatcctggtgtaaaccttcaagaagggcacaggcaggaaaacatgagccagcaactgaagaaacgggcaaagacaagacaccagaaaggcctgggtggaagagcccccagtggg

SEQ ID NO: 627713 - DNA, 120 bp, Artificial Sequence
  ENSG00000179059_4 (sequence is synthesized)
gctaagcccaggcaaggcaagtcaagccaagacctgcaggcggaaatagaacctgtcagcgcggtgtgggccttatgtgatggctatgtgtgctatgagcctggccctcaggctctcgga

SEQ ID NO: 627714 - DNA, 120 bp, Artificial Sequence
  ENSG00000179059_5 (sequence is synthesized)
ggggatgatttctcagactgttacatagaatgcgtcataaggggtgagttttctcaacccatcctggaagaggactcactttttgagtccttggaatacctaaagaaaggatcagaacaa

SEQ ID NO: 627715 - DNA, 120 bp, Artificial Sequence
  ENSG00000179059_6 (sequence is synthesized)
cagctttctcaaaaggttttcgaagcaagctcccttgaatgttctttggaatacatgaaaaaaggggtaaagaaagagcttccacaaaagatagttggagagaattcgcttgagtattct

SEQ ID NO: 627716 - DNA, 120 bp, Artificial Sequence
  ENSG00000179059_7 (sequence is synthesized)
gagtacatgacaggcaagaagcttccgcctggaggaatacctggcattgacctatcagatcctaaacagctcgcagaatttgctagaaagaagccccccataaataaagaatatgacagt

SEQ ID NO: 627717 - DNA, 120 bp, Artificial Sequence
  ENSG00000179059_8 (sequence is synthesized)
ctgagcgcaatcgcttgtcctcagagtggatgcactaggaagttgaggaatagagctgccctgagaaagcatctcctcattcatggtccccgagaccacgtctgtgcggaatgtgggaaa

SEQ ID NO: 627718 - DNA, 120 bp, Artificial Sequence
  ENSG00000179059_9 (sequence is synthesized)
gcgttcgttgagagctcaaaactaaagagacatttcctggttcatactggagagaagccgtttcggtgcacttttgaagggtgcggaaagcgcttctctctggactttaatttgcgtacg

SEQ ID NO: 627719 - DNA, 120 bp, Artificial Sequence
  ENSG00000179059_10 (sequence is synthesized)
cacgtgcgcatccacacgggggagaaacgtttcgtgtgtccctttcaaggctgcaacaggaggtttattcagtcaaataacctgaaagcccacatcctaacgcatgcaaatacgaacaag

SEQ ID NO: 627720 - DNA, 120 bp, Artificial Sequence
  ENSG00000179059_11 (sequence is synthesized)
aagagggaaagtagtcctccaacaggatgaagcagattaacagaagagtgatcagtgacaaacatgcctcattgattattgtttctaggaaggaatttctaaatcaatattgcaacccca

SEQ ID NO: 627721 - DNA, 120 bp, Artificial Sequence
  ENSG00000179059_12 (sequence is synthesized)
aaagcggttataatttggtgttactaagatgctcctacactttgtgataccgttttaaggacatggtgcatttttttttcttttatttgttttatttagaactttttttatttgttttat

SEQ ID NO: 627722 - DNA, 120 bp, Artificial Sequence
  ENSG00000179059_13 (sequence is synthesized)
ttagaactttgtgtgttcttaaagtgtgcttccaacaggaaggtcagtgataaattttcaaaagcataaccttcaatatattatctgttggattattggatataagacttattttcatgt

SEQ ID NO: 627723 - DNA, 120 bp, Artificial Sequence
  ENSG00000179059_14 (sequence is synthesized)
actataaatatgaaaataactttgatttttaattgtgtagtttccatttcttagcttttgccttttaaatttatacttcagccaggcatagtgactgatgcctgtaatcccaacactttg

SEQ ID NO: 627724 - DNA, 73 bp, Artificial Sequence
  ENSG00000179059_15 (sequence is synthesized)
tcttgtttttatttgtatttatatatttttatttttgtttttgttggtaggcgtctcgctctgtcacccaggc

SEQ ID NO: 627725 - DNA, 90 bp, Artificial Sequence
  ENSG00000179059_16 (sequence is synthesized)
caaaaaaatttgtttttatttgtatttatatatttttatttttgtttttgttggtactagtgtcgtgatcttggctcactgcaacctcca

SEQ ID NO: 627726 - DNA, 87 bp, Artificial Sequence
  ENSG00000179059_17 (sequence is synthesized)
caggtgtgagccactgtgcctggccccccacaacatgtttaaacttagctaggcctggttgcatacgcctgtgtagcttgagcccag

SEQ ID NO: 627727 - DNA, 88 bp, Artificial Sequence
  ENSG00000179059_18 (sequence is synthesized)
aactggataacagcaagagcccatcttttaaaaaaagtaaaaattaaaaatatacttcatggttcatgtcatagccctagagaatgaa

SEQ ID NO: 627728 - DNA, 120 bp, Artificial Sequence
  ENSG00000179059_19 (sequence is synthesized)
aatatacttcatggttcatgtcatagccctagagaatgaaaaatttgcagtagatagtcaataaatgaatcagtagttaaatattccttaaagtcaactgtatttcattgtgatttttgt

SEQ ID NO: 627729 - DNA, 120 bp, Artificial Sequence
  ENSG00000179059_20 (sequence is synthesized)
tttctttttatcattgtatcaaactatatggaaatcatatggttagatgtgattatttgataatgttagtccatttgaatccattttagatatttcacaattaaagaatatgaaacttca

SEQ ID NO: 627730 - DNA, 120 bp, Artificial Sequence
  ENSG00000179071_0 (sequence is synthesized)
gtccctagcaacaccctgcagcgtttgaaatctgaggggaaaagactgtagtcagcccttagtggatgagagcgcctatgctccagaaacagcaggctcccaggatggacaccccgcccc

SEQ ID NO: 627731 - DNA, 120 bp, Artificial Sequence
  ENSG00000179071_1 (sequence is synthesized)
ctgaagaacgcttagagaagcaaaatgaaaaactgaacaaccaggaagaggagacggagtttaaggaactggacggtctgagggaagccttggcaaacctccggggactgtcagaggagg

SEQ ID NO: 627732 - DNA, 120 bp, Artificial Sequence
  ENSG00000179071_2 (sequence is synthesized)
agaggagcgagaaggctatgcttcgctcccgcattgaagagcagtcccagctcatctgcatcctgaagcggaggtcagatgaggccctggagcgctgccagatcctagagctgctcaatg

SEQ ID NO: 627733 - DNA, 120 bp, Artificial Sequence
  ENSG00000179071_3 (sequence is synthesized)
cagagctggaggagaagatgatgcaggaggctgagaagctcaaggcccagggtgagtacagtcggaaactagaggaacgctttatgaccctagcagccaaccacgagttgatgctccgct

SEQ ID NO: 627734 - DNA, 120 bp, Artificial Sequence
  ENSG00000179071_4 (sequence is synthesized)
tcaaggatgaatacaagagtgagaacatcaagctgagggaggagaatgagaagctgaggctggagaatagcagcctcttcagccaggctctgaaggatgaggaggcgaaagtattacagc

SEQ ID NO: 627735 - DNA, 120 bp, Artificial Sequence
  ENSG00000179071_5 (sequence is synthesized)
tcacagtccggtgtgaggccctcactggggagctagaaacgctgaaggagaggtgtgctcaggatgcctgccaggcacaggcgcgcgagaaggagctgctggagctacagagccagcagg

SEQ ID NO: 627736 - DNA, 120 bp, Artificial Sequence
  ENSG00000179071_6 (sequence is synthesized)
cctgcacccacaccaaggagacagaacagctgcgcagccagctgcagaccctcaagcagcagcaccagcaggctgtggagcagatagctaaggcagaggagacacacagcagcctgagcc

SEQ ID NO: 627737 - DNA, 120 bp, Artificial Sequence
  ENSG00000179071_7 (sequence is synthesized)
aggagctgcaggccaggctgcagaccgtcactagagagaaagaggagttgctgcagctgtccattgaaaggggcaaagtgcttcagaacaaacaggcagagatctgccagcttgaggaaa

SEQ ID NO: 627738 - DNA, 120 bp, Artificial Sequence
  ENSG00000179071_8 (sequence is synthesized)
agttggagatagcaaatgaagacaggaagcatgcgctggagcggtttgagcaagaggcagtggctgtggacagcaacttgagagtcagggagcttcagcgcaaagtagatgggatccaga

SEQ ID NO: 627739 - DNA, 120 bp, Artificial Sequence
  ENSG00000179071_9 (sequence is synthesized)
gagagagaactcaatggcaaactccgccatctctctccatagggaagtttctgcttcctctggcctgcaattcagaattcaaatatttgcgtcttagcattatggcaagagtaaagatga

SEQ ID NO: 627740 - DNA, 120 bp, Artificial Sequence
  ENSG00000179071_10 (sequence is synthesized)
tatcccatttattatactttcaagcacaaaaggcaactcaaagaaaagctactttactatgatattgttgttattattgtaaagccattattaattttcatttctacacctagaatacac

SEQ ID NO: 627741 - DNA, 120 bp, Artificial Sequence
  ENSG00000179071_11 (sequence is synthesized)
aagatttgccagatttccttctgtgccttagaaatcttaaatttactagtagtatcttctcctacccataagttattaattctcaacctcagatatcttcatttatgttaggattttaaa

SEQ ID NO: 627742 - DNA, 120 bp, Artificial Sequence
  ENSG00000179071_12 (sequence is synthesized)
ttagcagcttctatgatttaagtcaatctaagtgcagtgagatgtgccattgtgaaaaataattagcacaattacccactgtagatagttaggcttatagtctcccatagttgagattgt

SEQ ID NO: 627743 - DNA, 120 bp, Artificial Sequence
  ENSG00000179071_13 (sequence is synthesized)
aagcaaacatgtatcagcataatagcatgaatgctttgcagaaaaaaaaaagtgtctgactttattttattttgcgctagcttggaaaatgattgagatcaagttctttaacaaagaagg

SEQ ID NO: 627744 - DNA, 120 bp, Artificial Sequence
  ENSG00000179071_14 (sequence is synthesized)
tcaattttattctgtatgagcaatatgattcaaataagttatacaaaacaacttttattttttctgcaagcttagataatattccattttttggttttctctttaaaaagaggatttaga

SEQ ID NO: 627745 - DNA, 120 bp, Artificial Sequence
  ENSG00000179071_15 (sequence is synthesized)
tgtgcaataatgcaaatatcagtagcttaatttaatattgcacgatatgctaatagacaattagacaatttggggtaacaaatcatagcagacgtgatctatagagtaactcagaaattg

SEQ ID NO: 627746 - DNA, 120 bp, Artificial Sequence
  ENSG00000179071_16 (sequence is synthesized)
ttttgtttctattagcatattttttgtaattaagattttccttttttaaaaaaatctaagctgaacgtgtgtatgtatgcttgcagcatttttgtagtaatacctacattttgtaagaat

SEQ ID NO: 627747 - DNA, 120 bp, Artificial Sequence
  ENSG00000179071_17 (sequence is synthesized)
ttaaaaaagttctcaaaggtagttatattttcttatcttcctgtaattaggtattgatatataaacattattatgaatacctctcaaaatagattgtaatgtaatatttttctcacccat

SEQ ID NO: 627748 - DNA, 120 bp, Artificial Sequence
  ENSG00000179071_18 (sequence is synthesized)
caaaatagattgtaatgtaatatttttctcacccattttgctgaaggctaccaagttacataatgaatttacttaaaaaatatgacttggtgcctttttagtaaaaccatttccaagcaa

SEQ ID NO: 627749 - DNA, 120 bp, Artificial Sequence
  ENSG00000179083_0 (sequence is synthesized)
aaattgaatgaaaatggtccaaatggcgtcattgggtagtgtgactatggacgatttaaaaacaaaacgattttctctaaatattctatgagcatgcatttttacactggataaaaaagg

SEQ ID NO: 627750 - DNA, 120 bp, Artificial Sequence
  ENSG00000179083_1 (sequence is synthesized)
ggagagtcggttattggcagaggagggagggactagacagcaggcgtattgcattccacgaagctgatttaataagtgctgtctgtgatgtttggcaagcctggtttatatccatctaca

SEQ ID NO: 627751 - DNA, 120 bp, Artificial Sequence
  ENSG00000179083_2 (sequence is synthesized)
aggtttgcgaacccatgttgccgatttttttttctgctacagaacaactcccttggtacaataaaaaagacgagtatttacttttcattgaaagaatggagcttgcttgatatttcacta

SEQ ID NO: 627752 - DNA, 120 bp, Artificial Sequence
  ENSG00000179083_3 (sequence is synthesized)
gataaagaatttaaggcgagtatctatctttgttctccttggcaactgagagtctgcccttggaaacatcaggcaccatggggaagcgggataatcgggtagcctatatgaatcctatag

SEQ ID NO: 627753 - DNA, 120 bp, Artificial Sequence
  ENSG00000179083_4 (sequence is synthesized)
caatggccagatggagaggcccaactcaatctgtgggcccaacaatccaagattatctaaatcgaccaagacccacctgggaagaagtaaagaaacaattagaaaataaaaaaacaggtt

SEQ ID NO: 627754 - DNA, 120 bp, Artificial Sequence
  ENSG00000179083_5 (sequence is synthesized)
caaaagcattagctgaatttgaagaaaaaatgaatgaaaattggaagaaagaacttgaaaaaagcagagagaaattattaagtggaaatgagagctcatctaaaaaaagagaaagaaaga

SEQ ID NO: 627755 - DNA, 120 bp, Artificial Sequence
  ENSG00000179083_6 (sequence is synthesized)
aaaagagaaagaagaaatcttgtcggtcttcatcttcttcatcaagctctgattcttcaagcagttcttcagattctgaggatgaggaaaagaaacaaggaaaaaggagaaagaaaaaga

SEQ ID NO: 627756 - DNA, 120 bp, Artificial Sequence
  ENSG00000179083_7 (sequence is synthesized)
agaaccgttcatacaaatcatcccaaagctctacgcatgaatcagaatcagagagcaaggagtctgtaaaaaagaaaaagaagtcaaaggatgaaacagagaaagaaaaggatgtaagaa

SEQ ID NO: 627757 - DNA, 120 bp, Artificial Sequence
  ENSG00000179083_8 (sequence is synthesized)
gcctcagcaaaaaaagaaagaaaagttaccctgatgataaacctttatcatctgagtcctcatctgaatcagattatgaagaggatgtgcaagcaaaaaagaagagaaggtgtgaagagc

SEQ ID NO: 627758 - DNA, 120 bp, Artificial Sequence
  ENSG00000179083_9 (sequence is synthesized)
gagaacaagcaaaggaaaaagtaaagaagaagaagaagaaacagcacaagaaacatagtaagaagaagaaaaagaagtctggatcaagtcacaagtcaaggtaacatcaagaaaaaaagc

SEQ ID NO: 627759 - DNA, 120 bp, Artificial Sequence
  ENSG00000179083_10 (sequence is synthesized)
aagaatgagtttgccgagttcccctgtgttagtagaattatttctggactttgagttgcctatcaaatcccactgtgccagtaaggggcatagtggctgctggcaacttcaatatacatt

SEQ ID NO: 627760 - DNA, 120 bp, Artificial Sequence
  ENSG00000179083_11 (sequence is synthesized)
tttgtttgtttgcttgtccttccttctaatggttaattcctctgagagctaaaattctgttgtcataccagtgaataaaatgtttgaaattaaagtaaaatgtgttagataatgaataac

SEQ ID NO: 627761 - DNA, 120 bp, Artificial Sequence
  ENSG00000179083_12 (sequence is synthesized)
tttgacaaaaaaaagtgtatctaaggttaaatgtatctaattcgaatacatctttgaaatatcaccatcaatgaaacataaatgtaatttccagacaattgtagttggtatttttgatgc

SEQ ID NO: 627762 - DNA, 120 bp, Artificial Sequence
  ENSG00000179083_13 (sequence is synthesized)
tcattttccttttttctttaatgaatctttgtttacatggggaaagagcatgtggggtgggaagggcaagtgtttgctaatcactgtggctagctgaatagtgtgcctttgactcttaca

SEQ ID NO: 627763 - DNA, 120 bp, Artificial Sequence
  ENSG00000179083_14 (sequence is synthesized)
catcctatttttgccagagcagcagccgtccttttcttactttatgaaattctggggtgttgtatgctgcttcaagtgaacaagaaggacaggagtttacagcataagtaagcccccata

SEQ ID NO: 627764 - DNA, 120 bp, Artificial Sequence
  ENSG00000179083_15 (sequence is synthesized)
tctatgaaatttacctcttcttcagcactgtttactatacagtactgaataatatttagtattacaatattacatgatttgaaataactttatacccattttgtatgggaaccattctaa

SEQ ID NO: 627765 - DNA, 120 bp, Artificial Sequence
  ENSG00000179083_16 (sequence is synthesized)
acagaccctgatgttgtttgattaagaaatattctgaaattttttttgcatgttttatactgttaagttttaattatctgaccatattctatataactgatgatccttttttaagatatg

SEQ ID NO: 627766 - DNA, 120 bp, Artificial Sequence
  ENSG00000179083_17 (sequence is synthesized)
atttatgcttaggatataagtttcaagtttttagtttcttagccttgctatattaatttcattactgtgtttaattgcacccttgccaaaatatttagcatgtgaaaaggttttttttaa

SEQ ID NO: 627767 - DNA, 120 bp, Artificial Sequence
  ENSG00000179083_18 (sequence is synthesized)
aaaatatgtaatgccttcatattgaagctggttactgtacgcaagttgagtgccagacctctagtacgccgtatgttacatgaaactactgccaaaatcttagtaagattgttgttgaaa

SEQ ID NO: 627768 - DNA, 120 bp, Artificial Sequence
  ENSG00000179083_19 (sequence is synthesized)
agattgttgtcttaagcattaatattgaatttatatagaagttaaatgtagatgataatgacatcattgatcttcctgtgtccgtattttcctacaatttggtgccttgtatctgttgct

SEQ ID NO: 627769 - DNA, 120 bp, Artificial Sequence
  ENSG00000179083_20 (sequence is synthesized)
gattcacttttaccactagtgtaaaaataagtgaaaaaatatttttactttacatttttatatatcagagtaacataaattataaatttgtgtctcaaaaccacctgtgatggaggatgt

SEQ ID NO: 627770 - DNA, 120 bp, Artificial Sequence
  ENSG00000179083_21 (sequence is synthesized)
gctaattgtaatgtcataggtacaaagtattttggcatgatgaaaagctcaatagctattgtttttcaatagcagattttatctcggctaccttcaatcacaagtaaaattataaagata

SEQ ID NO: 627771 - DNA, 120 bp, Artificial Sequence
  ENSG00000179083_22 (sequence is synthesized)
aaaaacatctacataaacatgttggctgccaaattttttgcattggaaatactggaatctctcattaaagttcttggaacattatagtgatgccatgttagattaccttggagcttcata

SEQ ID NO: 627772 - DNA, 120 bp, Artificial Sequence
  ENSG00000179083_23 (sequence is synthesized)
actttagctttttcctaaaaatatatgtttatgctgataaaaactattacatttatgggatattttgtatccatatagagtttttcagaattgttcattaaaatgctttttataagctta

SEQ ID NO: 627773 - DNA, 120 bp, Artificial Sequence
  ENSG00000179083_24 (sequence is synthesized)
tattatttgtagaatatggcaaaagcatttacagctcatcatgtatctatctgctcctgttcacttccaaacctcttgtagttaggcaatgccatttgactacttcaagcagagggattg

SEQ ID NO: 627774 - DNA, 120 bp, Artificial Sequence
  ENSG00000179083_25 (sequence is synthesized)
taaacagaagtgattttctatttccatgttggactgtaaaaagttctgcatgaccctccagttttcttttgcctgtcatggtgacctgaaagcaagatgttccaaatggcatacttacaa

SEQ ID NO: 627775 - DNA, 120 bp, Artificial Sequence
  ENSG00000179083_26 (sequence is synthesized)
gacggatgcaacctgggtccttaggtcgctgtttagaagggacctgactggagtgctgatggacttgcagtaaactttttaagtgtaagaaataaactgttatgtgttaaaccactgtga

SEQ ID NO: 627776 - DNA, 120 bp, Artificial Sequence
  ENSG00000179083_27 (sequence is synthesized)
aagtgctgtctgtgatgtttggcaagcctggtttatatccatctacaaggtttgcgaacccatgttgccaacaactcccttggtacaataaaaaagacgagtatttacttttcattgaaa

SEQ ID NO: 627777 - DNA, 120 bp, Artificial Sequence
  ENSG00000179085_0 (sequence is synthesized)
gaactacaactcccagaaggccgcgcggaagcggaacgtgaaccagggaggacttccggacgccaacatccgggccgcgcggggaaggggagacgtggggtagaggggagcattgcttcc

SEQ ID NO: 627778 - DNA, 120 bp, Artificial Sequence
  ENSG00000179085_1 (sequence is synthesized)
ttctctcgcagtgaccatgacgaaattagcgcagtggctttggggactagcgatcctgggctccacctgggtggccctgaccacgggagccttgggcctggagctgcccttgtcctgcca

SEQ ID NO: 627779 - DNA, 120 bp, Artificial Sequence
  ENSG00000179085_2 (sequence is synthesized)
cctgtggccactgcccgcctacttgctggtgtccgccggctgctatgccctgggcactgtgggctatcgtgtggccacttttcatgactgcgaggacgccgcacgcgagctgcagagcca

SEQ ID NO: 627780 - DNA, 120 bp, Artificial Sequence
  ENSG00000179085_3 (sequence is synthesized)
gatacaggaggcccgagccgacttagcccgcagggggctgcgcttctgacagcctaaccccattcctgtgcggacagcccttcctcccatttcccattaaagagccagtttattttctaa

SEQ ID NO: 627781 - DNA, 120 bp, Artificial Sequence
  ENSG00000179085_4 (sequence is synthesized)
ggcccttccaccttttgtgggcactcaagttcggacctctgggatcggcgattcccctctggccagggctggttttaatgctctccgtgggcgggcttcggttgagtttggtccgctttt

SEQ ID NO: 627782 - DNA, 120 bp, Artificial Sequence
  ENSG00000179088_0 (sequence is synthesized)
gagcgcttggaaccacgctgcgccgcgtccccaggacccagcagagtgctccagctcccgcggaggaggctgcgggcggcgccccgggatagggaccctgcagctccaggtagacgcagg

SEQ ID NO: 627783 - DNA, 120 bp, Artificial Sequence
  ENSG00000179088_1 (sequence is synthesized)
gagcgcgggactcgccccctggcagggtgaggtagagccggaccgtttgctctctgctgctccccgggactccagccgcgcccgtgagaagaggcagcacggcagcaaaggccaaggagc

SEQ ID NO: 627784 - DNA, 120 bp, Artificial Sequence
  ENSG00000179088_2 (sequence is synthesized)
ggagggagttgaacttgtcaaattaatgtctacagtgatatgtatgaaacaaagggaagaagaattcttgctaaccatcagaccttttgcaaacaggatgcagaaatccccttgctatat

SEQ ID NO: 627785 - DNA, 120 bp, Artificial Sequence
  ENSG00000179088_3 (sequence is synthesized)
tcccattgtgagcagtgccaccctgtgggatagaagcacacccagtgcaaagcacatcccttgttatgaaagaacttcagtaccctgctccagattcattaatcacatgaagaatttctc

SEQ ID NO: 627786 - DNA, 120 bp, Artificial Sequence
  ENSG00000179088_4 (sequence is synthesized)
tgaatctcctaaatttcgtagtctacactttctgaattttccagtatttccagaaaggactcaaaattcaatggcgtgtaaaagactacttcatacttgccagtacatagtccccaggtg

SEQ ID NO: 627787 - DNA, 120 bp, Artificial Sequence
  ENSG00000179088_5 (sequence is synthesized)
ttctgtaagcacagtttcttttgatgaagaaagctatgaagaattccgttcctctccagcaccatccagtgaaactgatgaggccccattgatttttactgccagaggagaaactgagga

SEQ ID NO: 627788 - DNA, 120 bp, Artificial Sequence
  ENSG00000179088_6 (sequence is synthesized)
gcacactcagtaaatcctgttcacctggaggctcagggcatacacatcagtagacacacaagacctaagggccagcccttgagcagtcccaagaaaaattctggttctgccgccagacct

SEQ ID NO: 627789 - DNA, 120 bp, Artificial Sequence
  ENSG00000179088_7 (sequence is synthesized)
tccactgccatcggcctctgcaggaggagccagacgcccggcgctctgcagagcaccggcccgagtaacacagagctcgagccggaggagaggatggcagtcccagcaggcgctcaggca

SEQ ID NO: 627790 - DNA, 120 bp, Artificial Sequence
  ENSG00000179088_8 (sequence is synthesized)
caccccgacgacatccaaagcagactcctgggcgcgtccggaaatcccgtcggaaaaggcgcggttgccatggcgccggagatgctccccaagcatcctcataccccgcgggacaggagg

SEQ ID NO: 627791 - DNA, 120 bp, Artificial Sequence
  ENSG00000179088_9 (sequence is synthesized)
cctcaggcggacacctccctccatggcaatctggcaggagcgccccttcctctgctggccggtgcttccacccatttcccctccaagaggttaataaaggtttgctcctcagcacccccc

SEQ ID NO: 627792 - DNA, 120 bp, Artificial Sequence
  ENSG00000179088_10 (sequence is synthesized)
cgcccaacccggcgtttccatacggtttgttcacaggccctttctaggccggtggtgaatgctcacttacattgaccgctgcgagggaattgttcggcgagtgctgcccatcttcaaatc

SEQ ID NO: 627793 - DNA, 120 bp, Artificial Sequence
  ENSG00000179088_11 (sequence is synthesized)
aatgcctgctcagaacaacagaaagggcctcagatgtactggtttccacagaaccattgttaggcttttgtgaagcatttttgaacctaataaataatgtcaaaagtccctagcgcagcc

SEQ ID NO: 627794 - DNA, 120 bp, Artificial Sequence
  ENSG00000179088_12 (sequence is synthesized)
ttcccaatctagaaaatggaaataatggtatctccctggatgaatgctgaaatccccttgctatattcccattgtgagcagtgccaccctgtgggatagaagcacacccagtgcaaagat

SEQ ID NO: 627795 - DNA, 120 bp, Artificial Sequence
  ENSG00000179088_13 (sequence is synthesized)
caagctattgaagcttagggaggtgaagtaattttcctgggatcacatagccagtaaatggtagaggcaggattccaactcagcacatcccttgttatgaaagaacttcagtaccctgct

SEQ ID NO: 627796 - DNA, 120 bp, Artificial Sequence
  ENSG00000179088_14 (sequence is synthesized)
attcaaacctgactccattaggtgctgctcattgccttggaggctgctgctcctgtgtgtcagatccacagagatatccgagttcagaaatgagtggaaaaatacccatggtgggcagga

SEQ ID NO: 627797 - DNA, 120 bp, Artificial Sequence
  ENSG00000179088_15 (sequence is synthesized)
agtcaccatggacaggccacacagaaattacagggagctatggttcttcaccttgaagaatgtcaccactcctagaagccctttcctgcacttcctggctcctcagattttgtttaaata

SEQ ID NO: 627798 - DNA, 120 bp, Artificial Sequence
  ENSG00000179088_16 (sequence is synthesized)
taagaactggaaaaccaaagctttgtcatctctaaaacaccttcactgagaaacgaagtgtccttctcatcccatggggctgttctgggtatcaagtaagatactgatatgaagtgtttt

SEQ ID NO: 627799 - DNA, 120 bp, Artificial Sequence
  ENSG00000179088_17 (sequence is synthesized)
tgtagagatcctgccctagtttctctcctcttctcaagatggcctcacattctagaacagccctcttcctgtgtcagtgagcagactcttctcagaagttctcagcagacttcccctcag

SEQ ID NO: 627800 - DNA, 120 bp, Artificial Sequence
  ENSG00000179088_18 (sequence is synthesized)
tgtgctggaaatgcaacattctgagataaagaggaactggttgggcttcatttctgtccctcccaccacagaatgacctacaatgctttagcccaaaatccccttgctatattcccattg

SEQ ID NO: 627801 - DNA, 120 bp, Artificial Sequence
  ENSG00000179088_19 (sequence is synthesized)
caaacaaatttgactcaacaatttccaccaaggtcctgagccccacttgcctcaaaaccagtagacctggtctggatgcactctcccaagaaacttgccaactaatgaccaaggatctaa

SEQ ID NO: 627802 - DNA, 120 bp, Artificial Sequence
  ENSG00000179088_20 (sequence is synthesized)
aataatggtgtccaaattttaattgcaaatgtctagcaatgataaaaaatttagtgcccatatctcatatacttatagacagatatgtactactccattcattaaaatgttagaaactag

SEQ ID NO: 627803 - DNA, 120 bp, Artificial Sequence
  ENSG00000179088_21 (sequence is synthesized)
acaggccacacagaaattacagggagctatggttcttcaccttgaagagtaaaatagccactatgaggagacctgctgtgagtgcatcagtctgaaactgctcacatattaacgctgact

SEQ ID NO: 627804 - DNA, 120 bp, Artificial Sequence
  ENSG00000179088_22 (sequence is synthesized)
acttattcaaataatggaatagctgatcaactgggtctccacacaaaagagagttatccatgataaaagaacaactttttcatgcattatatgtgacacatgcatgctttctcttaagat

SEQ ID NO: 627805 - DNA, 120 bp, Artificial Sequence
  ENSG00000179088_23 (sequence is synthesized)
ttatgaacccatgactattagtattgttaatataatcaaaccttttacagcctcactccaaagcttaaacttattatcaattgccttctagaggggagtcaatcaatttcataagtgctt

SEQ ID NO: 627806 - DNA, 120 bp, Artificial Sequence
  ENSG00000179088_24 (sequence is synthesized)
aaacacctgcactctctttgaatcggggaaaaatcaataccaagtcctcattttctccaagtatataatgcaaccaaatcttgcttacaagttcaggaggatttgtgattcaacagtcac

SEQ ID NO: 627807 - DNA, 120 bp, Artificial Sequence
  ENSG00000179088_25 (sequence is synthesized)
aatgaaaaattattaattcatttctggatgctaatgaaaaaacaggtcactgtcggggaaaaataaaacagactctgctaatactgcttaggattaagtcccctgtttgtgttctgcata

SEQ ID NO: 627808 - DNA, 120 bp, Artificial Sequence
  ENSG00000179088_26 (sequence is synthesized)
ggtgtgttttgcaacaaacacaaatcacatacctattaaccaggcatggtgccagtctctgaatatacagatgtggctgagacaggacccctgccttcaggatgctcatgatctattaat

SEQ ID NO: 627809 - DNA, 120 bp, Artificial Sequence
  ENSG00000179088_27 (sequence is synthesized)
ggaagaagatgtataaacagcttactccaattgttatacaaaacaataatttaattgcgtgtagggggataaagaagaggagacagagaaaaggaaagaaataagaaaagaaaaaaaaag

SEQ ID NO: 627810 - DNA, 120 bp, Artificial Sequence
  ENSG00000179088_28 (sequence is synthesized)
gacagtgtattagatgcttattgctaccagccaggctagaacttccaattctataatcactcttgatttttacaatatgttgtaaaaacaaagaggaaggtgtattttcaaaatactatt

SEQ ID NO: 627811 - DNA, 120 bp, Artificial Sequence
  ENSG00000179088_29 (sequence is synthesized)
aatttcttttttgttatatgtttttcttctttgttattttgatacgattttgaaaagtagagtctaatataggaaggactatttattcatcacaataacaactaaagtttatgtttttcc

SEQ ID NO: 627812 - DNA, 120 bp, Artificial Sequence
  ENSG00000179088_30 (sequence is synthesized)
aagtgactgtttagcttggccatttgctgctcctacctcaaatagaaggtttcctgtgactttctttgtccaacggaacatgatagaactaacgtagcaccagttaccaccttggtcctc

SEQ ID NO: 627813 - DNA, 120 bp, Artificial Sequence
  ENSG00000179088_31 (sequence is synthesized)
aagaggccttccaccctttagctctcttggaatccttccttccccaaaggaacaagtctgcactaaccaatgaaggatgagaaagcacaaggaggagagccaaggcaccccagtaactgc

SEQ ID NO: 627814 - DNA, 120 bp, Artificial Sequence
  ENSG00000179088_32 (sequence is synthesized)
agaagcagagctgttgacagatgcatgggggagtccagccaagaccagaattgccatgctgagtgcagtctaaattgccaaatttcagattcaggaataaacaaatgaatttttattgca

SEQ ID NO: 627815 - DNA, 120 bp, Artificial Sequence
  ENSG00000179088_33 (sequence is synthesized)
gtttagcttggccatttgctgctcctacctcaaatagaaggttggaatgcactgttgcacacatccgatttcaatttacaaaactggaattaaaccgtatgcaatgtaccttttaaaact

SEQ ID NO: 627816 - DNA, 120 bp, Artificial Sequence
  ENSG00000179088_34 (sequence is synthesized)
taacattatactaagtatattttgacacataattacacatcctttgaaactgcatataattccaccatagaggtgtatcataatttatgattggacattttgattaaaagccagcaatac

SEQ ID NO: 627817 - DNA, 120 bp, Artificial Sequence
  ENSG00000179088_35 (sequence is synthesized)
ccattaggattgaggcacatgtgctcactttaaagctgctggtattgttcctaagaagttgcacaagcctgggcttttaactgaagacaaacttttcactgacatataaaaaactacaaa

SEQ ID NO: 627818 - DNA, 120 bp, Artificial Sequence
  ENSG00000179088_36 (sequence is synthesized)
tgctctggtaatgtaagctggatcacagtgaaatctctataatttgaattatgagttgaattcaaattgaagtatgaaatctatggccattgtactttgttatttcactaagagtgctat

SEQ ID NO: 627819 - DNA, 120 bp, Artificial Sequence
  ENSG00000179088_37 (sequence is synthesized)
tccaggaccatttcactgacctgaaaggatatatttaaatgtgcctgtccaatttactacctaagagataatgaagtttttaggacaactgataaagcagtatttccagaaaggactcaa

SEQ ID NO: 627820 - DNA, 120 bp, Artificial Sequence
  ENSG00000179088_38 (sequence is synthesized)
aggccacacagaaattacagggagctatggttcttcaccttgaagaaaatgctctccattccctttgtgcctgtaaactcctcctgatcctctcaaactcatctcacatgtggcttcctc

SEQ ID NO: 627821 - DNA, 120 bp, Artificial Sequence
  ENSG00000179088_39 (sequence is synthesized)
tggaagcacagccttacccccctccttttctgcatttctgtagtacttaggtcatgttttcagcacagtgtccactatgttgtactatgtcaccactcctagaagccctttcctgcactt

SEQ ID NO: 627822 - DNA, 120 bp, Artificial Sequence
  ENSG00000179091_0 (sequence is synthesized)
cttcgcttcgcggggtagtgttgggcccgcggggcgcggggctcccgggcgcgcgtgcccggggtctgctgtgcagcgcgcgtcccgggcagctcccgctacggacacctcaggcagtgg

SEQ ID NO: 627823 - DNA, 120 bp, Artificial Sequence
  ENSG00000179091_1 (sequence is synthesized)
cgtcccgggcagctcccgctacggacacctcaggcagtggccttgtcgtcgaagtctggcctttcccgaggccggaaagtgatgctgtcagcgctgggcatgctggcggcagggggtgcg

SEQ ID NO: 627824 - DNA, 120 bp, Artificial Sequence
  ENSG00000179091_2 (sequence is synthesized)
gggctggccatggctctgcattcggctgtgagtgccagtgacctggagctgcacccccccagctatccgtggtctcaccgtggcctcctctcttccttggaccacaccagcatccggagg

SEQ ID NO: 627825 - DNA, 120 bp, Artificial Sequence
  ENSG00000179091_3 (sequence is synthesized)
ggtttccaggtatataagcaggtgtgcgcctcctgccacagcatggacttcgtggcctaccgccacctggtgggcgtgtgctacacggaggatgaagctaaggagctggctgcggaggtg

SEQ ID NO: 627826 - DNA, 120 bp, Artificial Sequence
  ENSG00000179091_4 (sequence is synthesized)
aacggagcattgccccctgacctcagctacatcgtgcgagctaggcatggtggtgaggactacgtcttctccctgctcacgggctactgcgagccacccaccggggtgtcactgcgggaa

SEQ ID NO: 627827 - DNA, 120 bp, Artificial Sequence
  ENSG00000179091_5 (sequence is synthesized)
ggtctctacttcaacccctactttcctggccaggccattgccatggcccctcccatctacacagatgtcttagagtttgacgatggcaccccagctaccatgtcccagatagccaaggat

SEQ ID NO: 627828 - DNA, 120 bp, Artificial Sequence
  ENSG00000179091_6 (sequence is synthesized)
gtgtgcaccttcctgcgctgggcatctgagccagagcacgaccatcgaaaacgcatggggctcaagatgttgatgatgatggctctgctggtgcccctggtctacaccataaagcggcac

SEQ ID NO: 627829 - DNA, 120 bp, Artificial Sequence
  ENSG00000179091_7 (sequence is synthesized)
aagtggtcagtcctgaagagtcggaagctggcatatcggccgcccaagtgaccctgtccagtgtctgcttgccatcctgccagaacaggccctcaagcccaagagccatcccaggcctgt

SEQ ID NO: 627830 - DNA, 120 bp, Artificial Sequence
  ENSG00000179091_8 (sequence is synthesized)
tcaggcctcagctaagcctctcttcatctggaagaagaggcaagggggcaggagaccaggctctagctctgggccctccttcagcccccatcatgggaataaattaattttctcaatgta

SEQ ID NO: 627831 - DNA, 120 bp, Artificial Sequence
  ENSG00000179091_9 (sequence is synthesized)
ccctgacctcagctacatcgtgcgagctaggtacacgggctgcccatggggtggtgctggagagatgggggaagggctgacttgtgcttggaactaaggagccatggatctggtcctagg

SEQ ID NO: 627832 - DNA, 120 bp, Artificial Sequence
  ENSG00000179091_10 (sequence is synthesized)
aggtcacggcggggaggctgcgggcgcgggcctgggcagcgcggaagcggtaccggccacccagcgtccccggtcccagctgcctgccgaccttgagcgtgtgggatcagggctgggcgc

SEQ ID NO: 627833 - DNA, 120 bp, Artificial Sequence
  ENSG00000179091_11 (sequence is synthesized)
ccacctctccgaacggcagagagcccgtccccagcgtgggggttggcgggacgggctagctgccgtggcggggctggggctttcccgaatggcgcgcccaggacggctcttgcggctggc

SEQ ID NO: 627834 - DNA, 120 bp, Artificial Sequence
  ENSG00000179091_12 (sequence is synthesized)
tgtccaaactgggcccgcgtcctgaagtgaccccagcctgatctcggccagctgcttgtgaccttggcctgtcccagcacccttggtcacttcggtctgatccccggctcaggatccagg

SEQ ID NO: 627835 - DNA, 120 bp, Artificial Sequence
  ENSG00000179091_13 (sequence is synthesized)
aacaccctctcctgagagcgaatcacggtctaggggtcagcggcggagagggatggggtgggtagtgggacagggtgtgcgtctggtgccctgcaggaggaggccattgctgggtggaga

SEQ ID NO: 627836 - DNA, 120 bp, Artificial Sequence
  ENSG00000179094_0 (sequence is synthesized)
ggagcttccactcggctgcgggctggagcggcggcgggcaggcgtgcggaggacactcctgcgaccaggtactggctgtgatcgaacttctcaaccctcagagacttagatcttccacct

SEQ ID NO: 627837 - DNA, 120 bp, Artificial Sequence
  ENSG00000179094_1 (sequence is synthesized)
cactccctcagccaagcctccaggccccctcgtgcatccgtggtggcctctctgccttctctgttctgttctccccatggcccagacatgagtggccccctagaaggggctgatggggga

SEQ ID NO: 627838 - DNA, 120 bp, Artificial Sequence
  ENSG00000179094_2 (sequence is synthesized)
ggggaccccaggcctggggaatcattttgtcctgggggcgtcccatcccctgggcccccacagcaccggccttgcccaggccccagcctggccgatgacaccgatgccaacagcaatggt

SEQ ID NO: 627839 - DNA, 120 bp, Artificial Sequence
  ENSG00000179094_3 (sequence is synthesized)
tcaagtggcaatgagtccaacgggcatgagtctagaggcgcatctcagcggagctcacacagctcctcctcaggcaacggcaaggactcagccctgctggagaccactgagagcagcaag

SEQ ID NO: 627840 - DNA, 120 bp, Artificial Sequence
  ENSG00000179094_4 (sequence is synthesized)
agcacaaactctcagagcccatccccacccagcagttccattgcctacagcctcctgagtgccagctcagagcaggacaacccgtccaccagtggctgcagcagtgaacagtcagcccgg

SEQ ID NO: 627841 - DNA, 120 bp, Artificial Sequence
  ENSG00000179094_5 (sequence is synthesized)
gcaaggactcagaaggaactcatgacagcacttcgagagctcaagcttcgactgccgccagagcgccggggcaagggccgctctgggaccctggccacgctgcagtacgcactggcctgt

SEQ ID NO: 627842 - DNA, 120 bp, Artificial Sequence
  ENSG00000179094_6 (sequence is synthesized)
gtcaagcaggtgcaggccaaccaggaatactaccagcagtggagcctggaggagggcgagccttgctccatggacatgtccacctataccctggaggagctggagcacatcacgtctgag

SEQ ID NO: 627843 - DNA, 120 bp, Artificial Sequence
  ENSG00000179094_7 (sequence is synthesized)
tacacacttcagaaccaggataccttctcagtggctgtctccttcctgacgggccgaatcgtctacatttcggagcaggcagccgtcctgctgcgttgcaagcgggacgtgttccggggt

SEQ ID NO: 627844 - DNA, 120 bp, Artificial Sequence
  ENSG00000179094_8 (sequence is synthesized)
acccgcttctctgagctcctggctccccaggatgtgggagtcttctatggttccactgctccatctcgcctgcccacctggggcacaggggcctcagcaggttcaggcctcagggacttt

SEQ ID NO: 627845 - DNA, 120 bp, Artificial Sequence
  ENSG00000179094_9 (sequence is synthesized)
acccaggagaagtccgtcttctgccgtatcagaggaggtcctgaccgggatccagggcctcggtaccagccattccgcctaaccccgtatgtgaccaagatccgggtctcagatggggcc

SEQ ID NO: 627846 - DNA, 120 bp, Artificial Sequence
  ENSG00000179094_10 (sequence is synthesized)
cctgcacagccgtgctgcctgctgattgcagagcgcatccattcgggttacgaagctccccggataccccctgacaagaggattttcactacgcggcacacacccagctgcctcttccag

SEQ ID NO: 627847 - DNA, 120 bp, Artificial Sequence
  ENSG00000179094_11 (sequence is synthesized)
gatgtggatgaaagggctgcccccctgctgggctacctgccccaggacctcctgggggccccagtgctcctgttcctgcatcctgaggaccgacccctcatgctggctatccacaagaag

SEQ ID NO: 627848 - DNA, 120 bp, Artificial Sequence
  ENSG00000179094_12 (sequence is synthesized)
attctgcagttggcgggccagccctttgaccactcccctatccgcttctgtgcccgcaacggggagtatgtcaccatggacaccagctgggctggctttgtgcacccctggagccgcaag

SEQ ID NO: 627849 - DNA, 120 bp, Artificial Sequence
  ENSG00000179094_13 (sequence is synthesized)
gtagccttcgtgttgggccgccacaaagtacgcacggcccccctgaatgaggacgtgttcactcccccggcccccagcccagctccctccctggacactgatatccaggagctgtcagag

SEQ ID NO: 627850 - DNA, 120 bp, Artificial Sequence
  ENSG00000179094_14 (sequence is synthesized)
cagatccaccggctgctgctgcagcccgtccacagccccagccccacgggactctgtggagtcggcgccgtgacatccccaggccctctccacagccctgggtcctccagtgatagcaac

SEQ ID NO: 627851 - DNA, 120 bp, Artificial Sequence
  ENSG00000179094_15 (sequence is synthesized)
gggggtgatgcagaggggcctgggcctcctgcgccagtgactttccagcagatctgtaaggatgtgcatctggtgaagcaccagggccagcagctttttattgagtctcgggcccggcct

SEQ ID NO: 627852 - DNA, 120 bp, Artificial Sequence
  ENSG00000179094_16 (sequence is synthesized)
cagtcccggccccgcctccctgctacaggcacgttcaaggccaaggcccttccctgccaatccccagacccagagctggaggcgggttctgctcccgtccaggccccactagccttggtc

SEQ ID NO: 627853 - DNA, 120 bp, Artificial Sequence
  ENSG00000179094_17 (sequence is synthesized)
cctgaggaggccgagaggaaagaagcctccagctgctcctaccagcagatcaactgcctggacagcatcctcaggtacctggagagctgcaacctccccagcaccactaagcgtaaatgt

SEQ ID NO: 627854 - DNA, 120 bp, Artificial Sequence
  ENSG00000179094_18 (sequence is synthesized)
gcctcctcctcctcctataccacctcctcagcctctgacgacgacaggcagaggacaggtccagtctctgtggggaccaagaaagatccgccgtcagcagcgctgtctggggagggggcc

SEQ ID NO: 627855 - DNA, 120 bp, Artificial Sequence
  ENSG00000179094_19 (sequence is synthesized)
tgtgggagacaagaagcccccggagtcggacatcatcatgatggaggacctgcctggcctagccccaggcccagcccccagcccagcccccagccccacagtagcccctgacccagcccc

SEQ ID NO: 627856 - DNA, 120 bp, Artificial Sequence
  ENSG00000179094_20 (sequence is synthesized)
agacgcctaccgtccagtggggctgaccaaggccgtgctgtccctgcacacacagaaggaagagcaagccttcctcagccgcttccgagacctgggcaggctgcgtggactcgacagctc

SEQ ID NO: 627857 - DNA, 120 bp, Artificial Sequence
  ENSG00000179094_21 (sequence is synthesized)
ttccacagctccctcagcccttggcgagcgaggctgccaccacggccccgcacccccaagccgccgacaccactgccgatccaaagccaagcgctcacgccaccaccagaaccctcgggc

SEQ ID NO: 627858 - DNA, 120 bp, Artificial Sequence
  ENSG00000179094_22 (sequence is synthesized)
tgaagcgccctgctatgtctcacacccctcacccgtgccaccctccaccccctggcccaccccaccagccactacccccttcccagcggttgtccagccctaccctctcccagtgttctc

SEQ ID NO: 627859 - DNA, 120 bp, Artificial Sequence
  ENSG00000179094_23 (sequence is synthesized)
tcctcgaggaggcccccagcctcttccccctgctcccacatctgtgcccccagctgctttccccgcccctttggtgaccccaatggtggccttggtgctccctaactatctgttcccaac

SEQ ID NO: 627860 - DNA, 120 bp, Artificial Sequence
  ENSG00000179094_24 (sequence is synthesized)
cccatccagctatccttatggggcactccagacccctgctgaagggcctcccactcctgcctcgcactccccttctccatccttgcccgccctcgccccgagtcctcctcaccgcccgga

SEQ ID NO: 627861 - DNA, 120 bp, Artificial Sequence
  ENSG00000179094_25 (sequence is synthesized)
ctctccactgttcaactcgagatgcagctctccactccagctcaatctgctgcagctggaggagctcccccgtgctgagggggctgctgttgcaggaggccctgggagcagtgccgggcc

SEQ ID NO: 627862 - DNA, 120 bp, Artificial Sequence
  ENSG00000179094_26 (sequence is synthesized)
cccacctcccagtgcggaggctgctgagccagaggccagactggcggaggtcactgagtcctccaatcaggacgcactttccggctccagtgacctgctcgaacttctgctgcaagagga

SEQ ID NO: 627863 - DNA, 120 bp, Artificial Sequence
  ENSG00000179094_27 (sequence is synthesized)
ctcgcgctccggcacaggctccgcagcctcgggctccttgggctctggcttgggctctgggtctggttcaggctcccatgaagggggcagcacctcagccagcatcactcgcagcagcca

SEQ ID NO: 627864 - DNA, 120 bp, Artificial Sequence
  ENSG00000179094_28 (sequence is synthesized)
gagcagccacacaagcaaatactttggcagcatcgactcttccgaggctgaggctggggctgctcggggcggggctgagcctggggaccaggtgattaagtacgtgctccaggatcccat

SEQ ID NO: 627865 - DNA, 120 bp, Artificial Sequence
  ENSG00000179094_29 (sequence is synthesized)
ttggctgctcatggccaatgctgaccagcgcgtcatgatgacctaccaggtgccctccagggacatgacctctgtgctgaagcaggatcgggagcggctccgagccatgcagaagcagca

SEQ ID NO: 627866 - DNA, 120 bp, Artificial Sequence
  ENSG00000179094_30 (sequence is synthesized)
gcctcggttttctgaggaccagcggcgggaactgggtgctgtgcactcctgggtccggaagggccaactgcctcgggctcttgatgtgatggcctgtgtggactgtgggagcagcaccca

SEQ ID NO: 627867 - DNA, 120 bp, Artificial Sequence
  ENSG00000179094_31 (sequence is synthesized)
agatcctggtcaccctgatgacccactcttctcagagctggatggactggggctggagcccatggaagagggtggaggcgagcagggcagcagcggtggcggcagtggtgagggagaggg

SEQ ID NO: 627868 - DNA, 120 bp, Artificial Sequence
  ENSG00000179094_32 (sequence is synthesized)
ctgcgaggaggcccaaggcggggccaaggcttcaagctctcaggacttggctatggaggaggaggaagaaggcaggagctcatccagtccagccttacctacagcaggaaactgcaccag

SEQ ID NO: 627869 - DNA, 120 bp, Artificial Sequence
  ENSG00000179094_33 (sequence is synthesized)
ctagactccattctgggaccatctccaggagtccatgagaggctttcttctcctatgtcccaattctcagaactcagatgtggctagaccaaccagtgggaaactgccccagcttctccc

SEQ ID NO: 627870 - DNA, 120 bp, Artificial Sequence
  ENSG00000179094_34 (sequence is synthesized)
accatagggggccggacccccatcaccagcctaggatccaggggctgcctctggcctcttagggagcagagagcagaactccgcagcccagcccagaggagtgtcacctcccacctttgg

SEQ ID NO: 627871 - DNA, 120 bp, Artificial Sequence
  ENSG00000179094_35 (sequence is synthesized)
agaggaatccttccctcccctggacaaagttgctgacaagctgctgaagtggcctctccatattccagctgagcctgaatctgactcttgagggttggggctgcacttatttattgcggg

SEQ ID NO: 627872 - DNA, 120 bp, Artificial Sequence
  ENSG00000179094_36 (sequence is synthesized)
gagacagctctctctcccacctcctccccagatgggaggagagcctgaggcccaagcaggacccgggggttccagcccctagctgctctggagtgggggaggttggtggaccatggagtc

SEQ ID NO: 627873 - DNA, 120 bp, Artificial Sequence
  ENSG00000179094_37 (sequence is synthesized)
cctggtgctgcccctcaggtgggacccaggcgttctcagctgtaccctctgccgatggcatttgtgtttttgatatttgtgtctgttactacttttttaatacaaaaagataaaaacgcc

SEQ ID NO: 627874 - DNA, 120 bp, Artificial Sequence
  ENSG00000179094_38 (sequence is synthesized)
ctccctcagcccttggcgagcgaggtagccacctggggcctcctggagcctgccctctgcccagtctaggactggattgttggggggtgggtcttaagggaggtgtttctgctccaggga

SEQ ID NO: 627875 - DNA, 120 bp, Artificial Sequence
  ENSG00000179094_39 (sequence is synthesized)
cccaggctggtgttgcttccaccactaggccctgcctagggacaggcccctcgctagcttctccccactaggatggggttccgggctgcagccagaggagggcagcctggggggatggca

SEQ ID NO: 627876 - DNA, 120 bp, Artificial Sequence
  ENSG00000179094_40 (sequence is synthesized)
ctgggatgggcaggcagaggtgctgtctccaggtaagcgacttcaggcctagcctgggggcaggggcaggaagtatgcccacttaggagtcagttgtcactgatgaagagacatgcatag

SEQ ID NO: 627877 - DNA, 120 bp, Artificial Sequence
  ENSG00000179094_41 (sequence is synthesized)
attctgggccaactctgggtggggtctgggcttcaagggcaggtggaaggcagcccctccaggtgcctgagggagatcccctgcaggcagacgcaggactcaggactgggctttccagcc

SEQ ID NO: 627878 - DNA, 120 bp, Artificial Sequence
  ENSG00000179094_42 (sequence is synthesized)
ccactcttcactccattgcaagctaggcagaatacggcctcgatgggcaggaggaatgcctaggctggcagtgcccacaggagtttggcggaccagagccatctgtccatgtgtccatgg

SEQ ID NO: 627879 - DNA, 120 bp, Artificial Sequence
  ENSG00000179094_43 (sequence is synthesized)
actcaccctgcttcctccatctgccagcatgcctccatcttccgcacacccccagctcgacccctcgtgtaacctctccctggccttgttcctttctcaataaatccccttgtccctggc

SEQ ID NO: 627880 - DNA, 120 bp, Artificial Sequence
  ENSG00000179094_44 (sequence is synthesized)
attatgcaacccgcctccccgcccgcccggtggagcttccactcggctgcgggctggagcggcggcgggcaggcgtgcggaggacactcctgcgaccagcaccggccttgcccaggcccc

SEQ ID NO: 627881 - DNA, 77 bp, Artificial Sequence
  ENSG00000179094_45 (sequence is synthesized)
tacctctgcctcctcctgccccctccccagcgtctttgctgttgtctgctgtgaccttattgttggaggagtgggtg

SEQ ID NO: 627882 - DNA, 120 bp, Artificial Sequence
  ENSG00000179094_46 (sequence is synthesized)
aggacccagggccagccgttggcagagaggtgaccaagaaacgtacatggagaccaggcttggctgtggggcagagctgccaggggttggctaggctatcagacagggagggtgtggtat

SEQ ID NO: 627883 - DNA, 120 bp, Artificial Sequence
  ENSG00000179094_47 (sequence is synthesized)
ctgccctggataggataaacgtttctatctttcttcctgctccttggagccctgttactagttcctcccaggaggagagcaggtttcctggtcttggaagccttgacctcgcatagcact

SEQ ID NO: 627884 - DNA, 120 bp, Artificial Sequence
  ENSG00000179094_48 (sequence is synthesized)
agtttaggggaggagcatgaggtgggaagctgtggtagaggaaggatgccagcttcatgggtcctggtccgggtcctggatcccagcctctgccttctgaaccccttcttgggcagggac

SEQ ID NO: 627885 - DNA, 120 bp, Artificial Sequence
  ENSG00000179094_49 (sequence is synthesized)
acaagaagagtgagttcctctcgccctgctcgcccttcccactgtcctgggcttttgagtggctgcccttgtggttgtgtctcttggtgccttggtctcctggatctctagtggcatggc

SEQ ID NO: 627886 - DNA, 76 bp, Artificial Sequence
  ENSG00000179094_50 (sequence is synthesized)
cgccgagctacctcaggtactggctgtgatcgaacttctcaaccctcagagacttagatcttccacctcactccct

SEQ ID NO: 627887 - DNA, 120 bp, Artificial Sequence
  ENSG00000179094_51 (sequence is synthesized)
gtggggggcgtggcagcccggcccgtgggcgggtttggaggagccagtgtaatgctagaagtcctagaagaaatttggagtgtgcgtgcgcgccgagcggtactggctgtgatcgaactt

SEQ ID NO: 627888 - DNA, 120 bp, Artificial Sequence
  ENSG00000179094_52 (sequence is synthesized)
tagggaaggggcaggaagctgtgctcactcctctcctgtctgtcccaggttcaggcctcagggactttacccaggagaagtccgtcttctgccgtatcaggtaggtgaggggaactggag

SEQ ID NO: 627889 - DNA, 120 bp, Artificial Sequence
  ENSG00000179094_53 (sequence is synthesized)
caccctctaatcgccctttcccctctccttcttggaaccagcactgccagtcccagagtcttgcccgatcctcctttgccctctccttcctgccttttccttcttgtcctgctcccatca

SEQ ID NO: 627890 - DNA, 120 bp, Artificial Sequence
  ENSG00000179094_54 (sequence is synthesized)
aggcgtctgtgcctccccactggtaccttcttgttttattgtgcccttggcccctgacactggcgacaccccctggttctgctcactgtggtgctgtgtcccacaggtgactttccagca

SEQ ID NO: 627891 - DNA, 120 bp, Artificial Sequence
  ENSG00000179097_0 (sequence is synthesized)
cccttgttacaggtatccatttttcagctatattaatcttttaaaacaaagaaaatggatttcttaaattcatctgatcaaaacttgacctcagaggaactgttaaacagaatgccatcc

SEQ ID NO: 627892 - DNA, 120 bp, Artificial Sequence
  ENSG00000179097_1 (sequence is synthesized)
aaaattctggtgtccctcactctgtctgggctggcactgatgacaacaactatcaactcccttgtgatcgctgcaattattgtgacccggaagctgcaccatccagccaattatttaatt

SEQ ID NO: 627893 - DNA, 120 bp, Artificial Sequence
  ENSG00000179097_2 (sequence is synthesized)
tgttcccttgcagtcacagattttcttgtggctgtcctggtgatgcccttcagcattgtgtatattgtgagagagagctggattatggggcaagtggtctgtgacatttggctgagtgtt

SEQ ID NO: 627894 - DNA, 120 bp, Artificial Sequence
  ENSG00000179097_3 (sequence is synthesized)
gacattacctgctgcacgtgctccatcttgcatctctcagctatagctttggatcggtatcgagcaatcacagatgctgttgagtatgccaggaaaaggactccaaagcatgctggcatt

SEQ ID NO: 627895 - DNA, 120 bp, Artificial Sequence
  ENSG00000179097_4 (sequence is synthesized)
atgattacaatagtttggattatatctgtttttatctctatgcctcctctattctggaggcaccaaggaactagcagagatgatgaatgcatcatcaagcacgaccacattgtttccacc

SEQ ID NO: 627896 - DNA, 120 bp, Artificial Sequence
  ENSG00000179097_5 (sequence is synthesized)
atttactcaacatttggagctttctacatcccactggcattgattttgatcctttactacaaaatatatagagcagcaaagacattataccacaagagacaagcaagtaggattgcaaag

SEQ ID NO: 627897 - DNA, 120 bp, Artificial Sequence
  ENSG00000179097_6 (sequence is synthesized)
gaggaggtgaatggccaagtccttttggagagtggtgagaaaagcactaaatcagtttccacatcctatgtactagaaaagtctttatctgacccatcaacagactttgataaaattcat

SEQ ID NO: 627898 - DNA, 120 bp, Artificial Sequence
  ENSG00000179097_7 (sequence is synthesized)
agcacagtgagaagtctcaggtctgaattcaagcatgagaaatcttggagaaggcaaaagatctcaggtacaagagaacggaaagcagccactaccctgggattaatcttgggtgcattt

SEQ ID NO: 627899 - DNA, 120 bp, Artificial Sequence
  ENSG00000179097_8 (sequence is synthesized)
gtaatatgttggcttcctttttttgtaaaagaattagttgttaatgtctgtgacaaatgtaaaatttctgaagaaatgtccaattttttggcatggcttgggtatctcaattcccttata

SEQ ID NO: 627900 - DNA, 120 bp, Artificial Sequence
  ENSG00000179097_9 (sequence is synthesized)
aatccactgatttacacaatctttaatgaagacttcaagaaagcattccaaaagcttgtgcgatgtcgatgttagttttaaaaatgtttattattgaaggatgggggtttttgaggggag

SEQ ID NO: 627901 - DNA, 120 bp, Artificial Sequence
  ENSG00000179097_10 (sequence is synthesized)
gaataactagatgaatgccaaataataaaacacttaagcttttagagggaaatacatgaaaactgctaaattgataaggctataatttatattttaatagcaatgtgaatataaaagtta

SEQ ID NO: 627902 - DNA, 120 bp, Artificial Sequence
  ENSG00000179097_11 (sequence is synthesized)
ttgatcaccactattctagggtattcaaaattagaaaataatttatgtaggttataaacaatattttgcctatgcaatgttcctaaaaagctaactggaaaaaatatatatatatacaat

SEQ ID NO: 627903 - DNA, 120 bp, Artificial Sequence
  ENSG00000179097_12 (sequence is synthesized)
agtaatgacagtgattttccatgtttacatcttacaataattatagaggagttttcaattaacaacatacctccctccataatttctatctagtcctactgttttataatataattctat

SEQ ID NO: 627904 - DNA, 120 bp, Artificial Sequence
  ENSG00000179097_13 (sequence is synthesized)
aattcaccacaaagtacacatttctcctgtctccattcttgtcccttctccatcttaccctgagcaaaagggagggggaaggagcaactcttacttagtgtgactgcagaaaatgtaaaa

SEQ ID NO: 627905 - DNA, 120 bp, Artificial Sequence
  ENSG00000179097_14 (sequence is synthesized)
aagtcagagcttgaaattgtccttgtgtttaggtagcaaagagtaatcataaagtgggttaggtacagcaaaataattcaatactgaacttgtgcatatttaatgtattatgtttgatat

SEQ ID NO: 627906 - DNA, 120 bp, Artificial Sequence
  ENSG00000179097_15 (sequence is synthesized)
aaacttctagaataatattatcttatccttatattatcagcatttgaaatcaaagccttaccttagtaacaataactcaacaaaggggcatgggtgacgttgttataattgctctctgtt

SEQ ID NO: 627907 - DNA, 120 bp, Artificial Sequence
  ENSG00000179097_16 (sequence is synthesized)
tacttaggaatcaaatttaaagcactaaatatcatagattactcaccacagttatactcttaacatctttttaaaagtataaaatgtatttcatttctgttaataagctcagttattaac

SEQ ID NO: 627908 - DNA, 120 bp, Artificial Sequence
  ENSG00000179097_17 (sequence is synthesized)
taaattgtctgtggtattttgcacttcagtattttccatacctttgatttcaacattatttcccgtttactagacagaatataatggaaatttttagaactttccctttactttaaaata

SEQ ID NO: 627909 - DNA, 120 bp, Artificial Sequence
  ENSG00000179097_18 (sequence is synthesized)
tttctacttttccaattggtagaaatgaacaggaaaaaagactcatattacactaattaataaatgtacacacatatatatttttgtaattagtcactctactagttcagtgagccaaag

SEQ ID NO: 627910 - DNA, 120 bp, Artificial Sequence
  ENSG00000179097_19 (sequence is synthesized)
caattccataagtttttcttccatatttataaaaggatttgaaaacaatagaaccatgagtttgagaggattttattttatttgaaccagcaaggtcatagactacctttgggaagacct

SEQ ID NO: 627911 - DNA, 120 bp, Artificial Sequence
  ENSG00000179097_20 (sequence is synthesized)
atcatcaaccaagatcgtttgaaaaacaatatatacctttttttaagttgtacatttatgtgcattgtaaatattccttcctgatggtgtggttaagagtacattacatcaattttatgt

SEQ ID NO: 627912 - DNA, 120 bp, Artificial Sequence
  ENSG00000179097_21 (sequence is synthesized)
atatatagatctgtgacaaattactctcaatctaacaaacatttacagagttcccattttatacaaggcattgagacatatactagatagaagatatacgaaataataaaatacagtttt

SEQ ID NO: 627913 - DNA, 120 bp, Artificial Sequence
  ENSG00000179097_22 (sequence is synthesized)
ttttcctgaatatgtttacagtctaaaaggagaaacaagaaaaaataaaactataatagaaaagagcaaactaaaatctggcatggaagttgtttacacagttatgatggtgcagaggaa

SEQ ID NO: 627914 - DNA, 120 bp, Artificial Sequence
  ENSG00000179097_23 (sequence is synthesized)
aaactgatcgcatcttgtttagaaaaatcagaaatatttcacaaagaatgtatctagaacacatgtcaaatacacagcactggggcaagaaaaatggaagagcacactccaggttgtgac

SEQ ID NO: 627915 - DNA, 120 bp, Artificial Sequence
  ENSG00000179097_24 (sequence is synthesized)
aacatcaggatacaaactgcaccatgcaagtatttggtggggcatgttcataaatagcaatgagtttggcaactatttagagcaatagaggaaaaggatattaaaagaaaaattgggcat

SEQ ID NO: 627916 - DNA, 120 bp, Artificial Sequence
  ENSG00000179097_25 (sequence is synthesized)
ttttgtggctgactttgaacgtcagaaaaaagtctacagtcaattttattgctgacgatgggtaatcactgatacttttagcaaaaatattacaagtttagagcaaatctaaacaaaaaa

SEQ ID NO: 627917 - DNA, 90 bp, Artificial Sequence
  ENSG00000179104_0 (sequence is synthesized)
cttctcacttcactggagaagggaagggagctaataaacattgaatgtgcagcagctgccttggcggccggagtccgcccgagcgacacc

SEQ ID NO: 627918 - DNA, 120 bp, Artificial Sequence
  ENSG00000179104_1 (sequence is synthesized)
agcagctgccttggcggccggagtccgcccgagcgacaccggagcagtgcgcccgggaggcggcgaggggaggcggttcgccttgtccctcccacccgcgcctctttctctctcttcctc

SEQ ID NO: 627919 - DNA, 120 bp, Artificial Sequence
  ENSG00000179104_2 (sequence is synthesized)
cagctggtcccagagcccggcttggtccggtccctctgcccccatcccgcacccttccacctcctccgagtcccactcctcacctaggacgccccaaactgccatgggttagggtgggga

SEQ ID NO: 627920 - DNA, 120 bp, Artificial Sequence
  ENSG00000179104_3 (sequence is synthesized)
tcgcgacccgcgcgaaagaccagccctgcgcttccgccgggggacgcggagcccaaacgccgctcaccgcttgcgggcgccgggcatggggagtgtggtgtgagcccgcacccggggagg

SEQ ID NO: 627921 - DNA, 120 bp, Artificial Sequence
  ENSG00000179104_4 (sequence is synthesized)
acgcaggagctgcggagacgggcgcgaggaggaggagaggagtcgtggattggaaggacccgagggagggagggtggggaagcgagggaaaagtgaagctgggaggagaaggcggcggaa

SEQ ID NO: 627922 - DNA, 120 bp, Artificial Sequence
  ENSG00000179104_5 (sequence is synthesized)
ggtggagattgatgcttctgttttttgttgccgctgctgccctcgcgctgggagccgagccggagggaaggcggtggagagatgattgcagagttggtgagcagcgctctggggctcgcc

SEQ ID NO: 627923 - DNA, 120 bp, Artificial Sequence
  ENSG00000179104_6 (sequence is synthesized)
ttgtatctcaacaccctgagtgcggatttctgctatgatgacagccgtgctatcaagactaatcaggaccttctcccagaaactccatggacgcacattttctacaatgatttttggggg

SEQ ID NO: 627924 - DNA, 120 bp, Artificial Sequence
  ENSG00000179104_7 (sequence is synthesized)
actcttctaacccacagtggcagccacaagtcctaccggccactctgcactctttcttttcgcctgaaccatgccattggagggttgaatccctggagctaccatcttgtcaatgtcctg

SEQ ID NO: 627925 - DNA, 120 bp, Artificial Sequence
  ENSG00000179104_8 (sequence is synthesized)
ttgcatgcagcagtcactggtctcttcacaagcttctccaagatcctccttggtgatggatactggacattcatggctggcttgatgtttgcttctcaccccattcacacggaggcagtg

SEQ ID NO: 627926 - DNA, 120 bp, Artificial Sequence
  ENSG00000179104_9 (sequence is synthesized)
gcaggaatcgtgggacgagccgatgtcggggccagtctcttctttctcctctccttgctctgctacattaaacactgttctacaagaggctactcagccagaacctggggctggttcctg

SEQ ID NO: 627927 - DNA, 120 bp, Artificial Sequence
  ENSG00000179104_10 (sequence is synthesized)
gggtcaggactgtgcgcaggatgcagcatgttgtggaaggaacaaggagtgactgttctcgcagtttcagcagtttatgatgtctttgtctttcacaggctgaaaataaaacagatatta

SEQ ID NO: 627928 - DNA, 120 bp, Artificial Sequence
  ENSG00000179104_11 (sequence is synthesized)
cctaccatttacaaaaggaagaacttgtcgcttttcctaagcattagtttgttaattttctggggttcctcccttttgggtgcccggttatactggatgggaaacaaaccaccaagcttt

SEQ ID NO: 627929 - DNA, 120 bp, Artificial Sequence
  ENSG00000179104_12 (sequence is synthesized)
tccaactcggacaaccccgctgctgattcggacagcctcctcacccgcactctcaccttcttctacttgccaaccaagaacctctggctgttgctatgtccagataccctcagttttgat

SEQ ID NO: 627930 - DNA, 120 bp, Artificial Sequence
  ENSG00000179104_13 (sequence is synthesized)
tggtcaatggatgctgtgcctctgctcaaaacagtttgtgactggagaaacctacacactgtggccttctatactggactccttctccttgcctactatggtttgaagagcccgagcgta

SEQ ID NO: 627931 - DNA, 120 bp, Artificial Sequence
  ENSG00000179104_14 (sequence is synthesized)
gacagagaatgcaatgggaaaactgtaacaaatggcaagcagaatgcaaatggacatagctgcctttcagatgtggagtaccagaactcagagactaagtccagctttgcatccaaagta

SEQ ID NO: 627932 - DNA, 120 bp, Artificial Sequence
  ENSG00000179104_15 (sequence is synthesized)
gaaaatggcattaaaaacgatgtatcacagagaacccagcttccttctacggagaacattgttgttctgtctttatctttgttaatcataccctttgttcctgccacgaacctgtttttc

SEQ ID NO: 627933 - DNA, 120 bp, Artificial Sequence
  ENSG00000179104_16 (sequence is synthesized)
tatgtcggctttgtaattgcagagcgagtattatatattcctagtatgggcttctgcctactgattacagtgggtgctagagccctttatgtcaaagtccaaaagcggttcctcaagagc

SEQ ID NO: 627934 - DNA, 120 bp, Artificial Sequence
  ENSG00000179104_17 (sequence is synthesized)
ttgattttttatgctacagctacactaattgttttttatggactcaagactgcgatcaggaatggagactggcagaatgaggaaatgctttatagatcagggataaaagtaaacccagct

SEQ ID NO: 627935 - DNA, 120 bp, Artificial Sequence
  ENSG00000179104_18 (sequence is synthesized)
aaagcatggggtaaccttggaaatgttctgaagagtcagagcaaaatttctgaagctgaaagcgcctatagaaatgctttgtactaccgcagcaacatggctgacatgctttataattta

SEQ ID NO: 627936 - DNA, 120 bp, Artificial Sequence
  ENSG00000179104_19 (sequence is synthesized)
gggctacttctccaggagaacagcaggtttgcagaagcactacattattataaattggccattgggagcaggcctaccctggcttctgcatatttaaataccggtattattctaatgaac

SEQ ID NO: 627937 - DNA, 120 bp, Artificial Sequence
  ENSG00000179104_20 (sequence is synthesized)
caaggaaggacggaagaagcccgacggacattcttaaagtgttcggagatcccagatgaaaacctaaaggaccctcatgcacacaagagctctgttaccagttgtttgtacaacctagga

SEQ ID NO: 627938 - DNA, 120 bp, Artificial Sequence
  ENSG00000179104_21 (sequence is synthesized)
aagctgtatcatgagcagggacactatgaggaagcccttagtgtatacaaggaagcaattcagaaaatgccaaggcagtttgccccacagagcttgtacaacatgatgggtgaagcatat

SEQ ID NO: 627939 - DNA, 120 bp, Artificial Sequence
  ENSG00000179104_22 (sequence is synthesized)
atgcgtttaagcaaactccccgaagcagagcattggtatatggaatcactgagatccaagactgaccacatccctgctcatctcacctatgggaagctgctagctctaacaggtcgtaag

SEQ ID NO: 627940 - DNA, 120 bp, Artificial Sequence
  ENSG00000179104_23 (sequence is synthesized)
tattgagctggatcccaccaaaggaaactgttacatgcattatggtcagtttcttctggaagaagctcgtctcatagaagcagctgagatggcaaaaaaagcagctgaactagacagcac

SEQ ID NO: 627941 - DNA, 120 bp, Artificial Sequence
  ENSG00000179104_24 (sequence is synthesized)
agagtttgatgttgtcttcaatgctgcccacatgctcagacaggctagcctcaatgaagcagctgagaagtattatgatctggcagccaggctgaggcctaattatccggctgctttgat

SEQ ID NO: 627942 - DNA, 120 bp, Artificial Sequence
  ENSG00000179104_25 (sequence is synthesized)
gaacctgggagccattctgcacctcaatggcagactccagaaggccgaggccaactacctgcgggccctgcagctcaagccagacgatgtcatcacacagtccaatctccgcaaactgtg

SEQ ID NO: 627943 - DNA, 120 bp, Artificial Sequence
  ENSG00000179104_26 (sequence is synthesized)
gaacatcatggaaaaacaaggcttaaagacttctaagacctgacacaggaggcagaagcccatcctcctccatttttaaaagctggcttccttagcagacagaacttcccagcagtgcta

SEQ ID NO: 627944 - DNA, 120 bp, Artificial Sequence
  ENSG00000179104_27 (sequence is synthesized)
tgacaagagctggtgttagacttcaagaccagggcagaggtcattgaggtcactaccgcttctggaagaatccactttgctgtaggcacagctgttaacaccaaaaaggggaaagccgga

SEQ ID NO: 627945 - DNA, 120 bp, Artificial Sequence
  ENSG00000179104_28 (sequence is synthesized)
aacctcctggaggatgtcattgttacccatagactgtaaaccagagcacttaaaacagaaccttttggcattcttaaaaagggaggggtgggtgtgtaagtcacagattttgttcatttt

SEQ ID NO: 627946 - DNA, 120 bp, Artificial Sequence
  ENSG00000179104_29 (sequence is synthesized)
ctgaaagctaatttcaaaattatgttgttccttaaacactgtgagaggaagtcagagtgtccattcaggcatggcaaacaattagggttaagtgttacgagggagtgataaacacgtagt

SEQ ID NO: 627947 - DNA, 120 bp, Artificial Sequence
  ENSG00000179104_30 (sequence is synthesized)
gtgagtcccagtgagccgccggttgtcctaacgctgctgtcttccctgtttgggacagcctgcttatcaatttctgaagcttagaacactttttttaatactgtgtcaagatctgtcaga

SEQ ID NO: 627948 - DNA, 120 bp, Artificial Sequence
  ENSG00000179104_31 (sequence is synthesized)
atctgctatgtttcttgaccagtgcacataatgttttatgatttggatgtcagaggcttcattcttttggacatcatttgctttttatgttctgaaaaggatatggagagtagagctaac

SEQ ID NO: 627949 - DNA, 120 bp, Artificial Sequence
  ENSG00000179104_32 (sequence is synthesized)
catacttcacactcgagttgtatgagggactggggaggccttatatgtgtcaggcaggcattttttaaattttaatatcgtcaatattttcccccaaactgcccagtagaattcattgta

SEQ ID NO: 627950 - DNA, 120 bp, Artificial Sequence
  ENSG00000179104_33 (sequence is synthesized)
ttaattcttttgaaattacctttgaaaatagctattcctggagaatgtgcaagcttacataaggataaaggacaggggaggagtttgtaagccttgcagttccaataactaaccaacagg

SEQ ID NO: 627951 - DNA, 120 bp, Artificial Sequence
  ENSG00000179104_34 (sequence is synthesized)
ttattagacaaaagggaaggtgttttgtgcttctcagatgttgctggtttaggagtgtgtgatgatgcttgccagtgattttgtgttttggaaagggtaggtatcgaatgttaatcactt

SEQ ID NO: 627952 - DNA, 120 bp, Artificial Sequence
  ENSG00000179104_35 (sequence is synthesized)
tctaatgggtacctaaacagcaatgctgataaatgttcaaggaattattttcatcttagtttgttcttctcaaaaggcatcaaaaacaacttatttgaagctgcaatagagtgtagcatt

SEQ ID NO: 627953 - DNA, 120 bp, Artificial Sequence
  ENSG00000179104_36 (sequence is synthesized)
agcctgcatgtttctaggtcttctgccaagtgcttttctcagttgaaaactatttttcactagcaaaattggtattttatttcattacctgttagtaactacttcaatgatcatttcaca

SEQ ID NO: 627954 - DNA, 120 bp, Artificial Sequence
  ENSG00000179104_37 (sequence is synthesized)
agaaaaagactataaattaagtagagaacaacatttttattgaacatttttggcttgcaatcaaactttgccactaaaaattaacttcataaaacactagtccgttatcaacttcttcac

SEQ ID NO: 627955 - DNA, 120 bp, Artificial Sequence
  ENSG00000179104_38 (sequence is synthesized)
agagaaagtagctatactataccctacatatttatttatttattattctactatagcagaataacaaaacttgatgcattaagccagttctttgcaactgaaaattacctgtttctcctt

SEQ ID NO: 627956 - DNA, 120 bp, Artificial Sequence
  ENSG00000179104_39 (sequence is synthesized)
ccctttcacactccatgtatatatgatcagcctctccattaaaaagaagctggacatgcaaatacatcatattatgttttctccatattttatgtttttctatgtatctgaatacagtgg

SEQ ID NO: 627957 - DNA, 120 bp, Artificial Sequence
  ENSG00000179104_40 (sequence is synthesized)
gataaataattgaaagtagtgttcctatggcattagtgtttttgtgagaagggtaaatgtagtgagaaaggttttttcatggcattaataagaaagcccttctgtaatatatatattatt

SEQ ID NO: 627958 - DNA, 120 bp, Artificial Sequence
  ENSG00000179104_41 (sequence is synthesized)
ttgtaaacatttcactgaagggccaaaagttaaattataactaaatcactgtgttttcagaatgatatttaacaacaaacccgtggtcaaaccaaaatagtgggttgaagtgtattattc

SEQ ID NO: 627959 - DNA, 120 bp, Artificial Sequence
  ENSG00000179104_42 (sequence is synthesized)
atcttttagtgcattggcaattgcaaaaaaaaaaaaggaatttaatataaggctatagagattaattcagtgtctaacatttgtatttatttaaatagttattgacctatgatgactttc

SEQ ID NO: 627960 - DNA, 120 bp, Artificial Sequence
  ENSG00000179104_43 (sequence is synthesized)
tagtcttaacattttatctttttattgttgttgttcttcctttcaaagatgtggttcttaataggttcactgaatgcacagttgaggcacttcttgtgacaccagttcccaagtagcgtt

SEQ ID NO: 627961 - DNA, 120 bp, Artificial Sequence
  ENSG00000179104_44 (sequence is synthesized)
aataattgggcctgtgtcataaaatgcacggatcattaataactaaatgtccctgacacttttcactacagggctggacttagtaactgaccaacttcggggggagggttggggcaaggg

SEQ ID NO: 627962 - DNA, 120 bp, Artificial Sequence
  ENSG00000179104_45 (sequence is synthesized)
ggggtgggcgttagaacatgatcaaaaaatgtctccgctcagggatttatggtggattattgcagacagtgctaaaaatatagagcacaagacaagtttactaaattaaaattttatttt

SEQ ID NO: 627963 - DNA, 120 bp, Artificial Sequence
  ENSG00000179104_46 (sequence is synthesized)
ttgagaaactgttatttgtataaattatcaagatttgtaggctttccttttgtagaaataattgttttatgtgccagagaatttcaattttgttttcaacaataaagcattgataagaaa

SEQ ID NO: 627964 - DNA, 120 bp, Artificial Sequence
  ENSG00000179104_47 (sequence is synthesized)
agaccgggatagatgggtttgaggtactgttttacagccagttatctaagctattagggatgcaatggtggtgatactaactttgaaccctgtacagaaaatatagaaaaatgtgttact

SEQ ID NO: 627965 - DNA, 120 bp, Artificial Sequence
  ENSG00000179104_48 (sequence is synthesized)
ttgcctatgaggtttggtctagataagatgtgagatgtctgtatcttacatcttgatctagataatatgtgagatgtctgtatcttacatcttggtctagataagatgtgagatgtccgt

SEQ ID NO: 627966 - DNA, 120 bp, Artificial Sequence
  ENSG00000179104_49 (sequence is synthesized)
atcatccctgtatcaaaacatctcctgtatcccataaatatatgcacctatagaaaatgtttaaaagaattaaaaaattaaaaaaacaaaacaaacagatgtgagatgccatgatcgttg

SEQ ID NO: 627967 - DNA, 120 bp, Artificial Sequence
  ENSG00000179104_50 (sequence is synthesized)
atgtaactttgaaaaatataaatggagaatcccaaatatggaattacataatgaatttgttctaataatcatatttgcataaatattatgttctacaaaccagtgttagccccaaattgg

SEQ ID NO: 627968 - DNA, 120 bp, Artificial Sequence
  ENSG00000179104_51 (sequence is synthesized)
tctagagttatcaatctgaattataaattttgtaaaattattcacaaaagcacttattttgtaagtgtagtgtagaatgttagatgtatgacctataattaattccattaatcctcaaat

SEQ ID NO: 627969 - DNA, 120 bp, Artificial Sequence
  ENSG00000179104_52 (sequence is synthesized)
aaaactgtggaatcattttcctttcaaacagcagtttaaattcaaactgtattaccattagcataagaatagcttttaacaataattaaaatcctaatggtatcatgaaataattttagt

SEQ ID NO: 627970 - DNA, 120 bp, Artificial Sequence
  ENSG00000179104_53 (sequence is synthesized)
ttagttatccttttgatgtaaatatttatccagtgggagaacctgatttgttaaacattttatatgaatttgatttgagaaatgcacagcaccatataaatatatcactgtaggaggcag

SEQ ID NO: 627971 - DNA, 120 bp, Artificial Sequence
  ENSG00000179104_54 (sequence is synthesized)
tgtagccataaggaaaacataccggattgagtgtcaagaactggtgtctgtatggtgctgtactgcacaagcttcatatgaccttaatttccgagcatcagtttcatcattggttaaaaa

SEQ ID NO: 627972 - DNA, 120 bp, Artificial Sequence
  ENSG00000179104_55 (sequence is synthesized)
aaaagagatgacagtatcagacttgcctcacggctgtctgccaattaagtgaattagaaaattattttcaattatatagtgctgggcaaggtgaatgattgctattactgttgtcatcac

SEQ ID NO: 627973 - DNA, 120 bp, Artificial Sequence
  ENSG00000179104_56 (sequence is synthesized)
tgttgtttgaagcactgtgctttgggaagcaaatctggttcacatcttttgaacatttaaatgaagagaatgtgtctcagtgctctagtgtgtattaaaacagccttttaacaagaatgt

SEQ ID NO: 627974 - DNA, 120 bp, Artificial Sequence
  ENSG00000179104_57 (sequence is synthesized)
tttgaaccctgcccaatacctgcacatgcttttgttaatacttcattacataaaatgaccaagaagctgtcataagaatttaaaggaacatttaccctcatctttaaaatgtatcttaaa

SEQ ID NO: 627975 - DNA, 120 bp, Artificial Sequence
  ENSG00000179104_58 (sequence is synthesized)
agagagataagattctaattacaaattttgaacagtttattttctctctatgaaaaatttccaagaatgatacaaaagcacttttatgtgaagaggatacactggaacattgaggtcttg

SEQ ID NO: 627976 - DNA, 120 bp, Artificial Sequence
  ENSG00000179104_59 (sequence is synthesized)
atctcattttagtaactctctgatgtgattaattcataagcactgagttgtagctcattccttctggcaaaattccagcacttgattgttaccttataaacttttaataagagtaatttt

SEQ ID NO: 627977 - DNA, 120 bp, Artificial Sequence
  ENSG00000179104_60 (sequence is synthesized)
aaaaactgcacttgactcttgctttatgaaaagctggaaatgtaaaaagttaaaaatgcttgacaatttttctgagctctagtcagaaacagtggctatgcccttttatagatgacagcc

SEQ ID NO: 627978 - DNA, 120 bp, Artificial Sequence
  ENSG00000179104_61 (sequence is synthesized)
caaaggcgagtttgtaaaacgataaataaattgtaaagatctatcgagtggcaacttggatggtttaatgcctatgggttagaaacccaggagttaatgtttaaagtgatttggataaat

SEQ ID NO: 627979 - DNA, 120 bp, Artificial Sequence
  ENSG00000179104_62 (sequence is synthesized)
gtgaacatgtttaaatctttagtattattcctttaagccaaatgtgaacgatagttattttgacaaagtttgggttacctcgatagcctgatttttacagaagtaccgtgtatctcaaat

SEQ ID NO: 627980 - DNA, 120 bp, Artificial Sequence
  ENSG00000179104_63 (sequence is synthesized)
tgttaactgatgaatgggtggtgctgctggattatttcctgtgttttgtgtttttcttagttttaatttctttgttattcaagttatactatcacctcgtccaaagttgggtctcaggat

SEQ ID NO: 627981 - DNA, 120 bp, Artificial Sequence
  ENSG00000179104_64 (sequence is synthesized)
tagattaataaactaaccaagtaaatttgggaagtatgactaacttacataaagaaaataattggggttatttttttgtattattattttaaaatatgtaatcagcacttttgagaagct

SEQ ID NO: 627982 - DNA, 120 bp, Artificial Sequence
  ENSG00000179104_65 (sequence is synthesized)
ctcattttgttgaatctctaggcagacctttgtggttaagcatcatcctggaaattttttctgacagtcatttgaccaggtctttctgtttatactcagtgtcaaaacaacaacaacaaa

SEQ ID NO: 627983 - DNA, 120 bp, Artificial Sequence
  ENSG00000179104_66 (sequence is synthesized)
gggacactatgaggtctggccaatgcctctctgtccttttccctcccccttgttctgatccagtctcagtggtttgtaacctacagcctcctttgagcctatgtcctttgaacaactaat

SEQ ID NO: 627984 - DNA, 120 bp, Artificial Sequence
  ENSG00000179104_67 (sequence is synthesized)
atgtatacacgttaaactattgtcctttgagaaactaatacatgatgacattggaatggttttttgatcaaatttgtttagaaaaagcttctgctaaataaaaatttaatagatttcttt

SEQ ID NO: 627985 - DNA, 120 bp, Artificial Sequence
  ENSG00000179111_0 (sequence is synthesized)
atggtcacccgggatcgagctgagaatagggacggccccaagatgctcaagccgcttgtggagaagcggcgccgggaccgcatcaaccgcagcctggaagagctgaggctgctgctgctg

SEQ ID NO: 627986 - DNA, 120 bp, Artificial Sequence
  ENSG00000179111_1 (sequence is synthesized)
gagcggacccgggaccagaacctccggaacccgaagctggagaaagcggagatattggagttcgccgtgggctacttgagggagcgaagccgggtggagcccccgggggttccccggtcc

SEQ ID NO: 627987 - DNA, 120 bp, Artificial Sequence
  ENSG00000179111_2 (sequence is synthesized)
gcgcacgacgccagcccggccgcccgcgcccagctcttctccgcgctgcacggctatctgcgccccaaaccgccccggcccaagccggtagatccgaggcctccagcgccgcgcccatcc

SEQ ID NO: 627988 - DNA, 120 bp, Artificial Sequence
  ENSG00000179111_3 (sequence is synthesized)
caagccggtagatccgaggcctccagcgccgcgcccatccctggaccccgccgcaccggcccttggccctgcgctgcaccagcgccccccagtgcaccagggccaccctagcccgcgctg

SEQ ID NO: 627989 - DNA, 120 bp, Artificial Sequence
  ENSG00000179111_4 (sequence is synthesized)
ggattctggcgcgccggcgcccctcaccggactgctgccgccgccaccgccgcctcacagacaagacggggcgcccaaggccccgctgcccccgccgcccgctttctggagaccttggcc

SEQ ID NO: 627990 - DNA, 120 bp, Artificial Sequence
  ENSG00000179111_5 (sequence is synthesized)
ggggggtggtgggggcggggtctaggggtggggtagagactccagcccgagggcagcagagggacccgggcgtccgggcgagcaggtgttggggagggcagtggggcgcgcgggctcagc

SEQ ID NO: 627991 - DNA, 120 bp, Artificial Sequence
  ENSG00000179111_6 (sequence is synthesized)
tggtctatattagagtatctatataaatatatatttccctggttcctgtcccttttccctgccccaacttctcccttgcgtctaggattgtactctctctgcccctcagcccagtcccag

SEQ ID NO: 627992 - DNA, 120 bp, Artificial Sequence
  ENSG00000179111_7 (sequence is synthesized)
tcccttcccgagtccctagtgcatggaataaagtggttattaaatccccgtgtgtccccgagccaggggcctgcctttatctcgacgtccacgcccactttcccttcccttctgtctccc

SEQ ID NO: 627993 - DNA, 120 bp, Artificial Sequence
  ENSG00000179111_8 (sequence is synthesized)
accctcagtcctgctctccatggcccaagccccggggcagacaggtaagtaaagaagagagcagagcgggaactgagatcgaaattgaaaccaggtggaaagagagagatagggtagggg

SEQ ID NO: 627994 - DNA, 120 bp, Artificial Sequence
  ENSG00000179111_9 (sequence is synthesized)
gagaagggatgggggcctttaagaaaaaaacggataaaaaggaaaaattgaaataaaatcgactctggtgggattcgaacccacaacctttgaattgctctattcgtcactagaagtcca

SEQ ID NO: 627995 - DNA, 120 bp, Artificial Sequence
  ENSG00000179111_10 (sequence is synthesized)
atgcgctatccattgcgccacagagccacccgacgaacggcggcgtcttgtagcttacgggtactagagtgggaatggggcagggttggggagcggggctaagggacttgggcgggacat

SEQ ID NO: 627996 - DNA, 120 bp, Artificial Sequence
  ENSG00000179111_11 (sequence is synthesized)
gccaggagggcgcggtttggatctcagaggccaagccaggtagaggtagcgggcgcaaagcatgttagccaggtgagagagagggcgcacatgggtcgaaaaaacagggagggagagcaa

SEQ ID NO: 627997 - DNA, 120 bp, Artificial Sequence
  ENSG00000179111_12 (sequence is synthesized)
ccgaaaatggctgagcgagcgagtgcagagctccggctgcccgcttggggggtgtttccggctcaggcgctccccactcccagatatagtcccacccaaataaactagttttgttgtaaa

SEQ ID NO: 627998 - DNA, 120 bp, Artificial Sequence
  ENSG00000179111_13 (sequence is synthesized)
gaggagcaatggtcacccgggatcgagctgagaatagggacggccccaagggccgccaggtctgagcccggcaccgtgcggcgcacgtgcgtgcgcgcagagagtccccaaagttctcca

SEQ ID NO: 627999 - DNA, 120 bp, Artificial Sequence
  ENSG00000179111_14 (sequence is synthesized)
ctgagacaaagagaaactgcaccagacggagacgtagagagaaaagaggaggagagacacagagaggggaggagggaggacgagactgagagaggagaatgcgaagatccggggagatgc

SEQ ID NO: 628000 - DNA, 120 bp, Artificial Sequence
  ENSG00000179115_0 (sequence is synthesized)
acactggaaggagtcatggcggatggtcaggtggcggaactgctgctccggcggctggaggcgtctgatggcggcctggacagcgccgagttggcggctgagctgggcatggagcaccag

SEQ ID NO: 628001 - DNA, 120 bp, Artificial Sequence
  ENSG00000179115_1 (sequence is synthesized)
gcggtggtgggcgccgtgaagagccttcaggcgctgggcgaggtcatcgaggctgaacttcggtccaccaagcactgggagcttactgcggagggcgaggagattgcccgggagggcagc

SEQ ID NO: 628002 - DNA, 120 bp, Artificial Sequence
  ENSG00000179115_2 (sequence is synthesized)
catgaggcccgtgtgtttcgaagcattcccccagagggcctggcccagagcgagcttatgcgactgcccagtggcaaagtgggcttcagcaaggccatgtccaacaagtggattcgggtg

SEQ ID NO: 628003 - DNA, 120 bp, Artificial Sequence
  ENSG00000179115_3 (sequence is synthesized)
gacaagagtgcggctgacgggccccgggtgttccgagtggtggacagcatggaggatgaggtgcagcggcggctccagctggtccgggggggacaggctgagaagctgggggagaaggag

SEQ ID NO: 628004 - DNA, 120 bp, Artificial Sequence
  ENSG00000179115_4 (sequence is synthesized)
aggagcgagctgaggaagaggaagctgttggctgaagtgactctgaagacctactgggtgagcaaaggcagtgcctttagtaccagcatctccaagcaagagacagagctgagcccagag

SEQ ID NO: 628005 - DNA, 120 bp, Artificial Sequence
  ENSG00000179115_5 (sequence is synthesized)
atgatctccagtggctcttggcgggaccggcccttcaagccctacaacttcttggcccacggtgtcctccccgacagcggccaccttcacccgctgctcaaggtccgctcccagttccga

SEQ ID NO: 628006 - DNA, 120 bp, Artificial Sequence
  ENSG00000179115_6 (sequence is synthesized)
cagatcttcctggagatggggttcaccgagatgccgactgataacttcattgagagctccttctggaactttgacgccctcttccagccccagcagcacccagcccgtgaccagcacgac

SEQ ID NO: 628007 - DNA, 120 bp, Artificial Sequence
  ENSG00000179115_7 (sequence is synthesized)
tcgagatccagcggaggccctgcagctcccaatggactatgtccagcgggtcaagcggacccactctcagggcggctacggctcacaggggtacaagtataactggaagctggacgaggc

SEQ ID NO: 628008 - DNA, 120 bp, Artificial Sequence
  ENSG00000179115_8 (sequence is synthesized)
ccggaaaaacctactgcgaacccacaccacatcagccagcgcccgtgcgctctaccgccttgcccagaagaagcccttcactccggtcaagtacttctccatcgaccgcgtattccggaa

SEQ ID NO: 628009 - DNA, 120 bp, Artificial Sequence
  ENSG00000179115_9 (sequence is synthesized)
tgagaccctggacgccacgcacctggctgagttccaccagatcgagggcgtggtggcggatcatggtctcaccttgggccacctcatgggcgttctgcgggagttcttcaccaagctggg

SEQ ID NO: 628010 - DNA, 120 bp, Artificial Sequence
  ENSG00000179115_10 (sequence is synthesized)
tatcacgcaactccgcttcaagccagcctacaacccatacacagagcccagcatggaggtgttcagctaccaccaaggcctgaagaagtgggtggaggtcggaaactcgggggtcttccg

SEQ ID NO: 628011 - DNA, 120 bp, Artificial Sequence
  ENSG00000179115_11 (sequence is synthesized)
tccagagatgctgctgcccatggggcttcccgagaacgtgtcggtcattgcctggggcctctccctggagcgcccaacgatgatcaaatatggcatcaacaatatccgggagctggtggg

SEQ ID NO: 628012 - DNA, 120 bp, Artificial Sequence
  ENSG00000179115_12 (sequence is synthesized)
ccacaaggtgaacctgcagatggtgtatgacagtcccctgtgccgcctggatgccgagccgaggccccctcccacacaggaggctgcgtgacatgggccactctaggacaggtcatcctc

SEQ ID NO: 628013 - DNA, 120 bp, Artificial Sequence
  ENSG00000179115_13 (sequence is synthesized)
cccgagtccctgctgctgcgctcctttgcatccctggccagtgaccttgtatttatgaggcctctgtgaggccagcccccaccttcctctttcccacctgtcccaggaccagaatcccag

SEQ ID NO: 628014 - DNA, 120 bp, Artificial Sequence
  ENSG00000179115_14 (sequence is synthesized)
ggacagaggactgggtagcaggttccttctgttgtcctgtgtggtgtgtctactgtgagggtgggccctgaggagacctgtgggccacctattgtctaataaagtgggcagttgccccca

SEQ ID NO: 628015 - DNA, 120 bp, Artificial Sequence
  ENSG00000179115_15 (sequence is synthesized)
agagggttctgtaacccagagacggggaagtccaaggtcacacagcccgctcgaagtgaggctagataaaactcaaaacagggcggtgcttctgaccttgagataatcaattttacccct

SEQ ID NO: 628016 - DNA, 120 bp, Artificial Sequence
  ENSG00000179115_16 (sequence is synthesized)
ctggtcaaccagacgccattgatggagccagggtggaggtgggaactgagtcccatgcaccttttgcggctccgtcgccacactcaagatgacgacacattgagccctgttctacagtta

SEQ ID NO: 628017 - DNA, 120 bp, Artificial Sequence
  ENSG00000179115_17 (sequence is synthesized)
catggtctcaccttgggccagcccccaccttcctctttcccacctgtcccaggaccagaatcccagggacagaggactgggtagcaggttccttctgttgtcctgtgtggtgtgtctact

SEQ ID NO: 628018 - DNA, 120 bp, Artificial Sequence
  ENSG00000179115_18 (sequence is synthesized)
ccagcgcccgtgcgctctaccgccttgcccagaaggtgcggttggcccaggcgggggccccagtggggagagggtgctgtcaaagggaccttctgacccatacctgggcctggctcggtt

SEQ ID NO: 628019 - DNA, 120 bp, Artificial Sequence
  ENSG00000179115_19 (sequence is synthesized)
ggcggtgcctggtgcttctgctgggtacaggcagggcagtcaggctgtgtctcccaccaggttcaccgagatgccgactgataacttcattgagagctccttctggaactttgacgccct

SEQ ID NO: 628020 - DNA, 120 bp, Artificial Sequence
  ENSG00000179115_20 (sequence is synthesized)
gcgttcctgcgggctggtcagggggcaggtggacgggcacatgggcccctggccctcatacccctcacactccttatcctggcaggtggacagcatggaggatgaggtgcagcggcggct

SEQ ID NO: 628021 - DNA, 120 bp, Artificial Sequence
  ENSG00000179115_21 (sequence is synthesized)
gcggggtgaatggggagtgagtgatgggatgaaggtggccctcgtgccccactcactgcagcctctcttttccagcgactgcccagtggcaaagtgggcttcagcaaggccatgtccaac

SEQ ID NO: 628022 - DNA, 120 bp, Artificial Sequence
  ENSG00000179119_0 (sequence is synthesized)
agttggctgtagctgggcgcctcggttaggtgcgctgtcagtcctttccgagtgcctggcccagtctctcccgcctcggcccaacatggacttcagagaaattctcatgatagcttccaa

SEQ ID NO: 628023 - DNA, 120 bp, Artificial Sequence
  ENSG00000179119_1 (sequence is synthesized)
gggacaaggtgtcaacaatgtgccgaaaaggtatagtttggcagtggggcctccaaaaaaagacccaaaagttaaaggtgtccaatcagcagctgtacaagcttttcttaaaaggaaaga

SEQ ID NO: 628024 - DNA, 120 bp, Artificial Sequence
  ENSG00000179119_2 (sequence is synthesized)
agaggagctgagacgaaaagccttagaggagaaaaggagaaaagaggaactagtgaaaaagcgaattgagctcaaacatgacaagaaagcaagagctatggccaagaggacaaaggataa

SEQ ID NO: 628025 - DNA, 120 bp, Artificial Sequence
  ENSG00000179119_3 (sequence is synthesized)
tttccatggttacaatgggattcctattgaggaaaagtcaaagaagaggcaggcaacagaaagccataccagccaaggaaccgaccgagagtatgaaatggaagaagagaatgaattcct

SEQ ID NO: 628026 - DNA, 120 bp, Artificial Sequence
  ENSG00000179119_4 (sequence is synthesized)
cgagtacaatcacgcagagtcagagcaggagtatgaggaagagcaagaacctcccaaagttgaaagcaaaccaaaggtcccccttaaaagtgccccaccacccatgaacttcactgattt

SEQ ID NO: 628027 - DNA, 120 bp, Artificial Sequence
  ENSG00000179119_5 (sequence is synthesized)
actcaggctggctgagaaaaagcagtttgaaccagtggaaatcaaggtagtgaagaaatcagaagagcgacctatgaccgcagaagaacttagggagcgagaattccttgaacgaaagca

SEQ ID NO: 628028 - DNA, 120 bp, Artificial Sequence
  ENSG00000179119_6 (sequence is synthesized)
taggagaaaaaaacttgagacagatggaaaactacctccaactgtgtccaaaaaggcaccctctcagaaagaaagtgtgggcacaaaacttagcaaaggttctggagacaggcatccttc

SEQ ID NO: 628029 - DNA, 120 bp, Artificial Sequence
  ENSG00000179119_7 (sequence is synthesized)
ttccaaaggaatgccccttcctcatgctgagaagaaatcaagacccagcatggccaatgagaaacacctcgctttgtcttcatccaaatccatgccaggagagaggatcaaggcaggatc

SEQ ID NO: 628030 - DNA, 120 bp, Artificial Sequence
  ENSG00000179119_8 (sequence is synthesized)
tggcaatagctcccaaccctcacttcgtgagggccacgacaaacctgtttttaatggagctggaaagcctcattccagcacctcttcaccaagtgtcccaaagacttctgctagcaggac

SEQ ID NO: 628031 - DNA, 120 bp, Artificial Sequence
  ENSG00000179119_9 (sequence is synthesized)
tcagaaatctgctgttgagcacaaagccaaaaaatctctgtcccatcctagccattccaggcctgggcccatggtcaccccacacaataaggctaagagtccaggtgtcaggcagccagg

SEQ ID NO: 628032 - DNA, 120 bp, Artificial Sequence
  ENSG00000179119_10 (sequence is synthesized)
cagcagctctagctcagcccctgggcagcccagcacaggggttgctcgacccacagttagttctggccctgtgcctaggcgccagaatggcagctccagctcaggacctgagcgatcaat

SEQ ID NO: 628033 - DNA, 120 bp, Artificial Sequence
  ENSG00000179119_11 (sequence is synthesized)
cagtgggtccaagaagccaaccaatgactcaaatccctctaggcggacagtcagtggtacatgtggccctggacaacctgcaagcagctcaggtggccctgggcgacccatcagtggttc

SEQ ID NO: 628034 - DNA, 120 bp, Artificial Sequence
  ENSG00000179119_12 (sequence is synthesized)
agttagttctgcaagacccttgggcagctctcgtggccctggccggcctgtgagcagtccacatgaacttcgacgaccagtgagtggcttgggccccccggggcggtctgtcagtggccc

SEQ ID NO: 628035 - DNA, 120 bp, Artificial Sequence
  ENSG00000179119_13 (sequence is synthesized)
tgggagatccataagtggctcaattccagctggacggactgtcagtaattcagtcccaggaagaccagtgagcagcttgggacctgggcaaacagttagtagctcaggtcccactataaa

SEQ ID NO: 628036 - DNA, 120 bp, Artificial Sequence
  ENSG00000179119_14 (sequence is synthesized)
gcctaagtgcactgttgtctccgaaacaatttcttccaagaatatcattagccggtccagcaatggacagatgaatggaatgaagcctcccctatctggctacagagctgcccaaggtcc

SEQ ID NO: 628037 - DNA, 120 bp, Artificial Sequence
  ENSG00000179119_15 (sequence is synthesized)
tcaaaggcttcccttccctactggttacaaaaggcagcgagaatatgaagaggaagatgacgatgatgatgaatacgactctgaaatggaagattttattgaagatgaaggagagcctca

SEQ ID NO: 628038 - DNA, 120 bp, Artificial Sequence
  ENSG00000179119_16 (sequence is synthesized)
ggaagaaatatccaagcacattagagaaatctttggttatgaccgaaaaaaatacaaagatgaaagtgattatgccttacgttacatggaaagtagttggaaagagcagcagaaggaaga

SEQ ID NO: 628039 - DNA, 120 bp, Artificial Sequence
  ENSG00000179119_17 (sequence is synthesized)
agcaaagagcttaagactgggtatgcaagaggacttagaggaaatgagacgtgaagaagaagaaatgcaacgtcgaagggccaagaagctgaagaggcgttagctgctgcttttattttt

SEQ ID NO: 628040 - DNA, 120 bp, Artificial Sequence
  ENSG00000179119_18 (sequence is synthesized)
gtgaaattctagagctgctctgctgcaaggatttcctgccttcagactgaagaagcccccttatcattttagatttatacttgggtactcaaggagaaggaatgcatactgtcatttgca

SEQ ID NO: 628041 - DNA, 120 bp, Artificial Sequence
  ENSG00000179119_19 (sequence is synthesized)
ggctgtcatttgagcataaaatattttcagatattttccagggtgaaatctgtaatgcagatgatataatgcccacttgtgctcttatgaagttaactgttcacagatgccagccttgat

SEQ ID NO: 628042 - DNA, 120 bp, Artificial Sequence
  ENSG00000179119_20 (sequence is synthesized)
cctgatgagctatgcactctaatgtggggccactcaccagtcagccaatcttttattgttcctttgctactttgaaaggaaaaaaaaggttgtctcttgatttctgtaattcttctgctg

SEQ ID NO: 628043 - DNA, 120 bp, Artificial Sequence
  ENSG00000179119_21 (sequence is synthesized)
atctgtgagtagggcactgccctgctcccaatcaaacttagtctttttatgagaaacctggaccttccatgaatgttgccagcaataaagtgacttgtcctaatctatggattgagaact

SEQ ID NO: 628044 - DNA, 120 bp, Artificial Sequence
  ENSG00000179119_22 (sequence is synthesized)
tgaaaatgtagagtagaatttataactatcatatggatgtcatcctgtgactttgaagtacaaagtagaataaattctgtattcatggattggatgctgagcattcttactcattaattt

SEQ ID NO: 628045 - DNA, 120 bp, Artificial Sequence
  ENSG00000179119_23 (sequence is synthesized)
tcagatttactgttatgttggctttagtgtaagacaaggtcactgtgctgattgatttttatctaaaaaaattcatttttatatcgaagaaaaaatattttattcaaacattagatttga

SEQ ID NO: 628046 - DNA, 120 bp, Artificial Sequence
  ENSG00000179119_24 (sequence is synthesized)
aagagtaatagtttataaaataaggaagtaacatgtgaggctctcccctcctcccctcccccatcataaagatattttgaaatcccaaggtgccctcatacctcttgacattaatgactt

SEQ ID NO: 628047 - DNA, 120 bp, Artificial Sequence
  ENSG00000179119_25 (sequence is synthesized)
cattttttagcttgaatttgttagcaaatattaatggcagaaaaccaaaaactaaatttatggtatcgagagcaccaccttctctttttgcccatattgcactttgatttcaaactatgc

SEQ ID NO: 628048 - DNA, 120 bp, Artificial Sequence
  ENSG00000179119_26 (sequence is synthesized)
actgtgaagagatttttttccccaggtaggaagggatgttccctgttatcgttattttactgagctgtggaaactcatttttaccctttttaaagtcataaatatggacttaatagccct

SEQ ID NO: 628049 - DNA, 120 bp, Artificial Sequence
  ENSG00000179119_27 (sequence is synthesized)
taaccttcaagtccaagcagttccaatcaggctgacttaggatcatgctggaaggaagccaagtctcaagaactgtcagcaacagaaaatgagatatgatgctagagagcatttgtcctt

SEQ ID NO: 628050 - DNA, 120 bp, Artificial Sequence
  ENSG00000179119_28 (sequence is synthesized)
gactgtaagtacagaggcttaggggaagtgagacataagcttgtaggaataataaacgttctacaataaacgttttggctatcttaagccattgtatgggggggattaggaagtaggagg

SEQ ID NO: 628051 - DNA, 120 bp, Artificial Sequence
  ENSG00000179119_29 (sequence is synthesized)
gattgtcctacaacaggcccttatacttcaacagcccaaatattttggtttattcctttttatccataaagtctttattcttcaagtttgggtattatagattaccattgttagcctccc

SEQ ID NO: 628052 - DNA, 120 bp, Artificial Sequence
  ENSG00000179119_30 (sequence is synthesized)
ttaatgggaccatatgagccaggcttttaagacggactcattttgaattgagtttcaaactttgaaagtgcaaggatttaatttttaagttgaatcccatgaaaggtgtcatcatcacta

SEQ ID NO: 628053 - DNA, 120 bp, Artificial Sequence
  ENSG00000179119_31 (sequence is synthesized)
ggaataacaccctttgtaactacatatagaactgttacaatggtagcagaaaatcctattgatttcatctcacccatttcagataccttcagtgaaattaagggtagtgtgatgtcccat

SEQ ID NO: 628054 - DNA, 120 bp, Artificial Sequence
  ENSG00000179119_32 (sequence is synthesized)
gtaataaaacaggcttagaacatcaattcctctgctgccatttatgtgcttttattcccccttcaaaaattttttattggatatatatatttttcagtattcagactctgaaatctgtca

SEQ ID NO: 628055 - DNA, 120 bp, Artificial Sequence
  ENSG00000179119_33 (sequence is synthesized)
ttacaatcaagtgcttgtcacagctgaaagatttctggtggcttaaagtttactagcagtaaatttatgatatggtacagttctttgtacagaaaggcaccattatgttagaataaattt

SEQ ID NO: 628056 - DNA, 120 bp, Artificial Sequence
  ENSG00000179119_34 (sequence is synthesized)
ccagaacttagtgggaagaatcaggttttaaccttgtgtgtctgttacttctgagtgcatttctataatataaatgttgatttgcgtcaacattataaaagagcacttctgtggctcatt

SEQ ID NO: 628057 - DNA, 120 bp, Artificial Sequence
  ENSG00000179119_35 (sequence is synthesized)
taaaagaaaaaaaaggttaagtcttttaaattttggccttgtttccaaatcctgtcttccatgttgtttttctgcacttcctgaccactcttataaaaagctcacaaacctttgaagaaa

SEQ ID NO: 628058 - DNA, 120 bp, Artificial Sequence
  ENSG00000179119_36 (sequence is synthesized)
ctggagtaggctgttatttcattaaggtttacaaattaaatgcttgatttttaatgtattctctactgttttgatttttggattttcttaattcaacatttgaagatgtgccttttgggt

SEQ ID NO: 628059 - DNA, 120 bp, Artificial Sequence
  ENSG00000179119_37 (sequence is synthesized)
aatgttaatcacgaatgtagtaatatttcatgattgtaataatgttacatgatcatgggtgtggcattctctaacaaatgatgtgaaaggaaagtagttttcataaaactcatggctctg

SEQ ID NO: 628060 - DNA, 120 bp, Artificial Sequence
  ENSG00000179119_38 (sequence is synthesized)
attgcacagtcccacttgcttttgatattgctatgtcaaagcaaagggcacttcttttaaggctactttcagaactttgtattttcgctaaactataaatgcagttgtgtccagttggag

SEQ ID NO: 628061 - DNA, 120 bp, Artificial Sequence
  ENSG00000179119_39 (sequence is synthesized)
ttgtgtccagttggaggccagggtaccacatgtcacaggcggccttacatgtgtgccgtgaaaaggttcaaagaccgttaacaaaaaagtaagtctggccgggcatggtggctcaagcct

SEQ ID NO: 628062 - DNA, 65 bp, Artificial Sequence
  ENSG00000179119_40 (sequence is synthesized)
gcaggagaatcgctagaacctgggaggcggaggttgcagtcagccaagatagaatgtgggaactc

SEQ ID NO: 628063 - DNA, 120 bp, Artificial Sequence
  ENSG00000179119_41 (sequence is synthesized)
tgtcaaaaaaaaaagaatgtgggaactcaaattttcatttttaatgtaatccccaagattttctccaagaaataaattgttgttttgtattttgtaacttaaaagcagctattggtaaat

SEQ ID NO: 628064 - DNA, 120 bp, Artificial Sequence
  ENSG00000179119_42 (sequence is synthesized)
ttctgagatatagcaggagaccaaaacatgtttggaaagagaataaatatatgaagagagactggttgttttattttcaatgtattgaatatattagactactatttattttctgagtgg

SEQ ID NO: 628065 - DNA, 120 bp, Artificial Sequence
  ENSG00000179119_43 (sequence is synthesized)
atgtgattaaatattcagacgtttagtgtatgattaagagtgagatagagatttctttggagtaattaaatccatcctgtcttttacacaatggacaaatcaagttaaaaaaatttttag

SEQ ID NO: 628066 - DNA, 120 bp, Artificial Sequence
  ENSG00000179119_44 (sequence is synthesized)
atagcttagcttgttttctggtgctgttgacctgcaagagaatatacttttgcatatacaggtgaaagttttgcaatttatgtatacaagaaattgtaggcattaaaaatattttattga

SEQ ID NO: 628067 - DNA, 120 bp, Artificial Sequence
  ENSG00000179119_45 (sequence is synthesized)
aagtagcccaaaccccggctcgagatccgtctgttcagctgttgtggcgccgccgttttggatctaagcgcctacccgtgacacccagagaacccaggcctgaaaaggtatagtttggca

SEQ ID NO: 628068 - DNA, 120 bp, Artificial Sequence
  ENSG00000179119_46 (sequence is synthesized)
gacatcctttttttattttgaataattcatgtcatggggtaataaactaatagtggaggcactgaatacaattcttaattaggaacccttgggtgattgttatttaaataaacgtactct

SEQ ID NO: 628069 - DNA, 120 bp, Artificial Sequence
  ENSG00000179133_0 (sequence is synthesized)
aggcagcctgctctcctcttatgatggccttggtccgggatcgcagggctcattatgtcatgagcatagttattagatgggttcactgcttttcctcctccttgagggggacctttggca

SEQ ID NO: 628070 - DNA, 120 bp, Artificial Sequence
  ENSG00000179133_1 (sequence is synthesized)
cacgctgggaggccatgaaagccaaggccaccgagctgcgggtctgctgcgcgcgtaggaagcgagaagctcgggaattcaagcccccgcaaatgcgcgggtccacgagacttaacattt

SEQ ID NO: 628071 - DNA, 120 bp, Artificial Sequence
  ENSG00000179133_2 (sequence is synthesized)
cagatgatttaaagattggctttttcagcacagaccatgccactcaaactgattccagtgaaatactgtcagtaaaagaattgagttcatctacgcaaaagttagcacagatgatgaaat

SEQ ID NO: 628072 - DNA, 120 bp, Artificial Sequence
  ENSG00000179133_3 (sequence is synthesized)
ccctccaggtagattttgggttcctcaaacaattgcttcagttgaagtttgaggaccgactgaaagaggaatctttgagtctcttcaccattctgcatgacaggatcctagaaattgaaa

SEQ ID NO: 628073 - DNA, 120 bp, Artificial Sequence
  ENSG00000179133_4 (sequence is synthesized)
agcattatcaacagaatgaggataagatgagaaaatccttcaatcagcagttagctgatgccatagctgttatcaaaggaatgtaccagcaattctttgaggtagaagaagagaatgttt

SEQ ID NO: 628074 - DNA, 120 bp, Artificial Sequence
  ENSG00000179133_5 (sequence is synthesized)
ctttgcaagatgcgagtactgtcaaaacaaatattttgttaagaaaactgaaagagaaagaagaagttattaaagaattaaaagaagaactagaccaatataaagattttggatttcaca

SEQ ID NO: 628075 - DNA, 120 bp, Artificial Sequence
  ENSG00000179133_6 (sequence is synthesized)
aaatggaatcttttgccaaagaaaccagctctccaaaatcaaacctagaaaaggaaaatttggagtacaaagtggaaaatgagaggctgcttcagatcatttcagagcttgaagaagaaa

SEQ ID NO: 628076 - DNA, 120 bp, Artificial Sequence
  ENSG00000179133_7 (sequence is synthesized)
tccagatcaatctaaaagaaaattcaggattagaagatgaacttataagtatgaaagagatggcagaaaaggatcacaaaactattcaaaagttaatggatagtagagacagattaagag

SEQ ID NO: 628077 - DNA, 120 bp, Artificial Sequence
  ENSG00000179133_8 (sequence is synthesized)
aagagcttcattatgaaaaatcattagttcaggatgtgattaataaacagaaagaggacaaggaaatgagaaaaaagtatggcagcttaagtgtaaaggttgcaagatcagccaagggga

SEQ ID NO: 628078 - DNA, 120 bp, Artificial Sequence
  ENSG00000179133_9 (sequence is synthesized)
gagaagcctctttgtccccatggcccaagtctccacccagcaccacagctttgaggccacattctgcgaccatgagtgtatcatctgctggggcccagaaagctaaaatgccaaagaagg

SEQ ID NO: 628079 - DNA, 120 bp, Artificial Sequence
  ENSG00000179133_10 (sequence is synthesized)
ctttaaaggaagaccaagctgtggttgaagacaaacatggtttggagtctcaaatagaagcattaaaggcaaatttagagaatgagaaaaagaaggtggaaaggtttaggaaggaagctg

SEQ ID NO: 628080 - DNA, 120 bp, Artificial Sequence
  ENSG00000179133_11 (sequence is synthesized)
atcgactaaataaaagctgggaaaagagattctttattctcaggaacagctttcatgtccttaagaatgagatgtttacaaggcacacactgtttcgtcagtttgcagtgcttgctgaca

SEQ ID NO: 628081 - DNA, 120 bp, Artificial Sequence
  ENSG00000179133_12 (sequence is synthesized)
catccttcaattatattaaagtaaaacccttattagtgcagtctagaacgaccatgacagctatatcctcttcaagtcattgtacatcttcaatagacggtaagcatgtggatgtagtca

SEQ ID NO: 628082 - DNA, 120 bp, Artificial Sequence
  ENSG00000179133_13 (sequence is synthesized)
gtgatcaggcagcccttcaactttcaccaaaagggaagttgtcggaatccccaaaagaagagtccttggaggagccctccatgcgccagagcagccccgcagagactgttgattaaccca

SEQ ID NO: 628083 - DNA, 120 bp, Artificial Sequence
  ENSG00000179133_14 (sequence is synthesized)
gcagaagcctgggctgcgcagacggggcctcagaaagagtggcctcgccgtcctggtgtaaggtgcctccctcggaaaggatactatctccaaggattttctaaactaattgtttaatct

SEQ ID NO: 628084 - DNA, 120 bp, Artificial Sequence
  ENSG00000179133_15 (sequence is synthesized)
ctccagattatgtatattaaccagcactgcgctcgaatagacctcaatgcgcgccttgtgcgcgctcctttccacgcctttaaggaaagccctggctggtgctgggtgagcggggcgcac

SEQ ID NO: 628085 - DNA, 120 bp, Artificial Sequence
  ENSG00000179133_16 (sequence is synthesized)
aagtttgactccctctctaatccagtctttctataccaaaagcatcaacctgttttgctgtctcctcacccaataactagtccccatgaaggtaggtcatgaagactacagggagatcgt

SEQ ID NO: 628086 - DNA, 120 bp, Artificial Sequence
  ENSG00000179133_17 (sequence is synthesized)
acatttcctcaagcaagattcattcttatcttaccccggcacagggcacctagccgcatcttaaaggctgtcagaaattctttagtaagtagggaaactctttggagttttgcttcctgg

SEQ ID NO: 628087 - DNA, 120 bp, Artificial Sequence
  ENSG00000179133_18 (sequence is synthesized)
taaggatgcaaaccaagattctgctggaatgccagacaccgtttaccaaaaggcgggtttgcttttcttccatgcgtaatgtccaacttggttctttctattcccctaactacaagtaag

SEQ ID NO: 628088 - DNA, 120 bp, Artificial Sequence
  ENSG00000179133_19 (sequence is synthesized)
gccttgttaagagcctgtatctgaatcgtaggctctggattacagaattctacagttatttattaagtctcaggaaatatatttgtggtagttgtcacataaagctgatatactttagtt

SEQ ID NO: 628089 - DNA, 120 bp, Artificial Sequence
  ENSG00000179133_20 (sequence is synthesized)
caaaagaaagctgcagaggtgatttatttgtgcgtaaaaggaacaagatttaattggagagagacgtgttcttttcaacgcaagtacatgggatggtatagcgctgtggagcgttattcg

SEQ ID NO: 628090 - DNA, 120 bp, Artificial Sequence
  ENSG00000179133_21 (sequence is synthesized)
agcttcatctactatgcactatatgccgctgtctccaaaggagtgttgccctagaaacttgttttaaatctgctgctatatatcaacaccttgttttagcagtccttggctgaattacag

SEQ ID NO: 628091 - DNA, 120 bp, Artificial Sequence
  ENSG00000179133_22 (sequence is synthesized)
ttacacagtttggcgcttctttcaaatttcctcccatcagtttggctaaagaaaggaatttttctcctttagaaatgaattggcttaattagtaagtagattaatggcaattgctggtga

SEQ ID NO: 628092 - DNA, 120 bp, Artificial Sequence
  ENSG00000179133_23 (sequence is synthesized)
gttggtttccagcagagtttcaccagagagggttaatcggagtcaggtctggaatctttcccagaactggctgccagccatttccaccaaccaatcaaccctacaagaaacagaggaaat

SEQ ID NO: 628093 - DNA, 120 bp, Artificial Sequence
  ENSG00000179133_24 (sequence is synthesized)
gaaataaaatttgtattctctgtgccatcgtcctggacagaaattccttggaagcagcctcctggttgggtgtgatatcaaactgcttcatttcagaactttaatagaaacttgaacctt

SEQ ID NO: 628094 - DNA, 120 bp, Artificial Sequence
  ENSG00000179133_25 (sequence is synthesized)
caagatttatctgggtaccaaagcaaagtttcaaatggcacaataaaggtctccacagaaccctggatgtattggaaatttctgaggctctcagccaatttcaggttgggagaaattgca

SEQ ID NO: 628095 - DNA, 120 bp, Artificial Sequence
  ENSG00000179133_26 (sequence is synthesized)
aaccacccaggtcctgccctatatctgttgtccatcagaagtccttcaaaagttttgctgtatgttttgcagcctttttacttttttacttatttttttcccatagtgatgaaaatgcat

SEQ ID NO: 628096 - DNA, 120 bp, Artificial Sequence
  ENSG00000179133_27 (sequence is synthesized)
tcatagtttaacttgcagctgcattagtcttacaaaaaaaaaaaaaaaatccctgctgagaaatgcatataataggaaaaacagatcggctggacagcagtgtaattaatgccagaaagg

SEQ ID NO: 628097 - DNA, 120 bp, Artificial Sequence
  ENSG00000179133_28 (sequence is synthesized)
gctgaggccggtttcatagtttgtcttttgaggatatcaagacgagacctggtgaaaaatgacgcatgctttagcatttcagaaagctggcaactggcagcgcttttccttttttctttg

SEQ ID NO: 628098 - DNA, 120 bp, Artificial Sequence
  ENSG00000179133_29 (sequence is synthesized)
actttctgccgcggaacaaagaggtccgcagaactagctaggttgtaatgagttctatgtccctagcacattaagtgcatcatggaaacatattgtatcgaaatagtttggaggagaata

SEQ ID NO: 628099 - DNA, 120 bp, Artificial Sequence
  ENSG00000179133_30 (sequence is synthesized)
ccggggatgaaagagaatgggtgctttgatcagctccctggggtcctgagcacgcacagactgacttgcaaggagttattcagctccagctagacacacttacaacaccattgaaagaaa

SEQ ID NO: 628100 - DNA, 120 bp, Artificial Sequence
  ENSG00000179133_31 (sequence is synthesized)
tttgcatatctgtaatttatcacattggtccagaacattattgcaaggtaaataaaagttagttgaataaaaaaaatcaatcatcgcagatatagagaaaactgtgaagccagtctttcc

SEQ ID NO: 628101 - DNA, 120 bp, Artificial Sequence
  ENSG00000179133_32 (sequence is synthesized)
tactggttagacaaactactgatgggagcaaaaatggaatgactgagaaggcagaaagaagaacctaaactcctgtcaaggaggaagtttaagggctttggaaaatgtggatcctgagaa

SEQ ID NO: 628102 - DNA, 120 bp, Artificial Sequence
  ENSG00000179133_33 (sequence is synthesized)
cgaattcattgtcatctcatgtctgctctgagccaccggatgtcccaggcccaaccatggtccagagctggagaggattttattcttaagttctaagaacaagaagctgattgtttgatt

SEQ ID NO: 628103 - DNA, 120 bp, Artificial Sequence
  ENSG00000179133_34 (sequence is synthesized)
tggaaaggctaacagatgctgggacccaggaggaataaaagtctattgaatagcaatagcaggtatcagatacttcatcgatggcatctcttctcattctcacagttcagtttgcagatg

SEQ ID NO: 628104 - DNA, 120 bp, Artificial Sequence
  ENSG00000179133_35 (sequence is synthesized)
aagaggcagagacagggtggttaagtaacttcctcatgggcaaacgtagtagatggtaaagatggtacatgaaccaaggttcacctgaatctaaagtccacttacagagggggagcttta

SEQ ID NO: 628105 - DNA, 120 bp, Artificial Sequence
  ENSG00000179133_36 (sequence is synthesized)
cagagggggagctttatcctctacagtaagaattaaaggttgtagtgaatatataatatacatatgcatatagaaaatgtacagattataatgtatagattatgttatcataatatatta

SEQ ID NO: 628106 - DNA, 120 bp, Artificial Sequence
  ENSG00000179133_37 (sequence is synthesized)
aatacattaataattattaatagattaatacacatagagggctaccctctttgggtcctctccctttgtatgggagctctgtttccactctatttcactctattaaatcttgtaactgca

SEQ ID NO: 628107 - DNA, 120 bp, Artificial Sequence
  ENSG00000179133_38 (sequence is synthesized)
tcaaaggaatgtaccagccactgtgaaaccaaacattgagatactctggatgtgctgaaggtagcaaggtggaaagataagaagcagaggggtccttggtaatgtcatggagccatgaaa

SEQ ID NO: 628108 - DNA, 120 bp, Artificial Sequence
  ENSG00000179133_39 (sequence is synthesized)
gtaaccctggacttgccctgcctctggcctcttattcatgagataacaacccctcagtgtctaagccactgttagttggcttttcagttacttgcagctgaaaacatcccaggacagatt

SEQ ID NO: 628109 - DNA, 120 bp, Artificial Sequence
  ENSG00000179133_40 (sequence is synthesized)
gctctgctaacgatctctgtgactctgtgccaaactgtgtttccaaaggcatctgtgacactgtctcccacttacctgctcttgtgcaatgtttctctcccatcaagaggtggaatctga

SEQ ID NO: 628110 - DNA, 120 bp, Artificial Sequence
  ENSG00000179133_41 (sequence is synthesized)
ttcccctcccttgaatcagggctgcccttagtgacttgctgataaacacagaatgtggaggaagtgaagctgcgtgacttttaagttaacgtcaaaagaagtcttgcaagttcatcctta

SEQ ID NO: 628111 - DNA, 120 bp, Artificial Sequence
  ENSG00000179133_42 (sequence is synthesized)
ttcactctgaatgtttcccctctacattgtccctccctgaattgagctaccatgctgacaaaagcccatgccatatggaagatctacatgtaggtactactgggtctccaggctcatctg

SEQ ID NO: 628112 - DNA, 120 bp, Artificial Sequence
  ENSG00000179133_43 (sequence is synthesized)
agcccagcctttgagtcaccccagcccaggagtcaaaaatatgagtggagaagcgtccagatgactccagctgccagccatgtagactctttttatgtgaggtcacaggtcttacagagg

SEQ ID NO: 628113 - DNA, 83 bp, Artificial Sequence
  ENSG00000179133_44 (sequence is synthesized)
gagacagggatctcactgtctcccaggctggaatgtagggtgtgctcatagctcactgtagccttaaacttctggactcaagt

SEQ ID NO: 628114 - DNA, 80 bp, Artificial Sequence
  ENSG00000179133_45 (sequence is synthesized)
acagggatctcactgtctcccaggctggaatgtagggtgtgctcatagctcactgtagccttaaacttctggactcaagt

SEQ ID NO: 628115 - DNA, 120 bp, Artificial Sequence
  ENSG00000179133_46 (sequence is synthesized)
gctggtcttgaactcctgtcctcaagtaatcctcctgccttagcattccagagtgctaagattacaaccatgagccactgtgctggcctaattaatatttaatggaagaagacggaagga

SEQ ID NO: 628116 - DNA, 120 bp, Artificial Sequence
  ENSG00000179133_47 (sequence is synthesized)
taattaatatttaatggaagaagacggaaggaagaaagagaaagagggaaggagggaaaatgagcattatctgtagcagttttatatatattgattttgtaaccaaaaatcttgctaaat

SEQ ID NO: 628117 - DNA, 120 bp, Artificial Sequence
  ENSG00000179133_48 (sequence is synthesized)
tcttgtgtttattttaataagttttctatagactctttggggctttctatgtaaacagttatgcaactgagaataaatattttttgtcacttcatttttcatccataaaccatgtaatca

SEQ ID NO: 628118 - DNA, 120 bp, Artificial Sequence
  ENSG00000179133_49 (sequence is synthesized)
tttcagcagtggcctgtctggagcagctgctgcaaagatgccggctgcagcaggggagatatggccagggctgtacactctactaagctggcaggagccaggaacaagcaggagtggtgc

SEQ ID NO: 628119 - DNA, 120 bp, Artificial Sequence
  ENSG00000179133_50 (sequence is synthesized)
tcaccttctgagttggtgatgggggagctccacgctcctagaggcagctgcagctgcccagccatggctgcagacccaggcatccctgtgctcttgggggcctaggaagcccccctgctc

SEQ ID NO: 628120 - DNA, 120 bp, Artificial Sequence
  ENSG00000179133_51 (sequence is synthesized)
ccacaggctcggaagtgcctactcctgctgcctggcctctcctcactcctggcacccactctgattttgaagcaaagttgtggccaagcccaggcgctgttatgacccagccaggtgtgt

SEQ ID NO: 628121 - DNA, 120 bp, Artificial Sequence
  ENSG00000179133_52 (sequence is synthesized)
gtgtgcttgggatggtgctgacacaccagccctctgctgccttggccccctccagagtttgggtgccaacaagcatgggagggaggccaagggggcactgagggtggcacagcacaggcc

SEQ ID NO: 628122 - DNA, 120 bp, Artificial Sequence
  ENSG00000179133_53 (sequence is synthesized)
tgcaggtgtcccttggcatgaacagcctgggcaccatgaacagcagcaggaagcgacaggctcccgagtggaaagggatgtgtcgctggtgaagctccaccttcaacccaggggtggcct

SEQ ID NO: 628123 - DNA, 120 bp, Artificial Sequence
  ENSG00000179133_54 (sequence is synthesized)
gaagcctgggggccaggctgccagttccacagactggagtgagaacttatggtgcttttttcaggcccacctatggctgcccattgaccaatcagcatgagcttcctcccctctgaagcc

SEQ ID NO: 628124 - DNA, 120 bp, Artificial Sequence
  ENSG00000179133_55 (sequence is synthesized)
cataaaaaccctagactcagccagactctggcagaagtggggatgacctgcctgcagagaggagttattcgctgtggggtcttctctcagctaagagctgaacagatatcaggatgacct

SEQ ID NO: 628125 - DNA, 120 bp, Artificial Sequence
  ENSG00000179134_0 (sequence is synthesized)
ggtcggtgcgggaggagggaggggagcttgcgggcccgagagggggcgacggcggcggcggtggcctgaggaggcccgagcggcggcggtggcggcgaaggccgaggcgtctaggtgttt

SEQ ID NO: 628126 - DNA, 120 bp, Artificial Sequence
  ENSG00000179134_1 (sequence is synthesized)
ttggaagagctgcagcctttgaagaaacatctcttgatgatgatatcatagactccttcctactgggcagatgaggcagaatggggcacagtagttccagcaaaaatccagagaggacta

SEQ ID NO: 628127 - DNA, 120 bp, Artificial Sequence
  ENSG00000179134_2 (sequence is synthesized)
tccttggccaggctttaccccatgtccacttctggagccaagaaagacagttccttctccaaggggaacccagggtgttgatactagaagatggaaatggatacagtaagatgctgccac

SEQ ID NO: 628128 - DNA, 120 bp, Artificial Sequence
  ENSG00000179134_3 (sequence is synthesized)
agtgagatgcctcacccaggtctccctctgtcacttcagccaagcacatgggatagaaagtagcaggcggcctctggccctttaatggaagagggccatccagtcctctccagttaacat

SEQ ID NO: 628129 - DNA, 120 bp, Artificial Sequence
  ENSG00000179134_4 (sequence is synthesized)
ctagaccgaacacaaagcatccttctctcatccagaagacataggaaccctaccttcagggatgatttttttttaacagtgaaatcttaaaagtaactgtttcactaaagcctccagtat

SEQ ID NO: 628130 - DNA, 120 bp, Artificial Sequence
  ENSG00000179134_5 (sequence is synthesized)
ttactgaagactgtcagaatcatcctccatcactagatcttctccaccagtcatgttccctgagcagtggggtggcttgaaggtataaaccagagaggcccaagggagggatagttagca

SEQ ID NO: 628131 - DNA, 120 bp, Artificial Sequence
  ENSG00000179134_6 (sequence is synthesized)
gacttctggtctttttctagtttgtgctcttctgttccaaggaccacaggattcttctcatcgcagtgctccaggcagccactaccaatcgattggagttagcctgtgaggaaactggag

SEQ ID NO: 628132 - DNA, 120 bp, Artificial Sequence
  ENSG00000179134_7 (sequence is synthesized)
aggcgtggctggaccaagacctccccccatgtgagcaggcttcctcctcccccaacaaccgttgccaccacgcccagaaacgtccttaagccctggccctcaggggaaaggtaacaggag

SEQ ID NO: 628133 - DNA, 120 bp, Artificial Sequence
  ENSG00000179134_8 (sequence is synthesized)
gccagagccgggaccatgtgacggcgctggccctcgccaccgccgtcccccgaccctggccccaggcccggcaccatgatgttccgagaccaggtgggcatcctcgctggctggttcaaa

SEQ ID NO: 628134 - DNA, 120 bp, Artificial Sequence
  ENSG00000179134_9 (sequence is synthesized)
ggctggaatgagtgtgagcagacagtggccctcctgtcacttctgaaacgggtcacccgtacccaggcccgcttcctgcagctctgcctggagcactcactggcggactgcaatgacatc

SEQ ID NO: 628135 - DNA, 120 bp, Artificial Sequence
  ENSG00000179134_10 (sequence is synthesized)
cacctgctggagtcggaggccaacagtgctgccatcgtcagccagtggcagcaggagtccaaagagaaggtggtgtccctcctgctgtcccaccttcccctgcttcagccaggcaacaca

SEQ ID NO: 628136 - DNA, 120 bp, Artificial Sequence
  ENSG00000179134_11 (sequence is synthesized)
gaggccaagtcggagtacatgaggctactgcagaaagtgctggcctactcaatcgagagcaatgctttcatcgaggagagtcgccagctgctttcctatgccctcatccacccagccacc

SEQ ID NO: 628137 - DNA, 120 bp, Artificial Sequence
  ENSG00000179134_12 (sequence is synthesized)
acactggaggaccgcaacgcactggccctctggctgagccacctggaagagcggttggctagtggcttccgctcccggccagagccctcctaccattcacgtcaaggctcagatgagtgg

SEQ ID NO: 628138 - DNA, 120 bp, Artificial Sequence
  ENSG00000179134_13 (sequence is synthesized)
gggggccctgcagagctaggccctggggaggcagggccaggctggcaggacaagccaccccgggaaaatggacacgtgcccttccacccatccagctcagtgccgccagccatcaacagt

SEQ ID NO: 628139 - DNA, 120 bp, Artificial Sequence
  ENSG00000179134_14 (sequence is synthesized)
attgggagcaatgcaaacacaggtctcccctgccaaatccaccctagcccactgaagcgctccatgtcactcatccctacaagcccccaggtccctggtgagtggccgagtccagaggag

SEQ ID NO: 628140 - DNA, 120 bp, Artificial Sequence
  ENSG00000179134_15 (sequence is synthesized)
cttggggcccgggctgcttttaccacgcccgatcacgcacctctctcgccccagagcagcgtggcctcctctggcagtgagcagacagaggagcagggctccagccggaacaccttccag

SEQ ID NO: 628141 - DNA, 120 bp, Artificial Sequence
  ENSG00000179134_16 (sequence is synthesized)
gaggatggcagtggcatgaaagatgtgccctcatggctcaagagcctccgtttgcacaagtatgcagccctcttctcacagatgagctacgaggagatgatgacactgactgagcagcac

SEQ ID NO: 628142 - DNA, 120 bp, Artificial Sequence
  ENSG00000179134_17 (sequence is synthesized)
ctggagtctcagaacgtcaccaaaggtgcccgccacaagatagccctgagcatccagaagctgcgtgagagacagagcgtcctcaagtccctagagaaggatgtgctggaaggcgggaac

SEQ ID NO: 628143 - DNA, 120 bp, Artificial Sequence
  ENSG00000179134_18 (sequence is synthesized)
ctgccgccaccaccacccctactgccaaggatggggccccgggggaaccaccgctgccaggtgctgagcctcccctagcccaccccggcacagacaaaggcaccgaggccaaggaccctc

SEQ ID NO: 628144 - DNA, 120 bp, Artificial Sequence
  ENSG00000179134_19 (sequence is synthesized)
cagctgtggagaactacccacctccaccagctccagctcccactgatggcagtgagcctgccccggctcccgtcgccgacggagacatccccagccagtttacacgggtgatgggcaaag

SEQ ID NO: 628145 - DNA, 120 bp, Artificial Sequence
  ENSG00000179134_20 (sequence is synthesized)
tgtgcacccaactgctggtgtcccgaccagacgaggagaacatcaccagttacctccagctcatcgaaaagtgcctgactcatgaggctttcacggagacgcagaagaaacggctgctat

SEQ ID NO: 628146 - DNA, 120 bp, Artificial Sequence
  ENSG00000179134_21 (sequence is synthesized)
cctggaaacagcaagtgctgaagctcctccggacattcccgcgcaaagccgcactagagatgcagaactaccggcagcagaaaggctgggcattcggctccaactcgctccccatagctg

SEQ ID NO: 628147 - DNA, 120 bp, Artificial Sequence
  ENSG00000179134_22 (sequence is synthesized)
gctctgtggggatgggagtggcccggcgtacccagcggcagttcccaatgcctccccgggccctcccacccggccggatgggcctcctgagcccctcgggcattgggggtgtctcccctc

SEQ ID NO: 628148 - DNA, 120 bp, Artificial Sequence
  ENSG00000179134_23 (sequence is synthesized)
gacatgccctcaccagccccagccttggaggccagggccgacagaacctgtggtttgccaaccctggaggcagcaacagcatgcccagtcagagccgcagctctgtgcagcgcacccact

SEQ ID NO: 628149 - DNA, 120 bp, Artificial Sequence
  ENSG00000179134_24 (sequence is synthesized)
cgctcccggtccactcgtcaccccaggccattctcatgttccctccagactgcccggttcctgggcctgacctggagatcaatcccactctggagtctctgtgtctgagcatgacagaac

SEQ ID NO: 628150 - DNA, 120 bp, Artificial Sequence
  ENSG00000179134_25 (sequence is synthesized)
acgccttgggtgatgggacagacaaaacctccaccatctgacgggacccacagcccagcgcacccataggctccctgggcggcgggcgggggccaacccccaacgggcttctccgcgaca

SEQ ID NO: 628151 - DNA, 120 bp, Artificial Sequence
  ENSG00000179134_26 (sequence is synthesized)
gcgagagggtgggctggctcagctatatattctaatatttttctactctcttaccctcttaacttttgtttaacattggcacatgccttgctcactcccaggcccgtcgagggatctctg

SEQ ID NO: 628152 - DNA, 120 bp, Artificial Sequence
  ENSG00000179134_27 (sequence is synthesized)
ctgaggcccggggagttgggggcagccaggataaagggggcagggactggccagactgcctgcctctctcctttccttcctcatccccacctggtcccatcccacccctgcctcctccag

SEQ ID NO: 628153 - DNA, 120 bp, Artificial Sequence
  ENSG00000179134_28 (sequence is synthesized)
accgctgaccacctgcctctccccaagggagcagactccccagagacaaactgaccactaccttgtggagcctgctcagaaacatttgacatttggggtgacgcgcagggcagagaacct

SEQ ID NO: 628154 - DNA, 120 bp, Artificial Sequence
  ENSG00000179134_29 (sequence is synthesized)
gccctccagaatgttattgagaggagctggggagaaggaaggggagcaaggagaggaagctctctctcctctccctgcttccccttcaccattccccacattctgcaaggacaggagcca

SEQ ID NO: 628155 - DNA, 120 bp, Artificial Sequence
  ENSG00000179134_30 (sequence is synthesized)
ccttcctctctctcacctcccctggccctgttcaccagaggttctctatgattaatttcttaggcctatttaagatacatatttatatagttcttaacggtttttctctgatcatttcct

SEQ ID NO: 628156 - DNA, 120 bp, Artificial Sequence
  ENSG00000179134_31 (sequence is synthesized)
ctcatttttagaatccccaggtctctctcagccaagacagtggcagggagagcctgaactttatgaggggagagggcagagccccctcctccagaccctcaagctctaacccattttcct

SEQ ID NO: 628157 - DNA, 120 bp, Artificial Sequence
  ENSG00000179134_32 (sequence is synthesized)
ccagccctggctacccggatgaagaggttggaggtgggcagccagggtagccagtgaggtcaggaagtctgttgccttaacgtccccttccccacgaacacacacccttctccgctccca

SEQ ID NO: 628158 - DNA, 120 bp, Artificial Sequence
  ENSG00000179134_33 (sequence is synthesized)
ggtctggttggtgagacttgggagtcaggaataagggaaaggggattgtttggtttttgggtttttccctaagcccctcccttttctttcagcctttttccttcccccattatgtcatga

SEQ ID NO: 628159 - DNA, 120 bp, Artificial Sequence
  ENSG00000179134_34 (sequence is synthesized)
cctcacttaagtggaacactatatcataacccagagattcgtcccagccccagagtccgacagactgtctggtccctattcctaatgaggggttgtgttggggcccaggtggagggaggg

SEQ ID NO: 628160 - DNA, 120 bp, Artificial Sequence
  ENSG00000179134_35 (sequence is synthesized)
gatttgggggttcagactgcggggaagccagggtctccctcttcaacgccctcctccccctcaacccaccttcccaactgggacattctcaagcttttcacaccgaaaaggaaaaaaaat

SEQ ID NO: 628161 - DNA, 120 bp, Artificial Sequence
  ENSG00000179134_36 (sequence is synthesized)
aaaaaaatgttatttttagatacattttatgaataacttttgttatgaatatggctggtaaccattgtgtatgttattaaagatacaaaatgttgggaaaaaaacaaaaaaaacaaaaaa

SEQ ID NO: 628162 - DNA, 120 bp, Artificial Sequence
  ENSG00000179134_37 (sequence is synthesized)
aatcagctttgagtaactgtacagtttttctcgctgttggagaagacttatttgttggagtttcacttgtttaatggtctgggcttattttggaaaaaaaaaaaacaaacaaaaaaaacg

SEQ ID NO: 628163 - DNA, 75 bp, Artificial Sequence
  ENSG00000179134_38 (sequence is synthesized)
caagcgatctgcccacctcagtttcttgcattgttaagagcaagcaagagctctgaagccagactgcctggcctt

SEQ ID NO: 628164 - DNA, 120 bp, Artificial Sequence
  ENSG00000179134_39 (sequence is synthesized)
aagagcaagcaagagctctgaagccagactgcctggccttgaaaatctcagcttggtgtacagtcttgggcaaagtgacttaacttctctgtgcctcagttgctccatctgtaaaatgat

SEQ ID NO: 628165 - DNA, 120 bp, Artificial Sequence
  ENSG00000179134_40 (sequence is synthesized)
aatatattcatatatgtatgttatatatttttgaaatagagttttggggatcaaatgtgcttatctgtggaaagctgttggcaaagggcctgacaatgtatgatgtatgaagacatgcta

SEQ ID NO: 628166 - DNA, 120 bp, Artificial Sequence
  ENSG00000179134_41 (sequence is synthesized)
agcatcatgcttgctattgaaatgaagtatagaggaggaaaaaagcatcatgcgcggtatttttaaatacattgtttcatttaattcttctaacaagcttcattgaggaagaaacagagt

SEQ ID NO: 628167 - DNA, 120 bp, Artificial Sequence
  ENSG00000179134_42 (sequence is synthesized)
tacttgtcatagtcaatacagcaagtaagtataacaggagagccaggatttaagccaggtctgactaactccaccatcctgcttctgaatgaagagagctggactccagaggcactgttt

SEQ ID NO: 628168 - DNA, 120 bp, Artificial Sequence
  ENSG00000179134_43 (sequence is synthesized)
tccagaggcactgtttatgggcatatgggccttttctcactgtttggggccagagaagaagcccagagggcagtttgtcctggaacatctcagcatttttttgtttttgtttttgttttt

SEQ ID NO: 628169 - DNA, 88 bp, Artificial Sequence
  ENSG00000179134_44 (sequence is synthesized)
ctttctccaggtggcctcgacctccagaactcaagtgatcctcccaaagtagctgggactgcaggtgcacaccaccacgcccagctaa

SEQ ID NO: 628170 - DNA, 120 bp, Artificial Sequence
  ENSG00000179134_45 (sequence is synthesized)
acaccaccacgcccagctaatttttggattttttgtagaaacggttttgccatgttgcccaggctgctgatctggaacctttggcttttgttttgttttgtttttgttttttgagacagg

SEQ ID NO: 628171 - DNA, 74 bp, Artificial Sequence
  ENSG00000179134_46 (sequence is synthesized)
tggctaatttttttgtaagctcctgagctcaagcgatccacccgcccatgcctcccagagtgctgggattacag

SEQ ID NO: 628172 - DNA, 120 bp, Artificial Sequence
  ENSG00000179134_47 (sequence is synthesized)
gccattttgttaacctcatttcccacctctggaggtggtaggggcttcccaagaagatcacttggacctcttcaagtatggtggcaatattgctgggctgttggagagacttctgttata

SEQ ID NO: 628173 - DNA, 120 bp, Artificial Sequence
  ENSG00000179134_48 (sequence is synthesized)
gaggctcccctcttgtgtttttcctcaaaggcaaggagtcatttttggtcacatgaggacaaagagaccagaccagtagtgcattctgttttgcatgggaattgtcaaggctctttcagt

SEQ ID NO: 628174 - DNA, 120 bp, Artificial Sequence
  ENSG00000179134_49 (sequence is synthesized)
tttaactgaaacccaactcaaactggcctaagtcaaaaacgaatttattcatctatgtaactgaaaagagtgggccacaagggggaggcttcaggctagctgcatctaggttttaaatca

SEQ ID NO: 628175 - DNA, 120 bp, Artificial Sequence
  ENSG00000179134_50 (sequence is synthesized)
tgtgaacagatctccctttccccctcccccatctcttgactttgctgtcatctgttagtttcattctgaagcaggcttccaccgtgaaatagaagaggtggcaactggtgacatcatgag

SEQ ID NO: 628176 - DNA, 120 bp, Artificial Sequence
  ENSG00000179134_51 (sequence is synthesized)
cacaggtatgtcttcttctgtgtagttgttcactattgtttcaatgtgattcgtttcccacatttgaaaatagggggggattttactttaaaattcagatatctggctcctctttagggg

SEQ ID NO: 628177 - DNA, 120 bp, Artificial Sequence
  ENSG00000179134_52 (sequence is synthesized)
gcaaacacagatgtgccctcatggctcaagagcctccgtttgcacaagtatgcagccctcttctcacagatgagctacgaggagatgatgacactgactgagcagcacctggagtctcag

SEQ ID NO: 628178 - DNA, 120 bp, Artificial Sequence
  ENSG00000179134_53 (sequence is synthesized)
cctgggtctcatgtccactgttcttctagactgcattggcacctctccccatacctcacaccactctgcacccatctcccccaattgtggggggttgttttcctcctctgcttcaatttt

SEQ ID NO: 628179 - DNA, 120 bp, Artificial Sequence
  ENSG00000179134_54 (sequence is synthesized)
tatttatgtacctcttgcacactcatcaacctatgcaagtcccccaccccggccctccatgtttctgtgcctttgctcatcccctcaatctcccagggcttctccagtccccctcccact

SEQ ID NO: 628180 - DNA, 120 bp, Artificial Sequence
  ENSG00000179134_55 (sequence is synthesized)
agctgcaggaagtgggatggatgggccacctcgtttggaatcagcagggtgtccctctcatgggaccctcccctctccccagcctgtcctgtcttgttcactctccatcagggtgagctg

SEQ ID NO: 628181 - DNA, 120 bp, Artificial Sequence
  ENSG00000179134_56 (sequence is synthesized)
cgcaggcggccccactctgatgggcaggaccctgaccctctcccgctccagccccctccccaggccctcctccatgatttcaccctccctacccacttctgtccccggccccactggcag

SEQ ID NO: 628182 - DNA, 120 bp, Artificial Sequence
  ENSG00000179134_57 (sequence is synthesized)
aagaagattggagctgagggaataggccataggcagtgctctcaggtgaataggagtaccccaccctggctctcctgatatttcttcttatcccttctgtagccatcgtcagccagtggc

SEQ ID NO: 628183 - DNA, 120 bp, Artificial Sequence
  ENSG00000179134_58 (sequence is synthesized)
ggaggagggaggggagcttgcgggcccgagagggggcgacggcggcggcggtggcctgaggaggcccgagcggcggcggtggcggcgaaggccgaggcggaaactggagaggcgtggctg

SEQ ID NO: 628184 - DNA, 120 bp, Artificial Sequence
  ENSG00000179134_59 (sequence is synthesized)
tgaactgagcaactcagagtcatcctgaggggtccccaggggaggccagactccagggagggcctgactgggatgacaggctacctgagtgccttttcttgggcctccctccagctcctg

SEQ ID NO: 628185 - DNA, 120 bp, Artificial Sequence
  ENSG00000179134_60 (sequence is synthesized)
atcttcctcccttcctccctttcttaccacagatgggacagacaaaacctccaccatctgacgggacccacagcccagcgcacccataggctccctgggcggcgggcgggggccaacccc

SEQ ID NO: 628186 - DNA, 120 bp, Artificial Sequence
  ENSG00000179142_0 (sequence is synthesized)
ggaatggcactcagggcaaaggcagaggtgtgcgtggcagcgccctggctgtccctgcaaagggcacgggcactgggcactagagccgctcgggcccctaggacggtgctgccgtttgaa

SEQ ID NO: 628187 - DNA, 120 bp, Artificial Sequence
  ENSG00000179142_1 (sequence is synthesized)
gccatgccccagcatccaggcaacaggtggctgaggctgctgcagatctggagggagcagggttatgagcacctgcacctggagatgcaccagaccttccaggagctggggcccattttc

SEQ ID NO: 628188 - DNA, 120 bp, Artificial Sequence
  ENSG00000179142_2 (sequence is synthesized)
aggtacaacttgggaggaccacgcatggtgtgtgtgatgctgccggaggatgtggagaagctgcaacaggtggacagcctgcatccctgcaggatgatcctggagccctgggtggcctac

SEQ ID NO: 628189 - DNA, 120 bp, Artificial Sequence
  ENSG00000179142_3 (sequence is synthesized)
agacaacatcgtgggcacaaatgtggcgtgttcttgttgaatgggcctgaatggcgcttcaaccgattgcggctgaacccagatgtgctgtcgcccaaggccgtgcagaggttcctcccg

SEQ ID NO: 628190 - DNA, 120 bp, Artificial Sequence
  ENSG00000179142_4 (sequence is synthesized)
atggtggatgcagtggccagggacttctcccaggccctgaagaagaaggtgctgcagaacgcccgggggagcctgaccctggacgtccagcccagcatcttccactacaccatagaagcc

SEQ ID NO: 628191 - DNA, 120 bp, Artificial Sequence
  ENSG00000179142_5 (sequence is synthesized)
agcaacttagctctttttggagagcggctgggcctggttggccacagccccagttctgccagcctgaacttcctccatgccctggaggtcatgttcaaatccaccgtccagctcatgttc

SEQ ID NO: 628192 - DNA, 120 bp, Artificial Sequence
  ENSG00000179142_6 (sequence is synthesized)
atgcccaggagcctgtctcgctggatcagccccaaggtgtggaaggagcactttgaggcctgggactgcatcttccagtacggtgacaactgtatccagaaaatctaccaggaactggcc

SEQ ID NO: 628193 - DNA, 120 bp, Artificial Sequence
  ENSG00000179142_7 (sequence is synthesized)
ttcaaccgccctcaacactacacaggcatcgtggcggagctcctgttgaaggcggaactgtcactagaagccatcaaggccaactctatggaactcactgcagggagcgtggacacgaca

SEQ ID NO: 628194 - DNA, 120 bp, Artificial Sequence
  ENSG00000179142_8 (sequence is synthesized)
gcgtttcccttgctgatgacgctctttgagctggctcggaaccccgacgtgcagcagatcctgcgccaggagagcctggccgccgcagccagcatcagtgaacatccccagaaggcaacc

SEQ ID NO: 628195 - DNA, 120 bp, Artificial Sequence
  ENSG00000179142_9 (sequence is synthesized)
accgagctgcccttgctgcgggcggccctcaaggagaccttgcggctctaccctgtgggtctgtttttggagcgagtggtgagctcagacttggtgcttcagaactaccacatcccagct

SEQ ID NO: 628196 - DNA, 120 bp, Artificial Sequence
  ENSG00000179142_10 (sequence is synthesized)
gggacattggtacaggttttcctctactcgctgggtcgcaatgccgccttgttcccgaggcctgagcggtataatccccagcgctggctagacatcaggggctccggcaggaacttccac

SEQ ID NO: 628197 - DNA, 120 bp, Artificial Sequence
  ENSG00000179142_11 (sequence is synthesized)
cacgtgccctttggctttggcatgcgccagtgcctcgggcggcgcctggcagaggcagagatgctgctgctgctgcaccacgtgctgaagcacttcctggtggagacactaactcaagag

SEQ ID NO: 628198 - DNA, 120 bp, Artificial Sequence
  ENSG00000179142_12 (sequence is synthesized)
tttcagagcgattaactagtcttgcatctgcacccagggtcccagcctggccaccagcttccctctgcctgaccccaggccacctgtcttctctcccacgtgcacagcttcctgagtcac

SEQ ID NO: 628199 - DNA, 120 bp, Artificial Sequence
  ENSG00000179142_13 (sequence is synthesized)
ccctctgtccagccagctcctgcacaaatggaactccccagggcctccaggactggggcttgccaggcttgtcaaatagcaaggccagggcacagctggagacgatcttgctggcagggc

SEQ ID NO: 628200 - DNA, 120 bp, Artificial Sequence
  ENSG00000179142_14 (sequence is synthesized)
ctggccttgtccccagctccacctggccccttctccagcaagcagtgccctctggacagcttgactctactcccagcgctggctccaggctcctcatgaggccatgcaagggtgctgtga

SEQ ID NO: 628201 - DNA, 120 bp, Artificial Sequence
  ENSG00000179142_15 (sequence is synthesized)
ttttgtcccttgccttcctgcctagtctcacatgtccctgtccctctcgccctggccagggcctctgtgcagacagtgtcagagtcattaagcgggatcccagcatctcagagtccagtc

SEQ ID NO: 628202 - DNA, 120 bp, Artificial Sequence
  ENSG00000179142_16 (sequence is synthesized)
aagttccctcctgcagcctgaccccaggcagctcgagcatgccctgagctctctgaaagttgtcaccctggaatacgatcctgcagggtagactaaaaaggcccctgtggtcacttatcc

SEQ ID NO: 628203 - DNA, 120 bp, Artificial Sequence
  ENSG00000179142_17 (sequence is synthesized)
tgacacattttcaagtgatacaactgagtctcgaggggcgtgtgttccccagctgatcatgtcagcctcatgccccaggcctcgtctttcatggaccaggtcttgttcaagcagcgagtg

SEQ ID NO: 628204 - DNA, 120 bp, Artificial Sequence
  ENSG00000179142_18 (sequence is synthesized)
ttgggtcctctgcttcctgagctgtcccctggagaaggtcccgaggatgctgtcaggagatggaagagtcatgtggggtgggaacctggggtgtggttccagaaatgtttttggcaacag

SEQ ID NO: 628205 - DNA, 120 bp, Artificial Sequence
  ENSG00000179142_19 (sequence is synthesized)
gagagacaggattgggccaacaaggactcagatgagttttattgactcattcctctggttgatacggagccatgtcatgtgccacgacctggggtgggcacagggaggctgcagttccct

SEQ ID NO: 628206 - DNA, 120 bp, Artificial Sequence
  ENSG00000179142_20 (sequence is synthesized)
acgtgaacctgccttgggcctcatctgctcctagcccagcagagagagttgacccctcctgaactggccactccccagtgctcctgtgcagggataggaagtgccccagggtgagaacgt

SEQ ID NO: 628207 - DNA, 120 bp, Artificial Sequence
  ENSG00000179142_21 (sequence is synthesized)
gcccagccacatcatctttatctcctgggattttcattagggcaaagatctcagcagccagctcctggtagctgatgaggatcagagcgtttgttcccccatgaaaggggaaatacttag

SEQ ID NO: 628208 - DNA, 120 bp, Artificial Sequence
  ENSG00000179142_22 (sequence is synthesized)
gtaatcattccaggtgtgttcagtagttccaggactcagggactcaggccagtcaccctgtgaccgcaggttgctttcccaccctgggcaatgcagtgcagcatgggaaaggaataaggg

SEQ ID NO: 628209 - DNA, 120 bp, Artificial Sequence
  ENSG00000179142_23 (sequence is synthesized)
ggcaacaaggtgcacagacctcagagatggcttccttgtttatggggctctcacagatacccatccaactcctctagtcagcactagatcatgggatcctaaaataaaccttggaaaaat

SEQ ID NO: 628210 - DNA, 120 bp, Artificial Sequence
  ENSG00000179144_0 (sequence is synthesized)
acagtaaaagcaaaagcaacagctcaagcagcctccttggagaaaacctgaaaattcaacttgttcaagagaaggtcttgtacgtgcctaagttctagagcctcctgacgtgagcatggc

SEQ ID NO: 628211 - DNA, 120 bp, Artificial Sequence
  ENSG00000179144_1 (sequence is synthesized)
tgagagtgaggaccgctccctgaggatcgttctggtagggaaaactggaagtgggaaaagtgcaacagcgaacaccatccttggagaggaaatctttgattctagaattgctgcccaagc

SEQ ID NO: 628212 - DNA, 120 bp, Artificial Sequence
  ENSG00000179144_2 (sequence is synthesized)
tgttaccaagaactgtcaaaaagcatcccgggaatggcaggggagagaccttcttgttgtagacactccagggctctttgacaccaaggagagcctggacaccacctgcaaggaaatcag

SEQ ID NO: 628213 - DNA, 120 bp, Artificial Sequence
  ENSG00000179144_3 (sequence is synthesized)
ccgctgcatcatctcctcctgcccagggccccatgctattgtcctagttctgctgctgggccgctacacagaggaggagcagaaaaccgttgcattgatcaaggctgtctttgggaagtc

SEQ ID NO: 628214 - DNA, 120 bp, Artificial Sequence
  ENSG00000179144_4 (sequence is synthesized)
agccatgaagcacatggtcatcttgttcactcgcaaagaagagttggagggccagagcttccatgacttcatagcagatgcggatgtgggcctaaaaagcatcgtcaaggagtgcgggaa

SEQ ID NO: 628215 - DNA, 120 bp, Artificial Sequence
  ENSG00000179144_5 (sequence is synthesized)
ttagcaacagcaagaaaaccagtaaggcagagaaggaaagtcaagtgcaggagttggtggagctgatagagaaaatggtgcagtgcaacgaaggggcttacttttctgatgacatataca

SEQ ID NO: 628216 - DNA, 120 bp, Artificial Sequence
  ENSG00000179144_6 (sequence is synthesized)
aggacacagaggaaaggctgaaacaacgggaagaggttttgaggaaaatctacactgaccaattaaatgaagaaattaaactagtagaagaggataagcataaatcagaggaagaaaagg

SEQ ID NO: 628217 - DNA, 120 bp, Artificial Sequence
  ENSG00000179144_7 (sequence is synthesized)
agaaagaaattaaattactaaaattaaaatatgatgaaaaaataaaaaatataagggaagaagctgagagaaatatatttaaagatgtttttaataggatttggaagatgctttcagaaa

SEQ ID NO: 628218 - DNA, 120 bp, Artificial Sequence
  ENSG00000179144_8 (sequence is synthesized)
tatggcataggtttttgtcgaaatgtaagttttattcttcctaatttactgtgatttgttaatggatgaattgtattttgcaaagatagttagagaaatacctccttccccttagcttta

SEQ ID NO: 628219 - DNA, 120 bp, Artificial Sequence
  ENSG00000179148_0 (sequence is synthesized)
cacggatgattcacacgtaggaatgcagtggaacccaggctcctgatatccatctgggtgagccagccagagggaccggctgtgtcagaggcaagcaaacaagtattagagtgcaagact

SEQ ID NO: 628220 - DNA, 120 bp, Artificial Sequence
  ENSG00000179148_1 (sequence is synthesized)
gtgggcggagagaggaagcccgagccgccagcagggagcttcggagagagaaagcccaggaacatcccagagagagctgggcccatcctcagccctacccagccccgcagcccctagccc

SEQ ID NO: 628221 - DNA, 120 bp, Artificial Sequence
  ENSG00000179148_2 (sequence is synthesized)
tccgcccagaaacccagccctgtccggcgtgccgctcttctcctccaggccggctgctgctgcggccagcgttgccggggcatcccttcctccttcccatcatggcagtgtaccgcctgt

SEQ ID NO: 628222 - DNA, 120 bp, Artificial Sequence
  ENSG00000179148_3 (sequence is synthesized)
gtgtgaccactggtccctacctgagggccggcacactggacaacatctctgtcacactggtgggcacgtgtggtgaaagccccaagcagcggctagatcgaatgggcagggacttcgccc

SEQ ID NO: 628223 - DNA, 120 bp, Artificial Sequence
  ENSG00000179148_4 (sequence is synthesized)
ctggatcggtacagaagtacaaggtgcgttgcacagcggagctgggtgagctcttgctgctgcgtgtacacaaggagcgctacgctttcttccgcaaggactcttggtactgtagccgca

SEQ ID NO: 628224 - DNA, 120 bp, Artificial Sequence
  ENSG00000179148_5 (sequence is synthesized)
tctgtgtcaccgaaccggatggtagtgtatcccacttcccctgctatcagtggattgaaggctactgcaccgtggagctgaggccaggaacagcaagaactatttgtcaggactctcttc

SEQ ID NO: 628225 - DNA, 120 bp, Artificial Sequence
  ENSG00000179148_6 (sequence is synthesized)
ccctcctcctggatcacaggacacgggagctccgggcccgacaagaatgctaccgctggaagatctatgcccctggcttcccctgcatggtagacgtcaacagctttcaggagatggagt

SEQ ID NO: 628226 - DNA, 120 bp, Artificial Sequence
  ENSG00000179148_7 (sequence is synthesized)
cagacaagaaatttgccttgacaaagacgacaacttgtgtagaccagggtgacagcagtgggaatcggtacctgcccggcttccccatgaaaattgacatcccatccctgatgtacatgg

SEQ ID NO: 628227 - DNA, 120 bp, Artificial Sequence
  ENSG00000179148_8 (sequence is synthesized)
agcccaatgttcgatactcagccaccaagacgatctcgctgctcttcaatgccatccctgcgtccttgggaatgaagcttcgagggctgttggatcgcaagggctcctggaagaagctgg

SEQ ID NO: 628228 - DNA, 120 bp, Artificial Sequence
  ENSG00000179148_9 (sequence is synthesized)
atgacatgcagaacatcttctggtgccataagaccttcacgacaaagtatgtcacagagcactggtgtgaagatcacttctttgggtaccagtacctgaatggtgtcaatcccgtcatgc

SEQ ID NO: 628229 - DNA, 120 bp, Artificial Sequence
  ENSG00000179148_10 (sequence is synthesized)
tccactgcatctctagcttgcccagcaagctgcctgtcaccaatgacatggtggcccccttgctgggacaggacacatgcctgcagacagagctagagagggggaacatcttcctagcgg

SEQ ID NO: 628230 - DNA, 120 bp, Artificial Sequence
  ENSG00000179148_11 (sequence is synthesized)
actactggatcctggcggaggcccccacccactgcctaaacggccgccagcagtacgtggccgccccactgtgcctgctgtggctcagcccccagggggcgctggtgcccttggccatcc

SEQ ID NO: 628231 - DNA, 120 bp, Artificial Sequence
  ENSG00000179148_12 (sequence is synthesized)
agctcagccagacccccgggcctgacagccccatcttcctgcccactgactccgaatgggactggctgctggccaagacgtgggtgcgcaactctgagttcctggtgcacgaaaacaaca

SEQ ID NO: 628232 - DNA, 120 bp, Artificial Sequence
  ENSG00000179148_13 (sequence is synthesized)
aagctcctactcccccacactcgatacacgctgcaggtgaacaccatcgcgagggccacgctgctcaaccccgagggcctcgtggaccaggtcacgtccatcgggaggcaaggcctcatc

SEQ ID NO: 628233 - DNA, 120 bp, Artificial Sequence
  ENSG00000179148_14 (sequence is synthesized)
tacctcatgagcacgggcctggcccacttcacctacaccaatttctgccttccggacagcctgcgggcccgcggcgtcctggctatccccaactaccactaccgagacgacggcctgaag

SEQ ID NO: 628234 - DNA, 120 bp, Artificial Sequence
  ENSG00000179148_15 (sequence is synthesized)
atctgggcggccattgagagctttgtctcagaaatcgtgggctactattatcccagtgacgcatctgtgcagcaggattcggagctgcaggcctggactggcgagatttttgctcaggcg

SEQ ID NO: 628235 - DNA, 120 bp, Artificial Sequence
  ENSG00000179148_16 (sequence is synthesized)
ttcctgggccgggaaagctcaggtttcccaagccggctgtgcaccccaggagagatggtgaagttcctcactgcaatcatcttcaattgctctgcccagcacgctgctgtcaacagtggg

SEQ ID NO: 628236 - DNA, 120 bp, Artificial Sequence
  ENSG00000179148_17 (sequence is synthesized)
cagcatgactttggggcctggatgcccaatgctccatcatccatgaggcagcccccaccccagaccaaggggaccaccaccctgaagacttacctagacaccctccctgaagtgaacatc

SEQ ID NO: 628237 - DNA, 120 bp, Artificial Sequence
  ENSG00000179148_18 (sequence is synthesized)
agctgtaacaacctcctcctcttctggttggttagccaagaacccaaggaccagaggcccctgggcacctacccagatgagcacttcacagaggaggccccgaggcggagcatcgccgcc

SEQ ID NO: 628238 - DNA, 120 bp, Artificial Sequence
  ENSG00000179148_19 (sequence is synthesized)
ttccagagccgcctggcccagatctcaagggacatccaggagcggaaccagggtctggcactgccctacacctacctggaccctcccctcattgagaacagcgtctccatctaaccaccc

SEQ ID NO: 628239 - DNA, 120 bp, Artificial Sequence
  ENSG00000179148_20 (sequence is synthesized)
ccaaataccacccaagaagaaagaaaggtccaagcatgaggaggaccagttcctcaggtcctccagacccttccatcctccctgttctcagttcacctgaaccttctcttctgcacatgg

SEQ ID NO: 628240 - DNA, 120 bp, Artificial Sequence
  ENSG00000179148_21 (sequence is synthesized)
agacttttgcagccaagatggctctgacatcatacaaactgggccctgagctgtgagagaccagcacagcagcgtccaggttaaaagccgctgaccaaagtccaatgcacaatagcccct

SEQ ID NO: 628241 - DNA, 120 bp, Artificial Sequence
  ENSG00000179148_22 (sequence is synthesized)
ccgaaaggaaggaaccgcttcacttcttgccccacttggggcagcctcttgttccagcctcttggaatgcccagcttgggtttctgagcttttctccctcatcctccccaatccccaaac

SEQ ID NO: 628242 - DNA, 120 bp, Artificial Sequence
  ENSG00000179148_23 (sequence is synthesized)
tccttctcctaccatgcctttctacgttctctttcttccaagcctagagccaccagcccagcttccttctctggaaaagcctggaaactgggcacagaaggactgtgtgcctgggtctaa

SEQ ID NO: 628243 - DNA, 120 bp, Artificial Sequence
  ENSG00000179148_24 (sequence is synthesized)
catgtggtcccctttgtccctagcacctttaaggggaggggaagaattggagggcagcttgcctggacccctaacggctgttctcaggaacaggttcccaggcctggggtgtttgtggag

SEQ ID NO: 628244 - DNA, 120 bp, Artificial Sequence
  ENSG00000179148_25 (sequence is synthesized)
atctgtctttctccaaagatttcatccaactcccctttcatcccactccctttcatcccatttttttctttctgtccttgagcccagtgagttcaataaaaaccaaaatatttggctctc

SEQ ID NO: 628245 - DNA, 120 bp, Artificial Sequence
  ENSG00000179148_26 (sequence is synthesized)
acagatttggaagcagcgggtgaagctcgcctgctgctgattgagctttttctgcctcccgttcttagagcccccgccgaggctgcgacgcagggactgtaccatagtagaggctggaac

SEQ ID NO: 628246 - DNA, 120 bp, Artificial Sequence
  ENSG00000179148_27 (sequence is synthesized)
agtgcggcgccggaaccggccgcgcggggccgctgcgggctatgggcttctctgagaggttcctccccagtccctagtggcccagatcccggacacctgggctcccgcccaggatcctgc

SEQ ID NO: 628247 - DNA, 120 bp, Artificial Sequence
  ENSG00000179148_28 (sequence is synthesized)
aggcccagggcggtcctggagcggaaagaatgccacgcggggcattcagaccctgtttgccggcgctgtatttcgctttcctgacctgccctactccagagcagagaatgagtggaaccc

SEQ ID NO: 628248 - DNA, 120 bp, Artificial Sequence
  ENSG00000179148_29 (sequence is synthesized)
gcaggtgccctgtgctcatctctgcctgggaatggggaggaacagatcttgggggacattggggagtgggcggacaagcactccagggcatcagtccgggccgctgaccaggcggagggc

SEQ ID NO: 628249 - DNA, 120 bp, Artificial Sequence
  ENSG00000179151_0 (sequence is synthesized)
gtgggggcgcttccggcagcggcggcggtggtgaaggccgatgctgtgggggtgggcgtggagagaattcttctgtgggtcctctggtgttgagtggtcggcttggtgtggtgtgcggag

SEQ ID NO: 628250 - DNA, 120 bp, Artificial Sequence
  ENSG00000179151_1 (sequence is synthesized)
gagctccaggcccgtcggcgcggagtggtctcacgtgtgaaacatggctacagattggctgggaagtattgtgtccatcaattgtggagatagcttgggtgtctatcagggaagagtgtc

SEQ ID NO: 628251 - DNA, 120 bp, Artificial Sequence
  ENSG00000179151_2 (sequence is synthesized)
agctgtggatcaggtcagccagaccatttctctcacccggcctttccataatggagtgaagtgtcttgttccagaagtcaccttcagggcaggtgacattacggagttaaaaattctgga

SEQ ID NO: 628252 - DNA, 120 bp, Artificial Sequence
  ENSG00000179151_3 (sequence is synthesized)
gataccaggacctggagacaaccaacattttggagaccttcatcaaacagaattaggcccctctggtgctggctgccaagtgggcatcaatcagaatggcacaggcaagtttgtcaagaa

SEQ ID NO: 628253 - DNA, 120 bp, Artificial Sequence
  ENSG00000179151_4 (sequence is synthesized)
gccagcctcttccagcagtgcccctcagaatatccctaagaggacagatgtgaagagccaggatgttgccgtttccccgcagcagcaacagtgctcaaagagctatgtcgacaggcacat

SEQ ID NO: 628254 - DNA, 120 bp, Artificial Sequence
  ENSG00000179151_5 (sequence is synthesized)
ggaatccttgagtcagtccaaaagtttccgtcgtcggcacaactcctggtcatctagtagcaggcacccaaatcaggcaactcccaagaaaagtggtttaaagaatggccagatgaagaa

SEQ ID NO: 628255 - DNA, 120 bp, Artificial Sequence
  ENSG00000179151_6 (sequence is synthesized)
taaagatgacgagtgcttcggggatgatattgaggagatcccagacacagattttgattttgaagggaacctggctctttttgacaaggcagctgtgtttgaggagattgatacctatga

SEQ ID NO: 628256 - DNA, 120 bp, Artificial Sequence
  ENSG00000179151_7 (sequence is synthesized)
aaggagaagtggtacccgttcccggggcatcccaaatgaaaggcccactcggtaccgccatgatgagaacatcttggagtccgagcccattgtctatcgacggatcatagtgccccacaa

SEQ ID NO: 628257 - DNA, 120 bp, Artificial Sequence
  ENSG00000179151_8 (sequence is synthesized)
cgtgagcaaggagttctgcacggactctggcctggttgtcccaagtatttcctatgagctgcataaaaagctgttgtccgtggctgagaagcatgggctgacccttgagcggagactgga

SEQ ID NO: 628258 - DNA, 120 bp, Artificial Sequence
  ENSG00000179151_9 (sequence is synthesized)
gatgacaggtgtgtgtgccagtcagatggcactgaccctcctcggaggacctaacaggttgaatcccaaaaatgttcaccagaggcctacagtggctctactgtgtggacctcatgtgaa

SEQ ID NO: 628259 - DNA, 120 bp, Artificial Sequence
  ENSG00000179151_10 (sequence is synthesized)
gggggctcagggtatcagctgtggaaggcacctagccaaccatgatgtccaggtcatccttttcctgcccaattttgtcaagatgttggaatctatcaccaatgagctgtcgctcttcag

SEQ ID NO: 628260 - DNA, 120 bp, Artificial Sequence
  ENSG00000179151_11 (sequence is synthesized)
caagacccaaggccaacaagtgtctagcctcaaagatctgcccactagccctgtggacctggtcatcaactgcctggattgccctgagaacgtcttcctgcgcgatcaaccctggtacaa

SEQ ID NO: 628261 - DNA, 120 bp, Artificial Sequence
  ENSG00000179151_12 (sequence is synthesized)
ggcagctgtggcctgggccaaccagaaccgggcaccagtactcagcatagaccctcctgtgcatgaagtcgaacagggcattgatgccaaatggtcactggcactgggcctgcctctgcc

SEQ ID NO: 628262 - DNA, 120 bp, Artificial Sequence
  ENSG00000179151_13 (sequence is synthesized)
actgggggagcacgcaggccgtatctatttgtgcgacattggcattccccagcaggtcttccaggaggtgggcatcaactaccactcgccctttggctgcaagtttgttatcccactgca

SEQ ID NO: 628263 - DNA, 120 bp, Artificial Sequence
  ENSG00000179151_14 (sequence is synthesized)
ctctgcttagagggttcctgcgcaggcaggactctgctgtcccctgctgctcctgataacaaacgccttaaggatatgaagcttcatggaccttgttaaagttttttctcttttgggttt

SEQ ID NO: 628264 - DNA, 120 bp, Artificial Sequence
  ENSG00000179151_15 (sequence is synthesized)
ttacttaaaactgacctgtcacttgctcttagccagggaagtctttcccactgggttccgggctgggtggcaggctgagcgtgcagcaactccaggcatctctaccctcagccccctgca

SEQ ID NO: 628265 - DNA, 120 bp, Artificial Sequence
  ENSG00000179151_16 (sequence is synthesized)
cggccaggtgggcctttgtttacagccgtaggcagctctcaagactgtgtttcaggtttacagccactgggcctgggcacacacattgaagagtgggccaggtcctgtctgggggcctgt

SEQ ID NO: 628266 - DNA, 120 bp, Artificial Sequence
  ENSG00000179151_17 (sequence is synthesized)
acctgctctatttcagagcttgtggctttgtgtctcccctgctttccccacgcagacagcccttcctctgtagaaccagctgcacggcagctgtccaccagagggcagacctgcactctc

SEQ ID NO: 628267 - DNA, 120 bp, Artificial Sequence
  ENSG00000179151_18 (sequence is synthesized)
cattcatgtccagggctgtgacagaccaggccttcccctagccccacaagttgatttggggggttttgacccttactcctgagctgatccaagttttatgctgatttttccaaggatctc

SEQ ID NO: 628268 - DNA, 120 bp, Artificial Sequence
  ENSG00000179151_19 (sequence is synthesized)
tccctccttttccctccatcactcagaggtagggaagggggcggcattaggatggtgttactgtattgggattttatgttgttctgtcgtcttcagcacaggtagtataaggttatatta

SEQ ID NO: 628269 - DNA, 120 bp, Artificial Sequence
  ENSG00000179151_20 (sequence is synthesized)
ctgtagaaccacagtgcccatcttgccagcagtgcccgcccccaccctcaaagctgagcaggttgagcctttgcctagtctggggccagacccctcagatggggatatccctgggggagc

SEQ ID NO: 628270 - DNA, 120 bp, Artificial Sequence
  ENSG00000179151_21 (sequence is synthesized)
ctggtgctgaaccagaagaggcttcctggtgcttctgtcctaggccaccactcctccagccctttgcccgcacatacatgccccacctactctttcatcccctctgcccttcccctgaaa

SEQ ID NO: 628271 - DNA, 120 bp, Artificial Sequence
  ENSG00000179151_22 (sequence is synthesized)
cggtcctttgcagctgtcatcccagagcaggcagatgggctcccgtgcttgagctccaccccagctcttacatcatctgggctttgaaccttttacatttgtccagtctagatgagtagg

SEQ ID NO: 628272 - DNA, 120 bp, Artificial Sequence
  ENSG00000179151_23 (sequence is synthesized)
cttggggccagcaccctgtctcaaagatggcaaaatgaggctagttctggatgagctagctggtgtgggttccaaccataggaacacactgatgctcaaatcctaaggtgccaagctcta

SEQ ID NO: 628273 - DNA, 120 bp, Artificial Sequence
  ENSG00000179151_24 (sequence is synthesized)
ggccctggaggctggtagaacaggatctatgcctggaatcctggcagggattcctgtcaaggacttgtgtttaagcctgcttcagggcttcaggctgcttctgctctgtgtctgcccagg

SEQ ID NO: 628274 - DNA, 120 bp, Artificial Sequence
  ENSG00000179151_25 (sequence is synthesized)
ctggctgagcgggtggatgggtggacagaagggctcaccaaggattgtggacatagggtaggccctggtaccacgggtttcaggctgttatcacttcccttgtaggaacatagccagaag

SEQ ID NO: 628275 - DNA, 120 bp, Artificial Sequence
  ENSG00000179151_26 (sequence is synthesized)
cagatgagccagggtagagggctggcccctcctctcatcttcccttcagtcttaaattgtctccagcgatgggaagaggccagggactgtaacccttgtgctgtgtattctctgagcctc

SEQ ID NO: 628276 - DNA, 120 bp, Artificial Sequence
  ENSG00000179151_27 (sequence is synthesized)
tgctcactctcagggccaagcagctcccaagccggggccctctcttggccaaaatctgaggagcagtctaggttacaggctttttggtaggtaggttctggctgcctgttaatgcagtta

SEQ ID NO: 628277 - DNA, 120 bp, Artificial Sequence
  ENSG00000179151_28 (sequence is synthesized)
ggccccctgattaggtacagtgagaaacaagctagaacaaccctggcccagaagactgtccactccagcaagatccagggatgatagccttgcagggccactgggagtttgtgcccaagc

SEQ ID NO: 628278 - DNA, 120 bp, Artificial Sequence
  ENSG00000179151_29 (sequence is synthesized)
ttctccctcttctctccccagggggcactgggactggtccctgccctcatccttagcctgggccttccccagaggtattaaagagaagtatgattcctctgtcttcagttcttttcaggg

SEQ ID NO: 628279 - DNA, 120 bp, Artificial Sequence
  ENSG00000179151_30 (sequence is synthesized)
gcatcctgcccatagtacccagttcccaaggggcccccagtcacgtggtgaagcctagcactcatgcagctcttagggaaccaaaaaccagcactgaaataaagctgaatgactgactga

SEQ ID NO: 628280 - DNA, 120 bp, Artificial Sequence
  ENSG00000179151_31 (sequence is synthesized)
tccaggcccgtcggcgcggaggctttcaggtataggctgggtcactagtcttaaaacatttcttcttgagaatgtctaaaagactgtggaatctgttagatcttatatacttttaagttg

SEQ ID NO: 628281 - DNA, 120 bp, Artificial Sequence
  ENSG00000179151_32 (sequence is synthesized)
gcacctgaaacttttcatcctagatttacatagtggtcttgctgtgttgcccagcctggtcttgaattcctggactcaagtgatgctcctgccttggcttcccaaactcctggaattaca

SEQ ID NO: 628282 - DNA, 120 bp, Artificial Sequence
  ENSG00000179151_33 (sequence is synthesized)
ctagcctcaaaggtgagcacttaggcagggctgggctgaaggcctcctccctccttagcagtttgatggtctcgtcatgccacccagtggcgacaggtggaaaggcactacgtgtgtaag

SEQ ID NO: 628283 - DNA, 120 bp, Artificial Sequence
  ENSG00000179151_34 (sequence is synthesized)
gatggtgcttcgcctctaaggagtcttagaacagtaatatactacttcccatccccttatgcttctccctctccaactactcacatgaagagctggggacccattggtccattccacaaa

SEQ ID NO: 628284 - DNA, 68 bp, Artificial Sequence
  ENSG00000179151_35 (sequence is synthesized)
tggtgttgagtggtcggcttggtgtggtgtgcggaggagctccaggcccgtcggcgcggagagatggc

SEQ ID NO: 628285 - DNA, 120 bp, Artificial Sequence
  ENSG00000179151_36 (sequence is synthesized)
agtatggggattgtgtggggagtgaggcattagctgcttgggcccttagtccagccttgttggtggctgctgcagttctttggctcactcactctgttcttcgtgcctcagtttcccttt

SEQ ID NO: 628286 - DNA, 120 bp, Artificial Sequence
  ENSG00000179151_37 (sequence is synthesized)
gcataatgagatacggtggcagagaagaacgccagtgccacatccatgactgatagcttgaggacggagatgaactggagggtagaaaaagaggatgcctgagaaatttatacctaccag

SEQ ID NO: 628287 - DNA, 120 bp, Artificial Sequence
  ENSG00000179151_38 (sequence is synthesized)
agagatctgagaccaataggtgctacaggcaattgtctggtatagggtgcaagggattggcaagtatgtagctgatactgcttcttcaccttcttttccaggttgaatcccaaaaatgtt

SEQ ID NO: 628288 - DNA, 120 bp, Artificial Sequence
  ENSG00000179151_39 (sequence is synthesized)
ccgatgctgtgggggtgggcgtggagagaattcttctgtgggtcctctggtgttgagtggtcggcttggtgtggtgtgcggaggagctccaggcccgtcggcgcggagcaatgaatgacg

SEQ ID NO: 628289 - DNA, 120 bp, Artificial Sequence
  ENSG00000179151_40 (sequence is synthesized)
ggggaagcgggtgcttttcatcgagcctgcaagaggggggcccaggcatcgaggctggggagtcgtgggtagagccccgattccagccaagacgccacaggacataatggtctcacgtgt

SEQ ID NO: 628290 - DNA, 120 bp, Artificial Sequence
  ENSG00000179151_41 (sequence is synthesized)
gttccagaagtcaccttcaggtgagtgtcctgactgactcttctgaatccaacctggtggtctgtggagcttgaacctaggtctgattgctagtattctcttggcatatggccgcttttt

SEQ ID NO: 628291 - DNA, 120 bp, Artificial Sequence
  ENSG00000179152_0 (sequence is synthesized)
cttctggtgtactgggtgggaggtggaactagtcggacaaagccctcgcgtcggacccttgccagaactcaattaatggatgcctcgaagttgacgtacatatatattcagaaatgtttt

SEQ ID NO: 628292 - DNA, 120 bp, Artificial Sequence
  ENSG00000179152_1 (sequence is synthesized)
gccacctgagacctatgaggaggttatgtctagagaagatatttccacactggtttcccttttcaagagctttatcgggagctgaagcagtcaatgccttgaggcctttctattttgcag

SEQ ID NO: 628293 - DNA, 120 bp, Artificial Sequence
  ENSG00000179152_2 (sequence is synthesized)
tacatccagatttctttggacagcaccccgtagaaagggaaatcaatgaaaattctcttaaaaggttaagtgtctacctagaaaacctccagaaaccaggcttcaagtctttgaaaccaa

SEQ ID NO: 628294 - DNA, 120 bp, Artificial Sequence
  ENSG00000179152_3 (sequence is synthesized)
ctcagcttacattttatgtaagagaaacagaccagagttcctccgatggccaggaaccttttagtacttccggatttcgagcagtcaaatttactttgcacaccagagatctgctaagca

SEQ ID NO: 628295 - DNA, 120 bp, Artificial Sequence
  ENSG00000179152_4 (sequence is synthesized)
cagtgttatatattctcaactcctgcagtttatctgttgaacatatccaaagcttgaatactaatatgcatacccagcctctcaaagaagctaaaaggatgcctgacaggcccatcaaat

SEQ ID NO: 628296 - DNA, 120 bp, Artificial Sequence
  ENSG00000179152_5 (sequence is synthesized)
gggacaagtcttattactcctttactggattcaaggaccctgatgaagaccttgaacaagtctcgagagtggaaacaactctcacatcctggttagataacaatgggaaaagtgctgtta

SEQ ID NO: 628297 - DNA, 120 bp, Artificial Sequence
  ENSG00000179152_6 (sequence is synthesized)
aaaagctaaagaacagtttgccacttagaaaagaactagatcgtttaaaagatgaactgtctcatcaattgcaactctcagatatcaggtggcagaggagctggggcatcgcccaccgct

SEQ ID NO: 628298 - DNA, 120 bp, Artificial Sequence
  ENSG00000179152_7 (sequence is synthesized)
gtagccagctgcatagtttaagccgcttagcacagcagaatttggaaacacttaaaaaagcaaaagggtgtacaatcatatttacagaccgttctggcatgagtgcagtgggccatgtga

SEQ ID NO: 628299 - DNA, 120 bp, Artificial Sequence
  ENSG00000179152_8 (sequence is synthesized)
tgctaggaacaatggatgtccatcaccactggacaaaactttttgaaagattgccaagttattttgaccttcagaggaggctgatgattttagaagaccaaataagctatcttttaggtg

SEQ ID NO: 628300 - DNA, 120 bp, Artificial Sequence
  ENSG00000179152_9 (sequence is synthesized)
gcatacaagttgtttatattgaagaattacagccagtattgacacttgaagaatattactctcttcttgatgtgttttataatagactgttgaaaagtagaatactatttcaccctcgaa

SEQ ID NO: 628301 - DNA, 120 bp, Artificial Sequence
  ENSG00000179152_10 (sequence is synthesized)
gtttgcgtggtttacaaatgatccttaacagtgacagatatgctccaagcttgcatgaactcgggcattttaatattccaacactctgtgatccagcaaatctccagtggtttattctca

SEQ ID NO: 628302 - DNA, 120 bp, Artificial Sequence
  ENSG00000179152_11 (sequence is synthesized)
ccaaagctcagcaggcaagagagaacatgaaaagaaaggaagagttaaaggttattgaaaatgaattgatacaggcatcaacaaagaaattttctttggagaagttatataaagagccca

SEQ ID NO: 628303 - DNA, 120 bp, Artificial Sequence
  ENSG00000179152_12 (sequence is synthesized)
gcatttctagtatacaaatggtggattgttgtaagagacttctagaacaatcactgccttacctacatgggatgcacctctgcatttcacatttttactctgttatgcaagatggagacc

SEQ ID NO: 628304 - DNA, 120 bp, Artificial Sequence
  ENSG00000179152_13 (sequence is synthesized)
tttgtattccttggaattggaagaatggagaagccattaagtaacacagaaatctgttttatttttttaagagataagaaaggaacttaaattaaaaatatttaaatccacaatttgata

SEQ ID NO: 628305 - DNA, 120 bp, Artificial Sequence
  ENSG00000179152_14 (sequence is synthesized)
atttacataagaacaaagtttctaactgctgctttaaaagtagacttttttaaaaaaattaatttctgctaggagaggttttatatgccaggcgtggtggctcatgcctgcggtcccagc

SEQ ID NO: 628306 - DNA, 120 bp, Artificial Sequence
  ENSG00000179152_15 (sequence is synthesized)
tacttagggaggctaagataggaggatcacttgagcccaggaggccaaggttgcagtgggcccagattgcaccattgccctccagcctgagcaacagaacaagaccttgtctcaaaaaat

SEQ ID NO: 628307 - DNA, 120 bp, Artificial Sequence
  ENSG00000179152_16 (sequence is synthesized)
aataatgataatttaaaataaataagtaactaataaaaagattttatatcccagtcttatgatgttggttggcaaggctagataaaaagatgttagaatgaaagaacatatttttagtga

SEQ ID NO: 628308 - DNA, 120 bp, Artificial Sequence
  ENSG00000179152_17 (sequence is synthesized)
tatgtaaatgaaggattctacaatagtcatatatttttatatgaatgaatgttgggttgggctggagaggtatgtgtgtgtaaatataaaggtctcacattcagagtatagctctgaaat

SEQ ID NO: 628309 - DNA, 120 bp, Artificial Sequence
  ENSG00000179152_18 (sequence is synthesized)
aatggaactcatgtctacaattcaacatgcatctgtatagttacatctcatgtaaatatacacagacatattttgcagccagtaattgacagttaatgtccaaaacaggtgattgatagg

SEQ ID NO: 628310 - DNA, 120 bp, Artificial Sequence
  ENSG00000179152_19 (sequence is synthesized)
taacagaaattagataaccaccaattttgcccaagagaaagactagaaggactaaaagcagttgaatgtatggtactgacattgtcataagcagtctgataaccagtttattgaaacgtg

SEQ ID NO: 628311 - DNA, 120 bp, Artificial Sequence
  ENSG00000179152_20 (sequence is synthesized)
tgcattaacagagaatttaattttaaacccataatttctcctatccattaaaatattataattgttagtagtatgaaaccaacaggaaatgttttttaatcatttagtgaggtgattcat

SEQ ID NO: 628312 - DNA, 120 bp, Artificial Sequence
  ENSG00000179152_21 (sequence is synthesized)
ttgtttcatgggcaaacactatccaggaaaagccttgcttgcctgtttcccaaagagctctaagaaatagaatcaagtgtaaaatggttcagaccattcaggatttcttgtcactcttct

SEQ ID NO: 628313 - DNA, 120 bp, Artificial Sequence
  ENSG00000179152_22 (sequence is synthesized)
caaccacgatcttcctgttattactgatgtttgaaaccctgtcattagccccggcctggttaaagcccctcagagtcacctctcattcatagcaatagaattcaaccccaagtggttgat

SEQ ID NO: 628314 - DNA, 120 bp, Artificial Sequence
  ENSG00000179152_23 (sequence is synthesized)
ggtgtccccagcacagccgagagacctgatctctggattcagtgcttttagctcttcgagtttaccctaagataccttcgggcaatatttttaaccaacccaaaagctcttcaggtcatt

SEQ ID NO: 628315 - DNA, 120 bp, Artificial Sequence
  ENSG00000179152_24 (sequence is synthesized)
tctgaagaggacaaggtgaatcttggcttggaacaccatttttgggctcttgctactgaatgaatcagaaaggaattttttctgaagagcattagaaagtaaaagagatgttaaaataag

SEQ ID NO: 628316 - DNA, 120 bp, Artificial Sequence
  ENSG00000179152_25 (sequence is synthesized)
ttcttgaagtatgttttatatttatctaaaacactgattttaaaagtttacattcaaatgtgtattcaaaagaagtactgatttgtaattattatagtttgtgtgtatcatcccttttaa

SEQ ID NO: 628317 - DNA, 120 bp, Artificial Sequence
  ENSG00000179152_26 (sequence is synthesized)
ccgtgcctaacaactgtacttaaattttgttttctagtgtaacaaatgtttcccataagattttctagagccaaataatgggagtgaaaaattccttaagtgttatataagaaaatatat

SEQ ID NO: 628318 - DNA, 120 bp, Artificial Sequence
  ENSG00000179152_27 (sequence is synthesized)
tagaaaatcagctttggattatacgatttctaaaatatactaatacagaatcctcagtaatatgttttgaattggattttttctcagaactgttacataataaataatacatcaaccaga

SEQ ID NO: 628319 - DNA, 120 bp, Artificial Sequence
  ENSG00000179152_28 (sequence is synthesized)
ctcctccagcagtccctttccccttcttccccaagatccagcgcgtgctcggttgcccttctccgttccttgcaggcccttgggtcaggacccaccacctgccggaccatcattttccga

SEQ ID NO: 628320 - DNA, 120 bp, Artificial Sequence
  ENSG00000179152_29 (sequence is synthesized)
gtccctccggcctagtcggagtgctcgctcgcgcctcctaaagctctcagccgagcgcgccgagacccctcagggcggccgcaattaatggatgcctcgaagttgacgtacatatatatt

SEQ ID NO: 628321 - DNA, 120 bp, Artificial Sequence
  ENSG00000179152_30 (sequence is synthesized)
acactgatttattgggatggcaaaaacatttttttataaataaaaagtgtagttcacatttaaaattaaaacctaattttccaggaaaagtaatactatcagtctagttaatccagtaat

SEQ ID NO: 628322 - DNA, 64 bp, Artificial Sequence
  ENSG00000179152_31 (sequence is synthesized)
agaccttgaacaagtctcgagagtggaaacaactctcacatggagtctcgctctgtcacccaag

SEQ ID NO: 628323 - DNA, 120 bp, Artificial Sequence
  ENSG00000179152_32 (sequence is synthesized)
gtgtgtgtaaatgcattaaattgttttgtatttcaatgggtagttcttaggaattaaagaaaaaaatgccactacttgtgttagcaaccctcttctacacactagaaaagccagcatggg

SEQ ID NO: 628324 - DNA, 120 bp, Artificial Sequence
  ENSG00000179152_33 (sequence is synthesized)
aggattgaaggatttaatgtctagaacattctttgaatatattgctgagcagatttactgggcaaagtcaatccaatggaaaacattataagattaaactaatagtaaatcagtagccaa

SEQ ID NO: 628325 - DNA, 120 bp, Artificial Sequence
  ENSG00000179152_34 (sequence is synthesized)
catttgtggtgtatacactgtttgccgagcactgtgctgggtacttatatgcattctgtctttagctctcacaacctcactgtgcagcaggtcacccctggcatgtgacagataaggaag

SEQ ID NO: 628326 - DNA, 120 bp, Artificial Sequence
  ENSG00000179152_35 (sequence is synthesized)
aggtggcttttcttgatgatttttttttattttcctgaagactaataaaatattttctctggtgggggagaggagagggtcagtggtttttcctttaatgtatattttattgcagtgaca

SEQ ID NO: 628327 - DNA, 120 bp, Artificial Sequence
  ENSG00000179152_36 (sequence is synthesized)
ctacaacatcagttaatgtgtgctccaggaatacaaactgatatgaaaaatgacttatggtagatgtagttaagacagtcaatatattttaacattagaaaatacagtcagtccttcata

SEQ ID NO: 628328 - DNA, 120 bp, Artificial Sequence
  ENSG00000179152_37 (sequence is synthesized)
tccatgggttttacatccatggattcaaccaacctcagactgaaaatattaggggaaaaaaatacatctgtactacacatgaacaaacttctctttcttgtcattattccctgaacaaca

SEQ ID NO: 628329 - DNA, 120 bp, Artificial Sequence
  ENSG00000179152_38 (sequence is synthesized)
caggataacaactacttacatagcacttacattatattagatattataagtaatctagaaatgacttaaagtatatgggaggatacacataggttatttgcaaatactacactattttat

SEQ ID NO: 628330 - DNA, 120 bp, Artificial Sequence
  ENSG00000179152_39 (sequence is synthesized)
atgagagacttgagcattcgcagatttcggtatccacgggaggtcctggaaccaatcccctatggataccaagggactgctatgtattacaaagccacatgctttggaattacttcagtg

SEQ ID NO: 628331 - DNA, 120 bp, Artificial Sequence
  ENSG00000179152_40 (sequence is synthesized)
atttttttctacttgcaatggaaaatctattttgcttttttgcttctaggaaaatattctgattatgatatgtgatatgttggctactcaaagtcagaacttttcaaagtaatcagtaaa

SEQ ID NO: 628332 - DNA, 120 bp, Artificial Sequence
  ENSG00000179152_41 (sequence is synthesized)
ttgaatcaacagaaaaatattcattaactcggggatgcattaataaagtttttaaattcaaaatgtatagaaaaatcaagcttagtaatactttaatattattctaccaatgtatttttt

SEQ ID NO: 628333 - DNA, 74 bp, Artificial Sequence
  ENSG00000179152_42 (sequence is synthesized)
cttagtaatactttaatattattctaccaatgtattttttttaattaagacttctgtatgcagcagggcatggt

SEQ ID NO: 628334 - DNA, 120 bp, Artificial Sequence
  ENSG00000179152_43 (sequence is synthesized)
tcctcatctcctaaatttaaaaaacaaacaacaaaaacttctacgtgtggtaaagggttaactcagcaagcttgggttgcttaaaccttgcacattccaaagaaaggtctgaccccagtg

SEQ ID NO: 628335 - DNA, 120 bp, Artificial Sequence
  ENSG00000179152_44 (sequence is synthesized)
ctgacctttgactggctactgggaaatgagctctgagcccctggataggaatgtttctgtttgcctgaggcctttgaccatgccagatagtttatgctaacaatgtgatttatagtgaat

SEQ ID NO: 628336 - DNA, 120 bp, Artificial Sequence
  ENSG00000179152_45 (sequence is synthesized)
acctgttttcctgtgtctaagaccctgggctgcactgtattaatttgaccttgggtatttggggagctgagactgagtagctgaagtgagtcacataagcactaaatgcttacctgactg

SEQ ID NO: 628337 - DNA, 120 bp, Artificial Sequence
  ENSG00000179152_46 (sequence is synthesized)
acccccagtaaaactctggacatccagacttggatgagcttccttgggtggcaacacttttacgtattgtcacacaccattgctggggggattaagcactgtctgtaaaactccactgtg

SEQ ID NO: 628338 - DNA, 120 bp, Artificial Sequence
  ENSG00000179152_47 (sequence is synthesized)
aaatgacaactggaaacttgcacgtggtctctcctgattctgctctattcaccttttccctttgctgattttaatctccattcttttgttgtaataaaccataatggtgaataaaacagc

SEQ ID NO: 628339 - DNA, 120 bp, Artificial Sequence
  ENSG00000179152_48 (sequence is synthesized)
gggagatcaggagtcacaaattccttttcttggcagtttctccatctacctctgacttagagttttattaaaaatagccctattcttcaatatttaaagatagaaagtcaattcatagcc

SEQ ID NO: 628340 - DNA, 120 bp, Artificial Sequence
  ENSG00000179152_49 (sequence is synthesized)
cttttgtgaaggaacaggtatactgaagaatgctgtaaataatgaataataagcatgttgatcactctaagtgacacaattctgtttgaaagtttaaatacatgaatgtgctgttcctag

SEQ ID NO: 628341 - DNA, 120 bp, Artificial Sequence
  ENSG00000179152_50 (sequence is synthesized)
gcatgagagtctcataagcaactgagatagattgttactagtgtaaaaccaaatattcataaatatttttaatagatgtatgctcctgttagtcagggtcaagattaggctaggaattaa

SEQ ID NO: 628342 - DNA, 120 bp, Artificial Sequence
  ENSG00000179152_51 (sequence is synthesized)
ataacatcttacatatatgtagtggtctacttaggtttcattatttctccaggaagacagatggaatttttagaggcagattatatcctttatagttgttaaaataaaaatattatcatc

SEQ ID NO: 628343 - DNA, 120 bp, Artificial Sequence
  ENSG00000179152_52 (sequence is synthesized)
gggaggtggaactagtcggacaaagccctcgcgtcggacccttgccagaactgaaaggcaccatttccttagagaagaccttcctgagctctccccgccccattccaagtgttgcgtctg

SEQ ID NO: 628344 - DNA, 120 bp, Artificial Sequence
  ENSG00000179152_53 (sequence is synthesized)
ggagtttctcatattctgtgcatgtttgtattattgcatttactgcgttgttttatacttatctgcttgtgtctgtttttacactcccccctccctctaaaagtcttttgagtattagaa

SEQ ID NO: 628345 - DNA, 120 bp, Artificial Sequence
  ENSG00000179152_54 (sequence is synthesized)
ttgtcttaataattttctagtcccaatgctttacgcaggacctggcccataagtggtgatgaatgggtgagttaaagactcggtatgcctcccaagtgtgataagacagtgcaacctctt

SEQ ID NO: 628346 - DNA, 120 bp, Artificial Sequence
  ENSG00000179152_55 (sequence is synthesized)
cagttattttatagcattttccaagtggaagtatagtgggctaagtgcagtatggacaggaaccacctatgtaagaatttatctgaagacgagaagcctgcggttgatgtggatgtccca

SEQ ID NO: 628347 - DNA, 120 bp, Artificial Sequence
  ENSG00000179152_56 (sequence is synthesized)
gacttttggagctagtgtctgaatgagagcacccaactctactctgaagcaatgtgtcttcagtcagctgatagtaatttgattttctgtgtagctagtcctgaaagaggaagaacatta

SEQ ID NO: 628348 - DNA, 120 bp, Artificial Sequence
  ENSG00000179152_57 (sequence is synthesized)
gatctgaatcttctagttgtcttagcagttataatctcaaagtaaatttacagattgacattccagttatcaggccttctaatttagcttccccaaggcccacgtatttctgtcttgaag

SEQ ID NO: 628349 - DNA, 120 bp, Artificial Sequence
  ENSG00000179152_58 (sequence is synthesized)
tgataaaattgggttctgttcttacaaggttgaagactaacccaagatctgggcgttgtgaagcggcaggcagccatgcctgccaacctgctggacattgtctctacttagaattttggt

SEQ ID NO: 628350 - DNA, 120 bp, Artificial Sequence
  ENSG00000179152_59 (sequence is synthesized)
gtttgtattaaataattatttttaaagaattaaagcttaaacattaacagatgccccagaatcctctttggtgatagaatcaggattccctaatacagtggttctcaaacctgagtgtgc

SEQ ID NO: 628351 - DNA, 120 bp, Artificial Sequence
  ENSG00000179152_60 (sequence is synthesized)
atcagaatccctgacagtgtgttaaaacagattcctccatcccacccagattctgattctgcaggactcggatgggacctgataatttgcatttctcacggatgctgttgctgctttgaa

SEQ ID NO: 628352 - DNA, 120 bp, Artificial Sequence
  ENSG00000179152_61 (sequence is synthesized)
aaccactgccctaagagttatttctttctctccttcctaccctgtccctttcttcttttccaaaactggatcctcatctgtcacttagtcgtcagagcccattcttgaagagcttacagg

SEQ ID NO: 628353 - DNA, 120 bp, Artificial Sequence
  ENSG00000179152_62 (sequence is synthesized)
aaatactcaaaagactcatagtactcggtttttcattcttattcttaaacagaacgagaaaatatatttttaattttttccaatgatttgtataggaagtgatcatcttagagcaataat

SEQ ID NO: 628354 - DNA, 120 bp, Artificial Sequence
  ENSG00000179152_63 (sequence is synthesized)
tttgttgaatggatagcagaattattaactgaatatatttttatatatataggcattttcctctagaaatatgaattggctgccattgtgggagagaggagaattattggaaaaaggaaa

SEQ ID NO: 628355 - DNA, 120 bp, Artificial Sequence
  ENSG00000179152_64 (sequence is synthesized)
agtcacattccctctcatttctcccctattgctctctcattgtttctccatgacccagaacactgtctttaaaaagtcagtattaattcataaaaagacaattcccacagcacaatataa

SEQ ID NO: 628356 - DNA, 120 bp, Artificial Sequence
  ENSG00000179152_65 (sequence is synthesized)
ctttattatattcactttaggtttttattttgaagagagaaatgctacttccatcaaaacttgtgtttttattggttagcaagtgccacctttgtcttcaaatggtaaaagtaaacaact

SEQ ID NO: 628357 - DNA, 120 bp, Artificial Sequence
  ENSG00000179152_66 (sequence is synthesized)
ggggaaggcctggcacgctccagccaaccagggcgtcacctgcagctcgtccccctgcccgggcttgcctcgagcgccctgccgccgccggagcggggagggtgttgggggcaggtggag

SEQ ID NO: 628358 - DNA, 120 bp, Artificial Sequence
  ENSG00000179152_67 (sequence is synthesized)
ccgggagggcccagctgagaattcagggttgggggctcagagggcactgcggctaggagcccgtcaaagcctgtcgcccaccggggcgagggcaggtgggagcgcctggccgtgcgtcgc

SEQ ID NO: 628359 - DNA, 120 bp, Artificial Sequence
  ENSG00000179163_0 (sequence is synthesized)
gggtagcgatgcgggctccggggatgaggtcgcggccggcgggtcccgcgctgttgctgctgctgctcttcctcggagcggccgagtcggtgcgtcgggcccagcctccgcgccgctaca

SEQ ID NO: 628360 - DNA, 120 bp, Artificial Sequence
  ENSG00000179163_1 (sequence is synthesized)
ccccagactggccgagcctggattctcggccgctgccggcctggttcgacgaagccaagttcggggtgttcatccactggggcgtgttctcggtgcccgcctggggcagcgagtggttct

SEQ ID NO: 628361 - DNA, 120 bp, Artificial Sequence
  ENSG00000179163_2 (sequence is synthesized)
ggtggcactggcagggcgaggggcggccgcagtaccagcgcttcatgcgcgacaactacccgcccggcttcagctacgccgacttcggaccgcagttcactgcgcgcttcttccacccgg

SEQ ID NO: 628362 - DNA, 120 bp, Artificial Sequence
  ENSG00000179163_3 (sequence is synthesized)
aggagtgggccgacctcttccaggccgcgggcgccaagtatgtagttttgacgacaaagcatcacgaaggcttcacaaactggccgagtcctgtgtcttggaactggaactccaaagacg

SEQ ID NO: 628363 - DNA, 120 bp, Artificial Sequence
  ENSG00000179163_4 (sequence is synthesized)
tggggcctcatcgggatttggttggtgaattgggaacagctctccggaagaggaacatccgctatggactataccactcactcttagagtggttccatccactctatctacttgataaga

SEQ ID NO: 628364 - DNA, 120 bp, Artificial Sequence
  ENSG00000179163_5 (sequence is synthesized)
aaaatggcttcaaaacacagcattttgtcagtgcaaaaacaatgccagagctgtacgaccttgttaacagctataaacctgatctgatctggtctgatggggagtgggaatgtcctgata

SEQ ID NO: 628365 - DNA, 120 bp, Artificial Sequence
  ENSG00000179163_6 (sequence is synthesized)
cttactggaactccacaaattttctttcatggctctacaatgacagccctgtcaaggatgaggtggtagtaaatgaccgatggggtcagaactgttcctgtcaccatggaggatactata

SEQ ID NO: 628366 - DNA, 120 bp, Artificial Sequence
  ENSG00000179163_7 (sequence is synthesized)
actgtgaagataaattcaagccacagagcttgccagatcacaagtgggagatgtgcaccagcattgacaagttttcctggggctatcgtcgtgacatggcattgtctgatgttacagaag

SEQ ID NO: 628367 - DNA, 120 bp, Artificial Sequence
  ENSG00000179163_8 (sequence is synthesized)
aatcatttcggaactggttcagacagtaagtttgggaggcaactatcttctgaacattggaccaactaaagatggactgattgttcccatcttccaagaaaggcttcttgctgttgggaa

SEQ ID NO: 628368 - DNA, 120 bp, Artificial Sequence
  ENSG00000179163_9 (sequence is synthesized)
atggctgagcatcaatggggaggctatctatgcctccaaaccatggcgggtgcaatgggaaaagaacacaacatctgtatggtatacctcaaagggatcggctgtttatgccatttttct

SEQ ID NO: 628369 - DNA, 120 bp, Artificial Sequence
  ENSG00000179163_10 (sequence is synthesized)
gcactggccagaaaatggagtcttaaaccttgaatcccccataactacctcaactacaaagataacaatgctgggaattcaaggagatctgaagtggtccacagatccagataaaggtct

SEQ ID NO: 628370 - DNA, 120 bp, Artificial Sequence
  ENSG00000179163_11 (sequence is synthesized)
cttcatctctctaccccagttgccaccctctgctgtccccgcagagtttgcttggactataaagctgacaggagtgaagtaatcatttgagtgcaagaagaaagaggcgctgctcactgt

SEQ ID NO: 628371 - DNA, 120 bp, Artificial Sequence
  ENSG00000179163_12 (sequence is synthesized)
tttcctgcttcagtttttctcttatagtaccatcactataatcaacgaacttctcttctccacccagagatggcttttccaacacattttaattaaaggaactgagtacattaccctgat

SEQ ID NO: 628372 - DNA, 120 bp, Artificial Sequence
  ENSG00000179163_13 (sequence is synthesized)
gtctaaatggaccaaagatctgagatccattgtgattatatctgtatcaggtcagcagaagaaggaactgagcagttgaactctgagttcatcaattgtaatatttggaaattatctaca

SEQ ID NO: 628373 - DNA, 120 bp, Artificial Sequence
  ENSG00000179163_14 (sequence is synthesized)
atggaatcttccctctgttctctgataacctacttgcttactcaatgcctttaagccaagtcaccctgttgcctatgggaggaggtggaaggatttggcaagctcaaccacatgctattt

SEQ ID NO: 628374 - DNA, 120 bp, Artificial Sequence
  ENSG00000179163_15 (sequence is synthesized)
agttagcatcagttgtcaccaacagtctttctgcaaagggcaggagagctttgggggaaaggaaaaggcttaccaggctgctatggtcaactcttcagaaattttcagagcaatctaaaa

SEQ ID NO: 628375 - DNA, 120 bp, Artificial Sequence
  ENSG00000179163_16 (sequence is synthesized)
gcgccaaaattcgctatgtttacagtgatactattaagaaaatgaatgtgattctgctctgtctttttaagtatgatcaaataaaaaatttgtacatcacaatcatttctaccaaaaaaa

SEQ ID NO: 628376 - DNA, 120 bp, Artificial Sequence
  ENSG00000179165_0 (sequence is synthesized)
agtccactctgcacccaacctcagcgggcgcacttttctgagttgcgcataccctctcaattattaaaggttgcagacggaaaagttagtagttttcggaattgtagaatacgctcgtgc

SEQ ID NO: 628377 - DNA, 120 bp, Artificial Sequence
  ENSG00000179165_1 (sequence is synthesized)
agcgccaggacggctaatgcttacccgaaaatgtggaaccctgatctccccatgcgtggagcgaggttggaggtagcgtagtaagaatactggagttgcttaaacgcatttgctcgaaag

SEQ ID NO: 628378 - DNA, 120 bp, Artificial Sequence
  ENSG00000179165_2 (sequence is synthesized)
tcactaccctggatatacattctggccaaaagaaagggggaaaaactccacatttttctcaaatactgagtttcatgaagagaacctccaacaaatggtatataaaggaaaacaaagcaa

SEQ ID NO: 628379 - DNA, 120 bp, Artificial Sequence
  ENSG00000179165_3 (sequence is synthesized)
acaaaagagggaaactttgcaatttattaactcaagcatgaaaatacagaaaataaagagggctcaacatacttggaaaaggaaaaaacatgaagaaaaaacatgatggcattgtttatg

SEQ ID NO: 628380 - DNA, 120 bp, Artificial Sequence
  ENSG00000179165_4 (sequence is synthesized)
aaactaaagaagttctcaatccatctcccaaagtaacacattgttgcaaatcactgtggttaaaatacagttttcagaaggcatacatgacccaacttgtcagctcccagccagttccag

SEQ ID NO: 628381 - DNA, 120 bp, Artificial Sequence
  ENSG00000179165_5 (sequence is synthesized)
ccatgtcaaggaacccagatcataatctactttctcagcccaaggagcatagcattgttcagaagcatcaccaggaggaaataattcacaagttggccatgcagctgagacacattgggg

SEQ ID NO: 628382 - DNA, 120 bp, Artificial Sequence
  ENSG00000179165_6 (sequence is synthesized)
acaacattgatcataggatggttcgagaggatcttcaacaggatggcagagatgcactagatcattttgtcttctttttctttagaagagttcaggtgttgctgcattttttctggaaca

SEQ ID NO: 628383 - DNA, 120 bp, Artificial Sequence
  ENSG00000179165_7 (sequence is synthesized)
accatttgctgtaaaaggaaagtaaaggtcaagtggtcaagttctgttttctttttaccctctgagaaacatgaatcccactgggacagatgggaagaacacccttctccgtctccctct

SEQ ID NO: 628384 - DNA, 120 bp, Artificial Sequence
  ENSG00000179165_8 (sequence is synthesized)
ttgttgaagaactgcgggttcacgagccatttgtctcttcggaggagctagctatgagatgtctgcgatcacatcacggtaaagcccaaggagtaattaggaccccaggaagccttgctg

SEQ ID NO: 628385 - DNA, 120 bp, Artificial Sequence
  ENSG00000179165_9 (sequence is synthesized)
cccagaaaacaccagcgctgtggatggtcccagggctccttgtgaggaaaccttgaacatttccttccaggaatgaaagagaacctcgtcctcaaactaaaggccacagaaatgggcact

SEQ ID NO: 628386 - DNA, 120 bp, Artificial Sequence
  ENSG00000179165_10 (sequence is synthesized)
acctcctggcccactccctgggcaccatgccctctggtgacctgttggctccactcttgtcactcatgtccagatctgcagtgccagcttctccttctcggtgacatgtcacctccctgc

SEQ ID NO: 628387 - DNA, 120 bp, Artificial Sequence
  ENSG00000179165_11 (sequence is synthesized)
cccaatcctggctccaaccctctctggaaaatcgaagtgaaacatttgtctctaatactcaaattcaacatatggctcatctcatctaccttcccatttccatgcctagaggccccacta

SEQ ID NO: 628388 - DNA, 120 bp, Artificial Sequence
  ENSG00000179165_12 (sequence is synthesized)
ctaccactagcaccgttgggtgtttccttctcaggctctgattctacaacatttacgttcttttctcacctttgatcccctcactcctctgtgacccccttcaagtcttccttcaccact

SEQ ID NO: 628389 - DNA, 120 bp, Artificial Sequence
  ENSG00000179165_13 (sequence is synthesized)
ccagtgttttcccataccactcgaccctgctcgaaggtatctttccctgctctgtcatcctcttttaggcatgcctgcttaaaatcgggagtgcttagtccttggccaacagtcctgcct

SEQ ID NO: 628390 - DNA, 120 bp, Artificial Sequence
  ENSG00000179165_14 (sequence is synthesized)
tctagaagaatgtaagacctgaaagagttatgaatctatcactaggcaaaaacttctcttttcctattgctggatggttttgctattattggttggtgggccctttgcctgtggaatgta

SEQ ID NO: 628391 - DNA, 120 bp, Artificial Sequence
  ENSG00000179165_15 (sequence is synthesized)
tttcactcattctctcctgcacgctgttaggcagttctttcacctgcatgcttcttcttttacctttttgtctacctcatagtccctctctcccctcctttaaaagaattataaatatta

SEQ ID NO: 628392 - DNA, 120 bp, Artificial Sequence
  ENSG00000179165_16 (sequence is synthesized)
ggaaagcttgttgttataaattaaaagtttacatatgtatcttgagttcttcataggggaagtgttattttaaaaaattctaaaaatgaaataaatattgttattttattgagcatgaaa

SEQ ID NO: 628393 - DNA, 120 bp, Artificial Sequence
  ENSG00000179168_0 (sequence is synthesized)
agaaccagaaggcctgggggcgaggaacaagacctcggagtatttcaaggggagacctagttccctgccctgccccgggcccagggcgccgcggtctgaactctgctcggctggaggact

SEQ ID NO: 628394 - DNA, 120 bp, Artificial Sequence
  ENSG00000179168_1 (sequence is synthesized)
cgtctccgagctccgtcagaaatggggaacttgcagtcggagccatccgcgggcgggggctcccgaaaagtgcagccctcggaccgcgcccccgactcccgccggacgtccctggtggag

SEQ ID NO: 628395 - DNA, 120 bp, Artificial Sequence
  ENSG00000179168_2 (sequence is synthesized)
cccgagatgacctcccaggccatgcgcctgactcgtgggctgggtgtctggttccctggcagcgccacacccccgggactcatggtaccccgggagccccaggcctcaccctcgaccctg

SEQ ID NO: 628396 - DNA, 120 bp, Artificial Sequence
  ENSG00000179168_3 (sequence is synthesized)
cccctcaccttagaacggccctctccagtgatgccccctcctgaagaggcggccgcggtctctgcaccacccccggcccccgcggggactctgctgcccggcccgtctaaatggcaaaag

SEQ ID NO: 628397 - DNA, 120 bp, Artificial Sequence
  ENSG00000179168_4 (sequence is synthesized)
cccgcgggcactccagttccccggatccgccgcctgctggaggcgagccatcgcggccagggcgaccctccgagcctccgcccgctgaagccgccgccgccgccccggcaactatccgtg

SEQ ID NO: 628398 - DNA, 120 bp, Artificial Sequence
  ENSG00000179168_5 (sequence is synthesized)
aaggacactgtcccgagggccccatcccaatttccgccgcccctggagacttggaagccgccaccaccattaccttctgaacggcagccggcggaccgcagaatcactcctgctctggcc

SEQ ID NO: 628399 - DNA, 120 bp, Artificial Sequence
  ENSG00000179168_6 (sequence is synthesized)
acacccgcctcacccccgacagaaagccaggctgggccccgcaaccagggccagacggccggcagggctcgcggaggggcgcctccccatgcgggcgaaggcgaaatggcccagcctgcg

SEQ ID NO: 628400 - DNA, 120 bp, Artificial Sequence
  ENSG00000179168_7 (sequence is synthesized)
gattccgagtccggtctgagcctgctgtgtaaaatcaccttcaagtcgaggccctctttggcccctccggcagcctcgagttccttagcagccaaagcttcgctggggggcggcggaggc

SEQ ID NO: 628401 - DNA, 120 bp, Artificial Sequence
  ENSG00000179168_8 (sequence is synthesized)
ggcggcctctttgctgcctcaggtgccatctcttacgccgaggtcctgaagcaagggcccctgcctcctggagccgctcgccccttgggagaggtttctcgaggggcacaggaagccgag

SEQ ID NO: 628402 - DNA, 120 bp, Artificial Sequence
  ENSG00000179168_9 (sequence is synthesized)
ccaccttcccaggctcgaagcccaaattcgactgggttagcgctcccgacggccctgaacgccacttccgcttcaacggggctggcggaggcatcggggcgccgcgacggcgtgcggccg

SEQ ID NO: 628403 - DNA, 120 bp, Artificial Sequence
  ENSG00000179168_10 (sequence is synthesized)
cactctctgggccttggggctcccctccgccaccaccagagcagatacactcagctcccgggccccggaggcccgcacctgccctgctggcgccgcctacgttcatcttcccagcaccca

SEQ ID NO: 628404 - DNA, 120 bp, Artificial Sequence
  ENSG00000179168_11 (sequence is synthesized)
ccaatggcgagcccatgcgcccggggcctccaggcctgcaggagttaccaccgctgccaccgcccacaccgccgcccacactgcagccaccagcgctccagccaacgccgctgccggtgg

SEQ ID NO: 628405 - DNA, 120 bp, Artificial Sequence
  ENSG00000179168_12 (sequence is synthesized)
ctcccccgctcaccccgggtctgggccacaaggagtcagccctggctcccaccgcagcccctgctctgcccccagccttagccgccgaccaggccccggccccatccccggctccagctc

SEQ ID NO: 628406 - DNA, 120 bp, Artificial Sequence
  ENSG00000179168_13 (sequence is synthesized)
ccaccgtggctgagccctcgccgcctgtgtccgcgcccgcacccgcggctgcgcccatcaagacccgcacgcgcaggaacaagggttcccgtgcagcccggggcgcgacccgtaaggatg

SEQ ID NO: 628407 - DNA, 120 bp, Artificial Sequence
  ENSG00000179168_14 (sequence is synthesized)
gcttgcatggagatggtcctcgcgaacgagctacagctaccgtgcctgacagcagtggtggagggggtggtggcagcggggcctctcagactggggcagctaacacccgcgctgcgcgcc

SEQ ID NO: 628408 - DNA, 120 bp, Artificial Sequence
  ENSG00000179168_15 (sequence is synthesized)
actggctgcccttccaggtgcttaactcctgtccctgcaagtgttactgccaccaccagccacgccatcgccgcctgccacgcaacgtctctgcctggctgagcacatccaccaaccacc

SEQ ID NO: 628409 - DNA, 120 bp, Artificial Sequence
  ENSG00000179168_16 (sequence is synthesized)
tgggcgagccaccctgggttgccaccatcaagctgtccggctctctggtggccaagctggagcactacgacttgcaggccacccattccaactgagtgtagtcggctcaacaccctccac

SEQ ID NO: 628410 - DNA, 120 bp, Artificial Sequence
  ENSG00000179168_17 (sequence is synthesized)
cttcccctccatgccaataaaataaccaatccagatgccagcagcctgtcaatcactcgccaaggcagtgggtagggtgcagcagggcaggatcgccattaaagcacatcttggaaacaa

SEQ ID NO: 628411 - DNA, 120 bp, Artificial Sequence
  ENSG00000179168_18 (sequence is synthesized)
attctaaaggggaggggctaaggagaacaacccaaaggggtggagcttagaaccagaaggcctgggggcgaggaacaagacctcggagtatttcaaggggagacctaggttcgtaagggg

SEQ ID NO: 628412 - DNA, 120 bp, Artificial Sequence
  ENSG00000179168_19 (sequence is synthesized)
ccgggctcccgcgggctcgcaggagggcggggcctcgagctccgggggcggggcctacatctcggggtccgccctagttgtctcgcccacttgccttcacccgcacccccgttcttttcg

SEQ ID NO: 628413 - DNA, 120 bp, Artificial Sequence
  ENSG00000179168_20 (sequence is synthesized)
ggcctgggggcgaggaacaagacctcggagtatttcaaggggagacctagttccctgccctgccccgggcccagggcgccgcggtctgaactctgctcggctggaggactcggtgcttaa

SEQ ID NO: 628414 - DNA, 120 bp, Artificial Sequence
  ENSG00000179172_0 (sequence is synthesized)
ctgagctacaactacaaccagaggtctaaactacaaccagatctgaattcttgttgggagccattttgtgaagagacgaagactgagctgttttggctgcatttctggcctcgagccgca

SEQ ID NO: 628415 - DNA, 120 bp, Artificial Sequence
  ENSG00000179172_1 (sequence is synthesized)
gtcagtttctccccgtagaacccggcagtaggagacttagaatcgaatctcttctccctcccgcctcctgtttttggctttttgagaaaccttatcatccaacacaatggccagcaacgt

SEQ ID NO: 628416 - DNA, 120 bp, Artificial Sequence
  ENSG00000179172_2 (sequence is synthesized)
taccaacaagatggatcctcactccatgaactcccgtgtgttcattgggaatctcaacactcttgttgtcaagaaatcggatgtggaggcgatcttttccaagtatggcaaaattgcggg

SEQ ID NO: 628417 - DNA, 120 bp, Artificial Sequence
  ENSG00000179172_3 (sequence is synthesized)
ctgctctgttcataagggctttgccttcgttcaatatgataaggagaaaaatgcccgggctgctgtagcaggagaggatggcagaatgattgctagccaggttgtagatattaacctggc

SEQ ID NO: 628418 - DNA, 120 bp, Artificial Sequence
  ENSG00000179172_4 (sequence is synthesized)
gcaggtgtgaaacgatcagcagcggagatgtacggctcctcttttgacttggactatggctttcaacgggattattatgatggaatgtacagtttcccagcacgtgtacctcctcctcct

SEQ ID NO: 628419 - DNA, 120 bp, Artificial Sequence
  ENSG00000179172_5 (sequence is synthesized)
cccattgctctggctgtagtgccctcgaaacgtcaacgtctatcaggaaacacctcacgaaggggcaaaagtggcttcaattctaagagtggaaagcggggatcttccaagtctggaaag

SEQ ID NO: 628420 - DNA, 120 bp, Artificial Sequence
  ENSG00000179172_6 (sequence is synthesized)
ttgaaaggtgatgaccttcaggccattaagcaggagttgacccagataaaacagaaagtggattctctcctggaaaacctggaaaaaattgaaaaggaacagagcaaacaagaggtagag

SEQ ID NO: 628421 - DNA, 120 bp, Artificial Sequence
  ENSG00000179172_7 (sequence is synthesized)
gtgaaaaatgctaagtcagaagaggagcagagcagtagctccatgaagaaagatgagactcatgtgaagatggagtctgaggggggtgcagaagactctgctgaggagggggacccactg

SEQ ID NO: 628422 - DNA, 120 bp, Artificial Sequence
  ENSG00000179172_8 (sequence is synthesized)
gatgatgatgttaatgaagatcagggggatgaccagctggagttgatcaaggatgatgaaaaagaggctgaggaaggagaggatgacagagacagcaccaatggccaggatgactcttaa

SEQ ID NO: 628423 - DNA, 120 bp, Artificial Sequence
  ENSG00000179178_0 (sequence is synthesized)
catttgagggagaatgagcacggggcttttggaggctgcagcctagggccaagggatggaggaatgcctcagcccagcagaaggagcagtgccacgtcagccaatcggctcaggccctgc

SEQ ID NO: 628424 - DNA, 120 bp, Artificial Sequence
  ENSG00000179178_1 (sequence is synthesized)
cctggaaacgacacctgttcatcctcctcccggcaggctcacctgagtgcaggttaggcaggtgaagtgtctccccggaaaccaagctagagtgccccacctgctcggccctgccttctc

SEQ ID NO: 628425 - DNA, 120 bp, Artificial Sequence
  ENSG00000179178_2 (sequence is synthesized)
ggatcggatccagcacatccaggcttctcctcctcccgaggaaccagtggtgacagctgaggccatgtgagtaggatcctgaatgaggctttatctctggctgttcgtcccatcgtccac

SEQ ID NO: 628426 - DNA, 120 bp, Artificial Sequence
  ENSG00000179178_3 (sequence is synthesized)
cgtggcaccagctccctcagccagccgggatgggaccagcgactgagagagccagaggcagagaggtgagggtgaccatatcctggactgtgagaggaatgggactctgggcctgtagct

SEQ ID NO: 628427 - DNA, 120 bp, Artificial Sequence
  ENSG00000179178_4 (sequence is synthesized)
gccaagcaggtggcaggtgctccaggctgtgatctgaaccctctgacccctgacattgacctcctaccctgacccctgcctgaccaagccatgtctgaacaggaggctcaagccccaggg

SEQ ID NO: 628428 - DNA, 120 bp, Artificial Sequence
  ENSG00000179178_5 (sequence is synthesized)
ggccgggggctgcccccggacatgctggcagagcaggtggagctgtggtggtcccagcagccgcggcgctcggcgctctgcttcgtcgtggccgtgggcctcgtggcaggctgtggcgcg

SEQ ID NO: 628429 - DNA, 120 bp, Artificial Sequence
  ENSG00000179178_6 (sequence is synthesized)
ggcggcgtggcactgctgtcaaccaccagcagccgctcaggtgaatggcggctagcaacgggcactgtgctctgtttgctggctctgctggttctggtgaaacagctgatgagctcggct

SEQ ID NO: 628430 - DNA, 120 bp, Artificial Sequence
  ENSG00000179178_7 (sequence is synthesized)
ctgctgcgcagtggtggaggggccgacgccctcgtggtgctgctcagtggcctcgtgctgctggtcaccggcctgaccctggccgggctggccgccgcccctgcccctgctcggccgctg

SEQ ID NO: 628431 - DNA, 120 bp, Artificial Sequence
  ENSG00000179178_8 (sequence is synthesized)
gctgtctgtgggcattgctctggctgccttgggctcgcttttgctgctgggcctgctgctgtatcaagtgggtgtgagcggacactgcccctccatctgtatggccactccctccaccca

SEQ ID NO: 628432 - DNA, 120 bp, Artificial Sequence
  ENSG00000179178_9 (sequence is synthesized)
cagtggccatggcggccatggcagcatcttcagcatctcaggacagttgtctgctggccggcgtcacgagaccacatccagcattgccagcctcatctgacggagccagagccgtccttc

SEQ ID NO: 628433 - DNA, 120 bp, Artificial Sequence
  ENSG00000179178_10 (sequence is synthesized)
ttctcacagcggcctcagcgtccccagagccgagccagggtgtgagtgcatgtgaacgttgagtacacatgagtgcgtgtatgcccccaggctgggtcagctcttctgtggattgcatgg

SEQ ID NO: 628434 - DNA, 120 bp, Artificial Sequence
  ENSG00000179178_11 (sequence is synthesized)
cgtgtgattaaaagcccatgtgttcccacacatccacatcatgggaaggttaatgtgtgcctccttggaactgggtgttggtgtccatggaacttcctctctgtatctcaggtcagtagg

SEQ ID NO: 628435 - DNA, 120 bp, Artificial Sequence
  ENSG00000179178_12 (sequence is synthesized)
cgcagaaacgcctcatgatgaagattcttgagccccatttccaagacccctcacatccaatcctgtcctgtaacatccatcaaggatttccataggggtgactggtgcccacccaagact

SEQ ID NO: 628436 - DNA, 120 bp, Artificial Sequence
  ENSG00000179178_13 (sequence is synthesized)
gcaccagtgcctgctcattgaggagagtaactgctggccaggcagaaagaatatgggctctgcaatgagacagacctggaggggactctcccgttgagcactagcagctggaggagttgg

SEQ ID NO: 628437 - DNA, 120 bp, Artificial Sequence
  ENSG00000179178_14 (sequence is synthesized)
gagttcatggctatcatggttgtgttaatcgattgtggggatgaaatgtcattgtgtatggaaggcggggctcatggctgattggcaataaaatggcggctgccgttgtcattgtctcca

SEQ ID NO: 628438 - DNA, 120 bp, Artificial Sequence
  ENSG00000179178_15 (sequence is synthesized)
actcaaatcctgcttccccagtaggatccagtctgtggggctcatttgagggagaatgagcacggggcttttggaggctgcagcctagggccaagggatggaggctcacctgagtgcagg

SEQ ID NO: 628439 - DNA, 120 bp, Artificial Sequence
  ENSG00000179178_16 (sequence is synthesized)
ggaatgctgggactgactccacggccacgcccacctcccccacttccttgagagcatcggcaccagcccccgcccacctcgggggtaggggtcagcctctgcagaggagtctccgggagg

SEQ ID NO: 628440 - DNA, 120 bp, Artificial Sequence
  ENSG00000179178_17 (sequence is synthesized)
acagatacctcgtcaggatgtaacctgtgcacggccacatagtaatattcccagaatgacccaggacctacgtcttctgccctgtcctgccttggagggctcctcccgaggaaccagtgg

SEQ ID NO: 628441 - DNA, 120 bp, Artificial Sequence
  ENSG00000179195_0 (sequence is synthesized)
ggaggcgtctgggtgtgcggagcgcgcgcgcgcgcggctcggaggcgcacctgtgaggtgtccctgaggagagggaggtgggtgcgcggcgcccgcggcctggggcgctgactcccctca

SEQ ID NO: 628442 - DNA, 120 bp, Artificial Sequence
  ENSG00000179195_1 (sequence is synthesized)
tgactcccctcacttggaggcgccctgcgtccggcagaggaggcgagcatcccgctcaggtgatgaggaacccctcgcgcacccagcgcagaaggctgctgccgccggacgcctccattg

SEQ ID NO: 628443 - DNA, 120 bp, Artificial Sequence
  ENSG00000179195_2 (sequence is synthesized)
tttgaccacaacaagggccggattctcacccagcaggatcctaaggcctttgtagtccttcagccactgtgggccctgcctctgcctgttcttctggaatgtcttgggggttttgatcct

SEQ ID NO: 628444 - DNA, 120 bp, Artificial Sequence
  ENSG00000179195_3 (sequence is synthesized)
gtcactgtgacctgcaaatccaagagacacatctttggaagataagagagcttcttcaagaccaaaaaaggagacggcatgatacccatgtagggaattccccaaagcagggcttgccat

SEQ ID NO: 628445 - DNA, 120 bp, Artificial Sequence
  ENSG00000179195_4 (sequence is synthesized)
acctggaccccgaggagcctgcttgctggaaaggctttcctgtctgatgtgcaggaggcagaatgccaaactgactcttcaaggggcaactgcaggggctcgagaccagccagcagtatc

SEQ ID NO: 628446 - DNA, 120 bp, Artificial Sequence
  ENSG00000179195_5 (sequence is synthesized)
tcatccttcgatacaggggatatactgtacagtcctttttctagaagtgagacatacaagattactctacaagaggaagattccaggggctcaaaaacgcaaaggtttgcactttgagag

SEQ ID NO: 628447 - DNA, 120 bp, Artificial Sequence
  ENSG00000179195_6 (sequence is synthesized)
ccccttggaatgttgacaactcaggatctaaaacaaagttctgtgttaatgagttacagaattcacgtggaagtcaatgtcactttataatcgataataatactgagtgaggaacactat

SEQ ID NO: 628448 - DNA, 120 bp, Artificial Sequence
  ENSG00000179195_7 (sequence is synthesized)
gcaggaagaaaccttccgtagaaagacaggcagggaaaagcttaggctgaccttaaacttacctaatagagcaagcctgagatagactgccaaaatggccaaataagagactctatgaaa

SEQ ID NO: 628449 - DNA, 120 bp, Artificial Sequence
  ENSG00000179195_8 (sequence is synthesized)
taacagtcttgtaactgtagtaatcataaggaaattttctccttgaaatcacgataccaaataggaaaaatgatctacaagtgccccatgtgtagggaatttttctctgagagagcagat

SEQ ID NO: 628450 - DNA, 120 bp, Artificial Sequence
  ENSG00000179195_9 (sequence is synthesized)
ctttttatgcatcagaaaattcacacagctgagaagccccataaatgtgacaagtgtgataagggtttctttcatatatcagaacttcatattcattggagagaccatacaggagagaag

SEQ ID NO: 628451 - DNA, 120 bp, Artificial Sequence
  ENSG00000179195_10 (sequence is synthesized)
gtctataaatgtgatgattgtggtaaggattttagcactacaacaaaacttaatagacataagaaaatccacacagtggagaagccctataaatgttacgagtgtggcaaagccttcaat

SEQ ID NO: 628452 - DNA, 120 bp, Artificial Sequence
  ENSG00000179195_11 (sequence is synthesized)
tggagctcccatcttcaaattcatatgagagttcatacaggtgagaaaccgtatgtctgtagtgagtgtggaaggggctttagtaatagttcaaacctttgcatgcatcagagagtccac

SEQ ID NO: 628453 - DNA, 120 bp, Artificial Sequence
  ENSG00000179195_12 (sequence is synthesized)
accggagagaagccctttaaatgtgaagagtgtgggaaggccttcaggcacacctccagcctctgcatgcatcaaagagtccacacaggagagaaaccctataaatgttatgagtgtggg

SEQ ID NO: 628454 - DNA, 120 bp, Artificial Sequence
  ENSG00000179195_13 (sequence is synthesized)
aaggcgttcagtcagagttcgagcctctgcatccaccagagagtccacactggagagaaaccctatagatgttgtggatgtgggaaggccttcagtcagagttcgagcctgtgcatccac

SEQ ID NO: 628455 - DNA, 120 bp, Artificial Sequence
  ENSG00000179195_14 (sequence is synthesized)
cagagagtccacacaggagagaaacctttcaaatgtgatgagtgcggaaaggccttcagtcagagtacgagcctctgcatccaccagagagtccacacaaaggagagaaaccatctcaaa

SEQ ID NO: 628456 - DNA, 120 bp, Artificial Sequence
  ENSG00000179195_15 (sequence is synthesized)
atatcagttatataaaacgttttgctaagagtttaaaatcttaaaacccataagtgccactaggaaggaaaccctgtatatacctacattgacccaagaaatatttacgcaatccctagc

SEQ ID NO: 628457 - DNA, 120 bp, Artificial Sequence
  ENSG00000179195_16 (sequence is synthesized)
agaacattgtttctgaggaggcatatgtgagattgatttgttggttcatgccaagtgtgttccacaggttgactttgaatgtggacctctgagcatccacgcaggatggctctcaggtcc

SEQ ID NO: 628458 - DNA, 120 bp, Artificial Sequence
  ENSG00000179195_17 (sequence is synthesized)
tgcttaaaagctatcccagatactcccccttgaggagctcatgcccttccttcctctttattcgagcatactggcaatgcattggaaaacagacagctcccactaagatcacgttctggt

SEQ ID NO: 628459 - DNA, 120 bp, Artificial Sequence
  ENSG00000179195_18 (sequence is synthesized)
atttctgaggttaacacttgatttagcccctacatatctttccatatatcctattatttctgaatatatgtcctcaaaatccccataaatatccatcccttcctagatggcattaacttt

SEQ ID NO: 628460 - DNA, 120 bp, Artificial Sequence
  ENSG00000179195_19 (sequence is synthesized)
cattttagattttaggtgactcataattcccattcacttagcctatcagaaaagtcattggcagacatatatgtccttgaaccttttttatttgtgtggattctgctcatcactgtctct

SEQ ID NO: 628461 - DNA, 120 bp, Artificial Sequence
  ENSG00000179195_20 (sequence is synthesized)
gttagacttattttgtagtggctgcatcacatatttttcacttgaatttttttggaaatagctgaatgtaaatagcagggaggaagaagcaagcaaagtgagagcttttcttcatccaga

SEQ ID NO: 628462 - DNA, 120 bp, Artificial Sequence
  ENSG00000179195_21 (sequence is synthesized)
attgccctctgggctcctttggtaacagatggagctccttcctagctagggagaccttatgagaagtggatggtaggaggagtcactaatgtttcaatctctatttctgtaatcttgggc

SEQ ID NO: 628463 - DNA, 120 bp, Artificial Sequence
  ENSG00000179195_22 (sequence is synthesized)
aataatgcataggagttcttgataccccttcattgattactgtgtatcagttctttgttaggcatgaacgtctttattaatccatcattcttttcttcattcaacaaatatgtattgaac

SEQ ID NO: 628464 - DNA, 120 bp, Artificial Sequence
  ENSG00000179195_23 (sequence is synthesized)
acctcctatatgccaggcactgtgctaggtgctgggaataccactgatgagacagacaaggtccctactcttgtggagtttacttctggtggaggagacagatgataagtaaacaaataa

SEQ ID NO: 628465 - DNA, 120 bp, Artificial Sequence
  ENSG00000179195_24 (sequence is synthesized)
ataatgtagtttgagatagtgattaagtgctatgaagaaaataaactagggtgatgattttagtggtggggtggggtgggggtggggtgacattagctagtggtcagggaggcctttccg

SEQ ID NO: 628466 - DNA, 120 bp, Artificial Sequence
  ENSG00000179195_25 (sequence is synthesized)
cggtgggatgttgagctgaggccggaggagaagtagcagtcgctggcagagcacacaggctgctctgggggatgagctggtgcgtttaaggaacaggccagcactggcattcgcaagcag

SEQ ID NO: 628467 - DNA, 120 bp, Artificial Sequence
  ENSG00000179195_26 (sequence is synthesized)
tggggaaggggagagatgccgaggtggtcagtatcctgactttcagaggcctttttttgtttgttttaatttttgctagattgatattaaaaactcatgtggaggaactcaaggaatgtt

SEQ ID NO: 628468 - DNA, 120 bp, Artificial Sequence
  ENSG00000179195_27 (sequence is synthesized)
tagaagaccaaaagtccccaatgacaggaacaaaagcaaccaatttttaactttctcttctcattcctgttttcattgatttcccacatgtagtccttttgctcaggaagtctttgggga

SEQ ID NO: 628469 - DNA, 120 bp, Artificial Sequence
  ENSG00000179195_28 (sequence is synthesized)
aattaaggatctttgaagctctgaaataggtgatcaggttagtggtgtctgtcagctgtctaagaggttggaaaatgaactactcaagatagtcacgaaaatactgaaagtttgattttt

SEQ ID NO: 628470 - DNA, 120 bp, Artificial Sequence
  ENSG00000179195_29 (sequence is synthesized)
ctttccatatttgaattaattttttctgtttgactggaaggggtttttgtataactaaaacctcagcgcataaaggagatttaaaaggagcacatgatttagtgggtgggccatgaaact

SEQ ID NO: 628471 - DNA, 120 bp, Artificial Sequence
  ENSG00000179195_30 (sequence is synthesized)
agagatgggatttgggggtgaatttgtcaatatctggattttaatccagacatctctgctaacaagcctttggtaagtcacttcagatacttttcctcctttttacaaagagagggctgg

SEQ ID NO: 628472 - DNA, 120 bp, Artificial Sequence
  ENSG00000179195_31 (sequence is synthesized)
cttagttatttgccaaagccccttccaggcctgaattccacaagtacgatttactgtagtgtcttatcactctttcatgtcacaatagcgtggagcattagagaaaagcctagactttta

SEQ ID NO: 628473 - DNA, 120 bp, Artificial Sequence
  ENSG00000179195_32 (sequence is synthesized)
gttgatagccagttgaaatatcattgatagaattttagttttaggaaaaattggtttgatttctagctttattactattaggtatgtgagcttgggcaaatcgcttaatctttgagtcta

SEQ ID NO: 628474 - DNA, 120 bp, Artificial Sequence
  ENSG00000179195_33 (sequence is synthesized)
gttttctctcaaaatgagaacattaggctaaatgatttccgagtttccagctagtcctagagttctatatttctacatagttgaattattttatcatgctgttgctggggaatatgacta

SEQ ID NO: 628475 - DNA, 120 bp, Artificial Sequence
  ENSG00000179195_34 (sequence is synthesized)
acccttttgaagctactaattttatgtcgagctttaaagtccataattgttatcttcagaaaatattatttgacctacagtatgtccaaatcaatttaataaaatcgctttataacaggg

SEQ ID NO: 628476 - DNA, 120 bp, Artificial Sequence
  ENSG00000179195_35 (sequence is synthesized)
ggcggccgggctgcagtctttctttctttcccggagggaggcgggggccgggggccagggagcgggctgggggtgggaaggaggtggagtggcttaaagaaaagaaaaacaacccatccc

SEQ ID NO: 628477 - DNA, 120 bp, Artificial Sequence
  ENSG00000179195_36 (sequence is synthesized)
aaaaacaacccatcccggaggatgggcctcgggatggcggggaaggtcagagcggctccgcgcagcctggcgggtcccgggctgagaagccgcccctcgggcctcgggcggtcggccgcg

SEQ ID NO: 628478 - DNA, 120 bp, Artificial Sequence
  ENSG00000179195_37 (sequence is synthesized)
ccggggggcgcagatggcggccggtgcgagcgagggctgggcagcgggcagggcgaggccgggcgaggcccctcgggagccggactcccgagccaggctccattgttgttggagccgagg

SEQ ID NO: 628479 - DNA, 120 bp, Artificial Sequence
  ENSG00000179195_38 (sequence is synthesized)
ttggagccgagggaagggggagcgctgccgccctcgtcgcccgtggagccgcgtcttggagcccttccaggcgggtcccgggagaggcggtcatggccgcgccaggggaccggggagccg

SEQ ID NO: 628480 - DNA, 120 bp, Artificial Sequence
  ENSG00000179195_39 (sequence is synthesized)
gtccacttccctctgactcccgcctccgcaggcgttctcaccccttccaggactcgactgcagttttctcactgtccccggcttctcatgaactccgtataccccctcccagacattttc

SEQ ID NO: 628481 - DNA, 120 bp, Artificial Sequence
  ENSG00000179195_40 (sequence is synthesized)
tcatttcccccagaactcagctcctttgtgaaacctttcttgccgaactctaacaactaaatctccccgggagcctgctccgaactgaactgttctggttgctagattgcttacgggctg

SEQ ID NO: 628482 - DNA, 120 bp, Artificial Sequence
  ENSG00000179195_41 (sequence is synthesized)
tcttattgcaacaaaggagaccagataccgaaaaaagatttctgagctattgccttcttcaaggaacgttttctgatatttacagtttattgttttcacaggctggaacggtttttaggc

SEQ ID NO: 628483 - DNA, 120 bp, Artificial Sequence
  ENSG00000179195_42 (sequence is synthesized)
attttggcttcttatttagagagggctcctatttccttcatagacgcatagttttttagagcaggaaattgaccttgttcaacccgcaggttaattaaaaatttaaaaattaattctaaa

SEQ ID NO: 628484 - DNA, 120 bp, Artificial Sequence
  ENSG00000179195_43 (sequence is synthesized)
acatcctgaggttctggatggatatgaattctggggagacactattcaacccagtatactttttgcctttcttccttagagctccagctaatccagatgcaacattgacgaattagtgcc

SEQ ID NO: 628485 - DNA, 120 bp, Artificial Sequence
  ENSG00000179195_44 (sequence is synthesized)
tccttagagctccagctaatccagatgcaacattgacgaattagtgccggaatgagtatcagcacttgaaaaccctacagagatgccttggtcactccagataagagtttctgtggctga

SEQ ID NO: 628486 - DNA, 120 bp, Artificial Sequence
  ENSG00000179195_45 (sequence is synthesized)
tgacctctgtatacatgctgtgcctcctgttctttatgtggccacttcactttgtcctttgggtttcagcttaaaagtagagtcaactagaaatcttcattaccatgctgagactagtta

SEQ ID NO: 628487 - DNA, 120 bp, Artificial Sequence
  ENSG00000179195_46 (sequence is synthesized)
ggatgcccctggctcatcagctgtaatgcctctgtcaaagctccactcaaacatgctagaaccatcgccttcccctcctcaactgtaaaccacagaaatgcagaggccctgtctgttttg

SEQ ID NO: 628488 - DNA, 120 bp, Artificial Sequence
  ENSG00000179213_0 (sequence is synthesized)
agataatgttaacaatgtgatttagagtggaagcaataccagatagtctaacaatgtgatttagaataggggctttggatcaaatggtatcagctcaacttcaggaggagctggatgcta

SEQ ID NO: 628489 - DNA, 120 bp, Artificial Sequence
  ENSG00000179213_1 (sequence is synthesized)
agatccaccatgagggaagtcaccatgttacacgatggaggcccaataaaaacactggacacaaggcttgggtgaacaggccttcacgatgaccagagacagaagcccctgacttggcta

SEQ ID NO: 628490 - DNA, 120 bp, Artificial Sequence
  ENSG00000179213_2 (sequence is synthesized)
aagatacttctgctctccccatccccacatcctctttcagttacgcatcacctcactccttctgaaccatatggttctgatgtcagagccagtgtagtaaagagcttctgctgttcctga

SEQ ID NO: 628491 - DNA, 120 bp, Artificial Sequence
  ENSG00000179213_3 (sequence is synthesized)
gaactgttgctgctggaagtgatgcttccactgctacagctggtacctgctaagctgctcaactcctcttgctccttggagaagacactgcagtgcagctgttccttccatgggattccc

SEQ ID NO: 628492 - DNA, 120 bp, Artificial Sequence
  ENSG00000179213_4 (sequence is synthesized)
acaccctctgtgcagtggtggatgggaggagtccccgtgggtgtggatggcatggatggcagcctccaagtgacttccaccatgcttggcccctgggctaacagcaccatcagcctaact

SEQ ID NO: 628493 - DNA, 120 bp, Artificial Sequence
  ENSG00000179213_5 (sequence is synthesized)
gaagagccagaaatgggcatgagacttctctgtgaggggaagaaccaaaacggaacccatgctttgagcatcctactgatgtcaagaaagagttctttggctgcccaggccttcgtgaaa

SEQ ID NO: 628494 - DNA, 120 bp, Artificial Sequence
  ENSG00000179213_6 (sequence is synthesized)
gggctgatccagggtgctatctatgcgggaattgtaattgcgctgctcttcctctgcctcctccctctcatagtgaaacatatcagaaagaagcaggcgaagaaagctgcagcgatcaga

SEQ ID NO: 628495 - DNA, 120 bp, Artificial Sequence
  ENSG00000179213_7 (sequence is synthesized)
gccaagaacttgagatgtctctgaagcctgaggaaccaggaaaacccgtagtcgccacattttctgagagccggatattggaaaagcaagataaacgagccagctaagcctgtggaacat

SEQ ID NO: 628496 - DNA, 120 bp, Artificial Sequence
  ENSG00000179213_8 (sequence is synthesized)
gcctcatacctggagtcgccattatccctggaattacaaagatctgcaaaatttatagcgctcacagaaaccctggaggctgtaataaacctggagccccctggactctcctcagctcac

SEQ ID NO: 628497 - DNA, 120 bp, Artificial Sequence
  ENSG00000179213_9 (sequence is synthesized)
aaaaccctctcaattcctacacatcccttaacactcattctccattgaataggtggttactcttagacctagtcttagaacctctgaagacacactttgtaatttgttgtttggctaaat

SEQ ID NO: 628498 - DNA, 120 bp, Artificial Sequence
  ENSG00000179213_10 (sequence is synthesized)
gagaagaaatctgtgccaccctgggaaggtgtcaaaagaaggaaaaatacatgtgacaatatgaatcaagtccatcagcaagttacttttgagcgcctactgtgtgtcagtgcctgagat

SEQ ID NO: 628499 - DNA, 120 bp, Artificial Sequence
  ENSG00000179213_11 (sequence is synthesized)
acacctacaagagcgccaggctttcaagccttcatatctggatagaatcccaacttcagtgcttggtggctgtctatctttggacaagatctttcattccccatcctttgaacatcacat

SEQ ID NO: 628500 - DNA, 120 bp, Artificial Sequence
  ENSG00000179213_12 (sequence is synthesized)
gacccatatctgggtggagaatgggtgaaaagtactgttcagagatgcaggtgagaaaaaacatgacgatgggccctgaatgccaagattcattggagctttggagctttatcttgtagg

SEQ ID NO: 628501 - DNA, 120 bp, Artificial Sequence
  ENSG00000179213_13 (sequence is synthesized)
accttatcctgactcccttagaatgtaagttccaagagaacagggactttgtctgccttgttttctacttttatcaccagcacccagaatgatgcctaaaatacaataagatctcaagaa

SEQ ID NO: 628502 - DNA, 120 bp, Artificial Sequence
  ENSG00000179213_14 (sequence is synthesized)
atgcactcacctaaggatgcgagctagcaggtcttgcagcggctatcacgcccctcacgccgctatctctgtgcagccgactgaggatccctagtcgcataaggctgtgcctggcctgtt

SEQ ID NO: 628503 - DNA, 120 bp, Artificial Sequence
  ENSG00000179213_15 (sequence is synthesized)
ggcgtccctggcagttgttgggttctggcggttgttgggtccctggcagttgttggcggttgttgggttccttcattgaaactgcactaactgggcttccagtcagcgtcagtcagcgga

SEQ ID NO: 628504 - DNA, 120 bp, Artificial Sequence
  ENSG00000179213_16 (sequence is synthesized)
tccttgggccgtggggcagccgcaggtcggttaggccaccagggcggctctcgtgccagtgaggcccctgagagccctttggtcagacagaggctaaatctgaacagtcaggcggtgaga

SEQ ID NO: 628505 - DNA, 120 bp, Artificial Sequence
  ENSG00000179213_17 (sequence is synthesized)
ttaagcatagtcagggagttcgccaggagccagcgttcctcagcctccaccacgtcagtcacctggtcagccagagggcagctggggcgacatccatctaccaagaaggtgaacaggcct

SEQ ID NO: 628506 - DNA, 120 bp, Artificial Sequence
  ENSG00000179213_18 (sequence is synthesized)
gtatcttgaagagatatctgcactcctgtgttcattgcagcattattcaccatagcccacacgtggaatcaacgtgaacaggccttcacgatgaccagagacagaagcccctgacttggc

SEQ ID NO: 628507 - DNA, 120 bp, Artificial Sequence
  ENSG00000179218_0 (sequence is synthesized)
ccgtccgtactgcagagccgctgccggagggtcgttttaaagggcccgcgcgttgccgccccctcggcccgccatgctgctatccgtgccgctgctgctcggcctcctcggcctggccgt

SEQ ID NO: 628508 - DNA, 120 bp, Artificial Sequence
  ENSG00000179218_1 (sequence is synthesized)
cgccgagcctgccgtctacttcaaggagcagtttctggacggagacgggtggacttcccgctggatcgaatccaaacacaagtcagattttggcaaattcgttctcagttccggcaagtt

SEQ ID NO: 628509 - DNA, 120 bp, Artificial Sequence
  ENSG00000179218_2 (sequence is synthesized)
ctacggtgacgaggagaaagataaaggtttgcagacaagccaggatgcacgcttttatgctctgtcggccagtttcgagcctttcagcaacaaaggccagacgctggtggtgcagttcac

SEQ ID NO: 628510 - DNA, 120 bp, Artificial Sequence
  ENSG00000179218_3 (sequence is synthesized)
ggtgaaacatgagcagaacatcgactgtgggggcggctatgtgaagctgtttcctaatagtttggaccagacagacatgcacggagactcagaatacaacatcatgtttggtcccgacat

SEQ ID NO: 628511 - DNA, 120 bp, Artificial Sequence
  ENSG00000179218_4 (sequence is synthesized)
ctgtggccctggcaccaagaaggttcatgtcatcttcaactacaagggcaagaacgtgctgatcaacaaggacatccgttgcaaggatgatgagtttacacacctgtacacactgattgt

SEQ ID NO: 628512 - DNA, 120 bp, Artificial Sequence
  ENSG00000179218_5 (sequence is synthesized)
gcggccagacaacacctatgaggtgaagattgacaacagccaggtggagtccggctccttggaagacgattgggacttcctgccacccaagaagataaaggatcctgatgcttcaaaacc

SEQ ID NO: 628513 - DNA, 120 bp, Artificial Sequence
  ENSG00000179218_6 (sequence is synthesized)
ggaagactgggatgagcgggccaagatcgatgatcccacagactccaagcctgaggactgggacaagcccgagcatatccctgaccctgatgctaagaagcccgaggactgggatgaaga

SEQ ID NO: 628514 - DNA, 120 bp, Artificial Sequence
  ENSG00000179218_7 (sequence is synthesized)
cacccagaaattgacaaccccgagtattctcccgatcccagtatctatgcctatgataactttggcgtgctgggcctggacctctggcaggtcaagtctggcaccatctttgacaacttc

SEQ ID NO: 628515 - DNA, 120 bp, Artificial Sequence
  ENSG00000179218_8 (sequence is synthesized)
ctcatcaccaacgatgaggcatacgctgaggagtttggcaacgagacgtggggcgtaacaaaggcagcagagaaacaaatgaaggacaaacaggacgaggagcagaggcttaaggaggag

SEQ ID NO: 628516 - DNA, 120 bp, Artificial Sequence
  ENSG00000179218_9 (sequence is synthesized)
gaagaagacaagaaacgcaaagaggaggaggaggcagaggacaaggaggatgatgaggacaaagatgaggatgaggaggatgaggaggacaaggaggaagatgaggaggaagatgtcccc

SEQ ID NO: 628517 - DNA, 120 bp, Artificial Sequence
  ENSG00000179218_10 (sequence is synthesized)
ggccaggccaaggacgagctgtagagaggcctgcctccagggctggactgaggcctgagcgctcctgccgcagagctggccgcgccaaataatgtctctgtgagactcgagaactttcat

SEQ ID NO: 628518 - DNA, 120 bp, Artificial Sequence
  ENSG00000179218_11 (sequence is synthesized)
ttttttccaggctggttcggatttggggtggattttggttttgttcccctcctccactctcccccaccccctccccgcccttttttttttttttttttaaactggtattttatctttgat

SEQ ID NO: 628519 - DNA, 120 bp, Artificial Sequence
  ENSG00000179218_12 (sequence is synthesized)
tctccttcagccctcacccctggttctcatctttcttgatcaacatcttttcttgcctctgtccccttctctcatctcttagctcccctccaacctggggggcagtggtgtggagaagcc

SEQ ID NO: 628520 - DNA, 120 bp, Artificial Sequence
  ENSG00000179218_13 (sequence is synthesized)
acaggcctgagatttcatctgctctccttcctggagcccagaggagggcagcagaagggggtggtgtctccaaccccccagcactgaggaagaacggggctcttctcatttcacccctcc

SEQ ID NO: 628521 - DNA, 120 bp, Artificial Sequence
  ENSG00000179218_14 (sequence is synthesized)
ctttctcccctgcccccaggactgggccacttctgggtggggcagtgggtcccagattggctcacactgagaatgtaagaactacaaacaaaatttctattaaattaaattttgtgtctc

SEQ ID NO: 628522 - DNA, 120 bp, Artificial Sequence
  ENSG00000179218_15 (sequence is synthesized)
aggacatccgttgcaaggtgtgcctgggggtggtggcaaatggctgtcatggggagattcagaggtcagcctcattggggggtggcccccgctcaccttcttccttcttcaggatgatga

SEQ ID NO: 628523 - DNA, 120 bp, Artificial Sequence
  ENSG00000179218_16 (sequence is synthesized)
cccgatcctggatctgcgttgtcgcccgtaattaccgtttagaggtccaacacggtggcctcccgggactagagccgcgggcgatttctcttctgcgtccctggggagcgcggagggcgt

SEQ ID NO: 628524 - DNA, 120 bp, Artificial Sequence
  ENSG00000179218_17 (sequence is synthesized)
aggaggaagatgtccccggccaggccaaggacgagctgtagagaggcctgcctccagggctggactgaggcctgagcgctcctgccgcagagctggccgcgccaaataatgtctctctcc

SEQ ID NO: 628525 - DNA, 120 bp, Artificial Sequence
  ENSG00000179218_18 (sequence is synthesized)
cttggcctctgggcgaggattacaggcgtgatccacctcacctggcctctccatctttttaactgcagtgtcagcggtgttccttgtcttctctgcagatgcaggcagcagaatatagtg

SEQ ID NO: 628526 - DNA, 120 bp, Artificial Sequence
  ENSG00000179222_0 (sequence is synthesized)
ggcgaagaggcggggtcgcccaagctgccgcgctggcattttctcctggacaaggagagagtgcggctgctgagagccgagcccagcaatcccgatcctctgagtcgtgaagaagggagg

SEQ ID NO: 628527 - DNA, 120 bp, Artificial Sequence
  ENSG00000179222_1 (sequence is synthesized)
cagcgagggggttggggttggggcctgaggcaagcccccaggctccgctcttgccagagggacaggagccatggctcagaaaatggactgtggtgcgggcctcctcggcttccaggctga

SEQ ID NO: 628528 - DNA, 120 bp, Artificial Sequence
  ENSG00000179222_2 (sequence is synthesized)
ggcctccgtagaagacagcgccttgcttatgcagaccttgatggaggccatccagatctcagaggctccacctactaaccaggccaccgcagctgctagtccccagagttcacagccccc

SEQ ID NO: 628529 - DNA, 120 bp, Artificial Sequence
  ENSG00000179222_3 (sequence is synthesized)
aactgccaatgagatggctgacattcaggtttcagcagctgccgctaggcctaagtcagcctttaaagtccagaatgccaccacaaaaggcccaaatggtgtctatgatttctctcaggc

SEQ ID NO: 628530 - DNA, 120 bp, Artificial Sequence
  ENSG00000179222_4 (sequence is synthesized)
tcataatgccaaggatgtgcccaacacgcagcccaaggcagcctttaagtcccaaaatgctaccccaaagggtccaaatgctgcctatgatttttcccaggcagcaaccactggtgagtt

SEQ ID NO: 628531 - DNA, 120 bp, Artificial Sequence
  ENSG00000179222_5 (sequence is synthesized)
agctgctaacaagtctgagatggccttcaaggcccagaatgccactactaaagtgggcccaaatgccacctacaatttctctcagtctctcaatgccaatgacctggccaacagcaggcc

SEQ ID NO: 628532 - DNA, 120 bp, Artificial Sequence
  ENSG00000179222_6 (sequence is synthesized)
taagacccctttcaaggcttggaatgataccactaaggccccaacagctgatacccagacccagaatgtaaatcaggccaaaatggccacttcccaggctgacatagagaccgacccagg

SEQ ID NO: 628533 - DNA, 120 bp, Artificial Sequence
  ENSG00000179222_7 (sequence is synthesized)
tatctctgaacctgacggtgcaactgcacagacatcagcagatggttcccaggctcagaatctggagtcccggacaataattcggggcaagaggacccgcaagattaataacttgaatgt

SEQ ID NO: 628534 - DNA, 120 bp, Artificial Sequence
  ENSG00000179222_8 (sequence is synthesized)
tgaagagaacagcagtggggatcagaggcgggccccactggctgcagggacctggaggtctgcaccagttccagtgaccactcagaacccacctggcgcaccccccaatgtgctctggca

SEQ ID NO: 628535 - DNA, 120 bp, Artificial Sequence
  ENSG00000179222_9 (sequence is synthesized)
gacgccattggcttggcagaacccctcaggctggcaaaaccagacagccaggcagaccccaccagcacgtcagagccctccagctaggcagaccccaccagcctggcagaacccagtcgc

SEQ ID NO: 628536 - DNA, 120 bp, Artificial Sequence
  ENSG00000179222_10 (sequence is synthesized)
ttggcagaacccagtgatttggccaaacccagtaatctggcagaacccagtgatctggccaaaccccattgtctggcccggccctgttgtctggccgaatccactggcctggcagaatcc

SEQ ID NO: 628537 - DNA, 120 bp, Artificial Sequence
  ENSG00000179222_11 (sequence is synthesized)
cacctgattggccacttcccactgactggccactaccacctgactggatccccgctgattggccaattccacctgactggcagaacctgcgcccctcgcctaacctgcgcccttctccca

SEQ ID NO: 628538 - DNA, 120 bp, Artificial Sequence
  ENSG00000179222_12 (sequence is synthesized)
actcgcgtgcctcacagaacccaggtgctgcacagccccgagatgtggcccttcttcaggaaagagcaaataagttggtcaagtacttgatgcttaaggactacacaaaggtgcccatca

SEQ ID NO: 628539 - DNA, 120 bp, Artificial Sequence
  ENSG00000179222_13 (sequence is synthesized)
agcgctcagaaatgctgagagatatcatccgtgaatacactgatgtttatccagaaatcattgaacgtgcatgctttgtcctagagaagaaatttgggattcaactgaaagaaattgaca

SEQ ID NO: 628540 - DNA, 120 bp, Artificial Sequence
  ENSG00000179222_14 (sequence is synthesized)
aagaagaacacctgtatattctcatcagtacccccgagtccctggctggcatactgggaacgaccaaagacacacccaagctcggtctcctcttggtgattctgggtgtcatcttcatga

SEQ ID NO: 628541 - DNA, 120 bp, Artificial Sequence
  ENSG00000179222_15 (sequence is synthesized)
atggcaaccgtgccagtgaggctgtcctctgggaggcactacgcaagatgggactgcgtcctggggtgagacatcccctccttggagatctaaggaaacttctcacctatgagtttgtaa

SEQ ID NO: 628542 - DNA, 120 bp, Artificial Sequence
  ENSG00000179222_16 (sequence is synthesized)
agcagaaatacctggactacagacgagtgcccaacagcaaccccccggagtatgagttcctctggggcctccgttcctaccatgagactagcaagatgaaagtgctgagattcattgcag

SEQ ID NO: 628543 - DNA, 120 bp, Artificial Sequence
  ENSG00000179222_17 (sequence is synthesized)
aggttcagaaaagagaccctcgtgactggactgcacagttcatggaggctgcagatgaggccttggatgctctggatgctgctgcagctgaggccgaagcccgggctgaagcaagaaccc

SEQ ID NO: 628544 - DNA, 120 bp, Artificial Sequence
  ENSG00000179222_18 (sequence is synthesized)
gcatgggaattggagatgaggctgtgtctgggccctggagctgggatgacattgagtttgagctgctgacctgggatgaggaaggagattttggagatccctggtccagaattccattta

SEQ ID NO: 628545 - DNA, 120 bp, Artificial Sequence
  ENSG00000179222_19 (sequence is synthesized)
ccttctgggccagataccaccagaatgcccgctccagattccctcagacctttgccggtcccattattggtcctggtggtacagccagtgccaacttcgctgccaactttggtgccattg

SEQ ID NO: 628546 - DNA, 120 bp, Artificial Sequence
  ENSG00000179222_20 (sequence is synthesized)
gtttcttctgggttgagtgagatgttggatattgctatcaatcgcagtagtctttcccctgtgtgaggctgaagcctcagattccttctaaacacagctatctagagagccacatcctgt

SEQ ID NO: 628547 - DNA, 120 bp, Artificial Sequence
  ENSG00000179222_21 (sequence is synthesized)
tgactgaaagtggcatgcaagataaatttatttgctgttccttgtctactgctttttttccccttgtgtgctgtcaagttttggtatcagaaataaacattgaaattgcaaagtgaatta

SEQ ID NO: 628548 - DNA, 120 bp, Artificial Sequence
  ENSG00000179222_22 (sequence is synthesized)
gaagttgcctgaagtgaaggagggggtagcggctgcagaagctaaagcttccgccaaacaaaagaggacagcacttccggtcacgccatcgttgctgccttcttcgtcaagcccccaggc

SEQ ID NO: 628549 - DNA, 120 bp, Artificial Sequence
  ENSG00000179222_23 (sequence is synthesized)
cctcctgcctccaccctccctctttctgcattccccactctgtgcgaccccccttattctcaactccgcgatccgcctgccgtcctgagctgctactgcacgcctcttggagcgtccccg

SEQ ID NO: 628550 - DNA, 120 bp, Artificial Sequence
  ENSG00000179222_24 (sequence is synthesized)
ggtatctctgaacctgacggtgcaactgcacagacatcagcagatggttcccaggctcagaatctggagtcccggacaataattcggggcaagaggacccgcaagggtggtacaggcaga

SEQ ID NO: 628551 - DNA, 120 bp, Artificial Sequence
  ENSG00000179222_25 (sequence is synthesized)
acaaacccaggactcagggtgaccaatggctagtgggtcaggctgtcactacagattaataacttgaatgttgaagagaacagcagtggggatcagaggcgggccccactggctgcaggg

SEQ ID NO: 628552 - DNA, 120 bp, Artificial Sequence
  ENSG00000179222_26 (sequence is synthesized)
ggggttgtatttatgtgcatgagctagaagtattaggaaactcattgtagggagatgaggaaagtatggggcagcactctttggtatgtatattccttattatttgatatatatcattga

SEQ ID NO: 628553 - DNA, 120 bp, Artificial Sequence
  ENSG00000179222_27 (sequence is synthesized)
tgctttttttctaggagtttcacgtagatcagggtccagggttcagggtcacatagcaggtcatgggcagagctggggtataattctcccctagctgaggaatattggggaggctagatg

SEQ ID NO: 628554 - DNA, 120 bp, Artificial Sequence
  ENSG00000179222_28 (sequence is synthesized)
ggcaagctggttggggtctctcatgcaaatggctactgaaaatatattctttctatattcccttaggaccaaagacacacccaagctcggtctcctcttggtgattctgggtgtcatctt

SEQ ID NO: 628555 - DNA, 120 bp, Artificial Sequence
  ENSG00000179222_29 (sequence is synthesized)
aaagagtaagagctgtaactccccagtcacttttcccctctcttgctcttttctttgtcatcctctcatctgtaattcaaccaagtttttttgtaaatattttataagtttaatgatttc

SEQ ID NO: 628556 - DNA, 120 bp, Artificial Sequence
  ENSG00000179222_30 (sequence is synthesized)
ctttttccctcccaggcaaataagttggtcaagtacttgatgcttaaggactacacaaaggtgcccatcaagcgctcaggtatgcatccagtgtcccctccccaagctctgcccttccct

SEQ ID NO: 628557 - DNA, 120 bp, Artificial Sequence
  ENSG00000179222_31 (sequence is synthesized)
tcactccatgctctgtcagcattcttctgcttgtagctctgcccttcccttcactccatgctctgtcggcattcttctgcttgtatgacccttccccttctatcccctcctttccatggt

SEQ ID NO: 628558 - DNA, 120 bp, Artificial Sequence
  ENSG00000179222_32 (sequence is synthesized)
gctggacctgcagctgggggttggccacagcctgatttccatgcttattttccgtcccttgtctccccttgcctcccattgcagctgtcctctgggaggcactacgcaagatgggactgc

SEQ ID NO: 628559 - DNA, 120 bp, Artificial Sequence
  ENSG00000179222_33 (sequence is synthesized)
ctctctcatctcttgcctgtttgtgccatcctttggcaacagtggatggtcccaggattgcattaacctgggggtctggagggtttggtttggggatgttcagagcccaaagatgtgacc

SEQ ID NO: 628560 - DNA, 120 bp, Artificial Sequence
  ENSG00000179222_34 (sequence is synthesized)
tgggtggatggggaaacagttctgaactctctgcctcttttctcatctctgacctctgttctggaaagctctttgggcatggtaatagcctctgattgtgggtttcctttttttaccttc

SEQ ID NO: 628561 - DNA, 120 bp, Artificial Sequence
  ENSG00000179222_35 (sequence is synthesized)
agggtgagacatcccctccttggagatctaaggaaacttctcacctatgagtttgtaaagcagaagtaagtgatgcctaaggggcttttcctgcttcttatgattctgcctgtgtgctgg

SEQ ID NO: 628562 - DNA, 83 bp, Artificial Sequence
  ENSG00000179222_36 (sequence is synthesized)
ggggcttttcctgcttcttatgattctgcctgtgtgctggtcagctttagaaagcccttcctggctggatacacaggtgggca

SEQ ID NO: 628563 - DNA, 80 bp, Artificial Sequence
  ENSG00000179222_37 (sequence is synthesized)
gaaagcccttctcaagctcgtttcttacactatacttgtgcatatgtgtttctgtgcatacagaaacacttatgtcctca

SEQ ID NO: 628564 - DNA, 120 bp, Artificial Sequence
  ENSG00000179222_38 (sequence is synthesized)
tgtgcatatgtgtttctgtgcatacagaaacacttatgtcctcaggagtatttattgcatatactcctcatggttaaattctttattttttatttttttattttttgagacggagtttcg

SEQ ID NO: 628565 - DNA, 70 bp, Artificial Sequence
  ENSG00000179222_39 (sequence is synthesized)
gattacaggcatgtgccaccacgcccacctaattttgtcttcttagtagagacggtgtttctccatgtta

SEQ ID NO: 628566 - DNA, 87 bp, Artificial Sequence
  ENSG00000179222_40 (sequence is synthesized)
tctgcctgccttggcctccagaagtgctgagattacaggcgtgagcgaccgtaccgggcgaattcttttgtttgtttttttcgagac

SEQ ID NO: 628567 - DNA, 69 bp, Artificial Sequence
  ENSG00000179222_41 (sequence is synthesized)
tcgcttgactggaacttcaggtgcgtgccaccgtgcccggctgtttttgtatttttagtagagatgggg

SEQ ID NO: 628568 - DNA, 74 bp, Artificial Sequence
  ENSG00000179222_42 (sequence is synthesized)
atttttctaatttttctacttttctaagcagttgtcttgcaagtgaagcccatccaccatccccacagtagaca

SEQ ID NO: 628569 - DNA, 120 bp, Artificial Sequence
  ENSG00000179222_43 (sequence is synthesized)
tcttgcaagtgaagcccatccaccatccccacagtagacattcccaaggctgggccaggctgacacttttgcactgcattgtactcatttcaatggacctctgtggctcactgacaagat

SEQ ID NO: 628570 - DNA, 120 bp, Artificial Sequence
  ENSG00000179222_44 (sequence is synthesized)
tacaagaatctggagctagagctgaggcagaaggagtgaaaggaaatgttgtcctttctgtgaccctatacaagcctcgcctgcatctctagtgagtgcttagcgttctagtgcaggaat

SEQ ID NO: 628571 - DNA, 120 bp, Artificial Sequence
  ENSG00000179222_45 (sequence is synthesized)
ttaaggcttgatgattaaggggtaaataccctgatggtgttcaggaatgagcccaagggggagttgctatctgaaatctgttaaaaaatgtaagattatttttcattagtggactaccat

SEQ ID NO: 628572 - DNA, 120 bp, Artificial Sequence
  ENSG00000179240_0 (sequence is synthesized)
ggggagagagaattgcgcatgcgcgcctgtctcccgggacgctagagcaggcggttcctgggctgctccggtaggtttggcgtgcgcgggtttctgcagatctagggcgagcttgcacgt

SEQ ID NO: 628573 - DNA, 120 bp, Artificial Sequence
  ENSG00000179240_1 (sequence is synthesized)
tacatcaccgatgcatctcttcttgcttgcttaatttgccaccacttaggcctttcttgcagaattcgccatatactccttaagggccgcggaatcggagcgaccttggtgactggcaaa

SEQ ID NO: 628574 - DNA, 120 bp, Artificial Sequence
  ENSG00000179240_2 (sequence is synthesized)
ctctcggcagatgtgcgtgcactggtttgatgcagacgtggttgtaggcgatttaatttttcccagctttgcagcgactgttggcttcccagaacggatctccccagcctcgactggaag

SEQ ID NO: 628575 - DNA, 120 bp, Artificial Sequence
  ENSG00000179240_3 (sequence is synthesized)
ctgagggacaaaaattcataaaagcaattactctttcccggcgaggcttctagaagagcaagaagagcgatatgattacacctgcagccctataaagattgatctgtccgtctttccctt

SEQ ID NO: 628576 - DNA, 120 bp, Artificial Sequence
  ENSG00000179240_4 (sequence is synthesized)
acagtcgtggcctgttaaacgttcctgtgttgttcagtgccagaatgagtgaccgctatttagaacaaaggattagtatcaaattttgcgtgaaattgaacaagtctgcaagtgagaccc

SEQ ID NO: 628577 - DNA, 120 bp, Artificial Sequence
  ENSG00000179240_5 (sequence is synthesized)
accatcttttaaaagaagcttatggggatgaagtcatgtcaagggccagagtttttgactggcacaaaaggtttaaagaaggacgggaagatgttcgagatgatgcccgaagtgggcgtc

SEQ ID NO: 628578 - DNA, 120 bp, Artificial Sequence
  ENSG00000179240_6 (sequence is synthesized)
cagtcacccaccgaacagatgacaatatccagaaggtcaaggacttggtttgttcaaacaggcagttaaccgtgaggatgatggctgaagagttaaatttagacaaagaaactgttaggc

SEQ ID NO: 628579 - DNA, 120 bp, Artificial Sequence
  ENSG00000179240_7 (sequence is synthesized)
tcattttgaaagaaaacttgaacatgaggaagatttctgcaaaagttatttcgggtgttttgaagggtgagcctaaaccacgaaaacttgactttcggtccgatctttcaaaggaaacta

SEQ ID NO: 628580 - DNA, 120 bp, Artificial Sequence
  ENSG00000179240_8 (sequence is synthesized)
gaaaaatagctcatgtttgaggaaaaaggtaacaggttctgaaacatggagttatctccagggtgaagctggtggggaaatgcccctgccggtatcccatcccagagtccactactctgc

SEQ ID NO: 628581 - DNA, 120 bp, Artificial Sequence
  ENSG00000179240_9 (sequence is synthesized)
cagtcagcttctgcaggcgtcatcttcaacaagccttccccccagggtagctgagaattggttcaccccatggtgagaggaatgtgagttagctgaaccagaactaggatgctgcctcac

SEQ ID NO: 628582 - DNA, 120 bp, Artificial Sequence
  ENSG00000179240_10 (sequence is synthesized)
tgttaggcaccttctttggctgctcacgtatttttcagtcttcaccactcctccctatgtgccatggccctcctcattactctttgctggactcttggaccattttccttgctgttctcc

SEQ ID NO: 628583 - DNA, 120 bp, Artificial Sequence
  ENSG00000179240_11 (sequence is synthesized)
ataactttgaaaaacttttggctgttcccttctggtatttgcttgttcttgatttcttttgctcaacaagtttggatttcttctctgcccagaccttagcttgttgtggctgtcctgttc

SEQ ID NO: 628584 - DNA, 120 bp, Artificial Sequence
  ENSG00000179240_12 (sequence is synthesized)
ctttgttctcaaccttctgcctcagaggatcatgccagtgagaagagaggaacaggatctcctggaatctgtatctctgtgcccagggaagcatgcttttctgggaggaccccaaaagaa

SEQ ID NO: 628585 - DNA, 88 bp, Artificial Sequence
  ENSG00000179240_13 (sequence is synthesized)
gcccagggaagcatgcttttctgggaggaccccaaaagaaggcttacagtttcagcctgctttgcagtcagggcctgagagacggaac

SEQ ID NO: 628586 - DNA, 120 bp, Artificial Sequence
  ENSG00000179240_14 (sequence is synthesized)
ctgggattatcagcatgagccaccatgccaagccaaaaccaggagttcaatggtgtaaattccagtctgagtccacaggccgaagagcgaggagtgctgatgtacaagggcaggagaaga

SEQ ID NO: 628587 - DNA, 120 bp, Artificial Sequence
  ENSG00000179240_15 (sequence is synthesized)
tggatgtcacagctcaagaagcgagaacaaatttgcccttctatctttttgttctattcaggtcctcaatgaattggatgatgtccatgcacattagggagggctgcctcttcattactc

SEQ ID NO: 628588 - DNA, 120 bp, Artificial Sequence
  ENSG00000179240_16 (sequence is synthesized)
ggtctaccaattcaaatgctaatctcttccggaaacatccccacagacacacccagaaataatgttttcccatctatctcagtaccccatgatccagtcaagtgaacatataaaattggc

SEQ ID NO: 628589 - DNA, 120 bp, Artificial Sequence
  ENSG00000179240_17 (sequence is synthesized)
cccaggatccctgggacaggaagcagcagcagttaaacagtcacacatcagtgctccagcaagtgaactgaggtgcatccaactaaggagcagatccaggaccagaggaaataaaattat

SEQ ID NO: 628590 - DNA, 120 bp, Artificial Sequence
  ENSG00000179240_18 (sequence is synthesized)
taacatcctgctttcccataagttctctggctgctacactggcaccaattaaagacatgtctatgcaattaatcaaaaccaatttggaagcactctggtgctgctcctctgatgtgctgc

SEQ ID NO: 628591 - DNA, 120 bp, Artificial Sequence
  ENSG00000179240_19 (sequence is synthesized)
ctgctccacatacagtagttcctcagctgcggtgatggagccaggcacataggagcttttgatgaactggctgtactggccccaagtgttaactatgtcatctgacatgactaatgaggc

SEQ ID NO: 628592 - DNA, 120 bp, Artificial Sequence
  ENSG00000179240_20 (sequence is synthesized)
tccggacttgatccgcgtgagcggagcagccctgctgtctggaggaggctcagtttccacagccagcctgggaagaggctgcaacgtgcagggtacacactgcatcatgtcagctggagt

SEQ ID NO: 628593 - DNA, 120 bp, Artificial Sequence
  ENSG00000179240_21 (sequence is synthesized)
aacaattgattgagataactcactacctttggaccagccatctccattttataaataagaaaactgaagctcagaaaggttgtctaaactgccaaagccatagaactttaagtgcggaaa

SEQ ID NO: 628594 - DNA, 120 bp, Artificial Sequence
  ENSG00000179240_22 (sequence is synthesized)
taggttttgtgttcaatctgcttctctataaaatcccatacaggacatccaggcatctaaaaggtagctcagtatctctgccttctctccattgttagccttgatggacaatttttgctg

SEQ ID NO: 628595 - DNA, 120 bp, Artificial Sequence
  ENSG00000179240_23 (sequence is synthesized)
gagcaaatattctgaaaaagattcctcctgtttcctatgggagtagacagcaagcaggtgaagccgggctctcttgagcctgggaccccccggtaggagcatttggctggaaagatgtgg

SEQ ID NO: 628596 - DNA, 120 bp, Artificial Sequence
  ENSG00000179240_24 (sequence is synthesized)
aagtcaataagcatttcctccaccacccagaagcatctccaagctcaggcaggaggtgggcagtgaaggggaataccaagcatcctgcacatcaggtagaaggaggaagcccaggccatg

SEQ ID NO: 628597 - DNA, 120 bp, Artificial Sequence
  ENSG00000179240_25 (sequence is synthesized)
gcaggacttacctgttgagtcctgctgggtttgggcaatgtctcagcagagactggcatactctcaggcttttcacttccttccttagactgggggcgcctcttgccctgtgcatcttgc

SEQ ID NO: 628598 - DNA, 120 bp, Artificial Sequence
  ENSG00000179240_26 (sequence is synthesized)
acaaagcctggtcctgagtaggtgccctgcaaaggtgcaggggatcaatgggggtgactgagtctaactgaagaaaaagaaggcatttcaagtctctataggttggggactttaatgagt

SEQ ID NO: 628599 - DNA, 120 bp, Artificial Sequence
  ENSG00000179240_27 (sequence is synthesized)
gtaaatagctaccctttattgagcattgtttatgtgtggacactttttatgcatgtatattggaatatttttagctgtaagtaatgataactaacagtgacttaaataagtagttatttt

SEQ ID NO: 628600 - DNA, 120 bp, Artificial Sequence
  ENSG00000179240_28 (sequence is synthesized)
ctggcataataagaattccaaaggtgctcctttggtctttccatcttggttacaagatggctgtgacaccctgccctcacctccaagttcaaggcaggcaggggttgggaggtgcggaca

SEQ ID NO: 628601 - DNA, 120 bp, Artificial Sequence
  ENSG00000179240_29 (sequence is synthesized)
gttcagactcagcagtcctgtttcatcaggaaagcaaaagctctcccagtaactcccagcagagttctactaaatctcattggcccaagggagctgcagtggtaggtaacaaggagcaaa

SEQ ID NO: 628602 - DNA, 120 bp, Artificial Sequence
  ENSG00000179240_30 (sequence is synthesized)
tggcttttgggtagccagtcaacagggtctgccatgtgcatagaaagcacagtatgtatttggcatggagtcggtactcaataagcattagctatttggcgtgcctgtgtgtgtttgtgt

SEQ ID NO: 628603 - DNA, 120 bp, Artificial Sequence
  ENSG00000179240_31 (sequence is synthesized)
acacagctggcaaaaggcacagttagagccacacatcagactcatttctttctgactgaagtctgagggctctttccattgccatgctatgttccaccctccccttcaactgcccctcta

SEQ ID NO: 628604 - DNA, 120 bp, Artificial Sequence
  ENSG00000179240_32 (sequence is synthesized)
aagtcttgtcttggagtcacatgaggtccaagtgggcttgatgaagaaagaatagggaaggagatcagatcagtactgttgtccaggctggagcgcagttgattgtagctcactgcagcc

SEQ ID NO: 628605 - DNA, 80 bp, Artificial Sequence
  ENSG00000179240_33 (sequence is synthesized)
actccaaggacaacaggtgcgtgctaccatgcatggctaattaattaaaagaattttttttggtagagacagggtctcac

SEQ ID NO: 628606 - DNA, 120 bp, Artificial Sequence
  ENSG00000179240_34 (sequence is synthesized)
tgaactcctgggctccagtgatcctcccccttcagcctcccaaagtgctagaattacaggcattagccaccatgcctggcctggagatcagttcttttttacttttttttgagacaggct

SEQ ID NO: 628607 - DNA, 120 bp, Artificial Sequence
  ENSG00000179240_35 (sequence is synthesized)
ctggagatcagttcttttttacttttttttgagacaggctctccctatgtcaccgaggctacagtgcagtggttcaatcgcagctcactgtagcctctatctcctgggctcaagtgatcc

SEQ ID NO: 628608 - DNA, 120 bp, Artificial Sequence
  ENSG00000179240_36 (sequence is synthesized)
tgagtagctgggactagaggcatgtatcaccatgcccagctaatttttgcattttttgtagagtcagggtttcaccctgttgcccactctggtctcaaactcctgggctcaaccaatctg

SEQ ID NO: 628609 - DNA, 120 bp, Artificial Sequence
  ENSG00000179240_37 (sequence is synthesized)
cccacctaggcctcccaaaatgctgggactataggtgtgagccactgcacctggcctggagctcagttctgaaataagttgacacctgtccctggggctatccacagagtaacgatgaag

SEQ ID NO: 628610 - DNA, 120 bp, Artificial Sequence
  ENSG00000179240_38 (sequence is synthesized)
tcatgagaggaggttcaataactgtgtgctagagtcatacctccacctgagtgcagccactttggaatggtcaggctagaaggttcagcctttattctgatgatgccactactgcccaga

SEQ ID NO: 628611 - DNA, 120 bp, Artificial Sequence
  ENSG00000179240_39 (sequence is synthesized)
actcctctgggactctttgcaagttgcaaaagacctcaatctcattactgtaatattgcacctcatttctgaccccaaacccagctgcagcttctcatctcacgaatttcaagtgacttt

SEQ ID NO: 628612 - DNA, 120 bp, Artificial Sequence
  ENSG00000179240_40 (sequence is synthesized)
tgactattgccaaaaatcaaaaatcattccctgaaaacagaatctattgtaatttagatgcaaaagaatgtgttgtctgctttgcagccaattttcaaataaaaaagaaatgtttaaagc

SEQ ID NO: 628613 - DNA, 67 bp, Artificial Sequence
  ENSG00000179240_41 (sequence is synthesized)
tttgcagccaattttcaaataaaaaagaaatgtttaaagcagtggaagcactgtttaaataaatatg

SEQ ID NO: 628614 - DNA, 60 bp, Artificial Sequence
  ENSG00000179240_42 (sequence is synthesized)
taaataaataaatatgccctcccaggttgacatcttggaagaggataactctaagtttgg

SEQ ID NO: 628615 - DNA, 120 bp, Artificial Sequence
  ENSG00000179240_43 (sequence is synthesized)
cccaggttgacatcttggaagaggataactctaagtttggttgtataatttctgctgtgtttaagaaaaattacttaacttgtgagacattatgaaaaggatgctggacttggtaaagat

SEQ ID NO: 628616 - DNA, 120 bp, Artificial Sequence
  ENSG00000179240_44 (sequence is synthesized)
acaaatgggcttataatgttggtcaggtgagacatgttgcattggtgaaattataaattgatattgttttctcagagcaatttcgcaatgagcatcacgaagctttaaagagtttaaacc

SEQ ID NO: 628617 - DNA, 69 bp, Artificial Sequence
  ENSG00000179240_45 (sequence is synthesized)
tttcgcaatgagcatcacgaagctttaaagagtttaaaccacaccggtcacagtggttcaggagctaga

SEQ ID NO: 628618 - DNA, 84 bp, Artificial Sequence
  ENSG00000179240_46 (sequence is synthesized)
ccagttgacctaggaatcttctaggacgatttcttaggaatctttcttaggaaaacagtcagagatgcagacaaagatttatgt

SEQ ID NO: 628619 - DNA, 120 bp, Artificial Sequence
  ENSG00000179240_47 (sequence is synthesized)
tcttaggaaaacagtcagagatgcagacaaagatttatgtaacagccattcattgcagacttatttgtaaaagtagtaaaaagaaggaaataacccaaatgtcccacaatggagaaattg

SEQ ID NO: 628620 - DNA, 120 bp, Artificial Sequence
  ENSG00000179240_48 (sequence is synthesized)
ttaagaaaattacagcatactcattaagtgaaataatgcagctatttaagatgatgtttttaaagaactgtcaatgatgtttgaagatgttcacaataagataggtgataaaacagacta

SEQ ID NO: 628621 - DNA, 120 bp, Artificial Sequence
  ENSG00000179240_49 (sequence is synthesized)
taaaaccacatgcattatatagtcccatttttactttctgtatgctaaaacaaacccctcaagatagatccaaaacattaccagtggtttgatctgggtgatgaaattataagtgatttt

SEQ ID NO: 628622 - DNA, 80 bp, Artificial Sequence
  ENSG00000179240_50 (sequence is synthesized)
ccagtggtttgatctgggtgatgaaattataagtgattttaaacttgcttcattatgcttttatatatataatttttctt

SEQ ID NO: 628623 - DNA, 120 bp, Artificial Sequence
  ENSG00000179240_51 (sequence is synthesized)
gaggcctctagcgttggagctgggagtcatccatggagagggtgatggaaactgtgggccaggctctgtgttgggcgccagtgtgaatgtgacccaatttaaacttctagctcagcctcc

SEQ ID NO: 628624 - DNA, 120 bp, Artificial Sequence
  ENSG00000179240_52 (sequence is synthesized)
tcattttagacctgaaaatcaagacccagcaaaagtgtgaggcttgccaaagacctgaactttggagagagaaatgatggagaaagcagggtctctgccctagatgagaggtaaatatgt

SEQ ID NO: 628625 - DNA, 120 bp, Artificial Sequence
  ENSG00000179240_53 (sequence is synthesized)
atgagggtaacaactggggcctggtgcaagtatacttcatcaagggttaaccataggcttcctttcttccttctgcaaacctttatcaaggggaagggttgcttgtgcccttgtcacctc

SEQ ID NO: 628626 - DNA, 120 bp, Artificial Sequence
  ENSG00000179240_54 (sequence is synthesized)
agcaattccaagagcatggaatttggagtcaacagatctgtgtttgagtcccagccctactttgagttgatgtaatcttgcaaatcacttcatttttctgagccttggtttcctcagctg

SEQ ID NO: 628627 - DNA, 120 bp, Artificial Sequence
  ENSG00000179240_55 (sequence is synthesized)
taacattggaataggccatatactgcccagccagcctacctccatgagcccttctgtgactcaactgagttaatgggtgtgaaagtgtaagtaagagcctctgcacgtgttagttattat

SEQ ID NO: 628628 - DNA, 120 bp, Artificial Sequence
  ENSG00000179240_56 (sequence is synthesized)
tccagttttcatccccctaaggagcactggctgaaatctctggaatatggatccacagatagctttaactctcttcctcttcctgcctctttcaaatggacataaaaaccaattggtcat

SEQ ID NO: 628629 - DNA, 120 bp, Artificial Sequence
  ENSG00000179240_57 (sequence is synthesized)
ccgcctaaaatctcaacagctttcccagagagcccatgcatagaaagaggaagaactcaaccgttgtaaattaatgtcattccatacattgattgagcacctaccacatgccagacattg

SEQ ID NO: 628630 - DNA, 120 bp, Artificial Sequence
  ENSG00000179240_58 (sequence is synthesized)
taggagaaacagagctgggcataaataactataatgtactgcagacaaatgcaattgccataggaaagatacaaatcaagtgttttgggagccagaggatggagtgattcattccccaaa

SEQ ID NO: 628631 - DNA, 120 bp, Artificial Sequence
  ENSG00000179240_59 (sequence is synthesized)
aggagactggaaaaaggttcatcaacgaagtggtactgaaggatgggcagggcttagctctgtcaggaagaacgaggcagggcactccagacagagagaccagcataggcaaatgtatga

SEQ ID NO: 628632 - DNA, 120 bp, Artificial Sequence
  ENSG00000179240_60 (sequence is synthesized)
aatctggaaaggaatggtgatctaaaggacagaataaaatcaagtaaggtattgggagtgagcatgaatcaaagaaaaatcactgcaccccaactctgaaactcaggcataaatgttgct

SEQ ID NO: 628633 - DNA, 120 bp, Artificial Sequence
  ENSG00000179240_61 (sequence is synthesized)
gtttcactgttctctttgctggctgaggtcaccttggcctctgtccctcagtcagagaaaatcccacactggcccttcctccagcaaagccaaacccaagccccagccagcagaagcaaa

SEQ ID NO: 628634 - DNA, 120 bp, Artificial Sequence
  ENSG00000179240_62 (sequence is synthesized)
aacaaatgaacagggatcaacaataccattagatgcaaaaattcttgagctgggaaggccaggtcacagccatacctccccagccagggtaacagcttgatcagatgtggcaatgacacc

SEQ ID NO: 628635 - DNA, 120 bp, Artificial Sequence
  ENSG00000179240_63 (sequence is synthesized)
aaccctggagcacgatggcaaggaacttaacttaagcctcttggcatgggtcacaggctacatttttctccttcccccctcatccaaaagaagctagcttcttctttatgagtgctgctg

SEQ ID NO: 628636 - DNA, 120 bp, Artificial Sequence
  ENSG00000179240_64 (sequence is synthesized)
tcagaatggctttggaaagcctagagctgcagctgaactcaaggcatggccatgggccaccccagggacttgtattttctcagtctttctatctttcgttgcgaattttttttattgtgc

SEQ ID NO: 628637 - DNA, 120 bp, Artificial Sequence
  ENSG00000179240_65 (sequence is synthesized)
aaataatacagtgttaagaacggaaacttcaagaagagaaagaggaaagagagcatccactcacatgtcatctgtttccatttctccttgccctttcctgctgttgtccatgagcataat

SEQ ID NO: 628638 - DNA, 120 bp, Artificial Sequence
  ENSG00000179240_66 (sequence is synthesized)
tttttggccgcttttattactgatacaactacgtattctgtttttattgcttagccttgtatcatacaaggctacttattgccagcccctggtgtccacactggcttggcattgttctcc

SEQ ID NO: 628639 - DNA, 120 bp, Artificial Sequence
  ENSG00000179240_67 (sequence is synthesized)
caagactgaaaaaatatgccaggtgtcatgtaaagggactttccgcagataacatgatcgccattgacaactggcatcatgtggcagaggaaaagcttcgaccgctctgccatcatgttg

SEQ ID NO: 628640 - DNA, 120 bp, Artificial Sequence
  ENSG00000179240_68 (sequence is synthesized)
acttgggttggaatctcagctcctctacttcgaagctagatggccctgggcagatcattccatctctttgagccacagttcctcatctataagatggggatggcattagtaccatcttat

SEQ ID NO: 628641 - DNA, 120 bp, Artificial Sequence
  ENSG00000179240_69 (sequence is synthesized)
gatactaatgggatcacagtgagaattaagtgagataccaaaaggggaatgctcaataaagagcagctctccttcccaacccttgaggggctgacctagacaccactctgctttttcctc

SEQ ID NO: 628642 - DNA, 120 bp, Artificial Sequence
  ENSG00000179240_70 (sequence is synthesized)
tcttgcccacatttggccacctcccctcccctggacccagcaggccccctgggtgagcccacctaaattatgacaggcataccagtctgcatatttattattcactgggtgaatttgcta

SEQ ID NO: 628643 - DNA, 120 bp, Artificial Sequence
  ENSG00000179240_71 (sequence is synthesized)
tcttttacttaagtattttcctctgatgaaacttttgtttttgtccagtttttcactatttccaataatgatgcaaaaaaaaataccagtgtgtgccgctcaccctatgctttaaaaatt

SEQ ID NO: 628644 - DNA, 120 bp, Artificial Sequence
  ENSG00000179240_72 (sequence is synthesized)
gtattttctcagaaacaatccccaggagtaggatcactgagatagaggatagaaacattttcaaggtttctgatgtgtatttccaaattgcttttcagatttgtacctgttatgctgcca

SEQ ID NO: 628645 - DNA, 120 bp, Artificial Sequence
  ENSG00000179240_73 (sequence is synthesized)
ccaatttgagggagggaaccacttaggctacattggaggccgctgggccctggtcacaaacttctgtctctgctttatttctaccattgtcttctcttaacatggctcctgaacttctca

SEQ ID NO: 628646 - DNA, 120 bp, Artificial Sequence
  ENSG00000179240_74 (sequence is synthesized)
ctctatgggacaattcattgtttgtccccaaaatgatgctcccatacttttgtgcctttgtacttcctattagtcttcaccacccttgcccaagaatattcttcctttaagataccctct

SEQ ID NO: 628647 - DNA, 120 bp, Artificial Sequence
  ENSG00000179240_75 (sequence is synthesized)
caccttagagctcaacctttgtggaactgggaacttctatactctcttcaagacccagttcaaacacccctctctccgtgaaccagttccaatccccccaagcagagttcgtcacttttg

SEQ ID NO: 628648 - DNA, 120 bp, Artificial Sequence
  ENSG00000179240_76 (sequence is synthesized)
ttataagtggtacctggaggaacccttggcatccaagtgttcaccaagagtcagccatcccctaacctcagctacaggccccagttttcgtgattctctcttctcttttcctctctcact

SEQ ID NO: 628649 - DNA, 120 bp, Artificial Sequence
  ENSG00000179240_77 (sequence is synthesized)
ctttgcaccaggcaatctcaccaggttttcccaactcatgtcctaaatattcttagatccacttatctttgcctcatggtcattgccagagctatcacctctccaggattcctgcaatgg

SEQ ID NO: 628650 - DNA, 120 bp, Artificial Sequence
  ENSG00000179240_78 (sequence is synthesized)
ttcagcctgctttgcagtcagggcctgaggtatggtacagaaggtagtagcatgctggtattactgaacagtgctgggcctaggggctgatctggcccagatgactcagtaggcaccctt

SEQ ID NO: 628651 - DNA, 120 bp, Artificial Sequence
  ENSG00000179240_79 (sequence is synthesized)
aggaatcaggggttggccaccaatactgatcttctcacaggcctacacctcacagaagagctgggtttgtttcattctagtcctatgctttggacctccactcatttgggtatcacccct

SEQ ID NO: 628652 - DNA, 120 bp, Artificial Sequence
  ENSG00000179240_80 (sequence is synthesized)
gttggaagaggaggatctggtgctagaaaatataaacccggggacccaggcaaggctgtgttgtgtggggaggaagaccaggtggctctctagtccctgaattaagggagcctgctgcct

SEQ ID NO: 628653 - DNA, 120 bp, Artificial Sequence
  ENSG00000179240_81 (sequence is synthesized)
atgtgcggattcccacacagcagcctgtttttagtaactaatgcctatagttttgagaacttgctgtttttaggacactgctgggcattgacaatgtggaggttatgaacaagatctcca

SEQ ID NO: 628654 - DNA, 120 bp, Artificial Sequence
  ENSG00000179240_82 (sequence is synthesized)
agggctgatgggcttcatggatgagatggttcttgaactggatccatgaggatgggtgagacagggctgtgaaattagggaaagcttccggggcaggtggaacagcatgaggcttccaac

SEQ ID NO: 628655 - DNA, 78 bp, Artificial Sequence
  ENSG00000179240_83 (sequence is synthesized)
aaagcttccggggcaggtggaacagcatgaggcttccaacctgcatcagtagaaaatgacactggccaggtgtggtga

SEQ ID NO: 628656 - DNA, 120 bp, Artificial Sequence
  ENSG00000179240_84 (sequence is synthesized)
ttgcagtgagtggagattgcgccactgtactccaacctggcgacagagctagactctgtcccaaaaaaaaaaaaaaggaattagaaaatgatgacactattggctaaaataacaaagttt

SEQ ID NO: 628657 - DNA, 120 bp, Artificial Sequence
  ENSG00000179240_85 (sequence is synthesized)
aaagaggaagataatggtgttgcagcagatgaacaatttgggataatttgctttctctcctaagcctccaactctatgccacttgttgttaaattgcttcccctgagtctgtgaataggt

SEQ ID NO: 628658 - DNA, 120 bp, Artificial Sequence
  ENSG00000179240_86 (sequence is synthesized)
ttgtaacaaccaatttgatatctgattttccatttggaccccgacaagcagtttctgcaagttcaaactctgtctcttctcttcctgcctctgccaggatttatggaatggaacttttcc

SEQ ID NO: 628659 - DNA, 120 bp, Artificial Sequence
  ENSG00000179240_87 (sequence is synthesized)
caagtgggttccaagtaataccacatagactggaaacattcagggggcaggggtttggtaatagcatttcacagaattggccagtctttgttttactcaaggatttttagatataacagc

SEQ ID NO: 628660 - DNA, 120 bp, Artificial Sequence
  ENSG00000179240_88 (sequence is synthesized)
tcctcttaaacaatattgcttgatagtagaggcacaacactcattcatcacagttacttttagtgctgttctttcactttctctactcacctccaaaaattacaagttcctcattaacac

SEQ ID NO: 628661 - DNA, 120 bp, Artificial Sequence
  ENSG00000179240_89 (sequence is synthesized)
ggattacaggcgtgagccaccacgccgggtcaacacctgttagttttgagacaccttgaaagctagacgttgtcccacaaagagaagatactgtgtaagaaaactcttaaaccaaacaac

SEQ ID NO: 628662 - DNA, 120 bp, Artificial Sequence
  ENSG00000179240_90 (sequence is synthesized)
aagatactgtgtaagaaaactcttaaaccaaacaacagcttatagacctccagctccttaacagtttctagacattccatttcaggacaatgaagtcttcctacatcagatgcggctcta

SEQ ID NO: 628663 - DNA, 120 bp, Artificial Sequence
  ENSG00000179240_91 (sequence is synthesized)
ggttgcccacaagcacttggcaccagggacactgcactttaggaacaaagtccccaccactagttcttgcagctttgttgctgaacctcatagtaatccttgctaaggcctacccagtgg

SEQ ID NO: 628664 - DNA, 120 bp, Artificial Sequence
  ENSG00000179240_92 (sequence is synthesized)
taattgttgcagatttatatgctcctggtcccaggccaggatcccacaaccatacctacaggagttgtttctaacctgttattaaacagaggtcctgagacaacttacttctggatttta

SEQ ID NO: 628665 - DNA, 120 bp, Artificial Sequence
  ENSG00000179240_93 (sequence is synthesized)
ttccagtcctatgaacagggctggtatgtccctgccagtgatgctggaccaagacccatggtggagtgtagagtaccagaagctatgttggtccagacatggtttagacacagcaaccag

SEQ ID NO: 628666 - DNA, 120 bp, Artificial Sequence
  ENSG00000179240_94 (sequence is synthesized)
aagcaggtaattaggagtgtgaattcaaatggttccaattggctataatgaaaaggacttatccagagcaaaccattcacatttggctgctcagaatttctaaacccaagggtagagcat

SEQ ID NO: 628667 - DNA, 120 bp, Artificial Sequence
  ENSG00000179240_95 (sequence is synthesized)
gatctgggcatctccaaataggaaagttcttatatgagtactcctaatgtgtccacccaccaaatctattttattgctgatgcacgttttgccctggcctgcaccttgctgcctaggcct

SEQ ID NO: 628668 - DNA, 120 bp, Artificial Sequence
  ENSG00000179240_96 (sequence is synthesized)
cttgagctcctggtcccgtagtctcacacatccagctatgtgtccgtcacaccccaggctcttgtccttgactatcttcagacacctctcagtttattcttcacagtttgctcttactcc

SEQ ID NO: 628669 - DNA, 120 bp, Artificial Sequence
  ENSG00000179240_97 (sequence is synthesized)
tctctttccttgttgctttgttttctggtcctgggtcacatcttcagtagctgcttttggtcactttggtgtgctgatccttgtattgacctttgggtcatggttttccacttaacttac

SEQ ID NO: 628670 - DNA, 120 bp, Artificial Sequence
  ENSG00000179240_98 (sequence is synthesized)
ttggatccttctttcagctccccgcttcagctgctgagtaaggaaattgtctgctccagccctggccccaggttgccttcctatcttaaagaagcagggtggggtgacatgggggaatta

SEQ ID NO: 628671 - DNA, 120 bp, Artificial Sequence
  ENSG00000179240_99 (sequence is synthesized)
tgtgttgattttgttttttctaagggacatgggcaccttagccaccctcagttgcactccccagaggcacccagtgtcaccagtttctcaaggaggcaatatggttacctctagtagcaa

SEQ ID NO: 628672 - DNA, 120 bp, Artificial Sequence
  ENSG00000179240_100 (sequence is synthesized)
gagtcatgaaacttcttcagagttataacatccaaagcccattctcctagcaactgtattttccctggcaggagaaactccacctaaccacaatagatcaagcctggctttctgtgggat

SEQ ID NO: 628673 - DNA, 120 bp, Artificial Sequence
  ENSG00000179240_101 (sequence is synthesized)
gtcagtaggagagctggccatctgcaaactttctcaagcttaacaccatcggtcaatgactccgtttggctttcaggttgatctttgtccccgcccccacgctcattctaattcaaagtc

SEQ ID NO: 628674 - DNA, 120 bp, Artificial Sequence
  ENSG00000179240_102 (sequence is synthesized)
cacatggaatgttttatgccacagctgagcgtctaagaggaatacatgccttctggggcagatcatcctaacactgattttatgcaattctccccttccatcaccccaccctaccttgct

SEQ ID NO: 628675 - DNA, 120 bp, Artificial Sequence
  ENSG00000179240_103 (sequence is synthesized)
tcatttgccccactagtaatgatcaaaaagagaaagaataaaatgttcaccaaatctgtgacttagaaaaacatgtggagggttctgccatcttctgaattctgatcctcactgagtcct

SEQ ID NO: 628676 - DNA, 120 bp, Artificial Sequence
  ENSG00000179240_104 (sequence is synthesized)
cattgaaatgttatttggggaagaatgtttacctggggcctccttcccagaaactttttttcagatgaatttctagtcaaagactaagacttgcctttggaaatgcctggataaatctgg

SEQ ID NO: 628677 - DNA, 120 bp, Artificial Sequence
  ENSG00000179240_105 (sequence is synthesized)
atgctaaatgacttgaggacacctaataaaggaatggggtactattggggaattgtctgtcattgcattacaaatgctgctcagtctccctgctatttgcagacatcatcaccagagagt

SEQ ID NO: 628678 - DNA, 120 bp, Artificial Sequence
  ENSG00000179240_106 (sequence is synthesized)
ttcactaggctcgttgggattgggtctcagcaaggtcccatgtgactcaataagagcccacctttgctgctaaattgtgtatgttactgtgcattctccaattacttcttcttcagtcag

SEQ ID NO: 628679 - DNA, 120 bp, Artificial Sequence
  ENSG00000179240_107 (sequence is synthesized)
cccacccagattttaccaggcgtttatatcttttctgaggtaaccatcatgtatttatgttctacagtgtctcccttatcagatccttgcaaatactgtcctagttgaatcacccctttc

SEQ ID NO: 628680 - DNA, 120 bp, Artificial Sequence
  ENSG00000179240_108 (sequence is synthesized)
ccagtattaatatccggaaacaaaaaatctatagtggggagctccagtgggtcccctccaaggactcacttgggcatagtccagtggtcaacagacttctataaaggagtctttatgggc

SEQ ID NO: 628681 - DNA, 120 bp, Artificial Sequence
  ENSG00000179240_109 (sequence is synthesized)
catatggtctcttttgccactaaacattttagtgcaaaagtagacatagttaatatagaaacagatgagcacagctgtgttccaataaaactttataaatggatactagaatttgaattt

SEQ ID NO: 628682 - DNA, 120 bp, Artificial Sequence
  ENSG00000179240_110 (sequence is synthesized)
ttataaatggatactagaatttgaattttatatagtttttacaaaatactattttgatttttttaaaccattgaaaaatgttaaaaagaggccgggcacggtggctcagacctgtaatcc

SEQ ID NO: 628683 - DNA, 77 bp, Artificial Sequence
  ENSG00000179240_111 (sequence is synthesized)
tgatccaagatcttgccacgaaagttagacattcttagcttttaggccatagaaaaacagatggcaggacagatttg

SEQ ID NO: 628684 - DNA, 120 bp, Artificial Sequence
  ENSG00000179240_112 (sequence is synthesized)
gcttttaggccatagaaaaacagatggcaggacagatttggcccatcggctatagtttgatataacccccagtctagtgtatatgaagtgtgtatataaaaatgacagatgattattttc

SEQ ID NO: 628685 - DNA, 120 bp, Artificial Sequence
  ENSG00000179240_113 (sequence is synthesized)
acagatgattattttccatcaataacattattaatgccacattgatctggcagtgtctgacaatttatttgtggaaattgtgggccaggcacgatggctcatgtctgtaatcctagcact

SEQ ID NO: 628686 - DNA, 86 bp, Artificial Sequence
  ENSG00000179240_114 (sequence is synthesized)
cccaggaggtccaggctgcagtgagccatgatcgtgctactgcactacaaaaaaaagaaattgtggaatattggagggactctgtg

SEQ ID NO: 628687 - DNA, 120 bp, Artificial Sequence
  ENSG00000179240_115 (sequence is synthesized)
aagaaattgtggaatattggagggactctgtggagccaggagagtaaactaaagctgaatgattggctattttaccttgaaatattctggttcacaaaataaattttgtgctgtttttga

SEQ ID NO: 628688 - DNA, 120 bp, Artificial Sequence
  ENSG00000179240_116 (sequence is synthesized)
ctaaaaatgatattataaaaccacctatattattcccatgtaaaatatcaaaaccagtgttggcaacactaaaactgatgccaagctgcaaccaacaataatagaatgaactgaaggtag

SEQ ID NO: 628689 - DNA, 120 bp, Artificial Sequence
  ENSG00000179240_117 (sequence is synthesized)
tcccaaaaatgatttgaccatgggtagcatttgaataagcttatgttatcacctattaaagtgtgtactatggagatgacaaaactcactgaaatgtattttttgcatgcttgcaaatat

SEQ ID NO: 628690 - DNA, 120 bp, Artificial Sequence
  ENSG00000179240_118 (sequence is synthesized)
atatatgtattacagatacatatgtgtatttgcaccttgcaactggtgctgagatctgtccttttaggtaagtgtatttgtcttttcccctagagagctctttattgtgtcacctttatt

SEQ ID NO: 628691 - DNA, 120 bp, Artificial Sequence
  ENSG00000179240_119 (sequence is synthesized)
taaactgattttccaaagttgtagtagaatctcagcattgaacagtccattacaaaattgtctgatccagtcagtcatgtttcctatgagttcaggagtaactaaaccctacagctgctg

SEQ ID NO: 628692 - DNA, 120 bp, Artificial Sequence
  ENSG00000179240_120 (sequence is synthesized)
aaagattgcatctgaaagaagattctgtgttaattcactcaacaattttttattgagtggctgtatgggccagatgctatcttgtgtgccgagatacagcagtgtacaaaatagacacag

SEQ ID NO: 628693 - DNA, 120 bp, Artificial Sequence
  ENSG00000179240_121 (sequence is synthesized)
gccttggattagatggtctgaaatctaattatattactcttcactcttgcaaattttctgttccgtgtgtgcacactaacccattgttaactgcatacctggaaataggtatgactgttg

SEQ ID NO: 628694 - DNA, 120 bp, Artificial Sequence
  ENSG00000179240_122 (sequence is synthesized)
ccacatgcctttgtgctctggtcttgatgcctctccagctgcattaataattagaggactgcgtgtttcatttaaattttattatcctttagacagatctatattggcagaaaaacacac

SEQ ID NO: 628695 - DNA, 120 bp, Artificial Sequence
  ENSG00000179240_123 (sequence is synthesized)
tggcaatgttagaagtgtagactggcaatggttttctgaaaagcaatttggcaatatctatcaggagctttaaaaatgtttagatcctctgatcctccaattccacttctgggaatttgt

SEQ ID NO: 628696 - DNA, 120 bp, Artificial Sequence
  ENSG00000179240_124 (sequence is synthesized)
cctaaagaaatagtctaaaatgtgggcaaaatcaaggcttgacaatcttaaagtccaacagtagaaaattggttaagtaaattacagtatgactatccagtagactgttgtgccatcatt

SEQ ID NO: 628697 - DNA, 120 bp, Artificial Sequence
  ENSG00000179240_125 (sequence is synthesized)
ataatttatgtttctgaagagtatttgacagcatggcaaagtgcttatagtgttaagtgaaaagagtgatatacaaaattgtatgtataaatccaaaaaatgacttttaaaaagatggaa

SEQ ID NO: 628698 - DNA, 120 bp, Artificial Sequence
  ENSG00000179240_126 (sequence is synthesized)
aggatatgcaaactctgggtagttggattatgggttttcctggttttatgctttaaaaaattttctccagtatattactacttatattatcagtaaaaatcaatagcatctagagctggc

SEQ ID NO: 628699 - DNA, 120 bp, Artificial Sequence
  ENSG00000179240_127 (sequence is synthesized)
agtggagagattgaggccagatcactagtttggtccatgaacaattaactggctgggtggacacagaggctatatgatcttgtgttggcagcaaggctgggacagaagggaaaaggacct

SEQ ID NO: 628700 - DNA, 120 bp, Artificial Sequence
  ENSG00000179240_128 (sequence is synthesized)
gcccaggaggagaagggaccgtgtgactatgtgaccataatccctacaaaaaaacacaaagtgttaagggaagacactgtggctggcatgctcttgtgatgtagtcgtaggtcggtaaaa

SEQ ID NO: 628701 - DNA, 120 bp, Artificial Sequence
  ENSG00000179240_129 (sequence is synthesized)
gaccacttatgaatcaagtatattctgacaagtggaaaaggatatgaatgctctcctgggtaaaattaacctcctttgcatttcattctcacattctcgcacaaaatgaattatcaagat

SEQ ID NO: 628702 - DNA, 120 bp, Artificial Sequence
  ENSG00000179240_130 (sequence is synthesized)
ggattttataatagctgattctctgaagaatccctgagactttgtatgattctttagtatagcagtggctttcgatgtgccaagtctacctcctcccatactgggacactcaagcaacac

SEQ ID NO: 628703 - DNA, 120 bp, Artificial Sequence
  ENSG00000179240_131 (sequence is synthesized)
agatgtacacgggaattttgggtattctatactgagaatactgcacacatatcgttagtcatcttaatgttgtaacttaccaaactcttaaggtttgcaaatgtgattttgttggcatct

SEQ ID NO: 628704 - DNA, 120 bp, Artificial Sequence
  ENSG00000179240_132 (sequence is synthesized)
agaaccagtgtattttttatttatgtctgaaaaataatcattgtggggttttaaaatgaaaaatcatgtagctaatgcctatccatagatgaaattgttatgttgggaaaatgtgtactt

SEQ ID NO: 628705 - DNA, 120 bp, Artificial Sequence
  ENSG00000179240_133 (sequence is synthesized)
tttcttctctactagcccaggacctcctaaaagccaagcccacatctgattgttccatgttccctgcatccagaataaaccttgcgtggaactgctcaataaatgtttgatagatgaatg

SEQ ID NO: 628706 - DNA, 120 bp, Artificial Sequence
  ENSG00000179240_134 (sequence is synthesized)
gaaattttaaacctccaaatgagtacacaaggtaaatacatattttataggcctatagctcatataatcgccaagctgaaagagttctttaagatctaagtataagtcctctggtctata

SEQ ID NO: 628707 - DNA, 120 bp, Artificial Sequence
  ENSG00000179240_135 (sequence is synthesized)
gaatgaatgagtgaggcttgggtttcagttctggcttcttaactagctatgtgactttgggcagttcatttgtaccctctaaggttgtcagttaattcatctgtaaaagggaagtaatgc

SEQ ID NO: 628708 - DNA, 120 bp, Artificial Sequence
  ENSG00000179240_136 (sequence is synthesized)
catctatctcatggagttgttcattttgttcatttcaacaatatttattgagtgcttatctgtgtatgatgctgttctagacacaataaacaagaccccaagaaatgttcctcctcgtga

SEQ ID NO: 628709 - DNA, 84 bp, Artificial Sequence
  ENSG00000179240_137 (sequence is synthesized)
acacaataaacaagaccccaagaaatgttcctcctcgtgagcacacatttcagtgagggagacagacaagaaataagataaatt

SEQ ID NO: 628710 - DNA, 120 bp, Artificial Sequence
  ENSG00000179240_138 (sequence is synthesized)
gttagatagtgattattagatgtgaggcttacattaaacagtgtatacgaggcacacagcacaacacctggcatggagtacgtgctcaatagagaataatttcttctgtgtatacgaggc

SEQ ID NO: 628711 - DNA, 120 bp, Artificial Sequence
  ENSG00000179240_139 (sequence is synthesized)
acacagcacaacacctggcatggagtacgtgcccaatagagaataatttcttctgtttcttgaggcttcctaacagctccggaattaccctacaacgtggtggtagtcggcaagaagcct

SEQ ID NO: 628712 - DNA, 120 bp, Artificial Sequence
  ENSG00000179240_140 (sequence is synthesized)
gactggttgctttctatctcttgccagttaaggcctaaacctgtttctgcttaagaagacaaaagaattcttacagtggtgttttgtacttcctatatggcagattaatcaaggtggtgc

SEQ ID NO: 628713 - DNA, 120 bp, Artificial Sequence
  ENSG00000179240_141 (sequence is synthesized)
ctaaacacggttgataaatgaccttttctggagccagttggcaggagtccttgcctggggcaggatggcaggtgttaagtccacaaagacaaatgcatagtgtcattgctatttaagcaa

SEQ ID NO: 628714 - DNA, 120 bp, Artificial Sequence
  ENSG00000179240_142 (sequence is synthesized)
aacagactagaagaccgaaacggctgtttctcttaaagaaaagatgtgtgccctatgtcctgggccaaatgctggagcactgagcaaagtttgcagtattagaaggaaactgcctactgc

SEQ ID NO: 628715 - DNA, 120 bp, Artificial Sequence
  ENSG00000179240_143 (sequence is synthesized)
attatttatgggagaccagggcattgacagaaagccaggaaaaggagagtttaatggtttgcggttttgatatttttgtccattgtagaaaatttggaaagtttagaaatgtttaaagaa

SEQ ID NO: 628716 - DNA, 120 bp, Artificial Sequence
  ENSG00000179240_144 (sequence is synthesized)
gcagccagaagtccactcctagagttcgggtctgtcatcagacccatctccttgcctcagcttcctccttcaaaaacatccagccaggctgggtgcggtggctcatacctgtaatctcag

SEQ ID NO: 628717 - DNA, 120 bp, Artificial Sequence
  ENSG00000179240_145 (sequence is synthesized)
tctgtctcaaaaaaacaaacaaaaaaaaatcagtgaacggtcatttactgaattccttcttcgagcctgggcctgcactaggcacagagtacagcccttgtccttgggcagtgcccagct

SEQ ID NO: 628718 - DNA, 120 bp, Artificial Sequence
  ENSG00000179240_146 (sequence is synthesized)
ttgtgggttagggaaagggccagaggtggagaggagcaccaagaaagggttcctaccttagactgtcaatttttcccagaggacagagctaaggaacaaacttttgtaaagaattggaac

SEQ ID NO: 628719 - DNA, 120 bp, Artificial Sequence
  ENSG00000179240_147 (sequence is synthesized)
aaacagttgtaatcatcaactaagggtgattgtgaaaaagagacagtggactgtaaagaagcaaaacacagaatgatggtaactgtagctcttcttatgtaagagagcctggagctctgt

SEQ ID NO: 628720 - DNA, 120 bp, Artificial Sequence
  ENSG00000179240_148 (sequence is synthesized)
acacaaggatttagtgtgtaatattacctctcagaagaaactggacttgaggctgtgggccagtacccctgtaccttgcattaagaacctaataagtgaaaattcagaattacaacccaa

SEQ ID NO: 628721 - DNA, 120 bp, Artificial Sequence
  ENSG00000179240_149 (sequence is synthesized)
actcgatgagggaattggcccagggaggttgagtgattttcttgaatcgcacatttagttggtggcagagccaggataataatgaaggaccttgaacttcgctcagtccgtgagtttttt

SEQ ID NO: 628722 - DNA, 120 bp, Artificial Sequence
  ENSG00000179240_150 (sequence is synthesized)
tctattactccatcggtaattatttcctttactaaaatgtacattcttatgatatctttaaaatcatgctcacccttgtatttaacaaatgatttactaacagttgatttacatacaatt

SEQ ID NO: 628723 - DNA, 120 bp, Artificial Sequence
  ENSG00000179240_151 (sequence is synthesized)
tttaaggaacatatttatagcatagaaagtggtgcagagggttttaccaaatttctctggggtgtccaggtcccctggtccttccagaggtgcgtattcataagtaaatgttggcattct

SEQ ID NO: 628724 - DNA, 120 bp, Artificial Sequence
  ENSG00000179240_152 (sequence is synthesized)
gtcatccattttttccagatgttcttcccaagtagtgtgttatgttttgtgtttttaatatttctcatacacgtttttaaaaatctgggcacataaatcctaataaaactctcaactatc

SEQ ID NO: 628725 - DNA, 120 bp, Artificial Sequence
  ENSG00000179241_0 (sequence is synthesized)
agcaacgacgccgggcagcgggagcggcggccgcgccatgtggctgctggggccgctgtgcctgctgctgagcagcgccgcggagagccagctgctccccgggaacaacttcaccaatga

SEQ ID NO: 628726 - DNA, 120 bp, Artificial Sequence
  ENSG00000179241_1 (sequence is synthesized)
gtgcaacataccaggcaacttcatgtgcagcaatggacggtgcatcccgggcgcctggcagtgtgacgggctgcctgactgcttcgacaagagtgatgagaaggagtgccccaaggctaa

SEQ ID NO: 628727 - DNA, 120 bp, Artificial Sequence
  ENSG00000179241_2 (sequence is synthesized)
gtcgaaatgtggcccaaccttcttcccctgtgccagcggcatccattgcatcattggtcgcttccggtgcaatgggtttgaggactgtcccgatggcagcgatgaagagaactgcacagc

SEQ ID NO: 628728 - DNA, 120 bp, Artificial Sequence
  ENSG00000179241_3 (sequence is synthesized)
aaaccctctgctttgctccaccgcccgctaccactgcaagaacggcctctgtattgacaagagcttcatctgcgatggacagaataactgtcaagacaacagtgatgaggaaagctgtga

SEQ ID NO: 628729 - DNA, 120 bp, Artificial Sequence
  ENSG00000179241_4 (sequence is synthesized)
aagttctcaagaacccggcagtgggcaggtgtttgtgacttcagagaaccaacttgtgtattaccccagcatcacctatgccatcatcggcagctccgtcatttttgtgctggtggtggc

SEQ ID NO: 628730 - DNA, 120 bp, Artificial Sequence
  ENSG00000179241_5 (sequence is synthesized)
cctgctggcactggtcttgcaccaccagcggaagcggaacaacctcatgacgctgcccgtgcaccggctgcagcaccctgtgctgctgtcccgcctggtggtcctggaccacccccacca

SEQ ID NO: 628731 - DNA, 120 bp, Artificial Sequence
  ENSG00000179241_6 (sequence is synthesized)
ctgcaacgtcacctacaacgtcaataatggcatccagtatgtggccagccaggcggagcagaatgcgtcggaagtaggctccccaccctcctactccgaggccttgctggaccagaggcc

SEQ ID NO: 628732 - DNA, 120 bp, Artificial Sequence
  ENSG00000179241_7 (sequence is synthesized)
tgcgtggtatgaccttcctccaccgccctactcttctgacacggaatctctgaaccaagccgacctgcccccctaccgctcccggtccgggagtgccaacagtgccagctcccaggcagc

SEQ ID NO: 628733 - DNA, 120 bp, Artificial Sequence
  ENSG00000179241_8 (sequence is synthesized)
cagcagcctcctgagcgtggaagacaccagccacagcccggggcagcctggcccccaggagggcactgctgagcccagggactctgagcccagccagggcactgaagaagtataagtccc

SEQ ID NO: 628734 - DNA, 120 bp, Artificial Sequence
  ENSG00000179241_9 (sequence is synthesized)
agttattccaaagtccatatgggttaatctgctctgacttgttgccattctaacaatttgtgctcatgggaagctctttaagcacctgtaagggtgtctcaagttacagtttgggatatt

SEQ ID NO: 628735 - DNA, 120 bp, Artificial Sequence
  ENSG00000179241_10 (sequence is synthesized)
aactatctctgcattcccctcctcccccagacttcagagatgtttttctggcgtctcagttgacatgatctgttgtgcgtcttttctgtcaggtcactcttcccttgggacccgagatca

SEQ ID NO: 628736 - DNA, 120 bp, Artificial Sequence
  ENSG00000179241_11 (sequence is synthesized)
caccctcatttttcacattattctgtttctgttggagagacagcatataaaacagtattgaaataggctgggagagagcaatgtttctgtgctatattggatgctcagaagtgcaggaga

SEQ ID NO: 628737 - DNA, 120 bp, Artificial Sequence
  ENSG00000179241_12 (sequence is synthesized)
cgctggacccaattctctctgctgggtagttaccttatagcatttggggatttgggttagatgatctaaccaggaggccatcactggatggtcacccccccaaaaaaattccatttgagc

SEQ ID NO: 628738 - DNA, 120 bp, Artificial Sequence
  ENSG00000179241_13 (sequence is synthesized)
atcaaaacctgctttgcacaatcctatttgatgcccccagttcagcagagtcagtggccaaagaaaactttggacgtgagtaacacccttcagcagtcgcaacgttattttggttttgtg

SEQ ID NO: 628739 - DNA, 120 bp, Artificial Sequence
  ENSG00000179241_14 (sequence is synthesized)
aaggactctgaaaccatctaccctgtataaattctggctttagaaatttgcccaagaatgctcattctgagagctttcctcagcagcatatatcatcagcctcatcctaaaataggcagg

SEQ ID NO: 628740 - DNA, 120 bp, Artificial Sequence
  ENSG00000179241_15 (sequence is synthesized)
tttctggactgtcaccctcccagctgacctgcccgtagccaaggaatgaggacctaacttgagttggcccaaagtctgacctggctgtatgtccctgtggcccacacccagcctgtcttg

SEQ ID NO: 628741 - DNA, 120 bp, Artificial Sequence
  ENSG00000179241_16 (sequence is synthesized)
ctcattcatgcagcctcaacactggcctccaaagttcccttaacacttgcaaagtcctttttacctgtgcatttggacttgaggacactggtttctatcacaggtgagagccatgttcaa

SEQ ID NO: 628742 - DNA, 120 bp, Artificial Sequence
  ENSG00000179241_17 (sequence is synthesized)
tacctccagcaagctctcctggctccctgcactgtgcacgctcctcttcccaaggtcccaataccagcacctctagttagagttagggtcagggtcaggcctctcccaacatcccagtag

SEQ ID NO: 628743 - DNA, 120 bp, Artificial Sequence
  ENSG00000179241_18 (sequence is synthesized)
tttctcctctgagacacatgggcaagagacaatttggagtcaagattttccatttggatctattttaaatcttttagaaatgcatttgaaacagtgtgtttgttttttcccttctagtta

SEQ ID NO: 628744 - DNA, 120 bp, Artificial Sequence
  ENSG00000179241_19 (sequence is synthesized)
agggactatttatatgtgtataggaaagctgtctctttttttgtttttcctttaacaaggtccaaagaaagatgcaaaaggagatcacacccttgccccgctgagccccgtgataacaag

SEQ ID NO: 628745 - DNA, 120 bp, Artificial Sequence
  ENSG00000179241_20 (sequence is synthesized)
tcactccagactaacctgtgtgccagacatttgtgcattgttgcactttgaggttattatttatcaagttcttgaaggaagcagaaagagggactcctctctccctccgtgtatagtctc

SEQ ID NO: 628746 - DNA, 120 bp, Artificial Sequence
  ENSG00000179241_21 (sequence is synthesized)
tatgtttgtgctagtttttcttttttttctctgtgtccagtcagccacagggcccgcctccctgcaggaataaggggtaaaacgttaggtgttgtttggcaagaaaccacactgactgat

SEQ ID NO: 628747 - DNA, 120 bp, Artificial Sequence
  ENSG00000179241_22 (sequence is synthesized)
gaggggtaaaatggaaccaggtagagccactccgggcagctgtcacccattcagaacttctttccgcagctgaagaaatgttcagtaacctgtttgacgctaattaaaacagagcctgca

SEQ ID NO: 628748 - DNA, 120 bp, Artificial Sequence
  ENSG00000179241_23 (sequence is synthesized)
ggaagtggggctaaagtggcattcagtgatcctgttctgtagacttttctttctttttttaaccaaatccaaaggatgttacagaaaagctagccactggtattttgttttgtttaaaaa

SEQ ID NO: 628749 - DNA, 120 bp, Artificial Sequence
  ENSG00000179241_24 (sequence is synthesized)
aaaaaagaaagaaagaaagaaagaaaaacggaaaggaacctagctgcctgtatctttcatttttaaaatagcacttgagttattttctgagtaatccaataaagaacttttgatgacagc

SEQ ID NO: 628750 - DNA, 120 bp, Artificial Sequence
  ENSG00000179241_25 (sequence is synthesized)
cagaatgtgttagaactctggctgaacatttcatctcctgtgagtcagaagggctttatttctccctttgatggggccccttcttctttctggtgctctggaagttgtttagaggaaaga

SEQ ID NO: 628751 - DNA, 120 bp, Artificial Sequence
  ENSG00000179241_26 (sequence is synthesized)
attctaattttaattaattgcgcagtgagttaatctcactcgcttttctgcttccaggcatcttaggaaaaacaaatggttttagtagataagggatgcctactaatgcttttttaaaac

SEQ ID NO: 628752 - DNA, 120 bp, Artificial Sequence
  ENSG00000179241_27 (sequence is synthesized)
aaacagggacatttttattatagatttgatttttttaatgaatgtttttaaaaatatataaataggacaccaaagcggcagggtttttttgggggggagggggtttgttttccaactcaa

SEQ ID NO: 628753 - DNA, 120 bp, Artificial Sequence
  ENSG00000179241_28 (sequence is synthesized)
gatggcacattagtggccagcaatattttttaactcattccaaccaggaagcttttttatacattgcctaaatctacgccaaccagaaaatagtctcatctctttttttctcaaatgaga

SEQ ID NO: 628754 - DNA, 120 bp, Artificial Sequence
  ENSG00000179241_29 (sequence is synthesized)
tccgtgttttattttagcattaaattagttacactgtgatgactggcctattacctgactcagctccctctaccttgaaattgacatttttaaaaaatgcaactaagtggttaatagtgt

SEQ ID NO: 628755 - DNA, 120 bp, Artificial Sequence
  ENSG00000179241_30 (sequence is synthesized)
gtgacgctcaaagttaatgtaaactggaaaggttgtgtgtcgttgctttttgtgttttggttaggcttggttttgttttttaatttttatactttctaataaatttgcagtttcattctt

SEQ ID NO: 628756 - DNA, 80 bp, Artificial Sequence
  ENSG00000179241_31 (sequence is synthesized)
cgcgggggcagcaacgacgccgggcagcgggagcggcggccgcgccatgtggctgctggggccgctgtgcctgctgctga

SEQ ID NO: 628757 - DNA, 120 bp, Artificial Sequence
  ENSG00000179241_32 (sequence is synthesized)
atgtggctgctggggccgctgtgcctgctgctgagcagcgccgcgggaaagtgcctggaaaaatagatgacagccagaaagagagcttggagaaaaaaatgactccaaggagaaggtggt

SEQ ID NO: 628758 - DNA, 120 bp, Artificial Sequence
  ENSG00000179241_33 (sequence is synthesized)
atagaatgaagctgctggaggtccatttaacaggaagaatgtggaagccttttttccacttttaatttagagtttgaaagcccagctgggctgagagaggcaaaaatgctgactccattc

SEQ ID NO: 628759 - DNA, 120 bp, Artificial Sequence
  ENSG00000179241_34 (sequence is synthesized)
agcaattaaacatccccctgactgctgccactttctccactctgattattcagcagacccattcttcttaatacacagcaccgaggtgtggcttagcccagcctggtttgaattagctta

SEQ ID NO: 628760 - DNA, 120 bp, Artificial Sequence
  ENSG00000179241_35 (sequence is synthesized)
tgggatccacattaatgaagcctagccttacttccctgcatatgatgtgtgactgggtatagtcaagtgcccagtgtaggtaaatagatttcggagaatggtgatgtaagatacctacca

SEQ ID NO: 628761 - DNA, 120 bp, Artificial Sequence
  ENSG00000179242_0 (sequence is synthesized)
ggcggcggggaagatgaccgcgggcgccggcgtgctccttctgctgctctcgctctccggcgcgctccgggcccataatgaggatcttacaactagagagacctgcaaggctgggttctc

SEQ ID NO: 628762 - DNA, 120 bp, Artificial Sequence
  ENSG00000179242_1 (sequence is synthesized)
tgaagatgattacacggcattaatctcccaaaatattctagaaggggaaaagctacttcaagtcaagttcagcagctgtgtggggaccaaggggacacaatatgagaccaacagcatgga

SEQ ID NO: 628763 - DNA, 120 bp, Artificial Sequence
  ENSG00000179242_2 (sequence is synthesized)
cttcaaagttggggcagatgggacagtcttcgccacccgggagctgcaggtcccctccgagcaggtggcgttcacggtgactgcatgggacagccagacagcagagaaatgggacgccgt

SEQ ID NO: 628764 - DNA, 120 bp, Artificial Sequence
  ENSG00000179242_3 (sequence is synthesized)
ggtgcggttgctggtggcccagacctcgtccccgcactctggacacaagccgcagaaaggaaagaaggtcgtggctctggacccctctccgcctccgaaggacaccctgctgccgtggcc

SEQ ID NO: 628765 - DNA, 120 bp, Artificial Sequence
  ENSG00000179242_4 (sequence is synthesized)
ccagcaccagaacgccaacgggctgaggcggcgcaaacgggactgggtcatcccgcccatcaacgtgcccgagaactcgcgcgggcccttcccgcagcagctcgtgaggatccggtccga

SEQ ID NO: 628766 - DNA, 120 bp, Artificial Sequence
  ENSG00000179242_5 (sequence is synthesized)
caaagacaatgacatccccatccggtacagcatcacgggagtgggcgccgaccagccccccatggaggtcttcagcattgactccatgtccggccggatgtacgtcacaaggcccatgga

SEQ ID NO: 628767 - DNA, 120 bp, Artificial Sequence
  ENSG00000179242_6 (sequence is synthesized)
ccgggaggagcacgcctcttaccacctccgagcccacgctgtggacatgaatggcaacaaggtggagaaccccatcgacctgtacatctacgtcatcgacatgaatgacaaccgccctga

SEQ ID NO: 628768 - DNA, 120 bp, Artificial Sequence
  ENSG00000179242_7 (sequence is synthesized)
gttcatcaaccaggtctacaacggctccgtggacgagggctccaagccaggcacctacgtgatgaccgtcacggccaacgatgctgacgacagcaccacggccaacgggatggtgcggta

SEQ ID NO: 628769 - DNA, 120 bp, Artificial Sequence
  ENSG00000179242_8 (sequence is synthesized)
ccggatcgtgacccagaccccacagagcccgtcccagaatatgttcaccatcaacagcgagactggagatatcgtcacagtggcggctggcctggaccgagagaaagttcagcagtacac

SEQ ID NO: 628770 - DNA, 120 bp, Artificial Sequence
  ENSG00000179242_9 (sequence is synthesized)
agtcatcgttcaggccacagatatggaaggaaatctcaactatggcctctcaaacacagccacagccatcatcacggtgacagatgtgaatgacaacccgccagaatttaccgccagcac

SEQ ID NO: 628771 - DNA, 120 bp, Artificial Sequence
  ENSG00000179242_10 (sequence is synthesized)
gtttgcaggggaggtccccgaaaaccgcgtggagaccgtggtcgcaaacctcacggtgatggaccgagatcagccccactctccaaactggaatgccgtttaccgcatcatcagtgggga

SEQ ID NO: 628772 - DNA, 120 bp, Artificial Sequence
  ENSG00000179242_11 (sequence is synthesized)
tccatccgggcacttcagcgtccgcacagaccccgtaaccaacgagggcatggtcaccgtggtgaaggcagtcgactacgagctcaacagagctttcatgctgacagtgatggtgtccaa

SEQ ID NO: 628773 - DNA, 120 bp, Artificial Sequence
  ENSG00000179242_12 (sequence is synthesized)
ccaggcgcccctggccagcggaatccagatgtccttccagtccacggcaggggtgaccatctccatcatggacatcaacgaggctccctacttcccctcaaaccacaagctgatccgcct

SEQ ID NO: 628774 - DNA, 120 bp, Artificial Sequence
  ENSG00000179242_13 (sequence is synthesized)
ggaggagggcgtgccccccggcaccgtgctgaccacgttttcagctgtggaccctgaccggttcatgcagcaggctgtgagatactcaaagctgtcagacccagcgagctggctgcacat

SEQ ID NO: 628775 - DNA, 120 bp, Artificial Sequence
  ENSG00000179242_14 (sequence is synthesized)
caatgccaccaacggccagatcaccacggcggcagtgctggaccgtgagtccctctacaccaaaaacaacgtctacgaggccaccttcctggcagctgacaatgggatacccccggccag

SEQ ID NO: 628776 - DNA, 120 bp, Artificial Sequence
  ENSG00000179242_15 (sequence is synthesized)
cggcaccgggaccctccagatctatctcattgacatcaacgacaacgcccctgagctgctgcccaaggaggcgcagatctgcgagaagcccaacctgaacgccatcaacatcacggcggc

SEQ ID NO: 628777 - DNA, 120 bp, Artificial Sequence
  ENSG00000179242_16 (sequence is synthesized)
cgacgctgacgtcgaccccaacatcggcccctacgtcttcgagctgccctttgtcccggcggccgtgcggaagaactggaccatcacccgcctgaacggtgactatgcccaactcagctt

SEQ ID NO: 628778 - DNA, 120 bp, Artificial Sequence
  ENSG00000179242_17 (sequence is synthesized)
gcgcatcctgtacctggaggccgggatgtatgacgtccccatcatcgtcacagactctggaaaccctcccctgtccaacacgtccatcatcaaagtcaaggtgtgcccatgtgatgacaa

SEQ ID NO: 628779 - DNA, 120 bp, Artificial Sequence
  ENSG00000179242_18 (sequence is synthesized)
cggggactgcaccaccattggcgcagtggcagcggctggtctgggcaccggtgccatcgtggccatcctcatctgcatcctcatcctgctgaccatggtcctgctgtttgtcatgtggat

SEQ ID NO: 628780 - DNA, 120 bp, Artificial Sequence
  ENSG00000179242_19 (sequence is synthesized)
gaagcggcgagagaaggagcgccacacgaagcagctgctcattgaccccgaggacgacgtccgcgacaacatcctcaagtatgacgaggaaggcggtggcgaggaggaccaggactacga

SEQ ID NO: 628781 - DNA, 120 bp, Artificial Sequence
  ENSG00000179242_20 (sequence is synthesized)
cctcagccagctgcagcagccggaagccatggggcacgtgccaagcaaagcccctggcgtgcgtcgcgtggatgagcggccggtgggcgctgagccccagtacccgatcaggcccatggt

SEQ ID NO: 628782 - DNA, 120 bp, Artificial Sequence
  ENSG00000179242_21 (sequence is synthesized)
gccgcacccaggcgacatcggtgacttcatcaatgagggactccgcgctgctgacaacgaccccacggcacccccctatgactccctgctggtcttcgactacgaggggagcggctccac

SEQ ID NO: 628783 - DNA, 120 bp, Artificial Sequence
  ENSG00000179242_22 (sequence is synthesized)
cgcaggctccgtcagctccctgaactcatccagttccggggaccaagactacgattacctcaacgactgggggcccagattcaagaagctggcggacatgtatggaggtggtgaagagga

SEQ ID NO: 628784 - DNA, 120 bp, Artificial Sequence
  ENSG00000179242_23 (sequence is synthesized)
ttgactgacctcgcatcttcggaccgaagtgagagccgtgctcggacgccggaggagcaggactgagcagaggcggccggtcttcccgactccctgcggctgtgtccttagtgctgttag

SEQ ID NO: 628785 - DNA, 120 bp, Artificial Sequence
  ENSG00000179242_24 (sequence is synthesized)
gaggccccccaatccccacgttgagctgtctagcatgagcacccacccccacagcgccctgcacccggccgctgcccagcaccgcgctggctggcactgaaggacagcaagaggcactct

SEQ ID NO: 628786 - DNA, 120 bp, Artificial Sequence
  ENSG00000179242_25 (sequence is synthesized)
aaaaaaaagaaagtgccttttggtacatgtatcagattccctcaaactcaggagtgtctaaagcagacagaccgtccccaccttcccatcccgagcggcctccaaccccagctagtccca

SEQ ID NO: 628787 - DNA, 120 bp, Artificial Sequence
  ENSG00000179242_26 (sequence is synthesized)
gctctgaaggcatcattcagaaatgggggagactgtgtctgtctttcttactttttttttggtcttttattaagaaaaagaaagtgggtgacttgtttgaaaacagagtggggttcaaat

SEQ ID NO: 628788 - DNA, 120 bp, Artificial Sequence
  ENSG00000179242_27 (sequence is synthesized)
cccagcagcctttgctgtacacagctgggggtctcttgagcctcttgggagtcaaggccagctgggaggcttagcccttcagccccagcagaaggccctggggctggtggggctcagaat

SEQ ID NO: 628789 - DNA, 120 bp, Artificial Sequence
  ENSG00000179242_28 (sequence is synthesized)
acccctaccttgtggctgctccccacccctcccggatgctgtgaggagctcaggcaggggcctggaggggaacaggggtcatcctgaaggggctccacccccagtcaacccaggcctccc

SEQ ID NO: 628790 - DNA, 120 bp, Artificial Sequence
  ENSG00000179242_29 (sequence is synthesized)
tcagggacacctgtcaccctgagtgccaccaggtcccctctgcctttggtccagaagagtgagttgtccaaaccagccagcatctggctccagccctccaaccctggcgaccagacccca

SEQ ID NO: 628791 - DNA, 120 bp, Artificial Sequence
  ENSG00000179242_30 (sequence is synthesized)
tggggtgccatcaacggccccgcgacaggcatcaattcaaaccccaggacactctcgacagctccaaccatccggagggctgtgcagatggcaggaaccaaggaccctccctggcagctg

SEQ ID NO: 628792 - DNA, 120 bp, Artificial Sequence
  ENSG00000179242_31 (sequence is synthesized)
aagagggcagttacggttgggcgtggtgaccagaacacacccagcagcctgcgaagcctccccgtccccagcctgtgctcctgattcccgccagacgcttgtgagcctgtgtgggtggca

SEQ ID NO: 628793 - DNA, 120 bp, Artificial Sequence
  ENSG00000179242_32 (sequence is synthesized)
ggaggccccgtcttgccgtgcctacctgtcgcacagatgcctctgcacgctgcagacggtgcctctcctctcctatggaccctcgtcgggggcaggcagcggccgggtccaaacttgctg

SEQ ID NO: 628794 - DNA, 120 bp, Artificial Sequence
  ENSG00000179242_33 (sequence is synthesized)
ctgtcctcgaggctggcactgctatctccagggctgggttgactcaagccagacagggggaaggaattggttctgcaggacagtgagagggtctgtgtcccggcacccctgggacagcgc

SEQ ID NO: 628795 - DNA, 120 bp, Artificial Sequence
  ENSG00000179242_34 (sequence is synthesized)
tcggctgcctgtgctcactgcatgagaaaactcagagggtgcattctccctctggcatggctgtgtctgggcgccttgggctgcggcagggggcaggccccacgtggggaagcctcgtgc

SEQ ID NO: 628796 - DNA, 120 bp, Artificial Sequence
  ENSG00000179242_35 (sequence is synthesized)
ttggtcagctttctgtctctcccaggccagtgacaactggcttcccgaggaaggaggtgaggtaccagggaccctgggcaggacctggtgtcgggcagggcggtgccagcactggggaag

SEQ ID NO: 628797 - DNA, 120 bp, Artificial Sequence
  ENSG00000179242_36 (sequence is synthesized)
gacagggagccctcccggagccccaccctgcacctgccactggggtcagggagtgtctcggggtgcctttgggggcagcatgagctccaccaggggccccggcccccacctcagcctatg

SEQ ID NO: 628798 - DNA, 120 bp, Artificial Sequence
  ENSG00000179242_37 (sequence is synthesized)
gcccttccccatggctaaggtcatgccttttctgaacagctttggccttgagtgcacacatctgtgccaggctcacggcatgttcccgttggatgtcagggtccttgtccaaaccaaact

SEQ ID NO: 628799 - DNA, 120 bp, Artificial Sequence
  ENSG00000179242_38 (sequence is synthesized)
cacagctgcccctgtgcagccttcagagttgagctggggtctcagtctccaacctgtcctttctgaccctcccatggctgcccagggagggcggggttcactgtgccacgtgctgggtgc

SEQ ID NO: 628800 - DNA, 120 bp, Artificial Sequence
  ENSG00000179242_39 (sequence is synthesized)
ccccctctgcagacagccagtccaggagatggaccaacagaggtcaaggggcagctggccaggccgcaccggggtccccgagttctgagctgtgctatgcaaacaagaatgctcctgtgt

SEQ ID NO: 628801 - DNA, 120 bp, Artificial Sequence
  ENSG00000179242_40 (sequence is synthesized)
gggggggcatggccgttggaggtatagctgggcgggtagtggaaggactggaaatctctgttgttgtttggggaagtccatgcttcagtccttcggagtatgcgtggattgttcgaagtg

SEQ ID NO: 628802 - DNA, 120 bp, Artificial Sequence
  ENSG00000179242_41 (sequence is synthesized)
tgactatggcccgggagccagggcagcatgaactcctttctctgaaatttcgaggcctccttgggttccctgaactccgggctgatgttcccaggacccagcaccaggagaccccagtcc

SEQ ID NO: 628803 - DNA, 120 bp, Artificial Sequence
  ENSG00000179242_42 (sequence is synthesized)
cgccagcagccgccgctacccaggagggctgggcgacattggccgcctcccactagctccccctcctcgcccacagcctcttgtcactgccaagcccccgttccttttgcccaaatcacg

SEQ ID NO: 628804 - DNA, 120 bp, Artificial Sequence
  ENSG00000179242_43 (sequence is synthesized)
caggcggaagctgcagtgccagctggagggatgttcatagggcttcctgtgcccatccctgctccaaacagctggacagcttcccctctacccccaccctggtgagcccctgggggccag

SEQ ID NO: 628805 - DNA, 120 bp, Artificial Sequence
  ENSG00000179242_44 (sequence is synthesized)
agaaagatggggttcctgcaccttcccagctccacctctgaacttgagttagcgttagctaagcatacaatcagtgtcgaacgtctctcttccttaagcttgtagatacgactgcctata

SEQ ID NO: 628806 - DNA, 120 bp, Artificial Sequence
  ENSG00000179242_45 (sequence is synthesized)
atcaggggactcccactggaggccgggaggccaatgctggccaggtgcgagggcatggtttggttcctttagggaatttttgttttgcaaacaggagaaacctgtgctgcaggttggagt

SEQ ID NO: 628807 - DNA, 120 bp, Artificial Sequence
  ENSG00000179242_46 (sequence is synthesized)
ggcaggaacgactggccttggtcagcaggcagcccccagcctagggccacagtcctcttcagggcctgggcagccccaatttctggcccagcaggtttctctttgtagtgtctttcagca

SEQ ID NO: 628808 - DNA, 120 bp, Artificial Sequence
  ENSG00000179242_47 (sequence is synthesized)
catccaaaatgctaggcctcctgccaccaacgtgtcagagcaatgtccaactgtcaggctctcagagatgcctcagtttccctagcatgagcaccagccgacacacacagtccactgaga

SEQ ID NO: 628809 - DNA, 120 bp, Artificial Sequence
  ENSG00000179242_48 (sequence is synthesized)
tgataattctgttctctccaaagcaaaaagctgggcgaggggtagtctcaatttctgtcagtgctcaaaggaataacaccaaaagaatcaacacagaatctcccagacacacgtgaccca

SEQ ID NO: 628810 - DNA, 120 bp, Artificial Sequence
  ENSG00000179242_49 (sequence is synthesized)
gctcgtggcgccgtgggtccgtaggagggacagtacctcacaacaggcccagcgggggaccacctctctgtacaattggaatgcgttttacttttcttttctctccttttttcattccga

SEQ ID NO: 628811 - DNA, 120 bp, Artificial Sequence
  ENSG00000179242_50 (sequence is synthesized)
ttttttttgcatgtttctttttgaaatgggcaaaatgtgtagcagcctgcatgagcacagttgttttggggaaagatactggagtatgatgtactcacacctgcaaatctgagcatcgcg

SEQ ID NO: 628812 - DNA, 120 bp, Artificial Sequence
  ENSG00000179242_51 (sequence is synthesized)
aggttaaacgttccacctttttttgtaatcgtcaacagcacaactattttgtattgttgtttgtatcattttgtaccaaaaaaaaaaaggaaaaaaaaagggaagagagttgatgttttc

SEQ ID NO: 628813 - DNA, 120 bp, Artificial Sequence
  ENSG00000179242_52 (sequence is synthesized)
agtgtgtttccagtgccagacagtcttggtcctgaactcagtagacccttgcggagcggttgtgcgcgggcaggcggggcgcgctgctccagagaatgaataaagtcccccttttccgta

SEQ ID NO: 628814 - DNA, 120 bp, Artificial Sequence
  ENSG00000179242_53 (sequence is synthesized)
atcttgggcctgtcacttggggagcactgtagaaggttctggagaaggcattgagactataattctactttaatgagctgggctacctagattctatggtacagcaagagaagctgtttg

SEQ ID NO: 628815 - DNA, 120 bp, Artificial Sequence
  ENSG00000179242_54 (sequence is synthesized)
tatgcacctgtatgtacgtgccttacttaaaattcagaaagaaaatcttcaggtgccagaattacttgtgaggctggtgaagagtgaaaagccacttcccaggccagacaggaaagagtg

SEQ ID NO: 628816 - DNA, 120 bp, Artificial Sequence
  ENSG00000179242_55 (sequence is synthesized)
ccctggttgggaccagacgggcctggctgcagacgtacactttgggcttcagcagccctggtgctgccttgagcttgacccgaattgcttcttcccagaggctgggtctccctcgcagcc

SEQ ID NO: 628817 - DNA, 120 bp, Artificial Sequence
  ENSG00000179242_56 (sequence is synthesized)
cctgctctcaaggatgggaatgagaaggtcgatgacaaggcacctctgctttacatccaagcgttgacttttgtggcttcctttaccccattgctctgccctttaaagggtcctggtgtg

SEQ ID NO: 628818 - DNA, 120 bp, Artificial Sequence
  ENSG00000179242_57 (sequence is synthesized)
tttgggaatgggacagacaattttgtttttcacaatggtattgggctgtggatccagaactcaagttccagaggaaagcgatgccaaagtcaacagggatgcttcacggaggcagggaaa

SEQ ID NO: 628819 - DNA, 120 bp, Artificial Sequence
  ENSG00000179242_58 (sequence is synthesized)
atgcaggagtcaagttcagcagctgtgtggggaccaaggggacacaatatgagaccaacagcatggacttcaaaccgcagaaaggaaagaaggtcgtggctctggacccctctccgcctc

SEQ ID NO: 628820 - DNA, 120 bp, Artificial Sequence
  ENSG00000179242_59 (sequence is synthesized)
gcactggcgctctggctttcttctttctccctctgccttaatgatgctgcccctttcctgttcctggttgaagctgaagcccgcttcccttcgccgcacacaacacaggagcaatcttct

SEQ ID NO: 628821 - DNA, 120 bp, Artificial Sequence
  ENSG00000179242_60 (sequence is synthesized)
cagccgtgcactcacagcttggaaaataaagggaggaaggagtcccagccacagggtagaggaacggcctctccacagagaagctgctgctgctgagctgaagtgacagtcaagttcagc

SEQ ID NO: 628822 - DNA, 120 bp, Artificial Sequence
  ENSG00000179256_0 (sequence is synthesized)
actttaacaatactcctaaacaactgctaggaccacggaactcagaaacacagcaagcgatcatattggaaatatggcccaaagtgacttcctttacccagagaacccaaaaaggcggga

SEQ ID NO: 628823 - DNA, 120 bp, Artificial Sequence
  ENSG00000179256_1 (sequence is synthesized)
agaagtaaatcgtcttcaccagcagcttcttgattgcttatctgacagcttcgatgtcaccaataagctgactgaggttctaaatatgcacttggggtgcaggctggcctccattgagat

SEQ ID NO: 628824 - DNA, 120 bp, Artificial Sequence
  ENSG00000179256_2 (sequence is synthesized)
gaaaagagatgggaccatcaaagaaaactgtgacctcatcatccaagccattatgaaaatccaaaaggaattgcagaaggttgatgaagcactaaaagataagctagagccaaccctcta

SEQ ID NO: 628825 - DNA, 120 bp, Artificial Sequence
  ENSG00000179256_3 (sequence is synthesized)
tagaaaacttcaggatattaaggaaaaggaaacagacaaaattgcaatagtgcaaaaggttatttcggtcatcctgggagaagctacatctgcagccagtgcagtcgctgttaaacttgt

SEQ ID NO: 628826 - DNA, 120 bp, Artificial Sequence
  ENSG00000179256_4 (sequence is synthesized)
gggctcaaatgtcacaactggcataattaacaagttggtcactgtgttagctcaaattggtgcttctctccttggtagtattggagttgctgttcttggccttggcatagatatgattgt

SEQ ID NO: 628827 - DNA, 120 bp, Artificial Sequence
  ENSG00000179256_5 (sequence is synthesized)
ccgtgccatcctgggagcagtggaaaaaacacagcttcaagcagccatcaaaagttatgagaagcatctggtggagttcaaatcagcctcagaaaaatataatcatgccattactgaggt

SEQ ID NO: 628828 - DNA, 120 bp, Artificial Sequence
  ENSG00000179256_6 (sequence is synthesized)
catcaatacagtgaaacaccaaatgaaatgaacagccgttttatttgccactgaagtgtttttctgcttccttttcagtaacagtgtttgcttctttgattaggttcattttctataggc

SEQ ID NO: 628829 - DNA, 120 bp, Artificial Sequence
  ENSG00000179256_7 (sequence is synthesized)
ttccaatatggacttaaataagataaacaatttggagagggaaactggagatgccaagactagatgactagatgagttttgagtcaacaatgcctggatcagctgatgctagaccctgtg

SEQ ID NO: 628830 - DNA, 120 bp, Artificial Sequence
  ENSG00000179256_8 (sequence is synthesized)
atgctatcgtagagtagcaagtataggggttacttttctcttttctaatttcagtaaaattcttaaatttcacattgaatgcagagactttcatttctaccaccagcttcaaacatcatt

SEQ ID NO: 628831 - DNA, 120 bp, Artificial Sequence
  ENSG00000179256_9 (sequence is synthesized)
tagttataaggggacatactcagtaacttctgcctagacacaaactctaggccttcgaatgagacagaaatactaccatatttttgaccatcagagtaaatctggttttctgtaaactag

SEQ ID NO: 628832 - DNA, 120 bp, Artificial Sequence
  ENSG00000179256_10 (sequence is synthesized)
aagagactgaaaaatggtttgtaacaatgtgcttcaattaggacaggaagctgatctgtaaacgtctactgattacacaatgtaaaccggatggatttgaaaatggtaaaaatcaaaact

SEQ ID NO: 628833 - DNA, 120 bp, Artificial Sequence
  ENSG00000179256_11 (sequence is synthesized)
aaaaacatcaaggtcctgtttcagtcactgcaatcaaccctgaccaactgtgataattaaatatcgctcaagtgaatgttcaaacactgaaacatttagaagacaagaaagcaaaacaca

SEQ ID NO: 628834 - DNA, 120 bp, Artificial Sequence
  ENSG00000179256_12 (sequence is synthesized)
gctacacatattgcatttaggatgcagaatagaaggtcactactcaaagcatttgtcatttaaaagaaagtcataatttattataagctttcagaaaaaagaatataatttcattttcaa

SEQ ID NO: 628835 - DNA, 120 bp, Artificial Sequence
  ENSG00000179256_13 (sequence is synthesized)
cactagcaaaaaggaggcagctgcctttgctacatgacgcattaggtgggccatttcactaattacctgattttagaaaacgccaaaggctatggaagcctattaatggttccgctgaat

SEQ ID NO: 628836 - DNA, 120 bp, Artificial Sequence
  ENSG00000179256_14 (sequence is synthesized)
ctctgcagatgtgtttgttttctaaatcctttgccaaccaataattcccatgaggactcttttagtctatactgacaaaattattaatatgctgttgatgccagactgtgtttgttatag

SEQ ID NO: 628837 - DNA, 120 bp, Artificial Sequence
  ENSG00000179256_15 (sequence is synthesized)
ttgattctcccatccaagtacaagaaatgtattgaaataaaaactgctcagcatatcttaaaaatagtagctacatataaaattttagctacatgaaagactttaatatttccaacatac

SEQ ID NO: 628838 - DNA, 120 bp, Artificial Sequence
  ENSG00000179256_16 (sequence is synthesized)
actgttttctctttctcttcttgcattgtttttcaaaacgagttgcaaaactatgatcactaatgtgttaggaaagaaaaaaaactagttgcaaaacattacaacttagctcaccttcgc

SEQ ID NO: 628839 - DNA, 120 bp, Artificial Sequence
  ENSG00000179262_0 (sequence is synthesized)
gcggcgcgcctgggcgctaagatggcggcggcgtgagttgcatgttgtgtgaggatcccggggccgccgcgtcgctcgggccccgccatggccgtcaccatcacgctcaaaacgctgcag

SEQ ID NO: 628840 - DNA, 120 bp, Artificial Sequence
  ENSG00000179262_1 (sequence is synthesized)
cagcagaccttcaagatccgcatggagcctgacgagacggtgaaggtgctaaaggagaagatagaagctgagaagggtcgtgatgccttccccgtggctggacagaaactcatctatgcc

SEQ ID NO: 628841 - DNA, 120 bp, Artificial Sequence
  ENSG00000179262_2 (sequence is synthesized)
ggcaagatcttgagtgacgatgtccctatcagggactatcgcatcgatgagaagaactttgtggtcgtcatggtgaccaagaccaaagccggccagggtacctcagcacccccagaggcc

SEQ ID NO: 628842 - DNA, 120 bp, Artificial Sequence
  ENSG00000179262_3 (sequence is synthesized)
tcacccacagctgccccagagtcctctacatccttcccgcctgcccccacctcaggcatgtcccatcccccacctgccgccagagaggacaagagcccatcagaggaatccgcccccacg

SEQ ID NO: 628843 - DNA, 120 bp, Artificial Sequence
  ENSG00000179262_4 (sequence is synthesized)
acgtccccagagtctgtgtcaggctctgttccctcttcaggtagcagcgggcgagaggaagacgcggcctccacgctagtgacgggctctgagtatgagacgatgctgacggagatcatg

SEQ ID NO: 628844 - DNA, 120 bp, Artificial Sequence
  ENSG00000179262_5 (sequence is synthesized)
tccatgggctatgagcgagagcgggtcgtggccgccctgagagccagctacaacaacccccaccgagccgtggagtatctgctcacgggaattcctgggagccccgagccggaacacggt

SEQ ID NO: 628845 - DNA, 120 bp, Artificial Sequence
  ENSG00000179262_6 (sequence is synthesized)
tctgtccaggagagccaggtatcggagcagccggccacggaagcagcaggagagaaccccctggagttcctgcgggaccagccccagttccagaacatgcggcaggtgattcagcagaac

SEQ ID NO: 628846 - DNA, 120 bp, Artificial Sequence
  ENSG00000179262_7 (sequence is synthesized)
gatgctgaacgagccccctggggagctggcggacatctcagatgtggagggggaggtgggcgccataggagaggaggccccgcagatgaactacatccaggtgacgccgcaggagaaaga

SEQ ID NO: 628847 - DNA, 120 bp, Artificial Sequence
  ENSG00000179262_8 (sequence is synthesized)
agctatagagaggttgaaggccctgggcttcccagagagcctggtcatccaggcctatttcgcgtgtgaaaaaaatgagaacttggctgccaacttcctcctgagtcagaactttgatga

SEQ ID NO: 628848 - DNA, 120 bp, Artificial Sequence
  ENSG00000179262_9 (sequence is synthesized)
cgagtgatgccaggaagccaggccaccgaagcccccaccctacccttattccatgaaagttttataaaagaaaaaatatatatatattcatgtttatttaagaaatggaaaaaaaaatca

SEQ ID NO: 628849 - DNA, 120 bp, Artificial Sequence
  ENSG00000179262_10 (sequence is synthesized)
aaaatcttaaaaaaacaagcaaacagtccagcttcctgtcctcctaaagtggcccctgttcccatctcccgggccagacagctgtccccccgtcctcctccccagcccagcctgctcaga

SEQ ID NO: 628850 - DNA, 120 bp, Artificial Sequence
  ENSG00000179262_11 (sequence is synthesized)
gaagctggcaggactgggaggcgacagatgggcccctcttggcctctgtcccagctctctgcagccagacggaaaggcggctgcttgcctctccatcctccgaaaaacccctgaggaccc

SEQ ID NO: 628851 - DNA, 120 bp, Artificial Sequence
  ENSG00000179262_12 (sequence is synthesized)
ccccccatcctcttctaggatgaggggaagctggagccccaactttgatcctccattggagtggcccaaatctttccatctagggcaagtcctgaaaggcccaaggccccctccccagtc

SEQ ID NO: 628852 - DNA, 120 bp, Artificial Sequence
  ENSG00000179262_13 (sequence is synthesized)
tggccttggcctccagcctggagaagggctaacatcagctcattgtcaaggccacccccaccccagaacagaaccgtgtctctgataaaggttttgaagtgaataaagttttaaaaacta

SEQ ID NO: 628853 - DNA, 78 bp, Artificial Sequence
  ENSG00000179262_14 (sequence is synthesized)
gggttcaagaaatcagccggcaccaggagcagttcatccagatgctgaacgagccccctggggagctggcggacatct

SEQ ID NO: 628854 - DNA, 120 bp, Artificial Sequence
  ENSG00000179262_15 (sequence is synthesized)
ctgctccagcagctgggccaggagaaccctcagcttttacaggtccggaaagcaggactaagcacatgcttcccccacgcccctgtgcttcctgtgacctggtgacccccctggtttctc

SEQ ID NO: 628855 - DNA, 120 bp, Artificial Sequence
  ENSG00000179262_16 (sequence is synthesized)
ctgctcacggtgaggtggggcttccgcctcccggggaggccttgagggagtacccgggcgtcactgccctgatgggcggttgggaaggcaaaacctgccctgaaaagcctttgggtagtg

SEQ ID NO: 628856 - DNA, 120 bp, Artificial Sequence
  ENSG00000179262_17 (sequence is synthesized)
attctagccactaaaggcttcccacaggaggctggatgtgagtgatgggtgggcctctggagggcagggccgaggcctcatctgtgtcctgccagggcatggaggagggtggcagcagga

SEQ ID NO: 628857 - DNA, 120 bp, Artificial Sequence
  ENSG00000179262_18 (sequence is synthesized)
ggtctgtgcattagaactaaacaggacccctgacagggaattcctgggagccccgagccggaacacggttctgtccaggagagccaggtatcggagcagccggccacggaagcaggagag

SEQ ID NO: 628858 - DNA, 120 bp, Artificial Sequence
  ENSG00000179262_19 (sequence is synthesized)
gcccggcttatttcttggctcacttaaaagcacatcatcagctcttccagggtagggcttgtgtcgactgctatgttgtgtttggccagaacaggctcctctggatatttgcctgactga

SEQ ID NO: 628859 - DNA, 120 bp, Artificial Sequence
  ENSG00000179270_0 (sequence is synthesized)
agaattgtcccgctgctcactaacagcagagggttccaaacttagaacaacaacaggacgacaggtaccactccctcttcacatttggaccaagaaaataaagaaagctggttccaagtt

SEQ ID NO: 628860 - DNA, 120 bp, Artificial Sequence
  ENSG00000179270_1 (sequence is synthesized)
taggatattgtaccatggacttcaaagaattctggcctgaaaattgcctggatggactagtaagattgccttttgttcctatttcaaatatgattcttggaaaattgtgaaggtgggtgg

SEQ ID NO: 628861 - DNA, 120 bp, Artificial Sequence
  ENSG00000179270_2 (sequence is synthesized)
aagatgactacaagctgaaatcatggggtgtacaccttcacacagtgaccttgtaaacagcgttgcaaagagtggcattcagttcttgaaaaagcccaaagcaattcggccaggatgtca

SEQ ID NO: 628862 - DNA, 120 bp, Artificial Sequence
  ENSG00000179270_3 (sequence is synthesized)
gggcggaagtgaaagaggttccatccctttgctggttaaaaactccacctgctatgacgctggggagggcctggcagaggagcagccaagtcccaggaggaaccaaaccacagctaaagg

SEQ ID NO: 628863 - DNA, 120 bp, Artificial Sequence
  ENSG00000179270_4 (sequence is synthesized)
tctttgtcagctcatgggagatcctgcttcaggcaaaaggaaagatatggaaggactgatcccaggaaccaaaacctcttcatcccagctgaacaaatcacaaagccacatggctaagga

SEQ ID NO: 628864 - DNA, 120 bp, Artificial Sequence
  ENSG00000179270_5 (sequence is synthesized)
tattccgttcaagacacagggttcccatggatcacaaggggcagacttttctggagatgagagtgaggaaagtagtacccaagatacttccaaatggaaaaggacagcaaaatgtcacac

SEQ ID NO: 628865 - DNA, 120 bp, Artificial Sequence
  ENSG00000179270_6 (sequence is synthesized)
gtcaagcacacagagccactgctaccaaaccatccaccctgctcatgagcctgaaggcaaagtggacttcccggagcctctggtaaaggcccaccagcaggcttacacctatctacactc

SEQ ID NO: 628866 - DNA, 120 bp, Artificial Sequence
  ENSG00000179270_7 (sequence is synthesized)
cagcctctccaaatatgaagcaattctgtgcatcatccatcaggccacccagacccgggagctgctgcagcccatggtcagcttcttgctgctgtgctttgaggagatcagccagctgtt

SEQ ID NO: 628867 - DNA, 120 bp, Artificial Sequence
  ENSG00000179270_8 (sequence is synthesized)
gggggagatctccaaggatggagaagtgctcctgcaggaagtcagggaggatctggcttggcctttgaagaaaagagagccccaggagcagccaaatctcctgcaacagctgctacagta

SEQ ID NO: 628868 - DNA, 120 bp, Artificial Sequence
  ENSG00000179270_9 (sequence is synthesized)
cacagtcagcaagctgcaggtgctcaatggcacagtggcctcgctcaccggcagcttcctggagggctccagcagctacctccactccactgcaacccacttggaaaataagctgagcac

SEQ ID NO: 628869 - DNA, 120 bp, Artificial Sequence
  ENSG00000179270_10 (sequence is synthesized)
aaaaaggaatgtggatgaacgcctcctgagggctctgaggcagctagagagcctggcgagtggctgtggcgaccctggggtgcagggtctccccttatgctctgaggacagtggcattgg

SEQ ID NO: 628870 - DNA, 120 bp, Artificial Sequence
  ENSG00000179270_11 (sequence is synthesized)
tgctgacaatgagtccgtgcagtcggtggacaagctgggcaagcaaaccagctgggaccttgcaccagagcccgaagaatggaagtcggtgacttcaccccacacagaggccaggcagtc

SEQ ID NO: 628871 - DNA, 120 bp, Artificial Sequence
  ENSG00000179270_12 (sequence is synthesized)
aggacacacctggcagcaaagtccattctgtttgggctcaggcagaccccaggactgcctgctctcaggggctcctatggcaaaggttcagccacgagcacaggacgaagcaaggagccc

SEQ ID NO: 628872 - DNA, 120 bp, Artificial Sequence
  ENSG00000179270_13 (sequence is synthesized)
atgcctctccagtacaagcccagaaaatatcacctccccacctttgaagctggggacaagcaccccatgtgattcctttgggattggggtctctgtggaaccacacctttccaaaacctc

SEQ ID NO: 628873 - DNA, 120 bp, Artificial Sequence
  ENSG00000179270_14 (sequence is synthesized)
caggccgatggacgcttcatctcttagtgacagcgaggacagcagcccagaggaggaggaggaagacaaaatgagcagcatgagtctgtgtgcctggcaggaaaaaactccacattcaag

SEQ ID NO: 628874 - DNA, 120 bp, Artificial Sequence
  ENSG00000179270_15 (sequence is synthesized)
gccacaatcttcacctgctgaccgggaaagcccatttcaggcccgcaccaggaggcttaggagcctccaggcccaggaaatgattctgaagatgaaggagtcaatcagcgaaaggatcaa

SEQ ID NO: 628875 - DNA, 120 bp, Artificial Sequence
  ENSG00000179270_16 (sequence is synthesized)
gtttgtccctgtgccctgtgggcaccaggactggtctgaggaggaggaggggaggacagtggtccccccaagacctagcacggtaagtggcagcaggagggcccctgagaggcagacgag

SEQ ID NO: 628876 - DNA, 120 bp, Artificial Sequence
  ENSG00000179270_17 (sequence is synthesized)
gtcccagtcagagtcgtgtctccagagtcacgtggaggaccccacctttcaggagctgcgaagggtccagagggacctcagtcagaagctggaggcattttatgccctgggtgccaaagg

SEQ ID NO: 628877 - DNA, 120 bp, Artificial Sequence
  ENSG00000179270_18 (sequence is synthesized)
gcaggggcagagccaggagcaaattctgcagcccagagcagccgccgtgtggcccaatggcacctgcagggtcagtccaagcaacaccaccagcaggctcaaggcatccctcaccaagaa

SEQ ID NO: 628878 - DNA, 120 bp, Artificial Sequence
  ENSG00000179270_19 (sequence is synthesized)
cttcagtattttgcctagtcaggacaagagcatcttgcagaaatgcaatccccatcctgaggacgaacaaggcaaagctgggaagcttccaaatgccatcccatcaggagaggtcagtga

SEQ ID NO: 628879 - DNA, 120 bp, Artificial Sequence
  ENSG00000179270_20 (sequence is synthesized)
ggctgccaaggccacagactggaatgtcagaggctgtcccaccagaacatccgtcaagaagcttattgaaactttcagtcccacggagagtctgaggatgctgggggactctaaggacgc

SEQ ID NO: 628880 - DNA, 120 bp, Artificial Sequence
  ENSG00000179270_21 (sequence is synthesized)
tggggcaagtccctgcctcaggaattgcatcatgccccccagatttcccaagtacacagggcttgcccctttgtatccgaagccccaaatttctccagcatcaggcagagaatctctcaa

SEQ ID NO: 628881 - DNA, 120 bp, Artificial Sequence
  ENSG00000179270_22 (sequence is synthesized)
aatgggcataggctggaagcccttagcacctatctttccccctctgcctaaagcagaagcagccaagagtgaggagctcagctgtgaaatggaggggaacctcgagcacctccctccacc

SEQ ID NO: 628882 - DNA, 120 bp, Artificial Sequence
  ENSG00000179270_23 (sequence is synthesized)
gcctatggaagttctgatggacaaatcattcgcttctctggagtccccagaaagcagcaagtccacagagaactcccccaaggaaacccaggagccagggccgggagaggctggccccac

SEQ ID NO: 628883 - DNA, 120 bp, Artificial Sequence
  ENSG00000179270_24 (sequence is synthesized)
caggagaacatgggcttccccaaagctgagggcctctgtgagccccctggacttgctgcccagcaagagcaccgccagcctgaccaagcctcacagcacagggccagggagtggcaggag

SEQ ID NO: 628884 - DNA, 120 bp, Artificial Sequence
  ENSG00000179270_25 (sequence is synthesized)
cagctgccagcccaggaagccagccctggacctgagcagcccaccagccaccagccaaagccccgaggtgaagggtgggacttggagtcaggcagagaaggccaccagcctctacaggca

SEQ ID NO: 628885 - DNA, 120 bp, Artificial Sequence
  ENSG00000179270_26 (sequence is synthesized)
gccccggaaggccatcgcctggcaccactccggccctccatctggacaaaacaggacctcagagtccagcctggccagaccaaggcagagccgagagagaagcccccctgtgggcagaaa

SEQ ID NO: 628886 - DNA, 120 bp, Artificial Sequence
  ENSG00000179270_27 (sequence is synthesized)
ggcctctcccacgaggacacactgggtgcctcaagcagacaagaggcgccggagccttccctcctcttacagacctgcccagccaagcccctctgctgtgcagacgccccccagcccacc

SEQ ID NO: 628887 - DNA, 120 bp, Artificial Sequence
  ENSG00000179270_28 (sequence is synthesized)
tgtgagccccagggtgctaagcccacccaccacaaagcggcgaacttccccaccgcaccagcccaagttgcccaaccctccccccgagagtgcacctgctcagtgcaaggtccccagccc

SEQ ID NO: 628888 - DNA, 120 bp, Artificial Sequence
  ENSG00000179270_29 (sequence is synthesized)
cccaacccagcacccagaagcaagcccccctttctcgattccctccccatcacccccaatgtccccttctcaggagcacaaggaaacaagagactctgaagacagccaagcagtcatagc

SEQ ID NO: 628889 - DNA, 120 bp, Artificial Sequence
  ENSG00000179270_30 (sequence is synthesized)
ctgccgccagaggctgggggccctctcgggaacccagcagaatgctggaagaacagctcagggccttggctgagagcagactcgcagcggagagcagctctgtgtgccctcaaccctctg

SEQ ID NO: 628890 - DNA, 120 bp, Artificial Sequence
  ENSG00000179270_31 (sequence is synthesized)
cctttcctcaggaggacagcttctgaccgccagccaggtggccgaccgcagcctcccaccttggaccccaccagcacctcttatgaatcccagctcggccagaacagcagcagcgaggag

SEQ ID NO: 628891 - DNA, 120 bp, Artificial Sequence
  ENSG00000179270_32 (sequence is synthesized)
agccctaagaaggacacagagccggggagcagcccctgttcccctgaactgcagggcggcaccaggcgtgcatctcccccagagttctgtgtgctgggccacgggctgcaaccggagcct

SEQ ID NO: 628892 - DNA, 120 bp, Artificial Sequence
  ENSG00000179270_33 (sequence is synthesized)
cggaccggccacatccaggacaaatcccagccagaggcgcagccccagcaagaggaggtgtcctgacaggctgacgagggggccacactcacgcagtcaccccagaaggccaagtgtgac

SEQ ID NO: 628893 - DNA, 120 bp, Artificial Sequence
  ENSG00000179270_34 (sequence is synthesized)
agccaagtgtccagcctgacccagagatgatgggcaaaccaaactcctactgaggtgtcctggaaaggcctggaaggtgcactgcccagtgggtctgctgaattttaaacaatcgccgtt

SEQ ID NO: 628894 - DNA, 120 bp, Artificial Sequence
  ENSG00000179270_35 (sequence is synthesized)
ttcagtcccagatcttgctctgccttggggttcaaaggttaaccagaacttttagaccccacaatgacagtatttaatgcttcaagtgctggccttaatttggggtggggtggggggtgg

SEQ ID NO: 628895 - DNA, 120 bp, Artificial Sequence
  ENSG00000179270_36 (sequence is synthesized)
agaatgtatagttgcatgcttgatagggttttaactgggttcattccttgagatcacttaagcctcacaacagtgaatgaagcacatagcattcttcagttttgcgcatatgaaaaccga

SEQ ID NO: 628896 - DNA, 120 bp, Artificial Sequence
  ENSG00000179270_37 (sequence is synthesized)
aggtgtggggagaggccccctcaagtgtctggctgaaggtcatacagctaagaagagaatagagcaaaattttgcacagatgagtctggtgttagaatctctctgctctttttattacat

SEQ ID NO: 628897 - DNA, 120 bp, Artificial Sequence
  ENSG00000179270_38 (sequence is synthesized)
tccattgcccgtaactattgcgtcactccacctgcctaaagcagacatgggtgcgcaaatggtcgcaaagcttctttgttgtaaggttaagtagcggcacagcattgacaaagtccctat

SEQ ID NO: 628898 - DNA, 120 bp, Artificial Sequence
  ENSG00000179270_39 (sequence is synthesized)
tgagagctttgtttagaagtgcatggctcccaaaatgagaaggctgagtgagccaggattaaaacacacagccccacccgtcctctgtcctctcctccttcccaagctcagtttcaatgc

SEQ ID NO: 628899 - DNA, 120 bp, Artificial Sequence
  ENSG00000179270_40 (sequence is synthesized)
tgtaaacttaaagctgacagctcacaataccagccacgctgcctctcggcctaagcatgtagcaaatgctctcactgccctacgcattacatgcttctcgacggagtagggtaaaccaag

SEQ ID NO: 628900 - DNA, 120 bp, Artificial Sequence
  ENSG00000179270_41 (sequence is synthesized)
cctcccaaacaaggcagcccattctccacatgccgtgggtgctggagctcagaagatagcgtgggtgaggcatacgtactcacacgccgatctcccctcggaggcttcttggccaacttt

SEQ ID NO: 628901 - DNA, 120 bp, Artificial Sequence
  ENSG00000179270_42 (sequence is synthesized)
attcccaggtcatcttgcagaacttctgctggagtcgaaatcaaagtgaaaaacagttgttcatgccaaaaacctgcttctgccaatgagctagatatttgctgcagatcttggaatgct

SEQ ID NO: 628902 - DNA, 120 bp, Artificial Sequence
  ENSG00000179270_43 (sequence is synthesized)
tccactggaggctgtggtgtgcgttctatttagaaaagattttgcagtaattgagtgattcaatgccggctcaatgggttggcaaaagacaagaattcttacccactggggtacagcaaa

SEQ ID NO: 628903 - DNA, 120 bp, Artificial Sequence
  ENSG00000179270_44 (sequence is synthesized)
gggacgatcctccagatctgctgcaaagctgatttttaaagtttggggtaattatagacctcaaacccattcttgctgggactgtgggctcaaaaacttgttaaactgggtccctaggga

SEQ ID NO: 628904 - DNA, 120 bp, Artificial Sequence
  ENSG00000179270_45 (sequence is synthesized)
ctatagcaacctcccccagagagaggctatgactctgagtaaatgaatcccaccttgacttgtccaattattattcaaaggcacccaaagaacagctgattaaactaccaagaggggcca

SEQ ID NO: 628905 - DNA, 120 bp, Artificial Sequence
  ENSG00000179270_46 (sequence is synthesized)
caacccacccctctgctggaaagggacacacccagctgtctgctcgcatttgctcctgttgccgccctcatctcagagaagtgctcaggcagtgcccaggccagccgattctagagccaa

SEQ ID NO: 628906 - DNA, 120 bp, Artificial Sequence
  ENSG00000179270_47 (sequence is synthesized)
gccacacccactgctgggtggacacttaggagctgcctggactgcaggcaacgcagggaagtccagccacccaggcagggcaggggccaaggtaagcacgtgaggatggaccaggttcag

SEQ ID NO: 628907 - DNA, 120 bp, Artificial Sequence
  ENSG00000179270_48 (sequence is synthesized)
caaacttgcccgacagagatctgggcattctccctaaatggttgggcagaccaaccattgggtcaccatggggtgagccttaggtaagctgggcactgagctgagtgagcaggagacaca

SEQ ID NO: 628908 - DNA, 120 bp, Artificial Sequence
  ENSG00000179270_49 (sequence is synthesized)
cagtgtgagcggcctttgaggtctagctcacaagtaagtggcttcaggtgggactgctcagaaagtgggccctgcctgggctcagatttaggggcaggattcctggaggtccgaggaaac

SEQ ID NO: 628909 - DNA, 120 bp, Artificial Sequence
  ENSG00000179270_50 (sequence is synthesized)
gaagctgttccccagctgcagggagactggagtgggacacagtgggtgaaactggggtaccatgaggggtggaaccccaggaattatacacattttcattactggaaccgggatatgaag

SEQ ID NO: 628910 - DNA, 120 bp, Artificial Sequence
  ENSG00000179270_51 (sequence is synthesized)
tggagccactccagcagtgaggggaagcaaggctgagtctccagcccaggcctccttccgtaaagggcctcatcttaaaagtccagggctgggtagaaagtggaaagggtggccgagtgc

SEQ ID NO: 628911 - DNA, 120 bp, Artificial Sequence
  ENSG00000179270_52 (sequence is synthesized)
cccctgctgtggccatgcaagctagcggcagcagggagccaggcagattattccaccacagaaggggtcagtatcatggagaacacgcaggaagggtccggaatgaacaacggtgctttc

SEQ ID NO: 628912 - DNA, 120 bp, Artificial Sequence
  ENSG00000179270_53 (sequence is synthesized)
cgtgagcatgcatggcaggaggctgtctgagactagaggttgtccctcgccaggctaggctggcaagcagcaggaagtgcccacccaccatattgcaggcagcagacgaaggggtacagg

SEQ ID NO: 628913 - DNA, 120 bp, Artificial Sequence
  ENSG00000179270_54 (sequence is synthesized)
gcacccgggatcctgccatcagctgtggagatgcccatgatgcctccttgtccctctggaggacctccacgtttgcttggggccaacgtgtgccaggacagggcgaggctcctgccatag

SEQ ID NO: 628914 - DNA, 120 bp, Artificial Sequence
  ENSG00000179270_55 (sequence is synthesized)
gtccccacacacgatgtcataaaagcccccagctgccaccagacccaggcagccgggacagtgagctggtgacaccattgtgttgcccagtaaccttaggctactggaattccaagtcag

SEQ ID NO: 628915 - DNA, 120 bp, Artificial Sequence
  ENSG00000179270_56 (sequence is synthesized)
cttcccccactccagggaagatggggaggggttgccaaggtgctgggggctgggggtcaattaggtcaaaggtgaagcagtgctgagccgacataggagcaggcgggtcaaagatgtgtt

SEQ ID NO: 628916 - DNA, 120 bp, Artificial Sequence
  ENSG00000179270_57 (sequence is synthesized)
tttggctaccataccaactaccagacttagctcaaattacatgtgaattagactttgtacaaaaggaattaaatccacaatggaacagttttgtggcatctggtcagttttgcctcctag

SEQ ID NO: 628917 - DNA, 120 bp, Artificial Sequence
  ENSG00000179270_58 (sequence is synthesized)
agaccaggtcttccacaaacttgagtctgccttggagcacgcattgctggtggcaggaggggcaaacccagctgtacagcttctcagacaagggctgctcacgcccaccatctcccttct

SEQ ID NO: 628918 - DNA, 120 bp, Artificial Sequence
  ENSG00000179270_59 (sequence is synthesized)
acccaagaatggtatccttgctgggccaaatccacttcctttgcccaagggggaagggaggacagtttttctttgttctgctttttgttttaataaaaattattaagccaatgaacccaa

SEQ ID NO: 628919 - DNA, 120 bp, Artificial Sequence
  ENSG00000179270_60 (sequence is synthesized)
acccaagaatgagttagaaaccaaggactgtccgggatgcagagaaggaggaacccaccacagatcaatctaaggggtacatgtcatacccatcttctcactcgggccagctccactctg

SEQ ID NO: 628920 - DNA, 120 bp, Artificial Sequence
  ENSG00000179270_61 (sequence is synthesized)
gaggagcacagctttcatcttcccgaccatggagaccccagagctgtggagagggaggggagccgctgcagtgaattataagtgctgacgtgtttgtcaattgatcgtctggctgacggc

SEQ ID NO: 628921 - DNA, 120 bp, Artificial Sequence
  ENSG00000179271_0 (sequence is synthesized)
gcacagccaagatggcggcgtccgtgcgacaggcacgcagcctactaggtgtggcggcgaccctggccccgggttcccgtggctaccgggcgcggccgcccccgcgccgcaggccgggac

SEQ ID NO: 628922 - DNA, 120 bp, Artificial Sequence
  ENSG00000179271_1 (sequence is synthesized)
cccggtggccagaccccgaggacctcctgaccccgcggtggcagctgggaccgcgctacgcggctaagcagttcgcgcgttacggcgccgcctccggggtggtccccggttcgttatggc

SEQ ID NO: 628923 - DNA, 120 bp, Artificial Sequence
  ENSG00000179271_2 (sequence is synthesized)
cgtcgccggagcagctgcgggagctggaggccgaagaacgcgaatggtacccgagcctggcgaccatgcaggagtcgctgcgggtgaagcagctggccgaagagcagaagcgtcgggaga

SEQ ID NO: 628924 - DNA, 120 bp, Artificial Sequence
  ENSG00000179271_3 (sequence is synthesized)
gggagcagcacatcgcagagtgcatggccaagatgccacagatgattgtgaactggcagcagcagcagcgggagaactgggagaaggcccaggctgacaaggagaggagggcccgactgc

SEQ ID NO: 628925 - DNA, 120 bp, Artificial Sequence
  ENSG00000179271_4 (sequence is synthesized)
aggctgaggcccaggagctcctgggctaccaggtggacccaaggagtgcccgcttccaggagctgctccaggacctagagaagaaggagcgcaagcgcctcaaggaggaaaaacagaaac

SEQ ID NO: 628926 - DNA, 120 bp, Artificial Sequence
  ENSG00000179271_5 (sequence is synthesized)
ggaagaaggaggcgcgagctgctgcattggctgcagctgtggctcaagacccagcagcctctggggcacccagctcctgaggctttgtcccttcccaataaagcctgctacctggcagta

SEQ ID NO: 628927 - DNA, 120 bp, Artificial Sequence
  ENSG00000179271_6 (sequence is synthesized)
cccctgaagagatctgcgtcctctcaaggtgtgcctctctgggtcccctggttcctcccccaatacttaagagctggggaatcccccacttggctgtactcaaaaggggacagggactct

SEQ ID NO: 628928 - DNA, 120 bp, Artificial Sequence
  ENSG00000179271_7 (sequence is synthesized)
aaggcttctgtttaccaacattcatctccagtaattagccaattacaaggctggtggggggggaagtatagccaaaacagactgtggtgatgatggtgggggccggggagaagcagtcct

SEQ ID NO: 628929 - DNA, 120 bp, Artificial Sequence
  ENSG00000179271_8 (sequence is synthesized)
tgtaacgttgggctggggtccactgcctggaaatgacacactgggggaggagacaccggaagcctcaatctgcagggactcacagactcctctcccccttccaggcacccgtcaccatgc

SEQ ID NO: 628930 - DNA, 120 bp, Artificial Sequence
  ENSG00000179271_9 (sequence is synthesized)
ctgcctgtgcccagccagccccccaagacccagacaggtgggcgcggggagccccagcaggcacagaccatagggctagtttttaaaactttattcacttcaaaacctttatcagagaca

SEQ ID NO: 628931 - DNA, 120 bp, Artificial Sequence
  ENSG00000179271_10 (sequence is synthesized)
cggttctgttctggggtgggggtggccttgacaatgagctgatgttagcccttctccaggctggaggccaaggccagactggggagggggccttgggcctttcaggacttgccctagatg

SEQ ID NO: 628932 - DNA, 120 bp, Artificial Sequence
  ENSG00000179271_11 (sequence is synthesized)
gaaagatttgggccactccaatggaggatcaaagttggggctccagcttcccctcatcctagaagaggatgggggggggtcctcaggggtttttcggaggatggagaggcaagcagccgc

SEQ ID NO: 628933 - DNA, 120 bp, Artificial Sequence
  ENSG00000179271_12 (sequence is synthesized)
ctttccgtctggctgcagagagctgggacagaggccaagaggggcccatctgtcgcctcccagtcctgccagcttctctgagcaggctgggctggggaggaggacggggggacagctgtc

SEQ ID NO: 628934 - DNA, 120 bp, Artificial Sequence
  ENSG00000179271_13 (sequence is synthesized)
tggcccgggagatgggaacaggggccactttaggaggacaggaagctggactgtttgcttgtttttttaagatttttgatttttttttccatttcttaaataaacatgaatatatatata

SEQ ID NO: 628935 - DNA, 120 bp, Artificial Sequence
  ENSG00000179284_0 (sequence is synthesized)
actctcctcccccgctgtgggtctacagaaatgcctcccaggctatccaggaggggccaagagattaaaagcaggttcagaaggctcagatgccactcaccagacagcagggtcgactgc

SEQ ID NO: 628936 - DNA, 120 bp, Artificial Sequence
  ENSG00000179284_1 (sequence is synthesized)
tagtgaccttgagcccagtccggacagacagacaggcagacagacgcacggacaagcagatgctccttggccagctatccactcttctgtgcctgcttagcggggccctgcctacaggct

SEQ ID NO: 628937 - DNA, 120 bp, Artificial Sequence
  ENSG00000179284_2 (sequence is synthesized)
cagggaggcctgaaccccagtctcctcgacctcagtcctgggctgcagccaatcagacctgggctctgggcccaggggccctgcccccactggtgccagcttctgcccttgggagctgga

SEQ ID NO: 628938 - DNA, 120 bp, Artificial Sequence
  ENSG00000179284_3 (sequence is synthesized)
aggccttcttgggcctgcagaaagccaggcagctggggatgggcaggctgcagcgtgggcaagacgaggtggctgctgtgactctgccgctgaaccctcaggaagtgatccaggggatgt

SEQ ID NO: 628939 - DNA, 120 bp, Artificial Sequence
  ENSG00000179284_4 (sequence is synthesized)
gtaaggctgtgcccttcgttcaggtgttctcccggcccggctgctcagccatacgcctccgaaatcatctgtgctttggtcattgctcctctctctacatccctggctcggaccccaccc

SEQ ID NO: 628940 - DNA, 120 bp, Artificial Sequence
  ENSG00000179284_5 (sequence is synthesized)
cactagtcctgtgcaacagctgtatgcctgctcgcaagcgttgggcacccgtggtcctgtggtgtctcactggcagctcagcctcccgtcgacgggtgaagatatccaccatgctgatcg

SEQ ID NO: 628941 - DNA, 120 bp, Artificial Sequence
  ENSG00000179284_6 (sequence is synthesized)
aggggtgtcactgcagcccaaaagcatgaactgagcatcgtggatgggtgcacggagacacgcaccttggagaaatgaggggagatggaccaagaaagacgtggacctggatgatgtact

SEQ ID NO: 628942 - DNA, 120 bp, Artificial Sequence
  ENSG00000179284_7 (sequence is synthesized)
ccccagagtcctcaccctgctccccagacagtagacacagtgcccgtcctggagttgcaccactgatagtcacagcacacaatgattgacaactcactttttttttttttttttgagatg

SEQ ID NO: 628943 - DNA, 120 bp, Artificial Sequence
  ENSG00000179284_8 (sequence is synthesized)
ttaatcattaggctgaactgtctcttatagaatgaggtcaaagacactcccagttgcagggagggtagatggccccacccagaccgagagacacagtgatgacctcagcctagggacacc

SEQ ID NO: 628944 - DNA, 120 bp, Artificial Sequence
  ENSG00000179284_9 (sequence is synthesized)
aaaaaagaaaaaaaaaaaaacccaaaccaaaaacgcaaaccaaagcaggcaggcagacagctgctgggggaaatcctggggtccttgagacagaggcaggaccctcgtgttcccagctgc

SEQ ID NO: 628945 - DNA, 120 bp, Artificial Sequence
  ENSG00000179284_10 (sequence is synthesized)
ctcttgccttgatagtggtgctgtgtccctctcagaccccccacctgagtctccacagagccccacgcctggcatggcattccacagaaaccataaaggttggctgagtccagctgtcta

SEQ ID NO: 628946 - DNA, 120 bp, Artificial Sequence
  ENSG00000179292_0 (sequence is synthesized)
cggccgctgagccgagcggacgcccccgggggccgcgtcgcagccctccgtgctcccccctatcatgcccggtgcccaggctggggccgcccaagcagccaggacaccatgcccgaggac

SEQ ID NO: 628947 - DNA, 120 bp, Artificial Sequence
  ENSG00000179292_1 (sequence is synthesized)
atgcccgaggacggcgctggcgacggcggggaggtgcccgcgctcatcccggacggcgagccgctgcgggaagagcagcggcccctgaaacagtccctgggaagctccctgtgccgcgag

SEQ ID NO: 628948 - DNA, 120 bp, Artificial Sequence
  ENSG00000179292_2 (sequence is synthesized)
tcgcactggaagtgcctgctcctcacgctgctcatccacgcctgcggggccgtggtggcctggtgtcgcctggccacagtgccgcggctggtcctggggcccgaggccgccttggcccgg

SEQ ID NO: 628949 - DNA, 120 bp, Artificial Sequence
  ENSG00000179292_3 (sequence is synthesized)
ggagccgggggcccgccaccgacctacccggccagcccctgctccgatggctacctgtacatcccgctggccttcgtctccctcctctacctcctctacctggctgagtgctggcactgt

SEQ ID NO: 628950 - DNA, 120 bp, Artificial Sequence
  ENSG00000179292_4 (sequence is synthesized)
cacgtgcggtcctgccaggcgccacgcaccgacgcccacacggtgctggcgctgatccgccggctgcagcaggcgccgccgtgcgtctggtggaaggccaccagctatcactacgtgcgg

SEQ ID NO: 628951 - DNA, 120 bp, Artificial Sequence
  ENSG00000179292_5 (sequence is synthesized)
cgcacacgccagatcacgcgctaccgcaacggcgacgcctacaccaccacgcaggtgtaccatgagcgcgctgacagccgcacggcccgcggcgagtttgactactcggcgcacggcgtc

SEQ ID NO: 628952 - DNA, 120 bp, Artificial Sequence
  ENSG00000179292_6 (sequence is synthesized)
cgcgacgtctccaaggagctggtggggctggcggagcacgcggccacgcggctgcgcttcaccaagtgcttcagcttcggcagcgcggaggccgaggcctcgtacctcacgcagcgggcg

SEQ ID NO: 628953 - DNA, 120 bp, Artificial Sequence
  ENSG00000179292_7 (sequence is synthesized)
cgcttcttcagcgccaacgagggcctggacgactatctggaggcgcgcgagggcatgcacctgaaggacgtagacttccgcgagtcgctcatggtcttcgccgacccccgcagcccgccc

SEQ ID NO: 628954 - DNA, 120 bp, Artificial Sequence
  ENSG00000179292_8 (sequence is synthesized)
tggtacgcgcgcgcctgggtcttctggctcgtgtcggcggccacgctgtcgtggcccctgcgcgtcgtggccgcctatggcacggctcacgtgcactaccaggtggagaagctctttggc

SEQ ID NO: 628955 - DNA, 120 bp, Artificial Sequence
  ENSG00000179292_9 (sequence is synthesized)
gccagctcgcccccgccgggggccgtgcccagcgggcccccgctgtcccgcgtggccacagtggacttcactgagctcgagtggcacatctgctccaaccggcagctggtgcccagctac

SEQ ID NO: 628956 - DNA, 120 bp, Artificial Sequence
  ENSG00000179292_10 (sequence is synthesized)
ctcgggcgcctacctcagaggctgccagcgctgccgccgctctgtcagcagcaactcgctgccccccgcccggcccagcgggccccgcctgcccttcagccgcagccgcctctcgctggg

SEQ ID NO: 628957 - DNA, 120 bp, Artificial Sequence
  ENSG00000179292_11 (sequence is synthesized)
tcgctgggcgctggcggccgggccacgccaggggtcttccgcagcctgagcggggggccgctggggcgccgtggagaggacacggaacccctggagagcccgccctgctatgaggacgcc

SEQ ID NO: 628958 - DNA, 120 bp, Artificial Sequence
  ENSG00000179292_12 (sequence is synthesized)
ctctacttcccggtgctcattgtccacggagacagcggctgccagggggatgggcagggtgctctctgagaccccccacggcccccagagtggccccctccccaccattccaccatgggc

SEQ ID NO: 628959 - DNA, 120 bp, Artificial Sequence
  ENSG00000179292_13 (sequence is synthesized)
ttagatgcccgagtgattgttgtccaaaacaggcgggaaaacagaccagccacacacaaggggcaggggtgagggtgggggtgggggtccttaaacagactaaaatgcagttacctgtgg

SEQ ID NO: 628960 - DNA, 120 bp, Artificial Sequence
  ENSG00000179292_14 (sequence is synthesized)
tcattttggaggaagtggaagcctaagaatcgcccccagcatggcttcatcccccaagatggccgatgatctggcctgaaggcctctcacaaagggcaggagaagaagcttccagaaagg

SEQ ID NO: 628961 - DNA, 120 bp, Artificial Sequence
  ENSG00000179292_15 (sequence is synthesized)
ctgggatggaggaggagtcctgcggccagctgttgcctgcagcagaggctgcctgtggacacttccctaccggggctgaggccatgctgggagcccccccagtgacgcagaagcacaaat

SEQ ID NO: 628962 - DNA, 120 bp, Artificial Sequence
  ENSG00000179292_16 (sequence is synthesized)
tggaggcttggggccatgcccagccaggttggcttccctggggctgaagagctggctgtggtggcaccatggccttggccctgctactcacccaacattcccatcctcccctgataggcc

SEQ ID NO: 628963 - DNA, 120 bp, Artificial Sequence
  ENSG00000179292_17 (sequence is synthesized)
cctcctccttgcctgccctctctcccgctgctcagggccagtcactccccccacatgcagctacccctacaacctggggttccttctcagggcctcacctggtccccacatcccctggcc

SEQ ID NO: 628964 - DNA, 120 bp, Artificial Sequence
  ENSG00000179292_18 (sequence is synthesized)
tctgctcctgcctcccaaagtccatgtctgcctccatcagccacacacacgcagggacgcccgttccttgccctcccggacttatctactcttcactttcctgatgatccatggggccca

SEQ ID NO: 628965 - DNA, 120 bp, Artificial Sequence
  ENSG00000179292_19 (sequence is synthesized)
ggcctagagggcatccgaggggctgggccttggccacagcctcttggatgatgtccttgctccaccacgcaggcccttgcttctcccatcaacgagtcttggcccaggggacactgaccc

SEQ ID NO: 628966 - DNA, 120 bp, Artificial Sequence
  ENSG00000179292_20 (sequence is synthesized)
tcccccagggaggagagaggagttccttccctttcaacgagggcttccacgccctctaaggggtggcggggaagggaggaggctgagaagatgcagattaaataaaggtatggaatggaa

SEQ ID NO: 628967 - DNA, 120 bp, Artificial Sequence
  ENSG00000179295_0 (sequence is synthesized)
ggggcagctgcacagtctccgggatccccaggcctggaggggggtctgtgcgcggccggctggctctgccccgcgtccggtcccgagcgggcctccctcgggccagcccgatgtgaccga

SEQ ID NO: 628968 - DNA, 120 bp, Artificial Sequence
  ENSG00000179295_1 (sequence is synthesized)
ggccagcccgatgtgaccgagcccagcggagcctgagcaaggagcgggtccgtcgcggagccggagggcgggaggaacatgacatcgcggagatggtttcacccaaatatcactggtgtg

SEQ ID NO: 628969 - DNA, 120 bp, Artificial Sequence
  ENSG00000179295_2 (sequence is synthesized)
gaggcagaaaacctactgttgacaagaggagttgatggcagttttttggcaaggcctagtaaaagtaaccctggagacttcacactttccgttagaagaaatggagctgtcacccacatc

SEQ ID NO: 628970 - DNA, 120 bp, Artificial Sequence
  ENSG00000179295_3 (sequence is synthesized)
aagattcagaacactggtgattactatgacctgtatggaggggagaaatttgccactttggctgagttggtccagtattacatggaacatcacgggcaattaaaagagaagaatggagat

SEQ ID NO: 628971 - DNA, 120 bp, Artificial Sequence
  ENSG00000179295_4 (sequence is synthesized)
gtcattgagcttaaatatcctctgaactgtgcagatcctacctctgaaaggtggtttcatggacatctctctgggaaagaagcagagaaattattaactgaaaaaggaaaacatggtagt

SEQ ID NO: 628972 - DNA, 120 bp, Artificial Sequence
  ENSG00000179295_5 (sequence is synthesized)
tttcttgtacgagagagccagagccaccctggagattttgttctttctgtgcgcactggtgatgacaaaggggagagcaatgacggcaagtctaaagtgacccatgttatgattcgctgt

SEQ ID NO: 628973 - DNA, 120 bp, Artificial Sequence
  ENSG00000179295_6 (sequence is synthesized)
caggaactgaaatacgacgttggtggaggagaacggtttgattctttgacagatcttgtggaacattataagaagaatcctatggtggaaacattgggtacagtactacaactcaagcag

SEQ ID NO: 628974 - DNA, 120 bp, Artificial Sequence
  ENSG00000179295_7 (sequence is synthesized)
ccccttaacacgactcgtataaatgctgctgaaatagaaagcagagttcgagaactaagcaaattagctgagaccacagataaagtcaaacaaggcttttgggaagaatttgagacacta

SEQ ID NO: 628975 - DNA, 120 bp, Artificial Sequence
  ENSG00000179295_8 (sequence is synthesized)
caacaacaggagtgcaaacttctctacagccgaaaagagggtcaaaggcaagaaaacaaaaacaaaaatagatataaaaacatcctgccctttgatcataccagggttgtcctacacgat

SEQ ID NO: 628976 - DNA, 120 bp, Artificial Sequence
  ENSG00000179295_9 (sequence is synthesized)
ggtgatcccaatgagcctgtttcagattacatcaatgcaaatatcatcatgcctgaatttgaaaccaagtgcaacaattcaaagcccaaaaagagttacattgccacacaaggctgcctg

SEQ ID NO: 628977 - DNA, 120 bp, Artificial Sequence
  ENSG00000179295_10 (sequence is synthesized)
caaaacacggtgaatgacttttggcggatggtgttccaagaaaactcccgagtgattgtcatgacaacgaaagaagtggagagaggaaagagtaaatgtgtcaaatactggcctgatgag

SEQ ID NO: 628978 - DNA, 120 bp, Artificial Sequence
  ENSG00000179295_11 (sequence is synthesized)
tatgctctaaaagaatatggcgtcatgcgtgttaggaacgtcaaagaaagcgccgctcatgactatacgctaagagaacttaaactttcaaaggttggacaagggaatacggagagaacg

SEQ ID NO: 628979 - DNA, 120 bp, Artificial Sequence
  ENSG00000179295_12 (sequence is synthesized)
gtctggcaataccactttcggacctggccggaccacggcgtgcccagcgaccctgggggcgtgctggacttcctggaggaggtgcaccataagcaggagagcatcatggatgcagggccg

SEQ ID NO: 628980 - DNA, 120 bp, Artificial Sequence
  ENSG00000179295_13 (sequence is synthesized)
gtcgtggtgcactgcagtgctggaattggccggacagggacgttcattgtgattgatattcttattgacatcatcagagagaaaggtgttgactgcgatattgacgttcccaaaaccatc

SEQ ID NO: 628981 - DNA, 120 bp, Artificial Sequence
  ENSG00000179295_14 (sequence is synthesized)
cagatggtgcggtctcagaggtcagggatggtccagacagaagcacagtaccgatttatctatatggcggtccagcattatattgaaacactacagcgcaggattgaagaagagcagaaa

SEQ ID NO: 628982 - DNA, 120 bp, Artificial Sequence
  ENSG00000179295_15 (sequence is synthesized)
agcaagaggaaagggcacgaatatacaaatattaagtattctctagcggaccagacgagtggagatcagagccctctcccgccttgtactccaacgccaccctgtgcagaaatgagagaa

SEQ ID NO: 628983 - DNA, 120 bp, Artificial Sequence
  ENSG00000179295_16 (sequence is synthesized)
gacagtgctagagtctatgaaaacgtgggcctgatgcaacagcagaaaagtttcagatgagaaaacctgccaaaacttcagcacagaaatagatgtggactttcaccctctccctaaaaa

SEQ ID NO: 628984 - DNA, 120 bp, Artificial Sequence
  ENSG00000179295_17 (sequence is synthesized)
gatcaagaacagacgcaagaaagtttatgtgaagacagaatttggatttggaaggcttgcaatgtggttgactaccttttgataagcaaaatttgaaaccatttaaagaccactgtattt

SEQ ID NO: 628985 - DNA, 120 bp, Artificial Sequence
  ENSG00000179295_18 (sequence is synthesized)
taactcaacaatacctgcttcccaattactcatttcctcagataagaagaaatcatctctacaatgtagacaacattatattttatagaatttgtttgaaattgaggaagcagttaaatt

SEQ ID NO: 628986 - DNA, 120 bp, Artificial Sequence
  ENSG00000179295_19 (sequence is synthesized)
gtgcgctgtattttgcagattatggggattcaaattctagtaataggcttttttatttttatttttatacccttaaccagtttaattttttttttcctcattgttggggatgatgagaag

SEQ ID NO: 628987 - DNA, 120 bp, Artificial Sequence
  ENSG00000179295_20 (sequence is synthesized)
aaatgatttgggaaaattaagtaacaacgacctagaaaagtgagaacaatctcatttaccatcatgtatccagtagtggataattcattttgatggcttctatttttggccaaatgagaa

SEQ ID NO: 628988 - DNA, 120 bp, Artificial Sequence
  ENSG00000179295_21 (sequence is synthesized)
ttaagccagtgcctgagactgtcagaagttgacctttgcactggcattaaagagtcatagaaaaagaatcatggatatttatgaattaaggtaagaggtgtggcttttttttttttcttt

SEQ ID NO: 628989 - DNA, 120 bp, Artificial Sequence
  ENSG00000179295_22 (sequence is synthesized)
tttccagccgttgaccaattatagttcggctgttgactgagaagtttgtggtgggaaaacgtttgccatattttctttgcatttgaataattgtcttgtacttagaaaaaaggcgtctat

SEQ ID NO: 628990 - DNA, 120 bp, Artificial Sequence
  ENSG00000179295_23 (sequence is synthesized)
gaatgaccagtgtttttggtcgccaaatgttgctgacaaacttatcccaaaactttagtggcttaaaaaaacctgcccccaactgttagtcaatctgagctgggctcagctgggctgttc

SEQ ID NO: 628991 - DNA, 120 bp, Artificial Sequence
  ENSG00000179295_24 (sequence is synthesized)
ttctgccagcctgcaggtggccactcatgtggtcagcaggtcggcggagagactgggatggctgggcttctctctctgcctgcagtcctgagtctctccttcttcgtgtagtctctttca

SEQ ID NO: 628992 - DNA, 78 bp, Artificial Sequence
  ENSG00000179295_25 (sequence is synthesized)
tttttctaatcagaagaaagctggggtatgccctctacttactaaacaagtcacaagcccagctcagattcaagaaaa

SEQ ID NO: 628993 - DNA, 120 bp, Artificial Sequence
  ENSG00000179295_26 (sequence is synthesized)
ttactaaacaagtcacaagcccagctcagattcaagaaaagggtgtgaagtagaggtgcagttaagtggggggccactagtctaacagacggtcacaaccagtgccatggaaaaccaagg

SEQ ID NO: 628994 - DNA, 120 bp, Artificial Sequence
  ENSG00000179295_27 (sequence is synthesized)
atattagcaaaagcagaagttgctagtgaccttgggaagccgaagctgcttacagtagctgggacaagctgaaagtcagactaagaaataaagagagggccttcaagaagcttcctgaat

SEQ ID NO: 628995 - DNA, 120 bp, Artificial Sequence
  ENSG00000179295_28 (sequence is synthesized)
gatttctgctagccctgagcctatttttggaaccagcacttggggaaactgatcttgtgaggatggatgtgtttagggacacagggcttttgagagcagcaccaccccactggggcatcc

SEQ ID NO: 628996 - DNA, 120 bp, Artificial Sequence
  ENSG00000179295_29 (sequence is synthesized)
ccagacttgggaaacgtgactctttcttaatgccactgggttttagtcaggccacagtgagaaggaacagccctaacaggcctccagccaggttgaatgagctcatttttgttgtagcca

SEQ ID NO: 628997 - DNA, 120 bp, Artificial Sequence
  ENSG00000179295_30 (sequence is synthesized)
accagtaagatttgctaatgttctacattaagtgccttctccaaagacatccctctttgcctcatatgttgaatcatccagtgcggatatttcaatgaaaatatcattggttgacttttg

SEQ ID NO: 628998 - DNA, 120 bp, Artificial Sequence
  ENSG00000179295_31 (sequence is synthesized)
tgatggtaataatgctatggcatctttgccatgaagttgtggcctccttggattcttctgactttggcttctgaaaggaaggcctagatccagccctggtggtagttcctttctgaggtc

SEQ ID NO: 628999 - DNA, 120 bp, Artificial Sequence
  ENSG00000179295_32 (sequence is synthesized)
tctcagtcccttgagactttggggtagtttggctgccattctcactgacaaaatgtatatcagcccccacctccaccccccaatattccttgaactttgaattgcttcagaacacaggtg

SEQ ID NO: 629000 - DNA, 120 bp, Artificial Sequence
  ENSG00000179295_33 (sequence is synthesized)
tggcctgaaggtattcccttattagggaagtgtcactgctgtcttctagtcaaacttgtaaagaaaaagattccagttcagtatttgcagcaagaagcttgaatgctgttctttttatcg

SEQ ID NO: 629001 - DNA, 120 bp, Artificial Sequence
  ENSG00000179295_34 (sequence is synthesized)
cattgttacatcgactcattctccattttgctttggttttgtcttgacttgacttgactttgggggtaaagtctttcaccagcacacaagagtttgattgtacaaatatatcttctgcat

SEQ ID NO: 629002 - DNA, 120 bp, Artificial Sequence
  ENSG00000179295_35 (sequence is synthesized)
taacatctctgcctgttgcttaagatcagttgcttttatactcagaatggaaatacctgatcttggctagttttgttataagatattgatttcatttagatttccctccacgaggtcagc

SEQ ID NO: 629003 - DNA, 120 bp, Artificial Sequence
  ENSG00000179295_36 (sequence is synthesized)
aaactatcatgttcttatgtaaacttaggccaaggccagagttatcatagtccctaggttgctacggcttatcatgtgcttggtaaaaggtgatcgcaggttctcagacgagtttacttt

SEQ ID NO: 629004 - DNA, 120 bp, Artificial Sequence
  ENSG00000179295_37 (sequence is synthesized)
acatgagatggaatcaggcagagaggctgggatgatggagaaagctcgaggtgaagttttaaaaaaaaagttgtggaaaggaaagttccaaagaggtggtttctgaggaagtcagagcgc

SEQ ID NO: 629005 - DNA, 120 bp, Artificial Sequence
  ENSG00000179295_38 (sequence is synthesized)
ccagggccagagcagtcagtaatgggtgaatgaggttgtttggaaagtcggtgtgacagacacatggatgccatctacttctaggttgctggtgggtattaaatatgcacaatattccat

SEQ ID NO: 629006 - DNA, 120 bp, Artificial Sequence
  ENSG00000179295_39 (sequence is synthesized)
agctcactgaggattttaaaattataagcataggattttatattttggggtgaaagaattatctggcacattaggtattggagtttaaaaaaaaagccaaatttcacagtcttaataact

SEQ ID NO: 629007 - DNA, 120 bp, Artificial Sequence
  ENSG00000179295_40 (sequence is synthesized)
ttttttaaaaaaaactaaaaggcgcttcatgtccagtgtgtggcccttctgaaacttatggtcatctctcccactgaaaccaaggtcttttcaaatgtggctaaatggggatgaggagac

SEQ ID NO: 629008 - DNA, 120 bp, Artificial Sequence
  ENSG00000179295_41 (sequence is synthesized)
acgggtaggactttcttggtgtgtgtgcattctttaaagagccaagttgcttcggggaaacagccaggaaaatggtcaagattatttttagaggttattttattggggattttaagaact

SEQ ID NO: 629009 - DNA, 120 bp, Artificial Sequence
  ENSG00000179295_42 (sequence is synthesized)
aataacatcttgagttatttttaattcagggggatgtggaaaggtttgcaattgtcaagtgttttgttgtagcttagtatccataagggaaacttagactatagacataactacaaagcc

SEQ ID NO: 629010 - DNA, 120 bp, Artificial Sequence
  ENSG00000179295_43 (sequence is synthesized)
agtgcagcttttgttttctgtatgttgttgggggatcaactttcacacatagcaagcacatggcctccctgatgtcaggatgcctttgttaggatctgtatttgcccttaattttgttga

SEQ ID NO: 629011 - DNA, 120 bp, Artificial Sequence
  ENSG00000179295_44 (sequence is synthesized)
aatcttttttccttcttcctcttgaaaagttccaaaatatagtttattgtatctttcatcactaaaaatttgttcctttttcactatgggcagttcacacaaggcaaaaactattgaaca

SEQ ID NO: 629012 - DNA, 120 bp, Artificial Sequence
  ENSG00000179295_45 (sequence is synthesized)
gttggttttagtgtgttgtataactttgctgtatatcaaactaattttgacaagttttcatcctaagcctcaaatcatgtaattaataatttgcctgtttatttatgacctaattgtgat

SEQ ID NO: 629013 - DNA, 120 bp, Artificial Sequence
  ENSG00000179295_46 (sequence is synthesized)
tcttttattaataaaagctaatgggaaaaggatccctgattaagctgatgactagacctacaattaattttcctgcagtatatgaagtattgtaccagagtattaaaagatatgtaatat

SEQ ID NO: 629014 - DNA, 120 bp, Artificial Sequence
  ENSG00000179295_47 (sequence is synthesized)
tttattgataaatctatcctttaaaaggaatacgttttaggatgtcatcattttgatgtgaatcatgtaaatgttgataatatgctgtttattatacatttagtgtttcaagagattcac

SEQ ID NO: 629015 - DNA, 120 bp, Artificial Sequence
  ENSG00000179295_48 (sequence is synthesized)
ttaattgcctttttgcccacgtatattatgtagtctatttgcaactgttcttaaaaaaatgacattaaaagaatagtttatgtagagaaacattagtggatgttaattgtctccccacct

SEQ ID NO: 629016 - DNA, 120 bp, Artificial Sequence
  ENSG00000179295_49 (sequence is synthesized)
atatttatgggtgttagcgcaactgctttgctagttgcaaagctgtattatcagagtaaaagtgtatttgtaaactgtatgggaactaaaaattaggaataaaaccattttcttatatga

SEQ ID NO: 629017 - DNA, 120 bp, Artificial Sequence
  ENSG00000179295_50 (sequence is synthesized)
cagggcttgcttttacctacccactcctagctctttaactgtaggaagaatttaatatctgtttgaggcatagagcaactgcattgagggacattttgatcccaaggcatatttctccta

SEQ ID NO: 629018 - DNA, 120 bp, Artificial Sequence
  ENSG00000179295_51 (sequence is synthesized)
gaccctacagcactgccattggccatggccatggcaacatgctcagttaaaacagcaaagactaagtcagcattatctctgagtccaccagaagttgtgcattaaacaacttcatcctgg

SEQ ID NO: 629019 - DNA, 120 bp, Artificial Sequence
  ENSG00000179295_52 (sequence is synthesized)
gcagccccgacttctcgggcttaagttatcttcccgccgcagcctccacgcccgaaagaaaagaatggaggaaaccgaggctcggagacagtaggtaatttccccaaggttccacagcta

SEQ ID NO: 629020 - DNA, 120 bp, Artificial Sequence
  ENSG00000179295_53 (sequence is synthesized)
atgagtggagcggcgatttgtggaacgaaatgaatgaaatcgatgtggcagcgggcccggacgggtcggtggcgtagacgcggagcgcgcagctcacacctggcggccgcggtttccagg

SEQ ID NO: 629021 - DNA, 120 bp, Artificial Sequence
  ENSG00000179299_0 (sequence is synthesized)
agtcgactgccggagactcgggaggctgagctttcctcggcctgagccagccagaccccgggcaccgcgctcacccctcttcgccgccacgtccgcgaaggcctcacgcgcgaggccagg

SEQ ID NO: 629022 - DNA, 120 bp, Artificial Sequence
  ENSG00000179299_1 (sequence is synthesized)
cgaggccccgaggcgcccaccacttcacgacaccggagcgaaccgggcgccagaggctgcgacccccctgccccgaatcctgccggtgggagtggctgcatttgaaccaaacggccttcg

SEQ ID NO: 629023 - DNA, 120 bp, Artificial Sequence
  ENSG00000179299_2 (sequence is synthesized)
cgggcagcagccgtcgccccgcagtcccggggctcccaagggcctgtgaccgacgccgccctccgcgtcttcgtccccgaagccccgggaaccatccgccctcgggagaccatgctgcag

SEQ ID NO: 629024 - DNA, 120 bp, Artificial Sequence
  ENSG00000179299_3 (sequence is synthesized)
atgcgaggaaagccgtttcctggaacatcggaattctaaccccagggtgaaggactcacgacaggcgaggggcagacatgctgaattccacgggcgaactggagttttcgaacgaagaag

SEQ ID NO: 629025 - DNA, 120 bp, Artificial Sequence
  ENSG00000179299_4 (sequence is synthesized)
atcccgagatcatctcccaactcacttccctgcctctgtccggtgggaaaagctcagctggtgtgcccgaaaaaacgggctatccggactccgtttatgtcatggcagccaacatttttc

SEQ ID NO: 629026 - DNA, 120 bp, Artificial Sequence
  ENSG00000179299_5 (sequence is synthesized)
agggtattcgaatcgaaaagtcggcacagaaagtcttaatcaagtatgggaatgaacccctgcggtccttgtccgagtctgaggatcagtcctttcagcgtttgtcttatgagctggctt

SEQ ID NO: 629027 - DNA, 120 bp, Artificial Sequence
  ENSG00000179299_6 (sequence is synthesized)
tcagtgccctgaaatatcaagatattttggaaactatattgatagacagctgtatcttcccaagtaccacaataccagatcatttgagcagtcttattattgtgatgctatatgatttcc

SEQ ID NO: 629028 - DNA, 120 bp, Artificial Sequence
  ENSG00000179299_7 (sequence is synthesized)
aagatagaaaatttcaaactcgtgtcctttctgataatgaagagcccatatcagaagttcaagaagtagagaaccttcttaacagttttaagataaaattggctgcagcattggcaagat

SEQ ID NO: 629029 - DNA, 120 bp, Artificial Sequence
  ENSG00000179299_8 (sequence is synthesized)
gtcgaatcaagcatgatgccctttcaatttaccacatccttccagaaacagttaggaaacaggaactaagggcctccactttaccactttatgcttggataaatacttgtaaaatcagcc

SEQ ID NO: 629030 - DNA, 120 bp, Artificial Sequence
  ENSG00000179299_9 (sequence is synthesized)
ctgaagaagtttataataatttgaagagaagaggctataataaagtcaaatctgtattgcatattgatgataaagtctttgctgtggatcaacattgctatgatgtcttaatttttccat

SEQ ID NO: 629031 - DNA, 120 bp, Artificial Sequence
  ENSG00000179299_10 (sequence is synthesized)
ctcatcttaaaaatgatcttataaatatagatcttttcaaagattacaaacttatatttcaggacaaatctcgaagtcttgctgtccattctgtaaaggctttattaaatatggatgatg

SEQ ID NO: 629032 - DNA, 120 bp, Artificial Sequence
  ENSG00000179299_11 (sequence is synthesized)
atgtcttaatggtcaatacaggctcatggtacacagtttcccacatgtcaattttaacaaataataatacctcaaaagtatttgtgtgtggagtacaatcacaagctaaggatcctgact

SEQ ID NO: 629033 - DNA, 120 bp, Artificial Sequence
  ENSG00000179299_12 (sequence is synthesized)
tgaagacccttttcacaaaaataggatgtaaaaatattgaaatacttcatgagaaatttattaacattgaatcaaaggatcacaggttacagaaagttaaagtgattttgctgctacctc

SEQ ID NO: 629034 - DNA, 120 bp, Artificial Sequence
  ENSG00000179299_13 (sequence is synthesized)
gttgttcaggactgggtgttagtaatccagtagaatttattttaaatgaacatgaagatacagaattccttaaagatcactctcaaggaggcatctcagtggacaaacttcacgttcttg

SEQ ID NO: 629035 - DNA, 120 bp, Artificial Sequence
  ENSG00000179299_14 (sequence is synthesized)
ctcaacagcagtatgaacagctaacacatgcaatgaaatttactaaagctcaagcagttgtttactgcacatgttcagtttttccagaagaaaatgaagctgttgttaagaaagcactgg

SEQ ID NO: 629036 - DNA, 120 bp, Artificial Sequence
  ENSG00000179299_15 (sequence is synthesized)
aatttcaagaccttgggaataaaggacaaccttacaggcttagtcctcctgttcttccactgtgctccttaaaggaaattcaattgtctactgataaatttttcagaatggaaccatctg

SEQ ID NO: 629037 - DNA, 120 bp, Artificial Sequence
  ENSG00000179299_16 (sequence is synthesized)
aaattaccaatggttgttttctttctattttaacaagggagcgggacccttctgagacagtgtctgtgaatgatgttttggcccgagctgcagccaagggtctgctggatgggattgagt

SEQ ID NO: 629038 - DNA, 120 bp, Artificial Sequence
  ENSG00000179299_17 (sequence is synthesized)
tgggtaaatcatcaaaacgggagaagaagaagaaaaaatcaaaaacatcattgacaaaaggtgccactactgataatggcatccaaatgaaaattgctgagttcctgaatcgagaaacta

SEQ ID NO: 629039 - DNA, 120 bp, Artificial Sequence
  ENSG00000179299_18 (sequence is synthesized)
aagccagtgctaatctatcagagactgtaacaaaaccacctcttccccagaaaaatactgctcaagtgggggcttcctcacagaccagaaaacccaacaagctggccccccatcctgcag

SEQ ID NO: 629040 - DNA, 120 bp, Artificial Sequence
  ENSG00000179299_19 (sequence is synthesized)
tgcctgcatttgtgaagaacacttgtccctccagaccgcgtgaacggcagacacacttcttaagacctcggccagaagacagaatggttgctctgaaacccatcaagattgttctgcctc

SEQ ID NO: 629041 - DNA, 120 bp, Artificial Sequence
  ENSG00000179299_20 (sequence is synthesized)
ctcggatgccaactcaacatttgtactgtcgttgggttgcacccaaggcacttgtgcccacctgccttcccacacactcactatccagaaaagaggaaaagcctaaagatgacacacctt

SEQ ID NO: 629042 - DNA, 120 bp, Artificial Sequence
  ENSG00000179299_21 (sequence is synthesized)
cctccctactcaggcctcctcggcgatggctttgattgtcttgtgttttttataggggccaaagagcagttgattttttttcaaagtctagtatttctctgaagattctacatctctaca

SEQ ID NO: 629043 - DNA, 120 bp, Artificial Sequence
  ENSG00000179299_22 (sequence is synthesized)
caagatattcattcttttggtcacctagggatcttctaagtgtgatattactttcagagaattcagacaagtgagaaacaataatgtaggagtcagcaaagcagaattcagagacttcag

SEQ ID NO: 629044 - DNA, 120 bp, Artificial Sequence
  ENSG00000179299_23 (sequence is synthesized)
ccaatcactgctgctctgagaggatccagttagagactcagtatcagcggtcagaacttatctcactcctgtgaactttcaggctggacttaaagctgccaagtttcccctgcagggaag

SEQ ID NO: 629045 - DNA, 120 bp, Artificial Sequence
  ENSG00000179299_24 (sequence is synthesized)
gaaacactgcctcccttcagcaggtagctcattagaaagccaaacaggcaaacgatcctggcctctcccgccagctgaccgctcttcagcatccatgcggttgtagtcgtgactttctca

SEQ ID NO: 629046 - DNA, 120 bp, Artificial Sequence
  ENSG00000179299_25 (sequence is synthesized)
gtcacgatcaagggtgattttttcttaaatatcaagctgttctttgaacagggaatgaacatgagtttttgtaacgtgactgaagttgagtttaagtaggaagcgcaggaagttcccaag

SEQ ID NO: 629047 - DNA, 120 bp, Artificial Sequence
  ENSG00000179299_26 (sequence is synthesized)
tgccaggtgtgtgtagctcagagttccttttacagtgaggtgtctctcactgggggagcttccaggatcctgagcagactggacacaatcatctctcccttcctctatgtcaagcactgt

SEQ ID NO: 629048 - DNA, 120 bp, Artificial Sequence
  ENSG00000179299_27 (sequence is synthesized)
tacaaaagactgtgagcaaatttccatctaaatattaataattctgaagaagaggcaaaactgttgaatgcaagcgatacctattgttgaagaaacccacaaatttctgattctaagatc

SEQ ID NO: 629049 - DNA, 120 bp, Artificial Sequence
  ENSG00000179299_28 (sequence is synthesized)
aggggatacaacaaaatctacaagtcatttcaaatagcacacaggaatcaaactttggtaaatcatttctgaggcacaattaaatatattgtagcactatgttaattaattatattaaat

SEQ ID NO: 629050 - DNA, 120 bp, Artificial Sequence
  ENSG00000179299_29 (sequence is synthesized)
gtcgattcatcttgaatgtattctcaattgcctaccaaaaattggtatgattatcatttctgggtctactgatttttcatcatggcaacagaaattgtcattaaatagaattaagataca

SEQ ID NO: 629051 - DNA, 120 bp, Artificial Sequence
  ENSG00000179299_30 (sequence is synthesized)
tatatcttattatttaaaaacattcatagacatattcataaagtttgaatttaaagttttatttttgcaattcagttgtatagaaatgttacataaattcctaaatgctcaattcaggtg

SEQ ID NO: 629052 - DNA, 120 bp, Artificial Sequence
  ENSG00000179299_31 (sequence is synthesized)
ggtggcatgatttttagaatattatcttcttcaagatgaatacttaggtctacttcagctctgatattctatttttactttcttacttgaagtgagaaaagagaatggtgaattgtatta

SEQ ID NO: 629053 - DNA, 120 bp, Artificial Sequence
  ENSG00000179299_32 (sequence is synthesized)
ttgtattatagcggtaatacattatttttattttagcttagatttacatttatcagtaaaacgtgtcagtgggctgggtgcagtggctcacatctgtaatctcagcagtttgggaggctg

SEQ ID NO: 629054 - DNA, 90 bp, Artificial Sequence
  ENSG00000179299_33 (sequence is synthesized)
cacattgggcacgccacttgagcaccggagttccagacgagcctggacaacatggcgaaaccccaaaaccccatctctacaaaaaataca

SEQ ID NO: 629055 - DNA, 120 bp, Artificial Sequence
  ENSG00000179299_34 (sequence is synthesized)
ctacttaggaggctgaggtacgaggatctcttgagtccaggaggtgcaggttgcagtgagccaatattgccccactgcactccagcctgggaagcagagtgagaccttgcctcaaaaaaa

SEQ ID NO: 629056 - DNA, 120 bp, Artificial Sequence
  ENSG00000179299_35 (sequence is synthesized)
aaaaaaaaaaaaaaaaagtgtcaatgaagaaaggaaacaagactttttatagttgaaccaggcttattgtattttaaatccctgaagaagaattcttcatgttatcactcttgtacagaa

SEQ ID NO: 629057 - DNA, 120 bp, Artificial Sequence
  ENSG00000179299_36 (sequence is synthesized)
agatataaagtgctcagcttattttgctgattttgaaaatcaaacactatctccttgccctaaaattatagcgtgtggctcatcctcttatcccacccagatttctatctggttggttag

SEQ ID NO: 629058 - DNA, 120 bp, Artificial Sequence
  ENSG00000179299_37 (sequence is synthesized)
ggtagtccatgcctcaaggaaggcggtgcagcttaatttaacatattgttcagtaaagaatcccattgtgtatcataagaatcccttatccttttcgggccctccaccataccagactga

SEQ ID NO: 629059 - DNA, 120 bp, Artificial Sequence
  ENSG00000179299_38 (sequence is synthesized)
aaagtattccattgtccagaagtagctggtcttgagatttttattttcaagtgtattttctgtgatgttgtctcattgttatggaatagtttaggataattttctgatctctacagtagc

SEQ ID NO: 629060 - DNA, 120 bp, Artificial Sequence
  ENSG00000179299_39 (sequence is synthesized)
atgtgaagtcacaatttgttgccacttacattgattatctcctaacatgcatttggcactaaattatttttctctttagaagtatatgaagattctgaattaaaccattcattaattaca

SEQ ID NO: 629061 - DNA, 120 bp, Artificial Sequence
  ENSG00000179299_40 (sequence is synthesized)
attctcaacaatccaacctagccaaagaacttctccacttaaaaataaaacctaacactgtttatatttttatagattatcagggaggtttataaggcctaattgtcaccttgaataaaa

SEQ ID NO: 629062 - DNA, 120 bp, Artificial Sequence
  ENSG00000179299_41 (sequence is synthesized)
ttaatacctctacaatcagtgcatctggttggcgtctttgtctcatgtgaatttataaagaacatattcttctcccagattccatgaatgggaagatttgcattgctggcagctgtaagg

SEQ ID NO: 629063 - DNA, 120 bp, Artificial Sequence
  ENSG00000179299_42 (sequence is synthesized)
ttctacttttctcccctaaaggagaattcaagagaaagtacaatgagaccttttcttccttccctttctggggaagatgctagtgccatcttgcatatgaaaaaacaattgtaatagttt

SEQ ID NO: 629064 - DNA, 120 bp, Artificial Sequence
  ENSG00000179299_43 (sequence is synthesized)
ttcataatttctttaatatagtcttatagctttgatttgtaagaggtatataaaggctatcaatataggaagagaatgtgaggtataatgtagtttcaacagaacgaaaataaaaggtat

SEQ ID NO: 629065 - DNA, 120 bp, Artificial Sequence
  ENSG00000179299_44 (sequence is synthesized)
tttcacaaaaataggatgtaaaagtatgtaaaaatatttcttcatttggtgattattgttctgcaagattttagaaacgttaaaaagttttaatttattagtttttttgtaatgtaaaag

SEQ ID NO: 629066 - DNA, 120 bp, Artificial Sequence
  ENSG00000179299_45 (sequence is synthesized)
ctctatatgtgaactaatatcttaaaatccttactaatctatgtcttatcaggctgtccttgttgcttaatttggttaaacaactgtgggttaaattaatttcttggtactttgtaatac

SEQ ID NO: 629067 - DNA, 120 bp, Artificial Sequence
  ENSG00000179299_46 (sequence is synthesized)
ggaaaaatgaggaacagacaagttaaagcaggggtccccaaccccagggctgcagaccagtacctgtctgtggcctgttaggaactgggcagcacagcacgagcatgggacattcagaac

SEQ ID NO: 629068 - DNA, 120 bp, Artificial Sequence
  ENSG00000179299_47 (sequence is synthesized)
tgggaaggacttaatacagactcatgaaagttctttaatcttatcaagactatactgttgccatctgtgatactgataactagcctataatgagtgcctgctacgtgccaggcactgcgc

SEQ ID NO: 629069 - DNA, 120 bp, Artificial Sequence
  ENSG00000179300_0 (sequence is synthesized)
atttacacatttccctcctcagcaatgggtacacagacagccaagctcctggactaagtctctgaatgtgtatctgacacttccccttactgagctccggaggctccttcttgccgagct

SEQ ID NO: 629070 - DNA, 120 bp, Artificial Sequence
  ENSG00000179300_1 (sequence is synthesized)
ccggaggctcccagtgacctcttgataatcagccttggcggggcccaaataccaccccttggaaaactcactgagcctgacatctgcctgtaagcagctttcaggaaggatctcacaaac

SEQ ID NO: 629071 - DNA, 120 bp, Artificial Sequence
  ENSG00000179300_2 (sequence is synthesized)
acccacccaatctctcttggtagcaaattgtcaaatcatacccatttcctcaaaagatggtggaggacttagcagcctcctatattgttctgaaattggagaatgaaattcggcaggctc

SEQ ID NO: 629072 - DNA, 120 bp, Artificial Sequence
  ENSG00000179300_3 (sequence is synthesized)
aagtgcagtggctgatggaagaaaatgctgctctccaggcccagatcccagagcttcagaagtcccaagcagccaaggagtatgatctactccgaaagtcctcagaggccaaggagcccc

SEQ ID NO: 629073 - DNA, 120 bp, Artificial Sequence
  ENSG00000179300_4 (sequence is synthesized)
agaagctcccagagcacatgaatcccccagcagcctgggaggcccaaaagaccccagagttcaaggaaccccagaagccaccagagccacaggatcttctaccctgggaacccccagcag

SEQ ID NO: 629074 - DNA, 120 bp, Artificial Sequence
  ENSG00000179300_5 (sequence is synthesized)
cctgggaactccaggaggccccagcagccccagagtccctggcgcctccagcaacccgggagtcccagaaacctccaatggcccatgagatcccaacagtcttggagggccaggggcctg

SEQ ID NO: 629075 - DNA, 120 bp, Artificial Sequence
  ENSG00000179300_6 (sequence is synthesized)
caaacacccaggatgccacaatagcccaagagcccaagaattcagaaccccaggatcccccaaatattgagaagccccaggaggcaccagaataccaggaaactgcagcacagctagagt

SEQ ID NO: 629076 - DNA, 120 bp, Artificial Sequence
  ENSG00000179300_7 (sequence is synthesized)
tccttgagcttccacctccccaggagcctctggagccttcaaatgcccaggaattcctagaactctcagcagcccaggagtccctggagggtctaatagttgtggagacatcagcagctt

SEQ ID NO: 629077 - DNA, 120 bp, Artificial Sequence
  ENSG00000179300_8 (sequence is synthesized)
cagagtttccacaggcccctattgggttagaggctacagatttccccctgcaatacactttaaccttcagtggagattcccagaagcttcctgagttcctggttcagctgtatagttaca

SEQ ID NO: 629078 - DNA, 120 bp, Artificial Sequence
  ENSG00000179300_9 (sequence is synthesized)
tgagagtcagagggcacctgtatcccactgaagcagccctggtgagctttgttggcaattgcttctcaggtagggcaggatggtggttccagctcttactggatatccaaagccccttac

SEQ ID NO: 629079 - DNA, 120 bp, Artificial Sequence
  ENSG00000179300_10 (sequence is synthesized)
tggagcaatgtgaaagtttcatacctgtgctccaggatacttttgataatccagaaaacatgaaagatgccaaccagtgcatccatcaactctgccaaggggagggtcatgtagcaaccc

SEQ ID NO: 629080 - DNA, 120 bp, Artificial Sequence
  ENSG00000179300_11 (sequence is synthesized)
tcattgctcaagagctgaactgggatgaaagcactctctggatccaatttcaagaaggtcttgccagttctatacaagatgaactgtctcacacaagcccagccaccaacctatctgatc

SEQ ID NO: 629081 - DNA, 120 bp, Artificial Sequence
  ENSG00000179300_12 (sequence is synthesized)
tcatcactcagtgcatcagcctggaagagaagcctgatcccaatccattagggaaaagttcctctgcagagggagatggacccgagagtccaccagctgaaaaccaacctatgcaggctg

SEQ ID NO: 629082 - DNA, 120 bp, Artificial Sequence
  ENSG00000179300_13 (sequence is synthesized)
caatcaactgcccacacatcagtgaagctgaatgggtccgttggcacaaaggccgcttatgcctctactgtggttatcctggtcattttgccagagattgccctgtcaagcctcatcagg

SEQ ID NO: 629083 - DNA, 120 bp, Artificial Sequence
  ENSG00000179300_14 (sequence is synthesized)
ccctgcaggcgggaaacatccaggcctgccagtaagggggaccccacgtgggccaatctacaaatatgcgtccccctctcttccaatatccatgtctcatacactatggcttactgttga

SEQ ID NO: 629084 - DNA, 120 bp, Artificial Sequence
  ENSG00000179300_15 (sequence is synthesized)
aatccaactgggaagaagataattctttgagcaagcaatggtagattcaggctcctacagaaacagcattgatcatactgtggttcttcgagagaagctgcccatccgcagtaatatctt

SEQ ID NO: 629085 - DNA, 120 bp, Artificial Sequence
  ENSG00000179300_16 (sequence is synthesized)
ccctctgatgctggaaactgtcgacggccatccacttattaatggacccataactaaggaaacatcacctgtccaagttcaaattggaaaccatgttgaagagctccagtttgacattat

SEQ ID NO: 629086 - DNA, 120 bp, Artificial Sequence
  ENSG00000179300_17 (sequence is synthesized)
tcatgcaccacgataccctctgattattggaatccattggcttgagacacatgacccaaacatagaatggagtacccgcactgtgtcctttctatcacgttattgtcactacaattgctt

SEQ ID NO: 629087 - DNA, 120 bp, Artificial Sequence
  ENSG00000179300_18 (sequence is synthesized)
caggcacaggtggaatagaagaaatcgtgatgaaataatttctgggtagatcctgtgtcctagtgactgttcctggcaacctgtcttctgttacctcagctgtcatcagcatttgctgct

SEQ ID NO: 629088 - DNA, 120 bp, Artificial Sequence
  ENSG00000179300_19 (sequence is synthesized)
ccctgaatcttctactgaacatcttgctatgtactaaggctacctgtacaacgactctgcctcttagatgatagactgaacctgatgactttgagctgcttttttttttttcactaactc

SEQ ID NO: 629089 - DNA, 120 bp, Artificial Sequence
  ENSG00000179300_20 (sequence is synthesized)
tgcatgcctctatctcagaactctgcatcctgcggaactgttttaattacaattatactaacaatacacatgagaatagatattagaaactaataatgaaaaagcatagctgttaaactg

SEQ ID NO: 629090 - DNA, 120 bp, Artificial Sequence
  ENSG00000179300_21 (sequence is synthesized)
actgacttgatttttttcttatcaatattttctatatcacaaaaatggcaacatcttttacataaagaaaataagtttgtaagtgatatttcttaaaagaatcaataaatattagcaatt

SEQ ID NO: 629091 - DNA, 120 bp, Artificial Sequence
  ENSG00000179304_0 (sequence is synthesized)
ttctttccttggtgtgtggttggaagattaatttgagataagtgttcagttctgggctgggcagtcgtgccgggcacgggaaattcaggttctttaagggaaaggcctgatgtgctaaga

SEQ ID NO: 629092 - DNA, 120 bp, Artificial Sequence
  ENSG00000179304_1 (sequence is synthesized)
cgaaatctataccgtgtgtagccgcttatgagaatatgaaactaaggagagccacaggtaagtatacgtctatgaatgcgaattaaaacgggtgacaatataaagagagattggtgtcac

SEQ ID NO: 629093 - DNA, 120 bp, Artificial Sequence
  ENSG00000179304_2 (sequence is synthesized)
aaatggtggagtgacttttgtatttcagcagacctcagtgagaaatggtcaccaccactccctagatgtgtgaccttgagtgagttgcttaacctctctgatcctgttacctcatctgca

SEQ ID NO: 629094 - DNA, 120 bp, Artificial Sequence
  ENSG00000179304_3 (sequence is synthesized)
actggggatgagaatatatatcatagcatgccctgggagaagctgttcctgaccacctgggctatggtgattttgacttcctctgtgtcagaagtacccccgtctcatgcctgccatagt

SEQ ID NO: 629095 - DNA, 120 bp, Artificial Sequence
  ENSG00000179304_4 (sequence is synthesized)
tgtctttttgttttgttttgtgatttcagatggactcaccctgtcacccaggttggactgcactggcctcaacctcctgagttcaagtgatcgtcccacctcagcctccccagtagctgg

SEQ ID NO: 629096 - DNA, 120 bp, Artificial Sequence
  ENSG00000179304_5 (sequence is synthesized)
gaccatagctgtgcagcatcatgcctggctaattttttaagttttttgttgagatggtggtctcgccctgttgctcaggctggcctcaaactcctgggctgaagcagtcctcccacctca

SEQ ID NO: 629097 - DNA, 120 bp, Artificial Sequence
  ENSG00000179304_6 (sequence is synthesized)
gcctcccaaagtgcttggattagaggcgtgagccaccattcctggctccttggacaatattttattcctcagattaagacacgtccttgggatggggctgcattggataattcaccgaag

SEQ ID NO: 629098 - DNA, 120 bp, Artificial Sequence
  ENSG00000179304_7 (sequence is synthesized)
gcaccgctgaatggagtgggccctcagtaaatacctggaggaatgtgacctggccagtgaggttattttcttttgtaggtgaaaggtgtagcagtcactcggcctacacccacagcatcg

SEQ ID NO: 629099 - DNA, 120 bp, Artificial Sequence
  ENSG00000179304_8 (sequence is synthesized)
accttgtgaacccagcgacctgactgccttgggagaattgaagcgaatgagagtggggagtgtgagaggtgcgtttggtgcagcatttctggcatgggaacagaactggccaggaggaag

SEQ ID NO: 629100 - DNA, 120 bp, Artificial Sequence
  ENSG00000179304_9 (sequence is synthesized)
tgacgtctgggttctgcccgcacacattcctcgccaccttcttggtgtctgagaacctccagcttcacctccttttctggacccgagggcctggcggagcttccagctgggaccagacct

SEQ ID NO: 629101 - DNA, 120 bp, Artificial Sequence
  ENSG00000179304_10 (sequence is synthesized)
aaacggaatccagcatcgccttccaaatcttccccgatgacagctgcagagacttcccaggaaggtccagcgccctctcagccttcgtactcagaacagccgatgatgggcctcagtaac

SEQ ID NO: 629102 - DNA, 120 bp, Artificial Sequence
  ENSG00000179304_11 (sequence is synthesized)
ctgagccccggtcctggccccagccaggccgtgcctctcccagaggggctgctccgccagcggtacagagaggagaagaccctggaagagcggcggtgggagaggctggagttccttcag

SEQ ID NO: 629103 - DNA, 120 bp, Artificial Sequence
  ENSG00000179304_12 (sequence is synthesized)
aggaagaaagcattcctgcggcatgtgaggaggagacaccgcgatcacatggccccctatgctgttgggagggaagccagaatctccccattaggtgacagaagtcagaatcgattccga

SEQ ID NO: 629104 - DNA, 120 bp, Artificial Sequence
  ENSG00000179304_13 (sequence is synthesized)
tgtgaatgtcgatactgccagagccacaggccgaatctttctgggatccctggggagagtaacagggccccacatccctcctcctgggagacgctggtgcagggcctcagtggcttgact

SEQ ID NO: 629105 - DNA, 120 bp, Artificial Sequence
  ENSG00000179304_14 (sequence is synthesized)
ctcagcctaggcaccaaccagcccgggcctctgcctgaagcggcactccagccacaggagacagaggagaagcgccagcgagagaggcagcaggagagcaaaataatgtttcagaggctg

SEQ ID NO: 629106 - DNA, 120 bp, Artificial Sequence
  ENSG00000179304_15 (sequence is synthesized)
ctcaagcagtggttagaggaaaactgagacgtgcacccccatgggatggagacccgaagggactcagacggagccgccgtgttggcagcgcctgggtgtgggcccattttggggaccaaa

SEQ ID NO: 629107 - DNA, 120 bp, Artificial Sequence
  ENSG00000179304_16 (sequence is synthesized)
cagcaagctgtggtcggatgagtgccaggacctgtgtaccgggacacgtgggagtcctcccagcatgatgcttgactgacccgaggaaggtcctcatgtttcgtgcctgtcattctcgga

SEQ ID NO: 629108 - DNA, 120 bp, Artificial Sequence
  ENSG00000179304_17 (sequence is synthesized)
tggctgtgaggcattccttggcaagggacgctgcgtaccagcggtcctcaccgcatctcacatggctcctgtgatgcatgttgtcgctttcccacccgggatctccatctctcttccctt

SEQ ID NO: 629109 - DNA, 120 bp, Artificial Sequence
  ENSG00000179304_18 (sequence is synthesized)
cctgctgtcagtaagagatcacatgtctgtgtagtgtgaatgccttgtcgctgtcctgtgcttttgcaccattgagttgactgcctctgagaagcagcactaggcctgttgaaatgcaat

SEQ ID NO: 629110 - DNA, 120 bp, Artificial Sequence
  ENSG00000179304_19 (sequence is synthesized)
gtgctgccctgagatccagtttcaagaatgggcaggtaaacgcagtgtgggaaaggaatgtggaatgagaacttggtggttcaccgctgtactatttgtgtaaatgtttacgtatgtgat

SEQ ID NO: 629111 - DNA, 120 bp, Artificial Sequence
  ENSG00000179304_20 (sequence is synthesized)
aagctacatgtatgtaaatgttgcaatacccctaacagtcgagtagtagtctcccttacaggaatttttgacggggttcctcatcatcaataccaaataaatatatgtaggaatggaaaa

SEQ ID NO: 629112 - DNA, 120 bp, Artificial Sequence
  ENSG00000179304_21 (sequence is synthesized)
gagaacgcgcgtgagagagcccgagagagacggagagcgagcgagcgcgcgggagagactgagagcgggggggtgggagagagacttccagagagacagagcgagaggccgagacggagg

SEQ ID NO: 629113 - DNA, 120 bp, Artificial Sequence
  ENSG00000179304_22 (sequence is synthesized)
ctgtccctagcacaggccagggtgtcttgggactcgaatccctgggttgggctggccgggagtggggctttcgaaggaagcgggtgattttccacgtcgtccatatctccccggtgtggg

SEQ ID NO: 629114 - DNA, 120 bp, Artificial Sequence
  ENSG00000179304_23 (sequence is synthesized)
aatggcggtcgtgcactctgggggtggcgttgttctcgttccctacttgggggtggcctttttcagcggagaaagaggatgccgcgggcattggtagccggcgggactacacttgggcta

SEQ ID NO: 629115 - DNA, 120 bp, Artificial Sequence
  ENSG00000179304_24 (sequence is synthesized)
ggatcagtgttcagcgggttcagaaatcaccgtgtccttggcatcacctccctccccacctcctctcccatcgcacagcaggagacagtgactggagggttttcaaggaggactgcattg

SEQ ID NO: 629116 - DNA, 120 bp, Artificial Sequence
  ENSG00000179304_25 (sequence is synthesized)
cccctattgaaacaaaccgtccgacaaaccctttctccgacgtgtgacagagggacggtcgtaatgtgaaatacgactagacatgcgtttaatgggcggtgtgattgctgcattcgtgcg

SEQ ID NO: 629117 - DNA, 120 bp, Artificial Sequence
  ENSG00000179304_26 (sequence is synthesized)
caatgaatggtccaggccatttgtgtccagtagccgcacaagctgcagggtctcatgtttagagagggagggcctctccgccgtccaccttgctggagtacaggcgaccctgggcggtag

SEQ ID NO: 629118 - DNA, 120 bp, Artificial Sequence
  ENSG00000179304_27 (sequence is synthesized)
ccctctccgccatcagaaatgtggtgctctgagtagccacagattcccatctgcatctccaataccatttccctctactcactgacccgttgggtgcgttggatttgtgcgtgggtgtga

SEQ ID NO: 629119 - DNA, 120 bp, Artificial Sequence
  ENSG00000179304_28 (sequence is synthesized)
gggtagtttggtgtgtttgcttgcaaatggaaaagcgaatggccttggttggctgagcttatcagggcactagcagtggagagagaaaggactactgtattcttaggagcagaatctcaa

SEQ ID NO: 629120 - DNA, 120 bp, Artificial Sequence
  ENSG00000179304_29 (sequence is synthesized)
caacttcctataaaacgggcagtgtgtcttacctggaatgctttggcatttaataaaatgtcctgtgaatacttttcatagggaagcactttgtttttactgtttctggttggacagtgg

SEQ ID NO: 629121 - DNA, 120 bp, Artificial Sequence
  ENSG00000179304_30 (sequence is synthesized)
aattacgagcgggcggcgctgcgtttccagggcagaggaaacgaggcgccgcgttggcgcttggacggcgggaaccggctccggagcgagaacgcgcatggactcaccctgtcacccagg

SEQ ID NO: 629122 - DNA, 120 bp, Artificial Sequence
  ENSG00000179304_31 (sequence is synthesized)
actttggaaaagctttggccgagaggaagggtccattcagatggttggggagtggggcttagaattttatttttagtttacaaagatgatgggggctgtgttaaaaagaaaaaatataca

SEQ ID NO: 629123 - DNA, 120 bp, Artificial Sequence
  ENSG00000179304_32 (sequence is synthesized)
gatcacagtacagggattgggaattgggggaggcactgggttagctgcaggtaaattataacagagtgactagggtaggctgggttgagaaggtgacaatttgacaaagatgtgaagggg

SEQ ID NO: 629124 - DNA, 120 bp, Artificial Sequence
  ENSG00000179304_33 (sequence is synthesized)
gaggagtcagtcaagcagatatctgtggtgaaggccttccagacagagggagcagttggaaaaaagtcagaggctgagtcgttccaacatggcgcagatgccacaaggacactagcacac

SEQ ID NO: 629125 - DNA, 120 bp, Artificial Sequence
  ENSG00000179304_34 (sequence is synthesized)
ccagttcccacgtccctcgcccgggaagtcacgtccgctacagggagtgtcttcccatggcctccggaagcattcggcagtccacaagccacgcttcagagaagccgctccgggaacgcc

SEQ ID NO: 629126 - DNA, 120 bp, Artificial Sequence
  ENSG00000179304_35 (sequence is synthesized)
gcggcgcacctccggaagggatgacctccacgccttctcccctcgcagtccacccgagcggcgtgggtcgcgagaagccacccaaccgctccgtcttccggctccggcggtccgcggcag

SEQ ID NO: 629127 - DNA, 120 bp, Artificial Sequence
  ENSG00000179304_36 (sequence is synthesized)
acccttcaattacgagcgggcggcgctgcgtttccagggcagaggaaacgaggcgccgcgttggcgcttggacggcgggaaccggctccggagcgagaacgcgcgtgaaaggtgtagcag

SEQ ID NO: 629128 - DNA, 120 bp, Artificial Sequence
  ENSG00000179314_0 (sequence is synthesized)
ggcgcgggtgcgggcgccccagccggccgcgatcgcgggatttctgcgccaggagatgaggggcggtagagccctggaatggagatgtccttgacgcctgggcagaggctgcagctgcag

SEQ ID NO: 629129 - DNA, 120 bp, Artificial Sequence
  ENSG00000179314_1 (sequence is synthesized)
gaccctgtggccactggagataagtaatggtgccatttgaacacctactggaaacggggcaggaacagtgagtgaccccaggcgagcacaggcaggtgccaggagccaggatgcaaggat

SEQ ID NO: 629130 - DNA, 120 bp, Artificial Sequence
  ENSG00000179314_2 (sequence is synthesized)
gacgcctccggaggccctggcctcactcccacctgggcgctaggagccatcccggggctccagccaggagccctgctgcccaggggcatggccaaacctttcttccgactccagaagttt

SEQ ID NO: 629131 - DNA, 120 bp, Artificial Sequence
  ENSG00000179314_3 (sequence is synthesized)
ctccgccgaacacagttcctgctgttcttcctcacggctgcctacctgatgaccggcagcctgctgctgctgcagcgggtccgcgtggctctcccacagggcccccgggcacccggcccc

SEQ ID NO: 629132 - DNA, 120 bp, Artificial Sequence
  ENSG00000179314_4 (sequence is synthesized)
ctgcagaccttgccagtggccgccgtggcgctgggcgtgggcttgctggacagcagagccctgcacgaccctcgagtcagcccagagctgctgctgggtgtggacatgctgcagagcccc

SEQ ID NO: 629133 - DNA, 120 bp, Artificial Sequence
  ENSG00000179314_5 (sequence is synthesized)
ctgacccggccccggcccggcccccgctggctccggagccgcaactcggagctgcgtcagttgcgtcgccgctggttccaccacttcatgagtgactcccagggaccgcccgccctgggc

SEQ ID NO: 629134 - DNA, 120 bp, Artificial Sequence
  ENSG00000179314_6 (sequence is synthesized)
cccgaggctgccaggcccgccatccacagccgaggcacctacattggatgcttcagtgacgatggccacgagaggactctgaaaggagctgtgttttatgacttgagaaagatgactgtc

SEQ ID NO: 629135 - DNA, 120 bp, Artificial Sequence
  ENSG00000179314_7 (sequence is synthesized)
tcccactgccaggatgcgtgtgctgagcggtcctatgtctacgccggcttggaggccggggcggagtgttactgcgggaaccggctgccagcggtgagcgtggggctggaagagtgtaac

SEQ ID NO: 629136 - DNA, 120 bp, Artificial Sequence
  ENSG00000179314_8 (sequence is synthesized)
catgagtgcaaaggcgagaagggctctgtgtgcggggctgtggaccggctctccgtgtaccgtgtggacgagctgcagccgggctccaggaagcggcggaccgccacctaccgcggatgc

SEQ ID NO: 629137 - DNA, 120 bp, Artificial Sequence
  ENSG00000179314_9 (sequence is synthesized)
ttccgactgccagagaacatcacacatgccttccccagctccctgatacaggccaatgtgaccgtggggacttgctcgggcttttgttcccagaaagagttccccttggccattctcagg

SEQ ID NO: 629138 - DNA, 120 bp, Artificial Sequence
  ENSG00000179314_10 (sequence is synthesized)
ggctgggaatgctactgtgcttaccctaccccccggttcaacctgcgggatgccatggacagctcagtatgtggccaggaccctgaggcacagaggctggcagaatactgtgaggtctac

SEQ ID NO: 629139 - DNA, 120 bp, Artificial Sequence
  ENSG00000179314_11 (sequence is synthesized)
cagacacctgtgcaagacactcgttgtacagacaggaggttcctgcctaacaaatccaaagtgtttgtggctttgtcaagcttcccaggagccgggaacacatgggcacggcacctcatt

SEQ ID NO: 629140 - DNA, 120 bp, Artificial Sequence
  ENSG00000179314_12 (sequence is synthesized)
gagcatgccactggcttctatacagggagctactactttgatggaaccctctacaacaaagggttcaagggcgaaaaggaccactggcggagccgacgcaccatctgtgtcaaaacccac

SEQ ID NO: 629141 - DNA, 120 bp, Artificial Sequence
  ENSG00000179314_13 (sequence is synthesized)
gagagtggcaggagggagattgagatgtttgattcagccatcctgctaatccggaacccatacaggtccctggtggcagaattcaacagaaaatgtgccgggcacctgggatatgcagct

SEQ ID NO: 629142 - DNA, 120 bp, Artificial Sequence
  ENSG00000179314_14 (sequence is synthesized)
gaccgcaactggaagagcaaagagtggccggactttgtcaacagctacgcctcgtggtggtcctcgcacgtcctggactggctcaagtacgggaagcggctgctggtggtgcactacgag

SEQ ID NO: 629143 - DNA, 120 bp, Artificial Sequence
  ENSG00000179314_15 (sequence is synthesized)
gagctgcggcgcagcctggtgcccacgttacgggagatggtggccttcctcaacgtgtctgtgagcgaggagcggctgctctgcgtggagaacaacaaggagggcagcttccggcggcgc

SEQ ID NO: 629144 - DNA, 120 bp, Artificial Sequence
  ENSG00000179314_16 (sequence is synthesized)
ggccggcgctcccacgaccctgagcccttcaccccggagatgaaagacttgatcaatggctacatccggacggtggaccaagccctgcgtgaccacaactggacggggctgcccagggag

SEQ ID NO: 629145 - DNA, 120 bp, Artificial Sequence
  ENSG00000179314_17 (sequence is synthesized)
tatgtgcccagatgataggcctggcccacgccgccgcccccgctgagtgacgcaatcgcaccacggggctgcgctccccactctgatgctcaggcccgtggcctcactgggacgaacggt

SEQ ID NO: 629146 - DNA, 120 bp, Artificial Sequence
  ENSG00000179314_18 (sequence is synthesized)
gggtggggggctcaccctggtgctgcctcccgcacaaggagacctggacacaacagacacacatcacaaggcgaacacaaatggacacacatacctggccacgaacccacacctcctcag

SEQ ID NO: 629147 - DNA, 120 bp, Artificial Sequence
  ENSG00000179314_19 (sequence is synthesized)
acactcagacaccactccaggctcatagccccgtcttgatgcagagaagccacccacgtggggtgtgccaggcacccccagatacaaatgcagccacgcacagacgtaacacacaggtgc

SEQ ID NO: 629148 - DNA, 120 bp, Artificial Sequence
  ENSG00000179314_20 (sequence is synthesized)
caggccgtgtgctcctggaggctggctggctgtctctctcacacagatacacgtgcgctccctgggatccgggaggccctgggcttcctgtgtgtagccctggcatagacttgctcgtca

SEQ ID NO: 629149 - DNA, 120 bp, Artificial Sequence
  ENSG00000179314_21 (sequence is synthesized)
gggtgttcgactctgggatgctgggccgggcagacatttatgctctgagcagcaaggaccattgggatggaggtgggcacaaagactgctgcttccagggtgtgcggccctggccgtgtg

SEQ ID NO: 629150 - DNA, 120 bp, Artificial Sequence
  ENSG00000179314_22 (sequence is synthesized)
tctgacatcccataaatgtgtgtgtggtgtgactacgggcaccacaaactccgcagccttgcctctcttttctctgtggctgggctggctgcaccatgggcagggttgaggactgccccc

SEQ ID NO: 629151 - DNA, 120 bp, Artificial Sequence
  ENSG00000179314_23 (sequence is synthesized)
caccccgcccaagccaatgcagacactgacctcaagaccagccacaccaagtctgtgcactgcccaccacccccttcaacccctcctacaccatgctccggggcctggggcctccttgcc

SEQ ID NO: 629152 - DNA, 120 bp, Artificial Sequence
  ENSG00000179314_24 (sequence is synthesized)
aaggtgtaagcatgggggcgtggggaagagggcaggagctgaagttccaggggagcccaggacccctggggacctgtacactagcaggatgggtcttgggagttggcatggggagattgt

SEQ ID NO: 629153 - DNA, 120 bp, Artificial Sequence
  ENSG00000179314_25 (sequence is synthesized)
aagggctgtatctccgcgattactggtactggtgctccacccataggggccctgttctctctggggtcccacactggggtcatgagagctagttagtactcagcctgacccctaggtctg

SEQ ID NO: 629154 - DNA, 120 bp, Artificial Sequence
  ENSG00000179314_26 (sequence is synthesized)
gtcctgccagcctgggatgggggtcaatgtatgctacacatcttgggctcacaagtgaggctgtggaggccaggaggttcaagtatggagggtaggagtgcaacccaggagcaacgctca

SEQ ID NO: 629155 - DNA, 120 bp, Artificial Sequence
  ENSG00000179314_27 (sequence is synthesized)
aggtggccgagatgcagggaggattgtggcgatccggttgcacactggcctctgtggaggtcagggaggtgggaaggtgggtgggcctgaactcaggcagcccttcagtggcttcttcag

SEQ ID NO: 629156 - DNA, 120 bp, Artificial Sequence
  ENSG00000179314_28 (sequence is synthesized)
gcctaggataaccctggccaggccccatggtcctgctctgggtcagctgtcagggagacctcccttcagcctgagccaagctgcattgggaggagaaggcagggtgagggatctgggaga

SEQ ID NO: 629157 - DNA, 120 bp, Artificial Sequence
  ENSG00000179314_29 (sequence is synthesized)
gcaggacgttgagatatcctgaccctctgcttcctagcctgatgatggggaacccagagccacccgctatgagcacaggccgggggtggaaggcccagtagagctgcccttccccagatg

SEQ ID NO: 629158 - DNA, 120 bp, Artificial Sequence
  ENSG00000179314_30 (sequence is synthesized)
gaagcttcctccaaccttcagtttggccagtgggtgggtttgggcatctgtgcccctggtggcctccaaatccttcctgggattcccccaaacccacactgatgcgaagctgttcttgac

SEQ ID NO: 629159 - DNA, 120 bp, Artificial Sequence
  ENSG00000179314_31 (sequence is synthesized)
cctcccatagcatcaactcagttcagctcaaagctagaaacaccaaggtctttgaaaatgtttattggctcaggatagcttcggcatccaatctgcgaaggcccctgatggagctatttc

SEQ ID NO: 629160 - DNA, 120 bp, Artificial Sequence
  ENSG00000179314_32 (sequence is synthesized)
ttcctagtatcaggagcaattgagacccctcaggagtttccacactgctgtggacgggatagccagggcagacctgcatcccagagcaagcctagatccttgaaagcaatgtcaggcgtg

SEQ ID NO: 629161 - DNA, 120 bp, Artificial Sequence
  ENSG00000179314_33 (sequence is synthesized)
gcagtggggaagccatggaggctgggaagggcaaagtgtggagagaggagtgaccgggactggagccagggtctggggagagcaacagcaccaggcttttcctggtagttggattggtac

SEQ ID NO: 629162 - DNA, 120 bp, Artificial Sequence
  ENSG00000179314_34 (sequence is synthesized)
attcactgctgccaggtacccagagatgtcatctctctccaggtagagcatcaccagctcctgtggccttgtagatgactctgtacctcagtgaagagtgcaggcaagtagagtgatggg

SEQ ID NO: 629163 - DNA, 120 bp, Artificial Sequence
  ENSG00000179314_35 (sequence is synthesized)
gtcagtgtccatccagtttacgctgagtcagtccatacagcaagacacctggcacttggcaggtactcctggatgttgatgagcaaggaagagcaacggccctgtcagctggcagtggtc

SEQ ID NO: 629164 - DNA, 120 bp, Artificial Sequence
  ENSG00000179314_36 (sequence is synthesized)
ctcacagccttcatcccaggtctgcctacgtgggagatctcatcagaaacaggaacggggatctgtctgtgcttgcaggaaagtccatttgtttttctccaagttaggtctcatctacag

SEQ ID NO: 629165 - DNA, 120 bp, Artificial Sequence
  ENSG00000179314_37 (sequence is synthesized)
ctcttagcttctcagtaaagaggatactctcccaaccagccaaggaataaaagctgatctgtatgtagggcagaagtgtggcaaatgcatcaggaaccggttagaacagaacagagaaac

SEQ ID NO: 629166 - DNA, 120 bp, Artificial Sequence
  ENSG00000179314_38 (sequence is synthesized)
cctgactgtctacagattccaactttaatagcaagcctgtggagttacacaaacctgtgttaaaacatgtaatttttatggatttcatctcccgttgtggatcaatttggaaaaaccaaa

SEQ ID NO: 629167 - DNA, 120 bp, Artificial Sequence
  ENSG00000179314_39 (sequence is synthesized)
atatgtaattttaaaaaactaaaacacatcctggtagtcccagtgatgtgtaaatgagagagaagaatagacaggcttccaaaccctgggaagaaagctgcttaattatgtgaacatctt

SEQ ID NO: 629168 - DNA, 120 bp, Artificial Sequence
  ENSG00000179314_40 (sequence is synthesized)
ataatgaagtctcttgcagctaaaattagattttgagtgcatgaatctgtgataatgtttgcatatcagaatgcattctccccttaaaagtagcagtagccacttggttcttagggggcc

SEQ ID NO: 629169 - DNA, 120 bp, Artificial Sequence
  ENSG00000179314_41 (sequence is synthesized)
ccaagaggagaggagaagtgctgaggttgatgttacgactgcaagaattcttgggacacaggtttgttttctgctgacttgctcggaaacccattggaggtatctgaaatgtgatgactc

SEQ ID NO: 629170 - DNA, 120 bp, Artificial Sequence
  ENSG00000179314_42 (sequence is synthesized)
caaaggggttcatttcactatagggagaaattgattcgtctgacttcctatttatcaccactcaatattgggtgagttggtctgaacaaggtggggataaagtagagtggaaataatgta

SEQ ID NO: 629171 - DNA, 120 bp, Artificial Sequence
  ENSG00000179314_43 (sequence is synthesized)
gagtcgtcagactgaaaggccaggttgtagtcccagctcttatctgccatcttggacaaagcttttcccatctccagtctcagtttcccatccataaaatgggggaagtggtaggtcttg

SEQ ID NO: 629172 - DNA, 120 bp, Artificial Sequence
  ENSG00000179314_44 (sequence is synthesized)
ctgattgcatccacattcattcctccatttcctttcccagcaaccccccatttctgtttgggaattcatatgatctgccagagcctctccaggggtggaatacatgtcctggactaagcc

SEQ ID NO: 629173 - DNA, 120 bp, Artificial Sequence
  ENSG00000179314_45 (sequence is synthesized)
aatgacaccttccatctttccagctatggtgactgggttaggtatgatcttgtgagttaagacaatgaagccagagggaatttcaagacttatgggaatgctgggtagaagctgttttaa

SEQ ID NO: 629174 - DNA, 120 bp, Artificial Sequence
  ENSG00000179314_46 (sequence is synthesized)
ttcccctgttgaatgtgaaaaaggtagtagtattcctgggtctttatgatgaccaccttgggccttgggatcatgaccaggaatcacgtgaagctgacaccactgaagggagagttgaga

SEQ ID NO: 629175 - DNA, 120 bp, Artificial Sequence
  ENSG00000179314_47 (sequence is synthesized)
ggcagaaagagatcaagtccttggtgaaattgtttaagtacaggatcaagccttgcttgagattggccttacctctggactttttttgttatatgagctaataaattctgtttattgttt

SEQ ID NO: 629176 - DNA, 120 bp, Artificial Sequence
  ENSG00000179314_48 (sequence is synthesized)
atgaaactcccttttaggaagacggagtaagaggcaccaccacctgctcctgctgcctctgctgtcctcagcttctgggagcatcttagcagccagctccggatttctgcgccaggagat

SEQ ID NO: 629177 - DNA, 120 bp, Artificial Sequence
  ENSG00000179314_49 (sequence is synthesized)
actcttgttaactccatgcgtctgaaagccctcagctccgttaagctgtgttcctggaccgcctgggggcctgtgcctatgcactgctccatctctcccatgtttcaggcttcatccatg

SEQ ID NO: 629178 - DNA, 120 bp, Artificial Sequence
  ENSG00000179314_50 (sequence is synthesized)
gtcaggacccatggctggccagtccatatccattgtcctcgtaggagactggacctcagagtggggcaggacttcccacagtcctgcagcaaaaggcagtggcagaaccagtcttggggc

SEQ ID NO: 629179 - DNA, 120 bp, Artificial Sequence
  ENSG00000179314_51 (sequence is synthesized)
ctcgcctcctggctgacccaggtgctaaatgatccctcactaggcactgggactgtcagctccctgaggaccaggagttgagttaaggggggtcagaccagcaccaggacccaaagacag

SEQ ID NO: 629180 - DNA, 120 bp, Artificial Sequence
  ENSG00000179314_52 (sequence is synthesized)
ttttacagatggggaagctgaggcccagcaaggttaagcaacctacccagtgtcacacagctggccagtaacaaagctgggatttaaacctggctttgtccagtgctcctgcaacacagc

SEQ ID NO: 629181 - DNA, 120 bp, Artificial Sequence
  ENSG00000179314_53 (sequence is synthesized)
aagtgcaaattctcagattctcccggagttgcctagtcaggaactctggggtaggggccagcaggctttgtatttaacgctgtctccagctgaaaggaataaatccgcctcagagtgggt

SEQ ID NO: 629182 - DNA, 120 bp, Artificial Sequence
  ENSG00000179314_54 (sequence is synthesized)
cccagtgtatccctcggaagttctttctttcctgaacattctcgcctctgtcggggagttagaaaagctgttcattctgcgtccagataaaagagctcgcctcctcttttatccccgtcg

SEQ ID NO: 629183 - DNA, 120 bp, Artificial Sequence
  ENSG00000179314_55 (sequence is synthesized)
ttttaggaagacggagtaagaggcaccaccacctgctcctgctgcctctgctgtcctcagcttctgggagcatcttagcagccagctccgggtgaggacagggtccaccggtgcacatgg

SEQ ID NO: 629184 - DNA, 120 bp, Artificial Sequence
  ENSG00000179331_0 (sequence is synthesized)
agccgcaggaatatgctggaaggcggcgggcgggcgcccgcgaggtgctgaaaggacagttcccgccgccgaacttagcccgcgggtggggcggcccgggagccagcggggcacgtgagc

SEQ ID NO: 629185 - DNA, 120 bp, Artificial Sequence
  ENSG00000179331_1 (sequence is synthesized)
gatggagaccatctggatctaccagttccgcctcatcgtgatcggggactccaccgtgggcaagtcctgcctcctgcaccgcttcacccagggccgcttccccgggctgcgctcccccgc

SEQ ID NO: 629186 - DNA, 120 bp, Artificial Sequence
  ENSG00000179331_2 (sequence is synthesized)
ctgcgaccccaccgtcggcgtggacttcttctcccgcctgctggagatcgagccgggcaagaggatcaagctacagctctgggacacggcgggacaggagcggttcagatcaataacccg

SEQ ID NO: 629187 - DNA, 120 bp, Artificial Sequence
  ENSG00000179331_3 (sequence is synthesized)
atcttattaccgcaactcagttggtggatttttagtatttgacattactaaccgacgatcttttgaacatgtgaaagattggctagaagaagcaaaaatgtatgtacagccatttcggat

SEQ ID NO: 629188 - DNA, 120 bp, Artificial Sequence
  ENSG00000179331_4 (sequence is synthesized)
tgtatttctgctagtgggacataaatgtgatttagcttcacaacgtcaagttacaagggaagaagctgaaaaactgtcagcagactgtggaatgaagtatatagaaacctcagcaaagga

SEQ ID NO: 629189 - DNA, 120 bp, Artificial Sequence
  ENSG00000179331_5 (sequence is synthesized)
tgctacaaatgttgaagaatccttcacaatcttgacgagagacatatatgaacttattaaaaagggagaaatttgtattcaggatggctgggaaggggttaaaagtggttttgttccaaa

SEQ ID NO: 629190 - DNA, 120 bp, Artificial Sequence
  ENSG00000179331_6 (sequence is synthesized)
tactgtgcattcttctgaggaagcagtaaagcccaggaaagaatgcttctgctgacttcaaacatgctgaagaactaacaggaacagattgggtgtcagttcaggataaataccaacatt

SEQ ID NO: 629191 - DNA, 120 bp, Artificial Sequence
  ENSG00000179331_7 (sequence is synthesized)
gatgcttacttgttacactactagattgggtattttgctaaattaccaagcaaagcagacaatctttttcttgaaattacctccattcttactttgttagcatacgctgaccttagtgtc

SEQ ID NO: 629192 - DNA, 120 bp, Artificial Sequence
  ENSG00000179331_8 (sequence is synthesized)
cagatatgtcactattactcatttttcttgacagttcaaatggatttttgtgcatatatagtcaattgaaaagattttatcaggaattacattctcttgagttaattaatattgaatagc

SEQ ID NO: 629193 - DNA, 120 bp, Artificial Sequence
  ENSG00000179331_9 (sequence is synthesized)
aaaatgcatttaaatatgcactgttcacctgcagagtaaacaatctcagaagtatcgactaggacgtaaatagcagttccttatataaagtaccaggttttttccccattctctggaaat

SEQ ID NO: 629194 - DNA, 120 bp, Artificial Sequence
  ENSG00000179331_10 (sequence is synthesized)
gtttgtcctcccttaattttgcctcaacacaagaaaataagttttatgtccatttttgttccctaatttattgcttctaaaaatgcattatgttttacaaagatatctaaggatccaagc

SEQ ID NO: 629195 - DNA, 120 bp, Artificial Sequence
  ENSG00000179331_11 (sequence is synthesized)
aaactactttaagcaaatatttgtaaaattaaaaacggaggaccgctcaccaaatgtttgaaatgttgctttttttttttgagacagggtcttgttttgtcacccaggctggagtgcagt

SEQ ID NO: 629196 - DNA, 120 bp, Artificial Sequence
  ENSG00000179331_12 (sequence is synthesized)
ggggcaatcttggctccctgcaacctctgcttcctgggttcaggtgattgtcagtaccttacctcagcctcctgagtagctggaactgcagatgtgcgccaccatgcccggctaattttt

SEQ ID NO: 629197 - DNA, 120 bp, Artificial Sequence
  ENSG00000179331_13 (sequence is synthesized)
gtattataagtagacacagggtttcataatgttccccaggctggtctccaactcctcgcctcaagcaattcgcccccctcggcctccaaagtgctggaattataggcatgagctgccgtg

SEQ ID NO: 629198 - DNA, 120 bp, Artificial Sequence
  ENSG00000179331_14 (sequence is synthesized)
cctggactatcagcagcacatgttttgctgttacggtgtactgttcgtatttagacaagaagaacaaaatttatttatgtattgacattttcaaagaaagtaaatgcaatttactttgaa

SEQ ID NO: 629199 - DNA, 120 bp, Artificial Sequence
  ENSG00000179335_0 (sequence is synthesized)
ggggcactggtacctccaggacctggagtgtactggaagaaatggtgcagtccagatgcatcactgtaagcgataccgctcccctgaaccagacccgtacctgagctaccgatggaagag

SEQ ID NO: 629200 - DNA, 120 bp, Artificial Sequence
  ENSG00000179335_1 (sequence is synthesized)
gaggaggtcctacagtcgggaacatgaagggagactgcgatacccgtcccgaagggagcctcccccacgaagatctcggtccagaagccatgaccgcctgccctaccagaggaggtaccg

SEQ ID NO: 629201 - DNA, 120 bp, Artificial Sequence
  ENSG00000179335_2 (sequence is synthesized)
ggagcgccgtgacagcgatacataccggtgtgaagagcggagcccatcctttggagaggactactatggaccttcacgttctcgtcatcgtcggcgatcgcgggagagggggccataccg

SEQ ID NO: 629202 - DNA, 120 bp, Artificial Sequence
  ENSG00000179335_3 (sequence is synthesized)
gacccgcaagcatgcccaccactgccacaaacgccgcaccaggtcttgtagcagcgcctcctcgagaagccaacagagcagtaagcgcagcagccggagtgtggaagatgacaaggaggg

SEQ ID NO: 629203 - DNA, 120 bp, Artificial Sequence
  ENSG00000179335_4 (sequence is synthesized)
tcacctggtgtgccggatcggcgattggctccaagagcgatatgagattgtggggaacctgggtgaaggcacctttggcaaggtggtggagtgcttggaccatgccagagggaagtctca

SEQ ID NO: 629204 - DNA, 120 bp, Artificial Sequence
  ENSG00000179335_5 (sequence is synthesized)
ggttgccctgaagatcatccgcaacgtgggcaagtaccgggaggctgcccggctagaaatcaacgtgctcaaaaaaatcaaggagaaggacaaagaaaacaagttcctgtgtgtcttgat

SEQ ID NO: 629205 - DNA, 120 bp, Artificial Sequence
  ENSG00000179335_6 (sequence is synthesized)
gtctgactggttcaacttccacggtcacatgtgcatcgcctttgagctcctgggcaagaacacctttgagttcctgaaggagaataacttccagccttaccccctaccacatgtccggca

SEQ ID NO: 629206 - DNA, 120 bp, Artificial Sequence
  ENSG00000179335_7 (sequence is synthesized)
cagctgacccatacagacttgaaaccagagaacatcctgtttgtgaattctgagtttgaaaccctctacaatgagcacaagagctgtgaggagaagtcagtgaagaacaccagcatccga

SEQ ID NO: 629207 - DNA, 120 bp, Artificial Sequence
  ENSG00000179335_8 (sequence is synthesized)
gtggctgactttggcagtgccacatttgaccatgagcaccacaccaccattgtggccacccgtcactatcgcccgcctgaggtgatccttgagctgggctgggcacagccctgtgacgtc

SEQ ID NO: 629208 - DNA, 120 bp, Artificial Sequence
  ENSG00000179335_9 (sequence is synthesized)
tggagcattggctgcattctctttgagtactaccggggcttcacactcttccagacccacgaaaaccgagagcacctggtgatgatggagaagatcctagggcccatcccatcacacatg

SEQ ID NO: 629209 - DNA, 120 bp, Artificial Sequence
  ENSG00000179335_10 (sequence is synthesized)
atccaccgtaccaggaagcagaaatatttctacaaagggggcctagtttgggatgagaacagctctgacggccggtatgtgaaggagaactgcaaacctctgaagagttacatgctccaa

SEQ ID NO: 629210 - DNA, 120 bp, Artificial Sequence
  ENSG00000179335_11 (sequence is synthesized)
gactccctggagcacgtgcagctgtttgacctgatgaggaggatgttagaatttgaccctgcccagcgcatcacactggccgaggccctgctgcaccccttctttgctggcctgacccct

SEQ ID NO: 629211 - DNA, 120 bp, Artificial Sequence
  ENSG00000179335_12 (sequence is synthesized)
gaggagcggtccttccacaccagccgcaacccaagcagatgacaggcacaggccaccgcatgaggagatggagggcgggactgggccgcccagccccttgactccagcctcgaccgccag

SEQ ID NO: 629212 - DNA, 120 bp, Artificial Sequence
  ENSG00000179335_13 (sequence is synthesized)
gccccaggccagagccacccaatgaacagtgcaatgtgaaggaaggcaggagcctgcaggggagcagacttggtgcccagctgccagaaagcacagatttgacccaagctatttatatgt

SEQ ID NO: 629213 - DNA, 120 bp, Artificial Sequence
  ENSG00000179335_14 (sequence is synthesized)
tataaagttataataaagtgtttcttactgtttgtaacccctggtaccagtgtgtccatctccaggctccttgccttccccttacctgaccttattaataaagtctttcttagcagttca

SEQ ID NO: 629214 - DNA, 120 bp, Artificial Sequence
  ENSG00000179335_15 (sequence is synthesized)
ttaaaggcctcatctcttcctagccttctctcaggctggctggtccgggtgagtactgccagccctgtgcacgtgcactggtgtgcgtgcatgtgtgtgtgtatgtgttgtctggtccag

SEQ ID NO: 629215 - DNA, 120 bp, Artificial Sequence
  ENSG00000179335_16 (sequence is synthesized)
gtgtagggctgatcacagggtcctggcctctgtgtcttctggctctttccagtggcaactgtaggaactctggctccgatgctggctggcccctggcctgtctatgtctacacagtgctc

SEQ ID NO: 629216 - DNA, 120 bp, Artificial Sequence
  ENSG00000179335_17 (sequence is synthesized)
cagacaaaggccacgtggtgcaagtggctggggacacttcttaggacacttcttagggatcctagtagagtggctggtatggtggtctgcagctatatggcctggtccttcccacccaga

SEQ ID NO: 629217 - DNA, 120 bp, Artificial Sequence
  ENSG00000179335_18 (sequence is synthesized)
gactgcctcctcgtgtaactgagtgctctgatgtggactgcacccacctctgcgtctcatctgcacaccccttcccaaaggcccccagtctggagtgcctcacaggaccggaggatttgc

SEQ ID NO: 629218 - DNA, 120 bp, Artificial Sequence
  ENSG00000179335_19 (sequence is synthesized)
gatttaaaaaaatctgttgccatatccctagcatcaggaagagtgcctgttcaacgaatatttgtggaatggaccaatgggtccccagctcttcatgtgcaatggctcacacctgtaatc

SEQ ID NO: 629219 - DNA, 89 bp, Artificial Sequence
  ENSG00000179335_20 (sequence is synthesized)
agcagaaacacaaaaaattagctgtgcatggtggcacatgcctgcagtctcagctacttcatgaggctgaggtgggagaattgctcaag

SEQ ID NO: 629220 - DNA, 81 bp, Artificial Sequence
  ENSG00000179335_21 (sequence is synthesized)
acaaaaaattagctgtgcatggtggcacatgcctgcagtctcagctacttcatgaggctgaggtgggagaattgctcaagc

SEQ ID NO: 629221 - DNA, 120 bp, Artificial Sequence
  ENSG00000179335_22 (sequence is synthesized)
gggcgaacagaggcaggcaaggacaggctgggcattctgcagctgaagccggagcagccgctgaccagtctggatggttggacccaggcggggccagctgccttcttgcgccgccgttct

SEQ ID NO: 629222 - DNA, 120 bp, Artificial Sequence
  ENSG00000179335_23 (sequence is synthesized)
cactgcatcttccgctctggcccaaagccacatgggagggtctgggagggagagactcggaggaggaggaggagggagtcggggcgatggctctcctcacagcgtggccctcagcagcag

SEQ ID NO: 629223 - DNA, 120 bp, Artificial Sequence
  ENSG00000179335_24 (sequence is synthesized)
atacctgtagctgtttttacttttctgtttttgaagtcagtttgtgtcttgacgtgtcccttgcaatatccctatcgttatatatgctgtgtgccttatgaaatgctgggatctggaaaa

SEQ ID NO: 629224 - DNA, 120 bp, Artificial Sequence
  ENSG00000179335_25 (sequence is synthesized)
tccaaccaaccaacccaccggctcctcaccgtctccacctctgcctttgactgacacctcaatctgtcaatcggaaccgcctaccatgcgattggtcggatggcgtttcggggggcggtg

SEQ ID NO: 629225 - DNA, 120 bp, Artificial Sequence
  ENSG00000179335_26 (sequence is synthesized)
aggactgtctcgttccccactgggcatctgaattctagctgtcctttcctgacagggcctggcagttgagcctcagcaggtttccttctctgctggctccctgcagatggcctcctgggg

SEQ ID NO: 629226 - DNA, 120 bp, Artificial Sequence
  ENSG00000179335_27 (sequence is synthesized)
tgaggttgggggtgggaggcacagagcagggactgttaaaaccttctttggacacttaagaagggttcctggcattttgtggtcactgataaacactgtggcaggtagaaatcaacgtgc

SEQ ID NO: 629227 - DNA, 120 bp, Artificial Sequence
  ENSG00000179335_28 (sequence is synthesized)
acaaccacaccgtggccaggtggagacatggcagactcaacagccgggatgcatgtaggcattctgggctgctcctctctcaggagctggagggaaaatgagcctctggagtcactaggg

SEQ ID NO: 629228 - DNA, 120 bp, Artificial Sequence
  ENSG00000179335_29 (sequence is synthesized)
ggcaggtggagggtccagggaaactttacgggactcaaagggagccagggccagtgggggttgtcatgcagaggcagaattcagctcagcgaaaggcagggtcttattctaagagcagtg

SEQ ID NO: 629229 - DNA, 120 bp, Artificial Sequence
  ENSG00000179335_30 (sequence is synthesized)
caactctgacaggggctgccttggaagtgatgagctccctgtgctgaggactggaatgccacggagggaccctgttttaggaggaggccggagtgcatggcctttcccctgaggtccctt

SEQ ID NO: 629230 - DNA, 120 bp, Artificial Sequence
  ENSG00000179335_31 (sequence is synthesized)
cctgccctgagaatctgggaaaataggtagggagaaaaaagcaggggattctctagaaggtccctttatcctgggcctgtgagccttaggcaccacagtcagcctccctgaggcctcaga

SEQ ID NO: 629231 - DNA, 120 bp, Artificial Sequence
  ENSG00000179335_32 (sequence is synthesized)
caggtaggtgcggctggagaggggtgtggtaaagggagtggccctgggcctcacagtgagaggtacccttgctggtacccctacctcttgccagatctttactcgatcctggaaccccca

SEQ ID NO: 629232 - DNA, 120 bp, Artificial Sequence
  ENSG00000179335_33 (sequence is synthesized)
tccctgtttgctcagacttgcagacaagctcaggaaggtcaagaggcgccgcaggagggttctcggtgggacagcctggccagggttggggctgcctggcctataggttaggtcactgtg

SEQ ID NO: 629233 - DNA, 120 bp, Artificial Sequence
  ENSG00000179335_34 (sequence is synthesized)
tgagctcttggactggcactggttaagcaggattggcctctactctcccacactcctttgggagctggcagtggctgagaacataaaagcctaaggatggcaaggatgctaagagcatta

SEQ ID NO: 629234 - DNA, 120 bp, Artificial Sequence
  ENSG00000179335_35 (sequence is synthesized)
actcacagatctcagggagcttgctgttgggtgggcaaaggtctggtgttgcatggggcaggctgggcatccagtatctgctctcttcagtgccggctgctcctggagtggtgtttgttg

SEQ ID NO: 629235 - DNA, 120 bp, Artificial Sequence
  ENSG00000179335_36 (sequence is synthesized)
tgcccaccactgccacaaacgccgcaccaggtcttgtagcagcgcctcctcgagggaagtctcaggttgccctgaagatcatccgcaacgtgggcaagtaccgggaggctgcccggctag

SEQ ID NO: 629236 - DNA, 120 bp, Artificial Sequence
  ENSG00000179335_37 (sequence is synthesized)
cgcctttgagctcctgggcaagaacacctttgagttcctgaaggagaataacttccagccttaccccctaccacatgtccggcacatggcctaccagctctgccacgcccttagatggcc

SEQ ID NO: 629237 - DNA, 120 bp, Artificial Sequence
  ENSG00000179335_38 (sequence is synthesized)
cccaagactgctgggtgctggcaatggggcttcttgcaaactgccccagaggggcccttagccctaccccttccccatagggtggctatgaatgtaattggggaacaccagaagagccag

SEQ ID NO: 629238 - DNA, 120 bp, Artificial Sequence
  ENSG00000179335_39 (sequence is synthesized)
atgtcagaagccctgctgcttcctgtccctctctctcctcgaaattttgggaagaactaggcaggactgaggtgagggggagggaagacctagacatggccaggaagcctctgtcaactg

SEQ ID NO: 629239 - DNA, 120 bp, Artificial Sequence
  ENSG00000179335_40 (sequence is synthesized)
catttggtgctcggacaagtgaatttcgcagaggtgatctctacccacctgtcaggactttgcatgtgggggcagaggcatcaacccagcaagacacctagtagcctggcaagttccgag

SEQ ID NO: 629240 - DNA, 120 bp, Artificial Sequence
  ENSG00000179335_41 (sequence is synthesized)
aggggcctctagtgcgcgtggtgccttagcggggccaccagtaattgcctgaatgacacagacactagcaacttccatttttaagagtgtagcagtgagagagaaaccttttttgttttt

SEQ ID NO: 629241 - DNA, 120 bp, Artificial Sequence
  ENSG00000179335_42 (sequence is synthesized)
gagaatttgaatgctgtgaacttgcaggagctgccaaccccctgccctccagattctcatgcccaatttcttttctctcctagatgagattgtggggaacctgggtgaaggcacctttgg

SEQ ID NO: 629242 - DNA, 120 bp, Artificial Sequence
  ENSG00000179335_43 (sequence is synthesized)
acagaccctccctcacaggcctcaggaggaaccaaccctgccgacaccctgacctgaacttcagccttcagaaccaagagacaatgaatgcctgccattgaagctaccgtcttcagcact

SEQ ID NO: 629243 - DNA, 120 bp, Artificial Sequence
  ENSG00000179335_44 (sequence is synthesized)
ttgttatcacagccctagcaaactcacagaggggcaactgccagccggtgccagcgtgccttccaatattcagccatctcctcatgaagcctgggatgtgattcttgtgcctctagctct

SEQ ID NO: 629244 - DNA, 120 bp, Artificial Sequence
  ENSG00000179335_45 (sequence is synthesized)
ctgaggggcactggtacctccaggacctggagtgtactggaagaaatggtgcagtccaggtacagcatggaccccagatcacccccaccccactccctttcagtgattattgtcttatga

SEQ ID NO: 629245 - DNA, 120 bp, Artificial Sequence
  ENSG00000179335_46 (sequence is synthesized)
actaggagggggagtggggcagagatgcctctttcatggctccctgcacacacagaacccctttgtactgggcacttctactcccaaggaccctgacttgcacccagcagctaaggtcat

SEQ ID NO: 629246 - DNA, 120 bp, Artificial Sequence
  ENSG00000179335_47 (sequence is synthesized)
ctcacccccacctcccacctgcccctgggccagcaggaggggcttggccatatgtaggcgagacaggacttcttgaagctgaaagatttcccaccccataaaagagccagaatgtgacaa

SEQ ID NO: 629247 - DNA, 120 bp, Artificial Sequence
  ENSG00000179335_48 (sequence is synthesized)
actccttagaggcgaagcaccatccttacacacgtagtgcctttccacctgtcgccactgggtggcatgacgagaccatcaaactgctaaggagggaggaggccttcagcccagccctgc

SEQ ID NO: 629248 - DNA, 120 bp, Artificial Sequence
  ENSG00000179335_49 (sequence is synthesized)
ctaagtgctcacctttgaggctagacacttgttggccttgggtcttgctgaagagcgacagctcattggtgatagattccaacatcttgacaaaattgggcaggaaaaggatgacctgga

SEQ ID NO: 629249 - DNA, 120 bp, Artificial Sequence
  ENSG00000179335_50 (sequence is synthesized)
catcatggttggctaggtgccttccacagctgataccctgagcccccttcacatgaggtccacacagtagagccactgtaggcctctggtgaacatttttgggattcaacctggaaaaga

SEQ ID NO: 629250 - DNA, 120 bp, Artificial Sequence
  ENSG00000179335_51 (sequence is synthesized)
aggtgaagaagcagtatcagctacatacttgccaatcccttgcaccctataccagacaattgcctgtagcacctattggtctcagatctcttacccactgctcaccaagtcccaggctcc

SEQ ID NO: 629251 - DNA, 120 bp, Artificial Sequence
  ENSG00000179335_52 (sequence is synthesized)
agagggggacaaaatccactgcaggccaggtctatagggtggcactcctgttgtcccaaaccccaacctcacatcattgctgggtcctcccactaagtggttcacccagatcttgctcca

SEQ ID NO: 629252 - DNA, 120 bp, Artificial Sequence
  ENSG00000179335_53 (sequence is synthesized)
cacaacactgttgccacaacaccgctttgctgacccatgaacacttaatagttcctctgcagccttgtctgctcttcttccccaacgtgtctgcttcactccagcagggctggtctcatc

SEQ ID NO: 629253 - DNA, 120 bp, Artificial Sequence
  ENSG00000179335_54 (sequence is synthesized)
ctctcctgcacttgtaaggctctttcctgcttatgctcaaactacatcccctgcccagaaagcctttcactttccaaactctgaaccgccttttcttggagatccagttcaagacttacc

SEQ ID NO: 629254 - DNA, 120 bp, Artificial Sequence
  ENSG00000179335_55 (sequence is synthesized)
tctgctgggattactctggctcatgcctttacctctcctcaactcctaataagctcacagcaagtaccatagctctccattctcctcagtcagttgccaatggttctctttactgagctt

SEQ ID NO: 629255 - DNA, 120 bp, Artificial Sequence
  ENSG00000179335_56 (sequence is synthesized)
agtagcttactgaagttaatgaaagcaatgctgcaggcattaacagtatctatttcataggatgctgtgcagattatcggatgcccagcacttagcagtgcctaacacaaagaaggtaag

SEQ ID NO: 629256 - DNA, 120 bp, Artificial Sequence
  ENSG00000179335_57 (sequence is synthesized)
gtactcagtcagtgctgaccatggcggaggcagcaggccaagggttacctggcctcctaggctagcagctgccttggatgaagttgtcacttccagttttctgctattcaaagctgagac

SEQ ID NO: 629257 - DNA, 120 bp, Artificial Sequence
  ENSG00000179335_58 (sequence is synthesized)
tcctctagactcagagaagccacaaataaggagataaagaggattagccccagagctgtgcccaactcataggcagcacagttggctcacggggcagcaatgtagggaggagatggacgg

SEQ ID NO: 629258 - DNA, 120 bp, Artificial Sequence
  ENSG00000179335_59 (sequence is synthesized)
caaggccataggtccctgcctagtggcagagcaatgatagtcacttaccggtttcccaaagggaggaagatgacaagatgttgtcaagctaagaggagcttcataactgcccccattccc

SEQ ID NO: 629259 - DNA, 120 bp, Artificial Sequence
  ENSG00000179335_60 (sequence is synthesized)
aaacacattttggagaatttaacaatctactctatattccagacaccaaaccattcgccttcccatttctgcatttagaggaaatatgatgagaattgctcccttcagaggatgctgcag

SEQ ID NO: 629260 - DNA, 120 bp, Artificial Sequence
  ENSG00000179335_61 (sequence is synthesized)
agttgtggaatctgactcactttgttctctaaaagggttcttcctctcagggagaacctctcccacccccaatcaaaagaagcagagcatggcattcacacacccagcggcaaggtgtag

SEQ ID NO: 629261 - DNA, 120 bp, Artificial Sequence
  ENSG00000179335_62 (sequence is synthesized)
agtatatgggcactggaaatggacctatgtggattagaggcctggctggactgtgtaccagcagtatcatgtgggcaagtccctcagctctctgagccacagtgtgcttatccaaaaaca

SEQ ID NO: 629262 - DNA, 120 bp, Artificial Sequence
  ENSG00000179335_63 (sequence is synthesized)
cagggctattatttagctttgaggtgaagttatgaggaccacattaaattatgttgtgaaagcactgtggaacactgcatggcacctgacatacattaaacttcaagattactaaccacg

SEQ ID NO: 629263 - DNA, 120 bp, Artificial Sequence
  ENSG00000179335_64 (sequence is synthesized)
ggtctgatttctcaacatcagcaactgctacaaaggacaggagatggacctttggatagttcagacactaagagaaaagactggcacaaggacagccagccccaagaagctggctagaga

SEQ ID NO: 629264 - DNA, 120 bp, Artificial Sequence
  ENSG00000179335_65 (sequence is synthesized)
ggagtgtgatttggtaaggacattcagctcctgctccaaaactaatgtttctgggaagccacttaatggtctcaaagtgcccccaacagtggctctgggaggaggtgcaggagacaccag

SEQ ID NO: 629265 - DNA, 120 bp, Artificial Sequence
  ENSG00000179335_66 (sequence is synthesized)
acacacgggcctgatgctctttcagagggcacctcacactaccccctcctgtaggcatttccctggctcttccctggcacaggagagcccaaggatctaacagctaggaagcaggcctaa

SEQ ID NO: 629266 - DNA, 120 bp, Artificial Sequence
  ENSG00000179335_67 (sequence is synthesized)
atcaaagaaaaaggaaaaactaacactccaacccccaactcaaataggatgagggaggtggaaatcttacatctggcttggagtaagcctgcttgaattaagatcacttcagaatcagga

SEQ ID NO: 629267 - DNA, 120 bp, Artificial Sequence
  ENSG00000179335_68 (sequence is synthesized)
gatgccttccatccaaacacattatcaggcccagagaatgaaaataggctggagtgaggagctacaggatttatctgcaatatcagttttctggcaagcactcccaaacaccatggctgg

SEQ ID NO: 629268 - DNA, 120 bp, Artificial Sequence
  ENSG00000179335_69 (sequence is synthesized)
aagcacaagccaaggaccaggttccattttgcaaatagggaaggggccctgtgggaagcaacatcctatcatgtgaggctttggatctgtgagtgctgctcagggaaaggaggctttcct

SEQ ID NO: 629269 - DNA, 120 bp, Artificial Sequence
  ENSG00000179335_70 (sequence is synthesized)
tgccccagtgaacccagatctgccctgctctttggaagtggcctccccactccagacaccactctcccacaaggttgcctacatcctcctctttaccgaaaaatccaacaggcacttgtc

SEQ ID NO: 629270 - DNA, 120 bp, Artificial Sequence
  ENSG00000179335_71 (sequence is synthesized)
aactctaattttgattgatctctcagcactaccattgccggccgttccttttttcttcaaagactatttccttggttcttacacgctaccctcttggtttcttacctctcctgccttctt

SEQ ID NO: 629271 - DNA, 120 bp, Artificial Sequence
  ENSG00000179335_72 (sequence is synthesized)
cttcatccttctaactgtgccttacatgccgacgttccccagaatcccaccctaggccctttctgttcacaccttctccttatatgatctcatctactcttacaccatctacaagctgac

SEQ ID NO: 629272 - DNA, 82 bp, Artificial Sequence
  ENSG00000179335_73 (sequence is synthesized)
tatatgatctcatctactcttacaccatctacaagctgacaactcctaaatctctagcatcagctaagacccttttctgaac

SEQ ID NO: 629273 - DNA, 80 bp, Artificial Sequence
  ENSG00000179335_74 (sequence is synthesized)
gtatagggattacaggtgtgagtcactgcgcctggcctaagtttcagatccttatagctaagagactatttggatatctc

SEQ ID NO: 629274 - DNA, 120 bp, Artificial Sequence
  ENSG00000179335_75 (sequence is synthesized)
gtttcagatccttatagctaagagactatttggatatctcacaggtattccaaactcaacacatccaaaacaaaacccaccatctctcccaaacctgctcttcttcccatgtttcctatc

SEQ ID NO: 629275 - DNA, 120 bp, Artificial Sequence
  ENSG00000179335_76 (sequence is synthesized)
acagtgaatgtaaccaccatccaatcagatgtccaggctagaaaacttgaagttcactgatttctgacattatactttccattacctctaaaatccattcaattaccttgccctgctgaa

SEQ ID NO: 629276 - DNA, 120 bp, Artificial Sequence
  ENSG00000179335_77 (sequence is synthesized)
caacaacaacaacaacaacaacaacacccatctgtccacttctctttctaagagacaaaaaaaaaaaaaagagacagacaaagtctcactacgttgcccaggctggcctcgaactcctgg

SEQ ID NO: 629277 - DNA, 120 bp, Artificial Sequence
  ENSG00000179335_78 (sequence is synthesized)
actcctgggctcaagcagtcctcccactgcagcctctggagtaactgggattataggcatgcctcaccaaacctggtttgtccacttttctgatccctgcttccctagttgggccaccat

SEQ ID NO: 629278 - DNA, 120 bp, Artificial Sequence
  ENSG00000179335_79 (sequence is synthesized)
gccaccatcacttgggccctggctcagttttctaagttttgcagttttctacctgatctcactgccttcagtcttgcctccattgaattgactgtcctcattgtagctaaaaatcatctt

SEQ ID NO: 629279 - DNA, 120 bp, Artificial Sequence
  ENSG00000179335_80 (sequence is synthesized)
tttaaaacacaagactaactatgtcatagctctactgaaatgtcttcagcagctccctaccactcagctgtactgaggccctactttccagccacatagtgacttacggattgccaacaa

SEQ ID NO: 629280 - DNA, 120 bp, Artificial Sequence
  ENSG00000179335_81 (sequence is synthesized)
gacttacggattgccaacaaccatgtgccatggtctctcgattctctctgcccttggcacatgctactccctgtacttagaataccttcttcttggccaggtgcaatggctcacacctgt

SEQ ID NO: 629281 - DNA, 120 bp, Artificial Sequence
  ENSG00000179335_82 (sequence is synthesized)
aaaaaaaaaaaaaaagaatgccttcttctttcttgcttgcccctgttaatcaccacttgttcgtcagggctcagcttggatgccactgctccagaagggtgactggtttctccagcctgg

SEQ ID NO: 629282 - DNA, 120 bp, Artificial Sequence
  ENSG00000179335_83 (sequence is synthesized)
ggcaataatatggcttactggagaattttgtttcctctactacagcactatactttctagagacctcattgggctactagaggaaaggcacagtattttattcttcgtgtccccggtgtc

SEQ ID NO: 629283 - DNA, 120 bp, Artificial Sequence
  ENSG00000179335_84 (sequence is synthesized)
tagcagaaggtctggcacctggtatcagtctgtctacaaataaaataaggcactgcccttgatatatgagcataaggggcaggtgggaaggtgccaaactccagctcccctactcagttg

SEQ ID NO: 629284 - DNA, 120 bp, Artificial Sequence
  ENSG00000179335_85 (sequence is synthesized)
agtaaatgatgagtgccaaaggccaggtctccgaaggttcctagaaggaaggcttctgatagttagcaggagtctcaggcccgatggctgctatcaggagagagtcaaaaggcagcttgc

SEQ ID NO: 629285 - DNA, 120 bp, Artificial Sequence
  ENSG00000179335_86 (sequence is synthesized)
cagaagaataatgaggacatctaggagatgggtctgaggaggggcaaagaaacctcacagcatccaggaaagtgacttcagagagacactcccatcagatgagcagaaactgcctaatga

SEQ ID NO: 629286 - DNA, 120 bp, Artificial Sequence
  ENSG00000179335_87 (sequence is synthesized)
actcgtatgtgtgtatgggaggcactgtggtggtggccaggcagagcatccttactccacattgagtccctgccagtttatagacatttacctgttaggtcctccgaggagggtcagtgc

SEQ ID NO: 629287 - DNA, 120 bp, Artificial Sequence
  ENSG00000179335_88 (sequence is synthesized)
catctgactggcacacacacctgtcatctccagtctccgctcaagggtcagcccatgcttctcagccacggacaacagctttttatgcagctcataggaaatacttgggacaaccaggcc

SEQ ID NO: 629288 - DNA, 120 bp, Artificial Sequence
  ENSG00000179335_89 (sequence is synthesized)
agagtctgcagttcaaaaggagaagagaaagggaaagtgactacagaaaccaagtccaaaccgggtatactctatccaagattctgcaaatgccaacattttaccatggatcacccctgg

SEQ ID NO: 629289 - DNA, 120 bp, Artificial Sequence
  ENSG00000179335_90 (sequence is synthesized)
cccatcctcttcatcttccgggactaaggcacgctctgcagctctgcagagctcaagtagtgactggtgaaccaagtaacaacttgttccaggtcaccacagagtggggacaaacttaag

SEQ ID NO: 629290 - DNA, 120 bp, Artificial Sequence
  ENSG00000179335_91 (sequence is synthesized)
ctcccttagcaatttagctttagaccacaaaggccaaatctaccaggatatatttagtgctatcgagaccagcacacagcctgtaacagcaacctatcaggcacatgagaagagaacatg

SEQ ID NO: 629291 - DNA, 120 bp, Artificial Sequence
  ENSG00000179335_92 (sequence is synthesized)
attttcccaaagtgggggaaatgccatcttgggcagcggggcttcctcacaagcaggccccttgtccttcctgagaagtggaacagacactagctaaccctaatggccctctggtccctg

SEQ ID NO: 629292 - DNA, 120 bp, Artificial Sequence
  ENSG00000179335_93 (sequence is synthesized)
ctgttctcctcaactgtagggcaggaggacttgttccatctgcttccctcttcctcttccttctctcttctatttaccccttcctttttgattaagaaacttagctagcaaagttgtttt

SEQ ID NO: 629293 - DNA, 120 bp, Artificial Sequence
  ENSG00000179335_94 (sequence is synthesized)
ctcaaataatttatcattttctccccatctgagttgggtgtaacccagtactcacgaaacagggaagcagtacaagttaagtaagctatggctggctttaaaaaagggtaacttttataa

SEQ ID NO: 629294 - DNA, 120 bp, Artificial Sequence
  ENSG00000179335_95 (sequence is synthesized)
aagttggggagaattagtcactgaaagtacactgtggaaaatacttggtttttcaaggctcaaagccaacatctacagcagctggtgtatgtgaagaagtctatagtattattatatgca

SEQ ID NO: 629295 - DNA, 120 bp, Artificial Sequence
  ENSG00000179335_96 (sequence is synthesized)
ccagtgtcaacataccaggaaagaaacagcaaacccaaaaatttggatctgcaatggacagctcttaccttgacaaccaaggtattgctccctccaagaagccaatgccatcttacaaat

SEQ ID NO: 629296 - DNA, 120 bp, Artificial Sequence
  ENSG00000179335_97 (sequence is synthesized)
gccaaagccactgggctaaccagcagaccctttcccaaagagccccacttggcttcaccggccagtggaccaaccaacgcagattccaatcagcaagccactgtgggactgcacgtcact

SEQ ID NO: 629297 - DNA, 120 bp, Artificial Sequence
  ENSG00000179335_98 (sequence is synthesized)
cactttgtccagctagatcaggtacctttttagatcctgtgtcctcaattatactggactgtcaactgcctgaggtaaggaaattaatcttttacttcttcagccttcgccttctcaact

SEQ ID NO: 629298 - DNA, 120 bp, Artificial Sequence
  ENSG00000179335_99 (sequence is synthesized)
tgttccagctacacttatcaacggagttgagttcttatcaggtcctcagacatataaatgatgcaaacctagtgccatttctggtctggcctaactctaaggtagaagagttagggaata

SEQ ID NO: 629299 - DNA, 120 bp, Artificial Sequence
  ENSG00000179335_100 (sequence is synthesized)
aaagttaataaaagttttcagtacatttatctccttccattgttccagagccttgtctagaaaaatctgttttcttcactggtcctgtcgggagaaatctcttgaggttatctatcaggt

SEQ ID NO: 629300 - DNA, 120 bp, Artificial Sequence
  ENSG00000179335_101 (sequence is synthesized)
ccagtcctacctgcatattcctaaagccacagagaatgaggctatagcttcatgttttaacaacaggaaaccaagcacaaagactgaaactataggacccaggtctgtatcctctcaggg

SEQ ID NO: 629301 - DNA, 120 bp, Artificial Sequence
  ENSG00000179335_102 (sequence is synthesized)
aaggcagaataacaatgtcatgtaatgatgatgataaaaaaggtctaacgtatcaaataaacactaacactatcctgttggctaactgagcccctctacctgcccaagtcctattcctgg

SEQ ID NO: 629302 - DNA, 120 bp, Artificial Sequence
  ENSG00000179335_103 (sequence is synthesized)
gctggggagaggcaacaaacagtgccattaggagcactgagtctctcctcccacctctttctgaaatgtcagtcattggtatctcaggtgccagtgctggaggctgcagactgaccttgc

SEQ ID NO: 629303 - DNA, 120 bp, Artificial Sequence
  ENSG00000179335_104 (sequence is synthesized)
atgtcaacagctgattaaaacagccatttttatggcctgcttcagacacgcacatattatcagaactaattaggctgaacaattttcaaaagtcctaagccacgaacaactcaaacctgt

SEQ ID NO: 629304 - DNA, 120 bp, Artificial Sequence
  ENSG00000179335_105 (sequence is synthesized)
cagacaagtcatgcacctgactacttcaaacaccctctttacctgcagagtcacgcaaggcagagctttcactcgtctatgcatttcttcacctatttatcaggactctttctgttagat

SEQ ID NO: 629305 - DNA, 120 bp, Artificial Sequence
  ENSG00000179335_106 (sequence is synthesized)
ttgaaatgggtcagggcagtgagtcttgggcctgctactccacaaatcaagcattctttctaggtctggctcttgtgctacgtgtacaggcaggcagcccctcccctgccccctcattct

SEQ ID NO: 629306 - DNA, 120 bp, Artificial Sequence
  ENSG00000179335_107 (sequence is synthesized)
gagggctctctgggagcaggcagaagcattttctgctagctgtgccctcacagtccttaagagtacaaaacttaatggtacaggagaggagacatcaccccccaccggctggctagatgc

SEQ ID NO: 629307 - DNA, 120 bp, Artificial Sequence
  ENSG00000179335_108 (sequence is synthesized)
tgctgctggaagctgtgagtctcttaccacctcctcactgatctttgttgggggaaggggcactgttggtgaatcagcatatttttgcagcctagagaaagacaaagccaagagcctttc

SEQ ID NO: 629308 - DNA, 120 bp, Artificial Sequence
  ENSG00000179335_109 (sequence is synthesized)
tgctcagagtctggcagttatggggtctagaactctactctgactgttcctctgaaaggaacgtacaaacaccacaaaatgttccttttaaacatttatacacgtaagtccaacaagttg

SEQ ID NO: 629309 - DNA, 120 bp, Artificial Sequence
  ENSG00000179335_110 (sequence is synthesized)
gactggcttatcagaaacagaccaagggaataaaataaattccaaaggaaaggaaccaagaacatagcgtgtaaattgcaaacaacaacactgccactgccaaagcctgaacatgggcca

SEQ ID NO: 629310 - DNA, 120 bp, Artificial Sequence
  ENSG00000179335_111 (sequence is synthesized)
agtctaattatgtttgagttggaaggtagatctttattgttcgggaatcaaggcagtaaaatcagttggtagggtttctttgagcattaatatgtattttacagctgctggtgaaacaag

SEQ ID NO: 629311 - DNA, 120 bp, Artificial Sequence
  ENSG00000179335_112 (sequence is synthesized)
aaagggagagataattataaccagatcgtgacaagcagagaacttcttaggatctgattgaccttagggtatcaaggaagacaacaagtacactcagtacaggccaggaaagaaaactcc

SEQ ID NO: 629312 - DNA, 120 bp, Artificial Sequence
  ENSG00000179335_113 (sequence is synthesized)
tccttgcacacctgatttccactgcatgaggctgaggctgtctcttcggaccatgggacgcagtggtccagcagtgcccgtgccggctgcagtctgccccttgtcaggtcatcactttgg

SEQ ID NO: 629313 - DNA, 120 bp, Artificial Sequence
  ENSG00000179335_114 (sequence is synthesized)
cactgctcattccagcacacagcatttcaggcctttccctcccttatggacacatatatgcgtccccactccccctgacacagacacccttcagtagtaccatgtccaaggttcctctct

SEQ ID NO: 629314 - DNA, 120 bp, Artificial Sequence
  ENSG00000179335_115 (sequence is synthesized)
ccttcagacctgcccagtctttctgttgtgtaacaaagatcccacaacaaagtgttatctcagatctaactcaatcctctcactgattggccctttaattggaaaggctgcatgtgtccc

SEQ ID NO: 629315 - DNA, 120 bp, Artificial Sequence
  ENSG00000179335_116 (sequence is synthesized)
aagtcttatcaataaggagcacagctcatttacaggcatgggatttctccaggactatgacttctgattctcttctgtggcagtcaacaaaactgagtgctgatgtcacactggttcctt

SEQ ID NO: 629316 - DNA, 120 bp, Artificial Sequence
  ENSG00000179335_117 (sequence is synthesized)
tagggatataaatccactggtaaatttataccccctgaccagcaatgtacagagtccctggagatctacactaaagctaccacaaactggtagtaatgcaatttagtgtcaagtgttctc

SEQ ID NO: 629317 - DNA, 120 bp, Artificial Sequence
  ENSG00000179335_118 (sequence is synthesized)
tgaaggaaggatttgttataagaaacctaactacacattcacgatactctttattatgacccacaagacctgctgtgatctggcctgtctacctcactacctttacctggtacccaacat

SEQ ID NO: 629318 - DNA, 120 bp, Artificial Sequence
  ENSG00000179335_119 (sequence is synthesized)
gtaccccagaccccttggccaccttctggttcctaaattctccaagttccttctggcctcaagagacagttcgcttcacatgctttctccatcccaacactttattctctcttctggggc

SEQ ID NO: 629319 - DNA, 120 bp, Artificial Sequence
  ENSG00000179335_120 (sequence is synthesized)
tctattctctcttccaatgctacccctacacagcgggctcctcatctgtcaggtgtcagcacgctgcttacttcccttcattgcattcaatacatctgactccactcttaagtggtagtt

SEQ ID NO: 629320 - DNA, 85 bp, Artificial Sequence
  ENSG00000179335_121 (sequence is synthesized)
gtacatatatatatatatatatataaataaatctgactccccacctcttcccttccccacttacaactagaccagccccatgtcc

SEQ ID NO: 629321 - DNA, 120 bp, Artificial Sequence
  ENSG00000179335_122 (sequence is synthesized)
tcttcccttccccacttacaactagaccagccccatgtccacagtggacctcattccttcatactaaagctccactggaacaagctttgaactttaagaggcaaagaactgctcaacaaa

SEQ ID NO: 629322 - DNA, 120 bp, Artificial Sequence
  ENSG00000179335_123 (sequence is synthesized)
aacctactaattatgaagggaaaaattatctttacgaggaagaaatctggtggtcaacaccttaccaagtggtcaaacagccccagtgatgggacaaggggatacaatgtactccctgat

SEQ ID NO: 629323 - DNA, 120 bp, Artificial Sequence
  ENSG00000179335_124 (sequence is synthesized)
gtgacgtactccctgatgtgacgtactccctgatgtgacgccttgagaaagacacagccctaccaaaatcctagaaaacatgtttaacatgaatcagatcaaaaggaaacaaacaataca

SEQ ID NO: 629324 - DNA, 120 bp, Artificial Sequence
  ENSG00000179335_125 (sequence is synthesized)
tcaaaactaagacattctgcaaatcaattggcctagattcttcactaatatcagtatcacaaaggacaacaaaagttgtaggaactgttctagtttaaaggaaacagaagagatatgaca

SEQ ID NO: 629325 - DNA, 120 bp, Artificial Sequence
  ENSG00000179335_126 (sequence is synthesized)
gctgaatgtaatgtgcaatggatgattaaaaatacagctataaaggatattactgggataattgggaagttttgcatacggagtatattagatagtatttttgtaataatttaaattttg

SEQ ID NO: 629326 - DNA, 120 bp, Artificial Sequence
  ENSG00000179335_127 (sequence is synthesized)
ctgagagcaatcttgtagtgtggttgtgtagagcaatatatatcacactgaatttatgtgctgtggaagtatttagggatgaaatctaatgatgagtacaactaaatctcaaatggttca

SEQ ID NO: 629327 - DNA, 120 bp, Artificial Sequence
  ENSG00000179335_128 (sequence is synthesized)
aaggaaaggagctgctcattgtccaggagggcggaagtagagtcctccaaggaggcatcactgcctcctcgatccagtccagcaaggcgtcccagaggcaaggggacctgctgtggcttc

SEQ ID NO: 629328 - DNA, 120 bp, Artificial Sequence
  ENSG00000179335_129 (sequence is synthesized)
cggtgaggaggggcaggtgcctgtgtgatggggcatgtgaagaaatggcagaaaggctgccgccccaggcctcgtccagttgcaggccacatgcccagagcagggcctggccagtattcc

SEQ ID NO: 629329 - DNA, 120 bp, Artificial Sequence
  ENSG00000179335_130 (sequence is synthesized)
tagcatggagggttgtaaggtctctggagcccacattgcgctcagtcccctggggaagcaaagccagttgtgtatttccgaggttacgtgcggtcttctcttctcccccatccctcttcc

SEQ ID NO: 629330 - DNA, 120 bp, Artificial Sequence
  ENSG00000179335_131 (sequence is synthesized)
ctgcctccctcctgccggccttgaggcccctgaggagcagtggagaggccaggtgtcttctctgcccagcgctttctgtgacttctttgagtggctacaggttgagggttgactgtgcgg

SEQ ID NO: 629331 - DNA, 120 bp, Artificial Sequence
  ENSG00000179335_132 (sequence is synthesized)
gcgattgcagcgtggccctttcacctctttgcacactgccacatgctgccacaggatggcagtgcaggtctggctctgtttctctgtttggtgccctctatcgatcgtcgtgaggcttgg

SEQ ID NO: 629332 - DNA, 120 bp, Artificial Sequence
  ENSG00000179335_133 (sequence is synthesized)
gatgggcctagattgtgagcagcatgggtgccaaggccagggcaggagctggcatggggcctgtgtgggccattgtggtaggaagcctggcagtcgactggcccagaggatcccaggctg

SEQ ID NO: 629333 - DNA, 120 bp, Artificial Sequence
  ENSG00000179335_134 (sequence is synthesized)
ctttccttcttgaggctggtggcaggagggctgctgacggaaggctgtttctggtagtgatggtgaaatctggccaaggatgccgtctggaggcaggtagcagcttggctgtgagtggca

SEQ ID NO: 629334 - DNA, 120 bp, Artificial Sequence
  ENSG00000179335_135 (sequence is synthesized)
agttttctcatctggaaagtggggcctcgtaatcctgtccgacccggcgcgggacagtaggtgtcagggattttggtgaccccacgctcgaggcctctgcaaaagggggctgtccagtgg

SEQ ID NO: 629335 - DNA, 120 bp, Artificial Sequence
  ENSG00000179335_136 (sequence is synthesized)
cccagagacgcagccggcggggcttttgtctagcgggggagtcttaactgagaggccacgcaggccggcaggaagccgctccacaggagggggctcaaggagaggggatctcctccctcc

SEQ ID NO: 629336 - DNA, 120 bp, Artificial Sequence
  ENSG00000179335_137 (sequence is synthesized)
agactccggccccgccagagtagctctagggtatcttcccagaaactgccccgcacgcactggcgagctgggagcgccaccacggctttcaaaaaacccgcacacaccaagataataatg

SEQ ID NO: 629337 - DNA, 120 bp, Artificial Sequence
  ENSG00000179335_138 (sequence is synthesized)
tgtcgttcgctcgtttcgcgcaagcggagtcgcgtccgccttcccgagctccggcacacagacctcaggccgctctcgcgctctccggggccccgagaacaatgcccgtcctctccgcgc

SEQ ID NO: 629338 - DNA, 120 bp, Artificial Sequence
  ENSG00000179335_139 (sequence is synthesized)
aatgcccgtcctctccgcgcgcaggagggagttggcggaccacgcggggtcggggcgacggagcgggcccagccccacggccaggtcggggccccacctctcggctctgagagcccagcc

SEQ ID NO: 629339 - DNA, 120 bp, Artificial Sequence
  ENSG00000179335_140 (sequence is synthesized)
caggtcgggggacctacgtgcgccgcgacacggcgggaggcgggccgggccaggctcgtcccctcggccctcccggaactagtctcctaggccgcggcgcccgccggagcggagagggct

SEQ ID NO: 629340 - DNA, 120 bp, Artificial Sequence
  ENSG00000179335_141 (sequence is synthesized)
ggtgccccggagccttcgagtcgggggctagagcggccaggcctccgagccgggtcgagccgaggctggcgacggctgcgtcacgcgagggggcggggctgccacgggcggaggtcgcag

SEQ ID NO: 629341 - DNA, 120 bp, Artificial Sequence
  ENSG00000179335_142 (sequence is synthesized)
tcaggagcaaccgggaagccccagcagccccatggctggaggtggctggctgtgtgtttagcagggctctctgttcctcgtggcctagatgcatcactgtaagcgataccgctcccctga

SEQ ID NO: 629342 - DNA, 120 bp, Artificial Sequence
  ENSG00000179335_143 (sequence is synthesized)
agatccactacaggctgcgcctctgcccctgcgaggggcacccctgggtctctgggaaacggaatggagggtcttatggaagagaaggtttggaaccaccgctggagggaaggggagaag

SEQ ID NO: 629343 - DNA, 120 bp, Artificial Sequence
  ENSG00000179335_144 (sequence is synthesized)
aaagcaagcaggagtggcgcgaacaggaagggactagggatagaagccgggcttggacacagtgaggcacgaaccccgacagacacagagacagacaaggggtgctgatctcctcactgg

SEQ ID NO: 629344 - DNA, 120 bp, Artificial Sequence
  ENSG00000179335_145 (sequence is synthesized)
gcggggtgggcaggaaaaggaacaggagctggagctagagcgagggctgcgagcggcgagtggatacccggcctcagggaggagcttccaggagggcaggggtctcctttggagcagcac

SEQ ID NO: 629345 - DNA, 120 bp, Artificial Sequence
  ENSG00000179335_146 (sequence is synthesized)
cggggacgtttgctcggcaagggctttttgtgcgaagtaaccgaagccagtcaggctaatggcggcagagagaaggatttattcttgcacccagggtgtgcggaggagcccaagggcatt

SEQ ID NO: 629346 - DNA, 120 bp, Artificial Sequence
  ENSG00000179335_147 (sequence is synthesized)
tggacctgtgttgacgtccggaagggcccggaacccaggaagctctgcccgcagagggtattcctctccctctgaagaccacctcaaagctcaactttatcacctccacgcatgagaccg

SEQ ID NO: 629347 - DNA, 120 bp, Artificial Sequence
  ENSG00000179335_148 (sequence is synthesized)
ccggcggctgaactaaaatctcaccatcccaattccagtttctgggaattgtcacctccattcgctctcattagaaatccagcttttttcacgaggtgaataacagggcagttgacagtt

SEQ ID NO: 629348 - DNA, 120 bp, Artificial Sequence
  ENSG00000179335_149 (sequence is synthesized)
cccaagttttctgtgtccaatcttcagccctggagggactcttctgctccaagtccagcgatcccgggagggggcccactggtccagtacggctcagtacccagccctggatccaccagc

SEQ ID NO: 629349 - DNA, 120 bp, Artificial Sequence
  ENSG00000179335_150 (sequence is synthesized)
tgacgctggaaggagtgggtcatgaagaactcagcacgaacgcagctgggtacgaattcccagagatgtcctgtccctccacggtaccaaggacccctcctttaagaaactgcttcactg

SEQ ID NO: 629350 - DNA, 120 bp, Artificial Sequence
  ENSG00000179335_151 (sequence is synthesized)
agaaactgcttcactgaaggcgcagatggagggagggatcggcaacagagttcagaggggttccgggggcacatggctcagccggaggaagcaggctgaggcaggagagtcgcttgaacc

SEQ ID NO: 629351 - DNA, 79 bp, Artificial Sequence
  ENSG00000179335_152 (sequence is synthesized)
ctttgggactaaagcccgtatgcagccgcccctgggcacatatacgtggttttatgactttggtactgactcagcctaa

SEQ ID NO: 629352 - DNA, 120 bp, Artificial Sequence
  ENSG00000179335_153 (sequence is synthesized)
atatacgtggttttatgactttggtactgactcagcctaactggaccccagatacaggagaaactgagaaggacggagaacataagcactgtccccggtgcactgtgtcccatgtcatcc

SEQ ID NO: 629353 - DNA, 120 bp, Artificial Sequence
  ENSG00000179335_154 (sequence is synthesized)
tcatcacttcaattgagcctgcatcctgctcctgtggctgactggggaggggccagctgcatccccatctaggggccctgctcccccatcctctcatgcctgcagaaaccttcaccctgg

SEQ ID NO: 629354 - DNA, 120 bp, Artificial Sequence
  ENSG00000179335_155 (sequence is synthesized)
ctcttgggtttgggcaggtccagcctgcagaggggagcggatctcctcctgggccctggcctgccctccctggctggcatgtggactaggggcctgggggctcactggatggtgcccgcc

SEQ ID NO: 629355 - DNA, 120 bp, Artificial Sequence
  ENSG00000179335_156 (sequence is synthesized)
cagactcacggcagctcctcctgcgtgcactctggcctgtgcagctgtgtaagggtcctgcggttacatgatgggaaaagcaagagggagcatctggggccctgaagtcccaagtcacac

SEQ ID NO: 629356 - DNA, 120 bp, Artificial Sequence
  ENSG00000179335_157 (sequence is synthesized)
ccaaaccaaaccacccagccaggaagatagcaggaagcaaattggaggcgttctgggttgaactgtatccccagcaacaacaacaaaaagatatattgacatccccagtacctcctaatg

SEQ ID NO: 629357 - DNA, 120 bp, Artificial Sequence
  ENSG00000179335_158 (sequence is synthesized)
agacagaatcattacagaggtaatcagactaaaatgaagtcaataggctgggctttcatccaaggtgactatacaaaggggaaatgtggacacgggcacacacagagggagacaccacgc

SEQ ID NO: 629358 - DNA, 120 bp, Artificial Sequence
  ENSG00000179335_159 (sequence is synthesized)
tccaagagcctcgccctgctggaagtgcactgctagtctggttcatcagccactctgcacaggacccctgcccaggacccagggtctgcattttaggccatccttgctggataggcccag

SEQ ID NO: 629359 - DNA, 120 bp, Artificial Sequence
  ENSG00000179335_160 (sequence is synthesized)
gatggtccgccccgactgcgggtttctagccctcgcgtggcgtggggacaattaggcgccacgccctgtcgcttcactgcgcgacgctcgcgaggccggggacgccactcccagaccggg

SEQ ID NO: 629360 - DNA, 120 bp, Artificial Sequence
  ENSG00000179335_161 (sequence is synthesized)
cgggacgcgcacgctcacagtgaggtctcaaaagatccccacctcagttttctcatctggaaagtggggcctcgtaatcctgtccgacccggcgcgggacaatgcatcactgtaagcgat

SEQ ID NO: 629361 - DNA, 120 bp, Artificial Sequence
  ENSG00000179344_0 (sequence is synthesized)
aggatggattagagacctctattttgaggcgcactgatgtaggggctgaggaaggacattgagggcaccttcaggtctctctgcctattcttccttgccccaactccattccaggtgtac

SEQ ID NO: 629362 - DNA, 120 bp, Artificial Sequence
  ENSG00000179344_1 (sequence is synthesized)
atcagatccatcaggtccgagctgtgttgactaccactgcttttcccttcgtctcagttatgtcttggaagaaggctttgcggatccccggagaccttcgggtagcaactgtcaccttga

SEQ ID NO: 629363 - DNA, 120 bp, Artificial Sequence
  ENSG00000179344_2 (sequence is synthesized)
tgctggcgatgctgagctccctactggctgagggcagagactctcccgaggatttcgtgttccagtttaagggcatgtgctacttcaccaacgggacggagcgcgtgcgtcttgtgacca

SEQ ID NO: 629364 - DNA, 120 bp, Artificial Sequence
  ENSG00000179344_3 (sequence is synthesized)
gatacatctataaccgagaggagtacgcgcgcttcgacagcgacgtgggggtgtaccgcgcggtgacgccgcaggggcggcctgatgccgagtactggaacagccagaaggaagtcctgg

SEQ ID NO: 629365 - DNA, 120 bp, Artificial Sequence
  ENSG00000179344_4 (sequence is synthesized)
aggggacccgggcggagttggacacggtgtgcagacacaactacgaggtggcgttccgcgggatcttgcagaggagagtggagcccacagtgaccatctccccatccaggacagaggccc

SEQ ID NO: 629366 - DNA, 120 bp, Artificial Sequence
  ENSG00000179344_5 (sequence is synthesized)
tcaaccaccacaacctgctggtctgctcggtgacagatttctatccaggccagatcaaagtccggtggtttcggaatgatcaggaggagacagccggcgttgtgtccaccccccttatta

SEQ ID NO: 629367 - DNA, 120 bp, Artificial Sequence
  ENSG00000179344_6 (sequence is synthesized)
ggaatggtgactggactttccagatcctggtgatgctggaaatgactccccagcgtggagatgtctacacctgccacgtggagcaccccagcctccagagccccatcaccgtggagtggc

SEQ ID NO: 629368 - DNA, 120 bp, Artificial Sequence
  ENSG00000179344_7 (sequence is synthesized)
tgctggggctgatcttccttgggctgggccttatcatccgtcaaaggagtcagaaagggcttctgcactgactcctgagactattttaactaggattggttatcactcttctgtgatgcc

SEQ ID NO: 629369 - DNA, 120 bp, Artificial Sequence
  ENSG00000179344_8 (sequence is synthesized)
tgcttatgcctgcccagaattcccagctgcctgtgtcagcttgtccccctgagatcaaagtcctacagtggctgtcacgcagccaccaggtcatctcctttcatccccaccccaaggcgc

SEQ ID NO: 629370 - DNA, 120 bp, Artificial Sequence
  ENSG00000179344_9 (sequence is synthesized)
tggctgtgactctgcttcctgcactgacccagagcctctgcctgtgcatggccagctgcgtctactcaggtcccaaggggtttctgtttctattctttcctcagactgctcaagagaagc

SEQ ID NO: 629371 - DNA, 120 bp, Artificial Sequence
  ENSG00000179344_10 (sequence is synthesized)
acatgaaaaacattacctgactttagagcttttttacataattaaacatgatcctgagttatctgtattctgaactttcttaattgagaagaggcaggaaatcactgcagaatgaaggaa

SEQ ID NO: 629372 - DNA, 120 bp, Artificial Sequence
  ENSG00000179344_11 (sequence is synthesized)
catcccttgaggtgacccagcaaacctgtggccagaaggaggattgtaccttgaaaagacactgaaagcattttggggtgtgaagtaagggtgggcagaggaggtagaaaataattcaat

SEQ ID NO: 629373 - DNA, 120 bp, Artificial Sequence
  ENSG00000179344_12 (sequence is synthesized)
tgtcgcatcattcatggttctttaatactgatgctcagtgcattggccttagaatatcccagcctctcttctggtttggtgagtgctgtgtaaataagcatggtagaattgtttggagac

SEQ ID NO: 629374 - DNA, 120 bp, Artificial Sequence
  ENSG00000179344_13 (sequence is synthesized)
atatatagtgatccttggtcactggtgtttcaaacattctggaaagtcacatcgatcaagaatattttttatttttaagaaagcataaccagcaataaaaatactatttttgagtctaaa

SEQ ID NO: 629375 - DNA, 120 bp, Artificial Sequence
  ENSG00000179344_14 (sequence is synthesized)
aatgcagggaccatagtatgttatttatctttgaattctcagtgattgtcaaatttatatttgttgaatgaaccttaatccaagacttcgactccaggtcatctcctttcatccccaccc

SEQ ID NO: 629376 - DNA, 120 bp, Artificial Sequence
  ENSG00000179344_15 (sequence is synthesized)
atgggggcgaggtctctgaaatctgagcccagttcattccaccccaggggaaaggaggcggcggcggggtggtgggggcaggtgcatcggaggggcggggacctagggcagagcaggggg

SEQ ID NO: 629377 - DNA, 120 bp, Artificial Sequence
  ENSG00000179344_16 (sequence is synthesized)
acaagcagagttggccaggctgcctagtgtcccccccagcctccccgtccgtcggcctcgtcctccgctctgcacgtttctcgcctcgtgccttatgtgtttgcctcctcgtaccttacc

SEQ ID NO: 629378 - DNA, 120 bp, Artificial Sequence
  ENSG00000179344_17 (sequence is synthesized)
ttcgctaagcagttctctctgcccccagtgcccaccctcttcccctgcccgccggcctcgctagcactgccccacccagcaaggcccacgtgcgcagcttgcgccgcaggaagcttcagg

SEQ ID NO: 629379 - DNA, 120 bp, Artificial Sequence
  ENSG00000179344_18 (sequence is synthesized)
cttggcctggtggagttagggctgccccacagctgcgcgcagggcatccagcaattacagttgcgaaataagatattttgactttttggcttcaaatcattattcatcgtaattctgttt

SEQ ID NO: 629380 - DNA, 120 bp, Artificial Sequence
  ENSG00000179344_19 (sequence is synthesized)
tcttaaatggctaccactaatggcggagatctttgaggcgagagactgtttaattattgcatgcctggtacctgacacattgactggtatgtggtgtgagctcaatgatcttctgttaaa

SEQ ID NO: 629381 - DNA, 120 bp, Artificial Sequence
  ENSG00000179344_20 (sequence is synthesized)
ttcatgaataaatgtactcagctgccaatccagttaggttcaagaaaaaaacagaggcttacaaatgaactttatcaattattttctaacattttgcttaatgctttcaagtaaactctt

SEQ ID NO: 629382 - DNA, 120 bp, Artificial Sequence
  ENSG00000179344_21 (sequence is synthesized)
actgacttggatcttaatagaatttgtgaatacaaagtctgaggaaaatgtgtttgctaaaaataaaaacaatgcttgaatgatgttgtaaggcagagttttaatttcttagaaaagctg

SEQ ID NO: 629383 - DNA, 120 bp, Artificial Sequence
  ENSG00000179344_22 (sequence is synthesized)
aacaaatagcactatgcaaagatcagaagtttgggaataaataggttgaagctattaaattattggataaaaatagtttcaggttgcttttggcctaggttatcccctcccccccatcac

SEQ ID NO: 629384 - DNA, 120 bp, Artificial Sequence
  ENSG00000179344_23 (sequence is synthesized)
tatccacttcaggaataaacattctgaaagtcaattttacccattcaggaagcacttatttctagacagttgccttatcaaataccatctatgttatgtcatttaatctcacagctacct

SEQ ID NO: 629385 - DNA, 120 bp, Artificial Sequence
  ENSG00000179344_24 (sequence is synthesized)
gtgcattagagattagcatcaccactttatatatcctaatattggtacatgataaacactttaagtaatcagcccacaattactcaccaagatcttaagcctcccaaagtacacaacatt

SEQ ID NO: 629386 - DNA, 120 bp, Artificial Sequence
  ENSG00000179344_25 (sequence is synthesized)
cttatgttcctcactacacatatgtagagtctaagggatgtaaggccttgttaaagccagttttgaccagaagcagcaatgagtctattcctgtttgttctgtgtgttaatgcggcattg

SEQ ID NO: 629387 - DNA, 120 bp, Artificial Sequence
  ENSG00000179344_26 (sequence is synthesized)
aaaattcatgattaatcaatccctagtctgaccccggtgttatctatgcaggttcacaaaacttttagtttgctttacactcccttgccttcttttgactcacatcctaatgccagcaag

SEQ ID NO: 629388 - DNA, 120 bp, Artificial Sequence
  ENSG00000179344_27 (sequence is synthesized)
tacttatatttttgctatttcagttttatttccataaaatttattttatcatcttttctcataaatttgtgccctctatttttactcccagtctgttgaagatgaacaaatcttataagg

SEQ ID NO: 629389 - DNA, 120 bp, Artificial Sequence
  ENSG00000179344_28 (sequence is synthesized)
ccacatagctgactctgatttcagttggcctccaggaaggagaacctaaagaaaagttcaagtccaagcagaaaccatgattccttccggatgatggctcaagagtgccatttaattggg

SEQ ID NO: 629390 - DNA, 120 bp, Artificial Sequence
  ENSG00000179344_29 (sequence is synthesized)
gtgccacctgctgacctcagcaaatcccagttatatgtatatgttcacattacaggctcattagcccaggccgacctctgcacggatctcagaatattttctgtggagaacatacacgat

SEQ ID NO: 629391 - DNA, 120 bp, Artificial Sequence
  ENSG00000179344_30 (sequence is synthesized)
gcgttaaaaagaaattaaggaaaaaaagaaaatgagagaacatattactaaataaagaaagcacacattaaatatttgctatagtttcacactaagagaataaaggaaatgtgataaagt

SEQ ID NO: 629392 - DNA, 120 bp, Artificial Sequence
  ENSG00000179344_31 (sequence is synthesized)
ggcctaaaaggaaaggatgagatgtgtaaaagaggcggggaaagatgtgtcattttttttactatgagcagcaatctgagaagataaaggaattgagttgtggacaaacatgatgtttga

SEQ ID NO: 629393 - DNA, 120 bp, Artificial Sequence
  ENSG00000179344_32 (sequence is synthesized)
tcaagggttatttgttttgaaggcctgcctacttttttttcaaatattacaaacttttgaaataacattctacttttttttcaaatattacaaacttttgaaataacattctttttgttt

SEQ ID NO: 629394 - DNA, 120 bp, Artificial Sequence
  ENSG00000179344_33 (sequence is synthesized)
tttgctgtctgttactagattgcacattctataaatgcagggaccatagtatgttatttatctttgaattctcagtgattgtcaaatttatatttgttgaatgaaccttaatccaagact

SEQ ID NO: 629395 - DNA, 120 bp, Artificial Sequence
  ENSG00000179344_34 (sequence is synthesized)
tcgactccaggtatctttccactctggtccaaggagggatccttcctcatggtagacgtggtgtgtgttctcacatctcactcctatgtcttttcctgtctgttactgccctcagtggag

SEQ ID NO: 629396 - DNA, 120 bp, Artificial Sequence
  ENSG00000179344_35 (sequence is synthesized)
tgatgtcactactgagctgggaatcacaggagactagagcacctcttgctccatggcaagtgcatcagaagaatcctggtctcatcacctttccagatgctagggaaattactctacata

SEQ ID NO: 629397 - DNA, 120 bp, Artificial Sequence
  ENSG00000179344_36 (sequence is synthesized)
ctgttgctctgaatcccagtcctgatagctctgagggactgattcttagggctggtgactgggatcttagggtctaaggttatggatgagttcttgaagagcagagatttgcttccccac

SEQ ID NO: 629398 - DNA, 120 bp, Artificial Sequence
  ENSG00000179344_37 (sequence is synthesized)
tctctcacctattcactgtatccaaggacctattggctggtctttcccctccttaggggtggtctgaatggagaactaggttcctttgatgccttcaccttctgcacctcagactggact

SEQ ID NO: 629399 - DNA, 120 bp, Artificial Sequence
  ENSG00000179344_38 (sequence is synthesized)
tcaactcctcagcagggatgctatggggtgtggggacaaacacagacactcagttctgctctttaggggctcagtctgaatctgcccagagcaagatgctgagtggcgttggaggcttcg

SEQ ID NO: 629400 - DNA, 120 bp, Artificial Sequence
  ENSG00000179348_0 (sequence is synthesized)
gagcgccaggaaggtagcgaggccagcgtcgccccgggactcgctgctcaagtctgtctattgcctgccgccacatccatcctagcagggccccgtcgcccaccaggcggacaaaagcgg

SEQ ID NO: 629401 - DNA, 120 bp, Artificial Sequence
  ENSG00000179348_1 (sequence is synthesized)
ctgaacaccatgcggccgctcggcgtgccgcccaggctctgctggtgagcgccgccaccccgcgcccaggtcccgcgagcccgcctgccgcgcacctcgccctgctcccagctctactcc

SEQ ID NO: 629402 - DNA, 120 bp, Artificial Sequence
  ENSG00000179348_2 (sequence is synthesized)
accgcgcctcgctcgggccgttgccgtctgcacccagaccctgagccgccgccgccggccatggaggtggcgcccgagcagccgcgctggatggcgcacccggccgtgctgaatgcgcag

SEQ ID NO: 629403 - DNA, 120 bp, Artificial Sequence
  ENSG00000179348_3 (sequence is synthesized)
ggatggcgcacccggccgtgctgaatgcgcagcaccccgactcacaccacccgggcctggcgcacaactacatggaacccgcgcagctgctgcctccagacgaggtggacgtcttcttca

SEQ ID NO: 629404 - DNA, 120 bp, Artificial Sequence
  ENSG00000179348_4 (sequence is synthesized)
atcacctcgactcgcagggcaacccctactatgccaaccccgctcacgcgcgggcgcgcgtctcctacagccccgcgcacgcccgcctgaccggaggccagatgtgccgcccacacttgt

SEQ ID NO: 629405 - DNA, 120 bp, Artificial Sequence
  ENSG00000179348_5 (sequence is synthesized)
tgcacagcccgggtttgccctggctggacgggggcaaagcagccctctctgccgctgcggcccaccaccacaacccctggaccgtgagccccttctccaagacgccactgcacccctcag

SEQ ID NO: 629406 - DNA, 120 bp, Artificial Sequence
  ENSG00000179348_6 (sequence is synthesized)
ctgctggaggccctggaggcccactctctgtgtacccaggggctgggggtgggagcgggggaggcagcgggagctcagtggcctccctcacccctacagcagcccactctggctcccacc

SEQ ID NO: 629407 - DNA, 120 bp, Artificial Sequence
  ENSG00000179348_7 (sequence is synthesized)
ttttcggcttcccacccacgccacccaaagaagtgtctcctgaccctagcaccacgggggctgcgtctccagcctcatcttccgcggggggtagtgcagcccgaggagaggacaaggacg

SEQ ID NO: 629408 - DNA, 120 bp, Artificial Sequence
  ENSG00000179348_8 (sequence is synthesized)
gcgtcaagtaccaggtgtcactgacggagagcatgaagatggaaagtggcagtcccctgcgcccaggcctagctactatgggcacccagcctgctacacaccaccccatccccacctacc

SEQ ID NO: 629409 - DNA, 120 bp, Artificial Sequence
  ENSG00000179348_9 (sequence is synthesized)
cctcctatgtgccggcggctgcccacgactacagcagcggactcttccaccccggaggcttcctggggggaccggcctccagcttcacccctaagcagcgcagcaaggctcgttcctgtt

SEQ ID NO: 629410 - DNA, 120 bp, Artificial Sequence
  ENSG00000179348_10 (sequence is synthesized)
cagaaggccgggagtgtgtcaactgtggggccacagccacccctctctggcggcgggacggcaccggccactacctgtgcaatgcctgtggcctctaccacaagatgaatgggcagaacc

SEQ ID NO: 629411 - DNA, 120 bp, Artificial Sequence
  ENSG00000179348_11 (sequence is synthesized)
gaccactcatcaagcccaagcgaagactgtcggccgccagaagagccggcacctgttgtgcaaattgtcagacgacaaccaccaccttatggcgccgaaacgccaacggggaccctgtct

SEQ ID NO: 629412 - DNA, 120 bp, Artificial Sequence
  ENSG00000179348_12 (sequence is synthesized)
gcaacgcctgtggcctctactacaagctgcacaatgttaacaggccactgaccatgaagaaggaagggatccagactcggaaccggaagatgtccaacaagtccaagaagagcaagaaag

SEQ ID NO: 629413 - DNA, 120 bp, Artificial Sequence
  ENSG00000179348_13 (sequence is synthesized)
gggcggagtgcttcgaggagctgtcaaagtgcatgcaggagaagtcatcccccttcagtgcagctgccctggctggacacatggcacctgtgggccacctcccgcccttcagccactccg

SEQ ID NO: 629414 - DNA, 120 bp, Artificial Sequence
  ENSG00000179348_14 (sequence is synthesized)
cctgcccactccgacgcccatccacccctcctccagcctctccttcggccacccccacccgtccagcatggtgaccgccatgggctagggaacagatggacgtcgaggaccgggcactcc

SEQ ID NO: 629415 - DNA, 120 bp, Artificial Sequence
  ENSG00000179348_15 (sequence is synthesized)
cgggatgggtggaccaaacccttagcagcccagcatttcccgaaggccgacaccactcctgccagcccggctcggcccagcaccccctctcctggagggcgcccagcagcctgccagcag

SEQ ID NO: 629416 - DNA, 120 bp, Artificial Sequence
  ENSG00000179348_16 (sequence is synthesized)
ttactgtgaatgttccccaccgctgagaggctgcctccgcacctgaccgctgcccaggtggggtttcctgcatggacagttgtttggagaacaacaaggacaactttatgtagagaaaag

SEQ ID NO: 629417 - DNA, 120 bp, Artificial Sequence
  ENSG00000179348_17 (sequence is synthesized)
gaggggacgggacagacgaaggcaaccatttttagaaggaaaaaggattaggcaaaaataatttattttgctcttgtttctaacaaggacttggagacttggtggtctgagctgtcccaa

SEQ ID NO: 629418 - DNA, 120 bp, Artificial Sequence
  ENSG00000179348_18 (sequence is synthesized)
gtcctccggttcttcctcgggattggcgggtccacttgccagggctctgggggcagatttgtggggacctcagcctgcaccctcttctcctctggcttccctctctgaaatagccgaact

SEQ ID NO: 629419 - DNA, 120 bp, Artificial Sequence
  ENSG00000179348_19 (sequence is synthesized)
ccaggctgggctgagccaaagccagagtggccacggcccagggagggtgagctggtgcctgctttgacgggccaggccctggagggcagagacaatcacgggcggtcctgcacagattcc

SEQ ID NO: 629420 - DNA, 120 bp, Artificial Sequence
  ENSG00000179348_20 (sequence is synthesized)
caggccagggctgggtcacaggaaggaaacaacattttcttgaaaggggaaacgtctcccagatcgctcccttggctttgaggccgaagctgctgtgactgtgtccccttactgagcgca

SEQ ID NO: 629421 - DNA, 120 bp, Artificial Sequence
  ENSG00000179348_21 (sequence is synthesized)
agccacagcctgtcttgtcaggtggaccctgtaaatacatcctttttctgctaacccttcaaccccctcgcctcctactctgagacaaaagaaaaaatattaaaaaaatgcataggctta

SEQ ID NO: 629422 - DNA, 120 bp, Artificial Sequence
  ENSG00000179348_22 (sequence is synthesized)
actcgctgatgagttaattgttttatttttaaactctttttgggtccagttgattgtacgtagccacaggagccctgctatgaaaggaataaaacctacacacaaggttggagctttgca

SEQ ID NO: 629423 - DNA, 120 bp, Artificial Sequence
  ENSG00000179348_23 (sequence is synthesized)
attctttttggaaaagagctgggatcccacagccctagtatgaaagctgggggtggggaggggcctttgctgcccttggtttctgggggctggttggcatttgctggcctggcagggggt

SEQ ID NO: 629424 - DNA, 120 bp, Artificial Sequence
  ENSG00000179348_24 (sequence is synthesized)
gaaggcaggagttgggggcaggtcaggaccaggacccagggagaggctgtgtccctgctggggtctcaggtccagctttactgtggctgtctggatccttcccaaggtacagctgtatat

SEQ ID NO: 629425 - DNA, 120 bp, Artificial Sequence
  ENSG00000179348_25 (sequence is synthesized)
aaacgtgtcccgagcttagattctgtatgcggtgacggcggggtgtggtggcctgtgaggggcccctggcccaggaggaggattgtgctgatgtagtgaccaagtgcaatatgggcgggc

SEQ ID NO: 629426 - DNA, 120 bp, Artificial Sequence
  ENSG00000179348_26 (sequence is synthesized)
agtcgctgcagggagcaccacggccagaagtaacttattttgtactagtgtccgcataagaaaaagaatcggcagtattttctgtttttatgttttatttggcttgttttattttggatt

SEQ ID NO: 629427 - DNA, 120 bp, Artificial Sequence
  ENSG00000179348_27 (sequence is synthesized)
agtgaactaagttattgttaattatgtacaacatttatatattgtctgtaaaaaatgtatgctatcctcttattcctttaaagtgagtactgttaagaataataaaatactttttgtgaa

SEQ ID NO: 629428 - DNA, 120 bp, Artificial Sequence
  ENSG00000179348_28 (sequence is synthesized)
actgggtcaagcacagccctgagcggccgcgtgtccgaggcccaggtgccctctagagccctgtagttcctgcccctctctgcccctctcggctcctgctgttccgccgctgtcgtccga

SEQ ID NO: 629429 - DNA, 120 bp, Artificial Sequence
  ENSG00000179348_29 (sequence is synthesized)
accatcccaacccccagtccacccagacagcgcccgagctaggggagggaacggtctgggagtcggcagctggcgccagggcggccggaggatgccgaggggccggagccgggagggccc

SEQ ID NO: 629430 - DNA, 120 bp, Artificial Sequence
  ENSG00000179348_30 (sequence is synthesized)
gaggccgaggcgcactctacccccagctcctaccctgtaagccccgccagcctccggacgtgctgtccctgggcccgtcgccctcggggctcccgccggaactccttcactctcagaggc

SEQ ID NO: 629431 - DNA, 120 bp, Artificial Sequence
  ENSG00000179348_31 (sequence is synthesized)
gtcgagcgcgggtccctctttattggccagctgggcgccctgctacttggcgtcgcatttctctctcccaggcgggttcgtttccgccagagaatgcagcagtcccgcatcctacgcagg

SEQ ID NO: 629432 - DNA, 120 bp, Artificial Sequence
  ENSG00000179348_32 (sequence is synthesized)
acctgcaaccgaggtggaggcttcggtcaagccggctcctgcctgcgttgtcgaggaaggcaaccccaaggcctgaaaggacctggcagaactcctgtttcctttttttcctctacaccg

SEQ ID NO: 629433 - DNA, 120 bp, Artificial Sequence
  ENSG00000179348_33 (sequence is synthesized)
gattgcgggcaaggaggctggttcgggtctcccgaggcccctgctcaagcactccttaaccgtcctgctaagcccctctgtgcggcgattttctgagctgccgagcgggggccgttgccg

SEQ ID NO: 629434 - DNA, 120 bp, Artificial Sequence
  ENSG00000179348_34 (sequence is synthesized)
gatgctttgattcccatgtgagatttagccctccttgactgagctggtggggactgggggtggagcgagggtcagggaggggggtcgaggtgggcgtgggagtccagcctgctgacgctg

SEQ ID NO: 629435 - DNA, 120 bp, Artificial Sequence
  ENSG00000179348_35 (sequence is synthesized)
agggaccccgtgtgtggcgaacgctcctttaccggaaaacaaggaaggaaattcgttgttttggaaaaagcctcctctcccgaggtcgggaacatctggtggtgagctccaggtctacgc

SEQ ID NO: 629436 - DNA, 120 bp, Artificial Sequence
  ENSG00000179348_36 (sequence is synthesized)
aggcaccccgtgctaggattcgtttatgagcaggcaggattcgagaaccagggccgttgccgtctgcacccagaccctgagccgccgccgccggccatggaggtggcgcccgagcagccg

SEQ ID NO: 629437 - DNA, 120 bp, Artificial Sequence
  ENSG00000179361_0 (sequence is synthesized)
ggccccgccccggctgtggcccccggctgcggaggagtccgagacgcagctgccgcgccggggcctgagctgccgcctcctccgccgcccgaaaacccggagtgccccgcacaggtttag

SEQ ID NO: 629438 - DNA, 120 bp, Artificial Sequence
  ENSG00000179361_1 (sequence is synthesized)
tccgccgcccgaaaacccggagtgccccgcacaggtttagacccagtgtgcctggtgggctgtgcccaggttcagagtcatgccactctgtgggtgaagcttgaggcaaaaatggagcca

SEQ ID NO: 629439 - DNA, 120 bp, Artificial Sequence
  ENSG00000179361_2 (sequence is synthesized)
cttcagcagcagcagcagcagcagcagcaacaacagaagcagccacacctggctcctctgcagatggatgccagagagaagcagggccagcagatgagagaagcccagttcttgtatgcc

SEQ ID NO: 629440 - DNA, 120 bp, Artificial Sequence
  ENSG00000179361_3 (sequence is synthesized)
caaaagctggtcacacagccgactctcctttccgccacagctgggagaccttctggcagcactcccttaggtcccttagccagagttccacccaccgcagcagtggcccaagtgtttgaa

SEQ ID NO: 629441 - DNA, 120 bp, Artificial Sequence
  ENSG00000179361_4 (sequence is synthesized)
cggggcaacatgaactcagagcctgaggaagaggacggaggtttggaagatgaggatggggatgatgaagttgcagaggtggctgagaaagaaacccaggctgcttcaaaatattttcat

SEQ ID NO: 629442 - DNA, 120 bp, Artificial Sequence
  ENSG00000179361_5 (sequence is synthesized)
gtgcagaaagtagctcgccaagatcccagagtggcacccatgtccaatctacttccagcaccagggctcccaccacatggacaacaagctaaagaagaccataccaaagatgcttccaag

SEQ ID NO: 629443 - DNA, 120 bp, Artificial Sequence
  ENSG00000179361_6 (sequence is synthesized)
gcctcaccttctgtctccacagcaggacagccgaactggaatctggatgagcagctcaagcagaatggtggtttggcctggagtgatgatgcagatggaggccggggaagagagatctct

SEQ ID NO: 629444 - DNA, 120 bp, Artificial Sequence
  ENSG00000179361_7 (sequence is synthesized)
cgagattttgccaagctgtatgaactggacggtgatcctgaaaggaaagagttcctggatgacctcttcgtctttatgcagaagagggggacccccatcaaccgaatccccatcatggcc

SEQ ID NO: 629445 - DNA, 120 bp, Artificial Sequence
  ENSG00000179361_8 (sequence is synthesized)
aaacagatcctggacctgtacatgctgtataagctggtgaccgagaagggaggcctggtggagatcatcaacaagaagatctggagggagatcaccaaaggcctaaacctgcccacatcc

SEQ ID NO: 629446 - DNA, 120 bp, Artificial Sequence
  ENSG00000179361_9 (sequence is synthesized)
atcaccagcgccgccttcaccctcaggacgcagtacatgaagtatctgtatgcctatgagtgtgagaagaaagccttgagttccccagccgagctccaggcagcaattgatggcaaccgc

SEQ ID NO: 629447 - DNA, 120 bp, Artificial Sequence
  ENSG00000179361_10 (sequence is synthesized)
agggagggccggcggcccagctacagctcctccctctttggctactcacctgctgcggctactgctgctgccgctgccggggcccctgcccttctctccccacccaagatccgctttccc

SEQ ID NO: 629448 - DNA, 120 bp, Artificial Sequence
  ENSG00000179361_11 (sequence is synthesized)
atccttgggcttggctccagcagtggtaccaataccagtagccctcggatatccccagcaaccactctcaggaaaggtgatggagccccagtgacaacagtgcctgtgccaaatcgtctg

SEQ ID NO: 629449 - DNA, 120 bp, Artificial Sequence
  ENSG00000179361_12 (sequence is synthesized)
gctgtgcccgtgaccttggcaagccagcaggctggtactcggaccgccgcactggagcagctgcgggagcggctggagtcaggggagcctgctgagaagaaggcatcgaggctgtctgag

SEQ ID NO: 629450 - DNA, 120 bp, Artificial Sequence
  ENSG00000179361_13 (sequence is synthesized)
gaggagcagcgcctggtgcagcaggccttccagcgcaactttttcagcatggcacggcagctccccatgaagatcaggatcaacggcagggaagacagagcagaggcctcggctgcagca

SEQ ID NO: 629451 - DNA, 120 bp, Artificial Sequence
  ENSG00000179361_14 (sequence is synthesized)
ctgaacctgaccacgagtagcattgggagcattaacatgtctgtggacatcgatggcaccacctatgcaggtgtgctgtttgcccagaagcctgtggtccacctcatcacggggtctgct

SEQ ID NO: 629452 - DNA, 120 bp, Artificial Sequence
  ENSG00000179361_15 (sequence is synthesized)
ccccagagcctcggcagcagcgccagcagcagcagcagctctcactgttcaccaagtcctacctcatcccggggcacccccagcgcagagccctccaccagctggtccctctgatgggca

SEQ ID NO: 629453 - DNA, 120 bp, Artificial Sequence
  ENSG00000179361_16 (sequence is synthesized)
ggacccagcttcccacttgccactctcctgtcgagagtgaaggaagttgatgcacagaatttacctcatctcacagagcccacgtcgacgagcaccatttggccagacattgagagtttg

SEQ ID NO: 629454 - DNA, 120 bp, Artificial Sequence
  ENSG00000179361_17 (sequence is synthesized)
ggacagacagcgttgtccaatcagggattgtcctggagaactgggtgggggtctgtgggtgtccagcttcctccagggttccccagccacctcccagctcagggcacagtgtatcgacaa

SEQ ID NO: 629455 - DNA, 120 bp, Artificial Sequence
  ENSG00000179361_18 (sequence is synthesized)
tctgtcagccgacgcagggctggaggccctccatttccctccccttttaatttatttccctgaccctgccttctgccatgaccccagggccactagtctcttcccctgtttttaagtccc

SEQ ID NO: 629456 - DNA, 120 bp, Artificial Sequence
  ENSG00000179361_19 (sequence is synthesized)
atgtggggctgccaggagccaagagcatgccttcatgcccttctctgcagagcatgggatggggcccttccagcccactttgcctactgttaggttcctggggtacgggtccctcaaaca

SEQ ID NO: 629457 - DNA, 120 bp, Artificial Sequence
  ENSG00000179361_20 (sequence is synthesized)
caagtcttgaatcagtcctcagggccccagatcccccttctaatagtctgaaggaagaggctgtgagggcagttcagggccagggcccacagggcatctgctgatgggaaggcagagcct

SEQ ID NO: 629458 - DNA, 120 bp, Artificial Sequence
  ENSG00000179361_21 (sequence is synthesized)
cggggctgcccagccctggcacctgcttcacacggaccattctctgaccgcccccgccaaacctcatgctccccacttgcccttattggcctgctttcccaaaaacagcccactcatcct

SEQ ID NO: 629459 - DNA, 120 bp, Artificial Sequence
  ENSG00000179361_22 (sequence is synthesized)
ttccccagccctcttcagccctccccagtcctccccagccttcttcagccttcttcagctcagccctcttctatttcttatggggccatcttggcctcaccatccccacacgtgccgatg

SEQ ID NO: 629460 - DNA, 120 bp, Artificial Sequence
  ENSG00000179361_23 (sequence is synthesized)
tcaggttcattgaaatacctcagatttgtaattgttgatgtttgagtcttcaggaagtatttgcatctctgaaatcttttttatatgtgttttgctgacttttgttttttttttatttta

SEQ ID NO: 629461 - DNA, 120 bp, Artificial Sequence
  ENSG00000179361_24 (sequence is synthesized)
aaatttttatcgtagcaccaaagaaatgaaaacagatcacccccaaagccaagcaagtgattgggtaacccggcccctctggcccttccctcaagcccagtgaggaggtgggtggaggca

SEQ ID NO: 629462 - DNA, 120 bp, Artificial Sequence
  ENSG00000179361_25 (sequence is synthesized)
tgcaggggagacgactcagggatcgcgggggcggggaggtggagtggagaggcccgctctcacaccgggtcgggccctgaaactgtaccagttctgaagaccgttttctgccacaccccc

SEQ ID NO: 629463 - DNA, 120 bp, Artificial Sequence
  ENSG00000179361_26 (sequence is synthesized)
acccccagctgaccagggaggcagaggacacctccccatcactcagcattcccagctcagggcacaggcaggctggggtcctcgctggccttgccagaggttgagccgccccagggtatg

SEQ ID NO: 629464 - DNA, 120 bp, Artificial Sequence
  ENSG00000179361_27 (sequence is synthesized)
aggagatgaataactccacagctcctcctggaccctgcgcgggagcaggcagctcctgtgctgtaaagaaaattgattcgcttgcggctcacctcagtcgaggaagccctggaatgttca

SEQ ID NO: 629465 - DNA, 120 bp, Artificial Sequence
  ENSG00000179361_28 (sequence is synthesized)
gcagaacaccaccactgtgacatggggctgtggcagtgggagacaccgcgcgtggcgtgggtgtgtgtggcagcgtggctcgcattcagtcctgtgtaggagaggaaagggaatcaaaag

SEQ ID NO: 629466 - DNA, 120 bp, Artificial Sequence
  ENSG00000179361_29 (sequence is synthesized)
cttgagcacaaacagatacctcagcccggtaagctgcagctctgctcaactgcgtcttctctcagccctccacacacactcacccccactcccacacacatacacacacacacacacata

SEQ ID NO: 629467 - DNA, 120 bp, Artificial Sequence
  ENSG00000179361_30 (sequence is synthesized)
ccccatctcccgagggctgacctcctctggcctcagcctgcagggtgtgggcagagaagggcatctgggacgtggtgccagtgaggagcccagttggctggcactgggcccatttgaagg

SEQ ID NO: 629468 - DNA, 120 bp, Artificial Sequence
  ENSG00000179361_31 (sequence is synthesized)
tgtctcagacatttggccagtatgtctttctcaggggtttggtcacaaaggatggactcttcccacccagaggatgcagggaaagcacactgtgtctttccggtcattggatcctctccc

SEQ ID NO: 629469 - DNA, 120 bp, Artificial Sequence
  ENSG00000179361_32 (sequence is synthesized)
tttccccaggcagctcgcctggccacaccgttggagtgaaccctcactgccctcaaggacaacagcagggtgtcacccagagcccgatgaggggtgccagcaggtgcccccacgagtggg

SEQ ID NO: 629470 - DNA, 120 bp, Artificial Sequence
  ENSG00000179361_33 (sequence is synthesized)
gccttggcccaagcagagcttcccctgaaggtgccatcagccagggcagctctgtcccctcctgctctccatcttatatgtattctaaccaggaaaaatgtgatagcacatgggtagcct

SEQ ID NO: 629471 - DNA, 120 bp, Artificial Sequence
  ENSG00000179361_34 (sequence is synthesized)
aggcagtgagtaaatacctcagatgtcctcctgcagcaagtgtctatatgttgtggttattttctatcttacatgttctcgaatgtttatatttcaataaacctctacctcttcacacaa

SEQ ID NO: 629472 - DNA, 120 bp, Artificial Sequence
  ENSG00000179361_35 (sequence is synthesized)
ggtgagtgtgcatctactcatcattccaattcagggaatactgatagagtgcctactgtgtgctagtcactgttagacatcctggcccactaatcctcatccaggaggagaagaggcatt

SEQ ID NO: 629473 - DNA, 120 bp, Artificial Sequence
  ENSG00000179361_36 (sequence is synthesized)
tactgccagttggttctggatttagccaattaaccgatagccagattgaagaggacagagaaggtgttggcacaaagtagatggaatgatcgtccacttttggccctgcctgattttgtc

SEQ ID NO: 629474 - DNA, 120 bp, Artificial Sequence
  ENSG00000179361_37 (sequence is synthesized)
tcttcttccaattgactggtctctggagtcacttcaaattcaaatatgccttttttaagccttaaagctaccctggacttcacttaatctagcatgtgggccttcttgttggcatatcta

SEQ ID NO: 629475 - DNA, 120 bp, Artificial Sequence
  ENSG00000179361_38 (sequence is synthesized)
gtctcatggagaaaggtaagtgaaagaaaagaggcccctcaggatattttggaagggtctgaaatgatccatggaaagaaaaggccaacactttcttcttacccattggctttcgatgtt

SEQ ID NO: 629476 - DNA, 87 bp, Artificial Sequence
  ENSG00000179361_39 (sequence is synthesized)
cttcttacccattggctttcgatgtttgtatttgctggcttggttagaacattcctgcagtttaatagtcaggtacataggcatctg

SEQ ID NO: 629477 - DNA, 120 bp, Artificial Sequence
  ENSG00000179361_40 (sequence is synthesized)
ttataatgcaccctcccaattctctttccttctctcctcactctgcacatccccaagagccatcttcactgtagactatggtgtgactgagtttagagctgagtgactcaacttcctggc

SEQ ID NO: 629478 - DNA, 120 bp, Artificial Sequence
  ENSG00000179361_41 (sequence is synthesized)
tttgtattcagtcatagcaatgggttcaccagccaggtcagccctcagaacacatggccagcaccccagcctctctaggagaaggccttcagcaacctgtgtggctccaccttcgtcacc

SEQ ID NO: 629479 - DNA, 120 bp, Artificial Sequence
  ENSG00000179361_42 (sequence is synthesized)
ctcaggacaaaaccataggagagagctactcccagtagcctgctcccagcatcctgttatagctgatcatgcatcccttggtgcctgtgtcaacaactttattgagacctaagaatgaaa

SEQ ID NO: 629480 - DNA, 120 bp, Artificial Sequence
  ENSG00000179361_43 (sequence is synthesized)
tcttcctctttatcctgggccaagctgtaatggcagcccccagcagctaaatattctaagttaacttctctctctctctatttccctccttcctccctactcctttacctttggcagcct

SEQ ID NO: 629481 - DNA, 120 bp, Artificial Sequence
  ENSG00000179361_44 (sequence is synthesized)
tattgccttcttggtgtagcctgcctgttactgttggtttgcgtaaaaaaggcaatcgaaagttttgaatcttggttttccccagtctctaagcccatcaaagcaatctgagcagcctta

SEQ ID NO: 629482 - DNA, 120 bp, Artificial Sequence
  ENSG00000179361_45 (sequence is synthesized)
gcccatcaaagcaatctgagcagccttaattagtttgctcctccagctgttacctggaactgcatgtgtcagtaaaaaacaatataatcctgaggctgggcgcggtggctcctgcctgta

SEQ ID NO: 629483 - DNA, 120 bp, Artificial Sequence
  ENSG00000179363_0 (sequence is synthesized)
aggcagttgcgggttgcaggagttcaggaaaggaggtgggactagagtcaacctggaatagctctacagtaacaatggcagcctttttgttgctgggacatccatacaggcaacttagct

SEQ ID NO: 629484 - DNA, 120 bp, Artificial Sequence
  ENSG00000179363_1 (sequence is synthesized)
ggtgaaaggactctggattggttggcagtctgcttttttttttccaaggtgatcactttactgtagaagaaatgaggttaacagaaaagagtgagggagaacaacaactcaagcccaaca

SEQ ID NO: 629485 - DNA, 120 bp, Artificial Sequence
  ENSG00000179363_2 (sequence is synthesized)
actctaatgcacccaatgaagatcaagaagaagaaatccaacagtcagaacagcatactccagcaaggcagcgaacacaaagagcagacacacagccatccagatgtcgattgccttcac

SEQ ID NO: 629486 - DNA, 120 bp, Artificial Sequence
  ENSG00000179363_3 (sequence is synthesized)
caacatccagcgacagaacgatcaaccttcttgaagtccttccgtggcctactgagtggattttcaacccctatcgattgcctgctctttttgagctttatcctgaatttcttctggtgt

SEQ ID NO: 629487 - DNA, 120 bp, Artificial Sequence
  ENSG00000179363_4 (sequence is synthesized)
ttaaagaagccttccatgacatatcccattgtctgaaagcccagatggaaaagatcggactgcccatcatactccacctcttcgcactctccaccctctacttctacaagtttttccttc

SEQ ID NO: 629488 - DNA, 120 bp, Artificial Sequence
  ENSG00000179363_5 (sequence is synthesized)
ctacaattctttccctttctttctttattcttcttgtacttctgcttctgctttttattattgtcttcattctgatcttcttctgattcttttgtttcaataaacagcaatgagcatgaa

SEQ ID NO: 629489 - DNA, 80 bp, Artificial Sequence
  ENSG00000179364_0 (sequence is synthesized)
ggggtctgtgcgcaggcgcgtgagtgcgcgctctcgcgcaccggcgggcggggacgccccgtgaggcgccgccggaggaa

SEQ ID NO: 629490 - DNA, 80 bp, Artificial Sequence
  ENSG00000179364_1 (sequence is synthesized)
gacgccccgtgaggcgccgccggaggaagcgcgcgcgcacctcacttccggcgcgcgctgcgccggcggcgattggaccc

SEQ ID NO: 629491 - DNA, 120 bp, Artificial Sequence
  ENSG00000179364_2 (sequence is synthesized)
ccggcgccatggccgagcgaggccgcctcggcctccccggcgcgcccggcgcgctcaacacgcccgtgcccatgaacctgttcgccacctgggaggtggacggctccagccccagctgcg

SEQ ID NO: 629492 - DNA, 120 bp, Artificial Sequence
  ENSG00000179364_3 (sequence is synthesized)
tccagccccagctgcgtgcccaggttgtgcagcctgactctgaagaagctggtggtcttcaaggagctggagaaggagctgatctccgtggtgatcgctgtcaagatgcagggctccaaa

SEQ ID NO: 629493 - DNA, 120 bp, Artificial Sequence
  ENSG00000179364_4 (sequence is synthesized)
cgaatcctgcggtcccatgagattgtgctgccccccagtggacaagtggagacagacctggccctgaccttctccttgcagtatcctcacttcttgaagagggaaggcaacaagcttcag

SEQ ID NO: 629494 - DNA, 120 bp, Artificial Sequence
  ENSG00000179364_5 (sequence is synthesized)
atcatgctgcagcgcagaaagcgctacaagaacagaaccatcctgggctacaagacgctggccgcgggctccatcagcatggctgaggtgatgcaacacccgtctgaaggtggccaggtg

SEQ ID NO: 629495 - DNA, 120 bp, Artificial Sequence
  ENSG00000179364_6 (sequence is synthesized)
ctgagcctctgcagcagcatcaaggaggcccccgtcaaggcggccgagatctggatcgcctccctgtccagccagcccattgaccacgaagacagcaccatgcaggccggccccaaggcc

SEQ ID NO: 629496 - DNA, 120 bp, Artificial Sequence
  ENSG00000179364_7 (sequence is synthesized)
aagtccacggataactactccgaggaggagtatgagagcttctcctccgagcaggaggccagtgacgacgccgtgcaggggcaggacttggacgaggacgactttgacgtggggaagccg

SEQ ID NO: 629497 - DNA, 120 bp, Artificial Sequence
  ENSG00000179364_8 (sequence is synthesized)
aagaagcagcggagatcgattgtaagaacgacgtccatgaccaggcaacagaacttcaagcagaaagtggtagcgctgctgcggaggttcaaagtgtccgacgaggtcctggactcggag

SEQ ID NO: 629498 - DNA, 120 bp, Artificial Sequence
  ENSG00000179364_9 (sequence is synthesized)
caggaccctgcggagcacatccccgaggcagaggaggacctggacctcctgtatgacaccctggacatggagcaccccagcgacagcggccccgacatggaggatgacgacagcgtcctc

SEQ ID NO: 629499 - DNA, 120 bp, Artificial Sequence
  ENSG00000179364_10 (sequence is synthesized)
agcacccccaagccgaagctgcggccatactttgaaggcctgtcgcactcgagctcgcagacggagattgggagcatccacagcgcccgcagccacaaggagcccccaagcccggctgac

SEQ ID NO: 629500 - DNA, 120 bp, Artificial Sequence
  ENSG00000179364_11 (sequence is synthesized)
gtgcccgagaagacgcggtccctgggaggcaggcagccgagcgacagtgtctctgacacggtggccctcggtgtgccaggcccgagggagcaccctggacagcctgaggacagccccgag

SEQ ID NO: 629501 - DNA, 120 bp, Artificial Sequence
  ENSG00000179364_12 (sequence is synthesized)
gctgaggcctccaccctggatgtgttcacggagaggctgccgcccagcgggaggatcaccaagacagagtcccttgtcatcccctccaccaggtccgaggggaagcaggctggccgacgg

SEQ ID NO: 629502 - DNA, 120 bp, Artificial Sequence
  ENSG00000179364_13 (sequence is synthesized)
cccaggaagactgtgtatgaccagctcaaccacatcctcatctccgatgaccagcttcccgaaaacatcatccttgtcaacacctcggactggcaggggcagttcctctccgacgtcctg

SEQ ID NO: 629503 - DNA, 120 bp, Artificial Sequence
  ENSG00000179364_14 (sequence is synthesized)
cagaggcacacgctccccgtggtgtgcacgtgctctcctgcggacgtccaggcggccttcagcaccatcgtctcacggatacagagatactgcaactgcaattcccagcccccgaccccc

SEQ ID NO: 629504 - DNA, 120 bp, Artificial Sequence
  ENSG00000179364_15 (sequence is synthesized)
gtgaagatcgccgtggcgggagcgcagcattacctcagtgccatcctgcggctctttgtggagcagctgtcccacaagacacccgactggctcggctacatgcgcttcctggtcatccca

SEQ ID NO: 629505 - DNA, 120 bp, Artificial Sequence
  ENSG00000179364_16 (sequence is synthesized)
ctgggctcccaccccgtggccaggtacctaggctccgtggactaccgctacaacaacttcttccaggacctggcctggagagacctgttcaacaagctggaggcccagagtgcggtacag

SEQ ID NO: 629506 - DNA, 120 bp, Artificial Sequence
  ENSG00000179364_17 (sequence is synthesized)
gacacgccagacattgtgtcacgcatcacgcagtacatcgcaggggccaactgtgcccaccagctccccatcgcagaggccatgctgacctacaagcagaagagccctgacgaagagtcc

SEQ ID NO: 629507 - DNA, 120 bp, Artificial Sequence
  ENSG00000179364_18 (sequence is synthesized)
tcccaaaagttcattccctttgtcggggttgtgaaggttggaattgtggagccatcctcggccacatcaggcgactcggacgacgcggccccctcgggctctggcacgctctcctccacc

SEQ ID NO: 629508 - DNA, 120 bp, Artificial Sequence
  ENSG00000179364_19 (sequence is synthesized)
ccgccgtccgcatctcctgcggccaaggaggcctcacccaccccgccctcctccccgtcggtgagcggaggcctgtcctcccccagccagggtgtcggcgccgagctgatggggctgcag

SEQ ID NO: 629509 - DNA, 120 bp, Artificial Sequence
  ENSG00000179364_20 (sequence is synthesized)
gtggactactggacggcagcacagcctgcggacaggaagagggacgccgagaagaaggacctgcctgtcaccaaaaacacgctcaagtgcactttccggtccctccaggtcagcaggctg

SEQ ID NO: 629510 - DNA, 120 bp, Artificial Sequence
  ENSG00000179364_21 (sequence is synthesized)
cccagcagcggcgaggctgcagccacgcccaccatgtccatgaccgtggtcaccaaggagaagaacaagaaggtgatgtttctgcccaagaaagcgaaggacaaggacgtggagtctaag

SEQ ID NO: 629511 - DNA, 120 bp, Artificial Sequence
  ENSG00000179364_22 (sequence is synthesized)
agccagtgcattgagggcatcagccggctcatctgcactgccaggcagcagcagaacatgctgcgggtcctcatcgacggcgtggagtgcagcgacgtcaagttcttccagctggccgcg

SEQ ID NO: 629512 - DNA, 120 bp, Artificial Sequence
  ENSG00000179364_23 (sequence is synthesized)
cagtggtcctcgcacgtgaagcacttccccatctgcatcttcggacactccaaggccaccttctagccccacccaccagggggcccacctcctgccccatgctgtgaggggcccagctgc

SEQ ID NO: 629513 - DNA, 120 bp, Artificial Sequence
  ENSG00000179364_24 (sequence is synthesized)
atttctgttaacatttcagtttactacagagacagacgcttaaaacacaaagagaaacagtcttaagtatgaatgtgctcacaacgtggaaactaacgggggagctcctgccaggagccg

SEQ ID NO: 629514 - DNA, 120 bp, Artificial Sequence
  ENSG00000179364_25 (sequence is synthesized)
aataactgctctgcttattaacccgaacgttcggcccggggctgggaagccagaaggacgatgctgagccatggatcgcggaaggcgtcctctggcctcaggagccacccagagcctcac

SEQ ID NO: 629515 - DNA, 120 bp, Artificial Sequence
  ENSG00000179364_26 (sequence is synthesized)
aggctgagttcttgcctctgtgtcctgtccttcctggaagtcaggactctgcttcctcagggagcccggggaaggcggagctcagtggccacaggccgagggccatggggccgctcagtc

SEQ ID NO: 629516 - DNA, 120 bp, Artificial Sequence
  ENSG00000179364_27 (sequence is synthesized)
ccgttggggttgtcctgagttgagcctgggggggccgtcctgcccgcctaagagatgcccccagcaccgcacactcgtggttcccaataaactcctgcctgcggcggaggttttatagca

SEQ ID NO: 629517 - DNA, 120 bp, Artificial Sequence
  ENSG00000179364_28 (sequence is synthesized)
cgtccccgcgcgccgcgtccagctcgatgtccgtgccgccgcaaccgcggcacacgcggcccgtcatgccggcgaccgcgcgggcagcgcccggagcctcccaagactctcaagccaccc

SEQ ID NO: 629518 - DNA, 120 bp, Artificial Sequence
  ENSG00000179364_29 (sequence is synthesized)
gactctcaagccacccgagcctccggagcagcccgcgccgcccgcccaggcccagccgcccaggcctcgccgctctcgcgaggccccgctccagccgattcgcagccgcagattcgccgc

SEQ ID NO: 629519 - DNA, 120 bp, Artificial Sequence
  ENSG00000179364_30 (sequence is synthesized)
cgcgggatgggacaggcaccgggaccacggcggggacgcgaggactggagccgcgacctccccactgcgagcgagctggcctcccttgcggcgcgccggcgtcggaggggcgacctgcgg

SEQ ID NO: 629520 - DNA, 120 bp, Artificial Sequence
  ENSG00000179364_31 (sequence is synthesized)
ctgaagtccccctggggctgggcagagccagcagagcctgcccccacttccccagcccctgccccaccccgcctcacaccttccccactctcaggctgttcttgaaacaccatgaggctt

SEQ ID NO: 629521 - DNA, 120 bp, Artificial Sequence
  ENSG00000179364_32 (sequence is synthesized)
ctgcgtgtagtccctgccccaaacttagcaagcacaggggcctccacagcccaggtggccccagaaaatgttccagagcccagcttggtacatagtgagatgctgctggggttggcctga

SEQ ID NO: 629522 - DNA, 120 bp, Artificial Sequence
  ENSG00000179364_33 (sequence is synthesized)
ggtgggggccacttcctccaccccagtgggtatgtctgaggtcagccatggggatatctgggttgagattcaggttttggtgaatatggggcaggcgtccagatgtgtttgtgtcacctg

SEQ ID NO: 629523 - DNA, 120 bp, Artificial Sequence
  ENSG00000179364_34 (sequence is synthesized)
ctgcaacgctgtagccaatgaagattccagcgggatggcctgaccagcggggccggcactttggagccgtgggtgcagccaggtaccccgtgcagggcctgggaggctctccaggccaca

SEQ ID NO: 629524 - DNA, 120 bp, Artificial Sequence
  ENSG00000179364_35 (sequence is synthesized)
gtcctcagagcgtgttgggtcccatgttgtgtgtgggttccatgccctccacacagcaggagagggcttccctgaccacacctgccccctcagtcctgcttctccccagtaagcctgcac

SEQ ID NO: 629525 - DNA, 120 bp, Artificial Sequence
  ENSG00000179364_36 (sequence is synthesized)
tgtggggtctccataggaggagctggggaagctggggccctcccaggggtcctgatcgaccctgggggctcttggcctggtttcgtaagatggagcactgcaaaaggccatgctcagaaa

SEQ ID NO: 629526 - DNA, 120 bp, Artificial Sequence
  ENSG00000179364_37 (sequence is synthesized)
gcaaacgcagggcagggtgggcctcgagccggggctggaggggtctccacccttgctggcctgagagatggcccacatttcttacttgtgaccgccctgctcttcctggccgcccccccc

SEQ ID NO: 629527 - DNA, 120 bp, Artificial Sequence
  ENSG00000179364_38 (sequence is synthesized)
aggtggctgaacagggtgattttgttgtggtgaggggccaggatgtggcctggtgtgcagcctcagctccctgggttcaggcctcagaggtagcctgtgtgcaggaggcagagccccagc

SEQ ID NO: 629528 - DNA, 120 bp, Artificial Sequence
  ENSG00000179364_39 (sequence is synthesized)
ccctcccagccagagcccctccacaccagggactcctccttcacctgggaccaggagcctggggcacaccccagggtgggggagagggtaggaaggtctcccattgaatcctggcttcag

SEQ ID NO: 629529 - DNA, 120 bp, Artificial Sequence
  ENSG00000179364_40 (sequence is synthesized)
gctctgccccgagaagtgtctgcggtgagggtgtgagccccgggctgatggcctctgaccccggcaacaggtgggaccctgactgactcgttcagctgcccccaagctgggctgcagagc

SEQ ID NO: 629530 - DNA, 70 bp, Artificial Sequence
  ENSG00000179364_41 (sequence is synthesized)
ctgcctgctcttcctgtttctttcccaagggtcacactcagtagggagatgaaggtggaaacatccttgc

SEQ ID NO: 629531 - DNA, 120 bp, Artificial Sequence
  ENSG00000179364_42 (sequence is synthesized)
gtcacactcagtagggagatgaaggtggaaacatccttgctgtggctttctggcctcagagcaggttttagaggaaggggccacaggctgcctagtgcatcctggctgtgggcagcccct

SEQ ID NO: 629532 - DNA, 120 bp, Artificial Sequence
  ENSG00000179364_43 (sequence is synthesized)
ttcctggagccctcctgcctaccccgtacctcccatctggctgcacagctccatccttagccacgcaaggggagaacatgggcagagtctccatccagcagctgggggttctggtggcac

SEQ ID NO: 629533 - DNA, 120 bp, Artificial Sequence
  ENSG00000179364_44 (sequence is synthesized)
tccctgtgcccctgctgctgctgggctgtgggtctgccctgcacccaggagccccacggtccatcccccacaccatgcccagcaccagggaggttgggcagacaagacctgggccatgcc

SEQ ID NO: 629534 - DNA, 120 bp, Artificial Sequence
  ENSG00000179364_45 (sequence is synthesized)
agccctctgtgcctcggttttcccactggttacacaggatggtcgcattttccctgcctacctcacagagctgttctgagggtgcatggaggagcactctgtcccaccaaggacaactag

SEQ ID NO: 629535 - DNA, 120 bp, Artificial Sequence
  ENSG00000179364_46 (sequence is synthesized)
aaaccaaagccatctgacagccagtgcggtaagggcgggggatgtgtgtgtgaggtgtgcacaccccccgagaacctggccctggactggcctcacaggacaggaggcagccccttgtag

SEQ ID NO: 629536 - DNA, 120 bp, Artificial Sequence
  ENSG00000179364_47 (sequence is synthesized)
agctagggctcagccccatcagtctcaaaggttaagccaccagtcaccaccgaggcacccctcaggcctggtggccactgtccactattacgtagacagaccccaccctcacccaggcca

SEQ ID NO: 629537 - DNA, 120 bp, Artificial Sequence
  ENSG00000179364_48 (sequence is synthesized)
gctgtgggccagtcccgccctgcaatctggtctgctgccttcctcttccatgttggtccccttggccactgtctctgggcatgcaagccagtgtcctggttcagtgcctcggccagagct

SEQ ID NO: 629538 - DNA, 120 bp, Artificial Sequence
  ENSG00000179364_49 (sequence is synthesized)
ggggcaggagaggggcctctgggtgagagctgggggtgtctctgcagggtactggcagccttgccacactgtcctcattcccagatggaaagacctgagtgcctctcgccttcctccggg

SEQ ID NO: 629539 - DNA, 120 bp, Artificial Sequence
  ENSG00000179364_50 (sequence is synthesized)
aatgaattcctcatgaaaatgaccaggccacttcttccgagggccaggccgccccctccccgagacctgtcctgccgtccgcgggtgtgtggcctgtaggggactgagagctgggcttgc

SEQ ID NO: 629540 - DNA, 120 bp, Artificial Sequence
  ENSG00000179364_51 (sequence is synthesized)
tgggcacctctggaatctgaccctgtgggccaaagaagcaccactgtagtttctgcagacccccatgcggttcattgtgcattgtttggtttctaggatgtatgtgttgctagttttttt

SEQ ID NO: 629541 - DNA, 120 bp, Artificial Sequence
  ENSG00000179364_52 (sequence is synthesized)
taatgaaaccctggattaatgtaaatagctttttggggaacggattctaatgtcacgtatgtgaccgtgtggactatttcaaggtgctgatgcaacactaataaacctggaggggccggc

SEQ ID NO: 629542 - DNA, 120 bp, Artificial Sequence
  ENSG00000179364_53 (sequence is synthesized)
ggcacagatgccacgggcagtgtggcgtggcatggagtggtgtggcgtggcgtggcgtgttgtgtggcgtggcgtggcgcggtgtgtcgtggtgtggcgcggtgtggcatggcgtggtgt

SEQ ID NO: 629543 - DNA, 120 bp, Artificial Sequence
  ENSG00000179364_54 (sequence is synthesized)
ccctgcttgctacacatttgttgtttttaaatgtttgtttgatacagtaacactttgttaattttaattatatgcaagataacttgattgccctaaaacagccatttgggtcaagataaa

SEQ ID NO: 629544 - DNA, 120 bp, Artificial Sequence
  ENSG00000179364_55 (sequence is synthesized)
gccatcgccctctgaaggggcctgagctgggtgtctcctccatcagtcgctgtgataactctatgccagtttcgatttccaaagtcagaagtgcaaagcagggctcgttattaatcctct

SEQ ID NO: 629545 - DNA, 120 bp, Artificial Sequence
  ENSG00000179364_56 (sequence is synthesized)
caaatcgtccaggtcctgtgtcgtcgaactccattacttctttaggtccatacgatgtgtcttaccacgaaacaaacccacccagccttaatctgttgaccagcagcaaggcctggaggc

SEQ ID NO: 629546 - DNA, 120 bp, Artificial Sequence
  ENSG00000179364_57 (sequence is synthesized)
ctcagtggcactcagggctctgggacctcagctcagggctggagctccttcagcggggccacaggcatccaccagggaggggcagtggtggctttctctttcggtggcaggaaagtgggc

SEQ ID NO: 629547 - DNA, 120 bp, Artificial Sequence
  ENSG00000179364_58 (sequence is synthesized)
ttccatgtgcctgggagacgagtcaggcggtgcgctactgtggggccttgtgccaaaacagcgggcagcccatgccatctccgggagcccggggggctgggaatgacaggatgctcctgg

SEQ ID NO: 629548 - DNA, 120 bp, Artificial Sequence
  ENSG00000179364_59 (sequence is synthesized)
gttgtgctgggctgtctctcagctctgtacacagttggggcttttaaaaaacaagctgagggcagaaggtgcaagagacgtgagtctctagacggtcctcatgggatgagcttcgatagc

SEQ ID NO: 629549 - DNA, 120 bp, Artificial Sequence
  ENSG00000179364_60 (sequence is synthesized)
tgtgctgaggccccgctagcccgcccgggtctctccggagcagacctcactcaagtggaactaagccatggggggttgtgggccctgaggccaggcgtggtgctggtgctgcgtgcaggg

SEQ ID NO: 629550 - DNA, 120 bp, Artificial Sequence
  ENSG00000179364_61 (sequence is synthesized)
ctcacaccagcagatacccccccgacccccctgcctctgtgtttccagccgccggctccttccaggctgcgcctgagggagctggttcgcacgggccctcacgactccaaggggcagctt

SEQ ID NO: 629551 - DNA, 120 bp, Artificial Sequence
  ENSG00000179364_62 (sequence is synthesized)
ggagagcaggtggacaggcctcccaggccgaggctctcctgtcgccagggtccctgtaatttaagcaggacccttgtgggggtgactgggcatgtgaacagctccacagagcatgctcca

SEQ ID NO: 629552 - DNA, 120 bp, Artificial Sequence
  ENSG00000179364_63 (sequence is synthesized)
cactgccaggcagcagcagaacatgctgcggggtgagcaccaccggccccggggtctgtagagtgggacgtaggtgagagcacagcaaggctgctttggagcccagcctaggagctgcgg

SEQ ID NO: 629553 - DNA, 120 bp, Artificial Sequence
  ENSG00000179364_64 (sequence is synthesized)
gtgtctcgctgtgacacgcacattccacgattcaaggtgcaagcacattcgatgaagccctcagtgaggctgacaaccttccaaatgctgagaaagaattttttttcaaccctttttgct

SEQ ID NO: 629554 - DNA, 120 bp, Artificial Sequence
  ENSG00000179364_65 (sequence is synthesized)
ctggagtggtggcctcctggcctgtccttggaagcctgggctgaggccatgactgtgtggtccctcagcctgggcacgtttgggcatgtgggggtcctgggcttgggcagctccagggca

SEQ ID NO: 629555 - DNA, 120 bp, Artificial Sequence
  ENSG00000179364_66 (sequence is synthesized)
gttgtggcatgagcggccacaggcacggagccccctgggctcacactggcatccttggatggaggacggctcccctgaggcgtctgtcccctctccgtcccacctgcctctggattgcag

SEQ ID NO: 629556 - DNA, 120 bp, Artificial Sequence
  ENSG00000179364_67 (sequence is synthesized)
caaaaaccgaggagaatccgagaccctcccgtctctcacaggccactggggactcccaccctgcccacccccaggagctgcctggcctggccacatcctggtccggagggcctggtggca

SEQ ID NO: 629557 - DNA, 120 bp, Artificial Sequence
  ENSG00000179364_68 (sequence is synthesized)
aagcacaggatgcagcccagcagtggtggcaccgtggagtggctgggcggaagagatcctggtccacgctgctgtctggagggcagggtcctcaggtgaccagagtccgtgcaggagcga

SEQ ID NO: 629558 - DNA, 120 bp, Artificial Sequence
  ENSG00000179364_69 (sequence is synthesized)
gtgaggacagggctggggcaggcggcaggatgaggccgcccagagcaactcagtgagtgaatgagtgaaagcacgcacgccccatgctccagcggggccagagtgtgctgttgggttgtg

SEQ ID NO: 629559 - DNA, 120 bp, Artificial Sequence
  ENSG00000179364_70 (sequence is synthesized)
ggccacatcaggtaaccccgtcccaccctgaggccttgtgagtggcccgtgggtgggctgcaggagcacggtcattcgagtcctgcagaccagatcaacctttcagggcctgagagccgc

SEQ ID NO: 629560 - DNA, 120 bp, Artificial Sequence
  ENSG00000179364_71 (sequence is synthesized)
gtccctgagggccaccctgctggcctggccattctcgtcctgcccccggcgctccaggggcaacaggtgctcctctgcactgtgtgtgcacagtctccgcctgtaagacagccacttgcc

SEQ ID NO: 629561 - DNA, 120 bp, Artificial Sequence
  ENSG00000179364_72 (sequence is synthesized)
ggcatcagactctgcagtttggggaaatgagacagaagaaacagctgagggagctgcccagagagaaggcaccagttgctgatgcggtctggctgaggaagctgggcggggaggcacctc

SEQ ID NO: 629562 - DNA, 120 bp, Artificial Sequence
  ENSG00000179364_73 (sequence is synthesized)
tgtccctacgtgcaggccacggggggccttgaggccaggggagaggaggaaagaggagagccagacccagcccaccactcaggataggccctgccctctggatctttcctggggcccaga

SEQ ID NO: 629563 - DNA, 120 bp, Artificial Sequence
  ENSG00000179364_74 (sequence is synthesized)
aggagatgccctcacctcaccctagctgccggcggggcctcatgctgtgctggccccttgtcttgtgggagagctccctgggcccaagcccaggctgcagtgggcacagtcagcaggagc

SEQ ID NO: 629564 - DNA, 120 bp, Artificial Sequence
  ENSG00000179364_75 (sequence is synthesized)
ctgtgcgagctggaccacaggacagccctgcttgagctgcacacgtcggaggggaagacagacgggtcccctcagcggccccgcggctcctgtcctccacccttggcatcttcgtgtgga

SEQ ID NO: 629565 - DNA, 120 bp, Artificial Sequence
  ENSG00000179364_76 (sequence is synthesized)
cgggctgtgaccagacttccaggagaggctgctgttacctgccagatgttgtatggggccaagtccaggcaaaacctccactgcccgctgagtacatcagctcacgcggggcacggcctg

SEQ ID NO: 629566 - DNA, 120 bp, Artificial Sequence
  ENSG00000179364_77 (sequence is synthesized)
gggtgtgctgggcctgcctgcaggctgtgcgtggggtgttctggtagaacatggaggcccactgcagccaaagcctggcctcttatgtgggcatggacgttacccagatagtctggagaa

SEQ ID NO: 629567 - DNA, 120 bp, Artificial Sequence
  ENSG00000179364_78 (sequence is synthesized)
aacttctgcaccctggctttggtgctgctgattaccagagagggcccaggctcttcctgggagtcccagggcactggcagctgccctaaccccagcagagcaggggtgcccagcttggtg

SEQ ID NO: 629568 - DNA, 120 bp, Artificial Sequence
  ENSG00000179364_79 (sequence is synthesized)
gtggaaatgcaagccggacagggctgagctggctgtgtgggcgtcgggcacctaggatggcagagtgaatccctccgtggagctgtgccctctggcctgtcctcctgaccatgggtgcac

SEQ ID NO: 629569 - DNA, 120 bp, Artificial Sequence
  ENSG00000179364_80 (sequence is synthesized)
agagacccctttgtccttccagcatgtcagcatgtcagaaggggcccaggcgttggtcctgggggccaggccagggctggcagtggttggagatgggtggggccgggacacacagggcag

SEQ ID NO: 629570 - DNA, 120 bp, Artificial Sequence
  ENSG00000179364_81 (sequence is synthesized)
ggctgtccggcagggccatccggcagggccgcggccccagggctgcgccaggttctcaggccaagagggagctgtgcccaccaggcggggctgtgccctgaggagagcttaactgtctgt

SEQ ID NO: 629571 - DNA, 120 bp, Artificial Sequence
  ENSG00000179364_82 (sequence is synthesized)
ggaagcagagacaggtcggtggggcgaggcctcagaacacccaggaggcttggccccacgtctcaggagaggagagactgcctgcccgggttggggagggcgcctctgtcctttaggagc

SEQ ID NO: 629572 - DNA, 120 bp, Artificial Sequence
  ENSG00000179364_83 (sequence is synthesized)
ccaaggccccgggagcttcccagtgctcacttgggctgcagcctgcagtgtgtgggtttcacttcctgccctgcccagggttagggctgcttctgccagccaggccatctccctgccagc

SEQ ID NO: 629573 - DNA, 120 bp, Artificial Sequence
  ENSG00000179364_84 (sequence is synthesized)
cctgggtctccacagcctgtttcctgccatcttttcgctctgttgtgtggcctccctcccgccaggtgtctgctgtgagacagacccacagggcctggcagacaggttgcccaggcagcg

SEQ ID NO: 629574 - DNA, 120 bp, Artificial Sequence
  ENSG00000179364_85 (sequence is synthesized)
gaagggtctctgggcctcggtttccccactggtggaacagaggcctttttgtgcaccgtgcagtggttgggtctgctgagggctctggggcgatggctggccctctgggagggtggaatt

SEQ ID NO: 629575 - DNA, 120 bp, Artificial Sequence
  ENSG00000179364_86 (sequence is synthesized)
cgtcttgaacagcggctgcccaaagagctttctccggtgacaagagtacactgtgctcgggcacacaggccttcccatgcaaccaaggccctgcggtgtcactgggattcacggtagatc

SEQ ID NO: 629576 - DNA, 120 bp, Artificial Sequence
  ENSG00000179364_87 (sequence is synthesized)
tacgtagccgcctgtggctcgtggctgccaggtccggggcctatccccgtcggcccgccaaggtccctctcaccagcgtcctgtttttactgcacacatagtttgcagctgccctgaggg

SEQ ID NO: 629577 - DNA, 120 bp, Artificial Sequence
  ENSG00000179364_88 (sequence is synthesized)
cacatggctgctctgagctcagctctgctccacagatggggagagaagggcaggagggagctggcaccacctggccgctccagcatcatgggagtggtggccacggtggggaggcgggag

SEQ ID NO: 629578 - DNA, 120 bp, Artificial Sequence
  ENSG00000179364_89 (sequence is synthesized)
ccccactgggagggcgctgggctagctgaattgcacggctttcaccagccagtgcctgttgttttctaggttgtgaaggttggaattgtggagccatcctcggccacatcaggccactgg

SEQ ID NO: 629579 - DNA, 120 bp, Artificial Sequence
  ENSG00000179364_90 (sequence is synthesized)
ctgctcgcggcccccacgcctgcaacagcacctggtcgggaggaggcctctggggtctgtctccgggccacctctggttctgccgctcaccgtctgcacggccccgccagcatcgcacag

SEQ ID NO: 629580 - DNA, 120 bp, Artificial Sequence
  ENSG00000179364_91 (sequence is synthesized)
tctgcgaggcgcagtgacagtggcactgcctcccgggctccaggtcacccgctgggtctctgctgaagtagaagtcgtgaataccctggaagtcggaaagtcattttcagggggatgtaa

SEQ ID NO: 629581 - DNA, 120 bp, Artificial Sequence
  ENSG00000179387_0 (sequence is synthesized)
gacttccgggtcgcggtgcttgaagggagtgttccgtcgtttccgttgccggctgtttgcagtggggaaaccgaggcagctcctgctccccctagttcttccgctcctgtgaggaaaaaa

SEQ ID NO: 629582 - DNA, 120 bp, Artificial Sequence
  ENSG00000179387_1 (sequence is synthesized)
aaatgtttatttctttgtgggagttcttctatgggcacttttttcgattttggatgaaatggctattacgacagatgactgggaagtgtgaattgcagcgaatatttgatacctatgtag

SEQ ID NO: 629583 - DNA, 120 bp, Artificial Sequence
  ENSG00000179387_2 (sequence is synthesized)
gtgcacaaaggacacacaggatagaaaattccttgacatactccaagaataaggttttacagaaggcgacacatgttgttcagagtgaagtggacaaatatgtagatgatattatgaagg

SEQ ID NO: 629584 - DNA, 120 bp, Artificial Sequence
  ENSG00000179387_3 (sequence is synthesized)
aaaagaatattaaccctgagaaggatgccagttttaaaatatgcatgaagatgtgcttactgcagataactggttataaacagctgtatttggatgtagaaagtgtgaggaaaaggccat

SEQ ID NO: 629585 - DNA, 120 bp, Artificial Sequence
  ENSG00000179387_4 (sequence is synthesized)
atgattctgataacctacagcatgaagagctactcatgaagctttggaatcttctaatgcccacgaagaagttaaacgctagaatctccaagcagtgggctgaaattggttttcagggtg

SEQ ID NO: 629586 - DNA, 120 bp, Artificial Sequence
  ENSG00000179387_5 (sequence is synthesized)
atgatcccaagacagacttcagaggcatgggcatacttgggttaatcaatcttgtgtatttcagtgaaaattacactagtgaagctcatcagattctttcccgttcaaatcatccaaaat

SEQ ID NO: 629587 - DNA, 120 bp, Artificial Sequence
  ENSG00000179387_6 (sequence is synthesized)
tagggtattcttatgcaatagttggaatcaatcttacagagatggcttatagcttactgaagagtgaagctttgaagtttcatctctataaccttgttcctggtataccaacaatggaac

SEQ ID NO: 629588 - DNA, 120 bp, Artificial Sequence
  ENSG00000179387_7 (sequence is synthesized)
actttcatcagttttactgttatcttgtctatgaatttgacaagttttggtttgaagaagaaccagaaagcattatgtatttcaatttgtatagagagaagtttcatgaaaagattaaag

SEQ ID NO: 629589 - DNA, 120 bp, Artificial Sequence
  ENSG00000179387_8 (sequence is synthesized)
gacttttactggattgtaatgtagcacttactttaaaagtataaatcatccactgtatcttctatttctaccacattttgcacattcaacagaatttatatgttgtaataggaattatct

SEQ ID NO: 629590 - DNA, 120 bp, Artificial Sequence
  ENSG00000179387_9 (sequence is synthesized)
gatcaattacactcttatatataatttcctacaaaaatatttcagaaattctatttaagaaagctagtggacaatcagtgtatgtttacaattgtttatacactgttctccaaaggtacc

SEQ ID NO: 629591 - DNA, 120 bp, Artificial Sequence
  ENSG00000179387_10 (sequence is synthesized)
ttatccttccaaagatcccctctgtagagtcatgcgaactacagtttggaacttgggacttagcccgttggtgtaaaagtataaatcaggtatttgtattaaattgattaaaatgtgtaa

SEQ ID NO: 629592 - DNA, 120 bp, Artificial Sequence
  ENSG00000179387_11 (sequence is synthesized)
aatcaattttcgtttttatgtgttatagggtcaagttggtatctttttcaaagctctttaagatttttttggtttttagtttggaaatggctgtttttaattttgtctgatttttatttc

SEQ ID NO: 629593 - DNA, 120 bp, Artificial Sequence
  ENSG00000179387_12 (sequence is synthesized)
taggttaattaacagcaagtgtttctttatggttttctttgtttgcatcttaattacatgtcataacgttgcttcattagtagcaaatagagcagagatacagcagagagaataaagaat

SEQ ID NO: 629594 - DNA, 120 bp, Artificial Sequence
  ENSG00000179387_13 (sequence is synthesized)
tagggcctccttttgggtttctgtgattattgagcataactgatgagagaatgacagtattggtgactagcttttttgtttttaaataacacactttaaaatgccacagtgttatttgaa

SEQ ID NO: 629595 - DNA, 120 bp, Artificial Sequence
  ENSG00000179387_14 (sequence is synthesized)
agcttaaaggcattttctcatcttcagtatttgctttttatcagttgtagaaaagaaccttagtgttttcttctctacctatgtatgcttatgaaaccgctctacctacatatgaaactt

SEQ ID NO: 629596 - DNA, 120 bp, Artificial Sequence
  ENSG00000179387_15 (sequence is synthesized)
ctctacctatgtatgtttacgaaaagagatgtatttgccaagaaaatcttgattatataaaagacaaaaagattataaaagacagtttctgtttaagtaaaactgtctttgaaacttaag

SEQ ID NO: 629597 - DNA, 120 bp, Artificial Sequence
  ENSG00000179387_16 (sequence is synthesized)
aaagcttaagttttaaaaaaatctcagttaaacatcattggtttatttgacttactgttaactcttgcttctctttgactccatggtgtttttagataaccatgtatgaactttatgtta

SEQ ID NO: 629598 - DNA, 120 bp, Artificial Sequence
  ENSG00000179387_17 (sequence is synthesized)
atggtttgtgggatactaaaatagcttgaagatgacttgatgactgtgcattttatatagttttattctcctaaaatctcaggagggcagcaagtgctgtcaacgattatatagtgatga

SEQ ID NO: 629599 - DNA, 120 bp, Artificial Sequence
  ENSG00000179387_18 (sequence is synthesized)
gtttaagttctccttaaatcctacagaaaccaaccttttaaggacataatttcatctaaaacatgacgatatttagcacaccttttaatgtgggtatatatcaagtgtttaaggactggc

SEQ ID NO: 629600 - DNA, 120 bp, Artificial Sequence
  ENSG00000179387_19 (sequence is synthesized)
tagtatgtgatagagcaagacctgagactttataagtatttgctcgtgtctgttgacagacctctttctttcaaacttgttagaagagtggtaagacatatccaattggaaaataagatg

SEQ ID NO: 629601 - DNA, 120 bp, Artificial Sequence
  ENSG00000179387_20 (sequence is synthesized)
cagtgttgtatagcacatacatttaaagtgcttgcgttaaaattagtttctcaataagataaaattattttaaaaatttggttcactttattacaatagtggcaatttagcttttcagta

SEQ ID NO: 629602 - DNA, 120 bp, Artificial Sequence
  ENSG00000179387_21 (sequence is synthesized)
ttacaggaatttaaaaattggtttcttgtaggggacatctcaactttgggaatatcttcacttaatttttaaaaaatattttcatgctttattgtccagctatacaatatgtcgcaaaat

SEQ ID NO: 629603 - DNA, 120 bp, Artificial Sequence
  ENSG00000179387_22 (sequence is synthesized)
cctgacaagttcattgtattaaggtattaactattacatggaaagcaattctgttcatcttttgatgtttgtgttgaaaatgcttatctttgtgttttgatcttccaacagctgagagct

SEQ ID NO: 629604 - DNA, 120 bp, Artificial Sequence
  ENSG00000179387_23 (sequence is synthesized)
tgaactgatttaaacatttgtcaatatacttaagaatgctttaagtaaagaaggggaaaattttaagtaagttttttcccttctaggaagaaaaactatgatgatgttaagaaaatgtca

SEQ ID NO: 629605 - DNA, 120 bp, Artificial Sequence
  ENSG00000179387_24 (sequence is synthesized)
ttatagagcttgctcaataatatgttctttaaatccacctccatttgtacattataggtatcattctgtttttgcttaaaataatctgcaaccatttcagatagttttacagcaaattga

SEQ ID NO: 629606 - DNA, 120 bp, Artificial Sequence
  ENSG00000179387_25 (sequence is synthesized)
tctaaaagccactaataaattctagggtttgagtctagaagccaagcaaactgtcaccaatgtcagttgtaaattagaatgcaacatgaggcttcagactcatgacaatgatatacatga

SEQ ID NO: 629607 - DNA, 120 bp, Artificial Sequence
  ENSG00000179387_26 (sequence is synthesized)
aaacaaaaatataattgtgtctaccttcctactttcccttttgacatatgtagttggaattttacatagtcttaaaatccatatttagaatcttacctgtttctataataattagtaaaa

SEQ ID NO: 629608 - DNA, 120 bp, Artificial Sequence
  ENSG00000179387_27 (sequence is synthesized)
tgccaaagtagtgatagaatattgtggcattgaagtagccgaaaaattgttagttttagcatcaaaaaagtaaatagatgttgaaatgaatttttgtatgtgccaggttgaagagagtgt

SEQ ID NO: 629609 - DNA, 120 bp, Artificial Sequence
  ENSG00000179387_28 (sequence is synthesized)
gccagtgacaggaagtagtctaaaaaattaacagttatggttttaataggatctgaaagacaatctttaaagaaatgggagaaattgggggtatcagtgaacctataccaacctctcttt

SEQ ID NO: 629610 - DNA, 120 bp, Artificial Sequence
  ENSG00000179387_29 (sequence is synthesized)
gtacataaatatggtgatgtagctagatataaaaatcagtgtcttactggcaccatttacagtttagaaaacaatctttttcttaaaaatgcccatctgatttctatttttaggagctac

SEQ ID NO: 629611 - DNA, 120 bp, Artificial Sequence
  ENSG00000179387_30 (sequence is synthesized)
ttggatttgtatgtattttttctacgtgaaaatatatgtactcttcacttttgttccagtactataattgctcatgcactctttctcccctttgagaacattcagtgaaatacaacttca

SEQ ID NO: 629612 - DNA, 120 bp, Artificial Sequence
  ENSG00000179387_31 (sequence is synthesized)
tcaaagatttgctcaaaggagaagaatcgcatgagtgtgaaaagtagatgctcgtagccagaacagaaaaggttacacatgatcatggcacagaagataggaggtttgacttggtgggcc

SEQ ID NO: 629613 - DNA, 120 bp, Artificial Sequence
  ENSG00000179387_32 (sequence is synthesized)
ataatgtttattatcctttttgaaataacagggaccagcagcagttttctcaggataaatgctctaccccacttctctatgaacaggtgtggggaggcttactttccattttcatattta

SEQ ID NO: 629614 - DNA, 120 bp, Artificial Sequence
  ENSG00000179387_33 (sequence is synthesized)
tacacctctctacaaaagcaatttttaatgaaggttagtggaattgttaaaaatctgagaggaatgatgactggaggtgtttggggtttttttctgtattcattttttaatgagaaaagt

SEQ ID NO: 629615 - DNA, 120 bp, Artificial Sequence
  ENSG00000179387_34 (sequence is synthesized)
tttaaatgtagtacaggttagacccaactactaccttactattataggacgattctatgtttctgttaaagtattcaagtagctttctctgggggaaaaagtaccacttggacacttaaa

SEQ ID NO: 629616 - DNA, 120 bp, Artificial Sequence
  ENSG00000179387_35 (sequence is synthesized)
ggaattgggatttttgtctactttggataaggcagttgacttcttaagtaaaagcaatagtgtaaaatgtcattttgtttggaatgttaagtgagcaaataaaaaacatgttgaaattgt

SEQ ID NO: 629617 - DNA, 120 bp, Artificial Sequence
  ENSG00000179387_36 (sequence is synthesized)
ggctgtttgcagtggggaaaccgaggcagctcctgctccccctagttcttccgctcctgtgaggtggctgctgtttcttttcctcttgccccggatgcctcggtgcggctgcactgagag

SEQ ID NO: 629618 - DNA, 120 bp, Artificial Sequence
  ENSG00000179387_37 (sequence is synthesized)
ggttctgcgggaacccgggggcgcctgggccggcgggtctttgtgcgagccctgccctcccattcgcgggcggcgcgcgaggggggtcggcgcagagacgcccagagccctggggtgctc

SEQ ID NO: 629619 - DNA, 120 bp, Artificial Sequence
  ENSG00000179387_38 (sequence is synthesized)
gacgcccagagccctggggtgctcaggcgccgctacgcgtgcatcccctctgctcggcagttctgcgcttttgtcctaatgagcgcggactagatggcttgattttcaagataatgatca

SEQ ID NO: 629620 - DNA, 120 bp, Artificial Sequence
  ENSG00000179387_39 (sequence is synthesized)
acccagctgtgctatgcgctctttctgcactgacctgcgggtacttcgaacttcgacagtccctcctcaggccctagtccagaggtgacgtgtctgtgggaatgtttaaggcaggaagga

SEQ ID NO: 629621 - DNA, 120 bp, Artificial Sequence
  ENSG00000179387_40 (sequence is synthesized)
gacgagcaattttgtttttaagtatctccctctcactagtatctccctgactttttcatttagaagctgaagaattttcttatggcataagatatagttgtatcgagtgtgtacttagca

SEQ ID NO: 629622 - DNA, 120 bp, Artificial Sequence
  ENSG00000179387_41 (sequence is synthesized)
aaacaaaaacttgttagtatttctgcccttgacctattgaatggaaaatcaagaatgagctaaggtgttatatactcagtgttcaacttgtatacttaagtttgtagtgtttttatttgc

SEQ ID NO: 629623 - DNA, 120 bp, Artificial Sequence
  ENSG00000179387_42 (sequence is synthesized)
tggcatcacctgactgggacagttgtaacgaattatccacatgggataagaagagtgtattctataaaaacaactctgatgttttggtatatattttaattgttgattagttggagtcct

SEQ ID NO: 629624 - DNA, 120 bp, Artificial Sequence
  ENSG00000179387_43 (sequence is synthesized)
ggaagttaggaaactaagatatgaaatacaattatttagcaaaaagtgcaaaccattctgttactctttcaagccattgaatagtttgagtacattgtttgaattttagttttgaaaaag

SEQ ID NO: 629625 - DNA, 120 bp, Artificial Sequence
  ENSG00000179387_44 (sequence is synthesized)
tgattaattggccatttgatcatcaattaatagcggtatatattacacctgccattgtttttaaatgcctaattaaactgtcaaaacagacacaatgaaatgatagatacataatttgag

SEQ ID NO: 629626 - DNA, 120 bp, Artificial Sequence
  ENSG00000179387_45 (sequence is synthesized)
ccttgacatactccaagaataaggtaggataacataaaggtggtaactctagaaaacttaacgtggacatattttttcttaaaaaaaaaaaagtgccctgctagaagagtgttttctata

SEQ ID NO: 629627 - DNA, 120 bp, Artificial Sequence
  ENSG00000179387_46 (sequence is synthesized)
gtgagcattgagtgaaattttccccgtttagaggtaatattctgttttcaaacatttctctatatatgtgtttttcgtgtgtatttcaaagaaaatacttgaataatttgtcctgtcctg

SEQ ID NO: 629628 - DNA, 120 bp, Artificial Sequence
  ENSG00000179387_47 (sequence is synthesized)
aggttttatttgtttattttgctttaagagttgatagcttttaggaaagcagggccttaggaggaaagtcgtcttttagactgtgtcctcaggatagattatatgagagaaaagcaactt

SEQ ID NO: 629629 - DNA, 120 bp, Artificial Sequence
  ENSG00000179387_48 (sequence is synthesized)
aggatagagaaaaccctgggttgtgtaccttttgagctaaaataagtcataattcatgctatgtattagtcagcttttgctgtgtaacaaactataataaaatctcaggggcataaaacg

SEQ ID NO: 629630 - DNA, 120 bp, Artificial Sequence
  ENSG00000179387_49 (sequence is synthesized)
agacgctgcctcatagcagctggttgattaagtttaattactttcctagttttcttacaacttcatggttgacttaaattattgctgctcttttaatttgcccttttgactactcaaaag

SEQ ID NO: 629631 - DNA, 120 bp, Artificial Sequence
  ENSG00000179387_50 (sequence is synthesized)
tattatgtaattaaaatatctacttcgtaaacactatggtggcagctcatttgctgagaactcatcagctgagaacctgttgactcagttgaggaagccttcctctggtacatcatgttg

SEQ ID NO: 629632 - DNA, 120 bp, Artificial Sequence
  ENSG00000179387_51 (sequence is synthesized)
ctgttcttttattataaaactatatatatatatgtgaatttagccctagagaaaatgtgaaataaactggttgaaacaaactgggtttattttgcatttttaatatctactttgtaaggt

SEQ ID NO: 629633 - DNA, 120 bp, Artificial Sequence
  ENSG00000179387_52 (sequence is synthesized)
tgattaaatgtctcacaactatgtctttttcagctacaaagaatttttctcatttggctttcttttacataaataggttttacagaaggcgacacatgttgttcagagtgaagtggacaa

SEQ ID NO: 629634 - DNA, 120 bp, Artificial Sequence
  ENSG00000179387_53 (sequence is synthesized)
gtgaatcactgaagtgatttgagacagatatcaggatactcatggcaatactaggactatgattttgacagtagctttttaaattggttctggatatcttacatttgaatggcgtacatt

SEQ ID NO: 629635 - DNA, 80 bp, Artificial Sequence
  ENSG00000179388_0 (sequence is synthesized)
gggagcttttgggcagcagtgagcttgctaggaagcggcggggctggtggtggtggtagcagcggcggcagcggcggcag

SEQ ID NO: 629636 - DNA, 120 bp, Artificial Sequence
  ENSG00000179388_1 (sequence is synthesized)
ggcggtggcggtggcagatcggggggcgggggggcggcgggcgcgtgtctgtttgtgagatcaatactgaggccgcgtccgacccccttgagccgagatccccccccagcccagccccca

SEQ ID NO: 629637 - DNA, 120 bp, Artificial Sequence
  ENSG00000179388_2 (sequence is synthesized)
ccccaccccccgcacacgccccaccccccccacgacccagcctcataccgcaccagctgaggcacccaagaggattaccccctggggccctctcccgccccccaaaaaagagaagatccc

SEQ ID NO: 629638 - DNA, 120 bp, Artificial Sequence
  ENSG00000179388_3 (sequence is synthesized)
ctctcctggcccatcccttcccttcttccctcccccctccccccgaactttccctctcgcatgcttttcccctgcaccacggatcgcctctcggatgccgcttgcctggaagctgcgtta

SEQ ID NO: 629639 - DNA, 120 bp, Artificial Sequence
  ENSG00000179388_4 (sequence is synthesized)
ggagcgagcggcggcggtggcggcggtggcggcggcggcggcagctcgggagtgctatgaccggcaaactcgccgagaagctgccggtgaccatgagcagtttgctaaaccaactgcctg

SEQ ID NO: 629640 - DNA, 120 bp, Artificial Sequence
  ENSG00000179388_5 (sequence is synthesized)
acaatctgtaccccgaggagatccccagcgcgctcaacctcttctccggcagcagcgactcggtagtccattacaatcagatggctacagagaatgtaatggacatcggtctgaccaacg

SEQ ID NO: 629641 - DNA, 120 bp, Artificial Sequence
  ENSG00000179388_6 (sequence is synthesized)
agaagcccaacccggaactctcttactccggctccttccagccagcccccggcaacaagaccgtgacctacttgggaaagttcgccttcgactccccttccaactggtgccaggacaaca

SEQ ID NO: 629642 - DNA, 120 bp, Artificial Sequence
  ENSG00000179388_7 (sequence is synthesized)
tcattagcctcatgagcgccggcatcttgggggtgcccccggcttcaggggcgctcagcacgcagacgtccacggccagcatggtgcagccaccgcagggtgacgtggaggccatgtatc

SEQ ID NO: 629643 - DNA, 120 bp, Artificial Sequence
  ENSG00000179388_8 (sequence is synthesized)
ccgcgctacccccctactccaactgcggcgacctctactcagagcccgtgtctttccacgacccccagggcaatcccgggctcgcctattccccccaggattaccaatcggccaagccgg

SEQ ID NO: 629644 - DNA, 120 bp, Artificial Sequence
  ENSG00000179388_9 (sequence is synthesized)
cgttggacagcaatctcttccccatgattcctgactacaacctctaccaccaccccaacgacatgggctccattccggagcacaagcccttccagggcatggaccccatccgggtcaacc

SEQ ID NO: 629645 - DNA, 120 bp, Artificial Sequence
  ENSG00000179388_10 (sequence is synthesized)
cgccccctattacccctctggagaccatcaaggcattcaaagacaagcagatccacccgggctttggcagcctgccccagccgccgctcaccctcaagcccatccggccccgcaagtacc

SEQ ID NO: 629646 - DNA, 120 bp, Artificial Sequence
  ENSG00000179388_11 (sequence is synthesized)
ccaaccggcctagcaagacaccgctccacgaacggccccacgcgtgcccggccgagggctgcgaccgccgtttcagccgttcggacgagctgacccggcacctgcgcatccacacgggcc

SEQ ID NO: 629647 - DNA, 120 bp, Artificial Sequence
  ENSG00000179388_12 (sequence is synthesized)
acaagcccttccagtgccggatctgcatgcggagcttcagccgcagcgaccacctcaccactcacatccgcactcatacgggcgagaagccctttgcctgcgagttctgcgggcgcaagt

SEQ ID NO: 629648 - DNA, 120 bp, Artificial Sequence
  ENSG00000179388_13 (sequence is synthesized)
ttgcgcgcagcgacgagcgcaagcgccacgccaagatccacctcaagcaaaaggagaagaaggcggagaagggcggtgcaccctctgcatcctcggcgccccccgtgtcgctggcccccg

SEQ ID NO: 629649 - DNA, 120 bp, Artificial Sequence
  ENSG00000179388_14 (sequence is synthesized)
tggtcaccacctgcgcctgaggatcgggcccccagatccccacttttcccctccagtgcctcccggctgctagcctgaaagcagcgggaaagccagccacggaggcgtaggggccgcgcc

SEQ ID NO: 629650 - DNA, 120 bp, Artificial Sequence
  ENSG00000179388_15 (sequence is synthesized)
ctggcctctccatggacgtgcggccccttgcttccccttcgatgcccccggttcccaacctttcacgccggccagcggtcaggggccagggctggaggcgccttcccctcgcggtccccc

SEQ ID NO: 629651 - DNA, 120 bp, Artificial Sequence
  ENSG00000179388_16 (sequence is synthesized)
acttagccaaggcgtgggggcggaaaggtggcgtctagcccgctttgttcagttcggatcgccttgatccaggggccgccgggccgcgccaaggacctgcaagggactgaaggcggagcc

SEQ ID NO: 629652 - DNA, 120 bp, Artificial Sequence
  ENSG00000179388_17 (sequence is synthesized)
catccaaccctcgcccgacccaaacacctcattgtttcccccacgtctccctctataccccctcgaagactcgagagggggagggggtaaggagcgcaccaaagcgcagagcttgctgcc

SEQ ID NO: 629653 - DNA, 120 bp, Artificial Sequence
  ENSG00000179388_18 (sequence is synthesized)
gtgtgagtgtgtgtgtgtgcgcgcgcgcaagcgtgtgtgtttaagactcttgagctgaactgggctgtgtttaccccaaactcttccccacctcgggtccccaagccgctgggagatgtc

SEQ ID NO: 629654 - DNA, 120 bp, Artificial Sequence
  ENSG00000179388_19 (sequence is synthesized)
ccatgctgggggtccgcacgtggctggaggaggtggtcttccatccgctctgaaatcatgtttcttagagaaatgcctcggatgccgccgacgcggtgctgctgccgccgcttcgggttt

SEQ ID NO: 629655 - DNA, 120 bp, Artificial Sequence
  ENSG00000179388_20 (sequence is synthesized)
ggcccctcagaacccctccttttctgagcgcttccctcttaggcctcagggcagtttgatctgtggggagaaagagcagccatcgctgagcctgccttttaaaatatatgtgtatttcct

SEQ ID NO: 629656 - DNA, 120 bp, Artificial Sequence
  ENSG00000179388_21 (sequence is synthesized)
tagccccactctaagaaatctatgttcctgagtttgccccctgccctcccactccttccccttctcccctctaaaccttctcccatctctttcaaaatcttttcccagaaaggcaggctt

SEQ ID NO: 629657 - DNA, 120 bp, Artificial Sequence
  ENSG00000179388_22 (sequence is synthesized)
caaccagccactccagctttgtgtcttctctcaattacatagcaatttctccttcccaccatcatggggaagctggctctgcttttgccctttgtcatcaccaacacaacagatagaatt

SEQ ID NO: 629658 - DNA, 120 bp, Artificial Sequence
  ENSG00000179388_23 (sequence is synthesized)
taaatataagtatatggtgtgcgtgtgtatgtatgtgtatgtatatgcatgcatgtgtataaagatgcacatgcgtacatatacataacatacacacaatatgtattcctagcaaaataa

SEQ ID NO: 629659 - DNA, 120 bp, Artificial Sequence
  ENSG00000179388_24 (sequence is synthesized)
aatctctaaggtacttggttatccagtgcagtgcaccggaataaagagaatttgtaggcgtatacagctttaaatgatttattttttatgaaaatgttaactgatgagattatatctaca

SEQ ID NO: 629660 - DNA, 120 bp, Artificial Sequence
  ENSG00000179388_25 (sequence is synthesized)
tacgtgtgttatgtgtgtggatatagatgcacacatatctgtacatatacatgtgagtgtacatatatacacatatacacatctatgtatggatatgtgtgtatacacatatacacatct

SEQ ID NO: 629661 - DNA, 120 bp, Artificial Sequence
  ENSG00000179388_26 (sequence is synthesized)
ctgtccaaaatttcctcaaagatatggggattttttcatgaatccatgtggatgaatgaggtgtctcctttccatacccagtctcaccttctccccaccctacctcacctcttctcaggc

SEQ ID NO: 629662 - DNA, 120 bp, Artificial Sequence
  ENSG00000179388_27 (sequence is synthesized)
acccctcttccccagctgtcctgccagcccttctcgtacagggtggctcctttgaagtggagtaatagggaaggttgctctctgccacagcttgcagcatggtcttgactgaatgtactg

SEQ ID NO: 629663 - DNA, 120 bp, Artificial Sequence
  ENSG00000179388_28 (sequence is synthesized)
ttcctgttagcgttacttctcctgtggtcagtaagttgcccagagagaaggaacaaaggtctggagtttacagaatgtctgtttttaaagtcactttatgcgttttccacttttttcttt

SEQ ID NO: 629664 - DNA, 120 bp, Artificial Sequence
  ENSG00000179388_29 (sequence is synthesized)
tttaagaaaaagaagtaccatttttgttttgttttgttttgatttttggtggtggataaataatactaaaaggactctagtggaaaggggggatatcgaagagcagggggttgtgaattt

SEQ ID NO: 629665 - DNA, 120 bp, Artificial Sequence
  ENSG00000179388_30 (sequence is synthesized)
ccaggtacttggactttttgtagaaggagagagaagaagatgaagtttgccaggagggcccatattttttcagctgaagggtaaaatctttctttgcagagacagtattttgctgaatac

SEQ ID NO: 629666 - DNA, 120 bp, Artificial Sequence
  ENSG00000179388_31 (sequence is synthesized)
tttttataatgtgatgattattaaaaaagcaaaaattttggtcacttccaagctagaaggaggaatcagataccctttaatattttttcctcgctccttctggtatatgcatgtcactgc

SEQ ID NO: 629667 - DNA, 120 bp, Artificial Sequence
  ENSG00000179388_32 (sequence is synthesized)
atgataattgagttttcctttgttttaataaaactgttctcagacattaagctaaactaagagaaaaataactttgttgccaaaaggttgtgctatccagattttttatatgtctgcatg

SEQ ID NO: 629668 - DNA, 120 bp, Artificial Sequence
  ENSG00000179388_33 (sequence is synthesized)
tttaaaaaaaaaaagcaacaaaagaaaatgcactctaacttatgtgaactgagagaaaaaaatcaggttttaaacaggaaaacctatggggaatgatattttttgaaagacttttgtata

SEQ ID NO: 629669 - DNA, 120 bp, Artificial Sequence
  ENSG00000179388_34 (sequence is synthesized)
aagttgagtacttagaaaaaagacaaaccagatgtaatatattttgtggatgtttttatttcttggatttatagtaccttatactaaggttaaaaaaatatgcttgatattgtgaaaagg

SEQ ID NO: 629670 - DNA, 120 bp, Artificial Sequence
  ENSG00000179388_35 (sequence is synthesized)
tgaaattcttcaccaacatttcatttgctcctttgtcatattgtaatgccaatataatatagttaatgaaaacagcatttttaaaaaccgaaatattgaaatggtgtaatgttgtaccat

SEQ ID NO: 629671 - DNA, 120 bp, Artificial Sequence
  ENSG00000179388_36 (sequence is synthesized)
ttgcactgtgagcaaatgctaatacagtaaatatattgtgtttgctgacaatcagccggcctataaatctccttattttatttcttgtttttatagcataaagctttagtttggcctgtt

SEQ ID NO: 629672 - DNA, 120 bp, Artificial Sequence
  ENSG00000179388_37 (sequence is synthesized)
ctcttcccgggaggagcccggcgtctttttcacccgcgctctccccccttactccctcagcctcccacccgggatggagccatgtgcggcgtggagtccccgcggtgggagagagaatgt

SEQ ID NO: 629673 - DNA, 120 bp, Artificial Sequence
  ENSG00000179388_38 (sequence is synthesized)
acccgcggggcgagggcctgccacggggaacgatcccggggccggggagctggggaagggcggcctctcccgccatggagacaccggccggttttccgccgctctccaccctccctagct

SEQ ID NO: 629674 - DNA, 120 bp, Artificial Sequence
  ENSG00000179388_39 (sequence is synthesized)
gatggatggatgggtggatgggtggatagataaatggatggagagatgggggcgcgctgggaattttgcggggggcgagttgcttttcccacccactcctcccgccctcctcgatcgaga

SEQ ID NO: 629675 - DNA, 120 bp, Artificial Sequence
  ENSG00000179388_40 (sequence is synthesized)
ccactcctcccgccctcctcgatcgagaaggctaggttggcgacgccacggtagaggcttcggttctcccgggtgggggcagccgccgaccggagggagagaatgtaatggacatcggtc

SEQ ID NO: 629676 - DNA, 120 bp, Artificial Sequence
  ENSG00000179397_0 (sequence is synthesized)
acacttctccctcgctggtcttcaggcccggcccgccctgtccagaggcgccgggacccaggcgcctgcagccgcccgccgggccgacgtcccacgggaatgcgcgaggcctggacggga

SEQ ID NO: 629677 - DNA, 120 bp, Artificial Sequence
  ENSG00000179397_1 (sequence is synthesized)
gtggccgaggcggttgggcggaggcggagcaggcgccatgtcagcccgggaagtggccgtgctgctgctgtggctgagctgctatggctccgccctttggaggtattccactaacagccc

SEQ ID NO: 629678 - DNA, 120 bp, Artificial Sequence
  ENSG00000179397_2 (sequence is synthesized)
aaactatcgcatttttagtaccagaagtactattaagttagagtatgaaggaacattatttactgagtggagtgtgccagaaacttgttttgtgctaaataaaagctcacccacgacaga

SEQ ID NO: 629679 - DNA, 120 bp, Artificial Sequence
  ENSG00000179397_3 (sequence is synthesized)
attgcgttgttcctcacctggtgttcacgctataaaaccaattgttactggcccagatgaagaagaacgctatttatttgtggaaagttctcatacttgctttctgtggtactatagagt

SEQ ID NO: 629680 - DNA, 120 bp, Artificial Sequence
  ENSG00000179397_4 (sequence is synthesized)
tagacatttctttaacaactttacccagcttatcactgtgtgggcatatgatccagaaagtgcagatcctgatgagttgctggggaatgcagaagaaccttcaataaattccatagtact

SEQ ID NO: 629681 - DNA, 120 bp, Artificial Sequence
  ENSG00000179397_5 (sequence is synthesized)
cagcacacagatggccacattgggacagaagcctgtcatacatacagttctgaagagaaaagtttattcttcaaatgagaaaatgagaagggggacctggcgtattgtagtaccaatgac

SEQ ID NO: 629682 - DNA, 120 bp, Artificial Sequence
  ENSG00000179397_6 (sequence is synthesized)
aaaagatgatgcactaaaggagattagaggaaaccaagttacttttcaggattgctttattgcagattttcttattctgttgacttttcctttgttgaccatacctgaaattcctggtta

SEQ ID NO: 629683 - DNA, 120 bp, Artificial Sequence
  ENSG00000179397_7 (sequence is synthesized)
tttaccaatctcctcaccacgtggtagtcaattaatggcttcctgggatgcttgtgtagttgcatctgctgttttggtgacagatatggagacctttcacacaactgattcattcaaatc

SEQ ID NO: 629684 - DNA, 120 bp, Artificial Sequence
  ENSG00000179397_8 (sequence is synthesized)
ttggaccagaatcagagtgcctccagacattctgagtgatgatgaaagacggagtgtggctcatgtgatcttatcgcgggatggaatcgtttttcttataaatggtgttctttacataaa

SEQ ID NO: 629685 - DNA, 120 bp, Artificial Sequence
  ENSG00000179397_9 (sequence is synthesized)
gagttttcgtggatttataagactgggaggaattgtaaatcttcctgatggtggaattactggcatttcatcaagaaaatggtgttgggtcaattatttattaaaggctaaaggaagaag

SEQ ID NO: 629686 - DNA, 120 bp, Artificial Sequence
  ENSG00000179397_10 (sequence is synthesized)
aagcacctttgcagtctggacagaaaatgaaatttacctcggatccattcttcttaagtttgccagattagtaactaccacagaactgaaaaacatcctaagtctatcggtgactgctac

SEQ ID NO: 629687 - DNA, 120 bp, Artificial Sequence
  ENSG00000179397_11 (sequence is synthesized)
tctgaccatagacagggttgagtatacaggacaccctctggagattgctgtgtttttaaattattgcactgtatgtaacgtcaccaaaaagattttcttagtgatatataatgaagatac

SEQ ID NO: 629688 - DNA, 120 bp, Artificial Sequence
  ENSG00000179397_12 (sequence is synthesized)
aaaacagtgggtttcccaagactttacattagatgcccctattgacagtgttaccatgccacattttacattttcagcactgccaggattactgctatggaacaagcatagtatctacta

SEQ ID NO: 629689 - DNA, 120 bp, Artificial Sequence
  ENSG00000179397_13 (sequence is synthesized)
ttgttaccataatttcacctttactgggattttacagacacctgcaggacatggaaatctatcaatgctatcaaatgacagcattattcatgaagttttcatagattattatggagatat

SEQ ID NO: 629690 - DNA, 120 bp, Artificial Sequence
  ENSG00000179397_14 (sequence is synthesized)
acaaattacacaacaagagcattcattttcttaagtacatctggtcaaacatatttcctgtatgctttggatgatggcacaatacaaatacaggactatcccttacatctggaagcacaa

SEQ ID NO: 629691 - DNA, 120 bp, Artificial Sequence
  ENSG00000179397_15 (sequence is synthesized)
agtatagctttcacaacaaaagacaaatgcccatacatggcatttcataacaatgttgctcatgttttttactttttggacaagggagaggctctgacagtttggactcagatcgtctat

SEQ ID NO: 629692 - DNA, 120 bp, Artificial Sequence
  ENSG00000179397_16 (sequence is synthesized)
ccagaaaacactggtctgtatgttattgtggaatcttatggcccaaaaatattacaagagagtcatgagatttcctttgaagctgcctttggatactgcaccaaaactctgacactaaca

SEQ ID NO: 629693 - DNA, 120 bp, Artificial Sequence
  ENSG00000179397_17 (sequence is synthesized)
ttttatcagaatgtagattatgagagaatatctgattactttgagacacaagacaagcacacgggtcttgtgctggttcagtttcgacctagtgaatattcaaaagcatgtccaatagcc

SEQ ID NO: 629694 - DNA, 120 bp, Artificial Sequence
  ENSG00000179397_18 (sequence is synthesized)
caaaaggtgttccaaatagctgttggctgtgatgataaaaaattcattgcaattaaaggatttagtaaaaaaggatgtcatcaccatgatttttcatacgtgattgaaaagtcatatctg

SEQ ID NO: 629695 - DNA, 120 bp, Artificial Sequence
  ENSG00000179397_19 (sequence is synthesized)
aggcatcagccatcgaaaaacttgagagtaaggtatatttggggagaatatggctgccctctgaggcttgacttcacagaaaagtttcaacctgtggttcaactatttgatgataatggc

SEQ ID NO: 629696 - DNA, 120 bp, Artificial Sequence
  ENSG00000179397_20 (sequence is synthesized)
tatgttaaagacgttgaagcaaatttcatagtgtgggaaatacacggcagggatgactatagctttaataatactatggcacagagtggttgtttacatgaagcacagacatggaagtca

SEQ ID NO: 629697 - DNA, 120 bp, Artificial Sequence
  ENSG00000179397_21 (sequence is synthesized)
atgattgaacttaacaagcacctcccactagaagaagtctggggacctgagaactataaacactgtttttcttatgctattggaaaaccaggagacttaaatcaaccatacgagattatc

SEQ ID NO: 629698 - DNA, 120 bp, Artificial Sequence
  ENSG00000179397_22 (sequence is synthesized)
aacagttctaatggtaaccatatattttggcccatgggccattctggaatgtatgtatttcgtgtgaagatcctggatccaaactatagtttctgtaacctaacagctatgtttgcaata

SEQ ID NO: 629699 - DNA, 120 bp, Artificial Sequence
  ENSG00000179397_23 (sequence is synthesized)
gagacatttggactgattcccagtccaagtgtctacctggtagcttctttcctcttcgtcctgatgctgctcttcttcactattcttgttttgagctactttcggtacatgaggatttat

SEQ ID NO: 629700 - DNA, 120 bp, Artificial Sequence
  ENSG00000179397_24 (sequence is synthesized)
agacgatatatttatgaaccacttcacaaacctcaaagaaaacgtaagaagaattaggaaaactgaaagtttgtttattacagatatatgcatatagagaaacagtgtattacatagtga

SEQ ID NO: 629701 - DNA, 120 bp, Artificial Sequence
  ENSG00000179397_25 (sequence is synthesized)
tattgagagtgtgtgtttgaccaagaaatactaaatataagctcgtagtaggcatcaccaaattcaagatctgaaaaatattcttgaactatctccaaaatagaaatgttttcatatata

SEQ ID NO: 629702 - DNA, 120 bp, Artificial Sequence
  ENSG00000179397_26 (sequence is synthesized)
ttgttattaaattaatcctttgtttgccttcattttaaagatactctatgtactctcacatggcatgaaaaaataaactaaatttgactattacaatcctttgtaagaatgaaagtgaat

SEQ ID NO: 629703 - DNA, 120 bp, Artificial Sequence
  ENSG00000179397_27 (sequence is synthesized)
ttttgaaaatatatctatgtgtcaagtatcattttgcatgaaacttttcacatgaaaccttatatgactgtagttaatttatatataaaggatttaataaaggtgtgtggatttaaataa

SEQ ID NO: 629704 - DNA, 120 bp, Artificial Sequence
  ENSG00000179397_28 (sequence is synthesized)
agtgagttagccaggagaaagagcaaaggaggaggatctcactcacctgccccgctctcacctgccagcagctagagtccagcagccagggcatatgagcacagcatacaggatagtctg

SEQ ID NO: 629705 - DNA, 120 bp, Artificial Sequence
  ENSG00000179397_29 (sequence is synthesized)
gtgttttgctgggatggaaaatgttaattcggttccccatgcagcccgctgggcagcatcttgcaaattaagaatctcgtctatgtttccataaaacagtaaagggtgattttctcttgt

SEQ ID NO: 629706 - DNA, 120 bp, Artificial Sequence
  ENSG00000179397_30 (sequence is synthesized)
aaagtggcttgaaccccacagctatagcacaagcaagcagggtcatcaaaagccactccattcttctggaaactgcagagaaagggaacccggaaatctggtatgccggcacagaggggg

SEQ ID NO: 629707 - DNA, 120 bp, Artificial Sequence
  ENSG00000179397_31 (sequence is synthesized)
gattgtttatttggaataactaatctggcattttgctattaacaaaaacttgatggaaacattttggatttaaatttgctttggtaaatcaaatcctatttttatattaaattgtatcat

SEQ ID NO: 629708 - DNA, 120 bp, Artificial Sequence
  ENSG00000179397_32 (sequence is synthesized)
ggtatttttaaaatgcttcatcttaatttctgtgtgatcttttgttggttctgtgttactattttaattttcactgctgtaaatatgtgtttgcagattattaaatatgtgttaaacatg

SEQ ID NO: 629709 - DNA, 120 bp, Artificial Sequence
  ENSG00000179397_33 (sequence is synthesized)
gatcaaagctgctgtccacaaagaattgctcatgtcaccaaaatcaagaataggacagagatacctgctggtcatcgctgttttgaaagttctgacgtcacaggagaaaaataaaataaa

SEQ ID NO: 629710 - DNA, 120 bp, Artificial Sequence
  ENSG00000179399_0 (sequence is synthesized)
atcccaggttagctgctgcgagccgagccgggcggcggaggcggcggcggcggcggcagtggcggcagtggcggcagtggcggcagcggcagcagttgcagcagtggtggccagagcgga

SEQ ID NO: 629711 - DNA, 120 bp, Artificial Sequence
  ENSG00000179399_1 (sequence is synthesized)
tgcttgcgggctccctgcggctccactagttttcttcgccccgcccagccgcccactcttctcggctagggaagaagaccagagggtgctcagctggaaaactctggtgtctcagcttag

SEQ ID NO: 629712 - DNA, 120 bp, Artificial Sequence
  ENSG00000179399_2 (sequence is synthesized)
ggcctcctccgggaagagctaactgctcccaggtgaagccggtgcccgcgggcggtccgtacaccccgcagccggctcgcaccgctcgagagcctcggccgctgtgtcttccacgtctgc

SEQ ID NO: 629713 - DNA, 120 bp, Artificial Sequence
  ENSG00000179399_3 (sequence is synthesized)
agctcagccagggcgcgcagggcgagtggggtccactggcgggtaaaggggaccaggacggcgaggatggacgcacagacctggcccgtgggctttcgctgcctcctccttctggccctg

SEQ ID NO: 629714 - DNA, 120 bp, Artificial Sequence
  ENSG00000179399_4 (sequence is synthesized)
gttgggtccgcccgcagcgagggcgtgcagacctgcgaagaagttcggaaacttttccagtggcggctgctgggagctgtcagggggctgccggattcgccgcgggcaggacctgatctt

SEQ ID NO: 629715 - DNA, 120 bp, Artificial Sequence
  ENSG00000179399_5 (sequence is synthesized)
caggtttgcatatccaaaaagcctacatgttgcaccaggaagatggaggagagatatcagattgcggctcgccaggatatgcagcagtttcttcaaacgtccagctctacattaaagttt

SEQ ID NO: 629716 - DNA, 120 bp, Artificial Sequence
  ENSG00000179399_6 (sequence is synthesized)
ctaatatctcgaaatgcggctgcttttcaagaaacccttgaaactctcatcaaacaagcagaaaattacaccagtatacttttttgcagtacctacaggaacatggccttggaggctgct

SEQ ID NO: 629717 - DNA, 120 bp, Artificial Sequence
  ENSG00000179399_7 (sequence is synthesized)
gcttcggttcaggagttcttcactgatgtggggctgtatttatttggtgcggatgttaatcctgaagaatttgtaaacagattttttgacagtctttttcctctggtctacaaccacctc

SEQ ID NO: 629718 - DNA, 120 bp, Artificial Sequence
  ENSG00000179399_8 (sequence is synthesized)
attaaccctggtgtgactgacagttccctggaatactcagaatgcatccggatggctcgccgggatgtgagtccatttggtaatattccccaaagagtaatgggacagatggggaggtcc

SEQ ID NO: 629719 - DNA, 120 bp, Artificial Sequence
  ENSG00000179399_9 (sequence is synthesized)
ctgctgcccagccgcacttttctgcaggcactcaatctgggcattgaagtcatcaacaccacagactatctgcacttctccaaagagtgcagcagagccctcctgaagatgcaatactgc

SEQ ID NO: 629720 - DNA, 120 bp, Artificial Sequence
  ENSG00000179399_10 (sequence is synthesized)
ccgcactgccaaggcctggcgctcactaagccttgtatgggatactgcctcaatgtcatgcgaggctgcctggcgcacatggcggagcttaatccacactggcatgcatatatccggtcg

SEQ ID NO: 629721 - DNA, 120 bp, Artificial Sequence
  ENSG00000179399_11 (sequence is synthesized)
ttggaagaactctcggatgcaatgcatggaacatacgacattggacacgtgctgctgaactttcacttgcttgttaatgatgctgtgttacaggctcacctcaatggacaaaaattattg

SEQ ID NO: 629722 - DNA, 120 bp, Artificial Sequence
  ENSG00000179399_12 (sequence is synthesized)
tttgatcagagcaaagagaagcatggaatgaagaccaccacaaggaacagtgaagagacgcttgccaacagaagaaaagaatttatcaacagccttcgactgtacaggtcattctatgga

SEQ ID NO: 629723 - DNA, 120 bp, Artificial Sequence
  ENSG00000179399_13 (sequence is synthesized)
ggtctagctgatcagctttgtgctaatgaattagctgctgcagatggacttccctgctggaatggagaagatatagtaaaaagttatactcagcgtgtggttggaaatggaatcaaagcc

SEQ ID NO: 629724 - DNA, 120 bp, Artificial Sequence
  ENSG00000179399_14 (sequence is synthesized)
cagtctggaaatcctgaagtcaaagtcaaaggaattgatcctgtgataaatcagattattgataaactgaagcatgttgttcagttgttacagggtagatcacccaaacctgacaagtgg

SEQ ID NO: 629725 - DNA, 120 bp, Artificial Sequence
  ENSG00000179399_15 (sequence is synthesized)
gaacttcttcagctgggcagtggtggaggcatggttgaacaagtcagtggggactgtgatgatgaagatggttgcgggggatcaggaagtggagaagtcaagaggacactgaagatcaca

SEQ ID NO: 629726 - DNA, 120 bp, Artificial Sequence
  ENSG00000179399_16 (sequence is synthesized)
gactggatgccagatgatatgaacttcagtgatgtaaagcaaatccatcaaacagacactggcagtactttagacacaacaggagcaggatgtgcagtggcgactgaatctatgacattc

SEQ ID NO: 629727 - DNA, 120 bp, Artificial Sequence
  ENSG00000179399_17 (sequence is synthesized)
actctgataagtgtggtgatgttacttcccgggatttggtaactgaactcttctgtcctgacataccttactgaagtctcgatttcttctctctctgcatatgcctggaataagagatcc

SEQ ID NO: 629728 - DNA, 120 bp, Artificial Sequence
  ENSG00000179399_18 (sequence is synthesized)
tttttcaatgtaacaattatatttatgaaaagatatgttacactaacttctcagaagccaagctgaaatattcataaagtccctaaaactcaacgtttaaatgacacactttaaaaatat

SEQ ID NO: 629729 - DNA, 120 bp, Artificial Sequence
  ENSG00000179399_19 (sequence is synthesized)
gtcttttttcaatctaactgaaaaccttcttaacttctaatatattaaatctgaagatgtgaagggcacagaagtgactttgaataagaagaatttagtgtatctgtaattttattatca

SEQ ID NO: 629730 - DNA, 120 bp, Artificial Sequence
  ENSG00000179399_20 (sequence is synthesized)
attccaagccccttcctttctaaattaaaaatgttttcatttgaaagtgtatttgccagacaatgaaaacagtatgcagtatttcttaaagtattgaaattagaatatcatgaaataaat

SEQ ID NO: 629731 - DNA, 120 bp, Artificial Sequence
  ENSG00000179399_21 (sequence is synthesized)
caaaacatacaatggcaagtagtatgcatgcatattcaagagactcttccatttttgcaagctgtagaaggaaatgtctgaatgtctataagttatggggtagattcttgagaagcattt

SEQ ID NO: 629732 - DNA, 120 bp, Artificial Sequence
  ENSG00000179399_22 (sequence is synthesized)
catataatttcactgaagaaccttgataattttgacccactgtaacttagccactgatgaaccttaaagctgagtattttattaacacctgatttgtattccattatattcaaaatgcat

SEQ ID NO: 629733 - DNA, 120 bp, Artificial Sequence
  ENSG00000179399_23 (sequence is synthesized)
ctttggtattgtgcctctgctcccatctctctctttgcctcatagatttagctatgttgggaagcacatgcttgctctaggaatatctccaataaagctgttaactatttggtggaaaaa

SEQ ID NO: 629734 - DNA, 120 bp, Artificial Sequence
  ENSG00000179399_24 (sequence is synthesized)
tgataagtgtggtgatgttacttcccgggatttgaacaagctgacagagcataggagcatgttatctgggcctctgtattgcaggagctcgctcagaaaaatgaagaaagacgagaaaat

SEQ ID NO: 629735 - DNA, 120 bp, Artificial Sequence
  ENSG00000179399_25 (sequence is synthesized)
tcagcaagaaagcagatggaagcttagaatcacagcttatttaaaaggacagcttataaatatgatgtgtttataattttactatttcattttcctcatttataaaaaaattaaagaaaa

SEQ ID NO: 629736 - DNA, 120 bp, Artificial Sequence
  ENSG00000179399_26 (sequence is synthesized)
tctcatgagaatttcatcacagatggttaactgcaataaatttatattgaataatttgatttacttctattttgactacacatctattatagtatgggtgtgattgaatgcaaatccaca

SEQ ID NO: 629737 - DNA, 120 bp, Artificial Sequence
  ENSG00000179399_27 (sequence is synthesized)
gacacatgtacacatttatctatatctatccataaaatatacatattcatgtttattgttgctatgattgtattgatgcttatatttatatttgtataaaatttgcctttatgtcagtta

SEQ ID NO: 629738 - DNA, 120 bp, Artificial Sequence
  ENSG00000179399_28 (sequence is synthesized)
acagtgagaatggggaaagtcagctaagtgacaagcagttgttgaaacaaatacttgatcagaatggtggaagtgatatgggctaggagcaactaagagagtcatttcaaggtaaatagg

SEQ ID NO: 629739 - DNA, 80 bp, Artificial Sequence
  ENSG00000179403_0 (sequence is synthesized)
agccccgagcgagcgagcgagcgagcgagttgccgagcgcgccccgtccctcgcgcgcgatgctcccctggacggcgctc

SEQ ID NO: 629740 - DNA, 120 bp, Artificial Sequence
  ENSG00000179403_1 (sequence is synthesized)
gcgcggagcgcggtccaccagcatcagccccccgaggggacctgatgttcctgctggacagctcagccagcgtctctcactacgagttctcccgggttcgggagtttgtggggcagctgg

SEQ ID NO: 629741 - DNA, 120 bp, Artificial Sequence
  ENSG00000179403_2 (sequence is synthesized)
tggctccactgcccctgggcaccggggccctgcgtgccagtctggtgcacgtgggcagtcggccatacaccgagttccccttcggccagcacagctcgggtgaggctgcccaggatgcgg

SEQ ID NO: 629742 - DNA, 120 bp, Artificial Sequence
  ENSG00000179403_3 (sequence is synthesized)
tgcgtgcttctgcccagcgcatgggtgacacccacactggcctggcgctggtctatgccaaggaacagctgtttgctgaagcatcaggtgcccggccaggggtgcccaaagtgctggtgt

SEQ ID NO: 629743 - DNA, 120 bp, Artificial Sequence
  ENSG00000179403_4 (sequence is synthesized)
gggtgacagatggcggctccagcgaccctgtgggcccccccatgcaggagctcaaggacctgggcgtcaccgtgttcattgtcagcaccggccgaggcaacttcctggagctgtcagccg

SEQ ID NO: 629744 - DNA, 120 bp, Artificial Sequence
  ENSG00000179403_5 (sequence is synthesized)
ctgcctcagcccctgccgagaagcacctgcactttgtggacgtggatgacctgcacatcattgtccaagagctgaggggctccattctcgacgcgatgcggccgcagcagctccatgcca

SEQ ID NO: 629745 - DNA, 120 bp, Artificial Sequence
  ENSG00000179403_6 (sequence is synthesized)
cggagatcacgtccagcggcttccgcctggcctggccacccctgctgaccgcagactcgggctactatgtgctggagctggtgcccagcgcccagccgggggctgcaagacgccagcagc

SEQ ID NO: 629746 - DNA, 120 bp, Artificial Sequence
  ENSG00000179403_7 (sequence is synthesized)
tgccagggaacgccacggactggatctgggccggcctcgacccggacacggactacgacgtggcgctagtgcctgagtccaacgtgcgcctcctgaggccccagatcctgcgggtgcgca

SEQ ID NO: 629747 - DNA, 80 bp, Artificial Sequence
  ENSG00000179403_8 (sequence is synthesized)
gtcgggggctgggccggcccccacgcagctcgccgccctccccgccccagaggaggccgggccagagcgcatcgtcatct

SEQ ID NO: 629748 - DNA, 120 bp, Artificial Sequence
  ENSG00000179403_9 (sequence is synthesized)
gcatcgtcatctcccacgcccggccgcgcagcctccgcgtgagttgggccccagcgctgggctcagccgcggcgctcggctaccacgtgcagttcgggccgctgcggggcggggaggcgc

SEQ ID NO: 629749 - DNA, 120 bp, Artificial Sequence
  ENSG00000179403_10 (sequence is synthesized)
gaggtgcccgcgggccgcaactgcaccacgctgcagggcctggcgccgggcaccgcctacctggtgaccgtgaccgccgccttccgctcgggccgcgagagcgcgctgtccgccaaggcc

SEQ ID NO: 629750 - DNA, 80 bp, Artificial Sequence
  ENSG00000179403_11 (sequence is synthesized)
cgccccgaccccggggaccgccagccgtgagccgtaagccggcgtccccgcccagccgagagggccggcgcctacctgag

SEQ ID NO: 629751 - DNA, 120 bp, Artificial Sequence
  ENSG00000179403_12 (sequence is synthesized)
cgcctacctgagggcccctgtgtcccgaacccggagcggaggcgcccaacccggcagacgggtgcaggcccggcctttccccacgcggactccgcgcgaccccggccctctccctgcggc

SEQ ID NO: 629752 - DNA, 120 bp, Artificial Sequence
  ENSG00000179403_13 (sequence is synthesized)
ccgcctggcgcctgccctccagggctggggcctcgcctggcgggaccccgcagcagccccggccccatccccgcccagagccgggcgtcgtgtgggtccgtgggtgataattgagagcgt

SEQ ID NO: 629753 - DNA, 120 bp, Artificial Sequence
  ENSG00000179403_14 (sequence is synthesized)
cagacccaggactgttcagggaggagccccggtcagactcccacgtgtgaagaccgggccccaagtggcaagggctggcctggggcgggcagcttgggtcctggacgttgataggaagcg

SEQ ID NO: 629754 - DNA, 120 bp, Artificial Sequence
  ENSG00000179403_15 (sequence is synthesized)
gaaggggaatcgcgggaagctggcccaggtcaggtccgcaaaggcttctgaagaagaggaagggcgagtaggggcacctggacgctgatggtggccaggatgctcagctggccaggaggg

SEQ ID NO: 629755 - DNA, 120 bp, Artificial Sequence
  ENSG00000179403_16 (sequence is synthesized)
cagcacctgctggggacggtggccctgccttcatgcccaggacaccagctgggtccagctagcagccactgggaatcagaggaatggggcagagctgggcattcaggaccttgaggacac

SEQ ID NO: 629756 - DNA, 120 bp, Artificial Sequence
  ENSG00000179403_17 (sequence is synthesized)
gtgaccccacccgcccaccgccactatcaggccccgggaccgcactgacaggaaaccttccgtcgtgagggagcacttcccaggggccgcagggacgacactctccagggaggccccagc

SEQ ID NO: 629757 - DNA, 120 bp, Artificial Sequence
  ENSG00000179403_18 (sequence is synthesized)
actactcactgccctggggtccgtgggcaagttgcccagggtgggggtgcctagccaggtgcagtccccgccccgcctagtcctcggcgtcacgcaatgctcacctcgcctcttccccac

SEQ ID NO: 629758 - DNA, 120 bp, Artificial Sequence
  ENSG00000179403_19 (sequence is synthesized)
taacatcccagactttaaaattcagtaaatcagatgtacaccgagcctgcagtctcgctaggatgctttactcctccacaaacagcagccgccgacaggacagcttgtgaacgtctccgc

SEQ ID NO: 629759 - DNA, 120 bp, Artificial Sequence
  ENSG00000179403_20 (sequence is synthesized)
cttttggggtgtccggggagaggaggtggagctgtcccctcccagtgtcaggcctccttggtcctcatgtgcaccttttattcagagagcttgggcccccttcctttggagctgggccca

SEQ ID NO: 629760 - DNA, 120 bp, Artificial Sequence
  ENSG00000179403_21 (sequence is synthesized)
gggcaggtggctggaatgcagaggacaagggggctggggcctctgcagggccattcccaccgcagtctctgccacggcccggagccctgggcccagggccacgcgggctccctctgctgg

SEQ ID NO: 629761 - DNA, 120 bp, Artificial Sequence
  ENSG00000179403_22 (sequence is synthesized)
caaagccacaccctgcaccgcatggggtccactgcccctttccccacgtggactctgcgtgaccccaggaactgcagcattgaggtggtctcagtccctccctcaggtctggtgggcatt

SEQ ID NO: 629762 - DNA, 120 bp, Artificial Sequence
  ENSG00000179403_23 (sequence is synthesized)
gtgccaggggccaccttcgggacagctggccttggcaccgtctcccaagaacccagctctgtgcatcccgtggccccaccagaaacccaaggccacaccgcccaccagctgggtgtggtc

SEQ ID NO: 629763 - DNA, 120 bp, Artificial Sequence
  ENSG00000179403_24 (sequence is synthesized)
accattcatggagggccggctggggccaggctcaccacgcagagtttgccctccggtgtgatgatgcatgagacacagtaggcccccctgcctgtgtgtgcagggggtgtctgtgggggg

SEQ ID NO: 629764 - DNA, 120 bp, Artificial Sequence
  ENSG00000179403_25 (sequence is synthesized)
gccctgctggctggactttgggtttctcctgagctccccttagcccccaagtcaggccacggaggcctgagtaggacccatgggctgtgtgtgtcactgcaggtggcgtgctcacaactg

SEQ ID NO: 629765 - DNA, 120 bp, Artificial Sequence
  ENSG00000179403_26 (sequence is synthesized)
cactgctggtcggcaggtggccagggttgcaggcccgggcctcgggccccacctcctctggaggggtaggatctccttcgtgcagcccctgccccctaccctgttctccggagtgttggc

SEQ ID NO: 629766 - DNA, 120 bp, Artificial Sequence
  ENSG00000179403_27 (sequence is synthesized)
agatctgagcccacggtcacgtgagaggagatgcctcttgcacactgagcccaggcccagctcacggagcaccctgcaggtggcagcggggcaccaggggctcattcctggtggcctcag

SEQ ID NO: 629767 - DNA, 120 bp, Artificial Sequence
  ENSG00000179403_28 (sequence is synthesized)
tggcttctgtggacgactcagactcacatgagaagctgggaggagctccagctctgcaatcccgagagggcagagcgggggccctggccacaaccctgctccccacatacccgtctggca

SEQ ID NO: 629768 - DNA, 120 bp, Artificial Sequence
  ENSG00000179403_29 (sequence is synthesized)
gaggctctgcctcccctctgcccatctctgcacaccaaggctgagcacagcacaaggcctcacggagagggtgaaaaggcactgccgtctccatctcagtgccaaggaatgcccctttca

SEQ ID NO: 629769 - DNA, 120 bp, Artificial Sequence
  ENSG00000179403_30 (sequence is synthesized)
gaagccctcgtctgagaagtgctgccccttatgtagccccaggcattttaaaatctttgaatctgcaccaagtctcagaacagctctggccccggagtgctccgtccaggccgctgtgaa

SEQ ID NO: 629770 - DNA, 120 bp, Artificial Sequence
  ENSG00000179403_31 (sequence is synthesized)
ccggctgtccccgcgtctcctccacctcccctgacacaatcctggccccgactcagtccacccagggtgcagtgcagaggctgatacccgccaggacttccttgccaagggcccggccac

SEQ ID NO: 629771 - DNA, 120 bp, Artificial Sequence
  ENSG00000179403_32 (sequence is synthesized)
gtcacaaggccactgcacgcttttcgacatgcacctggaaatcgggaagggccatgctgcagttgcttctagttgagacgagaagagcgacaaggttgtgatccacgtggcaggtgttca

SEQ ID NO: 629772 - DNA, 120 bp, Artificial Sequence
  ENSG00000179403_33 (sequence is synthesized)
gaaggctgggggcgggcagcgctggggagagccctgggtacttcgaggagaccccgaagggaggctgctcccacacctgcgccagtttccaccctctctgtgagcagggctgcggtcacc

SEQ ID NO: 629773 - DNA, 120 bp, Artificial Sequence
  ENSG00000179403_34 (sequence is synthesized)
tcccacatctgaagagaaccaacctgaggatttcacgctggctgcgtgccagaccagtccctgacaggttgtgcgaggcccttcgctggacagcccattgctggccactggacggagagg

SEQ ID NO: 629774 - DNA, 120 bp, Artificial Sequence
  ENSG00000179403_35 (sequence is synthesized)
cagagggggctgaaattcgggcccatgcctctgtgagcgatgacggagcaacagctctccagcacgtgaagctctccagacagctgttcgtgagaagccagacagaggcctggggtctca

SEQ ID NO: 629775 - DNA, 120 bp, Artificial Sequence
  ENSG00000179403_36 (sequence is synthesized)
gtccagatttctggggagtggggtgtccaagcgtgggccacgctgctgggagccacctagggaagcaggtcgcctgtttctatagtgacggtaataaaccaagtcaattttctatagtga

SEQ ID NO: 629776 - DNA, 120 bp, Artificial Sequence
  ENSG00000179403_37 (sequence is synthesized)
gtccctcgcgcgcgatgctcccctggacggcgctcggcctggccctgagcttgcggctggcgctggcgcggagcggcgcggagcgcggacctttgggagaaggcaagcatccacttaagg

SEQ ID NO: 629777 - DNA, 80 bp, Artificial Sequence
  ENSG00000179403_38 (sequence is synthesized)
tgtccctgcgtgtcggggtccgctcgtgcgcgcctctccggggtctgtgcgcgtggccctccgctcgcgccggagggcgt

SEQ ID NO: 629778 - DNA, 120 bp, Artificial Sequence
  ENSG00000179403_39 (sequence is synthesized)
cagccacctctcgtctgggcctcaccaagaccccaagactcaagagctcctgtctcaccagtgggaccctccagtcctgctgggggtgtgtcctgggtcctggagtctgggcccctcact

SEQ ID NO: 629779 - DNA, 120 bp, Artificial Sequence
  ENSG00000179403_40 (sequence is synthesized)
gggtagggtatatgggtaacaggcccagtgtggtcccactggacagggcctcaaccaaccatctcccactcccatgcctcttcctccaagaagcccaggtggcgtgggtgcttcgagtct

SEQ ID NO: 629780 - DNA, 120 bp, Artificial Sequence
  ENSG00000179407_0 (sequence is synthesized)
acaccgcctttgccatcaccaccgtcattgccccctctactaccaccaccatcaccaccaccgggtctgcctcagccagacccaccactgcctctaattagactgccaccatcatcactg

SEQ ID NO: 629781 - DNA, 120 bp, Artificial Sequence
  ENSG00000179407_1 (sequence is synthesized)
ccaccaccactgcccctccaatgccttcctgatgtcaccatctgctttctctctgctatcctcacacccaactccatcacaaccaccaccttcatctgagccgccatcaccctcacagta

SEQ ID NO: 629782 - DNA, 120 bp, Artificial Sequence
  ENSG00000179407_2 (sequence is synthesized)
cacagccctcaaatgtgtaccaaggaggaggacatttactacacgctgcaccctgaacagtctgggaccagcggtcagggaacaaggaatcgagatgctcacctgcagctcccaggtgag

SEQ ID NO: 629783 - DNA, 120 bp, Artificial Sequence
  ENSG00000179407_3 (sequence is synthesized)
cggctctctagagcttgcctgggagctgctgaggagctcacggtattccaggaagctccccatccatgcctcagcctgtggctcagaagcagggtcttcgcagaagattgccccgagctg

SEQ ID NO: 629784 - DNA, 120 bp, Artificial Sequence
  ENSG00000179407_4 (sequence is synthesized)
ttgcaaagctcaccattgtcacctgcctgcaacggcctctcttttccactctccaaatcccttgtattggcaggctctagtctggaattataccggtgatgggattctggaaaatccctc

SEQ ID NO: 629785 - DNA, 120 bp, Artificial Sequence
  ENSG00000179407_5 (sequence is synthesized)
agatttctccaggatgcaaggagaccatggaagaggaacaagcctgcaagggacagcaggtgctaactgctaaccgagacatagtgacaaaaatccagccacagagataaagaatcaggt

SEQ ID NO: 629786 - DNA, 120 bp, Artificial Sequence
  ENSG00000179407_6 (sequence is synthesized)
tcatctgtagctacatccagtggagaagttctgctcttcaactcctctgctaagccacatgtgtcagcaggtgtagaattgagtggaacacttctttggatttgctgtccgctgcagcct

SEQ ID NO: 629787 - DNA, 120 bp, Artificial Sequence
  ENSG00000179407_7 (sequence is synthesized)
tggccctggtttcacatcccctccctcactgactcgctgtgtgaccttgagcactgtgtgtctctgagcctggttcatccaagagtttaccgacggccctcgtgtgccagccactgtcct

SEQ ID NO: 629788 - DNA, 120 bp, Artificial Sequence
  ENSG00000179407_8 (sequence is synthesized)
agacagggacagactttcccgcctttgtggagcttaccccggaagacctggccagataatgggcacaaaaaaagcaggctcttgtccccaccccagcctgcctgaaccccaccttggcct

SEQ ID NO: 629789 - DNA, 120 bp, Artificial Sequence
  ENSG00000179407_9 (sequence is synthesized)
cctcttgcctcagctgctgcccagccatcggccgagtggacatacccaggacgcccttgcccgcctcccccaccacggccacagacctttgtcactcaccaaggctggaatcccgtggct

SEQ ID NO: 629790 - DNA, 120 bp, Artificial Sequence
  ENSG00000179407_10 (sequence is synthesized)
ttcccacacaccgttgtggccacctcaccagcaggggcaggcccatatgcccaggtttgcctggtgaggagctgggggcgggggtatgccccgccccgggagctgacgtcataaaaggag

SEQ ID NO: 629791 - DNA, 120 bp, Artificial Sequence
  ENSG00000179407_11 (sequence is synthesized)
ctctggagggcagcccactctggcctggccccacagcggcagtgtccctcccctccccccactcctctcagtgggggcccctccagtccctgagaattggtactacgaaaaggtgaactc

SEQ ID NO: 629792 - DNA, 120 bp, Artificial Sequence
  ENSG00000179407_12 (sequence is synthesized)
ctgggcagaatcttgcctagagcttgcggagtccagccaggcccctgctgaagggccccagaccaccggccacttctcccccgtccatctgaccagctgggcccctgcgcccacctggcc

SEQ ID NO: 629793 - DNA, 120 bp, Artificial Sequence
  ENSG00000179407_13 (sequence is synthesized)
tccacgttccctctcctctcacccacacccctggccatggctaactactacgaagtgctgggcgtgcaggccagcgcttccccggaggacatcaagaaagcctaccgcaagctggccctt

SEQ ID NO: 629794 - DNA, 120 bp, Artificial Sequence
  ENSG00000179407_14 (sequence is synthesized)
cgttggcaccccgacaagaaccctgacaataaggaggaggcggagaagaagttcaagctggtgtctgaggcctatgaggttctgtctgactccaagaaacgctccctgtatgaccgtgct

SEQ ID NO: 629795 - DNA, 120 bp, Artificial Sequence
  ENSG00000179407_15 (sequence is synthesized)
ggctgtgacagctggcgggctggtggcggggccagcacgccctaccacagccccttcgacaccggctacaccttccgtaaccctgaggacatcttccgggagttttttggtggcctggac

SEQ ID NO: 629796 - DNA, 120 bp, Artificial Sequence
  ENSG00000179407_16 (sequence is synthesized)
cctttctcctttgagttctgggacagcccattcaatagtgaccgtggtggccggggccatggcctgaggggggccttctcggcaggctttggagaatttccggccttcatggaggccttc

SEQ ID NO: 629797 - DNA, 120 bp, Artificial Sequence
  ENSG00000179407_17 (sequence is synthesized)
tcatccttcaacatgctgggctgcagcgggggcagccacaccaccttctcatccacctccttcgggggctccagttctggcagctcggggttcaagtcggtgatgtcgtccaccgagatg

SEQ ID NO: 629798 - DNA, 120 bp, Artificial Sequence
  ENSG00000179407_18 (sequence is synthesized)
atcaatggccacaaggtcaccaccaagcgcatcgtggagaacgggcaggagcgcgtggaggtggaggaagacgggcagctcaagtcggtgactgtgaacggcaaggagcagctcaaatgg

SEQ ID NO: 629799 - DNA, 120 bp, Artificial Sequence
  ENSG00000179407_19 (sequence is synthesized)
atggacagcaagtaggcgctggccacccggccctgccttcccaccaccaccaccgtgcatggggcagcaaacacgtggggccgcagacatagcctgatggttaataaatgtgccaagtga

SEQ ID NO: 629800 - DNA, 120 bp, Artificial Sequence
  ENSG00000179407_20 (sequence is synthesized)
tgtaatgccaagttagcaacagaaaatacagagccccacacctcagtgccatcaccatcgccatcggcactcacaccagcatgtccaccactgtgtccttctcacccctcggcacccccc

SEQ ID NO: 629801 - DNA, 120 bp, Artificial Sequence
  ENSG00000179407_21 (sequence is synthesized)
tctaccattgcctcttccacaaccaccctcaccaccatcctccattaatagcacaattcctgcctcctatcccatcaccaccacgggtgtccccggcaccagcagcaccaacactgctcc

SEQ ID NO: 629802 - DNA, 120 bp, Artificial Sequence
  ENSG00000179407_22 (sequence is synthesized)
cagcagagccatcgttaccagccccgctgtcagtcccatcttgagcatctggcatatgttggagaactgctcactccctcttccccatgggaatctcaggcctctcttcctattgccctg

SEQ ID NO: 629803 - DNA, 120 bp, Artificial Sequence
  ENSG00000179407_23 (sequence is synthesized)
agatttgcagaaccttcctgaaggaaacattctttgccccatggatactggccttgaccatgggatgcagcaagactgccacacatcatggcccaacagaagctttcagaggcagcccaa

SEQ ID NO: 629804 - DNA, 120 bp, Artificial Sequence
  ENSG00000179407_24 (sequence is synthesized)
gttcctgctgtctctgagtggcactgtcatgagagaggggtgtgcaggtcagagctgattctccagcctgggacccacagtgagaagctatgggaggtggggccctggcagctgcctgta

SEQ ID NO: 629805 - DNA, 120 bp, Artificial Sequence
  ENSG00000179407_25 (sequence is synthesized)
ggcaccagtgagtgaagtggggggaactagatgtttgtcgtgagccactgagaggtggaagctgtcactgtggtatagccgaacaagatacaacctctgctacctccaccaccttcacct

SEQ ID NO: 629806 - DNA, 120 bp, Artificial Sequence
  ENSG00000179407_26 (sequence is synthesized)
tcatcatcaccattactgtcaccactgccaaccacaccaatggctcactaggagccattcccatcacctcctcatcatacctgcaccatcactgccaaccacaacaaaggctcgctgtta

SEQ ID NO: 629807 - DNA, 120 bp, Artificial Sequence
  ENSG00000179407_27 (sequence is synthesized)
ccatctcctctggcatgaccatcaccaccaccactaccatcatcaattactctcaagcacaagccttgctgctgtcaccaccagcatcaccatcatcatgatcaactccaccatcaccca

SEQ ID NO: 629808 - DNA, 120 bp, Artificial Sequence
  ENSG00000179407_28 (sequence is synthesized)
taattactctccccctcacacccaccatgaccattacctccacatcaacactgctcccatggtcacctctactatataatgacaccttatccatctccatggacacccaccgtgcctctc

SEQ ID NO: 629809 - DNA, 120 bp, Artificial Sequence
  ENSG00000179407_29 (sequence is synthesized)
cccaccagcaacacagtcaacagcagtgcctctcccactgccaccgccatcatggagaactgtgcagggcaagcatctttctcccgccccaggaacaagcctgcaagggacagcaggtgc

SEQ ID NO: 629810 - DNA, 120 bp, Artificial Sequence
  ENSG00000179409_0 (sequence is synthesized)
agcaggcctaagcgcggccgccgtggctcctgcgtctcccatcgtgccgtgcgtcccgcgccgcgttcgagttctcggaggggagggggcgttagccccgcgcagccgccggcgtcgccg

SEQ ID NO: 629811 - DNA, 120 bp, Artificial Sequence
  ENSG00000179409_1 (sequence is synthesized)
ccatggacctaggacccttgaacatctgtgaagaaatgactattctgcatggaggcttcttgctggccgagcagctgttccaccctaaggcactggcagaattaacaaagtctgactggg

SEQ ID NO: 629812 - DNA, 120 bp, Artificial Sequence
  ENSG00000179409_2 (sequence is synthesized)
aacgtgttggacggcccatcgtggaggccttaagggagatctcctcggctgcagcacactcccagccctttgcctggaagaagaaagccctgatcatcatctgggccaaggttctgcagc

SEQ ID NO: 629813 - DNA, 120 bp, Artificial Sequence
  ENSG00000179409_3 (sequence is synthesized)
cgcaccccgtgaccccgtccgacacagagacacggtggcaggaagacctgttcttctcggtgggcaacatgatccccaccatcaaccacaccatcctcttcgagctgctcaaatccctgg

SEQ ID NO: 629814 - DNA, 120 bp, Artificial Sequence
  ENSG00000179409_4 (sequence is synthesized)
aagcttctggactctttatccagctcctgatggccctgcccaccaccatctgccatgcagaactagagcgctttctggaacatgtgaccgttgacacttctgccgaagacgtggccttct

SEQ ID NO: 629815 - DNA, 120 bp, Artificial Sequence
  ENSG00000179409_5 (sequence is synthesized)
tcctggacgtctggtgggaggtgatgaagcacaagggtcacccgcaggaccccctgctctcccagtttagtgcaatggcccataagtacctgcctgccttagatgagttcccccatcctc

SEQ ID NO: 629816 - DNA, 120 bp, Artificial Sequence
  ENSG00000179409_6 (sequence is synthesized)
caaagaggcttaggtcagacccagacgcgtgccccaccatgcccctgttggccatgctgctccgcgggctgacacagatccagagtcggatcctgggcccggggaggaagtgctgtgcgc

SEQ ID NO: 629817 - DNA, 120 bp, Artificial Sequence
  ENSG00000179409_7 (sequence is synthesized)
tggccaacctggctgacatgctgactgtgtttgcgctgacagaggacgacccccaggaggtgtctgcaaccgtgtatctggacaaactggccacggtgatctctgtgtggaactcggaca

SEQ ID NO: 629818 - DNA, 120 bp, Artificial Sequence
  ENSG00000179409_8 (sequence is synthesized)
cccagaatccctaccaccagcaggcgctggcagagaaggtgaaggaggcagaacgggatgtcagcctgacctcgctggccaaactccccagtgagaccattttcgtgggctgcgagttcc

SEQ ID NO: 629819 - DNA, 120 bp, Artificial Sequence
  ENSG00000179409_9 (sequence is synthesized)
tgcaccacctgctgcgggagtggggggaggagttgcaggccgtgctccgcagcagccaggggacaagttacgacagctaccggctgtgcgacagtctgacttccttcagccagaacgcga

SEQ ID NO: 629820 - DNA, 120 bp, Artificial Sequence
  ENSG00000179409_10 (sequence is synthesized)
cgctctacctgaaccgcaccagcctgtccaaggaggacaggcaggtggtctctgagctggcggagtgtgtcagggacttcctgaggaaaacgagcacggtgctgaagaacagggccttgg

SEQ ID NO: 629821 - DNA, 120 bp, Artificial Sequence
  ENSG00000179409_11 (sequence is synthesized)
aggatatcacagcttccattgccatggccgtcatccagcagaagatggaccgccatatggaagtgtgctacatttttgcctctgagaagaagtgggccttctcggacgagtgggtagcct

SEQ ID NO: 629822 - DNA, 120 bp, Artificial Sequence
  ENSG00000179409_12 (sequence is synthesized)
gcctggggagtaacagggccctcttccgacagccagacttggtgttgaggctgctggaaacagtgatagacgtcagcacagctgacagagccatccctgagtctcagatccggcaggtga

SEQ ID NO: 629823 - DNA, 120 bp, Artificial Sequence
  ENSG00000179409_13 (sequence is synthesized)
tccacctgatcctggaatgttacgcagacctctccctgccaggtaaaaataaagtccttgcaggtatcctgcgttcctgggggcgaaagggcctctctgaaaagttgctggcttatgtgg

SEQ ID NO: 629824 - DNA, 120 bp, Artificial Sequence
  ENSG00000179409_14 (sequence is synthesized)
agggttttcaggaagacctcaatacaacttttaaccagctcactcagagtgcctccgaacagggcttggcaaaagctgtggcctccgtggcccgcctggtcatagtgcacccggaagtca

SEQ ID NO: 629825 - DNA, 120 bp, Artificial Sequence
  ENSG00000179409_15 (sequence is synthesized)
ctgtggtcaatctcggcacccacaagttcctggcccagattctcactgccttccctgcccttaggtttgtggaagagcagggtcccaattcatctgccactttcatggtgtcatgcctca

SEQ ID NO: 629826 - DNA, 120 bp, Artificial Sequence
  ENSG00000179409_16 (sequence is synthesized)
aagaaaccgtctggatgaagttctctacacccaaggaagaaaagcaatttttagagctcctgaactgcctgatgagtcccgtgaaaccccaagggattccagtggctgctcttcttgagc

SEQ ID NO: 629827 - DNA, 120 bp, Artificial Sequence
  ENSG00000179409_17 (sequence is synthesized)
cagacgaggtgctgaaggaatttgtcctgcctttcttgaggttagatgttgaagaggtagacctcagtctgaggatcttcatccagactctagaggcaaacgcgtgccgagaggaatact

SEQ ID NO: 629828 - DNA, 120 bp, Artificial Sequence
  ENSG00000179409_18 (sequence is synthesized)
ggctccagacctgctccccgtttccactcctcttcagcttgtgccagctcttggaccgcttcagcaaatactggcagcttcccaaggagaagcggtgcctctctttggataggaaggatc

SEQ ID NO: 629829 - DNA, 120 bp, Artificial Sequence
  ENSG00000179409_19 (sequence is synthesized)
tagcgatccatatcctggagctcctgtgtgagattgtatcagccaatgctgagaccttctccccggatgtctggatcaagtccctgtcctggctccaccgcaagttagaacagctagact

SEQ ID NO: 629830 - DNA, 120 bp, Artificial Sequence
  ENSG00000179409_20 (sequence is synthesized)
ggactgtgggcctgaggctgaagagcttcttcgaggggcacttcaagtgtgaagtgccagccacactttttgagatctgtaagctttcagaagacgagtggacctcccaggcccacccag

SEQ ID NO: 629831 - DNA, 120 bp, Artificial Sequence
  ENSG00000179409_21 (sequence is synthesized)
ggtacggggctggcacggggctcctggcctggatggagtgctgctgcgtctccagcggcatctcggagaggatgctgtctctcttggtggtggacgtgggcaatcctgaggaggtcagac

SEQ ID NO: 629832 - DNA, 120 bp, Artificial Sequence
  ENSG00000179409_22 (sequence is synthesized)
tgttcagcaaaggctttctggtggccctggtgcaagtcatgccttggtgcagccctcaggagtggcagcgccttcaccagctgaccaggagactgctggagaagcagctcctccatgtcc

SEQ ID NO: 629833 - DNA, 120 bp, Artificial Sequence
  ENSG00000179409_23 (sequence is synthesized)
cttatagcctggaatatattcagtttgttcccctgctcaacctgaagccctttgcccaggagttgcaactctccgtcctcttcctgaggactttccagtttctctgcagccatagctgtc

SEQ ID NO: 629834 - DNA, 120 bp, Artificial Sequence
  ENSG00000179409_24 (sequence is synthesized)
gtgattggcttcctctggaaggctggaaccacgtggtcaaactcctctgtggcagtctgacccgcctcctggactcagtcagggcgatacaggcagctggcccttgggttcaaggaccag

SEQ ID NO: 629835 - DNA, 120 bp, Artificial Sequence
  ENSG00000179409_25 (sequence is synthesized)
agcaggacctgacccaggaagccctgtttgtttacacccaggtgttctgccatgctctgcacatcatggccatgctccacccggaggtctgtgagccactctacgttttagccttggaaa

SEQ ID NO: 629836 - DNA, 120 bp, Artificial Sequence
  ENSG00000179409_26 (sequence is synthesized)
ccctcacctgctatgagactttgagcaagaccaacccttctgtcagctccttgctccagagggcacacgagcagcgcttcttaaagtccattgctgagggcatcggccctgaagaacggc

SEQ ID NO: 629837 - DNA, 120 bp, Artificial Sequence
  ENSG00000179409_27 (sequence is synthesized)
gccaaaccctgttgcagaagatgagcagcttctgacttggcgtggggagctgggccccaacatggcgggtctgcagaagatcagcagcttcttacctgtgcgggagcgaaaaagctgggc

SEQ ID NO: 629838 - DNA, 120 bp, Artificial Sequence
  ENSG00000179409_28 (sequence is synthesized)
ttcaacatggcaggtctgtaggggtcagacccgagcagcctggactttacagttatgtgaaactgtccacaaaaagtcatggcaataatggtgtaaagaaaatagtttcttgggtatttg

SEQ ID NO: 629839 - DNA, 120 bp, Artificial Sequence
  ENSG00000179409_29 (sequence is synthesized)
taacgtacaaactatcataaaaattctcctctttcgcatctcactttgtctcttctaagtcggcctcagcaatagcccaggattaaatatgctctgaaattgggtttagtgtcttcaaga

SEQ ID NO: 629840 - DNA, 120 bp, Artificial Sequence
  ENSG00000179409_30 (sequence is synthesized)
tcaaatccagccaggaggaacatgttcataactggacttttccatcctagattttggcaaataagcccaaagttgaaaccatgtgagtggaaaaagcattacatggtacgtataaccccc

SEQ ID NO: 629841 - DNA, 120 bp, Artificial Sequence
  ENSG00000179409_31 (sequence is synthesized)
tggccgtgtgattgctctgtgcccattaccctgtggccgtgtgactgctgctgtgcccattaccctgtggccgtgtgattgctgctgtgcccattaccctgtggccgtgtgattgctctg

SEQ ID NO: 629842 - DNA, 120 bp, Artificial Sequence
  ENSG00000179409_32 (sequence is synthesized)
tgcccattatcctgtggccgtgtgattgctctgtgcccattaccctgtggccgtgtgattgctctgtgcccattaccctgtggccgtgtgattgctctgtgcccattatcctgtggccgt

SEQ ID NO: 629843 - DNA, 120 bp, Artificial Sequence
  ENSG00000179409_33 (sequence is synthesized)
gtgattgctctgtgcccattatcctgtggccgtgtgattgctctgtgcccattatcctgtggccgtgtgattgctctgtgcccattaccctgtggccgtgtgattgctgctgtgcccatt

SEQ ID NO: 629844 - DNA, 120 bp, Artificial Sequence
  ENSG00000179409_34 (sequence is synthesized)
accctgtggccgtgtgattgctctgtgcccattatcctgtggccgtgtgattgctctgtgcccattatcctgtggctgtgtgattgctctgtgcccattatcctgtagccgtgtgattgc

SEQ ID NO: 629845 - DNA, 120 bp, Artificial Sequence
  ENSG00000179409_35 (sequence is synthesized)
ttctgtgcccattaccctgtggctgtgtgattgctgctgtgcccattatcctgtggctgtgtgattgctgctgtgcccattaccctgtggctgtgtgattgctctgtgcccattaccctg

SEQ ID NO: 629846 - DNA, 120 bp, Artificial Sequence
  ENSG00000179409_36 (sequence is synthesized)
tggctgtgtgattgctctgtgcccattatcctgtggccgtgtgattgctgctgtgcctgttaccctgtggctgtgtgattgctctgtgcccattaccctgtggctatgctcccttcatct

SEQ ID NO: 629847 - DNA, 120 bp, Artificial Sequence
  ENSG00000179409_37 (sequence is synthesized)
gtcatgagaagctcagctgtcatgtcctgtggtacatgctcagtggcccctgtagtttgtactgtcctcctatttctaaacccctctccccacatcctctgctggcccagcctttgctgg

SEQ ID NO: 629848 - DNA, 120 bp, Artificial Sequence
  ENSG00000179409_38 (sequence is synthesized)
agggtctcgcctcagcagcccagctttttcttttcacacacttttcctgaaggatctcattcaccgtcttggttccggtgatcccctctgggcagatacctctcagaatcacatttccca

SEQ ID NO: 629849 - DNA, 120 bp, Artificial Sequence
  ENSG00000179409_39 (sequence is synthesized)
gcttacttccctcctgaacttccacctggcatttccgttgctggaggacatctgtaccttgatggccaaagctgaactcatctttcctcacacctgctctgattctcctccattccctgt

SEQ ID NO: 629850 - DNA, 120 bp, Artificial Sequence
  ENSG00000179409_40 (sequence is synthesized)
atgtgatgtcacctggtggcctcccagttcccaggctggagagctcggaagccattctggattcctcggccaagtccttctgactccagctgtgcagtggctcttgtagtcatcccttct

SEQ ID NO: 629851 - DNA, 120 bp, Artificial Sequence
  ENSG00000179409_41 (sequence is synthesized)
ccccgtccgctgatgtcctttaaaacccttgtcatctcaaaccatgacagcctactaacagcagtggccatctggaaacattttcactatactgtcttatttggcttgtctgtgtgcagg

SEQ ID NO: 629852 - DNA, 120 bp, Artificial Sequence
  ENSG00000179409_42 (sequence is synthesized)
tgtcaagcacagattgcaagctcggggtccagcgtaaaccccaccatgtttgggctcacacggcgcattttctggggaggaccagccgtcaaaaagcgtctaggatccggaacgctgctg

SEQ ID NO: 629853 - DNA, 120 bp, Artificial Sequence
  ENSG00000179409_43 (sequence is synthesized)
tctggagggggcggcgcggcaggagcgcgttgagggactagctagggccatgagtaccttgtttttgactggaaggagctgtggggtggaccgtttccctgaaagctagaagaatgtttg

SEQ ID NO: 629854 - DNA, 120 bp, Artificial Sequence
  ENSG00000179409_44 (sequence is synthesized)
aaacgtcccccgcgtcggggcgggtctaggggtcccggggtggccttggcggggggtggtccgggtcccgccgcgcgttgggccgcgtcttgccgcctccggccccctgcgcttgaaaac

SEQ ID NO: 629855 - DNA, 120 bp, Artificial Sequence
  ENSG00000179409_45 (sequence is synthesized)
ccctgcgcttgaaaacacggagcagacgtgaagttagagcccttggaagcgcccggggctcgcgcacgtgctttgggaaacgggctccctccgagcacccctgggcgccccgacggcctc

SEQ ID NO: 629856 - DNA, 120 bp, Artificial Sequence
  ENSG00000179412_0 (sequence is synthesized)
atggccagcaacgttaccaacaagatggatcctcactccatgaactcccgtgtgttcattgggaatctcaacactcttgttgtcaagaaatcggatgtggaggcgatcttttccaagtat

SEQ ID NO: 629857 - DNA, 120 bp, Artificial Sequence
  ENSG00000179412_1 (sequence is synthesized)
ggcaaaattgcgggctgctctgttcataagggctttgccttcgttcaatatgataaggagaaaaatgcccgggctgctgtagcaggagaggatggcagaatgattgctagccaggttgta

SEQ ID NO: 629858 - DNA, 120 bp, Artificial Sequence
  ENSG00000179412_2 (sequence is synthesized)
gatattaacctggctgcagagccaaaagtgaaccgaggaaacgcaggtgtgaaacgatcagcagcagagatgtacggctcctcttttgacttggactataacctgcaacgggattattat

SEQ ID NO: 629859 - DNA, 120 bp, Artificial Sequence
  ENSG00000179412_3 (sequence is synthesized)
cccattgctctggctgtagtgccctcgaaacgccagcgcatatcaggaaacacctcacgaaggggcaaaagtggcttcaattctaagagtggaaagcggggatcttccaagtctggaaag

SEQ ID NO: 629860 - DNA, 120 bp, Artificial Sequence
  ENSG00000179412_4 (sequence is synthesized)
ctgaaaggagatgaccttcaggccattaagcaggagttgacccagataaaacagaaagtggattctctcctggaaaacctggaaaaaattgaaaaggaacattgcaagcaaggagtagag

SEQ ID NO: 629861 - DNA, 120 bp, Artificial Sequence
  ENSG00000179412_5 (sequence is synthesized)
gtaaagaatgctaagtctgaagaggagcagaccagcagctcctcgaagaaggataagactcacgtgaagatggagtctgaggggggtgcagatgactctgttgaggagggggacctactg

SEQ ID NO: 629862 - DNA, 120 bp, Artificial Sequence
  ENSG00000179412_6 (sequence is synthesized)
tgtgatgatgataatgaagatcagggggacaaccagctggagttgatcaaggatgatgaaaaaggggctgaggaaggagaggatgacagagacagggcgaatggccaggatgactcttaa

SEQ ID NO: 629863 - DNA, 80 bp, Artificial Sequence
  ENSG00000179431_0 (sequence is synthesized)
cgcgatggggccgaagcgcccgaagccccggagcccacaaactgccgggcccgcctcgccgccgggacccgggtgcctgg

SEQ ID NO: 629864 - DNA, 80 bp, Artificial Sequence
  ENSG00000179431_1 (sequence is synthesized)
ccgggtgcctgggctcggcttgaagcggcggcggcgcaccggcacagccgcgggagcatgggcaggaggatgcggggcgc

SEQ ID NO: 629865 - DNA, 80 bp, Artificial Sequence
  ENSG00000179431_2 (sequence is synthesized)
ctgctggcgctgtggggagggctcctgccgccgcggaccgagctgcccgcctcccggccgcccgaagaccgactcccacg

SEQ ID NO: 629866 - DNA, 120 bp, Artificial Sequence
  ENSG00000179431_3 (sequence is synthesized)
ccctggcgtgggacgcccgcggcggctccctgaaaactttccgggcgctgctcaccctggcggccggcgcggacggcccgccccggcagtcccggagcgagcccaggtggcacgtgtcag

SEQ ID NO: 629867 - DNA, 120 bp, Artificial Sequence
  ENSG00000179431_4 (sequence is synthesized)
aggtggcacgtgtcagccaggcagccccggccggaggagagcgccgcggtgcacgggggcgtcttctggagccgcggcctggaggagcaggtgcccccgggcttttcggaggcccaggcg

SEQ ID NO: 629868 - DNA, 120 bp, Artificial Sequence
  ENSG00000179431_5 (sequence is synthesized)
gcggcgtggctggaggcggctcgcggcgcccggatggtggccctggagcgcgggggttgcgggcgcagctccaaccgactggcccgttttgccgacggcacccgcgcctgcgtgcgctac

SEQ ID NO: 629869 - DNA, 120 bp, Artificial Sequence
  ENSG00000179431_6 (sequence is synthesized)
ggcatcaacccggagcagattcagggcgaggccctgtcttactatctggcgcgcctgctgggcctccagcgccacgtgccgccgctggcactggctcgggtggaggctcggggcgcgcag

SEQ ID NO: 629870 - DNA, 120 bp, Artificial Sequence
  ENSG00000179431_7 (sequence is synthesized)
tgggcgcaggtgcaggaggagctgcgcgctgcgcactggaccgagggcagcgtggtgagcctgacacgctggctgcccaacctcacggacgtggtggtgcccgcgccctggcgctcggag

SEQ ID NO: 629871 - DNA, 120 bp, Artificial Sequence
  ENSG00000179431_8 (sequence is synthesized)
gacggccgtctgcgccccctccgggatgccgggggtgagctggccaacctcagccaggcggagctggtggacctagtacaatggaccgacttaatccttttcgactacctgacggccaac

SEQ ID NO: 629872 - DNA, 120 bp, Artificial Sequence
  ENSG00000179431_9 (sequence is synthesized)
ttcgaccggctcgtaagcaacctcttcagcctgcagtgggacccgcgcgtcatgcagcgtgccaccagcaacctgcaccgcggtccgggcggggcgctggtctttctggacaatgaggcg

SEQ ID NO: 629873 - DNA, 120 bp, Artificial Sequence
  ENSG00000179431_10 (sequence is synthesized)
gtgcacggctaccgggtagcaggcatgtgggacaagtataacgagccgctgttgcagtcagtgtgcgtgttccgcgagcggaccgcgcggcgcgtcctggagctgcaccgcggacaggac

SEQ ID NO: 629874 - DNA, 120 bp, Artificial Sequence
  ENSG00000179431_11 (sequence is synthesized)
gccgcggcccggctgctgcgcctctaccggcgccacgagcctcgcttccccgagctggccgcccttgcagacccccacgctcagctgctacagcgccgcctcgacttcctcgccaagcac

SEQ ID NO: 629875 - DNA, 120 bp, Artificial Sequence
  ENSG00000179431_12 (sequence is synthesized)
attttgcactgtaaggccaagtacggccgccggtctgggacttagtgtcaccgggaggaaaagagagagatctggggctggggtatggatgatggggggaagggcggtcgcctctgccac

SEQ ID NO: 629876 - DNA, 120 bp, Artificial Sequence
  ENSG00000179431_13 (sequence is synthesized)
tgtcagggaccagccggccaacgcccacccgcaaaggtgtctaaaaacttcagcttttcacccacctgcccctttctttcaatcccacgctgtttcctttcaaagttctgggaggacgaa

SEQ ID NO: 629877 - DNA, 120 bp, Artificial Sequence
  ENSG00000179431_14 (sequence is synthesized)
ctcaccgaggcgagaagtgtaacattctctccacccagcttataaaaggattctttactgtgccagcacggggattggatccgaagaaactggctactggggtttggcccccgagtggcc

SEQ ID NO: 629878 - DNA, 120 bp, Artificial Sequence
  ENSG00000179431_15 (sequence is synthesized)
gtccctgtgggagatgcaccccattcttgggccccccctcattccctttccgaaaaaggaaaacttgcgtttgagccgttgagctaattctgcaattttctaccaaacagagcgctggtg

SEQ ID NO: 629879 - DNA, 120 bp, Artificial Sequence
  ENSG00000179431_16 (sequence is synthesized)
gccccggagcagggctgtgacattggctggtggagcccccttcctgtgttctccctttgttccagcgccgcgatggtgagatcactgttccaagcagggggacggctcgcgataggacaa

SEQ ID NO: 629880 - DNA, 120 bp, Artificial Sequence
  ENSG00000179431_17 (sequence is synthesized)
agagagcaggacctccagactctggggagccctgcagaccttgacaatttgcctgactcattcctgacctcttgtcattttggcctgaaggctacaaattcagggtcagctgtatgcact

SEQ ID NO: 629881 - DNA, 120 bp, Artificial Sequence
  ENSG00000179431_18 (sequence is synthesized)
aagtcaaataatgaatttcttcctccctctcgcaaccgaccaaaattttgacaacgatgatgttcaccagaaggaaaaaaaaaaatcagttttatgcactttattttgttttgattttca

SEQ ID NO: 629882 - DNA, 120 bp, Artificial Sequence
  ENSG00000179431_19 (sequence is synthesized)
gattttcattttttattaagaaaaaattttattttacagaatttaccttctctgtatatatgtgcataaagtgtggtgtaaatatactaaacaaacttatatttcaataaaagggagttt

SEQ ID NO: 629883 - DNA, 120 bp, Artificial Sequence
  ENSG00000179454_0 (sequence is synthesized)
aagttgcccgccccacccgtaagagttagggtttgaccggagctagtgaggatccagcccaggctccagttgtccgcggttcctcctcctgtcgctgcccgtgtgattactgagactcag

SEQ ID NO: 629884 - DNA, 120 bp, Artificial Sequence
  ENSG00000179454_1 (sequence is synthesized)
atggaccacacatccccgacctacatgcttgctaacttaacccacttgcattctgaacaacttctgcagggcttgaatcttcttcgccaacatcacgaactctgtgacatcattcttcga

SEQ ID NO: 629885 - DNA, 120 bp, Artificial Sequence
  ENSG00000179454_2 (sequence is synthesized)
gtaggtgatgttaaaattcatgctcacaaagtggtacttgccagcgtcagcccgtatttcaaagctatgttcactggaaacctttctgaaaaagagaacagtgaggttgagtttcaatgc

SEQ ID NO: 629886 - DNA, 120 bp, Artificial Sequence
  ENSG00000179454_3 (sequence is synthesized)
attgatgaaactgctctccaggccattgtggagtatgcctatacagggactgtttttatttctcaggacacagttgaatctctcctgccagcagcaaacctactccagataaaacttgtc

SEQ ID NO: 629887 - DNA, 120 bp, Artificial Sequence
  ENSG00000179454_4 (sequence is synthesized)
ctgaaagaatgttgtgcatttcttgaaagccaacttgatcctggtaattgtattggaatttctcgttttgcagaaacatatggttgccgtgacctttatttggcagccactaaatacata

SEQ ID NO: 629888 - DNA, 120 bp, Artificial Sequence
  ENSG00000179454_5 (sequence is synthesized)
tgccagaattttgaagctgtttgccagactgaagagttttttgagcttacacatgctgacttggatgaaattgtttccaatgactgtttgaatgtagctaccgaagagactgttttttat

SEQ ID NO: 629889 - DNA, 120 bp, Artificial Sequence
  ENSG00000179454_6 (sequence is synthesized)
gcattagagtcttggatcaagtatgatgtacaagaacgccagaaatacttagcacagttactaaacagtgtacgattaccattgttgagtgttaagtttctcactagactatatgaagca

SEQ ID NO: 629890 - DNA, 120 bp, Artificial Sequence
  ENSG00000179454_7 (sequence is synthesized)
aatcatcttattcgtgatgatcgcacttgtaaacatcttttgaatgaagccctaaagtaccactttatgcctgaacatagactctctcatcagacagtcttgatgacacgacctcgctgt

SEQ ID NO: 629891 - DNA, 120 bp, Artificial Sequence
  ENSG00000179454_8 (sequence is synthesized)
gctcccaaagtactttgtgcagtaggagggaaatctggactctttgcctgtttggatagtgtggagatgtactttcctcagaatgactcttggattggtttggcacccctaaacattcct

SEQ ID NO: 629892 - DNA, 120 bp, Artificial Sequence
  ENSG00000179454_9 (sequence is synthesized)
cgctatgaatttggaatatgcgttttagaccaaaaagtatatgttataggtggtattgcaactaatgtgcgtcctggcgtcactatcagaaaacatgaaaattcagtggaatgctggaat

SEQ ID NO: 629893 - DNA, 120 bp, Artificial Sequence
  ENSG00000179454_10 (sequence is synthesized)
cctgatacaaatacttggacttctctagagagaatgaatgaaagccgaagtactcttggagtagtagtacttgcaggagaactttatgccttaggtggttatgatggacaatcttattta

SEQ ID NO: 629894 - DNA, 120 bp, Artificial Sequence
  ENSG00000179454_11 (sequence is synthesized)
caatctgtagagaagtacattcccaaaataagaaaatggcaacctgtggcaccaatgacgacaacaagaagttgttttgctgcagcggtattggatggaatgatatatgccattggtggg

SEQ ID NO: 629895 - DNA, 120 bp, Artificial Sequence
  ENSG00000179454_12 (sequence is synthesized)
tatggtcctgcccacatgaacagtgtggagcgttatgatccaagtaaggactcctgggagatggttgcatccatggcagataaaaggattcactttggcgtgggtgtcatgctaggcttt

SEQ ID NO: 629896 - DNA, 120 bp, Artificial Sequence
  ENSG00000179454_13 (sequence is synthesized)
atttttgtggtgggtggacataatggagtctcacatttgtccagcattgaaagatacgatcctcatcaaaatcagtggactgtgtgtagaccaatgaaagaacctagaacaggagttggt

SEQ ID NO: 629897 - DNA, 120 bp, Artificial Sequence
  ENSG00000179454_14 (sequence is synthesized)
gctgctgtaatcgataactacctttatgtcgtcggtggtcactcagggtcttcctatctgaatacagtgcagaaatatgatcctatctcagatacgtggctggattcagctggcatgata

SEQ ID NO: 629898 - DNA, 120 bp, Artificial Sequence
  ENSG00000179454_15 (sequence is synthesized)
tactgtcgctgcaactttgggttaactgcactttgacaaatgtgaactctcggaaatagtatggtggtgaaacttgtactgcatgaacatccggatggcccagttttctgaaacccacaa

SEQ ID NO: 629899 - DNA, 120 bp, Artificial Sequence
  ENSG00000179454_16 (sequence is synthesized)
gctgcattgctttctttttaacttgaagtagcatgaaggctcaaaagttttgttgggtacttttaattgagaagtagttttggttgctcttgattacacagtaaatcaataatcaaaaag

SEQ ID NO: 629900 - DNA, 120 bp, Artificial Sequence
  ENSG00000179454_17 (sequence is synthesized)
aaaaaagagaaaaaaaaaaagtaaagactttgccaattgaattctgcactttttcccccaagactgagatgtactagttttatgttcataagtgtacatgtagacaaaacgtggctgctt

SEQ ID NO: 629901 - DNA, 120 bp, Artificial Sequence
  ENSG00000179454_18 (sequence is synthesized)
tttttttttttttttattttagctctccttccctgataaccatgattttctaggatgagcgatgctttaggtgctggagtgtattgaatgaatggacagagtgctgatactgcttcttgg

SEQ ID NO: 629902 - DNA, 120 bp, Artificial Sequence
  ENSG00000179454_19 (sequence is synthesized)
ttggatgtaaatgcttcacatttttcatttgttttaaaacaaacaaagggctgctttttattttggtacttttaaaggttgtaaataacatgccaataggtagtcatctgaatactttcc

SEQ ID NO: 629903 - DNA, 120 bp, Artificial Sequence
  ENSG00000179454_20 (sequence is synthesized)
tgctaaatggttttagggctacggatgtaataaatttttaagacaattgcttttattatcatgatatttggggccctattttaggaaatcagatatttactgtttatgccttttgtatat

SEQ ID NO: 629904 - DNA, 120 bp, Artificial Sequence
  ENSG00000179454_21 (sequence is synthesized)
gggcaggttaacgttggatgaatttaattacctatctatgctatggttagcatggataggagtttaagcatatcaggtgtttcagtttttcttcagtagtacagcaggcctcccagtgct

SEQ ID NO: 629905 - DNA, 120 bp, Artificial Sequence
  ENSG00000179454_22 (sequence is synthesized)
gatgtaaatatttgagcagtgtttagtaccattcttagtgcatattaatttttttatatatccttataattttagttttttaagatctttgctttttcaaagtgttcagatataaaatgg

SEQ ID NO: 629906 - DNA, 120 bp, Artificial Sequence
  ENSG00000179454_23 (sequence is synthesized)
tgctaactgtaggatttataacaaggctataactgatgtccttttggatgttcagtatgagatatgcatgacatgttttgatagtcttttgcatttttaatggcttgattcatttgtgct

SEQ ID NO: 629907 - DNA, 120 bp, Artificial Sequence
  ENSG00000179454_24 (sequence is synthesized)
tattaaaaatgttagtgattacgccaatgttaacatccaaaaatcatcagaatggcctgtgttatgcttttcatggttcctgaatagtgatttaaagaaagttacacttttgatcttctt

SEQ ID NO: 629908 - DNA, 120 bp, Artificial Sequence
  ENSG00000179454_25 (sequence is synthesized)
tcttcttgtgctagatattacatgtctttcttaaaaacagaaatatatgcattaaatataaagcactaggcagttatgcattactttgtacatttcttaggtaactgaatattttaaggt

SEQ ID NO: 629909 - DNA, 120 bp, Artificial Sequence
  ENSG00000179454_26 (sequence is synthesized)
tattgaggaaaactggaactcgatgtttacttgagtaatagttctaagttgagttctactttgattaaagaaatgatcttttaaagcaaaattgtttgctgtagccagtgacagcttatt

SEQ ID NO: 629910 - DNA, 120 bp, Artificial Sequence
  ENSG00000179454_27 (sequence is synthesized)
attcacttgcattttattattatgtcggtacttgtattttggaactgtagtcatttgattttcttttccttgattttttttaaacctgtttgcgatctccttataaagtctctgcaagat

SEQ ID NO: 629911 - DNA, 120 bp, Artificial Sequence
  ENSG00000179454_28 (sequence is synthesized)
tgcaagataatttttcttaagaaaaaaattcatattatattcttaagtgccataatgttctagactattgttaagaagccatttgtaattataaaacataggttcatttgttagtatata

SEQ ID NO: 629912 - DNA, 120 bp, Artificial Sequence
  ENSG00000179454_29 (sequence is synthesized)
tcttgaatactatagccgggcaatttacagttctttgttcttccataaactgccagttgtagatttgaatatatactacaaaactatgtaaaatcatttttaatcataaatgtagtatca

SEQ ID NO: 629913 - DNA, 120 bp, Artificial Sequence
  ENSG00000179454_30 (sequence is synthesized)
tgctttatgaatatttgcacagattataaaaccttgcaagtgatttttagtctcttctaatttagaactcaacaggagcaactaataacaattgatagtctgagtattttctatgttgct

SEQ ID NO: 629914 - DNA, 120 bp, Artificial Sequence
  ENSG00000179454_31 (sequence is synthesized)
tgtctgaataacataataatatatagcaataactttttcattgatttgaataaatctattgcatagaaataggtgcactattgtagttggcccagactttatttaaagaaaagcagttta

SEQ ID NO: 629915 - DNA, 120 bp, Artificial Sequence
  ENSG00000179454_32 (sequence is synthesized)
aaatagattcatcacatatttagttttaaatccccaattcagttttctttgtttatagcaatcaaattattaaatatatcctattatactatttttaatcccctattcccaaaagataag

SEQ ID NO: 629916 - DNA, 82 bp, Artificial Sequence
  ENSG00000179454_33 (sequence is synthesized)
ctattatactatttttaatcccctattcccaaaagataagggaatttgaaagactgtggaaaatgattttaggaagaggcca

SEQ ID NO: 629917 - DNA, 120 bp, Artificial Sequence
  ENSG00000179454_34 (sequence is synthesized)
ttgtattttaacaatattttactcatgtatcatctccactatcaaattagtgtataatcatttggtaaattagatcaaaaacatatactggtcattgtttttgaaaaatctaaatttcat

SEQ ID NO: 629918 - DNA, 120 bp, Artificial Sequence
  ENSG00000179454_35 (sequence is synthesized)
cttgatgaagactaaatgtgaaatatcttgggcagtagtagtaggagccatacaccagtgaacaaattatgaaaatctgtgaaaggaagaggaaaaatgttcaaaatttagaagtatatt

SEQ ID NO: 629919 - DNA, 120 bp, Artificial Sequence
  ENSG00000179454_36 (sequence is synthesized)
tattttaggattgcttaacctactgtattattcgtaacaaccagagctactaatctgacctgacaactaatatgtttacattagcgccttcttttacaaatttgtgagaagtttcattat

SEQ ID NO: 629920 - DNA, 120 bp, Artificial Sequence
  ENSG00000179454_37 (sequence is synthesized)
gaacactctgctgacaaattgtgaatttaaagccacatgtttctatgttaaaaaggatcaaaatgtttggttataaatcctcaggattaaaagtattagaaataattttacatattcagg

SEQ ID NO: 629921 - DNA, 120 bp, Artificial Sequence
  ENSG00000179454_38 (sequence is synthesized)
caagaagagaaaagctatttaagatttcccagaaatattttggaaaagagcagcactgggaaatagaaattaatgtaatcagttgcaagatacttgccttctataattataacaacttaa

SEQ ID NO: 629922 - DNA, 120 bp, Artificial Sequence
  ENSG00000179454_39 (sequence is synthesized)
tctgttaggcacctttggctattcaataatcattggatgttgtaatagaatgtaagtggcttttaatgtagctccaaggatatttataaattgtgttattgctgttattgttttaaatgt

SEQ ID NO: 629923 - DNA, 120 bp, Artificial Sequence
  ENSG00000179454_40 (sequence is synthesized)
gagtgaatattaaattataggaagtggtatcaagtgataggaaaatggcattaggttttgaaattttattttgataatttaacacatatggagggtttgctatatgtatgagatattctg

SEQ ID NO: 629924 - DNA, 120 bp, Artificial Sequence
  ENSG00000179454_41 (sequence is synthesized)
ttagatgctgtgggagctagagagatatactctttttcactcaaagagagtaaaatatagtgggagagaccctaataactattttggtgaaggatgaatctaattccttatctctgacat

SEQ ID NO: 629925 - DNA, 120 bp, Artificial Sequence
  ENSG00000179454_42 (sequence is synthesized)
cgtaagaagtgattagagacctagtttatgcataagcaattccttagtgtccaattaggttttattggcatgaaaaagaaatattaaaaaacctaatatttatagaactccaaatctcct

SEQ ID NO: 629926 - DNA, 120 bp, Artificial Sequence
  ENSG00000179454_43 (sequence is synthesized)
agaattggataatgtattttctagtaagaaaactatagaaattttaaatatatatatttcctgtagtatcaagactctggctgacattgagagaaatatatgtacatgttgtgtttattt

SEQ ID NO: 629927 - DNA, 120 bp, Artificial Sequence
  ENSG00000179454_44 (sequence is synthesized)
tcagttttggtgttggattcctggtattgtcacctaagtgctcattttcaggaaaatcagattctacaataaacacttactgcttaaagttcagtaaacttgtgataacctcataacctc

SEQ ID NO: 629928 - DNA, 120 bp, Artificial Sequence
  ENSG00000179454_45 (sequence is synthesized)
tgtagtctaaaagttaaggaattataagatgtcacatgtcaagttaacatccagttctacttcttaaccttttttccctttgtaaacagcactttaattagacatgatttaattagataa

SEQ ID NO: 629929 - DNA, 120 bp, Artificial Sequence
  ENSG00000179454_46 (sequence is synthesized)
caattattccatggctggatatgtactggattttcacttacagtacattgatttggtgttgatacacatttgaaaagagtgaggaatacaatacatttttaatacaataggtttacaaat

SEQ ID NO: 629930 - DNA, 120 bp, Artificial Sequence
  ENSG00000179454_47 (sequence is synthesized)
tttcctactggtgtgaatatggagtcaaataaaaatccagtttacatctctgcagagagaaaaattgttatccatatgtcttttatattatacatctttactagagataacttattgtta

SEQ ID NO: 629931 - DNA, 120 bp, Artificial Sequence
  ENSG00000179454_48 (sequence is synthesized)
attttgtcaagttatgtgtaagtcccatttatttttaaatactaagcaaaaagttccaagtttgccttaaaatacaagtgaagttaaagaactggatgataatgcctatatttttgcctt

SEQ ID NO: 629932 - DNA, 120 bp, Artificial Sequence
  ENSG00000179454_49 (sequence is synthesized)
atgaattgtgctgtgtattataaaccagcaacggttttgattttaacaggattctgaaattttgtagctgtagagtactaatatttgtactctcttgcaaagaatgtgatctagttgtgg

SEQ ID NO: 629933 - DNA, 120 bp, Artificial Sequence
  ENSG00000179454_50 (sequence is synthesized)
attatgttagtttaaatgtttttgtatatgtattttacctctgaacatgtacctttttagcatcagggttttattttatttatgtttacacactaaagtgtcatttaactagttaagaat

SEQ ID NO: 629934 - DNA, 120 bp, Artificial Sequence
  ENSG00000179454_51 (sequence is synthesized)
agtgtcatttaactagttaagaattgtattcttttttattttaaaggttatttgtgtgtatcattgtggtaatgttctgtaattattatggttaaatttcatttaatgtaaaatgtttaa

SEQ ID NO: 629935 - DNA, 120 bp, Artificial Sequence
  ENSG00000179454_52 (sequence is synthesized)
attttaggcgaactgagaattttgtgtgcattttctcctcataagtgatacttaaacggacacagtggaagagctggagtgtctagtgtgagcctgaatgctttggagtgtggaagagat

SEQ ID NO: 629936 - DNA, 120 bp, Artificial Sequence
  ENSG00000179454_53 (sequence is synthesized)
attttttttttttgaaggaataatactattacttttgaatgactcgtgcgaaaagtctaagttatcatttgaagacccaaatttatgcacttcaaatgcaagtattcctaccctgctctg

SEQ ID NO: 629937 - DNA, 120 bp, Artificial Sequence
  ENSG00000179454_54 (sequence is synthesized)
aaaattttttccctagtgttccagagagctaccaaagtgctttctgtgaggaagtcccatggtctggtttatatcttaacagcatcaatggctgttatatgagatggagtaataatgcaa

SEQ ID NO: 629938 - DNA, 120 bp, Artificial Sequence
  ENSG00000179454_55 (sequence is synthesized)
gcatggaaaccggtgatgaaactacaatagccatgtgggagataattacggcatgaactagagggatggcagcagagactgcagtagccaactgtcctttgtaatctgctccaccttttt

SEQ ID NO: 629939 - DNA, 120 bp, Artificial Sequence
  ENSG00000179454_56 (sequence is synthesized)
caactgtatccacagctttaaaaaggatgctggttttacctgagcccattgatgatgccaatacggcaaaagcttctaaagctgcttggcgtaccctgcgtttgctatctacaagagctg

SEQ ID NO: 629940 - DNA, 120 bp, Artificial Sequence
  ENSG00000179454_57 (sequence is synthesized)
gggcaagatcaaaggacagtttgggcaagtcaaaatcctcactaggataggtcagcagggagcagatgcaaatgttcaccacctcctctctcactctggaatgcttatgtttgagatgtt

SEQ ID NO: 629941 - DNA, 120 bp, Artificial Sequence
  ENSG00000179454_58 (sequence is synthesized)
tgaccaaaccgattgcttccatggtgatgtacccagcgcggacctcttgacccggaaatccacttgccgtgatgaatgctgggttatgtagtccacgtcaggtgttgagactaggccaaa

SEQ ID NO: 629942 - DNA, 120 bp, Artificial Sequence
  ENSG00000179454_59 (sequence is synthesized)
gcccaggctccagttgtccgcggttcctcctcctgtcgctgcccgtgtgattactgagactcagttatggaggctgagaagtccaaggtcaagggggccacacctggtgtgagctttctt

SEQ ID NO: 629943 - DNA, 120 bp, Artificial Sequence
  ENSG00000179454_60 (sequence is synthesized)
tcttcttgtgcagggctcgtcacccttgtaaacgcgttactctctaccaccctgagtaactgcgatcctttcctcttgccatctgcttatcaggacagaagatctggaccacggccaagc

SEQ ID NO: 629944 - DNA, 120 bp, Artificial Sequence
  ENSG00000179455_0 (sequence is synthesized)
acacttcccccagagaagcctccgagcgcggccgccattccgggcctcaagcccataaagaaaaaataccggagaggttctggcaccatttcggggtgccaaagcagccatggaagagcc

SEQ ID NO: 629945 - DNA, 120 bp, Artificial Sequence
  ENSG00000179455_1 (sequence is synthesized)
tgcagctccctcagaagcccacgaggcagccggggcccaggcaggtgctgaggcagcaagggagggtgtgtctgggccggaccttcccgtctgtgagccctccggggaatctgctgctcc

SEQ ID NO: 629946 - DNA, 120 bp, Artificial Sequence
  ENSG00000179455_2 (sequence is synthesized)
agattcagccctgccacatgcggcaaggggctgggcccccttccctgtagctccagtccctgcccacctccgcagaggaggcctgaggcctgccccagcctcaggaggaggagcctggcc

SEQ ID NO: 629947 - DNA, 120 bp, Artificial Sequence
  ENSG00000179455_3 (sequence is synthesized)
cagtccgttgccaagccgaagcagcggcatttggacaaagcagatcatctgcaggtattatatacatgggcagtgcaaggagggggagaactgtcgctattcgcacgacctttctggtcg

SEQ ID NO: 629948 - DNA, 120 bp, Artificial Sequence
  ENSG00000179455_4 (sequence is synthesized)
gaagatggccactgagggtggcgtttcgccgcctggggcctctgcaggtggaggccctagcacggctgcgcacatcgagcccccgactcaggaagtggcggaagcccccccggctgcatc

SEQ ID NO: 629949 - DNA, 120 bp, Artificial Sequence
  ENSG00000179455_5 (sequence is synthesized)
ctccctttccttgcctgtgattggctcggctgctgaaaggggtttctttgaagccgagagagacaatgcagaccgtggagctgctggaggagcaggtgtagaaagctgggcggatgccat

SEQ ID NO: 629950 - DNA, 120 bp, Artificial Sequence
  ENSG00000179455_6 (sequence is synthesized)
tgagtttgttccagggcagccctaccggggccgctgggttgcatctgcccccgaggctcctctacagagctcagagactgagaggaagcagatggctgtgggcagtgggttgcggttttg

SEQ ID NO: 629951 - DNA, 120 bp, Artificial Sequence
  ENSG00000179455_7 (sequence is synthesized)
ctattatgcttccaggggagtttgctttcgtggggagagctgtatgtacctccatggagacatatgcgacatgtgtgggctgcagaccttgcaccccatggatgctgcccagagggaaga

SEQ ID NO: 629952 - DNA, 120 bp, Artificial Sequence
  ENSG00000179455_8 (sequence is synthesized)
acatatgagggcctgcattgaagcacacgagaaagatatggaactctcgtttgctgtgcagcgtggtatggacaaggtgtgtggcatctgcatggaggttgtctatgagaaggccaaccc

SEQ ID NO: 629953 - DNA, 120 bp, Artificial Sequence
  ENSG00000179455_9 (sequence is synthesized)
aacaggatcgtcaagtcttgcccacagtgcagggtcacctctgaattggtcattcccagtgagttctgggtggaggaggaggaagagaagcagaaacttattcagcaatacaaggaggca

SEQ ID NO: 629954 - DNA, 120 bp, Artificial Sequence
  ENSG00000179455_10 (sequence is synthesized)
atgagcaacaaggcctgcaggtattttgcggaaggcaggggtaactgcccatttggagacacatgcttttacaagcatgaataccctgagggctggggagatgagcctcctgggccaggt

SEQ ID NO: 629955 - DNA, 120 bp, Artificial Sequence
  ENSG00000179455_11 (sequence is synthesized)
ggtgggtcattcagcgcatactggcatcaacttgtggagcctgtgcgaatgggagagggcaacatgctctataaaagcattaagaaggagcttgtcgtgcttcggctggccagtctgttg

SEQ ID NO: 629956 - DNA, 120 bp, Artificial Sequence
  ENSG00000179455_12 (sequence is synthesized)
tttaagcggtttctttcactgagagatgagttacccttctctgaggaccagtgggacttgcttcattatgagctggaagaatatttcaatttgattctgtagcatcgtgctgtggcatgt

SEQ ID NO: 629957 - DNA, 120 bp, Artificial Sequence
  ENSG00000179455_13 (sequence is synthesized)
ggtctagtctgctgaggttctgtcgtctgctattgcctgttttccctgtgttgacactcttactgctttcaggggctgttgaggcagtgcttctgttttcttgtctattctgcatatctt

SEQ ID NO: 629958 - DNA, 120 bp, Artificial Sequence
  ENSG00000179455_14 (sequence is synthesized)
tccccctaggattatggtgattatctgtgttaaaaaataagtccttaaagttactgttttggtgaaattaatattaatgtcagcttatggcttttttttgtcatctctgttgtcaacagg

SEQ ID NO: 629959 - DNA, 120 bp, Artificial Sequence
  ENSG00000179455_15 (sequence is synthesized)
attaactcagttctagtgtagtgtttactgaatttccacacttattttgaagaccctcaagagtaaatgtggcagagtgaaaggagaagttttaattgaactagtagctttgtgctataa

SEQ ID NO: 629960 - DNA, 120 bp, Artificial Sequence
  ENSG00000179455_16 (sequence is synthesized)
tagccttaacaaatggacccttgcagggctttgcagctgctcatctgtttgtttacagtttgttctttccctccttccccttcaagtgcacttgttaaactgtgatgaacttgtgatttt

SEQ ID NO: 629961 - DNA, 120 bp, Artificial Sequence
  ENSG00000179455_17 (sequence is synthesized)
acttgtgattttgtgttttacttgaccaaaaccaagtgtatatgtttacatgtttttatcctgtttagcttgacatgaaataatttatatttggaaatatatatttaagaattatatata

SEQ ID NO: 629962 - DNA, 120 bp, Artificial Sequence
  ENSG00000179455_18 (sequence is synthesized)
tgtataagagttatgtatttgaaaaaaatatataaaagaatatacatcacaatataatatttatgtttatgtaataaagtaaatacagagctgaaagctgaaggtcaaagcctaacagga

SEQ ID NO: 629963 - DNA, 120 bp, Artificial Sequence
  ENSG00000179455_19 (sequence is synthesized)
atcggtgcccgagtgagtccttgaatggttcatggaacagaacttctcagtcttcactcccctttacccatactgaagtttacatgattaatataatgtaatatataactaagccactga

SEQ ID NO: 629964 - DNA, 120 bp, Artificial Sequence
  ENSG00000179455_20 (sequence is synthesized)
gatttgcgagtttctttgattgcagctggtgtttaatttctgagtaactaagaaggaatacatttttgaggacatggtatttggtctgcaaccacccatggttttagagaagaagcaacc

SEQ ID NO: 629965 - DNA, 120 bp, Artificial Sequence
  ENSG00000179455_21 (sequence is synthesized)
catgtaggtatgtgggcaccaattattccagttagacaaacaacacacccaaagcccaaagtctgggagaatgtgtttaagaaacaacacacaacgacgacaaaaaataatatagctggt

SEQ ID NO: 629966 - DNA, 120 bp, Artificial Sequence
  ENSG00000179455_22 (sequence is synthesized)
ttctagtgaatggagaggagagtggtaggaaatgaagtttaagaggagtgtggagaccagatcccacaggactgtgtaaacagtgaaaaggagttcacatttcattataattgtgatgaa

SEQ ID NO: 629967 - DNA, 120 bp, Artificial Sequence
  ENSG00000179455_23 (sequence is synthesized)
acctcattggaaaattttaagcagagaaaatccatgatcttactatgatacacaggtctttaaaagattgagttactctttgttgaatgaattttaagaatccagagaggatgacaaggg

SEQ ID NO: 629968 - DNA, 120 bp, Artificial Sequence
  ENSG00000179455_24 (sequence is synthesized)
accagttaggagataataatcttccaggcaagacatgttagtgacttaaacaagatttattacaatggaaagaggaaaaattgatatatcccactgaatcattcaattaatcaggtctaa

SEQ ID NO: 629969 - DNA, 120 bp, Artificial Sequence
  ENSG00000179455_25 (sequence is synthesized)
aaaatatggattatacatttatgtaataattatattaagatctgttgtgagtcacttaggataatggcaaaaatattaaagggaatattagggaaagttataggaaataatcacaaatct

SEQ ID NO: 629970 - DNA, 120 bp, Artificial Sequence
  ENSG00000179455_26 (sequence is synthesized)
caatagaggattccccagttacttctgtttaccctacctccattaactaatctttaagccaaatggccctctgggtggttgtgggtgggggtaggggcggggaggtcaactagggaaatt

SEQ ID NO: 629971 - DNA, 120 bp, Artificial Sequence
  ENSG00000179455_27 (sequence is synthesized)
gccccctaatggtatttactttaaaccgtagtacctaagttttaatcatttgtaaaactactttcttaaccatgttaattatcctcaagtgtgtttactcaaagcttctgttgttcattg

SEQ ID NO: 629972 - DNA, 120 bp, Artificial Sequence
  ENSG00000179455_28 (sequence is synthesized)
tatactaaataaatgcctgaagtgcaagctgctcaggaccagccgcagtgacaaacctctcctggtgtgcaggcagtcggacgctcagctggactggcgaaacaaagtatctgtatgtca

SEQ ID NO: 629973 - DNA, 120 bp, Artificial Sequence
  ENSG00000179455_29 (sequence is synthesized)
atgtacgttttattcatccgtcttttgggtcagggtctgcgggcaaacccccgcagctaatgccctctggtaagacgccatacctcaactggtgccccgtgtaaggtgcaataccacaaa

SEQ ID NO: 629974 - DNA, 120 bp, Artificial Sequence
  ENSG00000179455_30 (sequence is synthesized)
gatacaatacaattgttacattagcaaaacatatgggtcatgaattatgttatgttcaggacagttgtagacagtctgcagggaggtctagttttagcttttttagacttagtgtaaatt

SEQ ID NO: 629975 - DNA, 120 bp, Artificial Sequence
  ENSG00000179455_31 (sequence is synthesized)
tagtgaagcctgtagttgttcacagtaacagaaaatacaaaaaactgttggttgatctagtggccactagatggcccgataaactctacttcatagacctcggagctagacactgaagtg

SEQ ID NO: 629976 - DNA, 120 bp, Artificial Sequence
  ENSG00000179455_32 (sequence is synthesized)
actgcagtttgttgctgaaaactatatagtgtaaaaagcctttgttgttgttattgtgaatggaaaataattatcaacattatacaaattaaacaggttcatatcggagaggctctgcta

SEQ ID NO: 629977 - DNA, 120 bp, Artificial Sequence
  ENSG00000179455_33 (sequence is synthesized)
tagagtcctacaaaatggaattgaatataatttctctgatatagaaaaacactcattttagaatgaaaaatagtgatatgcatgtgtgtaaaatgtgtaatcttagtctcaggcttcagt

SEQ ID NO: 629978 - DNA, 120 bp, Artificial Sequence
  ENSG00000179455_34 (sequence is synthesized)
ttcgtaattttagatcacttccctctttttcatgagaaaagctcctagacactcctatttgggaattgtataaatagtgaataatataatgaagaaaaaagtctaaaacaaggacttgct

SEQ ID NO: 629979 - DNA, 120 bp, Artificial Sequence
  ENSG00000179455_35 (sequence is synthesized)
gtacactatctacaggtgtcttgaacatgttatataaggtattcttttgcttatttatgagtttggttatttgtttttatttgctgaattgtaagagttctttgtgtattttggatacag

SEQ ID NO: 629980 - DNA, 120 bp, Artificial Sequence
  ENSG00000179455_36 (sequence is synthesized)
gtcctttatcagatatgtgacgtgcaaatatatcctccaaggttgaagcttgtttcttcattccctcaagagttaatttcacagagggaaacataattttaataaagtccaatttatcaa

SEQ ID NO: 629981 - DNA, 120 bp, Artificial Sequence
  ENSG00000179455_37 (sequence is synthesized)
acttgcctggagtctcagatgagactttggactttggacttttgagttgatgctggaccaagttaagactttgttgataggatgattttatctggcaatgtgagaagaacctgagtttta

SEQ ID NO: 629982 - DNA, 120 bp, Artificial Sequence
  ENSG00000179455_38 (sequence is synthesized)
atcatctgcagagatatttgttgagtgatgtttcaggctggaagcggtgagccactgacagggatcagagaattccccacagaatttggcagtcacatgcatggatttagaaagacaaag

SEQ ID NO: 629983 - DNA, 120 bp, Artificial Sequence
  ENSG00000179455_39 (sequence is synthesized)
ttggaaatgaattgttgcagctaatttctccctcaagacattgtctacattctgaagctagatctggtggcagaggagactaaggagctcagtatttccacatagtaacaacaaacattc

SEQ ID NO: 629984 - DNA, 120 bp, Artificial Sequence
  ENSG00000179455_40 (sequence is synthesized)
aaaaattatagaagacacaaataaattggaagatattctgtgttcatagattggaagaataatgttgctaaaatgtccatactaccccaaatgacttatagactcaaagcaatttctaac

SEQ ID NO: 629985 - DNA, 120 bp, Artificial Sequence
  ENSG00000179455_41 (sequence is synthesized)
aaaattgtaatgtaattattcatagtaacagaaaaaaatataaaattaatgtggaaccacaacaaactctgaatagccaaaggaatcatgagtaagaagatgaaagctggaggcaccaac

SEQ ID NO: 629986 - DNA, 120 bp, Artificial Sequence
  ENSG00000179455_42 (sequence is synthesized)
tgaaagctggaggcaccaaccacatgcatgatttaaaactacactacaaagcaatagtaattaaaacagtgtgatactggcatgaaaatagactcgttggctgggtgcagtggctcacgc

SEQ ID NO: 629987 - DNA, 68 bp, Artificial Sequence
  ENSG00000179455_43 (sequence is synthesized)
taatcccagctactcaggctagattacaccactgcactcccgcctgggtgacagagcaagactctatc

SEQ ID NO: 629988 - DNA, 120 bp, Artificial Sequence
  ENSG00000179456_0 (sequence is synthesized)
agtgtgtgcggatctgtggtggagaaggtatctcattcctctctaacatcatctccactttgcatctgtctctcttagtctgctttttttccaccgatgtaacagacctggagccagcag

SEQ ID NO: 629989 - DNA, 120 bp, Artificial Sequence
  ENSG00000179456_1 (sequence is synthesized)
gactcagaggaaaggacttaatcaggtttatgtgtcctaaaggttatgaagacagtatggagtttccagaccatagtagacatttgctacagtgtctgagcgagcagagacaccagggtt

SEQ ID NO: 629990 - DNA, 120 bp, Artificial Sequence
  ENSG00000179456_2 (sequence is synthesized)
ttctttgtgactgcactgttctggtgggagatgcccagttccgagcgcaccgagctgtactggcttcatgcagcatgtatttccacctcttttacaaggaccagctggacaaaagagaca

SEQ ID NO: 629991 - DNA, 120 bp, Artificial Sequence
  ENSG00000179456_3 (sequence is synthesized)
ttgttcatctgaacagcgacattgttacagcccccgctttcgctctcctgcttgaattcatgtatgaagggaaactccagttcaaagacttgcccattgaagacgtgctagcagctgcca

SEQ ID NO: 629992 - DNA, 120 bp, Artificial Sequence
  ENSG00000179456_4 (sequence is synthesized)
gttatctccacatgtatgacattgtcaaagtctgcaaaaagaagctgaaagagaaagccaccacggaggcagacagcaccaaaaaggaagaagatgcttcaagttgttcggacaaagtcg

SEQ ID NO: 629993 - DNA, 120 bp, Artificial Sequence
  ENSG00000179456_5 (sequence is synthesized)
agagtctctccgatggcagcagccacatagcaggcgatttgcccagtgatgaagatgaaggagaagatgaaaaattgaacatcctgcccagcaaaagggacttggcggccgagcctggga

SEQ ID NO: 629994 - DNA, 120 bp, Artificial Sequence
  ENSG00000179456_6 (sequence is synthesized)
acatgtggatgcgattgccctcagactcagcaggcatcccccaggctggcggagaggcagagccacacgccacagcagctggaaaaacagtagccagcccctgcagctcaacagagtctt

SEQ ID NO: 629995 - DNA, 120 bp, Artificial Sequence
  ENSG00000179456_7 (sequence is synthesized)
tgtcccagaggtctgtcacctccgtgagggattcggcagatgttgactgtgtgctggacctgtctgtcaagtccagcctttcaggagttgaaaatctgaacagctcttatttctcttcac

SEQ ID NO: 629996 - DNA, 120 bp, Artificial Sequence
  ENSG00000179456_8 (sequence is synthesized)
aggacgtgctgagaagcaacctggtgcaggtgaaggtggagaaagaggcttcctgtgatgagagtgatgttggcactaatgactatgacatggaacatagcactgtgaaagaaagtgtga

SEQ ID NO: 629997 - DNA, 120 bp, Artificial Sequence
  ENSG00000179456_9 (sequence is synthesized)
gcactaataacagggtacagtatgagccggcccatctggctcccctgagggaggactcggtcttgagggagctggaccgggaggacaaagccagtgatgatgagatgatgaccccagaga

SEQ ID NO: 629998 - DNA, 120 bp, Artificial Sequence
  ENSG00000179456_10 (sequence is synthesized)
gcgagcgtgtccaggtggagggaggcatggagagcagtctgctcccctacgtctccaacatcctgagccccgcgggccagatcttcatgtgccccctgtgcaacaaggtcttccccagcc

SEQ ID NO: 629999 - DNA, 120 bp, Artificial Sequence
  ENSG00000179456_11 (sequence is synthesized)
cccacatcctgcagatccacctgagcacgcacttccgcgagcaggacggcatccgcagcaagcccgccgccgatgtcaacgtgcccacgtgctcgctgtgtgggaagactttctcttgca

SEQ ID NO: 630000 - DNA, 120 bp, Artificial Sequence
  ENSG00000179456_12 (sequence is synthesized)
tgtacaccctcaagcgccacgagaggactcactcgggggagaagccctacacatgcacccagtgcggcaagagcttccagtactcgcacaacctgagccgccatgccgtggtgcacaccc

SEQ ID NO: 630001 - DNA, 120 bp, Artificial Sequence
  ENSG00000179456_13 (sequence is synthesized)
gcgagaagccgcacgcctgcaagtggtgcgagcgcaggttcacgcagtccggggacctgtacagacacattcgcaagttccactgtgagttggtgaactccttgtcggtcaaaagcgaag

SEQ ID NO: 630002 - DNA, 120 bp, Artificial Sequence
  ENSG00000179456_14 (sequence is synthesized)
cactgagcttgcctactgtcagagactggaccttagaagatagctctcaagaactttggaaataattttatatatatataaataatatatatatatatacatatatataaatagatctct

SEQ ID NO: 630003 - DNA, 120 bp, Artificial Sequence
  ENSG00000179456_15 (sequence is synthesized)
atatagttgtggtacggtctaaaagcagtcttgtttcctggaaataaaaagttgggatattaacttgtttttgcactttagaatagcatgagaatctcactaatttagcattctgataaa

SEQ ID NO: 630004 - DNA, 120 bp, Artificial Sequence
  ENSG00000179456_16 (sequence is synthesized)
agcaagtcagaatagagaggtgtttttcctttgaggggataggggaagtaagccaataagaaccttttaaacaaatcgtcctgtcacaaaatgctttcatatggcttaattttgtcaaca

SEQ ID NO: 630005 - DNA, 90 bp, Artificial Sequence
  ENSG00000179456_17 (sequence is synthesized)
agaaattccctccagttttattagcctctttatatgtctcaaattgcatgaattttttctggctgttggaaacctgaatgcttttagacc

SEQ ID NO: 630006 - DNA, 120 bp, Artificial Sequence
  ENSG00000179456_18 (sequence is synthesized)
aattttttctggctgttggaaacctgaatgcttttagacccaaatggaaaatttctgaaatgctggattatctatttttaaacaagcagttgacttaaaactttctgtggcaacttctgg

SEQ ID NO: 630007 - DNA, 120 bp, Artificial Sequence
  ENSG00000179456_19 (sequence is synthesized)
ttttctgacagttcccagtgagagaaatgctgaaagtacactgggatcactgggacactgtcttatgaaggtttgcttgggatgaaaaaggatattgcagcttcagcagtgttgaactgt

SEQ ID NO: 630008 - DNA, 120 bp, Artificial Sequence
  ENSG00000179456_20 (sequence is synthesized)
gtgtttaaaaatgtgaattactgttattgtatactgtaattgattacatgggctgggggggtgtcaaagaacttgacaggttgtgttgatgctcttagttgagtcttgaaaagtaaatat

SEQ ID NO: 630009 - DNA, 120 bp, Artificial Sequence
  ENSG00000179456_21 (sequence is synthesized)
taacgctacagaaatgcatgagtttcaatatattttttgtctttgtttgcattgtataactttaacgagtgagtttaaaattatttaatttccttagaaaaataacaccatttggaaaaa

SEQ ID NO: 630010 - DNA, 120 bp, Artificial Sequence
  ENSG00000179456_22 (sequence is synthesized)
aaaactggtgttatgaagaacgtaaatgcactgtttttatttttattttatataatttaaattgactttcccactgtctttaagttgaaactgttaagctgaataaaaacttaagctgca

SEQ ID NO: 630011 - DNA, 120 bp, Artificial Sequence
  ENSG00000179456_23 (sequence is synthesized)
aattgataacttcgctacataacaaggaaaatataaatgtttacaaacagcttaaagatttgcatgtgcagtgtgcatttataacaaacttctaattgcacaaaacccatgccagctcag

SEQ ID NO: 630012 - DNA, 120 bp, Artificial Sequence
  ENSG00000179456_24 (sequence is synthesized)
agtttaggtgtacacatttacccagttgagcgttcttagaataactactgcacaagttgacaataggtcgttctctctttttttttgtttgctccctttttctttttctccccttcctcc

SEQ ID NO: 630013 - DNA, 120 bp, Artificial Sequence
  ENSG00000179456_25 (sequence is synthesized)
ttaccctccctcccttactctccccccccaccaccaccctccacccccaactcatgaaaagattctatggactgaaaaagccccaggctgaaaggactggactgccttgattgacatggg

SEQ ID NO: 630014 - DNA, 120 bp, Artificial Sequence
  ENSG00000179456_26 (sequence is synthesized)
gaagggggttagtagactatgtggattgcggcagcagaggctgcagcctaacgtgtggttttaatgaccagcacgcaaggcaaaagcattttgcacagtgtttgttttcctgtcttgcac

SEQ ID NO: 630015 - DNA, 120 bp, Artificial Sequence
  ENSG00000179456_27 (sequence is synthesized)
ttacaaataaggtctatgggagtagcatggaaaacgtttgctgtttttcccttttttttttaattgcttttgtttaaaatttgatcgccttaactactgtaaacatagcctatttttgtg

SEQ ID NO: 630016 - DNA, 120 bp, Artificial Sequence
  ENSG00000179456_28 (sequence is synthesized)
cttaagatactgaatggaaaactccattgtgtgttgctggactgttttggaaatatttggttaaatgtgtgttaatttggctgtaatggcatttaaagcaaacaaacaaacaaaaaaagc

SEQ ID NO: 630017 - DNA, 120 bp, Artificial Sequence
  ENSG00000179456_29 (sequence is synthesized)
tgtgaaaatggccttggagcattatctttagttacttgaagagtttctagtttttttaaaatacagtttatgttaaaataatttttattaatttagagaagacaatcaatgtctgtgaga

SEQ ID NO: 630018 - DNA, 120 bp, Artificial Sequence
  ENSG00000179456_30 (sequence is synthesized)
aaacggactttcttttggattttctttttgtggtcattgtgagtgattgctttttccttttcttagtttcacattcttcctttgttctaaaacttagactgacatctagctttgacaatc

SEQ ID NO: 630019 - DNA, 120 bp, Artificial Sequence
  ENSG00000179456_31 (sequence is synthesized)
atagtatgttttattttcctgagggggaataacttataatgctgtttagttttgtactattggtgtgttggtgaatttttaaactgtgtgctaactgcaataaattatatgaactgagaa

SEQ ID NO: 630020 - DNA, 120 bp, Artificial Sequence
  ENSG00000179468_0 (sequence is synthesized)
tgtggagcaatgccacctctcttttaatctctgggcttcaaaacaagcagaatcaaggactaaatgatggacaaccactctagtgccactgaattccaccttctaggcttccctgggtcc

SEQ ID NO: 630021 - DNA, 120 bp, Artificial Sequence
  ENSG00000179468_1 (sequence is synthesized)
caaggactacaccacattctttttgctatattctttttcttctatttagtgacattaatgggaaacacggtcatcattgtgattgtctgtgtggataaacgtctgcagtcccccatgtat

SEQ ID NO: 630022 - DNA, 120 bp, Artificial Sequence
  ENSG00000179468_2 (sequence is synthesized)
ttcttcctcagccacctctctaccctggagatcctggtcacaaccataattgtccccatgatgctttggggattgctcttcctgggatgcagacagtatctttctctacatgtatcgctc

SEQ ID NO: 630023 - DNA, 120 bp, Artificial Sequence
  ENSG00000179468_3 (sequence is synthesized)
aacttttcctgtgggaccatggagtttgcattacttggagtgatggctgtggaccgttatgtggctgtgtgtaaccctttgaggtacaacatcattatgaacagcagtacctgtatttgg

SEQ ID NO: 630024 - DNA, 120 bp, Artificial Sequence
  ENSG00000179468_4 (sequence is synthesized)
aaatcaaattcattagaccatttttactgtgaccgagggcaattgctcaaactgtcctgcgataacactcttctcacagagtttatccttttcttaatggctgtttttattctcattggt

SEQ ID NO: 630025 - DNA, 120 bp, Artificial Sequence
  ENSG00000179468_5 (sequence is synthesized)
tctttgatccctacgattgtctcctacacctacattatctccaccatcctcaagatcccgtcagcctctggccggaggaaagccttctccacttttgcctcccacttcacctgtgttgtg

SEQ ID NO: 630026 - DNA, 120 bp, Artificial Sequence
  ENSG00000179468_6 (sequence is synthesized)
attggctatggcagctgcttgtttctctacgtgaaacccaagcaaacacagggagttgagtacaataagatagtttccctgttggtttctgtgttaacccccttcctgaatcctttcatc

SEQ ID NO: 630027 - DNA, 120 bp, Artificial Sequence
  ENSG00000179468_7 (sequence is synthesized)
tttactcttcggaatgacaaagtcaaagaggccctccgagatgggatgaaacgctgctgtcaactcctgaaagattagctgttctgtaagtcagttttaggtggtccaagcctcagggtt

SEQ ID NO: 630028 - DNA, 120 bp, Artificial Sequence
  ENSG00000179476_0 (sequence is synthesized)
ggaggtcgtgccgaatcttcctccgtaataagaagcgacgtgtcccactgtcctggctccgtgggtccagtgagattgggcctgggcgctggagctgctgtggctcccgccgcggcggct

SEQ ID NO: 630029 - DNA, 120 bp, Artificial Sequence
  ENSG00000179476_1 (sequence is synthesized)
gccatggaggccatgccagagcccagaactcacgccgggggaggccgagacagccggcggtactcatagatgaggcagcggcggcggcggcggcggcggcagcccgggctctccatgagc

SEQ ID NO: 630030 - DNA, 120 bp, Artificial Sequence
  ENSG00000179476_2 (sequence is synthesized)
aggcggcggcggcgacgggtgcggcggcaccggcagttttcggtccccagggaggatgaagacactgtttgaagagatcaaagcatcaattaaaaataactataaccaagatcgatcatt

SEQ ID NO: 630031 - DNA, 120 bp, Artificial Sequence
  ENSG00000179476_3 (sequence is synthesized)
ttgtaggcctgttcttccttgggggggtgtttttactatcaaagctggccgcaaagcagtatcctgtacaccactctatgttgaaataagactgaaaaatacctgcaccatagatggatt

SEQ ID NO: 630032 - DNA, 120 bp, Artificial Sequence
  ENSG00000179476_4 (sequence is synthesized)
cttgatgttattatatgtcattcttaatgaaaatgaaaacttccctagggaactctctcttcattttggtagagagtttgtagactgttttctttacttaatggacacctacagttttac

SEQ ID NO: 630033 - DNA, 120 bp, Artificial Sequence
  ENSG00000179476_5 (sequence is synthesized)
aactgtgaagctactttggatttgggacaagatggaaaaacagcaatacaaatctgaagtccataaagcttcattaataattgatttgtttgggaatgagcatgataattttacaaaaaa

SEQ ID NO: 630034 - DNA, 120 bp, Artificial Sequence
  ENSG00000179476_6 (sequence is synthesized)
tcttgaaaatctcatgtctaccattcaagagagttactgttccaactggcgatgcccaactcgagtgcaggaggatcagcagcgcacaattaatataaatcctccccaagaaattccaca

SEQ ID NO: 630035 - DNA, 120 bp, Artificial Sequence
  ENSG00000179476_7 (sequence is synthesized)
tggaaacttgataagactggctgtgaatgagttattctgttccaagattgaactgtgtgaagagcatgggtgtggtggcttaagagaattttcccaacgaattttctgccatggggcacc

SEQ ID NO: 630036 - DNA, 120 bp, Artificial Sequence
  ENSG00000179476_8 (sequence is synthesized)
cccttttgttgtcttaaatatgcaacattggaaatctgaagatctggcgtatgtaccctattacttggatttgtctgatcacaagtatttgttggaaggtgccacattatttaacaaaga

SEQ ID NO: 630037 - DNA, 120 bp, Artificial Sequence
  ENSG00000179476_9 (sequence is synthesized)
ggaacatcattattctgcagctttccagattggtggacattggatgcactatgatgggctcagaaatgtgaatttaattttgttaaataaacccccagagtttctcctcttgtcatcatt

SEQ ID NO: 630038 - DNA, 120 bp, Artificial Sequence
  ENSG00000179476_10 (sequence is synthesized)
ggtttatattcgagcaacagagaaataaatatagattgatgctaaaagttgttttccctcctgcccatgctctcccagatgaagggcttttattttgtgtatacttggtatccaagaaaa

SEQ ID NO: 630039 - DNA, 120 bp, Artificial Sequence
  ENSG00000179476_11 (sequence is synthesized)
tagttcaactatactagtttcagaagtgtattttcagtgtttaaccccaggtaaatgttttatatagaggatctgtgcaaaaatgtttgtaatttttttatatttcctgagttattttta

SEQ ID NO: 630040 - DNA, 120 bp, Artificial Sequence
  ENSG00000179476_12 (sequence is synthesized)
tttatatgtacctcaaagatttttacaattctgtctttgaattcaagaaatactttgtcatctgaattctaaatttttctttttggatattcgagtaaaacctaggtaaaagtattttaa

SEQ ID NO: 630041 - DNA, 120 bp, Artificial Sequence
  ENSG00000179476_13 (sequence is synthesized)
gtttatataatttaacagttcaaaatatatctgactgtatttctttgccctacctcactataatccaaagtgcactatttgatctagtatggatttgaatgtacaatttatcgatggctt

SEQ ID NO: 630042 - DNA, 120 bp, Artificial Sequence
  ENSG00000179476_14 (sequence is synthesized)
agtttattagttcgatttgcctagtatccctgcagcaattttttaaaatgtctgagaaatttttcagagcttaaactatttctttataatggcaaattacttttaactacttcctaaagt

SEQ ID NO: 630043 - DNA, 120 bp, Artificial Sequence
  ENSG00000179476_15 (sequence is synthesized)
attataaacctgccagtggattttaagtgatagctaagcttccaagcttaattcacgttattacaaataaattatataactatcttaaatgtttatcttataattaaatgtaatttgaaa

SEQ ID NO: 630044 - DNA, 120 bp, Artificial Sequence
  ENSG00000179476_16 (sequence is synthesized)
tgctctaatgtattttgcagataaaacaactataaacaatattaggcaactggatgtttactagtgtcggactagcaatagaaatgcactttaaatatatatttaaggggaaatgcgtgc

SEQ ID NO: 630045 - DNA, 120 bp, Artificial Sequence
  ENSG00000179476_17 (sequence is synthesized)
ctggaaatacttcttttcctagtgaagttttatattgacacagagaaaagaatacttaaaattttgagtgatgtctactggcttccttgtaagtagtgattgatagcatgcggctttgac

SEQ ID NO: 630046 - DNA, 120 bp, Artificial Sequence
  ENSG00000179476_18 (sequence is synthesized)
ttgcaatacaaatcattacgattttatagttatcagaacattacgtttctttataaagaccctaaggtcactcttctttttgcaacttaagggaaaaaatattctcaagggaaaatactt

SEQ ID NO: 630047 - DNA, 120 bp, Artificial Sequence
  ENSG00000179476_19 (sequence is synthesized)
tttgaaatttatcaccattttagtgtttacatttcaataaatagttcacttcaggtttgggattgagattagttgcaatatatttagaagctcctacatgacagcacagatcactgccat

SEQ ID NO: 630048 - DNA, 120 bp, Artificial Sequence
  ENSG00000179476_20 (sequence is synthesized)
ctgctgaactgctaaagtgcttggtgccatgttgagaaaacttacccaagaatggataaatatgggtgaaacattactgagaatgcctcacgttagcaaatactatgaaaattcttgttt

SEQ ID NO: 630049 - DNA, 120 bp, Artificial Sequence
  ENSG00000179476_21 (sequence is synthesized)
atatatcaaactgatttattttacaaaaaaaaaaaattcaccccaagatttatttagtttcccaagtgtatctgattaggatttaatttagagtaaacttttctggggacacctgattgc

SEQ ID NO: 630050 - DNA, 120 bp, Artificial Sequence
  ENSG00000179476_22 (sequence is synthesized)
atgaactgaagtatacaataacacaaatattacagtaaacataaatggtgtcattaacaaaattattcctaatgcagatttattctttcaggaaatgcactttatttggaatactagttt

SEQ ID NO: 630051 - DNA, 120 bp, Artificial Sequence
  ENSG00000179476_23 (sequence is synthesized)
atcatgaaacaatgacttacctacctcacagggttgttgtgaggattaagatgtttgttaaaatcttgactaccttgaacatgctaataaaaaaacatttttctacctcttttatttgca

SEQ ID NO: 630052 - DNA, 120 bp, Artificial Sequence
  ENSG00000179476_24 (sequence is synthesized)
tgtgaagagcatgggtacaataaaaccttggttaactggaacccagctaattgggaccctcaattatctggatttttttctgcactctccatttaggagaaagaggtgtggtggcttaag

SEQ ID NO: 630053 - DNA, 120 bp, Artificial Sequence
  ENSG00000179476_25 (sequence is synthesized)
gactagcccttaagagatattgttgaaaacaatcatatctgtctctaaatttatgtattctgaatagaatcagaatttattacagagagtcagttactagcagtgcacatagtgggtagg

SEQ ID NO: 630054 - DNA, 120 bp, Artificial Sequence
  ENSG00000179476_26 (sequence is synthesized)
tgtgtggactacagaatagacagaattgggttcaaatcctagccccatcttttataagttaaccttgggccaacaacttaaccagtttacatgtcagttttcttatctataaaacacaga

SEQ ID NO: 630055 - DNA, 120 bp, Artificial Sequence
  ENSG00000179476_27 (sequence is synthesized)
tgatggtatcaacctagtgcaattattgtaaagatttaataagcacatactaagtgtttaagatagtacctgacacataatactggatagtataataatagcacagtattttgtgcctga

SEQ ID NO: 630056 - DNA, 120 bp, Artificial Sequence
  ENSG00000179476_28 (sequence is synthesized)
cacatactggctaatacttgtatttcaagtcagagaagttcgtagtagtatgcaggtggtcataatttaaacataaaatgttacttgtcactataaataaaaatatctgcatacaaatca

SEQ ID NO: 630057 - DNA, 120 bp, Artificial Sequence
  ENSG00000179476_29 (sequence is synthesized)
ggaaataaagggttcttttaacattttccctgtaaaagttttcttacgtgtttactcttttttaaaagaaacatacaggttataagttcatctgttaaaatatgtttttaagaaattctt

SEQ ID NO: 630058 - DNA, 120 bp, Artificial Sequence
  ENSG00000179476_30 (sequence is synthesized)
aatttccacatttccaattttattacatgatctatagagatggatatctttttcagggaacagaatacaaacaatgtcaatgtttttattccttagttatgaatttaaggaatgtttatc

SEQ ID NO: 630059 - DNA, 120 bp, Artificial Sequence
  ENSG00000179477_0 (sequence is synthesized)
agaaggcttggagcccagacacctgctcactcaccaccagctgggctccgcctgggcctgcccggcacccaccccggccaccaagggcagcagcttttccagaatttggctggcaggcct

SEQ ID NO: 630060 - DNA, 120 bp, Artificial Sequence
  ENSG00000179477_1 (sequence is synthesized)
agtcaccccacctcgccacctcaccactgcacctcggaggccagccctgtccactccactctgtgcctggcttctcttgcctgccttgggccttcgtgtggcccctccacggtgtctggg

SEQ ID NO: 630061 - DNA, 120 bp, Artificial Sequence
  ENSG00000179477_2 (sequence is synthesized)
actgagtgcccctcttgcctcctgaagagcagccatggccacctacaaagtcagggtggccacaggcaccgacctcttgtcgggaacacgggactccatctcactgaccattgtggggac

SEQ ID NO: 630062 - DNA, 120 bp, Artificial Sequence
  ENSG00000179477_3 (sequence is synthesized)
acaaggagagagccataagcagctgctgaaccactttgggagagactttgcaactggggcggtgggccagtacaccgtgcagtgccctcaggacctgggtgagctcatcatcatccgcct

SEQ ID NO: 630063 - DNA, 120 bp, Artificial Sequence
  ENSG00000179477_4 (sequence is synthesized)
gcacaaagagcggtacgccttcttccccaaggacccttggtactgcaactatgtgcagatctgtgcccccaacggccgtatctaccacttccccgcctaccagtggatggatggctacga

SEQ ID NO: 630064 - DNA, 120 bp, Artificial Sequence
  ENSG00000179477_5 (sequence is synthesized)
gaccctggcactccgggaggccacaggaaagacaacagcagatgactcgctccccgtcctcctggagcacagaaaagaggagatcagagccaagcaggacttctaccactggcgagtctt

SEQ ID NO: 630065 - DNA, 120 bp, Artificial Sequence
  ENSG00000179477_6 (sequence is synthesized)
tcttcctggcctgcccagctatgtgcacattcccagttaccgccctccggtgcggaggcatcgcaaccccaaccggcctgagtggaatggctatattccgggattcccaattctcatcaa

SEQ ID NO: 630066 - DNA, 120 bp, Artificial Sequence
  ENSG00000179477_7 (sequence is synthesized)
ctttaaggccaccaagttcctgaacttaaatctccgctactccttcctcaagacggcctccttcttcgtccgcctggggcccatggcactggctttcaaagtccgcggcctgttggactg

SEQ ID NO: 630067 - DNA, 120 bp, Artificial Sequence
  ENSG00000179477_8 (sequence is synthesized)
caaacattcgtggaagaggctgaaggacattaggaaaattttccctggcaagaaatctgtcgtctccgagtacgtggccgagcactgggcagaggacaccttctttgggtaccagtacct

SEQ ID NO: 630068 - DNA, 120 bp, Artificial Sequence
  ENSG00000179477_9 (sequence is synthesized)
caacggcgtcaaccccggcctgatccgccgctgcacgcggatcccagacaagttccccgtcacagacgacatggtggctccgttcctgggcgagggaacgtgcttgcaagcggagctgga

SEQ ID NO: 630069 - DNA, 120 bp, Artificial Sequence
  ENSG00000179477_10 (sequence is synthesized)
gagggcaagatgatgcccatcgccatccagctcagccagacccctgggccagattgccccatcttcctgcccagtgattctgagtgggactggctgctagccaagacgtgggtacgctat

SEQ ID NO: 630070 - DNA, 120 bp, Artificial Sequence
  ENSG00000179477_11 (sequence is synthesized)
gcggagttctacagccacgaggccatcgcccacctgctggagacacacctcattgctgaggccttctgcctggccttgctgaggaacctgcccatgtgccaccccctctacaagctcctc

SEQ ID NO: 630071 - DNA, 120 bp, Artificial Sequence
  ENSG00000179477_12 (sequence is synthesized)
atcccccatacccgatacaccgtccagatcaacagcattggccgggccgttctcctcaatgagggggggctctctgccaagggcatgtccctgggcgtggaaggctttgctggggtgatg

SEQ ID NO: 630072 - DNA, 120 bp, Artificial Sequence
  ENSG00000179477_13 (sequence is synthesized)
gtacgggctctgtcggagctcacctatgacagcctctacctccccaatgactttgtggagcgtggggtccaggacctgcctggatattactaccgcgatgacagcttggcggtgtggaat

SEQ ID NO: 630073 - DNA, 120 bp, Artificial Sequence
  ENSG00000179477_14 (sequence is synthesized)
gcactggagaagtatgtgacggagatcatcacctattattacccgagtgacgcagccgtggagggtgatccggaattgcagtcttgggtgcaggaaatatttaaagagtgcctcctgggg

SEQ ID NO: 630074 - DNA, 120 bp, Artificial Sequence
  ENSG00000179477_15 (sequence is synthesized)
cgggagagctcaggcttccctaggtgcttgcgaaccgtgcctgagctgatccgatatgtcactatagtcatctacacctgctctgccaagcacgctgctgtcaacacaggccagatggag

SEQ ID NO: 630075 - DNA, 120 bp, Artificial Sequence
  ENSG00000179477_16 (sequence is synthesized)
ttcaccgcctggatgcccaacttcccagcgtccatgcggaatccaccgattcagactaaggggctgaccactctggagaccttcatggacacgttgccggatgtgaagaccacgtgcatc

SEQ ID NO: 630076 - DNA, 120 bp, Artificial Sequence
  ENSG00000179477_17 (sequence is synthesized)
acgctgctggtgctctggaccctcagccgagagcctgacgacaggcggcccctgggacacttcccggacattcacttcgtggaggaggccccgcggaggagcatagaggcgttccgccag

SEQ ID NO: 630077 - DNA, 120 bp, Artificial Sequence
  ENSG00000179477_18 (sequence is synthesized)
cgcctgaaccagatctcacacgacatccgccagcgcaacaagtgccttcccatcccctactactacctggacccggtgctgattgagaacagcatttctatttaggagcgcgcttcccgt

SEQ ID NO: 630078 - DNA, 120 bp, Artificial Sequence
  ENSG00000179477_19 (sequence is synthesized)
ctctcctctccccattctgtgccctactattttcaacaaaacaaaacaaacaagcaaaaaacacaaaaacctcagagaccaaaacaccaaacaaacaaaaaaacaaaaaaccttcctttc

SEQ ID NO: 630079 - DNA, 120 bp, Artificial Sequence
  ENSG00000179477_20 (sequence is synthesized)
tcgcaccgggctcctccggccgctcagcgccaggctgggggcctcgttttcctccccgactcctctcggtgcccatagtcttcttctgtcccatgcctctccgtccccgaggggggccgg

SEQ ID NO: 630080 - DNA, 120 bp, Artificial Sequence
  ENSG00000179520_0 (sequence is synthesized)
agtctgagagtggctgcctgagacagctgccacaggctgctgcagagcgtgcagcttttgcaagggactgaattcccagccagacaccccttggactcttttttggaggggtggggagca

SEQ ID NO: 630081 - DNA, 120 bp, Artificial Sequence
  ENSG00000179520_1 (sequence is synthesized)
gagagaggagggagttgtcttatcttggaagatccgagctgggtttcatctcctttttgattttgagtagttccctccacgagaactgacttccaggtgttcaccaagggaaacaaggtg

SEQ ID NO: 630082 - DNA, 120 bp, Artificial Sequence
  ENSG00000179520_2 (sequence is synthesized)
gttctcacactggaaatgaggaaggatgacagtttttgagactgactgttaacggctcagaggtgcccctcattcaaaatgccttttaaagcatttgataccttcaaagaaaaaattctg

SEQ ID NO: 630083 - DNA, 120 bp, Artificial Sequence
  ENSG00000179520_3 (sequence is synthesized)
aaacctgggaaggaaggagtgaagaacgccgtgggagattctttgggaattttacaaagaaaaatcgatgggacaactgaggaagaagataacattgagctgaatgaagaaggaaggccg

SEQ ID NO: 630084 - DNA, 120 bp, Artificial Sequence
  ENSG00000179520_4 (sequence is synthesized)
gtgcagacgtccaggccaagccccccactctgcgactgccactgctgcggcctccccaagcgttacatcattgctatcatgagtgggctgggattctgcatttcctttgggatccggtgc

SEQ ID NO: 630085 - DNA, 120 bp, Artificial Sequence
  ENSG00000179520_5 (sequence is synthesized)
aatcttggagttgccattgtggaaatggtcaacaatagcaccgtatatgttgatggaaaaccggaaattcagacagcacagtttaactgggatccagaaacagtgggccttatccatgga

SEQ ID NO: 630086 - DNA, 120 bp, Artificial Sequence
  ENSG00000179520_6 (sequence is synthesized)
tcttttttctggggctatattatgacacaaattccaggtggtttcatttcaaacaagtttgctgctaacagggtctttggagctgccatcttcttaacatcgactctgaacatgtttatt

SEQ ID NO: 630087 - DNA, 120 bp, Artificial Sequence
  ENSG00000179520_7 (sequence is synthesized)
ccctctgcagccagagtgcattacggatgcgtcatgtgtgtcagaattctgcaaggtttagtggagggtgtgacctacccagcctgccatgggatgtggagtaagtgggcaccacctttg

SEQ ID NO: 630088 - DNA, 120 bp, Artificial Sequence
  ENSG00000179520_8 (sequence is synthesized)
gagagaagccgactggccacaacctctttttgtggttcctatgcaggggcagtggttgccatgcccctggctggggtgttggtgcagtacattggatggtcctctgtcttttatatttat

SEQ ID NO: 630089 - DNA, 120 bp, Artificial Sequence
  ENSG00000179520_9 (sequence is synthesized)
ggcatgtttgggattatttggtacatgttttggctgttgcaggcctatgagtgcccagcagctcatccaacaatatccaatgaggagaagacctatatagagacaagcataggagagggg

SEQ ID NO: 630090 - DNA, 120 bp, Artificial Sequence
  ENSG00000179520_10 (sequence is synthesized)
gccaacgtggttagtctaagtaaatttagtaccccatggaaaagatttttcacatctttgccggtttatgcaatcattgtggcaaatttttgcagaagctggaccttttatttgctcctc

SEQ ID NO: 630091 - DNA, 120 bp, Artificial Sequence
  ENSG00000179520_11 (sequence is synthesized)
ataagtcagcctgcttattttgaagaggtctttggatttgcaataagtaaggtgggtctcttgtcagcagtcccacacatggttatgacaatcgttgtacctattggaggacaattggct

SEQ ID NO: 630092 - DNA, 120 bp, Artificial Sequence
  ENSG00000179520_12 (sequence is synthesized)
gattatttaagaagcagacaaattttaaccacaactgctgtcagaaaaatcatgaactgtggaggttttggcatggaggcaaccttactcctggtggttggcttttcgcataccaaaggg

SEQ ID NO: 630093 - DNA, 120 bp, Artificial Sequence
  ENSG00000179520_13 (sequence is synthesized)
gtggctatctcctttctggtacttgctgtaggatttagtggcttcgctatttcaggttttaatgtcaaccacctggacattgccccacgctatgccagcattctcatggggatctcaaac

SEQ ID NO: 630094 - DNA, 120 bp, Artificial Sequence
  ENSG00000179520_14 (sequence is synthesized)
ggagtgggaaccctctctggaatggtctgtcccctcattgtcggtgcaatgaccaggcacaagacccgtgaagaatggcagaatgtgttcctcatagctgccctggtgcattacagtggt

SEQ ID NO: 630095 - DNA, 120 bp, Artificial Sequence
  ENSG00000179520_15 (sequence is synthesized)
gtgatcttctatggggtctttgcttctggggagaaacaggagtgggctgacccagagaatctctctgaggagaaatgtggaatcattgaccaggacgaattagctgaggagatagaactc

SEQ ID NO: 630096 - DNA, 120 bp, Artificial Sequence
  ENSG00000179520_16 (sequence is synthesized)
aaaaagaagatgtcttatggagccacctcccagaattgtgaagtccagaagaaggaatggaaaggacagagaggagcgacccttgatgaggaagagctgacatcctaccagaatgaagag

SEQ ID NO: 630097 - DNA, 120 bp, Artificial Sequence
  ENSG00000179520_17 (sequence is synthesized)
agaaacttctcaactatatcctaatgtctgagaggcacttctgtcttctccttactttagaaacagaaagtatccatacctattgcctttcttgtagcccagcttgccagaggtccaaat

SEQ ID NO: 630098 - DNA, 120 bp, Artificial Sequence
  ENSG00000179520_18 (sequence is synthesized)
attgggaggggagaagatctaaccagcaacagggaaaagagaaatattatctttcaatgacatgtataggtaaggagctgcgctcagttgataacatagttgataatacatattttttga

SEQ ID NO: 630099 - DNA, 120 bp, Artificial Sequence
  ENSG00000179520_19 (sequence is synthesized)
attgacagttgacccttctctcaaagagctaaacttattcagaaaggaatgactagaagaaaaaggagacaataccatgttgttcaaagaaacattgaaggaaattgggatgtttggcca

SEQ ID NO: 630100 - DNA, 120 bp, Artificial Sequence
  ENSG00000179520_20 (sequence is synthesized)
gaaggaatgtaaacagtagtagtagctgccaccacatctctagggtagccatgcagaggagggcttcatattcccaataaaccccacgttgtggcaggtgctttataaacactcttattt

SEQ ID NO: 630101 - DNA, 120 bp, Artificial Sequence
  ENSG00000179520_21 (sequence is synthesized)
aatctccacacctttatgacacacatttcttatccccattttacaaccaaggcatctaaagcaacaagaaatgaacttgcccaaggtcatctgccagggtcagtgctgagactgttgaag

SEQ ID NO: 630102 - DNA, 120 bp, Artificial Sequence
  ENSG00000179520_22 (sequence is synthesized)
ctctcaataggtggcagttttagggaagatttccattcagtgtagggaagacatttgtaataatgaaaactgaaaatggagtaattgtgagtaactcaccactttagcaggtgttgggga

SEQ ID NO: 630103 - DNA, 120 bp, Artificial Sequence
  ENSG00000179520_23 (sequence is synthesized)
agggaaacatttgggttgatgaggcagaggggattcaaatgtgtgagaggctagattcaaagaccctcagtgttctatgttatctgaagagtcaaatggttttgtgactccatagttttt

SEQ ID NO: 630104 - DNA, 120 bp, Artificial Sequence
  ENSG00000179520_24 (sequence is synthesized)
aaagtaataagggtcaaagactacatcagagattcaaataggtttttaaagaaaagctaagcaagagagccaaatttttagaaatctgatggtcaaaatagctgaaagcagtaaacaaga

SEQ ID NO: 630105 - DNA, 120 bp, Artificial Sequence
  ENSG00000179520_25 (sequence is synthesized)
gattggctattaaatttcaactttccataatattaagaatgtagctaaatgatgtcccaaactacttacaaacttttaagacatttaataatttaagaagtaggttcatgtgttttctta

SEQ ID NO: 630106 - DNA, 120 bp, Artificial Sequence
  ENSG00000179520_26 (sequence is synthesized)
ggtaaagttcttctgaaagaattttctatttttaaaaaatgtatctctttagccttttctgctggagattatattaggaagtttcatcagattgtataaaattatgattttgtatcaaaa

SEQ ID NO: 630107 - DNA, 120 bp, Artificial Sequence
  ENSG00000179520_27 (sequence is synthesized)
gtattcatgatgactctatttggaatgatattcagggaaatcacaataatatagcagtagttatacagagaaatactacaatgaaaacatttggggcaattagacctacagttactgttg

SEQ ID NO: 630108 - DNA, 120 bp, Artificial Sequence
  ENSG00000179520_28 (sequence is synthesized)
aaaaattcacctttgattgcataaggcaattacatggatacttttagatatatttaaaattttaacattggcatctaaagtgttatttgaaaataaaattattttcctgttcattgattt

SEQ ID NO: 630109 - DNA, 85 bp, Artificial Sequence
  ENSG00000179520_29 (sequence is synthesized)
tcctactttcagaagaaaaatataatacggaaaaaattatagatttacttgtagcttattattgtaaaccacatgtatttctggt

SEQ ID NO: 630110 - DNA, 120 bp, Artificial Sequence
  ENSG00000179520_30 (sequence is synthesized)
tgtatttctggtccccagtgatactagctgagttgtagtgtattttataaatggaataatcttggggaaaaattgcgattcttcattaaataatattctttatgtcactagcatacaatt

SEQ ID NO: 630111 - DNA, 120 bp, Artificial Sequence
  ENSG00000179520_31 (sequence is synthesized)
tatgttagtagacatctttaaatctctttaatgagtgaatccatgcaagccccataaaacagttcctagcatgcagaaaatgcccacgtaaatagctgtcatcatcattatcttttaaca

SEQ ID NO: 630112 - DNA, 120 bp, Artificial Sequence
  ENSG00000179520_32 (sequence is synthesized)
ttttgggggactttccagttgaaaagaaaacatgctatgtcatttttatccattatccctggaacttattgtgaaagttgtgctgttttctaagtaaaataaaaaataaaaaattagcaa

SEQ ID NO: 630113 - DNA, 120 bp, Artificial Sequence
  ENSG00000179520_33 (sequence is synthesized)
ctgctgtcagaaaaatcatgaactgtggaggtactgtggatttcatagatggcttaggcagcttttgtagaattagggtaaactgaactgcagagcatatattaagaagtgacatttagt

SEQ ID NO: 630114 - DNA, 120 bp, Artificial Sequence
  ENSG00000179520_34 (sequence is synthesized)
cattggagtggatcttaaagacctctaagtctgtccctcagcagacacttgagtgttgtccatcacagtgctgccaagaggtcatccagctgggacctttccatacatccttccacattt

SEQ ID NO: 630115 - DNA, 120 bp, Artificial Sequence
  ENSG00000179520_35 (sequence is synthesized)
gcactccagtctgggtgacagagcacgactccatctcaaacaaaagaagaaaaaaaggtggcttattgcagttttcctggttttggcatggaggcaaccttactcctggtggttggcttt

SEQ ID NO: 630116 - DNA, 120 bp, Artificial Sequence
  ENSG00000179526_0 (sequence is synthesized)
ggcggcggcggcggcctcggacttgggctccgccgcagtgctcttggctgtgcacgccgcggtgaggccgctgggcgccgggccagacgccgaggcacagctgcggaggctgcagctgag

SEQ ID NO: 630117 - DNA, 120 bp, Artificial Sequence
  ENSG00000179526_1 (sequence is synthesized)
ggccagacgccgaggcacagctgcggaggctgcagctgagcgcggaccctgagcggcctgggcgcttccggctggagctgctgggcgcgggacctggggcggttaatttggagtggcccc

SEQ ID NO: 630118 - DNA, 120 bp, Artificial Sequence
  ENSG00000179526_2 (sequence is synthesized)
tggagtcagtttcctacaccatccgaggccccacccagcacgagctacagcctccaccaggagggcctggaaccctcagcctgcacttcctcaaccctcaggaagctcagcggtgggcag

SEQ ID NO: 630119 - DNA, 120 bp, Artificial Sequence
  ENSG00000179526_3 (sequence is synthesized)
tcctagtccgaggtgccaccgtggaaggacagaatggcagcaagagcaactcaccaccagccttgggcccagaagcatgccctgtctccctgcccagtcccccggaagcctccacactca

SEQ ID NO: 630120 - DNA, 120 bp, Artificial Sequence
  ENSG00000179526_4 (sequence is synthesized)
agggccctccacctgaggcagatcttcctaggagccctggaaacttgacggagagagaagagctggcagggagcctggcccgggctattgcaggtggagacgagaagggggcagcccaag

SEQ ID NO: 630121 - DNA, 120 bp, Artificial Sequence
  ENSG00000179526_5 (sequence is synthesized)
ggccctgagtgttcagcttcaggaggcctgcttcccacctggccccatcaggctgcaggtcacacttgaagacgctgcctctgccgcatccgccgcgtcctctgcacacgttgccctgca

SEQ ID NO: 630122 - DNA, 120 bp, Artificial Sequence
  ENSG00000179526_6 (sequence is synthesized)
ggtccacccccactgcactgttgcagctctccaggagcaggtgttctcagagctcggtttcccgccagccgtgcaacgctgggtcatcggacggtgcctgtgtgtgcctgagcgcagcct

SEQ ID NO: 630123 - DNA, 120 bp, Artificial Sequence
  ENSG00000179526_7 (sequence is synthesized)
tgcctcttacggggttcggcaggatggggaccctgctttcctctacttgctgtcagctcctcgagaagccccagccacaggacctagccctcagcacccccagaagatggacggggaact

SEQ ID NO: 630124 - DNA, 120 bp, Artificial Sequence
  ENSG00000179526_8 (sequence is synthesized)
tggacgcttgtttcccccatcattggggctacccccaggcccccagccagctgcctccagcctgcccagtccactccagcccagctggtcctgtccttcctgcaccttcatcaatgcccc

SEQ ID NO: 630125 - DNA, 120 bp, Artificial Sequence
  ENSG00000179526_9 (sequence is synthesized)
agaccgccctggctgtgagatgtgtagcacccagaggccctgcacttgggacccccttgctgcagcttccacctagcagccaccagaggttacaaggggagagtggcccttccctcacaa

SEQ ID NO: 630126 - DNA, 120 bp, Artificial Sequence
  ENSG00000179526_10 (sequence is synthesized)
gtccgacatctccaggcccccactgaactccggggacctctactgactgcttgctgggacagtcaccagggttggggggaagggccacaaaatgaaaccattaaagacccttaagagcca

SEQ ID NO: 630127 - DNA, 120 bp, Artificial Sequence
  ENSG00000179526_11 (sequence is synthesized)
ggctttgccactgttggctgctggtcaaaaagggcaggacctgcgacggctccgtgaaagtcaactctgcgggcaggaactggaagttctgccacctacagcctcaggatgcagagagaa

SEQ ID NO: 630128 - DNA, 120 bp, Artificial Sequence
  ENSG00000179526_12 (sequence is synthesized)
cacagtcagctgttaatttggagtggcccctggagtcagtttcctacaccatccgaggccccacccagcacgagctacagcctccaccaggagggcctggaaccctcagcctgcacttcc

SEQ ID NO: 630129 - DNA, 120 bp, Artificial Sequence
  ENSG00000179526_13 (sequence is synthesized)
cccagtcctggttggggaagttggatccaccttccccactgctggatgtctgggaaggcttccaggagggagtaggtggagcctggagtagcttggagtacttggagtggctgctggagt

SEQ ID NO: 630130 - DNA, 120 bp, Artificial Sequence
  ENSG00000179526_14 (sequence is synthesized)
cagtctcctacaccatctgaggccccagccagcacaagttgcagcctccaccaggaagccctggaacctcagcctgcacttccttaaccctcaggaaggatgagaggcaagcatgaagag

SEQ ID NO: 630131 - DNA, 120 bp, Artificial Sequence
  ENSG00000179526_15 (sequence is synthesized)
gcagagcaggcagggtcaggacctgtgtgagaagacatcatcccaagagcagcaggagagtgacaggagtgggagagtgacagactcagatacctcctgcttaagacagagttctgcagt

SEQ ID NO: 630132 - DNA, 120 bp, Artificial Sequence
  ENSG00000179526_16 (sequence is synthesized)
aagtggtggcagggaaggcctcattgaggtgacactggagtgaaatttgaaggtcatggcatgaaccatgtgaccaaggaagcagcaaacaaaccctgaggcagcaagagcaactcacca

SEQ ID NO: 630133 - DNA, 120 bp, Artificial Sequence
  ENSG00000179526_17 (sequence is synthesized)
gtgtgggcgtggcgggggctggggtctgcgggcgaaggtggcagcccattggaggtcccgggagcgaagtccagctgccgttaggcgctgggatagtcgcacgctggatgcatctacgtc

SEQ ID NO: 630134 - DNA, 120 bp, Artificial Sequence
  ENSG00000179526_18 (sequence is synthesized)
cgccgagcccctggggcgaagaggccgcgtccgccttcagttgtggccggtgcttcgccccctgacccttcgcccccaaagaccagctctaacgtgagcgcctcggccgccctgccccag

SEQ ID NO: 630135 - DNA, 120 bp, Artificial Sequence
  ENSG00000179526_19 (sequence is synthesized)
cctcgtacacgccgccagcctcgcccagccggtgtccggagaccctcgggccgtgtccatttgtgggcaaagccagcggggcaggcttggccagagtgcaccactcggcgccgtcccagg

SEQ ID NO: 630136 - DNA, 120 bp, Artificial Sequence
  ENSG00000179526_20 (sequence is synthesized)
ccactgcactgttgcagctctccaggagcaggtgggcacagggtctggggagccctgccaggggcagaggagcctaggtgacatcacctgccctgatgctctggccacaggtgttctcag

SEQ ID NO: 630137 - DNA, 120 bp, Artificial Sequence
  ENSG00000179528_0 (sequence is synthesized)
actggggcccaggcgtttgcggagcctagcgcaacggacagccggaccgccccagcccggccgaccatgaactcgggacgcgagccccgaacaccccggacactcttaagcatcgcagac

SEQ ID NO: 630138 - DNA, 120 bp, Artificial Sequence
  ENSG00000179528_1 (sequence is synthesized)
atcctagccccgcgcatggtcccccgagcaccctctgcgccgcagcttccagagtcgggtccgggtccaacgtcgccgctgtgcgcgctggaggagctgactagtaaaactttccgcgga

SEQ ID NO: 630139 - DNA, 120 bp, Artificial Sequence
  ENSG00000179528_2 (sequence is synthesized)
cttgacgcgcgcgctctgcagccctctgaagggcgggcaggtccggacgcgctgggccctggtcccttcggccgcaaacggcgcaagtcacgcactgcgttcaccgcgcaacaggtgctg

SEQ ID NO: 630140 - DNA, 120 bp, Artificial Sequence
  ENSG00000179528_3 (sequence is synthesized)
gagctggagcggcgcttcgtcttccagaagtacctggcgccgtccgagcgagacgggctagctacgcgactcggcctggccaacgcgcaggtggtcacttggttccagaaccggcgagcc

SEQ ID NO: 630141 - DNA, 120 bp, Artificial Sequence
  ENSG00000179528_4 (sequence is synthesized)
ctgcctcggccctgccggccctgactcccggccccacctgtcagacgaggagatacaggtggacgattgaagacaaagccgccgccaatcctgggctctggggccctggactcctcacct

SEQ ID NO: 630142 - DNA, 120 bp, Artificial Sequence
  ENSG00000179528_5 (sequence is synthesized)
cgcgctctgcctctggccagagttccagggtggaggaaggaggtccacttgggcctcttccggcccacagtccagacgctcacctttcccggtttttttgtaagtttgttttgttgtctg

SEQ ID NO: 630143 - DNA, 120 bp, Artificial Sequence
  ENSG00000179528_6 (sequence is synthesized)
tttttttgtaagtttgttttgttgtctgagacagggcctcgctctgtcgcccaggctggagtgccgtggagcgatcaccgctcactgcagtcgcgacctcctgggctcaagcgatcctcc

SEQ ID NO: 630144 - DNA, 120 bp, Artificial Sequence
  ENSG00000179528_7 (sequence is synthesized)
acaggcgtgcagcaccaccccaggctaatttaaaaaacttttttttttagagaggaggtcccgctatgttgtccaggctactttcccaatatttgagaataaagtcgagactctgccgca

SEQ ID NO: 630145 - DNA, 120 bp, Artificial Sequence
  ENSG00000179528_8 (sequence is synthesized)
cggacttgacgcgcgcgctctgcagccctctgaaggcggggcaatcgcgatagagaaaggcaggagagaaagagacaaaaggcttcagccgcaggcggtaaacgagtgagcctgcaaagg

SEQ ID NO: 630146 - DNA, 120 bp, Artificial Sequence
  ENSG00000179528_9 (sequence is synthesized)
ccaagccactctcttctcgaggggagtcaaggagcagaaagcccttggcgcagcactgggcgcgggattccgcactctgccttttctcgctctctgtacctcattatctccctttggggc

SEQ ID NO: 630147 - DNA, 120 bp, Artificial Sequence
  ENSG00000179528_10 (sequence is synthesized)
cggaggagcgggctctggtgtcactaaggaactgtaaaccgaatgcccgacccgatccatggaagggcatgatctaagtcctgttaccaccaccacgctgggtcggctgccctgactctt

SEQ ID NO: 630148 - DNA, 120 bp, Artificial Sequence
  ENSG00000179528_11 (sequence is synthesized)
ccttcctcacccccgccatttccaggactcacatccaaaggcgacagcaccaggatttgctcccgcctttggcacagaggaggacgggtccctctctcagcctggccagtctttcccagg

SEQ ID NO: 630149 - DNA, 120 bp, Artificial Sequence
  ENSG00000179528_12 (sequence is synthesized)
gcactgcgtctcccaaggtggctgaagctggccagctgcgggctccgcgccgctcgtcccgggtctatgggtccattccccacgcccacccggaccccggggtcactcgggtctccgtct

SEQ ID NO: 630150 - DNA, 120 bp, Artificial Sequence
  ENSG00000179528_13 (sequence is synthesized)
gtgccagggagggagaatcacgcccagggtcctctctggcttcgcgcgactgagaacgcgcccggacgcggcgcggcgctcctgagtcaaaggagaggtggcggcaggaccaccccaggg

SEQ ID NO: 630151 - DNA, 120 bp, Artificial Sequence
  ENSG00000179528_14 (sequence is synthesized)
agtgagtcttggggagttggggggagaaaagtgtcgaggagggcgtcggagtttcccaccgctggctgcttcccggcccgcacgcccgggagggtggcggtgggcgcgcagagatctttg

SEQ ID NO: 630152 - DNA, 120 bp, Artificial Sequence
  ENSG00000179528_15 (sequence is synthesized)
ggaaaaaggacttccctagaagagctgtccaatcccagtacctgagcccagctgcagaggggagaactaggcgggagagatggaaggggctgtgaggcacaggcccatcagcagagctcc

SEQ ID NO: 630153 - DNA, 120 bp, Artificial Sequence
  ENSG00000179532_0 (sequence is synthesized)
aacggttctaacagctgggtgcgggtggagctgcgggcgatcgccagctcgagtgcagattccttgctgtgaccgaggttcagagtgagctctgtcggtgtgtcagtttgcctcttcagg

SEQ ID NO: 630154 - DNA, 120 bp, Artificial Sequence
  ENSG00000179532_1 (sequence is synthesized)
cactcttcaatgaaacctcatcagcagatcgggctctcttcccttgccttgcctcctaacccccctaggccaggtgagggggacagggtactgggaggtaagaaggaactcttctgcaag

SEQ ID NO: 630155 - DNA, 120 bp, Artificial Sequence
  ENSG00000179532_2 (sequence is synthesized)
gagggctctcacgtctgtcttaggcctgctccttaccagagtctttggggaagcagtagggagggcctgagggtctcaggaaaggctctctgctggtctggctctgctctgtagctccat

SEQ ID NO: 630156 - DNA, 120 bp, Artificial Sequence
  ENSG00000179532_3 (sequence is synthesized)
ctatttccctgtcccaggtcctttcttcctcctaaccccattgactctgaccatcccctgcccagagcctgaggtcccttctctggcccctctgctgggctggcccatgcaggtgaggcc

SEQ ID NO: 630157 - DNA, 120 bp, Artificial Sequence
  ENSG00000179532_4 (sequence is synthesized)
ccgcatctggcatcctggaactggcagttggagcctgagctatgggcaaggtcacttcgacagcagttgaatgcccagctcctcatggtcccggaggagaggagggtaggtttgtcttct

SEQ ID NO: 630158 - DNA, 120 bp, Artificial Sequence
  ENSG00000179532_5 (sequence is synthesized)
gatgagacatcatctgattcccttaagtcttggcactccatatgtgtcttggacagcaaagaacagcccttggcctgccagcagaaacagaggcagttcgtgaagccagtgactgagtca

SEQ ID NO: 630159 - DNA, 120 bp, Artificial Sequence
  ENSG00000179532_6 (sequence is synthesized)
gagcagcccacagtgctggaactcctgctagctgagctccgaactctgttctcagctgtgttgcaggacagtagccctgcagcttggcgctatcttcatgcagtactgggtctactgcct

SEQ ID NO: 630160 - DNA, 120 bp, Artificial Sequence
  ENSG00000179532_7 (sequence is synthesized)
ccatatcgtgagttgctagttggccaccttgatttgctgcccttcctggagcagctgtactgctgggcaccctgggtccaaacccacctccatctggacctgctaggtgccattgtccag

SEQ ID NO: 630161 - DNA, 120 bp, Artificial Sequence
  ENSG00000179532_8 (sequence is synthesized)
gcctttcctccagacagctctttgttagacagtgcttcccatgctgactgctgtccccagaagcggaggctccatcacaggcccccatgcccagcttgcccttttgtgcaggcccagtgg

SEQ ID NO: 630162 - DNA, 120 bp, Artificial Sequence
  ENSG00000179532_9 (sequence is synthesized)
agcaggcagcaagtaaaggaggagctggccacctggctgcgaccattgacactgcctgagctacagcgctgcctgggcattgttggtgctcaggtggccctagaagaggctgtgtggctg

SEQ ID NO: 630163 - DNA, 120 bp, Artificial Sequence
  ENSG00000179532_10 (sequence is synthesized)
gatggacttagtctccttcccttggcactggcagcggacatccctgtacggtatgaaagcagtgacactgacaatgcagaggtggagcctgttggaagaaaagagaccaggtctcagctt

SEQ ID NO: 630164 - DNA, 120 bp, Artificial Sequence
  ENSG00000179532_11 (sequence is synthesized)
gactatgaagttcccagggaaaaggccttccaaaagagcagcaccggcttttcacctgagacttccttcctggatagccaggtgatgactgctctgaagatggagagatacctgaagaag

SEQ ID NO: 630165 - DNA, 120 bp, Artificial Sequence
  ENSG00000179532_12 (sequence is synthesized)
atccacttcctctatctcaatgtggctcccagccggtactttaggccttacagcctgatggtggtgccacccgacaaggtgaatcccgagcactacatcttctctccctttgggatcttg

SEQ ID NO: 630166 - DNA, 120 bp, Artificial Sequence
  ENSG00000179532_13 (sequence is synthesized)
catgtacatcctgtggaaggtagcgagacgatgacactgggtacctggcaccatcactgtgttctctggcagcagctccagttcattccattctttaagtattgcctcttacgcaagtcc

SEQ ID NO: 630167 - DNA, 120 bp, Artificial Sequence
  ENSG00000179532_14 (sequence is synthesized)
tttacctgttggaagaagaatgtgagattacaggggctgcatcgactccagaaattcctagagaatcatctgctcttggctgtgccccactttggagctgggctactccatattagcagg

SEQ ID NO: 630168 - DNA, 120 bp, Artificial Sequence
  ENSG00000179532_15 (sequence is synthesized)
cttctgcaggagctacactctgtgtcctggctaccccaggaactggatcggtgctatgagctgctggacctgcagacggctctagccgaggagaagcataaggctctacggctgctccat

SEQ ID NO: 630169 - DNA, 120 bp, Artificial Sequence
  ENSG00000179532_16 (sequence is synthesized)
cgttgcctaaacctctgcacatccattcttcgactggttcacgaggacacataccacatgcaacagtgcctacaggagcgagtacaaaactgtgacaggatcaggacaggccaaggctcc

SEQ ID NO: 630170 - DNA, 120 bp, Artificial Sequence
  ENSG00000179532_17 (sequence is synthesized)
atataccttcagagggtacagcacaagcaactggagcagaagctgaagcaagcagaggcctggtggctgcagctgggaaagtttgcccgcctggttgactacatgatttgtcagagcctc

SEQ ID NO: 630171 - DNA, 120 bp, Artificial Sequence
  ENSG00000179532_18 (sequence is synthesized)
atttctgtcttggaagagcagataacctcttttgtggccaacatccttcaagccccaaggcagaaaccctttctctcatcacagctggtctttgatgatcatggtcaactgtctcatgtg

SEQ ID NO: 630172 - DNA, 120 bp, Artificial Sequence
  ENSG00000179532_19 (sequence is synthesized)
ccctgtgttgaaaatatgatccagactctaactggaggcctacagtctgtcaagacctctgccttgcaggtagtgcagtctgcagacctgaagacctcctcggattccctgtattctgaa

SEQ ID NO: 630173 - DNA, 120 bp, Artificial Sequence
  ENSG00000179532_20 (sequence is synthesized)
gaagaagatgaagaggaggactcaaaagacgaatttctgatgcccaagttccagggccagcccagcgatgctgtgagcatcttctgtggcccgaatgtgggattggtgtggccctggaag

SEQ ID NO: 630174 - DNA, 120 bp, Artificial Sequence
  ENSG00000179532_21 (sequence is synthesized)
tctcacccaattgctggtatcttggaggtccgtggatgtcggctgcggggccaatacttcccccacaattataagcagctggaggaagacctggacaacaaccctaagatccagcaggca

SEQ ID NO: 630175 - DNA, 120 bp, Artificial Sequence
  ENSG00000179532_22 (sequence is synthesized)
ctgaatatacaacaggtgctgctggagggcgtgctgtgcaaggtgcaggaattctgcagggaacatcattggataacaggcatttatgaattcctgcaatcctgggggcctcagaagctg

SEQ ID NO: 630176 - DNA, 120 bp, Artificial Sequence
  ENSG00000179532_23 (sequence is synthesized)
gaagacatgagaggtggtcccatcaagaactacgtgacgctggtgagccgcctgaatgtttggcaggcccgtgtctccagtatgcctatcgagttgctcacaaaaggcgggttgctgcta

SEQ ID NO: 630177 - DNA, 120 bp, Artificial Sequence
  ENSG00000179532_24 (sequence is synthesized)
cttagctgccatgatgtacaggcagagatggaatccaagctgaacagcataaggaaggacattcttgcacacgtgcaaaatgagtgctggaacctcagtcaacaactcatgacagagctc

SEQ ID NO: 630178 - DNA, 120 bp, Artificial Sequence
  ENSG00000179532_25 (sequence is synthesized)
acagatttcatgcatatcttccgaaccatcaactcagatattcatgccattgcacagtgcacccagaagttgaatgaagccaatgaacagtacgtcgagctggaggagcgaatggaatac

SEQ ID NO: 630179 - DNA, 120 bp, Artificial Sequence
  ENSG00000179532_26 (sequence is synthesized)
gtacgggcactccacgaactcatccgcaaccactttagcctctttagtgctgagaatgaagcactggacatctcggtgagaaggcaattcggggagtcacccatccctccctgccctcct

SEQ ID NO: 630180 - DNA, 120 bp, Artificial Sequence
  ENSG00000179532_27 (sequence is synthesized)
cccccacaaccacatctactccactgccctctgcttgccccacagcttctggatatgtgggaggcatttcagtttgagaaaagccaggcttcagagttcctgctcagcaagcgacatgcc

SEQ ID NO: 630181 - DNA, 120 bp, Artificial Sequence
  ENSG00000179532_28 (sequence is synthesized)
attatgcccaagctgcagcagctgatggcagcagcattggcagagctggaaggcctgcttgcgaaggccctctccggtccctttatggaccccacacaagatcagaggagtactgagcac

SEQ ID NO: 630182 - DNA, 120 bp, Artificial Sequence
  ENSG00000179532_29 (sequence is synthesized)
cagctcgtctccctagagcgtcagttccagaacacagtcagcgacctcagtgaactgcaccacgcctatgccatcttcactgaggatgagactcctgtgcccttgccaatctgtgggaca

SEQ ID NO: 630183 - DNA, 120 bp, Artificial Sequence
  ENSG00000179532_30 (sequence is synthesized)
cgtcctattgtgcagcagcagcgcatatggcacctgtaccgagtcatctccgaaaacatcagcgagtggaagtgcatggcttttgccaagttcagcccagctatggcccaggagaagaca

SEQ ID NO: 630184 - DNA, 120 bp, Artificial Sequence
  ENSG00000179532_31 (sequence is synthesized)
gagggctggctgacagaggcagcacggatgagcacaaccctggagctgcacagccccgtgctgcagcactgcatgcgcatcctgggggagtttcgcagctacctgcccctgctcactaag

SEQ ID NO: 630185 - DNA, 120 bp, Artificial Sequence
  ENSG00000179532_32 (sequence is synthesized)
ctgggcagcctccacccacagagcctcaactgccagtgtctcctgcgtgcccttgggctgggcagtctccaaactatagaactcctaacgctgggccagctgcttacttatccactgctg

SEQ ID NO: 630186 - DNA, 120 bp, Artificial Sequence
  ENSG00000179532_33 (sequence is synthesized)
gagtttgcagatcgaatcaaccaggtctggcagaatgaaaatgaacgaattcatgcccaagagactatacggcggttgcagcggtactgggaagcgcgccagctgcgcctgctcaacttc

SEQ ID NO: 630187 - DNA, 120 bp, Artificial Sequence
  ENSG00000179532_34 (sequence is synthesized)
atcctgcatgtaccctacgagcccccagcctcagagcgctccaagaggcaggtgctccgcagcccccaatgggaggtagtggacaaagatagtggcaccttcatcctctcagattacagc

SEQ ID NO: 630188 - DNA, 120 bp, Artificial Sequence
  ENSG00000179532_35 (sequence is synthesized)
aacctgcaggattccatccaggaaagtcttcaggtgttgtccaagatcttggccatcgaaaagtcaggagatttaaacaaaatagctttggagtgggtggccatcatgcatggcctgggt

SEQ ID NO: 630189 - DNA, 120 bp, Artificial Sequence
  ENSG00000179532_36 (sequence is synthesized)
gccctgctggaggtgtggctgactttccagcagaagtggatttttctgaataaagttctgcatgagatgaagatccagtttcctaatgctgacctgaactctcgtttcaaggtcatggat

SEQ ID NO: 630190 - DNA, 120 bp, Artificial Sequence
  ENSG00000179532_37 (sequence is synthesized)
gaccagtatcgaaccctgatgcgcatctctgtagctgaccccatggttctgtcacttgtagtgcccagtgccgagaggagcccttacttccaaggccagcagctgcaacaactgctgcaa

SEQ ID NO: 630191 - DNA, 120 bp, Artificial Sequence
  ENSG00000179532_38 (sequence is synthesized)
gcaggatcggtggagctggagggcatcatcatgagtctggagagcgtgctctatggggtgtgtgctcacttcccccgcctcttcttccttagtgacagtgagctggtagccctgctggct

SEQ ID NO: 630192 - DNA, 120 bp, Artificial Sequence
  ENSG00000179532_39 (sequence is synthesized)
gctcgactggaatcatgcgaagcccagctatgggtacgacgctgctttcctcatgtgcatgctgtgagcttcaggtcttgcccaactggtgagaaaaacacagatgactgggagtcaagc

SEQ ID NO: 630193 - DNA, 120 bp, Artificial Sequence
  ENSG00000179532_40 (sequence is synthesized)
ccaaacacacagactcaggtggaggcacttgcagtgctaggggcaggtggggaggaggtgaagctgcagggtccccttcctctgcatccagatctccctaagtggctggcctctctggag

SEQ ID NO: 630194 - DNA, 120 bp, Artificial Sequence
  ENSG00000179532_41 (sequence is synthesized)
aagtgtctgcgcttggcactggtgcacatgctgcagggctgtgtggctgctcgccttgctcgaggcccatctctaggtgaggccctcaagcaactgcccaagcaaaacaagttgtacctg

SEQ ID NO: 630195 - DNA, 120 bp, Artificial Sequence
  ENSG00000179532_42 (sequence is synthesized)
caactgtatgtccagcactggatcgacttagtccaggccttcccatggcagtgtgtgctggtggcagaggaggtggtatggcgggccgagatggaggaggctctgcttgagtggggtacc

SEQ ID NO: 630196 - DNA, 120 bp, Artificial Sequence
  ENSG00000179532_43 (sequence is synthesized)
ctggccatggtctccatgcatatgcgcaagcttgaggtactggtgaattttatgcgggcccagagggcttcccaaggtgggcagtccctgccttctgtccgccagaccagccttctcagt

SEQ ID NO: 630197 - DNA, 120 bp, Artificial Sequence
  ENSG00000179532_44 (sequence is synthesized)
gccctgctggtcatggcagtgactcaccgggatatagcacagctgctggaacagcaccaggtcagtgatctcacagactttcactgggtccgccaactcaagtatcacttgggttcacct

SEQ ID NO: 630198 - DNA, 120 bp, Artificial Sequence
  ENSG00000179532_45 (sequence is synthesized)
cacataatccccaaaagccccctacagagtcttaagactattgcatcttctgaaccctctctgtcaccagcggcatgctggatagatgtgctaggcaggtccttcctgtacaattacgag

SEQ ID NO: 630199 - DNA, 120 bp, Artificial Sequence
  ENSG00000179532_46 (sequence is synthesized)
tatctgggacctagactagggcctctacccagcctactgcctgaacggccagccctggtactattattggccctagaggaggtggcctgtgggaccgtactgggtcctaatggtgtgggc

SEQ ID NO: 630200 - DNA, 120 bp, Artificial Sequence
  ENSG00000179532_47 (sequence is synthesized)
aagagagctatagtgaacagcctggcacaggccctgggccgccagctggtgatgctaccctgctcacctcagatagaggctcaatgcctgagcaactatctgaatggtgccctgcagggt

SEQ ID NO: 630201 - DNA, 120 bp, Artificial Sequence
  ENSG00000179532_48 (sequence is synthesized)
ggtgcctggctgctgttggagaaagttcatcagctgccccctggcttgctctctgccctgggccagcgcctgggtgaactgcaccacttgtatgccccactgtaccaggaggcttcccga

SEQ ID NO: 630202 - DNA, 120 bp, Artificial Sequence
  ENSG00000179532_49 (sequence is synthesized)
aacacaagcaccatagaccccacccagccccagctccttggcagtagcttctttgaaaaacatcacgtgtctgtgcgccttggctatggctgtctcctggtactgcgtgccctgagctct

SEQ ID NO: 630203 - DNA, 120 bp, Artificial Sequence
  ENSG00000179532_50 (sequence is synthesized)
gctgtgcctgccaacctgcacctgctgctgcggcctgtggcattggcattgcctgatctgcggcaagtggcagagctgactctgctgggtgcagggatgagggatgccttccagatggct

SEQ ID NO: 630204 - DNA, 120 bp, Artificial Sequence
  ENSG00000179532_51 (sequence is synthesized)
acccgcctatccaaattcttctctctagagcgtgagctggtgtctgggcccctgccctgccgcctgccactgctcaagcagatactggaagacacaatacggacactaaatgtgaccaag

SEQ ID NO: 630205 - DNA, 120 bp, Artificial Sequence
  ENSG00000179532_52 (sequence is synthesized)
gaggaaccgaagtgccagaagcctcgcagcctagctgccattgaggaggctgccctactgcgctcaccactgtttagcattctcaatgggctccacctgcacaacctccgagggctgttg

SEQ ID NO: 630206 - DNA, 120 bp, Artificial Sequence
  ENSG00000179532_53 (sequence is synthesized)
tgtgcgcttttccctagcgccagccaagtgctggcagaacctatgacttacaagctgatgaagccattggtggtggaggaactgcaacaggtaggtctggatcccagccctgacattttg

SEQ ID NO: 630207 - DNA, 120 bp, Artificial Sequence
  ENSG00000179532_54 (sequence is synthesized)
gggtccttggaacagttgagccaggccctgagccgggcctcaggcattctgctcctgggccctgcgggcagcggcaagaccacttgttggcacagcttatttaagatccagaatcggctg

SEQ ID NO: 630208 - DNA, 120 bp, Artificial Sequence
  ENSG00000179532_55 (sequence is synthesized)
gcagccatggaggacacctcaacccaaggctgccagcctgtggaaattacccacctgtaccccagtggcctcagcccccaggagttcctgggatggctagagggctcctgctggcatcat

SEQ ID NO: 630209 - DNA, 120 bp, Artificial Sequence
  ENSG00000179532_56 (sequence is synthesized)
ggcatctttcccaaggtacttcgtgcagccggtcagtgtaacaacatgggccaaaagaggcagacagaggaatcaatcgggatccagcactggataatatgtgatggagcctccaatggt

SEQ ID NO: 630210 - DNA, 120 bp, Artificial Sequence
  ENSG00000179532_57 (sequence is synthesized)
gcttggctggactccatcacttgcctcctgagtgagcttccccagcttagtctccccagtggacagcagatagcacgacccccaggcacctttctcttgatggaggtggctgacacaaca

SEQ ID NO: 630211 - DNA, 120 bp, Artificial Sequence
  ENSG00000179532_58 (sequence is synthesized)
ggcatatcccccacagtggtaggctgttgtgccctagtctggtgtggtggagagcagacttggcagtgtatacttagtgccctgatggcatcccttccttatgagtaccgcctgcagcac

SEQ ID NO: 630212 - DNA, 120 bp, Artificial Sequence
  ENSG00000179532_59 (sequence is synthesized)
cggacagtcgctgagctcaaccacatggctgaggttctggtgcctgcaacattgcgattcctcacctgccaaggtgtcagctctctgctgcaggtacacgggcagcaggctgtttgtgca

SEQ ID NO: 630213 - DNA, 120 bp, Artificial Sequence
  ENSG00000179532_60 (sequence is synthesized)
ggtgtggcagaagttaccagcatggcacgcatcttgcatagtctgcttgacctccaccttcgcctaaaggaggagaaggcccctggcccagaggacctcagctatagtgatcctgtggcc

SEQ ID NO: 630214 - DNA, 120 bp, Artificial Sequence
  ENSG00000179532_61 (sequence is synthesized)
tttctttttgccttgatctggggctttggagcccaccttccctccaggttctggcccatctttgataccttcataagggattctattagtcgcctctccaactaccctgagccaccaccc

SEQ ID NO: 630215 - DNA, 120 bp, Artificial Sequence
  ENSG00000179532_62 (sequence is synthesized)
tcagccttggtgtttgatctacatgtaagccctgaagatggaacactggtccccttcactggccaatacctgagcagccacatcaaaggaactttgggcacctttcacccttctatccag

SEQ ID NO: 630216 - DNA, 120 bp, Artificial Sequence
  ENSG00000179532_63 (sequence is synthesized)
actgaacggctcttgtatgtggtggacctgcttctgtcagggggacagccagtgttgctggctggagaggcagcaacagggaagtcagcctttgtggaggtgctggtagagccacatcac

SEQ ID NO: 630217 - DNA, 120 bp, Artificial Sequence
  ENSG00000179532_64 (sequence is synthesized)
ccttacatatacagccccatccaccctgccttcagttcctcccacctccgtctcctgctgagcagaggaatccagggccaaacacaagccagcccacagcctgggcatcaccaggattct

SEQ ID NO: 630218 - DNA, 120 bp, Artificial Sequence
  ENSG00000179532_65 (sequence is synthesized)
aaaccctccctcctcttcttgctggaggacctgcacctagccacttctgacccagagaagagctgccagccagtgttggagactctgcgccaggccatggatggcactgtgtatgcccac

SEQ ID NO: 630219 - DNA, 120 bp, Artificial Sequence
  ENSG00000179532_66 (sequence is synthesized)
agcaccttggaactgcagacgctgcagcctacagtcaacttccttgccactgtcacagtgccaggatactgtgagcgcccactgtgtccacgcctctttcgactcttcacagtcctggcc

SEQ ID NO: 630220 - DNA, 120 bp, Artificial Sequence
  ENSG00000179532_67 (sequence is synthesized)
ctggaaagcatgacccaggccaccctgctggaaagacatgtgcctatcattcaggcttggcttgagcgtttcccttctgtggaacgggagcgtgctctggcacgaggtctggttagggcc

SEQ ID NO: 630221 - DNA, 120 bp, Artificial Sequence
  ENSG00000179532_68 (sequence is synthesized)
tcagtagaggcctgggaggctgtgtgcaattgcttcatgccttcacccctccacccacactaccacttctccctacactctgtgagccacctactgagcagcctgcagctgctgcccaac

SEQ ID NO: 630222 - DNA, 120 bp, Artificial Sequence
  ENSG00000179532_69 (sequence is synthesized)
agaacaggctcccgaggttttgtggactatcccaaccaccaggagcacttgcgccgggtgtcaggcctgcgaggcacttgtctgaccgttatgatggccacacgcaatgtggtgcgtctt

SEQ ID NO: 630223 - DNA, 120 bp, Artificial Sequence
  ENSG00000179532_70 (sequence is synthesized)
tggttgcatgaggcacagagaaccttttgcgaccggctggacagccccagggaacgctcctactgtgccaagctgctcctagtagtagctcaaagtgtcttctgctgtgggccagggccc

SEQ ID NO: 630224 - DNA, 120 bp, Artificial Sequence
  ENSG00000179532_71 (sequence is synthesized)
cagcacctgggcaaggaccatcaggagagtgaggaggaggaggaggaggagagggtgcccgaagtagaatctgaaggggagttggcccagtgggaggacttcagcaacagcaatagtgaa

SEQ ID NO: 630225 - DNA, 120 bp, Artificial Sequence
  ENSG00000179532_72 (sequence is synthesized)
acagaggaggaagaggaaccttatggccttcaggtcgccagagtctcaaactccagagatccaagtctaacaccatccataggaccagtaagcagggggatgaaggaaagcataagtcac

SEQ ID NO: 630226 - DNA, 120 bp, Artificial Sequence
  ENSG00000179532_73 (sequence is synthesized)
aagataaggcaagagaaaggcacaagggcatccaactataggctccaggtaaggagatcattcaagacttggtggcagaagaaaccccagatggacctgatctcacccttgttgttacca

SEQ ID NO: 630227 - DNA, 120 bp, Artificial Sequence
  ENSG00000179532_74 (sequence is synthesized)
gtgttactactacatccccaggaaaagccctcagacctggtcttcagtcaggagctgatactggggcctaactctgagacccccaacttgtacctggaacgacagtgggagaagctagag

SEQ ID NO: 630228 - DNA, 120 bp, Artificial Sequence
  ENSG00000179532_75 (sequence is synthesized)
gagcagttggccacctcagctgctcaactgaagttgagcccccacctggcccggtgtcattccatggcccagcacgtggcccgcctggtccgggtgctggccaggccccggcagcatggc

SEQ ID NO: 630229 - DNA, 120 bp, Artificial Sequence
  ENSG00000179532_76 (sequence is synthesized)
ctgctgctctcgggggctctgggtactgggcgccacactgccatcactctggcttctagcatttgtcaggcccatttctttcatctaccatctgggtcagaggaggccattctccaatgt

SEQ ID NO: 630230 - DNA, 120 bp, Artificial Sequence
  ENSG00000179532_77 (sequence is synthesized)
ctacgagatgccagctggcatgctggcatgttaagccagccagtggctctgttggtacccagtggtgtggatctcactacacttcatcgcctcctggccctggcaacctcaggcagtttc

SEQ ID NO: 630231 - DNA, 120 bp, Artificial Sequence
  ENSG00000179532_78 (sequence is synthesized)
cctggccagtacacagaagcagatttggaccgcattggagaacacctccccagggagaaccttggtgtcaaacagaacatcaagaaggaaatggtgttgcagaggttccaccagcaagtg

SEQ ID NO: 630232 - DNA, 120 bp, Artificial Sequence
  ENSG00000179532_79 (sequence is synthesized)
tgcagccaccttcacctgttcttcctgattggagataaacaggcccacaagcagctgccctccacccttttcctgaggctccttcaactggccactgccagcattgaccgctatgaaccc

SEQ ID NO: 630233 - DNA, 120 bp, Artificial Sequence
  ENSG00000179532_80 (sequence is synthesized)
tgggaccaagctgccctggccaaggtggcccagcatcacctggagggtgctcagagtgtgccccttgatgacggctcctggaagtacccagacctccaggcctcaattcccagtgtggcc

SEQ ID NO: 630234 - DNA, 120 bp, Artificial Sequence
  ENSG00000179532_81 (sequence is synthesized)
aaagccatggctcttatccacctttcggccacccactaccatgagcacctgtgccctgcattgccactcgtcacccccaagaccttcctagacttcctggacactttcctgatgctgcag

SEQ ID NO: 630235 - DNA, 120 bp, Artificial Sequence
  ENSG00000179532_82 (sequence is synthesized)
caacagacaatcctgaagattaagaacaaggcccagcgggtccagaatgccttggagaatctgagaatgctgattaaggagcacggtacccatgccaatctgatctttgacttggaacag

SEQ ID NO: 630236 - DNA, 120 bp, Artificial Sequence
  ENSG00000179532_83 (sequence is synthesized)
cagctgaaagactccggcaagagtctcagcatgtttcagcagcagctagagcaaagcaagctcctatacaagcagcagctggaagagtgtcggcatcaagagaacctcattgagaacctg

SEQ ID NO: 630237 - DNA, 120 bp, Artificial Sequence
  ENSG00000179532_84 (sequence is synthesized)
gccaggcaacgggatgccctgcaagctcagcgagaggctttcctggagcagatgagcaaggcatttctggagcctctgagccagctgcaggtggctgactttgaggagatacggagctat

SEQ ID NO: 630238 - DNA, 120 bp, Artificial Sequence
  ENSG00000179532_85 (sequence is synthesized)
cgagcaccaccagaatctgtggtccgggtaactgatgcaatgtgtgacttgttccaccatgaaacaggctgggccagtgccaaacagctgttatgcactgaggatttttatcaggagctg

SEQ ID NO: 630239 - DNA, 120 bp, Artificial Sequence
  ENSG00000179532_86 (sequence is synthesized)
gtgttcttccccaaggagaagataacagactcagagctgataaagttacatctaattctgaaggctccaggtatggacgatgcagccctgcgggcagtgagccgacctgcagccagcctg

SEQ ID NO: 630240 - DNA, 120 bp, Artificial Sequence
  ENSG00000179532_87 (sequence is synthesized)
gcagcctggctctgggctgttctgcactatgggctggcgcattgccggggactgcccacggacctgctgctgcagcaagtggaggcaacactcactcgggagcaggcccgcctgggctac

SEQ ID NO: 630241 - DNA, 120 bp, Artificial Sequence
  ENSG00000179532_88 (sequence is synthesized)
taccagtttcaggcccaggagaccctggagcataatttggccctggctaagatggtggaggatgcccaagcttcccacaactgcgtggcaaagaccctcagtcaagcacagtgtgggcag

SEQ ID NO: 630242 - DNA, 120 bp, Artificial Sequence
  ENSG00000179532_89 (sequence is synthesized)
tatcacaaatggcccatgaaggctgcactgctcacgcctatgcgtgcctggactacacagctccagaagctgaagggacgctgcatgactgtgtttggagataccctcctatgttcagct

SEQ ID NO: 630243 - DNA, 120 bp, Artificial Sequence
  ENSG00000179532_90 (sequence is synthesized)
gccatcatctacctgggtcccttcccaccattgcggcgccaagagctactggacgagtggttagctctgtgtaggggctttcaggaggctctgggcccagatgatgtggcacaggcactg

SEQ ID NO: 630244 - DNA, 120 bp, Artificial Sequence
  ENSG00000179532_91 (sequence is synthesized)
aagcggaagcaaaaatctgtcagcataccaccaaagaaccccctgctggctacacactctcccttcagtattctgtccttgctgagctctgaatcggagcagtaccagtgggatggaaac

SEQ ID NO: 630245 - DNA, 120 bp, Artificial Sequence
  ENSG00000179532_92 (sequence is synthesized)
ctgaagccacaggcaaagtcggcccacctggcaggcttgcttctgcgaagccccacacactacagtagttgccgttggcctctgctgcttgaccccagcaacgaggccctcatctggttg

SEQ ID NO: 630246 - DNA, 120 bp, Artificial Sequence
  ENSG00000179532_93 (sequence is synthesized)
gacccgctgcctctggaagagaatcgatcttttgcgccagccctcactgagggtagagggaaaggcctcatgagaaatcaaaagagagagagtaaaacggacatgaaagaggaagatgat

SEQ ID NO: 630247 - DNA, 120 bp, Artificial Sequence
  ENSG00000179532_94 (sequence is synthesized)
gagagtgaagagagtaatgaggctgaggaccagacaaaagagcagaaggcagaggaaagaaaaaatgagcaggagaaagagcaagaggaaaatgaagagaaagaggaggagaagacagag

SEQ ID NO: 630248 - DNA, 120 bp, Artificial Sequence
  ENSG00000179532_95 (sequence is synthesized)
agccaggggtcaaagccagcctatgagactcagcttccatcccttccctaccttagtgttctttcaggtgctgacccagagctgggttctcagctccaggaggcagctgcttgtggcctg

SEQ ID NO: 630249 - DNA, 120 bp, Artificial Sequence
  ENSG00000179532_96 (sequence is synthesized)
cctgtgttactgaccaatgtggagctgggtctagggtgcgaagaactgcaatggctgctgcaacgggagcagctgagtccaccccaggtgcagcctggcttctgtctgtatctcagcacc

SEQ ID NO: 630250 - DNA, 120 bp, Artificial Sequence
  ENSG00000179532_97 (sequence is synthesized)
accctctccctctgtgccatggaaaaagtgctaggttgtgaactgctaaaggggctgaatgtgttggatctgggcctgaacatggaaatactggaagaacagatgctgcatgaaatcttg

SEQ ID NO: 630251 - DNA, 120 bp, Artificial Sequence
  ENSG00000179532_98 (sequence is synthesized)
tgcagagagtatcctgaactcgagacccgctggcaggacctaaagatcagagccctagatacctgcaaggctgtggaggctgctgaggagcggctgctgacgatgctgctgttccagaat

SEQ ID NO: 630252 - DNA, 120 bp, Artificial Sequence
  ENSG00000179532_99 (sequence is synthesized)
ccgaagcgtcagaagccagccaagtttctgcggaacatagtgagggcccaaggaaagctatgccagctgcgtgctcattgtgaagagttagaagggcagaaactacaggagatggtattg

SEQ ID NO: 630253 - DNA, 120 bp, Artificial Sequence
  ENSG00000179532_100 (sequence is synthesized)
tgggcaccctatcgacctgtggtttggcatggaatggccatggtaaaggccctaagccaactgcagaacctgctgccacttttctgtatgagcccagagaactggctggcagtcactaag

SEQ ID NO: 630254 - DNA, 120 bp, Artificial Sequence
  ENSG00000179532_101 (sequence is synthesized)
caggctctggacagcatgaagccacgtgagattaatcacggggaggacctggccagccatctactgcaattgagagcacacctgacccgccagctgctgggcagcaccgtgactgcactg

SEQ ID NO: 630255 - DNA, 120 bp, Artificial Sequence
  ENSG00000179532_102 (sequence is synthesized)
ggccttacccaagtacccttggtgggtgcattgggcgctttggctctgctgcaagcaacagggaaagcatcagagctggaaagactggcactctggcctggactagcagcctctcccagc

SEQ ID NO: 630256 - DNA, 120 bp, Artificial Sequence
  ENSG00000179532_103 (sequence is synthesized)
acagtccacagcaagccagtctcagatgtggctcgaccggcctggcttgggccaaaagcctggcatgaatgtgagatgttagagctgctgcccccatttgttggcctgtgtgcctccctg

SEQ ID NO: 630257 - DNA, 120 bp, Artificial Sequence
  ENSG00000179532_104 (sequence is synthesized)
gcaggccactccagtgcttggcaggcttacctgtcactgtcatccacagtgctgggtcctgcacctgggccagggcctgagccactcagcctcctccagaagctgatcctgtggcgcgtt

SEQ ID NO: 630258 - DNA, 120 bp, Artificial Sequence
  ENSG00000179532_105 (sequence is synthesized)
ctgcgacctgagtgcctggcaggtgccctggcagacttcaccactagcctcctgggtcggcccctggatgaaaacacgtatgctcccaccatgccctttaaacatagtcaggctactcag

SEQ ID NO: 630259 - DNA, 120 bp, Artificial Sequence
  ENSG00000179532_106 (sequence is synthesized)
cccatgctgatcttgttgccaccgcctggccacccctcagccactctgcatcctctgactgtcatccagaaactggctgccaagtatcagcaggggcagaagcaactgcaggtgatagcc

SEQ ID NO: 630260 - DNA, 120 bp, Artificial Sequence
  ENSG00000179532_107 (sequence is synthesized)
ctgggctctgaagcctgggacccagtctcagttgtggtcagcactctatcccaggctatgtatgaggggcactggctggtgctggacaactgtcatctgatgccccattggccgaaagag

SEQ ID NO: 630261 - DNA, 120 bp, Artificial Sequence
  ENSG00000179532_108 (sequence is synthesized)
ctgctacagctcttgctggaactgttaggcagagccaaggtggttgcagacctggaatcagaacagcttttagaccaacctgaaagcaggaatgtaagcactgttcacagagattttcgt

SEQ ID NO: 630262 - DNA, 120 bp, Artificial Sequence
  ENSG00000179532_109 (sequence is synthesized)
ctttggcttattgtgcctgcagagtctagtgcttctttgccagctgtgctgactcagcactccatgcctgttttctggaaccagtccctggagctgggccatgttttgattgacagtgtg

SEQ ID NO: 630263 - DNA, 120 bp, Artificial Sequence
  ENSG00000179532_110 (sequence is synthesized)
gagctagcccagcaagtactctacatgcaaccccccacccaggcactacctctgctcctcctccatggcctcctgctacaccggcagctctatggaacaaggctgcaggcacacaggggg

SEQ ID NO: 630264 - DNA, 120 bp, Artificial Sequence
  ENSG00000179532_111 (sequence is synthesized)
cgctggagtcaagtgactctaacccaggttcttcagacccaagaccagctgtgggcaagtcttagcaatccccgtgctgccatgcaagagctggctgcttcagttttctacgggggtcct

SEQ ID NO: 630265 - DNA, 120 bp, Artificial Sequence
  ENSG00000179532_112 (sequence is synthesized)
ctgggggacactgaggacagggaggccctgattagcctcacacaagcctgcctgagccccagtagtgggagctgggtccagccacacacacctcagtctttgctggccacgctcatgccc

SEQ ID NO: 630266 - DNA, 120 bp, Artificial Sequence
  ENSG00000179532_113 (sequence is synthesized)
ctcccagagctaagggagctggatgcaatggcagagtgcaaggcccagatgcacctactgccctcaccacctgaaccccggctctgcggactgagtgagggcccccaagcctggctgttg

SEQ ID NO: 630267 - DNA, 120 bp, Artificial Sequence
  ENSG00000179532_114 (sequence is synthesized)
cgacgccagagtcgcgctctcttgagtgcgctgcagcggagttcacccgtgtgggttcctgagtctcgaagaggcgcccagcttgcggaaaggcgactgcggcaacgcctagtgcaagtc

SEQ ID NO: 630268 - DNA, 120 bp, Artificial Sequence
  ENSG00000179532_115 (sequence is synthesized)
aaccggaggctggagtcactgcaggatctgctgacccacgtgattcgccaagacgagtccgacgccccgtggtcagtgctggggccaaatgcacggcggcctctggagggcgtcttagag

SEQ ID NO: 630269 - DNA, 120 bp, Artificial Sequence
  ENSG00000179532_116 (sequence is synthesized)
accgaggctctagaactgagccagttggtgggcacgctacaacgcgaccttgattgcctgttgcagcagctgaagggcgcacccccgtgcccctcccgccgctgtgctgcggtggcccac

SEQ ID NO: 630270 - DNA, 120 bp, Artificial Sequence
  ENSG00000179532_117 (sequence is synthesized)
gctctctggactggccgcctacccttgccttggcgacctcatgcgccggccggtccgcagccgccctggcactggctgcgacagttgtcgcgccgtgggcaactgttggttcgttacttg

SEQ ID NO: 630271 - DNA, 120 bp, Artificial Sequence
  ENSG00000179532_118 (sequence is synthesized)
ggcgtgggcgcggacgcgagcagtgatgtaccagagcgcgtcttccacctgtcagcctttcgccacccgcgccgcctgctgctggcattgcgtggggaagctgccctggaccagaatgtg

SEQ ID NO: 630272 - DNA, 120 bp, Artificial Sequence
  ENSG00000179532_119 (sequence is synthesized)
cccagctcgaatttccctggtagccgaggctcggtctccagtcagctccagtataaacgtctggagatgaacagcaaccctctgcacttcagggtggagaatggtccaaatcccacggtt

SEQ ID NO: 630273 - DNA, 120 bp, Artificial Sequence
  ENSG00000179532_120 (sequence is synthesized)
ccagagagagggctgctgctgatcgggctacaggtcctacatgcggagtgggacccaatagctggagccttgcaggacagtccttccagccaacccagccctctgcctcccgtcagcatc

SEQ ID NO: 630274 - DNA, 120 bp, Artificial Sequence
  ENSG00000179532_121 (sequence is synthesized)
agcacacaggccccgggcaccagtgacctgccagccccagccgacctgactgtgtactcgtgtcctgtgtacatgggagggccccttggcaccgctaagctgcagagcaggaacatcgtg

SEQ ID NO: 630275 - DNA, 120 bp, Artificial Sequence
  ENSG00000179532_122 (sequence is synthesized)
atgcatctgcctttacccaccaagctcacccccaacacctgtgtccaaaggagggtccatgtgtgcagcccacccctgtcttgagcccgtctaccaaaataaagttgtagtgattccatg

SEQ ID NO: 630276 - DNA, 120 bp, Artificial Sequence
  ENSG00000179532_123 (sequence is synthesized)
ccctgcctggtttccttctatgctatcttccccctcctctttctccacgtgcgcacccttctccctgtcctttctccacatactcctcctctgactctagtgtccctctctcttcccttc

SEQ ID NO: 630277 - DNA, 120 bp, Artificial Sequence
  ENSG00000179532_124 (sequence is synthesized)
tcctcagcctcctcctcctttccactctctacctccccttcactccctgttgcttacacagccttttgtcttacacatccttttctcacattttgctctttcttttttattctatcctag

SEQ ID NO: 630278 - DNA, 120 bp, Artificial Sequence
  ENSG00000179532_125 (sequence is synthesized)
tggtgatctattccaactccaatggaagaaacatgtgtttgtttaaatctttacagtgtcaggaaaatttttttccaggtatcttgttccttagactgaatcaaaatctgcattctttta

SEQ ID NO: 630279 - DNA, 120 bp, Artificial Sequence
  ENSG00000179532_126 (sequence is synthesized)
acttctacctcctggctctagtttatctatggggctataaaaacaggtctcctccttccccatgactcaagagacatttattcacttcctctcattagatccaaatcacacctactttta

SEQ ID NO: 630280 - DNA, 69 bp, Artificial Sequence
  ENSG00000179532_127 (sequence is synthesized)
ttcacttcctctcattagatccaaatcacacctacttttaaaaatttcttcttattattttgaagcaag

SEQ ID NO: 630281 - DNA, 90 bp, Artificial Sequence
  ENSG00000179532_128 (sequence is synthesized)
tcctgagtagctgggattacaggcatgaatcaccacactcggccagttttctaaaatttattttttgtagaatgaggtctcactgtgttg

SEQ ID NO: 630282 - DNA, 120 bp, Artificial Sequence
  ENSG00000179532_129 (sequence is synthesized)
ttacaggcatgagccaccatgcctggctcaaatcctcgcctattttaaaaagccctattcaagtccatctcctcccagaaataattgtaataattgcctttaaccaaactcttcaatata

SEQ ID NO: 630283 - DNA, 120 bp, Artificial Sequence
  ENSG00000179532_130 (sequence is synthesized)
attgcctttaaccaaactcttcaatatattaggcattgtgctaataaactcatgacatgtgttacttaatcctcatctaccaggtaggtgctattattatttctatatatgagatgagtg

SEQ ID NO: 630284 - DNA, 120 bp, Artificial Sequence
  ENSG00000179532_131 (sequence is synthesized)
gactgatacataagagaggttaagtaatttatccaaagctacataataaatggtgtaactaggatttaaacctaggactatcttaatccaaaagttcatgctcttaagcagtatctaata

SEQ ID NO: 630285 - DNA, 120 bp, Artificial Sequence
  ENSG00000179532_132 (sequence is synthesized)
cagcctcccaaataaccttatttcctgtgcacactgatctcttgaacttaggtagcactaatgatcaatatcattcattcatttactgatcaattcatttaataaatgttcactgagagc

SEQ ID NO: 630286 - DNA, 120 bp, Artificial Sequence
  ENSG00000179532_133 (sequence is synthesized)
taactatattgaagcgtcttgtgggaaccctcctatcagccacagggaagctggtcagagccagacctcgtgcctggggaatggggatcatgggtgctggcattgtgggtagggtgcctt

SEQ ID NO: 630287 - DNA, 120 bp, Artificial Sequence
  ENSG00000179532_134 (sequence is synthesized)
agaggtgaggccaagaaccccatatgcgaatctgctctgctcttacgctgtcttggccaaaaggccaaaaggaattctgtgggctgccatgagggctgagaagattggggctaagtggtc

SEQ ID NO: 630288 - DNA, 120 bp, Artificial Sequence
  ENSG00000179532_135 (sequence is synthesized)
accaagaggagaggatggagtgactcatcatggaatctcctggggggaggggacaaaggtaataggatggcttggggagtggcctctcatggggactccaaggagatgattcccctaaaa

SEQ ID NO: 630289 - DNA, 120 bp, Artificial Sequence
  ENSG00000179532_136 (sequence is synthesized)
gggctgagatggactggcccatggaagtaaaaacccacatgacatcactgttagggtatggtggagtgtgtgagtgtgtcataaatggaagtgttgtaactgtctgacgcttttgcctgt

SEQ ID NO: 630290 - DNA, 120 bp, Artificial Sequence
  ENSG00000179532_137 (sequence is synthesized)
tgcacctagccacttctggtgaggagctgcgaagagggaaggaaggagctactgtcatctcttgagactataaaatccctagcaatattcattgactctcaaatatatgtctgtagatct

SEQ ID NO: 630291 - DNA, 120 bp, Artificial Sequence
  ENSG00000179532_138 (sequence is synthesized)
ccttcctctcccccttggagtcatcagcccccaggagagcctggaagagggtgggggtgggatacaattcacagctttggttttggcggtggtggaaactgaaggtactggaactgagag

SEQ ID NO: 630292 - DNA, 120 bp, Artificial Sequence
  ENSG00000179532_139 (sequence is synthesized)
ggacagcagtctcaataaaggtatatgagggggtaatattcatactgttatgggggtgatggcagtaaaggctcagaggaaggcctactctctcgagtctagggtggggagagtccatct

SEQ ID NO: 630293 - DNA, 120 bp, Artificial Sequence
  ENSG00000179532_140 (sequence is synthesized)
cttcgcgccgcccctcgttcgcggttccagtcccctcgaagtctctaattacacctcgcagttaccccttcttggtgatcttgcccccggtaaccctgctagcttctccgatctcgcttc

SEQ ID NO: 630294 - DNA, 120 bp, Artificial Sequence
  ENSG00000179532_141 (sequence is synthesized)
ggcaaattgccagcacagttgtgtggacacactaggccctcagcaccagccctaagagggcttcactcaacctggcccagagcaggcacaggtctatagcagggagccatactccctgtc

SEQ ID NO: 630295 - DNA, 120 bp, Artificial Sequence
  ENSG00000179532_142 (sequence is synthesized)
ttctaacagctgggtgcgggtggagctgcgggcgatcgccagctcgagtgcagattccttgctgtgaccgaggttcagagtgagctctgtcggtgtgtcagtttgcctcttcaggtgatt

SEQ ID NO: 630296 - DNA, 120 bp, Artificial Sequence
  ENSG00000179532_143 (sequence is synthesized)
ccagttcctatcctctgagtaatcagaagctcacaacctggtttgaatccctcattgctttcccatttctgccccttctccatatcctggcatgaaggtagtgcagtctgcagacctgaa

SEQ ID NO: 630297 - DNA, 120 bp, Artificial Sequence
  ENSG00000179532_144 (sequence is synthesized)
gacctcctcggattccctgtattctgaaggtatttagggagacctaggcagggggtaggaaggctgaaggagggaaagggcacaagtactaatggcatgggaagaaggcaggaggtccag

SEQ ID NO: 630298 - DNA, 120 bp, Artificial Sequence
  ENSG00000179532_145 (sequence is synthesized)
gctatagagtcaggcactgggtgtggatggagcagctctaacctgggtactgcacatatgtgttgtgggtagaaaggtcagggaatgtttttgctcacaaattcacgtggttatgtgtat

SEQ ID NO: 630299 - DNA, 120 bp, Artificial Sequence
  ENSG00000179532_146 (sequence is synthesized)
gtgcgtgcaatgagagggtgtatgaaagagtgtgagtacattgtccttccaaacctgattcatcccaaactctgtgaggtttttctccagtgccataattgcatttcatttactactgaa

SEQ ID NO: 630300 - DNA, 120 bp, Artificial Sequence
  ENSG00000179532_147 (sequence is synthesized)
ttttattgctaagtaaatttgtacttgtttgaagagctctgcttgctcaacacttgctttatgtcatatagctctttttcatttcatatggattaattcattgtattgaaatattttatg

SEQ ID NO: 630301 - DNA, 120 bp, Artificial Sequence
  ENSG00000179532_148 (sequence is synthesized)
gttaccaattattattggttatcagtcttcacacttattaaccatcagcgtggaaacacatcttcacatttcccttatttaggatactaatgctgtcacaaataaaatcattaaatgcaa

SEQ ID NO: 630302 - DNA, 120 bp, Artificial Sequence
  ENSG00000179532_149 (sequence is synthesized)
tattgcatttaatgtgggatataggtgcattttgctgaagtaagagaacccaagaccaactaagattttaagatggctctgaaggtacttgtctagtacattaggttgcaattttcctct

SEQ ID NO: 630303 - DNA, 120 bp, Artificial Sequence
  ENSG00000179532_150 (sequence is synthesized)
ttatttgcctgtttcgaattttctagtcttcctctgcttttctccaatctcagtttttccatcaaataacattctgattgtctctgcatgtctttcagtacccaagtatatgtgtatttt

SEQ ID NO: 630304 - DNA, 120 bp, Artificial Sequence
  ENSG00000179532_151 (sequence is synthesized)
atcatgtctagaatgaggatttttcacatttcatcatctctaaaattgtgatgcatcttacaaattgatggaatatcttattagaagcatttttatcttagcatttcataagataatgct

SEQ ID NO: 630305 - DNA, 120 bp, Artificial Sequence
  ENSG00000179532_152 (sequence is synthesized)
gcagcttacggtggacagtgtcttagatctgatgggatgtaagatatctgcatttgaagatatgaacttcttggagctggctaggtgcctttttctttcttcccatctacctttggcttc

SEQ ID NO: 630306 - DNA, 120 bp, Artificial Sequence
  ENSG00000179532_153 (sequence is synthesized)
ggtttcttcttaataatatttgtttcatctttctagtttaaaaatcattctgctctctttgcccctttttctcctttcttctgcctgccttcctgttcccctttttcatctcctgtatcc

SEQ ID NO: 630307 - DNA, 120 bp, Artificial Sequence
  ENSG00000179532_154 (sequence is synthesized)
ggaatattctgatttctgcagttactaattttttagttacaacagcaacttctttctactctttcagtcttctaatacttgtaattaagtctctgtattaaaagtcctcttcttgaaata

SEQ ID NO: 630308 - DNA, 120 bp, Artificial Sequence
  ENSG00000179542_0 (sequence is synthesized)
agtggtcgagtgtcgggaggaaggactgcttgtgtgcggggtgggggggggtggtggagagcgggggcggggattcagcgcgtgtatgtaaaggtgcagcccgtgtgctaggcgctgggt

SEQ ID NO: 630309 - DNA, 120 bp, Artificial Sequence
  ENSG00000179542_1 (sequence is synthesized)
ctcgggtgcgcgcgcgcgccgctgcccgcctgcccgccggcccgcctgctcgcctgctggggctgctccgtgggtttgacgggcgagcgggcgcggaggagctctgtccggaatcacata

SEQ ID NO: 630310 - DNA, 120 bp, Artificial Sequence
  ENSG00000179542_2 (sequence is synthesized)
tgtccggaatcacatagataccatcgtggaaacagcagcgcaggtcacggcgccgcgggccctgcaccagacgctgggctctagagattatttctctttattcagaagcatacagttgtt

SEQ ID NO: 630311 - DNA, 120 bp, Artificial Sequence
  ENSG00000179542_3 (sequence is synthesized)
tgctgattgcaagaagatgtttctgtggctgtttctgattttgtcagccctgatttcttcgacaaatgcagattctgacatatcggtggaaatttgcaatgtgtgttcctgcgtgtcagt

SEQ ID NO: 630312 - DNA, 120 bp, Artificial Sequence
  ENSG00000179542_4 (sequence is synthesized)
tgagaatgtgctctatgtcaactgtgagaaggtttcagtctacagaccaaatcagctgaaaccaccttggtctaatttttatcacctcaatttccaaaataattttttaaatattctgta

SEQ ID NO: 630313 - DNA, 120 bp, Artificial Sequence
  ENSG00000179542_5 (sequence is synthesized)
tccaaatacattcttgaatttttcacatgcagtctccctgcatctggggaataataaactgcagaacattgagggaggagcctttcttgggctcagtgcattaaagcagttgcacttgaa

SEQ ID NO: 630314 - DNA, 120 bp, Artificial Sequence
  ENSG00000179542_6 (sequence is synthesized)
caacaatgaattaaagattctccgagctgacactttccttggcatagagaacttggagtatctccaggctgactacaatttaatcaagtatattgaacgaggagccttcaataagctcca

SEQ ID NO: 630315 - DNA, 120 bp, Artificial Sequence
  ENSG00000179542_7 (sequence is synthesized)
caaactgaaagttctcattcttaatgacaatctgatttcattccttcctgataatattttccgattcgcatctttgacccatctggatatacgagggaacagaatccagaagctccctta

SEQ ID NO: 630316 - DNA, 120 bp, Artificial Sequence
  ENSG00000179542_8 (sequence is synthesized)
tatcggggttctggaacacattggccgtgtcgttgaattgcaactggaagataacccttggaactgtagctgtgatttattgcccttaaaagcttggctggagaacatgccatataacat

SEQ ID NO: 630317 - DNA, 120 bp, Artificial Sequence
  ENSG00000179542_9 (sequence is synthesized)
ttacataggagaagctatctgtgaaactcccagtgacttatatggaaggcttttaaaagaaaccaacaaacaagagctatgtcccatgggcaccggcagtgattttgacgtgcgcatcct

SEQ ID NO: 630318 - DNA, 120 bp, Artificial Sequence
  ENSG00000179542_10 (sequence is synthesized)
gcctccatctcagctggaaaatggctacaccactcccaatggtcacactacccaaacatctttacacagattagtaactaaaccaccaaaaacaacaaatccttccaagatctctggaat

SEQ ID NO: 630319 - DNA, 120 bp, Artificial Sequence
  ENSG00000179542_11 (sequence is synthesized)
cgttgcaggcaaagccctctccaaccgcaatctcagtcagattgtgtcttaccaaacaagggtgcctcctctaacaccttgcccggcaccttgcttctgcaaaacacacccttcagattt

SEQ ID NO: 630320 - DNA, 120 bp, Artificial Sequence
  ENSG00000179542_12 (sequence is synthesized)
gggactaagtgtgaactgccaagagaaaaatatacagtctatgtctgaactgataccgaaacctttaaatgcgaagaagctgcacgtcaatggcaatagcatcaaggatgtggacgtatc

SEQ ID NO: 630321 - DNA, 120 bp, Artificial Sequence
  ENSG00000179542_13 (sequence is synthesized)
caatcaaattgagagactctatcctgaaatattttcaggtcttcataacctgcagtatctgtatttggaatacaatttgattaaggaaatctcagcaggcacctttgactccatgccaaa

SEQ ID NO: 630322 - DNA, 120 bp, Artificial Sequence
  ENSG00000179542_14 (sequence is synthesized)
tttgcagttactgtacttaaacaataatctcctaaagagcctgcctgtttacatcttttccggagcacccttagctagactgaacctgaggaacaacaaattcatgtacctgcctgtcag

SEQ ID NO: 630323 - DNA, 120 bp, Artificial Sequence
  ENSG00000179542_15 (sequence is synthesized)
cggggtccttgatcagttgcaatctcttacacagattgacttggagggcaacccatgggactgtacttgtgacttggtggcattaaagctgtgggtggagaagttgagcgacgggattgt

SEQ ID NO: 630324 - DNA, 120 bp, Artificial Sequence
  ENSG00000179542_16 (sequence is synthesized)
tgtgaaagaactgaaatgtgagacgcctgttcagtttgccaacattgaactgaagtccctcaaaaatgaaatcttatgtcccaaacttttaaataagccgtctgcaccattcacaagccc

SEQ ID NO: 630325 - DNA, 120 bp, Artificial Sequence
  ENSG00000179542_17 (sequence is synthesized)
tgcacctgccattacattcaccactcctttgggtcccattcgaagtcctcctggtgggccagtgcctctgtctattttaatcttaagtatcttagtggtcctcattttaacggtgtttgt

SEQ ID NO: 630326 - DNA, 120 bp, Artificial Sequence
  ENSG00000179542_18 (sequence is synthesized)
tgctttttgccttcttgtttttgtcctgcgacgcaacaagaaacccacagtgaagcacgaaggcctggggaatcctgactgtggctccatgcagctgcagctaaggaagcatgaccacaa

SEQ ID NO: 630327 - DNA, 120 bp, Artificial Sequence
  ENSG00000179542_19 (sequence is synthesized)
aaccaataaaaaagatggactgagcacagaagctttcattccacaaactatagaacagatgagcaagagccacacttgtggcttgaaagagtcagaaactgggttcatgttttcagatcc

SEQ ID NO: 630328 - DNA, 120 bp, Artificial Sequence
  ENSG00000179542_20 (sequence is synthesized)
tccaggacagaaagttgttatgagaaatgtggccgacaaggagaaagatttattacatgtagataccaggaagagactgagcacaattgatgagctggatgaattattccctagcaggga

SEQ ID NO: 630329 - DNA, 120 bp, Artificial Sequence
  ENSG00000179542_21 (sequence is synthesized)
ttccaatgtgtttattcagaattttcttgaaagcaaaaaggagtataatagcataggtgtcagtggctttgagatccgctatccagaaaaacaaccagacaaaaaaagtaagaagtcact

SEQ ID NO: 630330 - DNA, 120 bp, Artificial Sequence
  ENSG00000179542_22 (sequence is synthesized)
gataggtggcaaccacagtaaaattgttgtggaacaaaggaagagtgagtattttgaactgaaggcgaaactgcagagttcccctgactacctacaggtccttgaggagcaaacagcttt

SEQ ID NO: 630331 - DNA, 120 bp, Artificial Sequence
  ENSG00000179542_23 (sequence is synthesized)
gaacaagatctaggtcatgtaatcttacttcatacagaggacatttatttaatgatgaaagtgccttttgttgacttctaacttccaaatactatattatcaataggcatggaggcaggt

SEQ ID NO: 630332 - DNA, 120 bp, Artificial Sequence
  ENSG00000179542_24 (sequence is synthesized)
gtttccaagggtgtctcattaactgtagctgcaaagatgtgtcaagtagaagagaatttgtttaatagattttactacataaaacctatactgtggagtcctgtggggatactgcaaact

SEQ ID NO: 630333 - DNA, 120 bp, Artificial Sequence
  ENSG00000179542_25 (sequence is synthesized)
ctattgccaaagggatgctttatacacataatactgaatttaacctcaagaggcaaatctgttttgtaccccaatgcaaaaccttcgtctctttgtgctttgtaaagcaaactcaagaaa

SEQ ID NO: 630334 - DNA, 120 bp, Artificial Sequence
  ENSG00000179542_26 (sequence is synthesized)
actggtacacctgtaccagctgggtcctttatcttgcacgtagattaagttggtggaactggaataatccttttgatttgtggcattgtaacaactccgtgtaaagattatctgaaaagt

SEQ ID NO: 630335 - DNA, 120 bp, Artificial Sequence
  ENSG00000179542_27 (sequence is synthesized)
gtcgcaagtgcggcatctctcccagtcccacgcctctctttcctcaacccctatcccctatcccctatccccacccccagctccaagatcatccggcttaacccattctgcaccaaaggc

SEQ ID NO: 630336 - DNA, 120 bp, Artificial Sequence
  ENSG00000179542_28 (sequence is synthesized)
ccacggagttctaaggtgcggataattaacccgtctccttctaacccggctaaatagtctcactttaggctaaagcctcacactttcgccttaaagcccctggccccttacgcgcagaca

SEQ ID NO: 630337 - DNA, 120 bp, Artificial Sequence
  ENSG00000179542_29 (sequence is synthesized)
ggtagggggagtgcgaatactactggatcctaggaaattggttcccaagaaggctccttccaggatcgaccgccacggagaagtattccaggagccctccgttctgcggggtgacaatta

SEQ ID NO: 630338 - DNA, 120 bp, Artificial Sequence
  ENSG00000179542_30 (sequence is synthesized)
ttatggcctgcatcttgaaaccgctggatttataatgttaatttgtgcaaatacttgtttaaaatataacatacattacataactataaaataaatttgaacactttaagcattacctgt

SEQ ID NO: 630339 - DNA, 120 bp, Artificial Sequence
  ENSG00000179542_31 (sequence is synthesized)
ctatacataaaaatctaaaagaaaaaatcaacgtgagttagatagcatttgtgatgatctgaagaaatatgtgacgtttatcagaattaaacatggctcaaattaaactaacactagagt

SEQ ID NO: 630340 - DNA, 120 bp, Artificial Sequence
  ENSG00000179542_32 (sequence is synthesized)
ttgttctcagttacgtgaaacacccacaatccttcaaggttgtccaaaataagcagagtgcttactgtgtgagcgcacccaaagctatttttgtaacataattcatatttatgaagtact

SEQ ID NO: 630341 - DNA, 120 bp, Artificial Sequence
  ENSG00000179542_33 (sequence is synthesized)
ttgtatactaaataggaaaatatgtactccttaatatgtatttaatatgcctgacttgttttcctgatcacagtgaatttatcagtaagtataaatgtagacagaaagaaatatactaaa

SEQ ID NO: 630342 - DNA, 120 bp, Artificial Sequence
  ENSG00000179542_34 (sequence is synthesized)
ctgaaacaagctggtgtgaacagaaatattctggactttgtgatcaggtgtaacttaaaaacaaaaaaaatttaaaacaaacagaaaagaaaaaaatacaaaagaacagtcaattctgtg

SEQ ID NO: 630343 - DNA, 120 bp, Artificial Sequence
  ENSG00000179542_35 (sequence is synthesized)
ctattcttgtgaatttagcgtattatcttcagatttgttaccaattgtgcattcaaaaataagttccttagttttctagtattgtgtctggggcagttgttatttgccatcggttgtctt

SEQ ID NO: 630344 - DNA, 120 bp, Artificial Sequence
  ENSG00000179542_36 (sequence is synthesized)
gcttttcaggattctatgagcttaattcaaatagttttcgctacaagtatttaaaaaataatgaataaggttaatagttatatcttgtatgcatcagtatcctgttctttcatcattcag

SEQ ID NO: 630345 - DNA, 120 bp, Artificial Sequence
  ENSG00000179542_37 (sequence is synthesized)
tcacagtctgcaactacaaatgatatgcccctgtgtttgcttttgctaagatctaagtcaaaatttgttaaaggaataaagtaactgataatgggtgatgtcggaacttttgtaggagct

SEQ ID NO: 630346 - DNA, 120 bp, Artificial Sequence
  ENSG00000179542_38 (sequence is synthesized)
agctcccgattaacaaagtgatattcagaaacacattgtcttcttggcctgcctgcatatatatatatagatatatagatatatatagatatacatatatatatatgtgtgtgtgtatat

SEQ ID NO: 630347 - DNA, 120 bp, Artificial Sequence
  ENSG00000179542_39 (sequence is synthesized)
atgcgtgtgtatatatatgtgtgtgtatatatatacatatatgtatgtgtgtgtgtatacatatatatatagtgtgtgtgtgtgcatgtgtgagagtgtgtgtcctatctcttataatta

SEQ ID NO: 630348 - DNA, 120 bp, Artificial Sequence
  ENSG00000179542_40 (sequence is synthesized)
ccttatgaatcagtaagataaccaagaaggtaaacatagccattcctcatgattgcaagtggcatattttttctgttgcagcttccaaaatgatactatgtttatagttgcagtagctgt

SEQ ID NO: 630349 - DNA, 120 bp, Artificial Sequence
  ENSG00000179542_41 (sequence is synthesized)
tcctttattaatcactaatttcagggctttatgtgtttgttgcaagacaaaaaaaagaagcttggctttcttgggtgtgtgtgtatgtgtgtgtgtgtctgagtgtgtgtatatatatat

SEQ ID NO: 630350 - DNA, 120 bp, Artificial Sequence
  ENSG00000179542_42 (sequence is synthesized)
atgtgggtatatattcatacatatagataatttggaaatcttttttaaatagcaaaaaccgtctccatgtgtatgtgctggtgctcttaaaactttagtgtgtaattttaatttttatga

SEQ ID NO: 630351 - DNA, 120 bp, Artificial Sequence
  ENSG00000179542_43 (sequence is synthesized)
catctgtgaaaactttatatgaatataaaataattcaaacaaataattgctttctgatcttgaaagaaaagacaagatgtgtgcccaacagcttttttcatctacaatttcataaggact

SEQ ID NO: 630352 - DNA, 120 bp, Artificial Sequence
  ENSG00000179542_44 (sequence is synthesized)
tttgatatgccattaccatgcatgcacacatccatggattaaagggctcctaatgtatactgacaggataaagatgcaaaggcttcaaagaaagtgttttagtttagtctgtcaataaag

SEQ ID NO: 630353 - DNA, 120 bp, Artificial Sequence
  ENSG00000179542_45 (sequence is synthesized)
tatggcttgaaggatcttaaatagacacttataggaggaatcagaaagttccattcatggtctggggataataggtcatttgaatgatacttttattcagtgtggtgatgttctgaagat

SEQ ID NO: 630354 - DNA, 120 bp, Artificial Sequence
  ENSG00000179542_46 (sequence is synthesized)
gtttcaaggtttctgcagaattctcaatggcaagagtacctgccaccatctcaaaagcttgctgtagcatattggctatctcatactcttctgctaaaaggtataaatgttcaacttttt

SEQ ID NO: 630355 - DNA, 120 bp, Artificial Sequence
  ENSG00000179542_47 (sequence is synthesized)
ttaaaaagtaatttaacatatgtggttatttggaggttcaaattgtaaatgaaagtaacaaattcttggttaaggctaatatattttccttaactaaagtcattgtgcctacattatata

SEQ ID NO: 630356 - DNA, 120 bp, Artificial Sequence
  ENSG00000179542_48 (sequence is synthesized)
gtgtatacaattttgcacctgtctctcattagttctagttgtacattttatgataatgtagttaggtataagttttgagttgagtacaagaacagttaaaatactgtatctacattttgt

SEQ ID NO: 630357 - DNA, 120 bp, Artificial Sequence
  ENSG00000179542_49 (sequence is synthesized)
tggcttcaactataaccttgatgttagtttaacccctggaggtatgatatgtacatcagtacagcatttttagtggaacttggatgcaaacctataaaatccaagaagtgctcatttcta

SEQ ID NO: 630358 - DNA, 120 bp, Artificial Sequence
  ENSG00000179542_50 (sequence is synthesized)
atgtgggctgacacatcatgggcttcttggcactatagtcatgggtatggactacgttagaatgattgcaaacaaatttagatcttatgaaatcagtgaaggggttgagataatatattg

SEQ ID NO: 630359 - DNA, 120 bp, Artificial Sequence
  ENSG00000179542_51 (sequence is synthesized)
tgtccatgtaatataaatcaagttttaaattatttttttatgaaatcaataaagatgattcaattctttaaaagtaagactttgtgtaattttatgagaaagcagctattaaagtagagt

SEQ ID NO: 630360 - DNA, 120 bp, Artificial Sequence
  ENSG00000179542_52 (sequence is synthesized)
gagtgattcaagtctataaggcaatttatattctatatttagtttttcattctgaatagactgaaaaaatatatgaattagaaatttatttaagaccatctttcttttgttgcttttttt

SEQ ID NO: 630361 - DNA, 120 bp, Artificial Sequence
  ENSG00000179542_53 (sequence is synthesized)
atttacttttctttaagccataaggatgcataaattatacagggcatgaccttatgagtaacatcaacaggtatttcagaaataacagaacacgtctagaaatgtatggtggtaatatta

SEQ ID NO: 630362 - DNA, 120 bp, Artificial Sequence
  ENSG00000179542_54 (sequence is synthesized)
atctataacattttttgcatgatttgtacattgacattgtatgaaatgagcacactgaggtttttttgttgttactgtcgcatccaaagagttggggagaaactatattaagaatgtatt

SEQ ID NO: 630363 - DNA, 120 bp, Artificial Sequence
  ENSG00000179542_55 (sequence is synthesized)
tataatcactattttaaaataaagtaaaaaaaatattgtattgtttttaccctgatttgattatcagtattttaggttaatttgtaagagaaaaatcaagtaatgctgtaaaagctcatg

SEQ ID NO: 630364 - DNA, 120 bp, Artificial Sequence
  ENSG00000179542_56 (sequence is synthesized)
taaatcacagaaaagaactgttttaatgacttttgtttgcttttaataacatcaaggtattagaatttattaattgccatttttatgaaagtattaataaaattgtttgctacaatgata

SEQ ID NO: 630365 - DNA, 120 bp, Artificial Sequence
  ENSG00000179542_57 (sequence is synthesized)
tttctgaagccacagtttgttaaatatatttgtctttccattatttttcagaaaaatataaagcagtaaccaaactgatcatttcacccagatttgagggtaagatatagctttagccta

SEQ ID NO: 630366 - DNA, 120 bp, Artificial Sequence
  ENSG00000179542_58 (sequence is synthesized)
ctgtttatattcaacttaactgctaaatctctgttaaaaaaaacgctttctttagaaacatattttcaatctgtgttccttcccactggcagcccctttggagaagagtctgacagtgcc

SEQ ID NO: 630367 - DNA, 120 bp, Artificial Sequence
  ENSG00000179542_59 (sequence is synthesized)
aagatcaacatgctttgattcttgcccattcttttgaatcagttggattctgacataacttcagataagcaaatactaatattcagtcttaactatctgctcaaatacttttagaaaccc

SEQ ID NO: 630368 - DNA, 120 bp, Artificial Sequence
  ENSG00000179542_60 (sequence is synthesized)
ttcagtacctctgtattccattgccagtttgcctggttacaggttagttacccacttatggagtgaattgtgatttgtatttggttcttttaaagatgaccaaaattatcaatccatgac

SEQ ID NO: 630369 - DNA, 120 bp, Artificial Sequence
  ENSG00000179542_61 (sequence is synthesized)
tttacccaaattattactgttgtggaaaatgaactaattgcattacggttaacttgagggcagaaatgaatgtaactgactatattgaccaatacagtgggtttaaggttcatatattta

SEQ ID NO: 630370 - DNA, 120 bp, Artificial Sequence
  ENSG00000179542_62 (sequence is synthesized)
tggtaagaaaagtaaacacagaaacagagagagagagagaatataaattaagattgttgttgctttacacgtatacataggtatgctgaaggtgtgaacagtatagatagcatatgcaag

SEQ ID NO: 630371 - DNA, 120 bp, Artificial Sequence
  ENSG00000179542_63 (sequence is synthesized)
tacttttagactaaatgccttatgcatctgaggagatacaccgtaggattgtgttattttatttatttatgagtactgagcacagagctttgggttccagccacttctgttatgtagaca

SEQ ID NO: 630372 - DNA, 120 bp, Artificial Sequence
  ENSG00000179542_64 (sequence is synthesized)
agtggcatcaaatcaaggtttggcatcatttctagtgctcatcccattagtcactgtggtcagatgggctgaactaaaataaaatatcctgtttgtggcttcacttacctagaataactg

SEQ ID NO: 630373 - DNA, 120 bp, Artificial Sequence
  ENSG00000179542_65 (sequence is synthesized)
gtgacatatatcaagttcacctgataattgttaactctcaatttcagatttcctaaggatctattctttgttaatttaaaagctaatgggaactcaaatgaattttaataacttactttg

SEQ ID NO: 630374 - DNA, 120 bp, Artificial Sequence
  ENSG00000179542_66 (sequence is synthesized)
tttatttatttatttatttatttatttaatgtctttttagtttctactggttgataggattgtgttttaaaagggaaaatcgaggaagggaaattgtgttgtttatcttataggaaatga

SEQ ID NO: 630375 - DNA, 120 bp, Artificial Sequence
  ENSG00000179542_67 (sequence is synthesized)
cgaggaagggaaattgtgttgtttatcttataggaaatgatggttttttttaatttttaaaaattattttaacctgttgttcttatgtctacaaggggaaaataaagtagggctctgagg

SEQ ID NO: 630376 - DNA, 120 bp, Artificial Sequence
  ENSG00000179542_68 (sequence is synthesized)
catttgaatattttagaccaaataattgctattgagaataaagattcaagcttctcattaatccataattgacatttccactgactgtaggacccagaaccaggagagaattactcaacc

SEQ ID NO: 630377 - DNA, 120 bp, Artificial Sequence
  ENSG00000179542_69 (sequence is synthesized)
ctccacttcagtttacttttgtagacactgcctaaatagaaatagaaattctggtgatttcaataacatcaaaaatgacaaattacctgtttaacttaaaaaggtcatgaatgaggcctt

SEQ ID NO: 630378 - DNA, 120 bp, Artificial Sequence
  ENSG00000179542_70 (sequence is synthesized)
cagagaaataatattaataatataatgaataaccatagagcagtgcctttaaattagctataggaaggaaatagtcttttcaagtttctgaacaatatatttctcttagttggcacctca

SEQ ID NO: 630379 - DNA, 120 bp, Artificial Sequence
  ENSG00000179542_71 (sequence is synthesized)
caaatactagatcatgtcagacgctgctggttaatagctgcaggaaggcatgttgtgcagtggatattgctcatggaagtgtgtgaaaatcatagtaagctttgttctccctgctaagac

SEQ ID NO: 630380 - DNA, 120 bp, Artificial Sequence
  ENSG00000179542_72 (sequence is synthesized)
ttgctatgtatatttccatcattgtttcatgtaaactgaaccattgtggtaaacttttggagttgatatggaatcactttaatgctgttttcacaaataaaagttttttcttataggtca

SEQ ID NO: 630381 - DNA, 120 bp, Artificial Sequence
  ENSG00000179542_73 (sequence is synthesized)
gtacaggtctcgggtggctccggctgtcgggccgctgggctgggttgggctttatttttgcaccccactcgcagccactttccgcagacgtggatctgaggctcggggcagtggcccgcg

SEQ ID NO: 630382 - DNA, 120 bp, Artificial Sequence
  ENSG00000179546_0 (sequence is synthesized)
ctaaatccagaatcgtttcaattactgtgaggggaattctgaagttctcattaaacacacgaatgtctcaagctttgaaaagagccagatgccaaaggcaagaatcccagggcattgccc

SEQ ID NO: 630383 - DNA, 120 bp, Artificial Sequence
  ENSG00000179546_1 (sequence is synthesized)
acctgggtgtgatcccctgataattgtctaacaaattcagcatgtgtcccctgggcatgaccatctgctgggaaaagttccaggaccctgagacatcttgggattcctgtggtttaggaa

SEQ ID NO: 630384 - DNA, 120 bp, Artificial Sequence
  ENSG00000179546_2 (sequence is synthesized)
agacctttaactaccagctggtagttgtctcagcattcttcaaatagtccggtcttgtttaatattattattattattgttatttaattttattttattgcaactgtacttagagaatag

SEQ ID NO: 630385 - DNA, 120 bp, Artificial Sequence
  ENSG00000179546_3 (sequence is synthesized)
tctggtcttgagaccttttcactgtggtctgttctggtgtacggctcccaccagtgtgaagcagaaggatgactttgctctgttgtcaggacaaccttgaaggaaggagccaaatgtgtg

SEQ ID NO: 630386 - DNA, 120 bp, Artificial Sequence
  ENSG00000179546_4 (sequence is synthesized)
gaggtctgtgggaagagagagccacctagcatgtccccactgaaccagtcagcagaaggccttccccaggaggcctccaacagatccctgaatgccacagaaacctcagaggcttgggat

SEQ ID NO: 630387 - DNA, 120 bp, Artificial Sequence
  ENSG00000179546_5 (sequence is synthesized)
cccaggaccctccaggcgctcaagatctcccttgccgtggtcctttccgtcatcacactggccacagtcctctccaatgcctttgtactcaccaccatcttactcaccaggaagctccac

SEQ ID NO: 630388 - DNA, 120 bp, Artificial Sequence
  ENSG00000179546_6 (sequence is synthesized)
acccctgccaactacctgattggctccctggccaccaccgacctcttggtttccatcttggtaatgcccatcagcatcgcctataccatcacccacacctggaactttggccaaatcttg

SEQ ID NO: 630389 - DNA, 120 bp, Artificial Sequence
  ENSG00000179546_7 (sequence is synthesized)
tgtgacatctggctgtcctctgacatcacgtgctgcacagcctccatcctgcatctctgtgtcattgctctggacaggtactgggcaatcacagatgccctggaatacagtaaacgcagg

SEQ ID NO: 630390 - DNA, 120 bp, Artificial Sequence
  ENSG00000179546_8 (sequence is synthesized)
acggctggccacgcggccaccatgatcgccattgtctgggccatctccatctgcatctccatccccccgctcttctggcggcaggccaaggcccaggaggagatgtcggactgtctggtg

SEQ ID NO: 630391 - DNA, 120 bp, Artificial Sequence
  ENSG00000179546_9 (sequence is synthesized)
aacacctctcagatctcctacaccatctactccacctgtggggccttctacattccctcggtgttgctcatcatcctatatggccggatctaccgggctgcccggaaccgcatcctgaat

SEQ ID NO: 630392 - DNA, 120 bp, Artificial Sequence
  ENSG00000179546_10 (sequence is synthesized)
ccaccctcactctatgggaagcgcttcaccacggcccacctcatcacaggctctgccgggtcctcgctctgctcgctcaactccagcctccatgaggggcactcgcactcggctggctcc

SEQ ID NO: 630393 - DNA, 120 bp, Artificial Sequence
  ENSG00000179546_11 (sequence is synthesized)
gaaaggaaagccactaaaatcctgggcatcattctgggggcctttatcatctgctggctgcccttcttcgtggtgtctctggtcctccccatctgccgggactcctgctggatccacccg

SEQ ID NO: 630394 - DNA, 120 bp, Artificial Sequence
  ENSG00000179546_12 (sequence is synthesized)
gcgctctttgacttcttcacctggctaggctatttaaactccctcatcaatccaataatctacactgtgtttaatgaagagtttcggcaagcttttcagaaaattgtccctttccggaag

SEQ ID NO: 630395 - DNA, 120 bp, Artificial Sequence
  ENSG00000179546_13 (sequence is synthesized)
gcctcctagtcttattcggtgatgactcttgttatcttttgtgtcctgtaacctcatcgggattgtcttttttttttttaattattttctgagacttggattaattcatggtatcttgag

SEQ ID NO: 630396 - DNA, 120 bp, Artificial Sequence
  ENSG00000179546_14 (sequence is synthesized)
tcttggttcaatcaacagaattgttctttttcctgttgttttcttaacttctgaaagagctgtgggtggtggggggcggggggcaggactgaagatttcactacttagcataatattttc

SEQ ID NO: 630397 - DNA, 120 bp, Artificial Sequence
  ENSG00000179546_15 (sequence is synthesized)
ggcatgagccactgtgcctggccaacataatgttttcacagttcctctttgttggaagaagtgtgtgacctacaagattcctggttgatacagttcaggtgagaaactgtttgattatag

SEQ ID NO: 630398 - DNA, 120 bp, Artificial Sequence
  ENSG00000179546_16 (sequence is synthesized)
tacagttcaggtgagaaactgtttgattatagaaaagaccccagactcagagggaaggctctctggtctacctgagatctatatggagcttaaaggagggtgaataagattaatgacctg

SEQ ID NO: 630399 - DNA, 120 bp, Artificial Sequence
  ENSG00000179546_17 (sequence is synthesized)
aattgaaagagaatttggagccaggatgggtctccattctgtgtggcaccttgattggaaaataatatccatgcgtttcttccactgagtctttcttagattaaatctctcccagttgtc

SEQ ID NO: 630400 - DNA, 120 bp, Artificial Sequence
  ENSG00000179546_18 (sequence is synthesized)
cgtgaagagaaagacagtatttgcagtgccgatgatatagagtgacttggagagagattcagaagttaggggtagcgggggtaggatggttgggaccagattgactaccctgtacccttc

SEQ ID NO: 630401 - DNA, 120 bp, Artificial Sequence
  ENSG00000179546_19 (sequence is synthesized)
cttcttccccaatatgcctgcgccatcttcacattctgaagttgaaacccatgatcacccctttgaggtagattgaccggctttagacgcccaccccccacccaccgcaagctttgagtg

SEQ ID NO: 630402 - DNA, 120 bp, Artificial Sequence
  ENSG00000179546_20 (sequence is synthesized)
ggacaccattctgaattttttttctgaatttttttttaacatctctttctcattagagatctgaaaactcattagagatgttgagtcttatcaaataaaaagcatgagacatcatggcca

SEQ ID NO: 630403 - DNA, 120 bp, Artificial Sequence
  ENSG00000179562_0 (sequence is synthesized)
gttgtcggcaggcagctttagttaggatgtcgtgatgggaccgagctcagcgtaaccctctggccgacgtgggccgagggggccggcccgggctgctgtggcccagacgagcggagagtg

SEQ ID NO: 630404 - DNA, 120 bp, Artificial Sequence
  ENSG00000179562_1 (sequence is synthesized)
cggagcggcttctgggccagcgctaacgagccctggcagtgcgcacctctggtgccagtgtcgccccgcctccggggtagaatccgccccagccctccgggcctgggaccgggcggccgc

SEQ ID NO: 630405 - DNA, 120 bp, Artificial Sequence
  ENSG00000179562_2 (sequence is synthesized)
tttcgccagtccgtccggccgttccgcattaggtccgggataactaggtggagtaggtgtgcggcccgccgccggacagcccgctcgctgtttctttaagcccccgcctgcgtcttcacg

SEQ ID NO: 630406 - DNA, 120 bp, Artificial Sequence
  ENSG00000179562_3 (sequence is synthesized)
gccctctcccgttctgctggaaagctgacgtggggcaatccgttcagaccctccatggagaagtttgggatgaatttcgggggcggcccgagcaagaaggacttgctggagactatagag

SEQ ID NO: 630407 - DNA, 120 bp, Artificial Sequence
  ENSG00000179562_4 (sequence is synthesized)
acccagaagaagcagcttctccagtaccaggcacggctcaaggatgtggtccgtgcctataaaagcctgctgaaggagaaagaggcattagaggccagcatcaaggtgctgtcggtatcc

SEQ ID NO: 630408 - DNA, 120 bp, Artificial Sequence
  ENSG00000179562_5 (sequence is synthesized)
cacgaggcagatgtgggcctcgcaggtgtccagcttccaggcctcacctttcctgactctgtggatgaccggtgctccactcacagcgaggatagcactgggaccgccactagcttggat

SEQ ID NO: 630409 - DNA, 120 bp, Artificial Sequence
  ENSG00000179562_6 (sequence is synthesized)
actgcggccagtctcaccagcaccaagggtgagtttggggtagaagatgacagaccggcccgtggaccaccacctccaaagtccgaagaggccagttggtccgagagtggcgttagcagt

SEQ ID NO: 630410 - DNA, 120 bp, Artificial Sequence
  ENSG00000179562_7 (sequence is synthesized)
agcagtggggatgggccatttgcaggtggggaggtggacaaaagactgcaccagctgaagactcagttggctactttgaccagttctttggctacagtcactcaggagaagtcccgcatg

SEQ ID NO: 630411 - DNA, 120 bp, Artificial Sequence
  ENSG00000179562_8 (sequence is synthesized)
gaggcttcttacttggctgacaagaaaaagatgaaacaggacttagaggatgccagtaacaaggcggaggaggagagggcccgcctggagggagaattgaaggggctgcaggagcaaata

SEQ ID NO: 630412 - DNA, 120 bp, Artificial Sequence
  ENSG00000179562_9 (sequence is synthesized)
gcagaaaccaaagcccggcttatcacgcagcagcatgatcgggcccaagagcagagtgaccatgccttgatgctgcgtgagctccagaagctgctgcaggaggagaggacccagcgccag

SEQ ID NO: 630413 - DNA, 120 bp, Artificial Sequence
  ENSG00000179562_10 (sequence is synthesized)
gacttggagcttaggttagaagagacccgagaagccttggcaggacgagcatatgcagctgaacagatggaaggatttgaactgcagaccaagcagctgacccgtgaggtggaggagctg

SEQ ID NO: 630414 - DNA, 120 bp, Artificial Sequence
  ENSG00000179562_11 (sequence is synthesized)
aaaagtgaactgcaggccattcgagatgagaagaatcagccagatccccggctgcaagaacttcaggaagaggctgcccgccttaagagccatttccaggctcagttacagcaggaaatg

SEQ ID NO: 630415 - DNA, 120 bp, Artificial Sequence
  ENSG00000179562_12 (sequence is synthesized)
agaaagacagctcttgcagaggatcaactccgtcagcaatctcaggtagaagaacagagggtggcagccctggagaatcaaatatccgaggtgtctgagctgctaggcacctacgagaaa

SEQ ID NO: 630416 - DNA, 120 bp, Artificial Sequence
  ENSG00000179562_13 (sequence is synthesized)
gccaagcagaaggaccagctggccattcagaagctgaaggagcgcattctgcagctggacctggagaacaagacactggctctagcagcctccagcaggtcccctttagacagccatgga

SEQ ID NO: 630417 - DNA, 120 bp, Artificial Sequence
  ENSG00000179562_14 (sequence is synthesized)
gaggagtccagtctggatgtcaatgtcctgaaagataagatggagaagctgaagaggctgctgcaggttgcggccaggaaaagccaggtgaccctggatgtggagaagctctgtgacctg

SEQ ID NO: 630418 - DNA, 120 bp, Artificial Sequence
  ENSG00000179562_15 (sequence is synthesized)
gagataatgcccagctcggaggctgctgatggggagaaggctactgcactctattaccaacaggagctgaaacagctgaaggaagagtttgagaggtacaagatgagagcccaggttgtc

SEQ ID NO: 630419 - DNA, 120 bp, Artificial Sequence
  ENSG00000179562_16 (sequence is synthesized)
ctcaaaagcaagaataccaaagatggtaacctgggaaaggagctggaggcagcccaggaacagcttgcagagctgaaggagaagtatatttccctgcggctctcctgcgaggagctggag

SEQ ID NO: 630420 - DNA, 120 bp, Artificial Sequence
  ENSG00000179562_17 (sequence is synthesized)
ctgcagcagctccaccggcaggagctggagcggtgccagctggacttcagggaccgcacactgaaactggaggaggagctgcacaagcagcgggatcgtgccctagctgtgctcaccgag

SEQ ID NO: 630421 - DNA, 120 bp, Artificial Sequence
  ENSG00000179562_18 (sequence is synthesized)
aaggacttggaactggagcaactgcgttctgtggccttggcctctgggctgccaggacgcagaagtcctgtgggtggtggcggtcctggggacccagctgacacatcatcctctgatagc

SEQ ID NO: 630422 - DNA, 120 bp, Artificial Sequence
  ENSG00000179562_19 (sequence is synthesized)
ctgacccaagcattacaacttgcagcggccaatgagcccactttctttctgtacgctgagcaactggcccgcaaggaggtggagatcacatcactgaggaagcagaagcacaggctggag

SEQ ID NO: 630423 - DNA, 120 bp, Artificial Sequence
  ENSG00000179562_20 (sequence is synthesized)
gtcgaggtgcatcagctgcaggatcggctgctggaggagggcgaacggcatcgtgaggaggttgcagccctgcagagccacatcgaaaagaacatcagggaccagagcagggagggagcc

SEQ ID NO: 630424 - DNA, 120 bp, Artificial Sequence
  ENSG00000179562_21 (sequence is synthesized)
aatctggagtacctcaaaaacatcatctaccgcttcctgaccttacctgactccctgggccgccagcagactctcacagccatactgactatcttgcacttcagtccagaggagaaacaa

SEQ ID NO: 630425 - DNA, 120 bp, Artificial Sequence
  ENSG00000179562_22 (sequence is synthesized)
gtgataatgcgactcccaaccagtgccagctggtggccttctggcaagagatgatgccattttcatgaattcctggaatttctgtgcctcttttatgtgggaaagggcaggctctggttt

SEQ ID NO: 630426 - DNA, 120 bp, Artificial Sequence
  ENSG00000179562_23 (sequence is synthesized)
ctgctgcctcttctcttacattgtcatttatttcttcactgtgttgagctgggaggagtcttcaatgtgggaagggattttctgccaaatgccattaatgctgctttatccttaggccct

SEQ ID NO: 630427 - DNA, 120 bp, Artificial Sequence
  ENSG00000179562_24 (sequence is synthesized)
agagatactgaaagtcctggggcagtatcttctgatggtgtgcatgtgaggagaagatgaggttaggactgagaagtgcagaagttggaacagtggtaaggctgttttaaaataagatgt

SEQ ID NO: 630428 - DNA, 120 bp, Artificial Sequence
  ENSG00000179562_25 (sequence is synthesized)
tttgttttaataatatgctcctggcacaaagctaggagtaaatgtgactccaaagggagttcagttaatctctgaaatgcacaaaacctagctattttctccctctcatcacagtctgag

SEQ ID NO: 630429 - DNA, 120 bp, Artificial Sequence
  ENSG00000179562_26 (sequence is synthesized)
tctggtccattgctaccccaattctctggggacataaaaccaggctggaaagggaccaggaagtttgaaatagtgacatatcatccactagtcccaagggctaaggaatagtgagtttat

SEQ ID NO: 630430 - DNA, 120 bp, Artificial Sequence
  ENSG00000179562_27 (sequence is synthesized)
tctggaaggaactgggaagcttagtctaattagtgcctggggatgacctatgcaatcacaccgcttatgaccatcctagagagggccctgagcaccagcttgatcttagggatttccaaa

SEQ ID NO: 630431 - DNA, 120 bp, Artificial Sequence
  ENSG00000179562_28 (sequence is synthesized)
gtaacctgctttttgcctggatagggttaaaatagacctttcttgcctatccttgccttaacctatctgcctgaggttggcctgagattgtgagtcaacgactttgctatcttttcctca

SEQ ID NO: 630432 - DNA, 120 bp, Artificial Sequence
  ENSG00000179562_29 (sequence is synthesized)
gtgttgaactttcattaagaaataaagtcctagcttcttacagagaggggtccaaatggtgaatgctcatcctgcctggattcaaggaattagctcagagattggcccctagcttttctg

SEQ ID NO: 630433 - DNA, 120 bp, Artificial Sequence
  ENSG00000179562_30 (sequence is synthesized)
cctttgtagggacagcaaaaggggaaaatttgctgcagaaaattccaaaagattgctgtagctctcacagggaagtggtaaagatcagctaaacctgggttggggtgctttctgcccagt

SEQ ID NO: 630434 - DNA, 120 bp, Artificial Sequence
  ENSG00000179562_31 (sequence is synthesized)
gggtcttggcataagtagattaatcctgctcttttaagaaaaggcaacttattcaggcagtctggaaagggggttctcagaaaactcagtttctttattccttcttttctcccaactact

SEQ ID NO: 630435 - DNA, 120 bp, Artificial Sequence
  ENSG00000179562_32 (sequence is synthesized)
gttactggttatagaggtctttggactctaaagaccaatgtttggccactaactggactaatatgtatctttctgtgatttcatcatagaggtctgttttgtgagggtttggggtgcaga

SEQ ID NO: 630436 - DNA, 120 bp, Artificial Sequence
  ENSG00000179562_33 (sequence is synthesized)
aaactttgattaaatcttaatgggaggctgggtgacctggattatctacagtgagcagacttaaatggaacagaagtttatgtgtccaaatgatggaatcattaaacctgagtgacttga

SEQ ID NO: 630437 - DNA, 120 bp, Artificial Sequence
  ENSG00000179562_34 (sequence is synthesized)
atggcctagaggaggcgggtgcagagcctccggtgtttgccttcctattcccctttgggcaccaaagtaggctgagctgagaccaggatccggaacttcaacctgtgaatttagagatgg

SEQ ID NO: 630438 - DNA, 63 bp, Artificial Sequence
  ENSG00000179562_35 (sequence is synthesized)
ctctgggcaaacattaagaacggctctaagtagctacgagaatgatgggaaacaattacgtgg

SEQ ID NO: 630439 - DNA, 120 bp, Artificial Sequence
  ENSG00000179562_36 (sequence is synthesized)
catggaactatgaagggagatcctgtaatcttcagcaaaggctccttggagctgggaaggaatgagatttgcaccactgtaaaccctacagtatttccagcccaagaataaggagggaga

SEQ ID NO: 630440 - DNA, 120 bp, Artificial Sequence
  ENSG00000179562_37 (sequence is synthesized)
agctgagctgagggctacagacaacaccgtgtacaaaccacagcaaatttattactcaagatccagtgccacattatagcaccacccgaagccctcaccttccccctcccaacctggccc

SEQ ID NO: 630441 - DNA, 120 bp, Artificial Sequence
  ENSG00000179562_38 (sequence is synthesized)
ctagagtacacccaaaacagaaaaaaaaaaggaaacccagatccctgctcctcctctggaagagggggccttggccaggaagccccttccataggtcccagcaggcaggagagtggaccc

SEQ ID NO: 630442 - DNA, 120 bp, Artificial Sequence
  ENSG00000179562_39 (sequence is synthesized)
ctagaggaggcgggtgcagagcctccggtgtttgccttcctattcccctttgggcaccaaagtaggctgagctgagaccaggatccggaacttcaacctgtgaatttagtaaactctaca

SEQ ID NO: 630443 - DNA, 120 bp, Artificial Sequence
  ENSG00000179562_40 (sequence is synthesized)
gaagtttacagaactctatagaagctctacaggagtcatggcacaaactagagaccccactgcaaagaggaagtagtttatccaaagatgtgcaaggaaataaagacatgttatgagggc

SEQ ID NO: 630444 - DNA, 120 bp, Artificial Sequence
  ENSG00000179564_0 (sequence is synthesized)
gctgcatttgtccagtcctgctactggatgccatcattggcccccgactgcccactgcttgccatgcctgaggagacccaagaagactccgtggcgccaatgatgcccagccagaggagc

SEQ ID NO: 630445 - DNA, 120 bp, Artificial Sequence
  ENSG00000179564_1 (sequence is synthesized)
agggggccattggcccccaaccacgtgcatgaggtatgcctgcaccaggtggagtccatcagcgacctacatagtggagcaggcacactgcgcccctatctaactgaagaggcacgaccg

SEQ ID NO: 630446 - DNA, 120 bp, Artificial Sequence
  ENSG00000179564_2 (sequence is synthesized)
tgggatgagctgctgggcgttttgccgccgtcactgtgtgcccaggctggctgcagccctgtgtacagacgaggagggttcctgctgctgctcgcgctgctggtgctcacttgcctagtg

SEQ ID NO: 630447 - DNA, 120 bp, Artificial Sequence
  ENSG00000179564_3 (sequence is synthesized)
ctcgcactcctggctgtctacctgagcgtgctgcagagtgaatccctgcgcatcctggcacacacgctccgcacgcaggaggagacactactcaaactccgcttggccagcctcagccag

SEQ ID NO: 630448 - DNA, 120 bp, Artificial Sequence
  ENSG00000179564_4 (sequence is synthesized)
cttcggaggctcaactccagtgaggcccaagcacccagctgagatgccatttggatctggggcctgggggtgtgtgttggtgggggaataaagtggctatgggcaggtctctccttccct

SEQ ID NO: 630449 - DNA, 120 bp, Artificial Sequence
  ENSG00000179564_5 (sequence is synthesized)
cctctggtgccaaagcctcgctttgggtggcccaaggtcaggggaaggggcaccagcctcctggctcctcctgtggcctgtcaacactctctggccaccccagatggcaggttctgaagt

SEQ ID NO: 630450 - DNA, 120 bp, Artificial Sequence
  ENSG00000179564_6 (sequence is synthesized)
ctagaaatagctgcccccatagcaatcacccaaactctgccagggctcccagtgagggtccagcctcagctcttaaagacaggctgggctctgagtagggggagaggcaccacctgggga

SEQ ID NO: 630451 - DNA, 120 bp, Artificial Sequence
  ENSG00000179564_7 (sequence is synthesized)
agactgccttggagggcaaaggtgacatcgtggaagaccagttgggcccaagcctgggatagtagatggggagggagaacagaaaaatacccaggggttaagaccacagaaggctgaccg

SEQ ID NO: 630452 - DNA, 120 bp, Artificial Sequence
  ENSG00000179564_8 (sequence is synthesized)
ttctgtttaattatctgtaataatccttaaaaatcagcacacaaatccattccaggtagctttgccaccccacctgctgtggtggcatttgtccagatgccaccacccccctaagagtgg

SEQ ID NO: 630453 - DNA, 120 bp, Artificial Sequence
  ENSG00000179564_9 (sequence is synthesized)
gtcatcctgggggagcaaggcctgagaaaggaaaggaagggaaaggccccctagtgcctgccccacagccctgaggaaggcacatatttagcctggcctgagacaggacaggaaggggcc

SEQ ID NO: 630454 - DNA, 120 bp, Artificial Sequence
  ENSG00000179564_10 (sequence is synthesized)
acagggctgagtgcagggacaaaggggtcagggtcccaagtgtccgggcccccagctacccaccccatgtctgtttttggttttgtcattaaaaaaaataaagtgacaaatactggtgga

SEQ ID NO: 630455 - DNA, 120 bp, Artificial Sequence
  ENSG00000179580_0 (sequence is synthesized)
gtggagctgctgtctagacgcagatcatgggtggcgggtatgatctcaacctcttcgccagccctcctgacagcaacttcgtgtgctccgtctgccatggggttctcaagaggccagcaa

SEQ ID NO: 630456 - DNA, 120 bp, Artificial Sequence
  ENSG00000179580_1 (sequence is synthesized)
ggttgccatgcagccacatcttctgcaaaaagtgcatcctccggtggctagccagacaaaagacctgtccgtgctgtaggaaagaggtgaaaaggaaaaaggttgtccacatgaataaac

SEQ ID NO: 630457 - DNA, 120 bp, Artificial Sequence
  ENSG00000179580_2 (sequence is synthesized)
tccggaaaaccattggccgcctggaagtcaagtgcaagaacgccgacgctggctgcatagtgacatgccccctggcccatcgcaaggggcaccaggactcatgcccctttgagctaacgg

SEQ ID NO: 630458 - DNA, 120 bp, Artificial Sequence
  ENSG00000179580_3 (sequence is synthesized)
cagcaagggtcccagcagcgctgccccctgggctgcggggccaccctggacccggccgagcgtgctcgccacaactgctaccgggagctgcacaacgcctggagcgtgcgccaggagcgc

SEQ ID NO: 630459 - DNA, 120 bp, Artificial Sequence
  ENSG00000179580_4 (sequence is synthesized)
cgtcggcccctgctgctgtccctcctgcggcgtgtgcgctggctggaccaagccaccagtgtcgttcgtagagagctggcggagctcagcaacttcctggaggaagacaccgctctgctg

SEQ ID NO: 630460 - DNA, 120 bp, Artificial Sequence
  ENSG00000179580_5 (sequence is synthesized)
gagggtgccccacaggaggaggccgaggctgccccagaaggcaacgttggggctgaggtggtgggggagcccagggccaacataccttgtaaataggtaaataaaagcagacccccggcc

SEQ ID NO: 630461 - DNA, 120 bp, Artificial Sequence
  ENSG00000179580_6 (sequence is synthesized)
aatcccatcttcagagagaaacaagtgcagccttgggacgaccagacatagctgagtttggatcgtggctctactgcttagttgctgtgtgactttagtgcaagaacgccgacgctggct

SEQ ID NO: 630462 - DNA, 120 bp, Artificial Sequence
  ENSG00000179583_0 (sequence is synthesized)
ggttagtgatgaggctagtgatgaggctgtgtgcttctgagctgggcatccgaaggcatccttggggaagctgagggcacgaggaggggctgccagactccgggagctgctgcctggctg

SEQ ID NO: 630463 - DNA, 120 bp, Artificial Sequence
  ENSG00000179583_1 (sequence is synthesized)
ggattcctacacaatgcgttgcctggctccacgccctgctgggtcctacctgtcagagccccaaggcagctcacagtgtgccaccatggagttggggcccctagaaggtggctacctgga

SEQ ID NO: 630464 - DNA, 120 bp, Artificial Sequence
  ENSG00000179583_2 (sequence is synthesized)
gcttcttaacagcgatgctgaccccctgtgcctctaccacttctatgaccagatggacctggctggagaagaagagattgagctctactcagaacccgacacagacaccatcaactgcga

SEQ ID NO: 630465 - DNA, 120 bp, Artificial Sequence
  ENSG00000179583_3 (sequence is synthesized)
ccagttcagcaggctgttgtgtgacatggaaggtgatgaagagaccagggaggcttatgccaatatcgcggaactggaccagtatgtcttccaggactcccagctggagggcctgagcaa

SEQ ID NO: 630466 - DNA, 120 bp, Artificial Sequence
  ENSG00000179583_4 (sequence is synthesized)
ggacattttcaagcacataggaccagatgaagtgatcggtgagagtatggagatgccagcagaagttgggcagaaaagtcagaaaagacccttcccagaggagcttccggcagacctgaa

SEQ ID NO: 630467 - DNA, 120 bp, Artificial Sequence
  ENSG00000179583_5 (sequence is synthesized)
gcactggaagccagctgagccccccactgtggtgactggcagtctcctagtgggaccagtgagcgactgctccaccctgccctgcctgccactgcctgcgctgttcaaccaggagccagc

SEQ ID NO: 630468 - DNA, 120 bp, Artificial Sequence
  ENSG00000179583_6 (sequence is synthesized)
ctccggccagatgcgcctggagaaaaccgaccagattcccatgcctttctccagttcctcgttgagctgcctgaatctccctgagggacccatccagtttgtccccaccatctccactct

SEQ ID NO: 630469 - DNA, 120 bp, Artificial Sequence
  ENSG00000179583_7 (sequence is synthesized)
gccccatgggctctggcaaatctctgaggctggaacaggggtctccagtatattcatctaccatggtgaggtgccccaggccagccaagtaccccctcccagtggattcactgtccacgg

SEQ ID NO: 630470 - DNA, 120 bp, Artificial Sequence
  ENSG00000179583_8 (sequence is synthesized)
cctcccaacatctccagaccggccaggctccaccagccccttcgctccatcagccactgacctgcccagcatgcctgaacctgccctgacctcccgagcaaacatgacagagcacaagac

SEQ ID NO: 630471 - DNA, 120 bp, Artificial Sequence
  ENSG00000179583_9 (sequence is synthesized)
gtcccccacccaatgcccggcagctggagaggtctccaacaagcttccaaaatggcctgagccggtggagcagttctaccgctcactgcaggacacgtatggtgccgagcccgcaggccc

SEQ ID NO: 630472 - DNA, 120 bp, Artificial Sequence
  ENSG00000179583_10 (sequence is synthesized)
ggatggcatcctagtggaggtggatctggtgcaggccaggctggagaggagcagcagcaagagcctggagcgggaactggccaccccggactgggcagaacggcagctggcccaaggagg

SEQ ID NO: 630473 - DNA, 120 bp, Artificial Sequence
  ENSG00000179583_11 (sequence is synthesized)
cctggctgaggtgctgttggctgccaaggagcaccggcggccgcgtgagacacgagtgattgctgtgctgggcaaagctggtcagggcaagagctattgggctggggcagtgagccgggc

SEQ ID NO: 630474 - DNA, 120 bp, Artificial Sequence
  ENSG00000179583_12 (sequence is synthesized)
ctgggcttgtggccggcttccccagtacgactttgtcttctctgtcccctgccattgcttgaaccgtccgggggatgcctatggcctgcaggatctgctcttctccctgggcccacagcc

SEQ ID NO: 630475 - DNA, 120 bp, Artificial Sequence
  ENSG00000179583_13 (sequence is synthesized)
actcgtggcggccgatgaggttttcagccacatcttgaagagacctgaccgcgttctgctcatcctagacggcttcgaggagctggaagcgcaagatggcttcctgcacagcacgtgcgg

SEQ ID NO: 630476 - DNA, 120 bp, Artificial Sequence
  ENSG00000179583_14 (sequence is synthesized)
accggcaccggcggagccctgctccctccgggggctgctggccggccttttccagaagaagctgctccgaggttgcaccctcctcctcacagcccggccccggggccgcctggtccagag

SEQ ID NO: 630477 - DNA, 120 bp, Artificial Sequence
  ENSG00000179583_15 (sequence is synthesized)
cctgagcaaggccgacgccctatttgagctgtccggcttctccatggagcaggcccaggcatacgtgatgcgctactttgagagctcagggatgacagagcaccaagacagagccctgac

SEQ ID NO: 630478 - DNA, 120 bp, Artificial Sequence
  ENSG00000179583_16 (sequence is synthesized)
gctcctccgggaccggccacttcttctcagtcacagccacagccctactttgtgccgggcagtgtgccagctctcagaggccctgctggagcttggggaggacgccaagctgccctccac

SEQ ID NO: 630479 - DNA, 120 bp, Artificial Sequence
  ENSG00000179583_17 (sequence is synthesized)
gctcacgggactctatgtcggcctgctgggccgtgcagccctcgacagcccccccggggccctggcagagctggccaagctggcctgggagctgggccgcagacatcaaagtaccctaca

SEQ ID NO: 630480 - DNA, 120 bp, Artificial Sequence
  ENSG00000179583_18 (sequence is synthesized)
ggaggaccagttcccatccgcagacgtgaggacctgggcgatggccaaaggcttagtccaacacccaccgcgggccgcagagtccgagctggccttccccagcttcctcctgcaatgctt

SEQ ID NO: 630481 - DNA, 120 bp, Artificial Sequence
  ENSG00000179583_19 (sequence is synthesized)
cctgggggccctgtggctggctctgagtggcgaaatcaaggacaaggagctcccgcagtacctagcattgaccccaaggaagaagaggccctatgacaactggctggagggcgtgccacg

SEQ ID NO: 630482 - DNA, 120 bp, Artificial Sequence
  ENSG00000179583_20 (sequence is synthesized)
ctttctggctgggctgatcttccagcctcccgcccgctgcctgggagccctactcgggccatcggcggctgcctcggtggacaggaagcagaaggtgcttgcgaggtacctgaagcggct

SEQ ID NO: 630483 - DNA, 120 bp, Artificial Sequence
  ENSG00000179583_21 (sequence is synthesized)
gcagccggggacactgcgggcgcggcagctgctggagctgctgcactgcgcccacgaggccgaggaggctggaatttggcagcacgtggtacaggagctccccggccgcctctcttttct

SEQ ID NO: 630484 - DNA, 120 bp, Artificial Sequence
  ENSG00000179583_22 (sequence is synthesized)
gggcacccgcctcacgcctcctgatgcacatgtactgggcaaggccttggaggcggcgggccaagacttctccctggacctccgcagcactggcatttgcccctctggattggggagcct

SEQ ID NO: 630485 - DNA, 120 bp, Artificial Sequence
  ENSG00000179583_23 (sequence is synthesized)
cgtgggactcagctgtgtcacccgtttcagggctgccttgagcgacacggtggcgctgtgggagtccctgcagcagcatggggagaccaagctacttcaggcagcagaggagaagttcac

SEQ ID NO: 630486 - DNA, 120 bp, Artificial Sequence
  ENSG00000179583_24 (sequence is synthesized)
catcgagcctttcaaagccaagtccctgaaggatgtggaagacctgggaaagcttgtgcagactcagaggacgagaagttcctcggaagacacagctggggagctccctgctgttcggga

SEQ ID NO: 630487 - DNA, 120 bp, Artificial Sequence
  ENSG00000179583_25 (sequence is synthesized)
cctaaagaaactggagtttgcgctgggccctgtctcaggcccccaggctttccccaaactggtgcggatcctcacggccttttcctccctgcagcatctggacctggatgcgctgagtga

SEQ ID NO: 630488 - DNA, 120 bp, Artificial Sequence
  ENSG00000179583_26 (sequence is synthesized)
gaacaagatcggggacgagggtgtctcgcagctctcagccaccttcccccagctgaagtccttggaaaccctcaatctgtcccagaacaacatcactgacctgggtgcctacaaactcgc

SEQ ID NO: 630489 - DNA, 120 bp, Artificial Sequence
  ENSG00000179583_27 (sequence is synthesized)
cgaggccctgccttcgctcgctgcatccctgctcaggctaagcttgtacaataactgcatctgcgacgtgggagccgagagcttggctcgtgtgcttccggacatggtgtccctccgggt

SEQ ID NO: 630490 - DNA, 120 bp, Artificial Sequence
  ENSG00000179583_28 (sequence is synthesized)
gatggacgtccagtacaacaagttcacggctgccggggcccagcagctcgctgccagccttcggaggtgtcctcatgtggagacgctggcgatgtggacgcccaccatcccattcagtgt

SEQ ID NO: 630491 - DNA, 120 bp, Artificial Sequence
  ENSG00000179583_29 (sequence is synthesized)
ccaggaacacctgcaacaacaggattcacggatcagcctgagatgatcccagctgtgctctggacaggcatgttctctgaggacactaaccacgctggaccttgaactgggtacttgtgg

SEQ ID NO: 630492 - DNA, 120 bp, Artificial Sequence
  ENSG00000179583_30 (sequence is synthesized)
acacagctcttctccaggctgtatcccatgagcctcagcatcctggcacccggcccctgctggttcagggttggcccctgcccggctgcggaatgaaccacatcttgctctgctgacaga

SEQ ID NO: 630493 - DNA, 120 bp, Artificial Sequence
  ENSG00000179583_31 (sequence is synthesized)
cacaggcccggctccaggctcctttagcgcccagttgggtggatgcctggtggcagctgcggtccacccaggagccccgaggccttctctgaaggacattgcggacagccacggccaggc

SEQ ID NO: 630494 - DNA, 120 bp, Artificial Sequence
  ENSG00000179583_32 (sequence is synthesized)
cagagggagtgacagaggcagccccattctgcctgcccaggcccctgccaccctggggagaaagtacttctttttttttatttttagacagagtctcactgttgcccaggctggcgtgca

SEQ ID NO: 630495 - DNA, 120 bp, Artificial Sequence
  ENSG00000179583_33 (sequence is synthesized)
gccacagagaaagtacttctccaccctgctctccgaccagacaccttgacagggcacaccgggcactcagaagacactgatgggcaacccccagcctgctaattccccagattgcaacag

SEQ ID NO: 630496 - DNA, 120 bp, Artificial Sequence
  ENSG00000179583_34 (sequence is synthesized)
gctgggcttcagtggcagctgcttttgtctatgggactcaatgcactgacattgttggccaaagccaaagctaggcctggccagatgcaccagcccttagcagggaaacagctaatggga

SEQ ID NO: 630497 - DNA, 120 bp, Artificial Sequence
  ENSG00000179583_35 (sequence is synthesized)
cactaatggggcggtgagaggggaacagactggaagcacagcttcatttcctgtgtcttttttcactacattataaatgtctctttaatgtcacaggcaggtccagggtttgagttcata

SEQ ID NO: 630498 - DNA, 120 bp, Artificial Sequence
  ENSG00000179583_36 (sequence is synthesized)
ccctgttaccattttggggtacccactgctctggttatctaatatgtaacaagccaccccaaatcatagtggcttaaaacaacactcacatttattctgctcacatatctgtcatttgag

SEQ ID NO: 630499 - DNA, 120 bp, Artificial Sequence
  ENSG00000179583_37 (sequence is synthesized)
cagggctcagcggggacagctccttctgtcctactctgtgtcaggtggggcagcttgagggttgggctggtgtcacctgaagactcattcttctgtacgtctgacaggcaatgctggctg

SEQ ID NO: 630500 - DNA, 120 bp, Artificial Sequence
  ENSG00000179583_38 (sequence is synthesized)
ttggctgggggcctcagtgccactacggaatagttggctaggacccctccatgtgggctagttgggcttcctcatagtatggtggctgggttggagggtgtcccaaaaagaaaggagggg

SEQ ID NO: 630501 - DNA, 120 bp, Artificial Sequence
  ENSG00000179583_39 (sequence is synthesized)
atagagagagaccacttttcataacctagccttagaagtcacacagtattacttctgctacatatatatgttttaagaggcagggtctcactctgtcgcccagtctggaatgcagtggta

SEQ ID NO: 630502 - DNA, 75 bp, Artificial Sequence
  ENSG00000179583_40 (sequence is synthesized)
agtcaccaagcccagttaatctttagttttatttttgtagagccagggtctcactatgttgcccaggcaggtctt

SEQ ID NO: 630503 - DNA, 75 bp, Artificial Sequence
  ENSG00000179583_41 (sequence is synthesized)
gtgtgagtcaccaagcccagttaatctttagttttatttttgtagagccagggtctcactatgttgcccaggcag

SEQ ID NO: 630504 - DNA, 120 bp, Artificial Sequence
  ENSG00000179583_42 (sequence is synthesized)
cacttctgccatattctgttggccagtgtgacaaggattgctactgtcctacccaccctcctttcaccacatgtgcacatgcacgtgtgtgcacgtacacacacatacacacacacgcgt

SEQ ID NO: 630505 - DNA, 120 bp, Artificial Sequence
  ENSG00000179583_43 (sequence is synthesized)
gcacacaccagagcccaccttggctcaagtcctcttttctgagaggacttttctttgtggcttcctaaaattcagtggaaaattaattgtttggggatgagaaaggttgaagcaccaaaa

SEQ ID NO: 630506 - DNA, 120 bp, Artificial Sequence
  ENSG00000179583_44 (sequence is synthesized)
gcttaccaaggggaatgtttgcctctgcctctgacacacagctctgtcctgggagtgagctggtttttagcggagacggagtcccaccttggctgcagggagtccgaaagggacttggaa

SEQ ID NO: 630507 - DNA, 120 bp, Artificial Sequence
  ENSG00000179583_45 (sequence is synthesized)
gctccgctttctacccagcgagctgccggcacgactgttgcttttcactcgggcatagtctgctcagaagccccaattcaagacatcttagcttactcctggtggcagtgggagctgcct

SEQ ID NO: 630508 - DNA, 120 bp, Artificial Sequence
  ENSG00000179583_46 (sequence is synthesized)
gttcagctccagctcaccagccccagtgcccacaggatcagtctgattcccaagctctgctcctctccccagcaagtgagagctgggtgtcaagagggtctgaggaatccagacccggct

SEQ ID NO: 630509 - DNA, 120 bp, Artificial Sequence
  ENSG00000179583_47 (sequence is synthesized)
gcgtggttgatgatctttgcagacaggcaagcacctcctgcctcgaactggctgcaaagggtatcaggtgctgccatccaggttcagcttgtaaatagctcaggtgtcaccctgcaaggg

SEQ ID NO: 630510 - DNA, 120 bp, Artificial Sequence
  ENSG00000179583_48 (sequence is synthesized)
atccctgcacttgcagactctacagaggccatgggcctcctgtgtgtgcgcctacaggagtgagcactaaggtgtgctctgatcatccactgtgccatgtgccaggtttttggtctgacc

SEQ ID NO: 630511 - DNA, 120 bp, Artificial Sequence
  ENSG00000179583_49 (sequence is synthesized)
cactgcttttggtctgtgtgatgatgaaatgaggtcagagcctgcagttattaacactaacgatttgttaatgatagctactgtttattattttatttaatttttttgagacagagtttt

SEQ ID NO: 630512 - DNA, 120 bp, Artificial Sequence
  ENSG00000179583_50 (sequence is synthesized)
gcacccggccactactgtttatttaatgagcagatacatgcaaagcccttatcacagtgcaagggaaattcaaagcgctcagaaagtattagctcaataagtgatgactgtgtgccagac

SEQ ID NO: 630513 - DNA, 120 bp, Artificial Sequence
  ENSG00000179583_51 (sequence is synthesized)
actgtgctaaactcctactcaagagggataagagtctaggggcaagtggcagagactctagaacgagattgcctgggctcaacgcccacctcaccacttacttatgcaagctagttctct

SEQ ID NO: 630514 - DNA, 120 bp, Artificial Sequence
  ENSG00000179583_52 (sequence is synthesized)
gtgcctcagtctcctcatttgtaaaatgggcataaccacagcaccttctttataggattatgtgaaggtgtggtgagctaatacgttaagaattggagctcaataacatgttggctgtca

SEQ ID NO: 630515 - DNA, 120 bp, Artificial Sequence
  ENSG00000179583_53 (sequence is synthesized)
ttattacatatatctgtgtttcattcttgcctctggctggaatgttcttcccagctctccatatggctgatttctcatccttcgggacttgccccattctccaaccccatcactagtttt

SEQ ID NO: 630516 - DNA, 120 bp, Artificial Sequence
  ENSG00000179583_54 (sequence is synthesized)
atctttttcacttatttatgcagtctgctcttgtcctaggacatgagctccaggagggcgggaaacatctcgctttgtacactgctgtgccctctgtacccagcaaggcgcctgtgtata

SEQ ID NO: 630517 - DNA, 120 bp, Artificial Sequence
  ENSG00000179583_55 (sequence is synthesized)
ataggtgctcaataacataaaatgaacaaataatcctcacctaacggtttcattcattctgcaaatacatactgacagcacagtcatgaataagatgttcctgccctggtgagtcttata

SEQ ID NO: 630518 - DNA, 120 bp, Artificial Sequence
  ENSG00000179583_56 (sequence is synthesized)
ttttagcaaattaaaaaaactctttggacagggctgccaggtgaggttggccagtctgtacactgcacaaaggcacctgggacaagggggaacatgggggctgcaaaccagtctgggttc

SEQ ID NO: 630519 - DNA, 120 bp, Artificial Sequence
  ENSG00000179583_57 (sequence is synthesized)
tgcttgccaaactgggagtcctggtgtggagccttttaacccagaggggcatcttttcgtagttaacgcacagtcatcgtaagatgtggataaattactgtctccgtgtcacagatctaa

SEQ ID NO: 630520 - DNA, 120 bp, Artificial Sequence
  ENSG00000179583_58 (sequence is synthesized)
gtgatacttatagtcacactcctataaaggaatggacttctgacttctttggaggacctctctgcagggacaggcacagtgtgccggaagtgcccctgaaccccatttgtcaggtggtaa

SEQ ID NO: 630521 - DNA, 120 bp, Artificial Sequence
  ENSG00000179583_59 (sequence is synthesized)
agcgctgctcggaggaatcagggcatgatagtgcaattccatgtccagtggattgtaagtccacgcaccttccaaatggtcactcttcctcgcaggcctctctctgcatacaaatgtctc

SEQ ID NO: 630522 - DNA, 120 bp, Artificial Sequence
  ENSG00000179583_60 (sequence is synthesized)
cctcctgacgctcacctttttccctggggctctcaaatgtcttcttttcagatttcgtagcttttctttctttagcatcacttgagggcaagtggtgctccaactgtctccccccagagt

SEQ ID NO: 630523 - DNA, 120 bp, Artificial Sequence
  ENSG00000179583_61 (sequence is synthesized)
tctgccgcctgtactctcccacacctcagtctcctcgcctgtagaaaggggtcaatcgtttgaaccctgcttcacttggtgtgtatgtgaaggtgctttgaaatcaagtgctctgcaaac

SEQ ID NO: 630524 - DNA, 120 bp, Artificial Sequence
  ENSG00000179583_62 (sequence is synthesized)
cccttcccccctatctttaatgaaggtctaccatgtgcctgacacaggggatacccacccccacttctatgggattcaggcctggtttccagcttggccttcaggcttttcccaccacac

SEQ ID NO: 630525 - DNA, 120 bp, Artificial Sequence
  ENSG00000179583_63 (sequence is synthesized)
cccaaatgctgtccctggcttgtggagtggggcagggggccagcctgggactttcacgccagcccgactggggcagactctctcaaccccactggatcttctgctgtttgtcagccacaa

SEQ ID NO: 630526 - DNA, 120 bp, Artificial Sequence
  ENSG00000179583_64 (sequence is synthesized)
ggttctgcctagaactcctttcccgaatctcaaagttaaaaaaaaaggcagggccccaggggttggagttgcatacatttttttttaatccaaagaagtaagcctcctaagtattgctta

SEQ ID NO: 630527 - DNA, 120 bp, Artificial Sequence
  ENSG00000179583_65 (sequence is synthesized)
gacaggtttatcagaattaagtaggcacaacactcatactttcagaaaagcatttccagccaggggagtaacgtggcactcaccagcatgatgtctgttttgccaacttgctgaagaacg

SEQ ID NO: 630528 - DNA, 120 bp, Artificial Sequence
  ENSG00000179583_66 (sequence is synthesized)
agtaacctgaaatgaaggagcgagaatcccaccctcagccccccaacagcttcctcagcttctttttcttctgagtcacccctgaaacagtcgctgcatctaagaccagcctcgggctaa

SEQ ID NO: 630529 - DNA, 120 bp, Artificial Sequence
  ENSG00000179583_67 (sequence is synthesized)
acccagctggcctgaaggctcaactcacatcaaacggagctgggagtcgcttttgcgtgtgtccgcagtttgaagtgtcctctccgaaggtgaagtgggggaagcaggtgcgctccggga

SEQ ID NO: 630530 - DNA, 120 bp, Artificial Sequence
  ENSG00000179583_68 (sequence is synthesized)
tgaagtgcagggaggcaaactctggctgggttcctgtaaacatccatcgcagctgcaaataatcagaagccaaggccaggccatcgatttgacactgcaggcagatgaggtcttgggatg

SEQ ID NO: 630531 - DNA, 120 bp, Artificial Sequence
  ENSG00000179583_69 (sequence is synthesized)
cctcttgcgttcccccttctgtgggagcaggtgccttcccaacctcagcactcagtcccaatctctcttccactctcctgggttcaaacaggaacctctctgttggcacgaagcttttga

SEQ ID NO: 630532 - DNA, 120 bp, Artificial Sequence
  ENSG00000179583_70 (sequence is synthesized)
ggggagcaggtctaacaagaaggaaaaaggggggttattagcacggaagccccaccctgccaccaggttggctggggacagggaccaatccaccaggctcgggaggcttggggtggggca

SEQ ID NO: 630533 - DNA, 120 bp, Artificial Sequence
  ENSG00000179583_71 (sequence is synthesized)
gggaagtcttcctccatccctcaaatttagggaaccactgggagccccagactcaggctgaaaatgtctttctgcaaatataaaactctttttaatgaatttgcctaatttctcagagac

SEQ ID NO: 630534 - DNA, 120 bp, Artificial Sequence
  ENSG00000179583_72 (sequence is synthesized)
cctgggctggagaaccagtgcaatgtcacacgggagaggaaggactgtcctgtttattgggagggaggagggggatgctggtgcagcctgctcaggagtcacccagggtctgagggctga

SEQ ID NO: 630535 - DNA, 120 bp, Artificial Sequence
  ENSG00000179583_73 (sequence is synthesized)
cttgcagctctgggccagctgagccagcgctgggtagtgggcagggcttggcaacaccttccaccttgcccggaaaaatgctttgcaacctacaggaaggcaatagccacagccaagtta

SEQ ID NO: 630536 - DNA, 120 bp, Artificial Sequence
  ENSG00000179583_74 (sequence is synthesized)
ctcagcagccccacttggctctttctcccaggatgcagcatcatctccatggcctggccccctggcacgtccccgtttcccactgccttctctgtgtgcctagccgggtgccagtgtctc

SEQ ID NO: 630537 - DNA, 120 bp, Artificial Sequence
  ENSG00000179583_75 (sequence is synthesized)
tgtagcacctcgtgttcccatgcccaacccctctgcagccccctcaagccctgctctgattccaagcctcatctcccagctcactatcctttccgcaaacttcactgaacatctcgcaga

SEQ ID NO: 630538 - DNA, 120 bp, Artificial Sequence
  ENSG00000179583_76 (sequence is synthesized)
acttgtatgttaaacatgtgacatgtattgttgtttgacagggtgctattgacatttggggtaggacaattcttggaggtggggtggctgttctgggcactgagcatttagcagcatctc

SEQ ID NO: 630539 - DNA, 120 bp, Artificial Sequence
  ENSG00000179583_77 (sequence is synthesized)
tggctccaggccactaaatgccagtagcacccctggccactggaacaactaaaaatgccctcctaccctatttccaaggtcgacctaagggggcggaactgtttccattgagacccatgc

SEQ ID NO: 630540 - DNA, 120 bp, Artificial Sequence
  ENSG00000179583_78 (sequence is synthesized)
atcgtataggataagaaactgaggttcttatcatttaataggataagaaattgaggttcagagaagccaagtaacctgcctaaagatgcacagctatgagaggcaaagctggcactggct

SEQ ID NO: 630541 - DNA, 120 bp, Artificial Sequence
  ENSG00000179583_79 (sequence is synthesized)
tggtaataacgatggaaacggtctgaatgagagcaggtaccatttcctgagctcttagcagacgctgaggaccctgctaagtgccatgagaccttagcagaggctgtgggtgccccgccc

SEQ ID NO: 630542 - DNA, 120 bp, Artificial Sequence
  ENSG00000179583_80 (sequence is synthesized)
cattccctccactcactcttccttgcaggtcgacctgcccttctttgctgaggcctttctctgcctccagagcctgcttggtcctcaggctgtaagtgcaggcagagctaatgtctctcc

SEQ ID NO: 630543 - DNA, 120 bp, Artificial Sequence
  ENSG00000179583_81 (sequence is synthesized)
atagctgccctccaccagcctgctcctgagacacctgctggccagcagcctgaagcagaatcctttactcagattcagccgcacagatgctcactgcagagatctccaaggcctgtggtc

SEQ ID NO: 630544 - DNA, 120 bp, Artificial Sequence
  ENSG00000179583_82 (sequence is synthesized)
actgcagagatctccaaggcctgtggtcatccttgagcccatctcagatttgtgtggatagggtgttagagaacatggaatcagctggatagagtggttcatgcttgtaatcccagcact

SEQ ID NO: 630545 - DNA, 79 bp, Artificial Sequence
  ENSG00000179583_83 (sequence is synthesized)
gaccagcctgggcaacacagtgagactgtctctataaaaaatttaaaaattagccaggcataggtgagcccagcagttc

SEQ ID NO: 630546 - DNA, 84 bp, Artificial Sequence
  ENSG00000179583_84 (sequence is synthesized)
acttggaaggctgaggcaggaggattgcgtgagcccagcagttcaaggctgcagtgaactatgactgtgcccctgcacgagaag

SEQ ID NO: 630547 - DNA, 120 bp, Artificial Sequence
  ENSG00000179583_85 (sequence is synthesized)
ctctcccagtcctgtgaccacaaaccgcatccccgacagtcccagccaggcgctagtctggctgtagctgccctcttgtgtgcagatctccagtctgaatgggctacacgtggaatttac

SEQ ID NO: 630548 - DNA, 120 bp, Artificial Sequence
  ENSG00000179583_86 (sequence is synthesized)
taacactccggttttcattgtgtttatctgtagggttaccttctatttatagcaagtgatgccaagtttccatttctggtagtaatatagtttttcttttccaagtcgctcacacctgta

SEQ ID NO: 630549 - DNA, 120 bp, Artificial Sequence
  ENSG00000179583_87 (sequence is synthesized)
agactagcctggccaacatggcgaaaccgcgtctctactaaaaacaaacaaacaaaaatacaaaattcgctgggcatggtggcaggtgcctgaggtcccagctactcgggaggctgaggc

SEQ ID NO: 630550 - DNA, 89 bp, Artificial Sequence
  ENSG00000179583_88 (sequence is synthesized)
caaaagtttctcttttcaaaacattttactttaaaaggagccaatttaaagaaaactgttaatagttcaggtaacaggcagatacagga

SEQ ID NO: 630551 - DNA, 120 bp, Artificial Sequence
  ENSG00000179583_89 (sequence is synthesized)
agaaaactgttaatagttcaggtaacaggcagatacaggaaaagctgctgacagtgttgtatgaggtttgaggattttgatccaagctggtcccactcagtccatagcagagaatgaaag

SEQ ID NO: 630552 - DNA, 120 bp, Artificial Sequence
  ENSG00000179583_90 (sequence is synthesized)
ggcccagagagggtggtgacctctgcctgaagtcacacagtgagtcgaggacagggaggtgaccccaggtttctatgtgtagggcgggaggatgttctgggacacagttcaattctcatt

SEQ ID NO: 630553 - DNA, 120 bp, Artificial Sequence
  ENSG00000179583_91 (sequence is synthesized)
tgtcacacactttggctattagagatcaaccccttcgctcctgtgtcttgcaatggcagccttggcaaacgctaaatgaaaatcgtgacaacacttgtgttatgaagcatttactttgtg

SEQ ID NO: 630554 - DNA, 120 bp, Artificial Sequence
  ENSG00000179583_92 (sequence is synthesized)
ttcaccttgtactactcgaactcatgtcttaactcacttatccctcaaaaacaactctaggaggtagggccaagtaggaccatcatccctgcatttcacatggagctcagagaggttaag

SEQ ID NO: 630555 - DNA, 120 bp, Artificial Sequence
  ENSG00000179583_93 (sequence is synthesized)
caagccgtgcaaggccacacagctcataaatggcagagccaggatttgaacccccgtggcctgaccccaaagccgaaaccactcggcactgcaggttcgtcccttttctctgagatgggg

SEQ ID NO: 630556 - DNA, 120 bp, Artificial Sequence
  ENSG00000179583_94 (sequence is synthesized)
ttggcttccctgggccacagtggaagaactgtctggggccacatataaaatatactaatgatagctcatgagctaaaaaataaaacaaaatcacacacacacacacaaaaaaacacaaac

SEQ ID NO: 630557 - DNA, 62 bp, Artificial Sequence
  ENSG00000179583_95 (sequence is synthesized)
tgagctaaaaaataaaacaaaatcacacacacacacacaaaaaaacacaaaccaaaaaaaag

SEQ ID NO: 630558 - DNA, 74 bp, Artificial Sequence
  ENSG00000179583_96 (sequence is synthesized)
aggcgcatgtcaccatgcctggctaattgaaatctcataacgttttaagaaagtttatgaatctgtgttgggcc

SEQ ID NO: 630559 - DNA, 120 bp, Artificial Sequence
  ENSG00000179583_97 (sequence is synthesized)
tcataacgttttaagaaagtttatgaatctgtgttgggccacagtcaaagccgtcctgagctgtatgcagcctacaggccgcaccacggattgaacaagtttcttctaaggcatcaagag

SEQ ID NO: 630560 - DNA, 120 bp, Artificial Sequence
  ENSG00000179583_98 (sequence is synthesized)
ccccaggctgaaaagcaccccagagctggagcttatagaacccagggcagcaggttctccaaccttctgacatcatcagagcacagcagacaagttatcagccactagatttttttcccc

SEQ ID NO: 630561 - DNA, 120 bp, Artificial Sequence
  ENSG00000179583_99 (sequence is synthesized)
ctttctgaaactgtaacctttcattccagccattccccagagctggacagaggacgtggctggctggctggtttctgtagtcagaatgacagttgggtgctagatccccttcgtgaagca

SEQ ID NO: 630562 - DNA, 120 bp, Artificial Sequence
  ENSG00000179583_100 (sequence is synthesized)
atgtcttagctcagtaactctgcagagaagctgcctggttcaggatgtggcttaagtaagaagatggccctggcgttttacgcgcactggtgggtgaggctctgaaagtggtagaaggga

SEQ ID NO: 630563 - DNA, 120 bp, Artificial Sequence
  ENSG00000179583_101 (sequence is synthesized)
attctttcctagagttcagctgcccgctgtcctgctcctcagggcaaatgctgtgagatctgcatttagcctgtctgtgctgattgtggttctgccccttcctggctgtgtgacctcaga

SEQ ID NO: 630564 - DNA, 120 bp, Artificial Sequence
  ENSG00000179583_102 (sequence is synthesized)
caagtcacccaccctctctgggccagtttcctcatctggaaaaggggacagtgcccaccacattgggctgtttgtgtccatggagtgcctgacaatacccagcacacacgagacatcagt

SEQ ID NO: 630565 - DNA, 120 bp, Artificial Sequence
  ENSG00000179583_103 (sequence is synthesized)
acagggtggttccttccctccttagccccacctgttcccaggtagaaaccaataccggcagggaaccttctcaaggctaggggccttctgaaagcagcagcacttttcctccttcaaaga

SEQ ID NO: 630566 - DNA, 120 bp, Artificial Sequence
  ENSG00000179583_104 (sequence is synthesized)
ccttgccttctagaaacccattgctcattcctttctccatgtaccaaaaaatcaattaaagtggctaaagacagacgtcaccctcccctactcacgcagccattctgatcctccacgctg

SEQ ID NO: 630567 - DNA, 120 bp, Artificial Sequence
  ENSG00000179583_105 (sequence is synthesized)
gtgacaggctatgtggcaggagggtctctaccttatctcagaatgaaggcatggctggggtctggctgtctcctggtggccggaaggagacagacggcaaaggagaagctgcctgtctct

SEQ ID NO: 630568 - DNA, 120 bp, Artificial Sequence
  ENSG00000179583_106 (sequence is synthesized)
gcacaggtccatgtccctgaggaaagccaacgtcacagagaaatgatgaccactttctcaaacctggcttcggatttgcacgttggctgccaaagctgatcagcagcgggctttgtgaag

SEQ ID NO: 630569 - DNA, 120 bp, Artificial Sequence
  ENSG00000179583_107 (sequence is synthesized)
atgcctggtctaccacgtgcctccagctggtcacgcccaagactccctgagccctctggaagggcagcacttgcccagtgcctccctccaggtcctgccacatccaagaaccacctggac

SEQ ID NO: 630570 - DNA, 120 bp, Artificial Sequence
  ENSG00000179583_108 (sequence is synthesized)
tattatttacttagtattttaaaccaatgtactttttaaactccaattttttaataagatcatttatgtcaccatataacacccaaagcagtagaatttgtcatacacagaaggcaatgc

SEQ ID NO: 630571 - DNA, 120 bp, Artificial Sequence
  ENSG00000179583_109 (sequence is synthesized)
taaaaatacaatgaaaatggaaccaggaagtctagcttgatacccttggcctgtataactgagccttgtgccagttaaaagggcaaagcagtaggtgctcagggggtgtcggggccctga

SEQ ID NO: 630572 - DNA, 120 bp, Artificial Sequence
  ENSG00000179583_110 (sequence is synthesized)
gagctgatctgatccgctgctgcgtattcactaccgccctgggacgcctccagcagaccacctcactgggggaaacatcaggacagcgtggccaggagcccaatgctgccacctcataga

SEQ ID NO: 630573 - DNA, 120 bp, Artificial Sequence
  ENSG00000179583_111 (sequence is synthesized)
tgggtatctgagatgagtcatcgaacttctgcaagcctcagtttcctccctggtctaatggaaccctccttggcggcttcacagggtgatgcttggggcaggtgatggagatgtgggaga

SEQ ID NO: 630574 - DNA, 120 bp, Artificial Sequence
  ENSG00000179583_112 (sequence is synthesized)
ggcagttatttttaaccacccagccaagccccttgccaggagggactcccagaaatgaagccttacccttgagggagttccccgccactccaagcttggggcctgggatggcagctgtga

SEQ ID NO: 630575 - DNA, 120 bp, Artificial Sequence
  ENSG00000179583_113 (sequence is synthesized)
gggcaccagcaccatctggggactcgctgggtaccaattatcaccgcccttgggctacttcaaaggctgcccacacagacacaccctccttggtaaccagtcctcaggaggaagggcacc

SEQ ID NO: 630576 - DNA, 120 bp, Artificial Sequence
  ENSG00000179583_114 (sequence is synthesized)
caaggaaagggggaaggcttcctgggctagagccccttcagggtctgacacgccattgacactgaccacgtcattcattaagcaagcaccaactatacatcattcactatcccaatctaa

SEQ ID NO: 630577 - DNA, 120 bp, Artificial Sequence
  ENSG00000179583_115 (sequence is synthesized)
tttgcacaagcccttaggcaggtgctactattatccctgttttacagagaaggaaaccgaggcttaggagatgaagtctgaggtgttggtggagctgggatttaaaccaaaatatgtcca

SEQ ID NO: 630578 - DNA, 120 bp, Artificial Sequence
  ENSG00000179583_116 (sequence is synthesized)
actgcaaagcatgtaagtaacaattttagagggtatacggaggtgaccctaagtaacaaggaatcacatatagtgagcaagcaatttgcttttcagtttttggtcaatccttatgattat

SEQ ID NO: 630579 - DNA, 120 bp, Artificial Sequence
  ENSG00000179583_117 (sequence is synthesized)
ttagaggagaaagttcagtttggtgctggtatatcttatgtttatcacccgacagttgttaatctctttttaacaaagaatacaggccaaggccctgtgactttagctggctttggtatt

SEQ ID NO: 630580 - DNA, 120 bp, Artificial Sequence
  ENSG00000179583_118 (sequence is synthesized)
tggccaaaagttaatgactttggcagttagtgtttttatccatgccaagcgatgatgattttctctttagtgacagacattttttaaaaaataaattcacataaaaaagtagttttacag

SEQ ID NO: 630581 - DNA, 120 bp, Artificial Sequence
  ENSG00000179583_119 (sequence is synthesized)
atgaagcactaaaactagtgcatttcatcttaaactgcaaattataaagggaataatagtaacttgacagtggagagacctggcagacaccaccttcaccaactgatcaaagttaacatc

SEQ ID NO: 630582 - DNA, 120 bp, Artificial Sequence
  ENSG00000179583_120 (sequence is synthesized)
gccagaaaggggacagatggcatgtgcctctcgataagatgcactgaagacacacactcacttctgcaatattcctgccaagaatgcctcatctgaatctaatctcgagtataaccatca

SEQ ID NO: 630583 - DNA, 120 bp, Artificial Sequence
  ENSG00000179583_121 (sequence is synthesized)
gacaaacccaaattgagagacagtttacaaaacaccagccttgtactctgcttaatatgtcaatgtcacaagagagaaagacagactgaagagctgatccagactgaagaaggctcgaga

SEQ ID NO: 630584 - DNA, 120 bp, Artificial Sequence
  ENSG00000179583_122 (sequence is synthesized)
ttaatgcaaaagctgatctgggattgcatcttggacctcaactctcccctttttattgttaagggacactactgggacaattttttttttttttcgttttgagacagggtctcgctcagt

SEQ ID NO: 630585 - DNA, 120 bp, Artificial Sequence
  ENSG00000179583_123 (sequence is synthesized)
cacccaggctggagtgcagtggtggaataataactcactgcagccttgaactcccggactcaagcaatcctcctgcctgagccttccgagtaactgggactatgggcgtgtaccacaaca

SEQ ID NO: 630586 - DNA, 87 bp, Artificial Sequence
  ENSG00000179583_124 (sequence is synthesized)
aagtgatccttccacctcagcctctataaaatttgaataaagttgtagatgagattggtcataggattgtatagtgtatcaatatta

SEQ ID NO: 630587 - DNA, 120 bp, Artificial Sequence
  ENSG00000179583_125 (sequence is synthesized)
gatgagattggtcataggattgtatagtgtatcaatattagatttgctgattttgacaaccctactgtggttatgcaaatttgtccttgttctaaggaaataaatactgaattatttagg

SEQ ID NO: 630588 - DNA, 120 bp, Artificial Sequence
  ENSG00000179583_126 (sequence is synthesized)
agacttgccgcggccccagagctggcgggagggagaggccaccagcagcgcgcgcgggagcccggggaacagcggcagctcacagtgtgccaccatggagttggggcccctagaaggtgg

SEQ ID NO: 630589 - DNA, 120 bp, Artificial Sequence
  ENSG00000179583_127 (sequence is synthesized)
ggaagagacatccttgtgttgggcattaactgcggtcttggtgccaagcccagtgctctgtggggtctcttttagtatgcagagcagccgggtggggcagaatggattctctccattttt

SEQ ID NO: 630590 - DNA, 120 bp, Artificial Sequence
  ENSG00000179583_128 (sequence is synthesized)
aagatgaggatgttgaggctcagagaggggcagccacttgccacacagcaagtgagaggcaatggcattctcccagtcaatatttgaaggcccgccatgtgccagtcactggggtatgtc

SEQ ID NO: 630591 - DNA, 120 bp, Artificial Sequence
  ENSG00000179583_129 (sequence is synthesized)
tagaatctgagactgacctgggctcaaatttgttttattctttccaccccctgagcacgccaccgttttcttatgctaagagtaaagccatggcctccccttggactctctgcctccatt

SEQ ID NO: 630592 - DNA, 120 bp, Artificial Sequence
  ENSG00000179583_130 (sequence is synthesized)
ctctcctcttccactccattttgtattcagcaaccagaccaatcttctcagaacttgaatctgattgtatcccatccctgcttacaatccttcagggacactccaccactgtcaggatga

SEQ ID NO: 630593 - DNA, 120 bp, Artificial Sequence
  ENSG00000179583_131 (sequence is synthesized)
aggctaaattccttaatttggtttcattaagtcggtctgcaatctgcttgagcatttcagcttaatcgccagaggattgcttccatatttccccctaaacatactttacccaagctgtaa

SEQ ID NO: 630594 - DNA, 120 bp, Artificial Sequence
  ENSG00000179583_132 (sequence is synthesized)
ggtcctacataattgtgccaataatttagcagtgagcttcctggtagccgaagcaaaaagggaaagaaaaccactgtgtgagttgtgagaaagtaggaatcaataaaggctggagtggtc

SEQ ID NO: 630595 - DNA, 120 bp, Artificial Sequence
  ENSG00000179583_133 (sequence is synthesized)
ctggacctggatgcgctgagtgagaacaagatcggggacgagggtgtctcgcagctctcagccaccttcccccagctgaagtccttggaaaccctcaaacaagggctcgctgtgtcaccc

SEQ ID NO: 630596 - DNA, 120 bp, Artificial Sequence
  ENSG00000179583_134 (sequence is synthesized)
aagggctcgctgtgtcacccaggctagaatatagtgctatgatcatacctctgcagccttgaactcctggcctcaaggaatctcctcacctccgcttcccaaagtgctgggattataggt

SEQ ID NO: 630597 - DNA, 120 bp, Artificial Sequence
  ENSG00000179583_135 (sequence is synthesized)
tgcagtcatttctttactccctcatccaaccgctcactcaatcatttctttacttacccaaccatttattaatttaatcaacaaatatttaaggaggacctactatgtgcaggcaccttt

SEQ ID NO: 630598 - DNA, 120 bp, Artificial Sequence
  ENSG00000179583_136 (sequence is synthesized)
ctaggccctggagacccagctttaaacaaaacaaataaatcccctgacctcaggaatcttaaattctagtgaggagacacaatgaacaagtaaacaagtcggtaattataaagtatacag

SEQ ID NO: 630599 - DNA, 120 bp, Artificial Sequence
  ENSG00000179583_137 (sequence is synthesized)
ggttgagctaaggaaagaaagtattttaataggtaggaggacccttcatggagctgcccttccattaaggtctagcctggtcaccgtgcctgggtctgaggccctccctccacagggctg

SEQ ID NO: 630600 - DNA, 120 bp, Artificial Sequence
  ENSG00000179583_138 (sequence is synthesized)
tcttctaagacgcacagggtgggtcttacaagacccattttacagatgaggaaaataaagcacagagcagttaactaacctttctggggtcacacagcaagtcagctgcagaaccataaa

SEQ ID NO: 630601 - DNA, 120 bp, Artificial Sequence
  ENSG00000179583_139 (sequence is synthesized)
ggaatctcgggcctcctaggcttctccttttccccatgacccacaccggtcggtatcttgccaggggaaaagtccccaacgttctaggctgggtggaaggagggatttgggggcagctgt

SEQ ID NO: 630602 - DNA, 120 bp, Artificial Sequence
  ENSG00000179583_140 (sequence is synthesized)
gtgtgcagggcaggtgggctggggttgggaagggtggatgccttggggaggggatggaagagattgaactcctggcccaagtctgatggggatggtgcatggtgcagcccctgcccttct

SEQ ID NO: 630603 - DNA, 120 bp, Artificial Sequence
  ENSG00000179583_141 (sequence is synthesized)
ctctccgtgtggaggccctagggtcctgctcagcatagctctcagagccaagtcacaaggagaggactgggggactgcctggcacagagcagttgctgatcaacacagctgcagccaggg

SEQ ID NO: 630604 - DNA, 120 bp, Artificial Sequence
  ENSG00000179583_142 (sequence is synthesized)
ctgagaagatgacaagcatttcctctgtcaggagagacatccatgccactccagggccctccccatcccaggaaggcccctccaagcacccagtctctaacacagcccacttcctcacag

SEQ ID NO: 630605 - DNA, 120 bp, Artificial Sequence
  ENSG00000179583_143 (sequence is synthesized)
gaatcccccaaaagccaaggtcatcatcaagccaggatgaggactggaggaggagctgacagctctgcctcaaatggatttgggagcgaaggctttttccataagctttgggggtaagtc

SEQ ID NO: 630606 - DNA, 120 bp, Artificial Sequence
  ENSG00000179583_144 (sequence is synthesized)
acagagctaccccaaatgtaacttagtctcggggtctccttccttttcaccagctgtcccctttgctggaggaagctttccagcccaaacgaagggcttaagaggagtctggccattcct

SEQ ID NO: 630607 - DNA, 120 bp, Artificial Sequence
  ENSG00000179583_145 (sequence is synthesized)
ggcatccagttagacctggaggaggtgaacggaggagaagcctgagggaggggtgtgtatccggcctgggaattcctccctctcccttgctagcgccccaacccgccctcatcctgttca

SEQ ID NO: 630608 - DNA, 120 bp, Artificial Sequence
  ENSG00000179583_146 (sequence is synthesized)
gagagggcacttacaggcctcggaggcaggggagggtctcctcctggggaaccatccccgtccagatggtgcccccaaccagctgcggcggcatgatctgggcggctggtccagggcatg

SEQ ID NO: 630609 - DNA, 120 bp, Artificial Sequence
  ENSG00000179583_147 (sequence is synthesized)
ggttgcggatcgtgtagggaagaggggaacagcagtcgagaccctactccaagtacgcatcaaagacgtcgagctccgagtcagcatcgtaaaggcccgagccggggtcggagagcacgc

SEQ ID NO: 630610 - DNA, 120 bp, Artificial Sequence
  ENSG00000179583_148 (sequence is synthesized)
cgaggtccacgagcgcctggtccatgtcctcgggcaggaagacgaggcccacgttgaggacgatgtactccatgaggaaggcgtagtacaggatcagcacattgacgaagaacaggccca

SEQ ID NO: 630611 - DNA, 120 bp, Artificial Sequence
  ENSG00000179583_149 (sequence is synthesized)
agaacatagagggcagcagcggcggcggcacgtaggggaccagggggcccagtgcgtccaggtgggccgcgacccgggcgccgagcatgcagcgggtggcaagggcggcggcccggcgat

SEQ ID NO: 630612 - DNA, 120 bp, Artificial Sequence
  ENSG00000179583_150 (sequence is synthesized)
gcccgggcggccggcgagggcacagcgcagccatccaggggtaccctggagcccgacagaagcagggccgggctccagatgtcccctggcaattgcgccccgacccccgaaatgcgccgg

SEQ ID NO: 630613 - DNA, 120 bp, Artificial Sequence
  ENSG00000179583_151 (sequence is synthesized)
gtcaccgcaccccgagatgtgcccccaaggatctctcgaccgcccgggcggcgaggcgggcccccctgaagtggcccgcggctgcccggctccctcgtggcgcctccctggcgctcgcag

SEQ ID NO: 630614 - DNA, 120 bp, Artificial Sequence
  ENSG00000179583_152 (sequence is synthesized)
tccctggcgctcgcagggcctcgcagagccggtggggatcccaccgcggctcagtgtctagggccggtcccggcagccttctctcccgccccgccccgcaggtcctcgcgcaccccccgc

SEQ ID NO: 630615 - DNA, 120 bp, Artificial Sequence
  ENSG00000179583_153 (sequence is synthesized)
ccagcacccatggctgcggccgccgcgtagccctcccggtggcgctcggagctccgcctcccgaggggccccgagctcattggcaggccgccccctgcacgcgctaattggccggctcaa

SEQ ID NO: 630616 - DNA, 120 bp, Artificial Sequence
  ENSG00000179583_154 (sequence is synthesized)
cgcccgcgctgattggctccggccgccagggggcgggtaccgcttcgctccgcccctcggggccctagcgtctgagttgctttcctggttcgggtctgccctcagatctcaaatcgaatt

SEQ ID NO: 630617 - DNA, 120 bp, Artificial Sequence
  ENSG00000179583_155 (sequence is synthesized)
cgctctgcgtatcgaatagggggaggtaaaagagactgaacacagttcaaacctagacataatgctaaggccgcaaaagccgaaggaaacccgggctaccgctgcaccttgctgcatgcc

SEQ ID NO: 630618 - DNA, 120 bp, Artificial Sequence
  ENSG00000179583_156 (sequence is synthesized)
tctttgggactccgtttctcctttaaaaggaggcggggtcggggaggggcgacggacggttgccctggaaattttggacattcccaaagcgccaattttcatggtggagatccaccagtg

SEQ ID NO: 630619 - DNA, 120 bp, Artificial Sequence
  ENSG00000179583_157 (sequence is synthesized)
tccccttcgcttctccaaactctggttgctggaaggtccgcccactacggaacctgcatcctagagttaaggaacacctgaataaagagattccgaggtagttcagatcttcaaccataa

SEQ ID NO: 630620 - DNA, 120 bp, Artificial Sequence
  ENSG00000179583_158 (sequence is synthesized)
tttccctacctctcacatacacagtgggctggatgctggatgcaaagctccctcgtcacagccccaaagacaggacttgaccatctcagtgcaatgaccctgtggtgccttctcccgagg

SEQ ID NO: 630621 - DNA, 120 bp, Artificial Sequence
  ENSG00000179583_159 (sequence is synthesized)
acctaagagccccctgagcgcttgcaaacactgcagacaaagcgagccctggcaccagctccctgcctgcctgttctgtgaagggagcctacaaaactggcagcccctgcagttctgagc

SEQ ID NO: 630622 - DNA, 120 bp, Artificial Sequence
  ENSG00000179583_160 (sequence is synthesized)
gctgcatgctgggtgagcggagattccaggcactggccagggcagctgccctgactccaagggctgccatgaacaacttccaggccatcctgactcaggtgagaatgctgctctccagcc

SEQ ID NO: 630623 - DNA, 120 bp, Artificial Sequence
  ENSG00000179583_161 (sequence is synthesized)
atcagcccagcctggtgcaggccctcttggacaacctgctgaaggaggacctcctctccagggaataccactgcactctgctccatgagcctgatagtgaggctctggccaggaagatct

SEQ ID NO: 630624 - DNA, 120 bp, Artificial Sequence
  ENSG00000179583_162 (sequence is synthesized)
ctttgaccctactagagaaaggagacctggatttggccctcctggggtgggcccggagtgggctgcagcccccagcagccgagaggggccccggccacagtgaccatggtggcagctcac

SEQ ID NO: 630625 - DNA, 80 bp, Artificial Sequence
  ENSG00000179588_0 (sequence is synthesized)
agcccgccaggagcgccctcgcagtggccgcctgctccgccgctcgccgcccgcgggttccattgagaaaagccgagcgg

SEQ ID NO: 630626 - DNA, 80 bp, Artificial Sequence
  ENSG00000179588_1 (sequence is synthesized)
gcacccgcccgtcgggcagtccgcgcgcccgcaacgcaggaccgtggcctctcgggcctccgcggcagctccagcggctc

SEQ ID NO: 630627 - DNA, 80 bp, Artificial Sequence
  ENSG00000179588_2 (sequence is synthesized)
ccgccgccgcccgcccggggctagaggcggccgccgggagggcgcgcggcgccggagacatgtccaggcggaaacagagc

SEQ ID NO: 630628 - DNA, 120 bp, Artificial Sequence
  ENSG00000179588_3 (sequence is synthesized)
tgtccaggcggaaacagagcaacccccggcagatcaagcgttccctcggagacatggaggccagagaggaggtgcagttggtgggtgccagccacatggagcaaaaggccacggcacctg

SEQ ID NO: 630629 - DNA, 120 bp, Artificial Sequence
  ENSG00000179588_4 (sequence is synthesized)
aagccccgagccctcccagcgcagatgttaactcacccccaccgctgccgccccccacatccccaggaggccccaaggagctggaaggacaggaaccagaacccaggcccacggaggaag

SEQ ID NO: 630630 - DNA, 120 bp, Artificial Sequence
  ENSG00000179588_5 (sequence is synthesized)
agccgggcagtccctggagcgggccagacgagctggagccggtggtgcaggatgggcagaggcgcatacgggcccgactcagcctcgccacgggcctgtcctggggcccgttccatggga

SEQ ID NO: 630631 - DNA, 120 bp, Artificial Sequence
  ENSG00000179588_6 (sequence is synthesized)
gtgtccagaccagagcctcatcccccaggcaggcggagccgagcccagccctgaccctgctgctggtggacgaggcctgctggctgaggacgctgccccaggccctgactgaggccgagg

SEQ ID NO: 630632 - DNA, 120 bp, Artificial Sequence
  ENSG00000179588_7 (sequence is synthesized)
ccaacacagagatccacaggaaggatgacgcactctggtgcagggtcaccaagccggtgcctgcggggggactcctgagcgtgctcctcacggccgagccccacagcacccccggccacc

SEQ ID NO: 630633 - DNA, 120 bp, Artificial Sequence
  ENSG00000179588_8 (sequence is synthesized)
ctgtgaagaaggagccagcagagcccacgtgcccggcccctgcacacgacctccagctcctgccccagcaggccgggatggcctccatccttgccaccgcagtgatcaacaaagacgtct

SEQ ID NO: 630634 - DNA, 120 bp, Artificial Sequence
  ENSG00000179588_9 (sequence is synthesized)
tcccctgcaaggactgtggcatctggtaccgcagcgagcgcaacctgcaggcgcacctgctctactactgcgccagccgccagggcaccggctccccggccgcagccgccacagacgaga

SEQ ID NO: 630635 - DNA, 120 bp, Artificial Sequence
  ENSG00000179588_10 (sequence is synthesized)
agcccaaagagacctaccccaacgagcgcgtctgccccttcccccagtgccgcaagagctgccccagcgccagctccctggagatccacatgcgcagccacagcggagagcggcccttcg

SEQ ID NO: 630636 - DNA, 120 bp, Artificial Sequence
  ENSG00000179588_11 (sequence is synthesized)
tgtgcctgatctgcctgtcggccttcaccaccaaggccaactgcgagcggcacctcaaggtgcacacggacacgctgagcggtgtctgccacagctgtggcttcatctccaccacaaggg

SEQ ID NO: 630637 - DNA, 120 bp, Artificial Sequence
  ENSG00000179588_12 (sequence is synthesized)
acatcctctacagccacttggtcaccaaccacatggtctgccagcctggctccaagggtgagatctactcgccaggggccggacacccagcaaccaagctgcccccagacagtctgggca

SEQ ID NO: 630638 - DNA, 120 bp, Artificial Sequence
  ENSG00000179588_13 (sequence is synthesized)
gcttccagcagcagcacacggccctgcaaggccccctggcctccgcggacctgggcctggcgcccaccccatcgccaggactggacagaaaggccctggccgaggccaccaacggagagg

SEQ ID NO: 630639 - DNA, 120 bp, Artificial Sequence
  ENSG00000179588_14 (sequence is synthesized)
ccagagcggagcctctggcccagaatggaggcagcagcgagcccccggcggcccccaggagcatcaaggtggaggcggtggaggagccggaggcggcccccatcctgggccccggagagc

SEQ ID NO: 630640 - DNA, 80 bp, Artificial Sequence
  ENSG00000179588_15 (sequence is synthesized)
gagcctgggccccaggccccgtcgcggacgccgtcgccgcgcagccccgccccggccagggtcaaggccgagctgtccag

SEQ ID NO: 630641 - DNA, 120 bp, Artificial Sequence
  ENSG00000179588_16 (sequence is synthesized)
ccggggccctgttccttccgcagtacgtgttcgggcccgacgcggcgccccccgcctcggagatcctggccaagatgtccgagctggtgcacagccggctgcagcagggcgcgggcgcgg

SEQ ID NO: 630642 - DNA, 120 bp, Artificial Sequence
  ENSG00000179588_17 (sequence is synthesized)
gcgccggcggcgcgcagaccgggctcttccccggggcccccaagggcgctacgtgcttcgagtgcgagatcaccttcagcaacgtcaacaactactacgtgcacaagcgcctctactgtt

SEQ ID NO: 630643 - DNA, 120 bp, Artificial Sequence
  ENSG00000179588_18 (sequence is synthesized)
tcaacaactactacgtgcacaagcgcctctactgttcaggccgccgtgcgcccgaggacgcgcctgccgcgcgcaggcccaaggcgccccccggcccggcccgcgcgccccccggccagc

SEQ ID NO: 630644 - DNA, 120 bp, Artificial Sequence
  ENSG00000179588_19 (sequence is synthesized)
cgcggccacgcccgaggacggcgcgggcggccggggcagcgagggcagccagagcccgggtagctccgtggacgacgcggaggacgaccccagccgcacgctgtgcgaggcctgcaacat

SEQ ID NO: 630645 - DNA, 120 bp, Artificial Sequence
  ENSG00000179588_20 (sequence is synthesized)
gccgcacgctgtgcgaggcctgcaacatccgcttcagccgccacgagacctacaccgtgcacaagcggtactactgcgcctcgcgccacgacccgccgccgcgccgaccggccgcgcccc

SEQ ID NO: 630646 - DNA, 80 bp, Artificial Sequence
  ENSG00000179588_21 (sequence is synthesized)
ccctctcccgccgcgcctgtgcgcacgcgcagacgccgcaagctctacgagctgcacgcggccggcgccccgcccccccc

SEQ ID NO: 630647 - DNA, 80 bp, Artificial Sequence
  ENSG00000179588_22 (sequence is synthesized)
ggaagcggaagcggaagcggccccggcctcgcccctgcgcgctcgcccggccccgcggccgacggccccatcgacctgag

SEQ ID NO: 630648 - DNA, 120 bp, Artificial Sequence
  ENSG00000179588_23 (sequence is synthesized)
gcgctggccgactaccacgagtgcacggcctgccgcgtgagcttccacagcctcgaggcctacctggcgcacaagaagtactcgtgccccgctgcgccaccgcccggcgcgctcggcctg

SEQ ID NO: 630649 - DNA, 80 bp, Artificial Sequence
  ENSG00000179588_24 (sequence is synthesized)
cccgccgccgcctgcccctactgccccccgaacggcccggtgcgcggggacctgctggagcatttccgcctggcgcacgg

SEQ ID NO: 630650 - DNA, 120 bp, Artificial Sequence
  ENSG00000179588_25 (sequence is synthesized)
cgcgcccgaggccgtgccgcccccgccggcgcccccctcctactcggacaagggcgtccagactcccagcaagggcacgccggcgccgctgcccaacggcaaccaccggtactgccgtct

SEQ ID NO: 630651 - DNA, 120 bp, Artificial Sequence
  ENSG00000179588_26 (sequence is synthesized)
aaccaccggtactgccgtctttgcaacatcaagttcagcagcctgtccaccttcatcgcccacaagaagtattactgctcctcgcacgccgccgagcacgtgaagtgagcgcccacacta

SEQ ID NO: 630652 - DNA, 120 bp, Artificial Sequence
  ENSG00000179588_27 (sequence is synthesized)
ccacactacagccgcagacgctttgcacgccccgctgcgatgcggggagggggccgcccccaggccgcacggactgccgctcctgggaaccccgccacgcacaggcctcggcggaggggg

SEQ ID NO: 630653 - DNA, 120 bp, Artificial Sequence
  ENSG00000179588_28 (sequence is synthesized)
ggcagcgcccgcctggacccttggcacttaataaagaagttcagtttgatgagcatggtggtgggccagcctagttctctgagccagcaggcacacgcagccagtgtcacatccagccct

SEQ ID NO: 630654 - DNA, 120 bp, Artificial Sequence
  ENSG00000179588_29 (sequence is synthesized)
gctgtgtacacaggccactgcggcccggagtggctgggcccctgccggagttacaccactgggtgctaagagctagaccgagcgtcaggtcggaggccacagcacacactgaaccactgc

SEQ ID NO: 630655 - DNA, 120 bp, Artificial Sequence
  ENSG00000179588_30 (sequence is synthesized)
agggccagccgctctgggcctaccccaccccagccctgtccatacccccctagggagagcagcctccacactgctgaccctctccacggtctacttggccgccagacacggaagagaggg

SEQ ID NO: 630656 - DNA, 120 bp, Artificial Sequence
  ENSG00000179588_31 (sequence is synthesized)
gcactgacctggctggccatcccccaaccctgcatggtcctgggggtccgatgtcccccatccagtcacagaccaccagggatggcaggggtgggggcgccctggggaggatgaagccct

SEQ ID NO: 630657 - DNA, 120 bp, Artificial Sequence
  ENSG00000179588_32 (sequence is synthesized)
gtggtggccaaggctgggggaagaacaggcgagtaggtggacaggagagggagaccgaggccgaagcattccctggcctcgagggggtcctgatgctcactggtgggtgcatctctccct

SEQ ID NO: 630658 - DNA, 120 bp, Artificial Sequence
  ENSG00000179588_33 (sequence is synthesized)
cagagccagggctgaggacaaccgtgtggtggagtcacctgtggtggctgagtcggtgcaagggtcagggcacccccaccccccgtcttccctgccctgctgggctgtatgggccggcca

SEQ ID NO: 630659 - DNA, 120 bp, Artificial Sequence
  ENSG00000179588_34 (sequence is synthesized)
cactgagggagtacttggctgaccgcgttcagccacggtgtcaccgtgccgtttgcagctgggtggctgtgggcagcctccagcgtgctttctcactggagaacaaaaacactcttctat

SEQ ID NO: 630660 - DNA, 120 bp, Artificial Sequence
  ENSG00000179588_35 (sequence is synthesized)
tcccaacgtcactttatttttttatttttgggtctcactctcttgcccaggctggagtccctgggatactcacggctcattgcagccttgacctcgtgagctcaagtgatcttcccacct

SEQ ID NO: 630661 - DNA, 120 bp, Artificial Sequence
  ENSG00000179588_36 (sequence is synthesized)
cagtttcctcagtagctggggctacaggtgtacaccaccatgcccagctagtttttgtgttttttgtagaaatggtgtctccctatgttgcccaggctgggcaaccctatattttttaga

SEQ ID NO: 630662 - DNA, 120 bp, Artificial Sequence
  ENSG00000179588_37 (sequence is synthesized)
tttttagagctaaggtcttgttcggttccccaggctgaagttcagtggcacgatcataagtcactgcagcctcaaactcctgagctgaaaccatcttcctgcctcagcctcccaagtagc

SEQ ID NO: 630663 - DNA, 120 bp, Artificial Sequence
  ENSG00000179588_38 (sequence is synthesized)
caggcttgacccaccacacctggctaacttttaaaacatttttatagagacagggtcttcctgtgttgcccaagatggtctcaaactcctgacctccagtgctcctgcagcctcagcctc

SEQ ID NO: 630664 - DNA, 120 bp, Artificial Sequence
  ENSG00000179588_39 (sequence is synthesized)
ccagaacattaggatgacaggcgcgagctaccattcccagcccatttccaactctacttgaactagctgcatttttttcagctttgcccagcagccctggtgagtgcaggcaaagaaggc

SEQ ID NO: 630665 - DNA, 120 bp, Artificial Sequence
  ENSG00000179588_40 (sequence is synthesized)
agcggcctcttgcctcagaagcccgaggcacttcccagccagtccagggctcgctctcctgcccgcagctcgtgggcctgggtctgcagcgctttcagtggtctctgatgtctttgtcca

SEQ ID NO: 630666 - DNA, 120 bp, Artificial Sequence
  ENSG00000179588_41 (sequence is synthesized)
cctgcccactagggtctggccagatggggcccgtagccaaggccaatggacagacatggcttccaccccctcccagggacctgagctccagggaaggcaagcagccttttcctcacagac

SEQ ID NO: 630667 - DNA, 120 bp, Artificial Sequence
  ENSG00000179588_42 (sequence is synthesized)
accccttctgttgaagaccaggtgatagcggggacgggaggcacggacccctcaagtctgctcatcatttgcattgttgtgcatgaatttgcgtggagggttcaggaggctctgccccca

SEQ ID NO: 630668 - DNA, 120 bp, Artificial Sequence
  ENSG00000179588_43 (sequence is synthesized)
agtcctccccaggtgcgggcgcagggtacaagatgttctaaaaaatagaaacctggtggggggttgtcactgtgtgtacatttaaaagtaaactgtttaaaggtgtctagaaactacgaa

SEQ ID NO: 630669 - DNA, 120 bp, Artificial Sequence
  ENSG00000179588_44 (sequence is synthesized)
gggtgctggggcaggtgtgcaggttgctggagacccaccaggcccaggcctgtgcctagtccaaagctcagccaacccgtgcagctggtggtatcactggagcttggcaccctcgcgcca

SEQ ID NO: 630670 - DNA, 120 bp, Artificial Sequence
  ENSG00000179588_45 (sequence is synthesized)
ccagagcctcatcccccaggcaggcggagccgcgaggcgctatctccgccttggcgccgagtgtccagacacaccgtacaagatgattgatttcttcaagatatgcacgcctttccgata

SEQ ID NO: 630671 - DNA, 120 bp, Artificial Sequence
  ENSG00000179588_46 (sequence is synthesized)
ccccacgggctgccctttgccctagctgcagtcacccctccctgtccgcctgcctccgcatttagtcctgctctggcctagggcacaggccatcctggggatacgggcacggggttagaa

SEQ ID NO: 630672 - DNA, 120 bp, Artificial Sequence
  ENSG00000179588_47 (sequence is synthesized)
acgctcccaagtggggagataacgtctgggggcacaaggggagccaaggccagaggagccgctggggctctgtggggagcccggggaggaaggagcccccgctccactcttccctcctct

SEQ ID NO: 630673 - DNA, 120 bp, Artificial Sequence
  ENSG00000179588_48 (sequence is synthesized)
gctttatctcctgcagaattaaatccttgattaacccttatctccccagcgaggcgctatctccgccttggcgccgagtgtccagacacaccgtacaagatgattgatttcttcaagata

SEQ ID NO: 630674 - DNA, 120 bp, Artificial Sequence
  ENSG00000179588_49 (sequence is synthesized)
aagtcaattgcccaaatacccaggatcaaacagcagagggagaaatagaacccacatctgcctatccccggagaccctcgcaagctccttaatgaattaaatccttgattaacccttatc

SEQ ID NO: 630675 - DNA, 120 bp, Artificial Sequence
  ENSG00000179593_0 (sequence is synthesized)
agtggcaataaccaggggcaataaccaggcgtgtcccaggggggagccccgctctgcagccctgtgcgccgtagagagctggacttaggctggcagcatggccgagttcagggtcagggt

SEQ ID NO: 630676 - DNA, 120 bp, Artificial Sequence
  ENSG00000179593_1 (sequence is synthesized)
gtccaccggagaagccttcggggctggcacatgggacaaagtgtctgtcagcatcgtggggacccggggagagagccccccactgcccctggacaatctcggcaaggagttcactgcggg

SEQ ID NO: 630677 - DNA, 120 bp, Artificial Sequence
  ENSG00000179593_2 (sequence is synthesized)
cgctgaggaggacttccaggtgacgctcccggaggacgtaggccgagtgctgctgctgcgcgtgcacaaggcgcccccagtgctgcccctgctggggcccctggccccggatgcctggtt

SEQ ID NO: 630678 - DNA, 120 bp, Artificial Sequence
  ENSG00000179593_3 (sequence is synthesized)
ctgccgctggttccagctgacaccgccgcggggcggccacctcctcttcccctgctaccagtggctggagggggcggggaccctggtgctgcaggagggtacagccaaggtgtcctgggc

SEQ ID NO: 630679 - DNA, 120 bp, Artificial Sequence
  ENSG00000179593_4 (sequence is synthesized)
agaccaccaccctgtgctccagcaacagcgccaggaggagcttcaggcccggcaggagatgtaccagtggaaggcttacaacccaggttggcctcactgcctggatgaaaagacagtgga

SEQ ID NO: 630680 - DNA, 120 bp, Artificial Sequence
  ENSG00000179593_5 (sequence is synthesized)
agacttggagctcaatatcaaatactccacagccaagaatgccaacttttatctacaggctggctctgcttttgcagagatgaaaatcaaggggttgctggaccgcaaggggctctggag

SEQ ID NO: 630681 - DNA, 120 bp, Artificial Sequence
  ENSG00000179593_6 (sequence is synthesized)
gagtctgaatgagatgaaaaggatcttcaacttccggaggaccccagcagctgagcacgcatttgagcactggcaggaggacgccttcttcgcctcccagttcctgaatggtctcaaccc

SEQ ID NO: 630682 - DNA, 120 bp, Artificial Sequence
  ENSG00000179593_7 (sequence is synthesized)
tgtcctgatccgccgctgtcactacctcccaaagaacttccccgtcactgatgccatggtggcctcagtgttgggtcctgggaccagcttgcaggctgagctagagaagggctccctgtt

SEQ ID NO: 630683 - DNA, 120 bp, Artificial Sequence
  ENSG00000179593_8 (sequence is synthesized)
cttggtggatcacggcatcctctctggcatccagaccaatgtcattaatgggaagcctcagttctctgcggccccaatgaccctgctataccagagcccaggctgcgggccgctgctgcc

SEQ ID NO: 630684 - DNA, 120 bp, Artificial Sequence
  ENSG00000179593_9 (sequence is synthesized)
tctcgccatccagctcagccagacccccggcccaaacagccccatcttcctgcccactgatgacaagtgggactggttgctggccaagacctgggtgcgcaatgccgagttctccttcca

SEQ ID NO: 630685 - DNA, 120 bp, Artificial Sequence
  ENSG00000179593_10 (sequence is synthesized)
tgaggccctcacgcacctgctgcactcacatctgctgcctgaggtcttcaccctggctaccctgcgtcagctgccccactgccaccctctcttcaagctgctgatcccgcacacccgata

SEQ ID NO: 630686 - DNA, 120 bp, Artificial Sequence
  ENSG00000179593_11 (sequence is synthesized)
ggacaggtccacaggcatcggcattgaaggcttctctgagttgatacagaggaacatgaagcagctgaactattctctcctgtgtctgcctgaggatatccggacccgaggagttgaaga

SEQ ID NO: 630687 - DNA, 120 bp, Artificial Sequence
  ENSG00000179593_12 (sequence is synthesized)
catcccaggctactactaccgtgatgatgggatgcagatctggggtgcagtggaacgctttgtctctgaaatcatcggtatctactacccaagtgatgagtctgtccaagatgacagaga

SEQ ID NO: 630688 - DNA, 120 bp, Artificial Sequence
  ENSG00000179593_13 (sequence is synthesized)
gctccaggcctgggtcagagagatcttctccaagggcttcctaaaccaggagagctcaggtataccctcctcactggagacccgggaagccctggtgcagtatgtcaccatggtgatatt

SEQ ID NO: 630689 - DNA, 120 bp, Artificial Sequence
  ENSG00000179593_14 (sequence is synthesized)
cacctgctccgccaagcatgcggctgtcagtgcagggcagtttgactcctgtgcttggatgcccaacctgccacccagcatgcagctgccaccacccacctccaaaggcctggcaacatg

SEQ ID NO: 630690 - DNA, 120 bp, Artificial Sequence
  ENSG00000179593_15 (sequence is synthesized)
cgagggcttcatagccaccctcccacctgtcaatgccacatgtgatgtcatccttgctctctggttgctgagcaaggagcctggagaccaaaggcccctgggcacctatccggatgagca

SEQ ID NO: 630691 - DNA, 120 bp, Artificial Sequence
  ENSG00000179593_16 (sequence is synthesized)
cttcacagaggaggcccctcggcggagcatcgccaccttccagagccgcctggcccagatctcgaggggcatccaggagcggaaccagggcctggtgctgccctacacctacctagaccc

SEQ ID NO: 630692 - DNA, 120 bp, Artificial Sequence
  ENSG00000179593_17 (sequence is synthesized)
tcccctcatcgagaacagcgtctccatctaaatcccaggggaacacaggcccagatgacatccctttgaccacatcgctctaggataactggcacccagagaaaaggactcctcagaaaa

SEQ ID NO: 630693 - DNA, 120 bp, Artificial Sequence
  ENSG00000179593_18 (sequence is synthesized)
aacaggcccccatgtgcctctcctgggacaaccagactctgtaactcacccccaccaccatacacacacacaaaaacagaaacaaaatcaaaacagagaaagcagaaaatctaccaagaa

SEQ ID NO: 630694 - DNA, 120 bp, Artificial Sequence
  ENSG00000179593_19 (sequence is synthesized)
cagagtctcaggacagaaccactgagtcttttggaggctccaagcctcaaagtgcccgcagagcccaccttgagggttttgctagttggttttgttttgcgttttacagccgtgggggga

SEQ ID NO: 630695 - DNA, 120 bp, Artificial Sequence
  ENSG00000179593_20 (sequence is synthesized)
agcacataatcccgccccagggcccactagcatccactgattggaccttatggtcacccaactcaaggacagccaccaagaagtggctgccaaagagactgggcgcagtggctcatgccc

SEQ ID NO: 630696 - DNA, 120 bp, Artificial Sequence
  ENSG00000179593_21 (sequence is synthesized)
ataatcccagcactttgggagatggaggcgggaaaatcatttgaggtcagaagttcaaggccagcctggacgacatagcgagactccacctctaccaaaaaataaaaattaaaaaacaaa

SEQ ID NO: 630697 - DNA, 120 bp, Artificial Sequence
  ENSG00000179593_22 (sequence is synthesized)
caacttttatctacaggctggctctgcgtgaggatgcccacccttccctgcccctgggcctcagatgccctatgacctctgccttctgccctcccctagtcagttcccccaccctcagtg

SEQ ID NO: 630698 - DNA, 120 bp, Artificial Sequence
  ENSG00000179593_23 (sequence is synthesized)
atatgagtcacatagtcctgcccaggaaacagcctccttcccactaccaatcccacagagcaacagctaccttaggggtagtgactaccttgggcccggaggctggttcaggatcccaag

SEQ ID NO: 630699 - DNA, 120 bp, Artificial Sequence
  ENSG00000179593_24 (sequence is synthesized)
aggcataaggctggctgacagggaagggtctcccagggcctcctccccactccccacccctcacatcccctggcagttttgcagagatgaaaatcaaggggttgctggaccgcaaggggc

SEQ ID NO: 630700 - DNA, 120 bp, Artificial Sequence
  ENSG00000179598_0 (sequence is synthesized)
agactccgctgcggcggcgtggctgtgggtcccggattagcggcggcatgggacggttgagttggcaggtggcggccgcggcggctgtgggcctggctctgactctggaggcgctgcctt

SEQ ID NO: 630701 - DNA, 120 bp, Artificial Sequence
  ENSG00000179598_1 (sequence is synthesized)
gggtgctgcgctggctgcggtccaggcggcggcggccgcggcgcgaggcgctgttcttcccgtctcaggtgacctgtaccgaggccctgctgcgggctccgggcgcggagctggccgagc

SEQ ID NO: 630702 - DNA, 120 bp, Artificial Sequence
  ENSG00000179598_2 (sequence is synthesized)
tccccgagggctgcccgtgcggcctgccccacggcgagagcgcgctaagccgcctgctgcgtgccctgctggccgcccgcgccagcctggatctctgcctgttcgccttctccagcccgc

SEQ ID NO: 630703 - DNA, 120 bp, Artificial Sequence
  ENSG00000179598_3 (sequence is synthesized)
agctgggccgcgccgtgcagttgctgcaccagcgtggggtgcgagtgcgggtcgtcaccgactgcgactacatggccctcaacggctcgcaaatcggtctgctgcgcaaggcagggatcc

SEQ ID NO: 630704 - DNA, 120 bp, Artificial Sequence
  ENSG00000179598_4 (sequence is synthesized)
aggtccggcacgatcaagacccaggctacatgcatcacaagtttgccatcgtggacaagagggtgctcatcactggctcgctcaactggaccacgcaagccatccagaacaacagggaga

SEQ ID NO: 630705 - DNA, 120 bp, Artificial Sequence
  ENSG00000179598_5 (sequence is synthesized)
atgttctcatcacggaggacgacgagtacgtgcggctttttctggaagaatttgagcgcatctgggaacagtttaaccctacaaagtatacctttttcccaccaaagaaaagtcacggaa

SEQ ID NO: 630706 - DNA, 120 bp, Artificial Sequence
  ENSG00000179598_6 (sequence is synthesized)
gctgtgccccacctgtctccagagctggagggagattgctttcatggcacagaacttgcggcacctccagcgaaagccaaacctaaccaagaatggggctgagccctccctgcgggctgc

SEQ ID NO: 630707 - DNA, 120 bp, Artificial Sequence
  ENSG00000179598_7 (sequence is synthesized)
tgtgcgttctgagggagggagacctcggcactagaaaaaaatcgttaaactaaagtctcgtctattagaatactaaattgaactaaagaaggttaggaaagggaaatttctgttacttcg

SEQ ID NO: 630708 - DNA, 120 bp, Artificial Sequence
  ENSG00000179598_8 (sequence is synthesized)
ggtcagttatttcgggccagacctttttcttgctcctttgccaaaataacttcagtcacgacctgccacggggtgctttcatgagtgtggtccgtatcttggtttggaatcgaaacttct

SEQ ID NO: 630709 - DNA, 120 bp, Artificial Sequence
  ENSG00000179598_9 (sequence is synthesized)
gctacagcacagaaaaggcacagtgcctcttccaggtcgatcccattcccttccctgattctagaaaagtccctcctgctttggctgatgtgggccctttcagcatctccctgagatttc

SEQ ID NO: 630710 - DNA, 120 bp, Artificial Sequence
  ENSG00000179598_10 (sequence is synthesized)
tcacagtctgcccctgtcagggctcggtcctcagagtaaggaaaggaaatggaagtcaggaggaagggaagatgtgagtgtgcggtgcgggtggcaaaagcagccttcggggcaaccccg

SEQ ID NO: 630711 - DNA, 120 bp, Artificial Sequence
  ENSG00000179598_11 (sequence is synthesized)
tgagcgtcattgccaccaaaggctggctgttcccttgattccttgcataattgctctttaaaaccagtatgcacgccagtgccaagctcttcagcagcctgtccttgggtagtaagtgct

SEQ ID NO: 630712 - DNA, 120 bp, Artificial Sequence
  ENSG00000179598_12 (sequence is synthesized)
gccaagctcttcagcagcctgtccttgggtagtaagtgctgtggtctgtcaggactgatggccagcagctgtttctatgttgggcttttaactttttttattttatttatttatttattt

SEQ ID NO: 630713 - DNA, 65 bp, Artificial Sequence
  ENSG00000179598_13 (sequence is synthesized)
cactgcatcctctgcctcctgggttcaacacctggctgattttttttttggtatttttagtagag

SEQ ID NO: 630714 - DNA, 120 bp, Artificial Sequence
  ENSG00000179598_14 (sequence is synthesized)
gccgccatgcccggccgggcttttaacttttaatgtcctaatgttaaggtaattttgttgtgtgtttagaagtgaccttacctttaacacctgtggagttagtgcgtgcacattgctggc

SEQ ID NO: 630715 - DNA, 120 bp, Artificial Sequence
  ENSG00000179598_15 (sequence is synthesized)
tcagcgtaacccatcacgggaccggaggagaggagagcggggaagaggagagcagcttcaggccgtggtgtctcccacgtctgtgttcttatttgcagctcagggtttgcattcccaggt

SEQ ID NO: 630716 - DNA, 120 bp, Artificial Sequence
  ENSG00000179598_16 (sequence is synthesized)
agaacaggtgtcgtacactgtgaaatgttccaggttatttgtttataatgtgtgtgtcatatacagatagctccgatgacatctgaagttgtgacttcatcatcttgtcatatttctgta

SEQ ID NO: 630717 - DNA, 120 bp, Artificial Sequence
  ENSG00000179598_17 (sequence is synthesized)
tgatgagccccagggcccatcctgaggtctgctagccatgtgcttagtctcacctccccagcccacgctggcattaccacccagagacccttcagtgctgtgtgtttttcctttttaggg

SEQ ID NO: 630718 - DNA, 120 bp, Artificial Sequence
  ENSG00000179598_18 (sequence is synthesized)
ttacttttgactcacagtgttaggcaagccagcttggaagttaacttttaaaaaaattcaattgaagctgtaaagtataatatatagattggaagtcaccagaaattgttttagtttgtg

SEQ ID NO: 630719 - DNA, 120 bp, Artificial Sequence
  ENSG00000179598_19 (sequence is synthesized)
aattcccccagtgtatgttctgaaaagaaaatgggagagcttgtaaagcatctcctaaatgcgaagccgcgtgaccctggacttctggcacatctgaataaacatgttcttattctggaa

SEQ ID NO: 630720 - DNA, 120 bp, Artificial Sequence
  ENSG00000179600_0 (sequence is synthesized)
atgaagctggcattcctcttccttggccccatggccctcctccttctggctggctatggctgtgtcctcggtgcctccagtgggaacctgcgcacctttgtgggctgtgccgtgagggag

SEQ ID NO: 630721 - DNA, 120 bp, Artificial Sequence
  ENSG00000179600_1 (sequence is synthesized)
ggccttcggatcaccacggatgcctgctggggtcgctgtgagacctgggagaaacccattctggaacccccctatattgaagcccatcatcgagtctgtacctacaacgagaccaaacag

SEQ ID NO: 630722 - DNA, 120 bp, Artificial Sequence
  ENSG00000179600_2 (sequence is synthesized)
gtgactgtcaagctgcccaactgtgccccgggagtcgaccccttctacacctatcccgtggccatccgctgtgactgcggagcctgctccactgccaccacggagtgtgagaccatctga

SEQ ID NO: 630723 - DNA, 120 bp, Artificial Sequence
  ENSG00000179603_0 (sequence is synthesized)
gatttttaaaaatcagaactattgacatttctggtctcctcgtcgcttcaggctgaagagcggagggggatccgcgggccgagggtccccctccctgcccgcgccagggccgctgggtga

SEQ ID NO: 630724 - DNA, 120 bp, Artificial Sequence
  ENSG00000179603_1 (sequence is synthesized)
caccgaaatccagaggctcccgcccctcgggggttcctcctcccgcttcccgaggtgactggttggcgcgaagcgattggcgatcccgggcgcgatcctggccgcggctccccgcgccgc

SEQ ID NO: 630725 - DNA, 120 bp, Artificial Sequence
  ENSG00000179603_2 (sequence is synthesized)
gccgggtgaatggccgcgggcggaggatcgggaggcgccgggcgcagaccaatcgcggccgccggtgggagtatttgttattcacatggaagagacttggcgcctgctaggccagctcag

SEQ ID NO: 630726 - DNA, 120 bp, Artificial Sequence
  ENSG00000179603_3 (sequence is synthesized)
tcagccccctcagcccagagatcagccacaagtgcggccgctgtgctcgcctcacgcggcggcggcggcggcggcggcggcgctgacatggagctgcgggcccccggcgggcttcctcac

SEQ ID NO: 630727 - DNA, 120 bp, Artificial Sequence
  ENSG00000179603_4 (sequence is synthesized)
ccctctgcggggagcagggaataattctgctacaaggctgatttcaaggacatgaattgttgacctcatcccaacatcagaacctcagatgttctaatttttgcaccattccaggcaagt

SEQ ID NO: 630728 - DNA, 120 bp, Artificial Sequence
  ENSG00000179603_5 (sequence is synthesized)
tgatcttataaggaaataaaattgaaccttaggggtctgatggaaattcactgtgacattcaaatcaagaaaacttgctaatgcccacagagccttttccccatgggccctgatggtagc

SEQ ID NO: 630729 - DNA, 120 bp, Artificial Sequence
  ENSG00000179603_6 (sequence is synthesized)
ctccagaaggtgcagcctcaggtggtgccctttcttctgtggcaagaataaactttgggtcttggattgcaataccacctgtggagaaaatggtatgcgagggaaagcgatcagcctctt

SEQ ID NO: 630730 - DNA, 120 bp, Artificial Sequence
  ENSG00000179603_7 (sequence is synthesized)
gcccttgtttcttcctcttgaccgccaagttctactggatcctcacaatgatgcaaagaactcacagccaggagtatgcccattccatacgggtggatggggacattattttggggggtc

SEQ ID NO: 630731 - DNA, 120 bp, Artificial Sequence
  ENSG00000179603_8 (sequence is synthesized)
tcttccctgtccacgcaaagggagagagaggggtgccttgtggggagctgaagaaggaaaaggggattcacagactggaggccatgctttatgcaattgaccagattaacaaggaccctg

SEQ ID NO: 630732 - DNA, 120 bp, Artificial Sequence
  ENSG00000179603_9 (sequence is synthesized)
atctcctttccaacatcactctgggtgtccgcatcctcgacacgtgctctagggacacctatgctttggagcagtctctaacattcgtgcaggcattaatagagaaagatgcttcggatg

SEQ ID NO: 630733 - DNA, 120 bp, Artificial Sequence
  ENSG00000179603_10 (sequence is synthesized)
tgaagtgtgctaatggagatccacccattttcaccaagcccgacaagatttctggcgtcataggtgctgcagcaagctccgtgtccatcatggttgctaacattttaagactttttaaga

SEQ ID NO: 630734 - DNA, 120 bp, Artificial Sequence
  ENSG00000179603_11 (sequence is synthesized)
tacctcaaatcagctatgcatccacagccccagagctaagtgataacaccaggtatgactttttctctcgagtggttccgcctgactcctaccaagcccaagccatggtggacatcgtga

SEQ ID NO: 630735 - DNA, 120 bp, Artificial Sequence
  ENSG00000179603_12 (sequence is synthesized)
cagcactgggatggaattatgtttcgacactggcttctgaggggaactatggtgagagcggtgtggaggccttcacccagatctcgagggagattggtggtgtttgcattgctcagtcac

SEQ ID NO: 630736 - DNA, 120 bp, Artificial Sequence
  ENSG00000179603_13 (sequence is synthesized)
agaaaatcccacgtgaaccaagacctggagaatttgaaaaaattatcaaacgcctgctagaaacacctaatgctcgagcagtgattatgtttgccaatgaggatgacatcaggaggatat

SEQ ID NO: 630737 - DNA, 120 bp, Artificial Sequence
  ENSG00000179603_14 (sequence is synthesized)
tggaagcagcaaaaaaactaaaccaaagtgggcattttctctggattggctcagatagttggggatccaaaatagcacctgtctatcagcaagaggagattgcagaaggggctgtgacaa

SEQ ID NO: 630738 - DNA, 120 bp, Artificial Sequence
  ENSG00000179603_15 (sequence is synthesized)
ttttgcccaaacgagcatcaattgatggatttgatcgatactttagaagccgaactcttgccaataatcgaagaaatgtgtggtttgcagaattctgggaggagaattttggctgcaagt

SEQ ID NO: 630739 - DNA, 120 bp, Artificial Sequence
  ENSG00000179603_16 (sequence is synthesized)
atttgtaattgatgctgtatattccatggcttacgccctgcacaatatgcacaaagatctctgccctggatacattggcctttgtccacgaatgagtaccattgatgggaaagagctact

SEQ ID NO: 630740 - DNA, 120 bp, Artificial Sequence
  ENSG00000179603_17 (sequence is synthesized)
tggttatattcgggctgtaaattttaatggcagtgctggcactcctgtcacttttaatgaaaacggagatgctcctggacgttatgatatcttccagtatcaaataaccaacaaaagcac

SEQ ID NO: 630741 - DNA, 120 bp, Artificial Sequence
  ENSG00000179603_18 (sequence is synthesized)
agagtacaaagtcatcggccactggaccaatcagcttcatctaaaagtggaagacatgcagtgggctcatagagaacatactcacccggcgtctgtctgcagcctgccgtgtaagccagg

SEQ ID NO: 630742 - DNA, 120 bp, Artificial Sequence
  ENSG00000179603_19 (sequence is synthesized)
ggagaggaagaaaacggtgaaaggggtcccttgctgctggcactgtgaacgctgtgaaggttacaactaccaggtggatgagctgtcctgtgaactttgccctctggatcagagacccaa

SEQ ID NO: 630743 - DNA, 120 bp, Artificial Sequence
  ENSG00000179603_20 (sequence is synthesized)
catgaaccgcacaggctgccagcttatccccatcatcaaattggagtggcattctccctgggctgtggtgcctgtgtttgttgcaatattgggaatcatcgccaccacctttgtgatcgt

SEQ ID NO: 630744 - DNA, 120 bp, Artificial Sequence
  ENSG00000179603_21 (sequence is synthesized)
gacctttgtccgctataatgacacacctatcgtgagggcttcaggacgcgaacttagttacgtgctcctaacggggatttttctctgttattcaatcacgtttttaatgattgcagcacc

SEQ ID NO: 630745 - DNA, 120 bp, Artificial Sequence
  ENSG00000179603_22 (sequence is synthesized)
agatacaatcatatgctccttccgacgggtcttcctaggacttggcatgtgtttcagctatgcagcccttctgaccaaaacaaaccgtatccaccgaatatttgagcaggggaagaaatc

SEQ ID NO: 630746 - DNA, 120 bp, Artificial Sequence
  ENSG00000179603_23 (sequence is synthesized)
tgtcacagcgcccaagttcattagtccagcatctcagctggtgatcaccttcagcctcatctccgtccagctccttggagtgtttgtctggtttgttgtggatcccccccacatcatcat

SEQ ID NO: 630747 - DNA, 120 bp, Artificial Sequence
  ENSG00000179603_24 (sequence is synthesized)
tgactatggagagcagcggacactagatccagagaaggccaggggagtgctcaagtgtgacatttctgatctctcactcatttgttcacttggatacagtatcctcttgatggtcacttg

SEQ ID NO: 630748 - DNA, 120 bp, Artificial Sequence
  ENSG00000179603_25 (sequence is synthesized)
tactgtttatgccattaaaacgagaggtgtcccagagactttcaatgaagccaaacctattggatttaccatgtataccacctgcatcatttggttagctttcatccccatcttttttgg

SEQ ID NO: 630749 - DNA, 120 bp, Artificial Sequence
  ENSG00000179603_26 (sequence is synthesized)
tacagcccagtcagcagaaaagatgtacatccagacaacaacacttactgtctccatgagtttaagtgcttcagtatctctgggcatgctctatatgcccaaggtttatattataatttt

SEQ ID NO: 630750 - DNA, 120 bp, Artificial Sequence
  ENSG00000179603_27 (sequence is synthesized)
tcatccagaacagaatgttcaaaaacgcaagaggagcttcaaggctgtggtgacagctgccaccatgcaaagcaaactgatccaaaaaggaaatgacagaccaaatggcgaggtgaaaag

SEQ ID NO: 630751 - DNA, 120 bp, Artificial Sequence
  ENSG00000179603_28 (sequence is synthesized)
tgaactctgtgagagtcttgaaaccaacacttcctctaccaagacaacatatatcagttacagcaatcattcaatctgaaacagggaaatggcacaatctgaagagatgtggtatatgat

SEQ ID NO: 630752 - DNA, 120 bp, Artificial Sequence
  ENSG00000179603_29 (sequence is synthesized)
cttaaatgatgaacatgagaccgcaaaaattcactcctggagatctccgtagactacaatcaatcaaatcaatagtcagtcttgtaaggaacaaaaattagccatgagccaaaagtatca

SEQ ID NO: 630753 - DNA, 120 bp, Artificial Sequence
  ENSG00000179603_30 (sequence is synthesized)
ataaacggggagtgaagaaacccgttttatacaataaaaccaatgagtgtcaagctaaagtattgcttattcatgagcagttaaaacaaatcacaaaaggaaaactaatgttagctcgtg

SEQ ID NO: 630754 - DNA, 120 bp, Artificial Sequence
  ENSG00000179603_31 (sequence is synthesized)
aaaaaaaatgctgttgaaataaataatgtctgatgttattcttgtatttttctgtgattgtgagaactcccgttcctgtcccacattgtttaacttgtataagacaatgagtctgtttct

SEQ ID NO: 630755 - DNA, 120 bp, Artificial Sequence
  ENSG00000179603_32 (sequence is synthesized)
tgtaatggctgaccagattgaagccctgggttgtgctaaaaataaatgcaatgattgatgcatgcaattttttatacaaataatttatttctaataataaaggaatgttttgcaaatgtt

SEQ ID NO: 630756 - DNA, 120 bp, Artificial Sequence
  ENSG00000179603_33 (sequence is synthesized)
acattacagtaaagaggttcagaaaagagggagactttacccggaactcccaaggcttggagatgtgatcccccaaaagtttagtcggcgaatgggagactgaagggtgacgggaagggg

SEQ ID NO: 630757 - DNA, 120 bp, Artificial Sequence
  ENSG00000179603_34 (sequence is synthesized)
gcaggcgcgctcggcgctctgactgggcgtgcggcggcaggattttaaagcgctctgcctcggatcgtctgccctgggtgacctcccggacctgccctggtggaatccggacttgccccg

SEQ ID NO: 630758 - DNA, 120 bp, Artificial Sequence
  ENSG00000179603_35 (sequence is synthesized)
agacaacactagatggggtggtcagggaaggtctgttgagctgaggctgaaggatgagaaaggccaggaaggacttacttgggaaaatgtttgtggtgatatgtatgagtgctgcaggtg

SEQ ID NO: 630759 - DNA, 120 bp, Artificial Sequence
  ENSG00000179603_36 (sequence is synthesized)
gacatggcagccttcagtagcagtgactcctgcactgacaccaccagtatgagtgggtaagttagtgatgggacagaaacacttctcaagatcttcaggcttggccaaggattatcagcc

SEQ ID NO: 630760 - DNA, 120 bp, Artificial Sequence
  ENSG00000179603_37 (sequence is synthesized)
gaatatggaatgaaagaaggcaaagagcggtatagtttgttctcttccttttctgcaagaagtctggaagtgtgttggctggttgtgtccctctgcaaacaaaggcagcgaggatccagc

SEQ ID NO: 630761 - DNA, 120 bp, Artificial Sequence
  ENSG00000179603_38 (sequence is synthesized)
tccttcccactgttctgtgcttctacccttagcatgtggtctttcttatcagtcagccctcattgtctcctggtagcaggtccagggatcacaagtaaatggtgacatctatagaaaaac

SEQ ID NO: 630762 - DNA, 120 bp, Artificial Sequence
  ENSG00000179603_39 (sequence is synthesized)
tcatctgtagagtttccgatggtcaagagcgggagcacttcctaatagattccacccaggaaaaagcacatgataacaatacacagaaatctgtgctcaaccagtagaatttaactgatc

SEQ ID NO: 630763 - DNA, 120 bp, Artificial Sequence
  ENSG00000179603_40 (sequence is synthesized)
tattgaagcccatcttggtatctatgaaagagtggcaaataatttgaagatttgtatggtaaaataccaggaagctgaatatggtaaacattacaacctttaccttactaggttctacag

SEQ ID NO: 630764 - DNA, 120 bp, Artificial Sequence
  ENSG00000179603_41 (sequence is synthesized)
atgaatcaaaaaagaaagaaaagcaaagcttcctctaccaagacaacatatatcagttacagcaatcattcaatctgaaacagggaaatggcacaatctgaagagatgtggtatatgatc

SEQ ID NO: 630765 - DNA, 120 bp, Artificial Sequence
  ENSG00000179603_42 (sequence is synthesized)
gaccaagaagagcgaagacagtctggagaaaaaaattaagttggaagacatatactaccaagtattgagattcttaacctctagcttgtagaaagaaaaaccttccagaaagagctctct

SEQ ID NO: 630766 - DNA, 120 bp, Artificial Sequence
  ENSG00000179603_43 (sequence is synthesized)
cttcatgaatgttttgctatactatgtcaagttgtttaccaatttctgcttctaatgcagctgtcagatgctcaaactgtctattagtcgaagaggctctctactgaccacctttctcaa

SEQ ID NO: 630767 - DNA, 120 bp, Artificial Sequence
  ENSG00000179603_44 (sequence is synthesized)
gtttcttcttcttacatacaatgtttttgacaagactaagcatatcaaaccatcttttaacaattgtaaagcctaatattggccagcatacaattcaattcattaaacattgtagcactg

SEQ ID NO: 630768 - DNA, 120 bp, Artificial Sequence
  ENSG00000179603_45 (sequence is synthesized)
gttgagctgaggctgaaggatgagaaaggccaggaaggacttacttgggaaaatgtttgtggtgatatgtatgagtgctgcaggtgaaacaaaaaggaagccagtgtagttggatcagca

SEQ ID NO: 630769 - DNA, 120 bp, Artificial Sequence
  ENSG00000179603_46 (sequence is synthesized)
ccaaataactccccaggcacatgactatctgctaagaactgcgttcgagataattcagcttgaacctgtgcctcctactcttgcaccatatctcaaccttgggacccacttctgcctgca

SEQ ID NO: 630770 - DNA, 120 bp, Artificial Sequence
  ENSG00000179603_47 (sequence is synthesized)
atttaattggacaactgttcacacctgctaggtggaaagcataccacagacatctttcattagcactgtagctgcactgtctagaagataatctgagagtgcttgttgaatgaaggaata

SEQ ID NO: 630771 - DNA, 120 bp, Artificial Sequence
  ENSG00000179603_48 (sequence is synthesized)
atgtgatctttgcctcaatggaggcatcatttagaggcattgcccccaaaacactgtgcctgagagagagcatcctgcagttcatgtaatgaaaagacctggcatgagacagtggagcag

SEQ ID NO: 630772 - DNA, 120 bp, Artificial Sequence
  ENSG00000179603_49 (sequence is synthesized)
gatggacatggcagccttcagtagcagtgactcctgcactgacaccaccagtatgagtgggtaagttagtgatgggacagaaacacttctcaagatcttcaggcttggccaaggtactca

SEQ ID NO: 630773 - DNA, 120 bp, Artificial Sequence
  ENSG00000179603_50 (sequence is synthesized)
aatgcatagctgttggagatagcaagaggactacatttttacttattttcttaaaatattccaactcctattctgttttgtgtttaaaaattctagtgtttgcaaatatcttgaaggaac

SEQ ID NO: 630774 - DNA, 120 bp, Artificial Sequence
  ENSG00000179603_51 (sequence is synthesized)
aagaatacactagagtctgggctactaccgcgattgaatacaaatcctgccaactgacagaactggaaaacagggttggtggtggagatacaagaaaaatcatgaacgggagaaaagcat

SEQ ID NO: 630775 - DNA, 120 bp, Artificial Sequence
  ENSG00000179604_0 (sequence is synthesized)
agagggaaacaaacgccggcgctgacaggggccgccagcccctccgccgcgcggagcccacgaaggggacagcgcagccggcccagagctcgggtctccggggaccgagccttatgatct

SEQ ID NO: 630776 - DNA, 120 bp, Artificial Sequence
  ENSG00000179604_1 (sequence is synthesized)
cctcattgcgtccccctctgcccactggacttggacttcagatctgaccccagacctgccggctacctcgggagggcccacctccccgcccatccagcaagatgccaatcctcaagcaac

SEQ ID NO: 630777 - DNA, 120 bp, Artificial Sequence
  ENSG00000179604_2 (sequence is synthesized)
tggtgtccagctcggtgcactccaagcgccgttcccgagcggacctcacggccgagatgatcagcgccccgctgggcgacttccgccacaccatgcacgttggccgggccggagacgcct

SEQ ID NO: 630778 - DNA, 120 bp, Artificial Sequence
  ENSG00000179604_3 (sequence is synthesized)
ttggggacacctccttcctcaatagcaaggctggcgagcccgacggcgagtccttggacgaacagccctcttcttcatcttccaaacgcagtctcctgtccaggaagttccggggcagca

SEQ ID NO: 630779 - DNA, 120 bp, Artificial Sequence
  ENSG00000179604_4 (sequence is synthesized)
agcggtcacagtcggtgaccaggggggagcgggagcagcgtgacatgctgggctccctgcgggactcggccctgtttgtcaagaatgccatgtccctgccccagctcaatgagaaggagg

SEQ ID NO: 630780 - DNA, 120 bp, Artificial Sequence
  ENSG00000179604_5 (sequence is synthesized)
ccgcggagaagggcaccagtaagctgcccaagagcctgtcatccagccccgtgaagaaggccaatgacggggagggcggcgatgaggaggcgggcacggaggaggcagtgccccgtcgga

SEQ ID NO: 630781 - DNA, 120 bp, Artificial Sequence
  ENSG00000179604_6 (sequence is synthesized)
atggggccgcgggtccacattcccctgaccccctcctcgatgagcaggcctttggggatctgacagatctgcctgtcgtgcccaaggccacgtacgggctgaagcatgcggagtccatca

SEQ ID NO: 630782 - DNA, 120 bp, Artificial Sequence
  ENSG00000179604_7 (sequence is synthesized)
tgtccttccacatcgacctggggccctccatgctgggtgacgtcctcagcatcatggacaaggaggagtgggaccccgaggagggggagggtggttaccatggcgatgagggcgccgctg

SEQ ID NO: 630783 - DNA, 120 bp, Artificial Sequence
  ENSG00000179604_8 (sequence is synthesized)
gcaccatcacccaggctcccccgtacgccgtggcggcccctcccctggcaaggcaggaaggcaaggctggcccagacttgccctccctcccctcccatgctctggaggatgaggggtggg

SEQ ID NO: 630784 - DNA, 120 bp, Artificial Sequence
  ENSG00000179604_9 (sequence is synthesized)
cagcagcggcccccagccccggctcagcccgcagcatgggcagccacaccacacgggacagcagctccctctccagctgcacctcaggcatcctggaggagcgcagccctgccttccggg

SEQ ID NO: 630785 - DNA, 120 bp, Artificial Sequence
  ENSG00000179604_10 (sequence is synthesized)
ggccggacagggcccgggctgctgtctcaagacagccagacaaggagttctccttcatggatgaggaggaggaggatgaaatccgtgtgtgaggcggacagtgggtggccaccgggagct

SEQ ID NO: 630786 - DNA, 120 bp, Artificial Sequence
  ENSG00000179604_11 (sequence is synthesized)
cttggctgcatcttctccctgcccccaccccactatgacctttgaccctacggcgcaggggcagccaggacccttgattcagaccatggaccctggaccttgtagatgagggacactggc

SEQ ID NO: 630787 - DNA, 120 bp, Artificial Sequence
  ENSG00000179604_12 (sequence is synthesized)
gggctgtgttgtcacagcaggaataggttttcctctgttggcctccctttcctccaccctggcctcaaatggatgccagatgccaaccccagttctggccacgtacagccagcgggtcag

SEQ ID NO: 630788 - DNA, 120 bp, Artificial Sequence
  ENSG00000179604_13 (sequence is synthesized)
cccagaggcagcctcagctccagggctaaggactctcggctcccattttctctgctggcgtttctgctgtgcccagcagtggctgctggggaagcagctgcagcaggagggagacggtct

SEQ ID NO: 630789 - DNA, 120 bp, Artificial Sequence
  ENSG00000179604_14 (sequence is synthesized)
tgcctctcagcccctccctgccccaccccagctcctgccctggaaatctggagccccttggagctgagctggacggggggccagctgcgagcatgtgcactaaacgcagccctttccagg

SEQ ID NO: 630790 - DNA, 120 bp, Artificial Sequence
  ENSG00000179604_15 (sequence is synthesized)
ggaagagaacaggatggagaatggaaggaaagccccccaggcttcgtgaattgcaagaagggacccttccaggatgacactaggaacagggctagggcactcgctcagtccctaggggct

SEQ ID NO: 630791 - DNA, 120 bp, Artificial Sequence
  ENSG00000179604_16 (sequence is synthesized)
tgtttgttctttattattgtgtttaaatccttatagagcaatatcaggatggtgttaataggtctgcctcagaatgagaatcaatccttttagaaaacctttatactaagcctcctcttc

SEQ ID NO: 630792 - DNA, 120 bp, Artificial Sequence
  ENSG00000179604_17 (sequence is synthesized)
aaaattcacagtggcgattagcggactggagtctggtggcgattagcggactggagtctggggacatccgtggcaaagacaccagctcaactttagtgcttcccaactttatttagaatg

SEQ ID NO: 630793 - DNA, 120 bp, Artificial Sequence
  ENSG00000179604_18 (sequence is synthesized)
acatggggtgggtgtctggtgtgtgtgttttccctacgcacctcccatagctattaacaactgaggaaggccagtgcagaatatttttggagaacgattttttttttaaataatatatca

SEQ ID NO: 630794 - DNA, 120 bp, Artificial Sequence
  ENSG00000179604_19 (sequence is synthesized)
ttcctatggggggaaagccttttttttctttttggctgagttattccctccctcccctcaataccctcagtactgactacttccctttcttttctcaggcctccccccaccgacttttga

SEQ ID NO: 630795 - DNA, 120 bp, Artificial Sequence
  ENSG00000179604_20 (sequence is synthesized)
ggccagggttggccagatttagcaaaaccaaaacagagtgctgagttaaacgcaaatttcaggtaaacaaaagataattttctagcattaatatgccccacgcaatatttggaacactta

SEQ ID NO: 630796 - DNA, 120 bp, Artificial Sequence
  ENSG00000179604_21 (sequence is synthesized)
tgtgaaaaatgatttgtttttctgaaattcacgtttctctctgagtcctgtaactgtccccgaggggattgagcagaagctcgggtatgagccctgaggttgactgccggttatttttct

SEQ ID NO: 630797 - DNA, 120 bp, Artificial Sequence
  ENSG00000179604_22 (sequence is synthesized)
gtcctgggaacagcctgacccacctccctgtctccatgtagccagtgaggggagggggagacacagaaccaaccacagccaggggcgtccccatggcgactgtggcccggcccctcctct

SEQ ID NO: 630798 - DNA, 120 bp, Artificial Sequence
  ENSG00000179604_23 (sequence is synthesized)
cttgcctgactctcctctcttgcctgactctagacactaacttagttccaggttcggtgccctgttggtgctcctgtttccaatagcttaggtcccatggtgggggaggaacctcagggg

SEQ ID NO: 630799 - DNA, 120 bp, Artificial Sequence
  ENSG00000179604_24 (sequence is synthesized)
ctatgcagcccccgccagctgccctcgaatcccgtccaggccaattccagattctaaactgatttttttcatgatattgtcaaaacagtgaggaaacattaaaaaaaaagccctaaagca

SEQ ID NO: 630800 - DNA, 120 bp, Artificial Sequence
  ENSG00000179604_25 (sequence is synthesized)
actccttgaagacagctgctccttcccacaaggggtgttcagtgaatttggggagatcccaagtggattcccaggcatcctggtggacccctgcagggactaggaggggcccgctgtgat

SEQ ID NO: 630801 - DNA, 120 bp, Artificial Sequence
  ENSG00000179604_26 (sequence is synthesized)
catatgggcggtggttctggggcactgccagcttgcagctctgggctctgtgccaggatggcagtgctggcatccaaagccctcccttgccaggaacaggggaactggctgtctccactc

SEQ ID NO: 630802 - DNA, 120 bp, Artificial Sequence
  ENSG00000179604_27 (sequence is synthesized)
acagtgccaggcaagaaggatccctggatgtctgtgctcagccagagctgcttcagccaccatcttctgccttggccatcacggtagcagaggttgtctggggcagcctccacctcccag

SEQ ID NO: 630803 - DNA, 120 bp, Artificial Sequence
  ENSG00000179604_28 (sequence is synthesized)
catgagactctgggttcttcttttgcccagacacctgcagttctggcagtcactgaacttggtctggagaccccagctttgaatctctccaagtgtgccaacaaagccaggttctgtgtg

SEQ ID NO: 630804 - DNA, 120 bp, Artificial Sequence
  ENSG00000179604_29 (sequence is synthesized)
ctggcttctctttcctgcctgtccttcctctctacctcgggtcttcactcagtgcaaccttcttatttccttacactgttgcctccaaccctgaagcatcagaaagggacctgttcccct

SEQ ID NO: 630805 - DNA, 120 bp, Artificial Sequence
  ENSG00000179604_30 (sequence is synthesized)
agagggaaacaaacgccggcgctgacaggggccgccagcccctccgccgcgcggagcccacgaaggggacagcgcagccggcccagagctcgggtctccggggaccgagtttcagggaaa

SEQ ID NO: 630806 - DNA, 120 bp, Artificial Sequence
  ENSG00000179604_31 (sequence is synthesized)
gtgtgtccgaggctactggaactctaaccagatttgcaaaatcactcctctactctgaatgcctgcggatgaagaaacaggcagggttataccatggattgctggcttatttcacagcat

SEQ ID NO: 630807 - DNA, 120 bp, Artificial Sequence
  ENSG00000179604_32 (sequence is synthesized)
aacaggccacaaaggaagggattgctgagctgcggatttctgatttctcccagaaatcgggagttggctgggactgagccaggccctaagagagcccctggcagccccaggggctcctgg

SEQ ID NO: 630808 - DNA, 120 bp, Artificial Sequence
  ENSG00000179604_33 (sequence is synthesized)
ggcaataacagggcatccaccaggatctcctgaggctctatctctgctgagaagccagtgcctactgaatgcgggggtgccctgccggttcctgctctcatcaactgccctgtgtgagct

SEQ ID NO: 630809 - DNA, 120 bp, Artificial Sequence
  ENSG00000179604_34 (sequence is synthesized)
agccagagggaaacaaacgccggcgctgacaggggccgccagcccctccgccgcgcggagcccacgaaggggacagcgcagccggcccagagctcgggtctccggggaccgaggaatggg

SEQ ID NO: 630810 - DNA, 120 bp, Artificial Sequence
  ENSG00000179604_35 (sequence is synthesized)
gtgtgtgtcggtgtgggcaggagcgcagcaatcggcggcgcgcggcccgcgatctccgcgaggggggcgtgtgtgcgcccggagttctccatgaataagaaccgaattctccgcctgtac

SEQ ID NO: 630811 - DNA, 120 bp, Artificial Sequence
  ENSG00000179604_36 (sequence is synthesized)
gtctggaagggaatggccgaaggaacaaatggtcctcctttcccctactcccgccccgcgaacccttccctcccccgccaggctcccgccccgcccgctccctcggaagcccgggaggcc

SEQ ID NO: 630812 - DNA, 120 bp, Artificial Sequence
  ENSG00000179604_37 (sequence is synthesized)
gaggcgcctcctggcggggtgcggggggagggcagtcgagccacccgcccccttggagccggggagacggccgctcctgggctagtgcgccccgagctcagcgcgctcagcgggatcgca

SEQ ID NO: 630813 - DNA, 120 bp, Artificial Sequence
  ENSG00000179604_38 (sequence is synthesized)
gagcggtcggttaatgatttaatcgcccgcttggggcgggtgcgcgcggatcggccgtccctggccccgccccctctccggagcgcccccagccggggttacaaaactgccccctgcccc

SEQ ID NO: 630814 - DNA, 120 bp, Artificial Sequence
  ENSG00000179615_0 (sequence is synthesized)
atgaaaaataaaaccgtgttaactgagtttatccttctgggtctaacagatgtccctgaactccaggtggcagttttcacctttcttttccttgcgtatttactcagcatccttggaaat

SEQ ID NO: 630815 - DNA, 120 bp, Artificial Sequence
  ENSG00000179615_1 (sequence is synthesized)
ctgactatcctcatcctcaccttgctggactcccaccttcagactcccatgtatttctttctccggaacttctccttcttggaaatttccttcacaaacatcttcattccaagggtcctg

SEQ ID NO: 630816 - DNA, 120 bp, Artificial Sequence
  ENSG00000179615_2 (sequence is synthesized)
attagcatcacaacagggaacaagagtatcagctttgctggctgcttcactcagtatttctttgccatgttccttggggctacagagttttaccttctggctgccatgtcctatgaccgc

SEQ ID NO: 630817 - DNA, 120 bp, Artificial Sequence
  ENSG00000179615_3 (sequence is synthesized)
ctaatggctattataccaacaatcaccctgatgagtcagcaggacttttgtgcatccaacagactgaatcattacttctgtgactatgagcctcttctggaactctcatgttcagacaca

SEQ ID NO: 630818 - DNA, 120 bp, Artificial Sequence
  ENSG00000179615_4 (sequence is synthesized)
agcctcatagagaaggttgtctttcttgtggcatctgtgaccctggtggtcactctggtgctagtgattctctcctatgcattcattatcaagactattctgaagctcccctctgcccaa

SEQ ID NO: 630819 - DNA, 120 bp, Artificial Sequence
  ENSG00000179615_5 (sequence is synthesized)
caaaggacaaaagccttttccacatgttcttcccacatgattgtcatctccctctcttacggaagctgcatgtttatgtacattaatccctctgcaaaagaaggggatacattcaacaag

SEQ ID NO: 630820 - DNA, 120 bp, Artificial Sequence
  ENSG00000179615_6 (sequence is synthesized)
ggagtagctctactcattacttcagttgctcctttgttgaacccctttatttacaccctaaggaaccaacaggtaaaacaacccttcaaggatatggtcaaaaagcttctgaatctttaa

SEQ ID NO: 630821 - DNA, 120 bp, Artificial Sequence
  ENSG00000179615_7 (sequence is synthesized)
gaatatttaggattaaaatctcacaatagtcatttggatagtcaagtcaggaagtatgttacctgtttatagcttcatttattttacttctctggagttgtaaagactgaaactgatgca

SEQ ID NO: 630822 - DNA, 120 bp, Artificial Sequence
  ENSG00000179615_8 (sequence is synthesized)
gatgtgaatattcaaccactccctgaagactccagggcaaatgggactgggaaggatccaacatcattcaaatgggccactggtctggactatgtcatcagaggagaagttaatcatcca

SEQ ID NO: 630823 - DNA, 120 bp, Artificial Sequence
  ENSG00000179626_0 (sequence is synthesized)
ttgcctttaggttttccgaaggtcaacaatgaaaaacagaaccatgtttggtgagtttattctactgggccttacaaatcaacctgaactccaagtgatgatattcatctttctgttcct

SEQ ID NO: 630824 - DNA, 120 bp, Artificial Sequence
  ENSG00000179626_1 (sequence is synthesized)
cacctacatgctaagtatcctaggaaatctgactattatcaccctcaccttactagacccccacctccagacccccatgtatttcttcctccggaatttctccttcttagaaatttcctt

SEQ ID NO: 630825 - DNA, 120 bp, Artificial Sequence
  ENSG00000179626_2 (sequence is synthesized)
cacatccatttttattcccagatttctgaccagcatgacaacaggaaataaagttatcagctttgctggctgcttgactcagtatttttttgctatatttcttggagctaccgagtttta

SEQ ID NO: 630826 - DNA, 120 bp, Artificial Sequence
  ENSG00000179626_3 (sequence is synthesized)
cctcctggcctccatgtcttatgatcgttatgtggccatctgcaaacccttgcattacctgactattatgagcagcagagtctgcatacaactagtgttctgctcctggttggggggatt

SEQ ID NO: 630827 - DNA, 120 bp, Artificial Sequence
  ENSG00000179626_4 (sequence is synthesized)
ggcctctcgtggagcttgcctgctcagacacaagcctcttagaactgatggtcatcctcttggccgttgtgactctcatggttactctggtgctggtgacactttcttacacatacatta

SEQ ID NO: 630828 - DNA, 120 bp, Artificial Sequence
  ENSG00000179626_5 (sequence is synthesized)
tcaggactattctgaggatcccttctgcccagcaaaggacaaaggccttttccacttgttcctcccacatgattgtcatctccctctcttatggcagctgcatgtttatgtacattaatc

SEQ ID NO: 630829 - DNA, 120 bp, Artificial Sequence
  ENSG00000179626_6 (sequence is synthesized)
cttctgcaaaagaaggaggtgctttcaacaaaggaatagctgtactcattacttcggttactcccttactgaatcccttcatatatactttaagaaatcagcaagtgaaacaagctttca

SEQ ID NO: 630830 - DNA, 120 bp, Artificial Sequence
  ENSG00000179626_7 (sequence is synthesized)
aggactcagtcaaaaagattgtgaaactttaaaaaaggagattacacttcaaaatacattttcacttaacaaatatgcattgaatgtctatatttcaagtgctaaattggcccttgaaga

SEQ ID NO: 630831 - DNA, 120 bp, Artificial Sequence
  ENSG00000179626_8 (sequence is synthesized)
agatgcccatcctctgccatctaagaacttcaacataatctctcttagaacataaattttcagaaattttctgtctctcaaagtattttcttccaattcaataactgctatgggctttgt

SEQ ID NO: 630832 - DNA, 120 bp, Artificial Sequence
  ENSG00000179626_9 (sequence is synthesized)
ttttattttttattacctatgtgaagttctctgtctctcaggaactatgatttgattctggattggattcttagaatggaaaataatatgctcttttttctggttaagttccataagttt

SEQ ID NO: 630833 - DNA, 120 bp, Artificial Sequence
  ENSG00000179626_10 (sequence is synthesized)
ggatacttctattaagagaaaggtaaaatgtggatggaagccaatagaaaacatgttaaagtatatactactcaaagattcacgtggcacatctcatctttgatttacctcttaggaaca

SEQ ID NO: 630834 - DNA, 120 bp, Artificial Sequence
  ENSG00000179626_11 (sequence is synthesized)
acaaggtaaacagtatactatagtcattcaggttgtcaaaggtatgagcaacatatgtttttaaagtcactgattttatcattctataaatgtggatcatgaaatgaatcaactgtgaaa

SEQ ID NO: 630835 - DNA, 120 bp, Artificial Sequence
  ENSG00000179626_12 (sequence is synthesized)
tggcccttgaagattaaaataggaaaagtatatgtcttaatttcaagaaaactatagtctagaatcaaggaaagatatataaatggtaaatttatgtaataaatttacaaaaaacaaaat

SEQ ID NO: 630836 - DNA, 120 bp, Artificial Sequence
  ENSG00000179626_13 (sequence is synthesized)
agaagagtgaatggggatctgaaaaggaacagttggaaagaattagttctgttttccataaattatttgaaatttaagaagcaaaacagattgtttatttagaagagtaggaggataaga

SEQ ID NO: 630837 - DNA, 120 bp, Artificial Sequence
  ENSG00000179626_14 (sequence is synthesized)
atttagagtgaaaaaggaaaccagatcataaaagtaagtaattacaactactgagttagctgggtttcatgagtcaagaaattttcagaattgttttgaggagaatgtagtatcagcatt

SEQ ID NO: 630838 - DNA, 120 bp, Artificial Sequence
  ENSG00000179626_15 (sequence is synthesized)
gttcttcagcatggagccctggagactatgtttccatcgaggagtgaataatttttcttctcctccattttttcatctatatttcaaatgtaaccattgcaacttccctcctttcataag

SEQ ID NO: 630839 - DNA, 120 bp, Artificial Sequence
  ENSG00000179626_16 (sequence is synthesized)
aggaaaatgaaagaatatatatttagtctacttttctccaaatgaggagaaaatttttaagatttttgtcaacttaatatgtccattttctagtttatggttaaaacaggtttctagaga

SEQ ID NO: 630840 - DNA, 120 bp, Artificial Sequence
  ENSG00000179626_17 (sequence is synthesized)
caagtttagaaggctttcattctcctagacaaaatctattgtttcttttcttaggtgacattttaagttaatggcatgagatctgttttctctctctttgatagtttctggtaatttttt

SEQ ID NO: 630841 - DNA, 120 bp, Artificial Sequence
  ENSG00000179626_18 (sequence is synthesized)
ccttcctatcatgattttattttcatccttttgtttcactttattagatattagaaaagaaaattctgttatctggctctacttctttaactttcccccagatttttgctttcgtttgta

SEQ ID NO: 630842 - DNA, 120 bp, Artificial Sequence
  ENSG00000179626_19 (sequence is synthesized)
acataaaccatggatgaccattttataaagtaaaaagaatataaagtgtcaatgcaatcttatatctagaatgttccaaattatgagtcttgaaaaacaactagaaatagactatcctac

SEQ ID NO: 630843 - DNA, 120 bp, Artificial Sequence
  ENSG00000179626_20 (sequence is synthesized)
gcatttgtacacagtttaataatatcttaaaaaattgcaggagctttgttactatttggggtaaaagtggaacacaatctggtattttcacatgctttatatgtggtaatatgttgagta

SEQ ID NO: 630844 - DNA, 120 bp, Artificial Sequence
  ENSG00000179626_21 (sequence is synthesized)
aaatgaggtacttctcaagcatttaaggaacaagctggattgaactgattatgagagcaaattatcagagccacagaaggtattggagaatgtataatatttttgaaaaagtattttatg

SEQ ID NO: 630845 - DNA, 120 bp, Artificial Sequence
  ENSG00000179626_22 (sequence is synthesized)
taaagctgttgctattctgagtatcttgttttctttggttgctagctagagattagtgataatattcaatatattccaaatttaatgcactacaagaacaagaagtgttcttgaatagcc

SEQ ID NO: 630846 - DNA, 120 bp, Artificial Sequence
  ENSG00000179626_23 (sequence is synthesized)
acatctaaatcattaagttcccctacacccacatttctactaaaacctatggtacagtgggagcaatgtcatatagtggcttaaaacataggctttagttcaaatcccagattttcaact

SEQ ID NO: 630847 - DNA, 120 bp, Artificial Sequence
  ENSG00000179626_24 (sequence is synthesized)
ttctaccaaagttacctggggatagttacttgatctctctaaggctcacctctgtcaactctaaaatgtttacaataatagtgtctatcttatagttttgagcattcactgagaaaatag

SEQ ID NO: 630848 - DNA, 120 bp, Artificial Sequence
  ENSG00000179626_25 (sequence is synthesized)
atgtaaaatattaaaagacagccagtatttattgtgtttaataaatgacatctattataactatattataaacaatatatttttcaaggaactggagcttaactagaaagaaggcattaa

SEQ ID NO: 630849 - DNA, 120 bp, Artificial Sequence
  ENSG00000179626_26 (sequence is synthesized)
attggttggtttaatatagcagggacagtaaaaatgttggccattgtacttgaaatccatctgcacaaggccagcatatttctactctccacacatccagctgcatgctgggtagctggg

SEQ ID NO: 630850 - DNA, 120 bp, Artificial Sequence
  ENSG00000179626_27 (sequence is synthesized)
tcagcaaagatcttacctactcttcagataaagccatcaaaatacttggcagcaggttataagaactgggctagcatcaacttcattgccctagatatctatgggagagacaggatgtat

SEQ ID NO: 630851 - DNA, 120 bp, Artificial Sequence
  ENSG00000179626_28 (sequence is synthesized)
taacatgctgagacaaggaaggaaggtactttgtgtaagttaatgtttaagatcactaggcaagagttcactcagcattctttatataagcatttggaaatgaacatggaaaagaatgta

SEQ ID NO: 630852 - DNA, 120 bp, Artificial Sequence
  ENSG00000179626_29 (sequence is synthesized)
tcaccttctaaatgagcttgtcaaaaaaaaaaaagcaagtcatattcttctaaagctgttcatctagtctggctgtatgttaattcatacttggaatgtaatccaagtcatagataagca

SEQ ID NO: 630853 - DNA, 120 bp, Artificial Sequence
  ENSG00000179626_30 (sequence is synthesized)
aaaggaatgacttcacagagtctggtgctgagctaccagaatattcagtatctaaatatataaaatggtgagtttgattcctcatgtcaccaaagtggacaagaattaaaagaaacagct

SEQ ID NO: 630854 - DNA, 120 bp, Artificial Sequence
  ENSG00000179626_31 (sequence is synthesized)
ttagctgcctaacattctcagaatcatattataccagtgctagggtgaggagactatgaaaatgagtaaaagccaatctgctacatttgggcattcattcttctattgcctctctttaaa

SEQ ID NO: 630855 - DNA, 120 bp, Artificial Sequence
  ENSG00000179626_32 (sequence is synthesized)
gctgccagagcttgtggatatatggattacaattctaaacaggtagtcttccagcatcatttcttgcaaagagttttaaataaaattcaaaacaataaaatatattttttaatttttttt

SEQ ID NO: 630856 - DNA, 81 bp, Artificial Sequence
  ENSG00000179626_33 (sequence is synthesized)
agttcaagaacagcctggccaacacagtgaaaccccgtttctactattacattgatagaaaagtaattgtggtttttgcta

SEQ ID NO: 630857 - DNA, 120 bp, Artificial Sequence
  ENSG00000179626_34 (sequence is synthesized)
gtgcctgtaattccagctactgggaaggctgaagcacaagaatcacttggagtacaagtggccttttgttacatcagtgaattaaatagtggtgaattctgggattttagtgcacctgtc

SEQ ID NO: 630858 - DNA, 120 bp, Artificial Sequence
  ENSG00000179626_35 (sequence is synthesized)
acccaagtagtatacattggacctaagctgtagtttttttatccctagccccctcccatcattccccttctgagtctctaaagttcattataccactctgtgtgcctttgcatactcata

SEQ ID NO: 630859 - DNA, 120 bp, Artificial Sequence
  ENSG00000179626_36 (sequence is synthesized)
gcttagctcccacttacgagtgagaacatacttataagtgagaacatagtttttggttttccactcccgtattacttcacttagaataacgacttccagctccatccaaactgctgcaaa

SEQ ID NO: 630860 - DNA, 90 bp, Artificial Sequence
  ENSG00000179626_37 (sequence is synthesized)
ttagaataacgacttccagctccatccaaactgctgcaaaatacattcttttgttcctttccaggccaaatttgggaggctgaggagggt

SEQ ID NO: 630861 - DNA, 85 bp, Artificial Sequence
  ENSG00000179626_38 (sequence is synthesized)
acttgaaccagggaggcagaggttgtagtgagctgagtttatgccactgtactccagcataaaataaaataataaaaaatgttgc

SEQ ID NO: 630862 - DNA, 120 bp, Artificial Sequence
  ENSG00000179627_0 (sequence is synthesized)
ctttccgcgctgcctgcagccgggaagggcgcttcgtgggcgcctccaggcgcgctgacgggcgtcccgtttgtgcccaggtgatgacggcggcggcatggagttccctgagcacggcgg

SEQ ID NO: 630863 - DNA, 120 bp, Artificial Sequence
  ENSG00000179627_1 (sequence is synthesized)
acggctgctgggccgcctgagacagcagcgcgagctgggcttcctatgcgactgcaccgtgctggtgggcgacgcgcgcttcccggcccaccgtgccgtgctggccgcgtgcagcgtcta

SEQ ID NO: 630864 - DNA, 120 bp, Artificial Sequence
  ENSG00000179627_2 (sequence is synthesized)
cttccatctcttctacagggaccggcccgcgggcagtcgcgacacggtgcggctcaacggcgacatcgtcacggcgcccgccttcggccgcctactggacttcatgtacgagggccgcct

SEQ ID NO: 630865 - DNA, 120 bp, Artificial Sequence
  ENSG00000179627_3 (sequence is synthesized)
ggacctgcgcagcctgcctgtggaggacgtcctggcagccgccagctacctgcacatgtatgacatcgtcaaggtctgcaagggcaggctccaggagaaggatcgaagtctggacccggg

SEQ ID NO: 630866 - DNA, 120 bp, Artificial Sequence
  ENSG00000179627_4 (sequence is synthesized)
gaaccctgcccctggggcagaacctgctcagccaccgtgcccctggcctgtctggaccgcggacctctgcccagctgcccgaaaggccaagctccccccgtttggggtcaaggctgccct

SEQ ID NO: 630867 - DNA, 120 bp, Artificial Sequence
  ENSG00000179627_5 (sequence is synthesized)
ccctcctcgagcatctgggcctcctccctgccaggtcccagaagagtcagaccaggccctggacctgtcgttgaagtctggcccaaggcaggagcgggtccacccaccgtgcgtcctcca

SEQ ID NO: 630868 - DNA, 120 bp, Artificial Sequence
  ENSG00000179627_6 (sequence is synthesized)
gacacccctctgcagccagaggcagccaggggcccagccactggtgaaggacgaacgggactcactgtccgaacaggaggagagcagcagctctaggagcccccacagtcccccgaagcc

SEQ ID NO: 630869 - DNA, 120 bp, Artificial Sequence
  ENSG00000179627_7 (sequence is synthesized)
acctcctgttcctgcagccaagggcctggtggtgggcttgcagccgctgcccctcagcggagagggcagccgggagctggagcttggtgcagggcgactggcgagtgaggacgagctggg

SEQ ID NO: 630870 - DNA, 120 bp, Artificial Sequence
  ENSG00000179627_8 (sequence is synthesized)
gcctggtgggcccctctgcatctgcccgttgtgcagcaagctgtttcccagctcccacgtgctgcagctgcacctcagtgcccacttccgtgagcgagacagcacccgggcccggctctc

SEQ ID NO: 630871 - DNA, 120 bp, Artificial Sequence
  ENSG00000179627_9 (sequence is synthesized)
acccgacggcgtggcacccacctgcccgctctgtgggaagaccttctcgtgcacatacacactgaagaggcacgagcggacacactcgggtgagaagccctatacgtgtgtgcagtgtgg

SEQ ID NO: 630872 - DNA, 120 bp, Artificial Sequence
  ENSG00000179627_10 (sequence is synthesized)
caaaagttttcagtactcccacaacctgagccggcacaccgtagtgcacactcgagagaagccgcatgcctgccggtggtgtgagcgccgtttcacgcagtccggggacctctaccgcca

SEQ ID NO: 630873 - DNA, 120 bp, Artificial Sequence
  ENSG00000179627_11 (sequence is synthesized)
cgtccgcaagtttcactgtggcctcgtcaagtcccttctggtgtgatgcatccctgtgggtcctgagggtggggtggaagggaagggatgggccctcccaggtgggacacagcatggggt

SEQ ID NO: 630874 - DNA, 120 bp, Artificial Sequence
  ENSG00000179627_12 (sequence is synthesized)
gtgaagcctgaccaggtggaggtccctgcttgggccagatggctccaccctcctggcagagagaatgctgcctcttcctggaacttggcctcagactcggtaacttgggcagccttcctc

SEQ ID NO: 630875 - DNA, 120 bp, Artificial Sequence
  ENSG00000179627_13 (sequence is synthesized)
ccaccttgcctctcctttcccctcactctccaactcattccggcccccaggctgtgccctgcctaggctgtgacactatcttcctctcccgtcccctccagccaagttctgaggggtgtc

SEQ ID NO: 630876 - DNA, 120 bp, Artificial Sequence
  ENSG00000179627_14 (sequence is synthesized)
caaccagcacctggctctgcccccgtttctccgtgtgagatggcacatccatctcccggcccgggactttcctgaccacctctctggcaggcttggggaggtcttcatgagcctggcccc

SEQ ID NO: 630877 - DNA, 120 bp, Artificial Sequence
  ENSG00000179627_15 (sequence is synthesized)
ttattcacatgtcagaaaagttgttggtgtgcgtcccaatggggcgctgggagggaacaggacactcctggggagcggcagcaggaacccctgccaggaaggcctggggcacagtgagtg

SEQ ID NO: 630878 - DNA, 120 bp, Artificial Sequence
  ENSG00000179627_16 (sequence is synthesized)
ccagcaggggccatctgggcacagctggtgtctcggggtgggggggggggtgcagccccagcagggatcctaaggcagcaggagtagagccagctagaagctgagtggctgtggcatcat

SEQ ID NO: 630879 - DNA, 120 bp, Artificial Sequence
  ENSG00000179627_17 (sequence is synthesized)
tgtcactcgggtgggacgtgggtccatgagagcgtgcaattatgaccacactgtaactttgagcagagaaagtgggaatttggaactggattctctttagagccaggaagagcctcctga

SEQ ID NO: 630880 - DNA, 120 bp, Artificial Sequence
  ENSG00000179627_18 (sequence is synthesized)
ggcggccagatgtctgctggtggccgcccagccacatgcttgtctgcctgagtgcaggtctaggaagcctctgggcatcccccagggtggggtctgggccgctgagctgtgtgctgctgc

SEQ ID NO: 630881 - DNA, 120 bp, Artificial Sequence
  ENSG00000179627_19 (sequence is synthesized)
tgggccaccgtgggccttaccttgacggtcactctgcctgctagggggtttccctggagctgtgggcatttccgtgcactgactgagcagaggcaagggctgccctgtccgccaggggca

SEQ ID NO: 630882 - DNA, 120 bp, Artificial Sequence
  ENSG00000179627_20 (sequence is synthesized)
gggtttgcgggccttcctttccccacggcgaggcatgggtgaaagtggccatggcggcagggttaggggcaggtgaggagtgggagtcgcagcaccctaggggcctccatccgcagcctt

SEQ ID NO: 630883 - DNA, 120 bp, Artificial Sequence
  ENSG00000179627_21 (sequence is synthesized)
gggagactgacgctcctcgaacatgaatagaatgtggagaccacaacccccacacatgtcgttggttcaggtcgccctgctttgcctgcctaatggagcacatcttgctgccagaacctc

SEQ ID NO: 630884 - DNA, 120 bp, Artificial Sequence
  ENSG00000179627_22 (sequence is synthesized)
actggcctctgggggtcggcaggtgcagagccacctggacgcctggagaccacctgggatgtttcctctgtgactgggaatggccttgacaacagagtccagccaagtctacgttatttt

SEQ ID NO: 630885 - DNA, 120 bp, Artificial Sequence
  ENSG00000179627_23 (sequence is synthesized)
ctcatctcctgacaacactggatgtcatatttattagtcagcctggtctggagtgaaagaccgtccctagcgcatctcccacgcgccctgggctcctggtgtgctgggtgccagcctggg

SEQ ID NO: 630886 - DNA, 120 bp, Artificial Sequence
  ENSG00000179627_24 (sequence is synthesized)
agcccagcgcttctgggtgatgccccagggctcagaggccctggatggctttggtctcgagacagctgggggaggggccctgcttctgattgtcctgggccccagcccccacctctgcaa

SEQ ID NO: 630887 - DNA, 120 bp, Artificial Sequence
  ENSG00000179627_25 (sequence is synthesized)
gtgtgtgtgtgtgtgtgtgtgtatgtatgcatgcgtctggcacatggcaaggcccaagccaacccggcaccccgtagatgggcagctacactgccacccaagcacggagatgtggccgcg

SEQ ID NO: 630888 - DNA, 120 bp, Artificial Sequence
  ENSG00000179627_26 (sequence is synthesized)
ggcagctacactgccacccaagcacggagatgtggccgcggcactgggtcccccagtgggtcccatgggggaagaacttccctttgctggggtgggcagcctgccctgagctatcaacac

SEQ ID NO: 630889 - DNA, 120 bp, Artificial Sequence
  ENSG00000179627_27 (sequence is synthesized)
tggatttgttgtcttctgcacagctactgtgaagataacgtaaggagaagtggtcagttttcattttataactgacacagttgggacaaaatatatacgtgtacatatatttaagacact

SEQ ID NO: 630890 - DNA, 120 bp, Artificial Sequence
  ENSG00000179627_28 (sequence is synthesized)
aattgtgtgggagagtttagtagaggcctgtgcagacacaaggcaaacagcgtcagcagcgtgggggtctcctgggccagctcggcacctgtgggtgctctgaccctgggggtggggaca

SEQ ID NO: 630891 - DNA, 120 bp, Artificial Sequence
  ENSG00000179627_29 (sequence is synthesized)
gctccgtgctaaccccagcagacagttgttggtgcacagtgtctaggaggcgtgggaatgggtgctgtcttcctcttttcacatcatggcgacagtaataaagcccacctccagtggaaa

SEQ ID NO: 630892 - DNA, 80 bp, Artificial Sequence
  ENSG00000179627_30 (sequence is synthesized)
ccagggccgccctggggagggcgcgcgcgcgagcggcgaccggagaggagctcggggcggcggaggtgatgacggcggcg

SEQ ID NO: 630893 - DNA, 120 bp, Artificial Sequence
  ENSG00000179630_0 (sequence is synthesized)
aatttcgttgaggctcaggacgagggacggggcggcaaattgtcacagaggtcgccgtagaccggtgtgcaaccgaaggtgaagagcgggaaggcgaggaccgaatcgcctctggtgtgc

SEQ ID NO: 630894 - DNA, 120 bp, Artificial Sequence
  ENSG00000179630_1 (sequence is synthesized)
gttgtccgacaggaagtcccgaatgggctgtgagccgccggtggaggtgcccgggcaggtgcagagccacagcctgcgccccgtgagccgaggcgggtgatttatttggcataaaagtat

SEQ ID NO: 630895 - DNA, 120 bp, Artificial Sequence
  ENSG00000179630_2 (sequence is synthesized)
tctttcaaggatggcagaagctgttttgattgatctttttggtttgaaattgaactctcaaaaaaactgccatcagacattactgaagactttgaatgctgtccaataccaccatgctgc

SEQ ID NO: 630896 - DNA, 120 bp, Artificial Sequence
  ENSG00000179630_3 (sequence is synthesized)
caaggccaagtttctctgtataatgtgttgcagtaacatcagctatgaaagggatggagaacaagataattgtgaaatagaaacaagcaatggattatcagctctcttggaagaatttga

SEQ ID NO: 630897 - DNA, 120 bp, Artificial Sequence
  ENSG00000179630_4 (sequence is synthesized)
gattgttagctgtcccagcatggctgccactttgtataccattaaacagaaaattgatgaaaaaaatctgagcagcattaaggtaattgtacccaggcacaggaagacattaatgaaagc

SEQ ID NO: 630898 - DNA, 120 bp, Artificial Sequence
  ENSG00000179630_5 (sequence is synthesized)
ttttattgatcaactcttcactgatgtttacaattttgaatttgaagatttgcaagtgacttttaggggagggctttttaaacagtccattgaaataaacgtaatcacagctcaagaact

SEQ ID NO: 630899 - DNA, 120 bp, Artificial Sequence
  ENSG00000179630_6 (sequence is synthesized)
aagaggaattcagaatgaaatagaaacatttttgagaagtctgccagcactgagaggaaaattaactattatcacttcttctttgatcccagatattttcatacatggatttactacaag

SEQ ID NO: 630900 - DNA, 120 bp, Artificial Sequence
  ENSG00000179630_7 (sequence is synthesized)
aacaggtgggatatcttatataccaactcttagctcattcaatctcttcagtagttccaaacggagagatcccaaggtagtggttcaagaaaatctgcgtaggttggcgaatgctgcagg

SEQ ID NO: 630901 - DNA, 120 bp, Artificial Sequence
  ENSG00000179630_8 (sequence is synthesized)
atttaatgtggagaaattttaccgaataaagactcatcattccaatgacatctggattatgggaagaaaggagcctgactcttatgatggaataaccacaaatcagagaggagtcacaat

SEQ ID NO: 630902 - DNA, 120 bp, Artificial Sequence
  ENSG00000179630_9 (sequence is synthesized)
agcagctcttggtgcagactgtataccgatagtttttgcagatccagtcaaaaaagcatgtggggttgctcacgctggttggaaaggtactttgttgggtgttgctatggctacagtgaa

SEQ ID NO: 630903 - DNA, 120 bp, Artificial Sequence
  ENSG00000179630_10 (sequence is synthesized)
tgctatgatagcagaatatggctgcagtttggaagacattgttgttgtacttggaccttcagtaggaccttgctgttttactcttccaagggaatcagcagaggcatttcataatcttca

SEQ ID NO: 630904 - DNA, 120 bp, Artificial Sequence
  ENSG00000179630_11 (sequence is synthesized)
tcctgcatgtgtacaactatttgattcaccaaatccctgtatcgacatccgtaaagccacaaggattcttctagaacagggaggaattcttccacagaatattcaggaccagaaccaaga

SEQ ID NO: 630905 - DNA, 120 bp, Artificial Sequence
  ENSG00000179630_12 (sequence is synthesized)
tctcaacctctgtacatcttgccatcctgacaagtttttctcccatgtccgagatggccttaattttggtacacagattggcttcatatcaattaaagaatgagatacttgactggattt

SEQ ID NO: 630906 - DNA, 120 bp, Artificial Sequence
  ENSG00000179630_13 (sequence is synthesized)
ttgtataactgcttcctgcctccttccaaactgactgcaagagagaaatttagctgtttgatttacttaaaaccaaatggattacaatggataattcatcttttgggtatatttttacta

SEQ ID NO: 630907 - DNA, 120 bp, Artificial Sequence
  ENSG00000179630_14 (sequence is synthesized)
ttattcaaagccaaatgattttcatttaattgtaataataactgacaaaaatcagtatgttgtagctaatatgttttatgcatgagaattattcttaaagtttgttctccctgtttatta

SEQ ID NO: 630908 - DNA, 120 bp, Artificial Sequence
  ENSG00000179630_15 (sequence is synthesized)
cacagatcaggaatagatttgttcagttcagtatttattggataccctctattggtcaggcattgtgttaagcatatgtgaatcaaaatgaacacaactttttcctttgagtctgataca

SEQ ID NO: 630909 - DNA, 120 bp, Artificial Sequence
  ENSG00000179630_16 (sequence is synthesized)
agaggttaattttacccagaagcaggatagagaaaatattacagagaaaatcacatatcacatgggctcgaaagatgtagaggtttttgacaaatgaagaacaaccataacaggtagagg

SEQ ID NO: 630910 - DNA, 120 bp, Artificial Sequence
  ENSG00000179630_17 (sequence is synthesized)
gaacaccatgaaccagggcatgaaactgaaagtgcataacatattctagagagagaagggtgtgggcatgagttagggctggaaaaacaggttggaaacagataagtaagggtctcaaat

SEQ ID NO: 630911 - DNA, 120 bp, Artificial Sequence
  ENSG00000179630_18 (sequence is synthesized)
gcaatgtcaaagagcttgcagtttattttccaggcaatgagtaggcagccaaaaaaaaaaaagtaaggatgttttttttttttttcccatggcatcatatttaagaggatggatttaaat

SEQ ID NO: 630912 - DNA, 120 bp, Artificial Sequence
  ENSG00000179630_19 (sequence is synthesized)
tgtgtgagaccaaagcatagagactagataagaggcgatcaaaatatttcaaaaagaaataatgaagatccaatgaaggaagtggaaattaaaatagggaagagagtagatggattagag

SEQ ID NO: 630913 - DNA, 120 bp, Artificial Sequence
  ENSG00000179630_20 (sequence is synthesized)
agacatttaagagatggaatcaatagatcctgttactagataatggaagtaagaggtgaggaagagtggaaaagtcattaatgactctaagatttctgcttggctgcttaccaagattgg

SEQ ID NO: 630914 - DNA, 120 bp, Artificial Sequence
  ENSG00000179630_21 (sequence is synthesized)
caacaaagggagggagaaggtttggaaaaagagagaaggataatgagtttgactttacatagaatgaagggcatccagatagaaatctttggttaataattagaaatatagacctagaaa

SEQ ID NO: 630915 - DNA, 120 bp, Artificial Sequence
  ENSG00000179630_22 (sequence is synthesized)
ttaggaggaaacctgagacagagacaaatatttcaaagcttacaatacagagatgatacctgattctattggagcaggtttgatcatctaggcagaaattaggatgagaaaaaaggagat

SEQ ID NO: 630916 - DNA, 120 bp, Artificial Sequence
  ENSG00000179630_23 (sequence is synthesized)
ccaataatacaaccttatagtcacagaagtaagaaaaaaagggtagttgttttgaagaagccaggataggtgtggaaagtactcaaaaagaaatcttcagggataaaataaagtgataat

SEQ ID NO: 630917 - DNA, 120 bp, Artificial Sequence
  ENSG00000179630_24 (sequence is synthesized)
ttaaaagaaatcaatggattaaacatattgaaactgttctataggcagtggtcattgagtcagctttcagtgcattaggaagaagatgcataggtgtcaactcttttctgacagcattta

SEQ ID NO: 630918 - DNA, 120 bp, Artificial Sequence
  ENSG00000179630_25 (sequence is synthesized)
ctagagaagagaaaaagctggggactacatcttcaaggaagggactttttttggatgagcagttttgagtgtgtttgtcagttaaagagaggaattaggttagttttcatttgggaaaaa

SEQ ID NO: 630919 - DNA, 120 bp, Artificial Sequence
  ENSG00000179630_26 (sequence is synthesized)
atatatatttaatgtaagttatcacattgcatcttaaaaatattcttatttaatacatatatttcctacatgtatatgtggtagcatgatagcaaataacatttgtttggtatttccaaa

SEQ ID NO: 630920 - DNA, 120 bp, Artificial Sequence
  ENSG00000179630_27 (sequence is synthesized)
caaaggactttcatgtacattgcctcattttacctttacagctactctgaaatacacaggcattatcccttttattcagctgagaaaactgagcttcattgaggtggaggtcaaaaatca

SEQ ID NO: 630921 - DNA, 120 bp, Artificial Sequence
  ENSG00000179630_28 (sequence is synthesized)
caaaatttgtgatgaattaagatttgaacatatgttttgtgactccagttttcctttcagattttaaaattaattaaagggatcttcattatacttttattgttaactttttgttaacat

SEQ ID NO: 630922 - DNA, 120 bp, Artificial Sequence
  ENSG00000179630_29 (sequence is synthesized)
aatttattcatacattcagtgaaaattttgttgaggtactgggacaggttaaaaaatacagttgtagccctcaggatatttaatatccagtgaaaagtgacagtcagtaaaccaacaatc

SEQ ID NO: 630923 - DNA, 120 bp, Artificial Sequence
  ENSG00000179630_30 (sequence is synthesized)
tcaatactttgatatatgttgtgaggttgtgataaccgattcttgtttagtttaattctatatctcccttagaccagtgttaaatttaaataaaacacctcattttttccaattcaggga

SEQ ID NO: 630924 - DNA, 120 bp, Artificial Sequence
  ENSG00000179630_31 (sequence is synthesized)
aggcactaaacataaagcataggatagaaatgttgaactcatccaaaatattattttgtttaatgaaaatgatgaagattaaggaatacttccatgtattgagtaaggttgataattttc

SEQ ID NO: 630925 - DNA, 120 bp, Artificial Sequence
  ENSG00000179630_32 (sequence is synthesized)
taattcttcactgtgcattattttgtttgaagttggtaaatttggagtatcctgcagacacattttgctttatgtactacaacattctacaaccaaataaaaattattttgattatctga

SEQ ID NO: 630926 - DNA, 120 bp, Artificial Sequence
  ENSG00000179630_33 (sequence is synthesized)
agacctgcagctcctgccgccctgcgcccgctcccagggcccgtcgttccgccgccctatccctcctcaaggggcccctagctgcctcctcgcgaccctttccggactcggcctgcccac

SEQ ID NO: 630927 - DNA, 120 bp, Artificial Sequence
  ENSG00000179630_34 (sequence is synthesized)
tcctgcccgctaacccgcctggctcccgggcgagagccctcgcgcggctctggttcctgttcctctaacgccgccggggctgcgggatgccgactccgcggaccgcccagacccggaact

SEQ ID NO: 630928 - DNA, 120 bp, Artificial Sequence
  ENSG00000179630_35 (sequence is synthesized)
gctgaggcagcagcgggctcgcggcgcttggctcatcccgggattccccagctctcgcgctgggcccgccgcgttcgcaccaagcacgccaggcggccctggcctacctccctcccgcct

SEQ ID NO: 630929 - DNA, 120 bp, Artificial Sequence
  ENSG00000179632_0 (sequence is synthesized)
attcagaggcgcggggccgggcccggcggacgcttgttgttgtccggccgggggaggcggaggtcgctcgctcgctcgctcggctcgctgactcgccggagcgctctgtggcggtcggcg

SEQ ID NO: 630930 - DNA, 120 bp, Artificial Sequence
  ENSG00000179632_1 (sequence is synthesized)
gcaggtcggtcgcgagagcgggctctgtggaagggggcgaggctatgtcgcggtggcagcccggatgggccggcagggccgggagtaacgggacgtcgccgcggagcttcttcccccgga

SEQ ID NO: 630931 - DNA, 120 bp, Artificial Sequence
  ENSG00000179632_2 (sequence is synthesized)
agcttcttcccccggatacagtgcggcccgagcggaggccgcggcgccgccctccgatcttgaagagcccgcgctgcgcggagcccgcccccgcctgcgcaccggcaccgacgcggagcg

SEQ ID NO: 630932 - DNA, 120 bp, Artificial Sequence
  ENSG00000179632_3 (sequence is synthesized)
cccggcccggcgcggcctgatctaacccagccaggcaggcaatactagcccctctggagcacggagctccttccccaaagacatgaagctattggagaactcgagctttgaagccatcaa

SEQ ID NO: 630933 - DNA, 120 bp, Artificial Sequence
  ENSG00000179632_4 (sequence is synthesized)
ctcacagctgactgtggagactggagatgcccacatcattggcaggattgagagctactcatgtaagatggcaggagacgacaaacacatgttcaagcagttctgccaggagggccagcc

SEQ ID NO: 630934 - DNA, 120 bp, Artificial Sequence
  ENSG00000179632_5 (sequence is synthesized)
ccacgtgctggaggcactttctccaccccagacttcaggactgagccccagcagactcagcaaaagccaaggcggtgaggaggagggccccctcagtgacaagtgcagccgcaagaccct

SEQ ID NO: 630935 - DNA, 120 bp, Artificial Sequence
  ENSG00000179632_6 (sequence is synthesized)
cttctacctgattgccacgctcaatgagtccttcaggcctgactatgacttcagcacagcccgcagccatgagttcagccgggagcccagccttagctgggtggtgaatgcagtcaactg

SEQ ID NO: 630936 - DNA, 120 bp, Artificial Sequence
  ENSG00000179632_7 (sequence is synthesized)
atctgaaaccacagctgtggaacgcggtggacgaggagatctgcctggctgaatgtgacatctacagctataacccagacttggactcagatcccttcggggaggatggtagcctctggt

SEQ ID NO: 630937 - DNA, 120 bp, Artificial Sequence
  ENSG00000179632_8 (sequence is synthesized)
ccttcaactacttcttctacaacaagcggctcaagcgaatcgtcttctttagctgccgttccatcagtggctccacctacacaccctcagaggcaggcaacgagctggacatggagctgg

SEQ ID NO: 630938 - DNA, 120 bp, Artificial Sequence
  ENSG00000179632_9 (sequence is synthesized)
gggaggaggaggtggaggaagaaagcagaagcgggggcagtggggccgaggagaccagcaccatggaggaggacagggtcccagtgatctgtatttgatgaggaggagccgaggccccag

SEQ ID NO: 630939 - DNA, 120 bp, Artificial Sequence
  ENSG00000179632_10 (sequence is synthesized)
cttcatccagcttcaaccaatgcctggacctgtccacctgagaggcccctggggcctccccagctgctggccagaccctggcgctgccacagtcctggcactgcccaaggccatacctgc

SEQ ID NO: 630940 - DNA, 120 bp, Artificial Sequence
  ENSG00000179632_11 (sequence is synthesized)
ctagccctttggctccatcctgtggatgcccactcacccctcagactcctgctgcccatgctgtggccggacttgtcagcagggggcctggtgggaggagcgactgccctgcccaaatga

SEQ ID NO: 630941 - DNA, 120 bp, Artificial Sequence
  ENSG00000179632_12 (sequence is synthesized)
actgccacagcagggacagctggaccgcagagtttatttttgtatttctactgggcctgcacactccagcccaaagggtctgtggccggaggccccacgagcaggccccagcagtcaccg

SEQ ID NO: 630942 - DNA, 120 bp, Artificial Sequence
  ENSG00000179632_13 (sequence is synthesized)
gctctggtcttgggccggccccggtgcccacctgtacccccacctcgcccatttggccgcgtgcactgagtgtcactttgctgcagctcgtttctttccaataaaagtttctgtgactta

SEQ ID NO: 630943 - DNA, 120 bp, Artificial Sequence
  ENSG00000179632_14 (sequence is synthesized)
cccgacgtggcccaggcgggcgctgcctggtgactgcagcgccccagcggggccgagggaccgccctcctaggcgtctggagaaactaggcaatttttccgggtagagtggaggaacctg

SEQ ID NO: 630944 - DNA, 120 bp, Artificial Sequence
  ENSG00000179632_15 (sequence is synthesized)
gcctccaggcctccaggtttgtggggcacttggcgcctcacaccacctgtcaccctatactccccagctataacccagacttggactcagatcccttcggggaggatggtagcctctggt

SEQ ID NO: 630945 - DNA, 120 bp, Artificial Sequence
  ENSG00000179632_16 (sequence is synthesized)
ttttcctctccccgggccagaaagtagccaaaacgaaagagcgcccgcccaggtgaccgcagggcccggagtcccaggtgtcctggttcctaaccgggatgcagcctcttaccttggctg

SEQ ID NO: 630946 - DNA, 120 bp, Artificial Sequence
  ENSG00000179632_17 (sequence is synthesized)
aggagcccagccagcctgagggagactgcaggagtcacgtcccgttgcggactcaagagttacccccatggtggctggagctcttttggagtgggcgtggagatggggaatgggaatgtt

SEQ ID NO: 630947 - DNA, 120 bp, Artificial Sequence
  ENSG00000179632_18 (sequence is synthesized)
agcagccccagggtgagcagggtccccggtggtctagtctagtcccagaactcgcgtgttctgcagggggtatggctgacctggagcctggacttaccaccctcaggcaatactagcccc

SEQ ID NO: 630948 - DNA, 120 bp, Artificial Sequence
  ENSG00000179636_0 (sequence is synthesized)
attgccacagccaaccggctcccacatatctgcacacacttaaatacaaaggccgggaagggtcagaccaccatccgggtactctaagtcctccctcccccttctccttcacccccaagt

SEQ ID NO: 630949 - DNA, 120 bp, Artificial Sequence
  ENSG00000179636_1 (sequence is synthesized)
gtctcccacgactgccctccccgacctctagctgaccatggcatcagaggcagaaaaaacattccatcggtttgctgcgtttggagaatcatcaagcagtggcactgaaatgaacaacaa

SEQ ID NO: 630950 - DNA, 120 bp, Artificial Sequence
  ENSG00000179636_2 (sequence is synthesized)
gaacttctccaagctgtgcaaagactgtggcatcatggatggcaagacagtcacctccacggacgtggacatcgtgttcagcaaagtcaaggccaagaacgcccgaaccatcacgtttca

SEQ ID NO: 630951 - DNA, 120 bp, Artificial Sequence
  ENSG00000179636_3 (sequence is synthesized)
acagttcaaagaggcagtgaaggaactgggccagaagcgcttcaaagggaagagtccagatgaagtcctggagaacatttatggactcatggagggcaaagacccagccaccactggcgc

SEQ ID NO: 630952 - DNA, 120 bp, Artificial Sequence
  ENSG00000179636_4 (sequence is synthesized)
tactaaagcaacaacagtgggtgcagtggaccgtttgacagacaccagcaagtacaccggcacccacaaggagcgctttgatgagagtggcaagggcaagggcattgcgggacgggaaga

SEQ ID NO: 630953 - DNA, 120 bp, Artificial Sequence
  ENSG00000179636_5 (sequence is synthesized)
cctgctagccccctgaccctgcatgtttaacaccagggagcttggaaaacaataaacatctgtgtgtgcagcagccaaaatctctgtctgtgagggacagatgagcctactagtgtagag

SEQ ID NO: 630954 - DNA, 120 bp, Artificial Sequence
  ENSG00000179636_6 (sequence is synthesized)
agagggagaagaggcagcacaggagggtgggttctccaccacacacccttcgctctgcttagccttatgcctaccagccatcagttagcattcctcctcaacagctgcttccaagaacag

SEQ ID NO: 630955 - DNA, 120 bp, Artificial Sequence
  ENSG00000179636_7 (sequence is synthesized)
gatggaagaatatatttggagtaaagagatgaaccagatgtggaggtaaaagtatctactacttgtgttcacacattactgatatccacctctccacccccacccctcaaaagggtgtag

SEQ ID NO: 630956 - DNA, 120 bp, Artificial Sequence
  ENSG00000179636_8 (sequence is synthesized)
caattcctcacgtgatggactatgactatatcacatattagatccttccctgtccctccaccttcctcatctgttgcaattcaggttttttgggtggaggagtagaagccagctaaggtt

SEQ ID NO: 630957 - DNA, 120 bp, Artificial Sequence
  ENSG00000179636_9 (sequence is synthesized)
gcctgacttctattacaaatttgttccagagctggggtaaggggagagtctattttcaacacccagcccagaactaagttttaccccacatcacctccatcatggggcacatgggacaga

SEQ ID NO: 630958 - DNA, 120 bp, Artificial Sequence
  ENSG00000179636_10 (sequence is synthesized)
agagcttactgactgctaagggtagctcaggaagatggccagatgaggcaggctgccaggattccaagagcaggagttctggtgcactgaagaaaaagcaattaaatcacaacagagtca

SEQ ID NO: 630959 - DNA, 120 bp, Artificial Sequence
  ENSG00000179636_11 (sequence is synthesized)
atatatttggagtaaagagatgaaccagatgtggagtggatgctctcgtctcgcctggacagcacacacactccaactccagtaagactcaactcaaatatatctcttatacaacttcaa

SEQ ID NO: 630960 - DNA, 120 bp, Artificial Sequence
  ENSG00000179636_12 (sequence is synthesized)
atatggaggtgggggtgagaagaacctgcgaggtagttggccacggaagggttcacgtggtggaacatttgcagtgggcctaccaagcaccacagggtacctggcgctgtgctatccttt

SEQ ID NO: 630961 - DNA, 120 bp, Artificial Sequence
  ENSG00000179636_13 (sequence is synthesized)
gtcttcgagacactcactgattgataggacaaaagaggccaaatctgagtgaggcaagagttggaccttggaaggtaatgcattcatgctccaaagtttctggatttctgtctaactgac

SEQ ID NO: 630962 - DNA, 120 bp, Artificial Sequence
  ENSG00000179636_14 (sequence is synthesized)
actgtgagtgacagccttcatccccttgaccctacttccctaaatccccattgttccagtctaccctccctaaccctgccaactgtgtgactgtagagacagggccgaaacagactttag

SEQ ID NO: 630963 - DNA, 120 bp, Artificial Sequence
  ENSG00000179636_15 (sequence is synthesized)
agcaacgaggtgaatgacatgggagacagacctggggtctttcagggacggaaagcctcagccaagacccagactcccagggtcatcaacctcctcgggtcactaaccctccccagtgtc

SEQ ID NO: 630964 - DNA, 120 bp, Artificial Sequence
  ENSG00000179636_16 (sequence is synthesized)
tgtctacccctaagtccagagaacacgtcctctctaggctcgagccggaatcaatataggctacaagggcatcagttcaggctgcgcggaggagagaaggaagtgctgatgtggagtcct

SEQ ID NO: 630965 - DNA, 120 bp, Artificial Sequence
  ENSG00000179636_17 (sequence is synthesized)
cctgaaagtgatcctagacccctccacctccccaatcccagctacggggaggcggtcctgcatggtggttaagatcaaggcttttgagtgaaacagaccaggaattgaatcctgcctctg

SEQ ID NO: 630966 - DNA, 120 bp, Artificial Sequence
  ENSG00000179636_18 (sequence is synthesized)
cagcttacaaactgcacaccatctatctgtttacgaaaccactgaaagcttccttgtttcatctgttcatgaggatagtattttttacctcacggcagtatgaggatccattaagatgta

SEQ ID NO: 630967 - DNA, 120 bp, Artificial Sequence
  ENSG00000179636_19 (sequence is synthesized)
tatcaagagtttttagaccagtgcccggcacatgtggatgctctcgtctcgcctggacagcacacacactccaactccagtaagactcaactcaaatatatctcttatacaacttcaaga

SEQ ID NO: 630968 - DNA, 120 bp, Artificial Sequence
  ENSG00000179636_20 (sequence is synthesized)
acagccaaccggctcccacatatctgcacacacttaaatacaaaggccgggaagggtcagaccaccatccgggtactctaaggtacataaaagaggtaggggaaagagaggatcattcag

SEQ ID NO: 630969 - DNA, 120 bp, Artificial Sequence
  ENSG00000179639_0 (sequence is synthesized)
agtctccagcatcctccacctgtctaccaccgagcatgggcctatatttgaagccttagatctctccagcacagtaagcaccaggagtccatgaagaagatggctcctgccatggaatcc

SEQ ID NO: 630970 - DNA, 120 bp, Artificial Sequence
  ENSG00000179639_1 (sequence is synthesized)
cctactctactgtgtgtagccttactgttcttcgctccagatggcgtgttagcagtccctcagaaacctaaggtctccttgaaccctccatggaatagaatatttaaaggagagaatgtg

SEQ ID NO: 630971 - DNA, 120 bp, Artificial Sequence
  ENSG00000179639_2 (sequence is synthesized)
actcttacatgtaatgggaacaatttctttgaagtcagttccaccaaatggttccacaatggcagcctttcagaagagacaaattcaagtttgaatattgtgaatgccaaatttgaagac

SEQ ID NO: 630972 - DNA, 120 bp, Artificial Sequence
  ENSG00000179639_3 (sequence is synthesized)
agtggagaatacaaatgtcagcaccaacaagttaatgagagtgaacctgtgtacctggaagtcttcagtgactggctgctccttcaggcctctgctgaggtggtgatggagggccagccc

SEQ ID NO: 630973 - DNA, 120 bp, Artificial Sequence
  ENSG00000179639_4 (sequence is synthesized)
atgagaaccacaacatctccattacaaatgccacagttgaagacagtggaacctactactgtacgggcaaagtgtggcagctggactatgagtctgagcccctcaacattactgtaataa

SEQ ID NO: 630974 - DNA, 120 bp, Artificial Sequence
  ENSG00000179639_5 (sequence is synthesized)
aagctccgcgtgagaagtactggctacaattttttatcccattgttggtggtgattctgtttgctgtggacacaggattatttatctcaactcagcagcaggtcacatttctcttgaaga

SEQ ID NO: 630975 - DNA, 120 bp, Artificial Sequence
  ENSG00000179639_6 (sequence is synthesized)
ttaagagaaccaggaaaggcttcagacttctgaacccacatcctaagccaaaccccaaaaacaactgatataattactcaagaaatatttgcaacattagtttttttccagcatcagcaa

SEQ ID NO: 630976 - DNA, 120 bp, Artificial Sequence
  ENSG00000179639_7 (sequence is synthesized)
ttgctactcaattgtcaaacacagcttgcaatatacatagaaacgtctgtgctcaaggatttatagaaatgcttcattaaactgagtgaaactggttaagtggcatgtaatagtaagtgc

SEQ ID NO: 630977 - DNA, 120 bp, Artificial Sequence
  ENSG00000179639_8 (sequence is synthesized)
tcaattaacattggttgaataaatgagagaatgaatagattcatttattagcatttgtaaaagagatgttcaatttcaataaaataaatataaaaccatgtaacagaatgcttctgagta

SEQ ID NO: 630978 - DNA, 120 bp, Artificial Sequence
  ENSG00000179639_9 (sequence is synthesized)
acagtaagcaccaggagtccatgaagaagatggctcctgccatggaatcccctactctactgtgtgtagccttactgttcttcgctccagatggcgtgttagcagtcagttccaccaaat

SEQ ID NO: 630979 - DNA, 120 bp, Artificial Sequence
  ENSG00000179673_0 (sequence is synthesized)
acactaggttctccggctccagctcctgcgccgcctgttgctcgctcctccgggcggtcgcttcccgcccggtgcccaggggtaggcggcccgagagcgcgcaggcagccagcctcccgc

SEQ ID NO: 630980 - DNA, 120 bp, Artificial Sequence
  ENSG00000179673_1 (sequence is synthesized)
cttcgtcccctccccgtaccgcaggagccggtccgaggggtccggagcgtccctgagagcgcggaccccggcgagcagcccagtgcacccgggactgcgcgccgagacccccggcgccgc

SEQ ID NO: 630981 - DNA, 120 bp, Artificial Sequence
  ENSG00000179673_2 (sequence is synthesized)
gcggcgatgaacgcgaccttcctgaaccacagcggcttggaggaggtggacggcgtgggcggcggcgccggggccgccctgggaaaccgcacccacgggctgggcacgtggctgggctgc

SEQ ID NO: 630982 - DNA, 120 bp, Artificial Sequence
  ENSG00000179673_3 (sequence is synthesized)
tgtccagggggcgcaccgctggccgccagcgacggggtccccgcggggctggcgcccgacgagcgcagcctgtgggtgtcgcgggtggcgcagatcgccgtgctctgcgtgctgtcgctt

SEQ ID NO: 630983 - DNA, 120 bp, Artificial Sequence
  ENSG00000179673_4 (sequence is synthesized)
ttcttcctgggctgcaacctgctcatcaagtccgagagcatgatcaactttctggtgcaggagcgccggccctccaaggacgtgggcgcagccatcctggggctgtactgagcgccatct

SEQ ID NO: 630984 - DNA, 120 bp, Artificial Sequence
  ENSG00000179673_5 (sequence is synthesized)
atctgggtccgccctcgccagcgctgctgcaagaaggaccccggagacccggaccctcgccccgctctctgcgctctgccgccgcctccgggcgggcagctacgtgcctggggcgcccgg

SEQ ID NO: 630985 - DNA, 120 bp, Artificial Sequence
  ENSG00000179673_6 (sequence is synthesized)
ggacgcggcgagactgtcggcgggggcgcgggaagggacttggacgcccggctctgtcctgtgtgcgctgcagcgttgcggggtgggagaatgtggggtgagggttcttaccagtttttt

SEQ ID NO: 630986 - DNA, 120 bp, Artificial Sequence
  ENSG00000179673_7 (sequence is synthesized)
ttgtttgtttgttttttaagacgttcggggcagggtgggagtgggtatggagatgcaatttgggactgcggtcgctcgcgtgggagttttgtgtgtacgttggtgcgggtgggttcggaa

SEQ ID NO: 630987 - DNA, 120 bp, Artificial Sequence
  ENSG00000179673_8 (sequence is synthesized)
cacggtgcgagtgggtgaagatgtgaagcgtcagagtcgctgagcttgttggcctgatcttgcgtttggaaagaaatcttgtaataaaactgcagccgtagggcttcaggcagcttccca

SEQ ID NO: 630988 - DNA, 120 bp, Artificial Sequence
  ENSG00000179674_0 (sequence is synthesized)
gataagctacaacataaacacatctaggttcttgttcttagaatacagcatgaagaatttgctttcttctttcttcctaacattttcatgtgagatccagaaaggacacattgtctctgg

SEQ ID NO: 630989 - DNA, 120 bp, Artificial Sequence
  ENSG00000179674_1 (sequence is synthesized)
ccattcgaagaaagaaagaaagaaaaaaaaaaaaggtatttagagacagagagagaaaaaggctgaaatgggttcgctgggttctaaaaatccgcaaaccaaacaagcccaagttcttct

SEQ ID NO: 630990 - DNA, 120 bp, Artificial Sequence
  ENSG00000179674_2 (sequence is synthesized)
tttgggacttgactcagctgggaagtctactctcctttataaattaaagcttgctaaggatattaccaccatccctacaataggtttcaatgtggaaatgatcgagttggaaaggaatct

SEQ ID NO: 630991 - DNA, 120 bp, Artificial Sequence
  ENSG00000179674_3 (sequence is synthesized)
ttcactcacagtctgggatgttggaggacaggaaaaaatgagaactgtttggggctgttactgtgagaacaccgatgggctggtgtatgttgtggacagtacagacaaacagcgactgga

SEQ ID NO: 630992 - DNA, 120 bp, Artificial Sequence
  ENSG00000179674_4 (sequence is synthesized)
agagtctcagagacagtttgagcacattttgaagaatgaacacattaaaaatgtgcctgttgttctattagccaacaaacaagacatgcctggagctctgactgctgaggacatcaccag

SEQ ID NO: 630993 - DNA, 120 bp, Artificial Sequence
  ENSG00000179674_5 (sequence is synthesized)
tcaggaaattaactggatttgtgaagagccacatgaaatcaagaggagacactttggcgttcttcaagcagaactgaggctgcgaaaaatccaagtctctacagagacactgatgaagtt

SEQ ID NO: 630994 - DNA, 120 bp, Artificial Sequence
  ENSG00000179674_6 (sequence is synthesized)
gaaagggtaattgtttttccatgccaaatgaggaaatcaaattaatgagttgacaaacttttcctgagatgttatttcatctacatttagttaaacaacttagaatgatatctagaaaat

SEQ ID NO: 630995 - DNA, 120 bp, Artificial Sequence
  ENSG00000179674_7 (sequence is synthesized)
atttattttcagccaggaactttagcaaactgtggcaatgatcactgggaatgaaaacgtataatgttctacaatttttgttatcacattggatgactttgaatatagtagtgacacttg

SEQ ID NO: 630996 - DNA, 120 bp, Artificial Sequence
  ENSG00000179674_8 (sequence is synthesized)
ggaccaaataaattattttatatgactactagaacaaagttttagtaagctgtctgctaatagagtcagaattcttccagattgtttccagctgtaacaggtattgaatttccaccgtgc

SEQ ID NO: 630997 - DNA, 120 bp, Artificial Sequence
  ENSG00000179674_9 (sequence is synthesized)
tcctatgtaacagctgggtggtgtaaaaaatgaacttcaaattatggagtggaaaaagcgtaatgttaatatcttgtaaattcgtattccctattaaataaagctttcttattccctaaa

SEQ ID NO: 630998 - DNA, 120 bp, Artificial Sequence
  ENSG00000179695_0 (sequence is synthesized)
atgaaaaaccacacagtaataagaacttttatcctgctgggactgacaggtgacccacacctgcaagttctgctttttatctttctatttctcacctacatgttgagtgtaacagggaac

SEQ ID NO: 630999 - DNA, 120 bp, Artificial Sequence
  ENSG00000179695_1 (sequence is synthesized)
ctgactattatcaccctcacattggtggaccaccaccttaaaactcctatgtacttctttctcagaaatttttccttcttagaagtctcatttactacagtctgcattcccagattcttg

SEQ ID NO: 631000 - DNA, 120 bp, Artificial Sequence
  ENSG00000179695_2 (sequence is synthesized)
tacaatatatcaatgggggacaataccattacctacaatgcttgtgccagtcaaatattctttgttattctctttggagcaacagaattttttctcttggcagccatgtcctatgaccgc

SEQ ID NO: 631001 - DNA, 120 bp, Artificial Sequence
  ENSG00000179695_3 (sequence is synthesized)
attgttccaccacttagcttaggcctccagctcgaattctgtgactccaatgccattgatcattttagctgtgatgcaggtcctctcctaaagatctcatgctcagatacatgggtaata

SEQ ID NO: 631002 - DNA, 120 bp, Artificial Sequence
  ENSG00000179695_4 (sequence is synthesized)
gaacagatggttatacttatggctgtatttgcactcattatcaccctagtttgtgtgattctgtcctacttgtacatagtcagaacaattctgaagttcccttctgttcagcaaaggaaa

SEQ ID NO: 631003 - DNA, 120 bp, Artificial Sequence
  ENSG00000179695_5 (sequence is synthesized)
aaggccttttctacctgttcatcccacatgattgtggtttccattgcctatggaagctgcatcttcatctatatcaagccctctgcaaaagatgaggtggccataaataaaggagtttca

SEQ ID NO: 631004 - DNA, 120 bp, Artificial Sequence
  ENSG00000179695_6 (sequence is synthesized)
gttcttactacttctgtcgcacccttgttgaaccccttcatttacaccttgaggaacaagcaagtgaaacaagctttcagtgactctataaagaggattgcatttctctcaaagaagtag

SEQ ID NO: 631005 - DNA, 120 bp, Artificial Sequence
  ENSG00000179695_7 (sequence is synthesized)
cttccttaacacaacacagttcaacccattagggagctgccacctgaaatcgtgaaaaattatcaaaacagtaagtattttaagcctctggtaaacatccttctactctctatgtctatg

SEQ ID NO: 631006 - DNA, 120 bp, Artificial Sequence
  ENSG00000179695_8 (sequence is synthesized)
agttcaactgatttgattttcagatgtcacgaataagtgagaacatacgatgtctttctaaaggacctaaagatatattgaaaaagacgcagcctagaagactatatttagtggtgttaa

SEQ ID NO: 631007 - DNA, 120 bp, Artificial Sequence
  ENSG00000179695_9 (sequence is synthesized)
atgtagatttgcttctggagcttgaaaggaaaggaatcacaactgaacatcaaatgaaagcctatgagaatattcattttgtaaaaaccttgaacacaactttttctcacattatagata

SEQ ID NO: 631008 - DNA, 120 bp, Artificial Sequence
  ENSG00000179695_10 (sequence is synthesized)
aaataattgtacatcaacccatctacaggtactagagggttgagaataaggaatgccagcagagaagaataaaaagaccggggaaaggctcagggacaacggttgtattctgttgtcatt

SEQ ID NO: 631009 - DNA, 120 bp, Artificial Sequence
  ENSG00000179695_11 (sequence is synthesized)
gttgtttgtttgtttttcaggaaaaatgtaatttaatcttaatacaatcctcagatgataacaactgaagagaattaatgttattaattacctggatatatcctatattcagagtttgtc

SEQ ID NO: 631010 - DNA, 120 bp, Artificial Sequence
  ENSG00000179695_12 (sequence is synthesized)
ctggacaaaaaatgtttaagtacctataaaatgacatcatttctttctaacccatttgtaaatccattccatgtaacaaactacaatcaactgcatttgtaaattctgatggataaggaa

SEQ ID NO: 631011 - DNA, 120 bp, Artificial Sequence
  ENSG00000179695_13 (sequence is synthesized)
tgatcaaagaaaaagttggattgttttacaaaacttgatttcttaaggagatatccactgctcatatatgtgaaatttagaaaggttattggaacactggcaacattgattattctataa

SEQ ID NO: 631012 - DNA, 120 bp, Artificial Sequence
  ENSG00000179695_14 (sequence is synthesized)
agggagaaaataaaagtaggctggtcagcttggcttctagatgcatatccttttgctatagaattcaaatatctaccccctcataaaccgtgatttttaaaggaggattgggtagatatc

SEQ ID NO: 631013 - DNA, 120 bp, Artificial Sequence
  ENSG00000179695_15 (sequence is synthesized)
ttgcttcctgactacagtttagtcatgtgaaccttctcaatgacatttaatattgcatcctaatcccatctttatcaaaatccttattatttcgaaccaaggtcatacattgtgttttcc

SEQ ID NO: 631014 - DNA, 120 bp, Artificial Sequence
  ENSG00000179698_0 (sequence is synthesized)
gcagttgctgaaatggaggcagaggtgtgggaggcagaaggctacaacctagttctggactcggacctgtatgatgcggatggctatgatgtcccagaccctgggctgctcaccgaaaag

SEQ ID NO: 631015 - DNA, 120 bp, Artificial Sequence
  ENSG00000179698_1 (sequence is synthesized)
aatgagttgactttcacggagccgtcgcaggtcctgccctttttgaccagcagccaacagtggcaaagcctgaccccgcgcgcccgcgcccgccggctgtggctgcttctgcgcaccagc

SEQ ID NO: 631016 - DNA, 120 bp, Artificial Sequence
  ENSG00000179698_2 (sequence is synthesized)
ctccacgaagtcgtggaaaaggagaagagagccgagctgcgcgcggcgcgcctgacgcatgggctggaaccactgcgccgcctggaggtggcagccgggctgcgctcggtggcgcaggac

SEQ ID NO: 631017 - DNA, 120 bp, Artificial Sequence
  ENSG00000179698_3 (sequence is synthesized)
ccggtgggtggacgcttcgtggtgctggacggcgcgggccgcctgcacctgcacaaggaagacggctgggcacaggagacgctgctggcgcctgtccggcttacggggctggtgaccgtg

SEQ ID NO: 631018 - DNA, 120 bp, Artificial Sequence
  ENSG00000179698_4 (sequence is synthesized)
ctgggcccgctgggtgccgtgggccgttttgtaggctggggccccgcggggctggcaattctgaggcccaacctcagcctgctgtggctgagcgagcagggggtgggcagggccccgggt

SEQ ID NO: 631019 - DNA, 120 bp, Artificial Sequence
  ENSG00000179698_5 (sequence is synthesized)
tgggcgcccacctgctgcctgccggttcccgacctcaggctgctgctcgttgcggagatgaacagcagcctggcgctctggcagttccgttcaggtggtcgccgcctggtgctgcgaggg

SEQ ID NO: 631020 - DNA, 120 bp, Artificial Sequence
  ENSG00000179698_6 (sequence is synthesized)
tcagcactgcacccgcccccgagcccaacaggcaggctcatgcgtctggctgtggcgccggttcctccccaccacgtcctgcgctgcttcgcggcctatggctcggccgtgctcaccttc

SEQ ID NO: 631021 - DNA, 120 bp, Artificial Sequence
  ENSG00000179698_7 (sequence is synthesized)
gatctgcatgcctggactctcgtagatgtgcgccgggatttgcacaaaaccaccatctcggacctggcttactgcgaggaagtagaggcaatggtgacagcttcccgggacagcaccgtg

SEQ ID NO: 631022 - DNA, 120 bp, Artificial Sequence
  ENSG00000179698_8 (sequence is synthesized)
aaggtgtgggaggctgactggcagatccggatggtgttcgtgggccacacaggcccggtgacggctatgactgtgctcccgaacacgaccctggtgttgtcggcctcgcaggacgggacg

SEQ ID NO: 631023 - DNA, 120 bp, Artificial Sequence
  ENSG00000179698_9 (sequence is synthesized)
ctacgcacctgggacctgcaggcggcggcgcaggtgggcgaggtagcgctgggcttctggggccaggacaagctgtcccggcgcgtgggccgtctgctggcgccggtgcgcccgggctgg

SEQ ID NO: 631024 - DNA, 120 bp, Artificial Sequence
  ENSG00000179698_10 (sequence is synthesized)
ccggtgctgtccctgtgcgcgagcagcatgcagctgtggcgcgtacgcgagctctactcgccgttggcgcaactgcccgccaaggtgctccacgtgcaggtggcgcccgcgttgcccgcg

SEQ ID NO: 631025 - DNA, 120 bp, Artificial Sequence
  ENSG00000179698_11 (sequence is synthesized)
cctgcgcaccagtcgctgcctacgcgcctcgtgtgcgcgtgcgccgacggctcggtctacctcctgtcggcggccaccgggcgcatagtgagctcactgctgctggagccggaggactgc

SEQ ID NO: 631026 - DNA, 120 bp, Artificial Sequence
  ENSG00000179698_12 (sequence is synthesized)
gcggcagccgtggcctactgcctgccgcgcgaggcgctgtggctgctgaccagggctgggcacctggtccgcgccaacgcggcgcgctgccccatgagcgtgctgcaccgcgtgtgcccg

SEQ ID NO: 631027 - DNA, 120 bp, Artificial Sequence
  ENSG00000179698_13 (sequence is synthesized)
ccgccgccccctgcgccgcagccttgctgtctgcacctgtacagccacctcacggatctcgaaggcgccttctcctcctgggagatcgtgcgccagcactggggcgagttgcgctgcagc

SEQ ID NO: 631028 - DNA, 120 bp, Artificial Sequence
  ENSG00000179698_14 (sequence is synthesized)
tctgtggcctgcgcctggaagaacaagaaccggtacctgccagtggtggggcacacggacggcacgctgtcggtgctggagtggctctcgtcgaagactgtcttccaaacggaggcgcac

SEQ ID NO: 631029 - DNA, 120 bp, Artificial Sequence
  ENSG00000179698_15 (sequence is synthesized)
agcccgggcccggttgtcgccatcgcatccacctggaacagcattgtgtcttcgggtggggacctgacggtgaagatgtggcgcgtcttcccctatgccgaagagagcctgagcctgctg

SEQ ID NO: 631030 - DNA, 120 bp, Artificial Sequence
  ENSG00000179698_16 (sequence is synthesized)
cgcaccttctcctgctgctacccggccgtggcgctctgtgcgctaggcagacgcgtcaccgcgggctttgaggacccagacagcgctacctacggcctggtgcagtttggcctgggcgac

SEQ ID NO: 631031 - DNA, 120 bp, Artificial Sequence
  ENSG00000179698_17 (sequence is synthesized)
agtccgcgattagaccaccggccccaggacgaccccacggaccacatcactggcctgtgctgctgccccacgctcaaactgtatgcctgctccagcctggactgcaccgttcgcatctgg

SEQ ID NO: 631032 - DNA, 120 bp, Artificial Sequence
  ENSG00000179698_18 (sequence is synthesized)
actgctgagaaccgcctcctgcggctcctgcagctgaatggtgcccctcaggccctggctttctgcagcaacagtggagacctggtgctggcgctgggatcccgcctctgcctggtgtcc

SEQ ID NO: 631033 - DNA, 120 bp, Artificial Sequence
  ENSG00000179698_19 (sequence is synthesized)
cacaggctctacctgcctacatcctacctagttaagaagatgtgccggaaggccccagacgtggtggacgaccctccgctgccactgatgagccaggagtcactgacttccgcccaactg

SEQ ID NO: 631034 - DNA, 120 bp, Artificial Sequence
  ENSG00000179698_20 (sequence is synthesized)
cagaggctcaccaacctccatggggcagccagcctcagcgaggccttgtctctcatccatcgtcggagggcaacatctcagcacctggtgccgaaggaggacttggacgccatagtggcc

SEQ ID NO: 631035 - DNA, 120 bp, Artificial Sequence
  ENSG00000179698_21 (sequence is synthesized)
cgggaccgagaccttcagcagttgaggctggggctagtggtcccagcagcccagcccccaccctcctggcagcagcgccaggaaggctttgacaattacctccgtctgatctacggctct

SEQ ID NO: 631036 - DNA, 120 bp, Artificial Sequence
  ENSG00000179698_22 (sequence is synthesized)
ggcctgctgggcatgcagtctggaagggggtcccagcagtggagtgccgggaccctcagagtggagagagagacccgggatgtgtgtgctgtaccccaagctgcccactgtcttgcccgg

SEQ ID NO: 631037 - DNA, 120 bp, Artificial Sequence
  ENSG00000179698_23 (sequence is synthesized)
gctgaggtcagcactgcagcccaaacagtgccaacagccctgtccccacaggacctgggagccctgggccagcacttctcccagtctccccgagtcacagtgccgatcccacccacccac

SEQ ID NO: 631038 - DNA, 120 bp, Artificial Sequence
  ENSG00000179698_24 (sequence is synthesized)
cgtagggtgcacagcaaggcatcccagcttctggcccgctcctcactgagccactacctgggcatcagtctggatctgcagctgcagttggagcagctccgagggaggacgaccatggcc

SEQ ID NO: 631039 - DNA, 120 bp, Artificial Sequence
  ENSG00000179698_25 (sequence is synthesized)
ctggacctgccatcctcccacttgcagtgcaggatcccactgctgccaaagagatgggacaaggaacctctctctagcctcaggggcttctttcctgccaccgtgcagccccacaagcac

SEQ ID NO: 631040 - DNA, 120 bp, Artificial Sequence
  ENSG00000179698_26 (sequence is synthesized)
tgcctgaggcccatctgcttccccggctatgtgcccaactccgcggtgctacagcagatgtggctaaatgcggagccaggggcaagccaggatgccctgtggttgtggcgccccaggcca

SEQ ID NO: 631041 - DNA, 120 bp, Artificial Sequence
  ENSG00000179698_27 (sequence is synthesized)
tcccaaacccagtggcagaggaagctgctccaatggatgggggagaagcctggggaggagggggaggaagacaagaaggaagaggaggaggagaaggaagacgaggagctggactgggcc

SEQ ID NO: 631042 - DNA, 120 bp, Artificial Sequence
  ENSG00000179698_28 (sequence is synthesized)
cccaggagccccggcggcgcagctgcaaggttgccaggacccaccctcatccctggcaccgtcatgggagtttgctcttggatgagcattacgggcatctgcccaagtttctgcatttct

SEQ ID NO: 631043 - DNA, 120 bp, Artificial Sequence
  ENSG00000179698_29 (sequence is synthesized)
tcatctaccagacctggttcaaaaagttgttccccatcttcagcctgcaggcatacccggaggcgggcacgatcgagggcctggcctcgctgttggtggccctgctggagaagaccacgt

SEQ ID NO: 631044 - DNA, 120 bp, Artificial Sequence
  ENSG00000179698_30 (sequence is synthesized)
gggtcgaccgtgtgcacatcctgcaggtgctactgagactgctgcccaacatgagcagtgatctccaaggccagctgcagggcctgctcgtacacttgctcaacctggaccagcccccca

SEQ ID NO: 631045 - DNA, 120 bp, Artificial Sequence
  ENSG00000179698_31 (sequence is synthesized)
gcctccaggaccagacacagaagaagttcgtgatactggcgctgcagctgctcctggcctgctccctggagtcccgggatgtggtgctggagctcatgtcctacttcctctactctcccg

SEQ ID NO: 631046 - DNA, 120 bp, Artificial Sequence
  ENSG00000179698_32 (sequence is synthesized)
tgcactgccggccagagctcaagaagctgctgcacgggctgggccttcaggacccagagggcttcctattcaaggagatgatgacctgggtccagggcccagacctggactccaaggccg

SEQ ID NO: 631047 - DNA, 120 bp, Artificial Sequence
  ENSG00000179698_33 (sequence is synthesized)
gcctgcgcacttgctgccaccagaaactggaggacatgatccaggagcttcaggagaccccatcgcagacgtcagtggtctctggggcacccacacgcgcctccgtgataccctcgggca

SEQ ID NO: 631048 - DNA, 120 bp, Artificial Sequence
  ENSG00000179698_34 (sequence is synthesized)
cctcctggtcggcctccggcatcttcgggaggctctcgcaggtctcagaggtgcctttgatggtggtctcacctgcggagccgcactctttagccccggagctccaggcccagcggatgc

SEQ ID NO: 631049 - DNA, 120 bp, Artificial Sequence
  ENSG00000179698_35 (sequence is synthesized)
tggcacccaagcgcagctgggggacccctcagctccgtctcagagtgctctccgagacgctgaagagcttctgcctggagcccgaggcccgcctgcaccctgccgggcctgctcagctgc

SEQ ID NO: 631050 - DNA, 120 bp, Artificial Sequence
  ENSG00000179698_36 (sequence is synthesized)
ccggagagccgccgccgctggaggagaccgactggtcgcactcgcagctgctggacttgggccccatcgacgcgctcaacttcttctgtgagcagctgcgggcgcagcagcggagttcgc

SEQ ID NO: 631051 - DNA, 120 bp, Artificial Sequence
  ENSG00000179698_37 (sequence is synthesized)
tccaggagaaggctgcgcacccacacccgccagagccctacacggtggcgccggtgcccgacatggtggtgccacctccgcgggagcactggtaccaccccatcctccggctgcaggagg

SEQ ID NO: 631052 - DNA, 120 bp, Artificial Sequence
  ENSG00000179698_38 (sequence is synthesized)
ccaagccgcagaggtccgcgaggtccgcgatgagactgaggggccccatgcggtcccggctctgtgcgggccgcaccctggacggccccatccggacgctgaagctgccgttgccgcgtg

SEQ ID NO: 631053 - DNA, 120 bp, Artificial Sequence
  ENSG00000179698_39 (sequence is synthesized)
tggagccgcagcctttccccctggactggcctatgcccccgcgcccgctgcccccgcggctcctgcagccggccctgcagcgctactttctgccagcggacgcggaccctgacacctaca

SEQ ID NO: 631054 - DNA, 120 bp, Artificial Sequence
  ENSG00000179698_40 (sequence is synthesized)
gctgaccggactggtggcctcagcccgcctggctctggggcctgtcattggtatttggccaaggcctgcatcgggaataaagtccagagaatttctttctgcaggatgccgcctgctttg

SEQ ID NO: 631055 - DNA, 120 bp, Artificial Sequence
  ENSG00000179698_41 (sequence is synthesized)
gagggccccggggtgcgcacggcgtgtgggcgtgcggcctgaacccacagtggcggcggaaggcaggagccggaggcctggcggaggtggccatcgtgggcaccagcgttcccggagggg

SEQ ID NO: 631056 - DNA, 120 bp, Artificial Sequence
  ENSG00000179698_42 (sequence is synthesized)
tggccggcctagggcagaggagacccatagcggggtaccatccgctgggcactgagcaaacgttttctgctcaagtactaggtgttgagatgcgggctgaccttagagaacgtgtcctgg

SEQ ID NO: 631057 - DNA, 120 bp, Artificial Sequence
  ENSG00000179698_43 (sequence is synthesized)
gccagcccacagcctggtgtggaggggagtccgggagggcctgggcggtcccaggatgagccttccgggtcgatgcaggtgagaccaggagtttgcagaccttgctttcgttacttttat

SEQ ID NO: 631058 - DNA, 120 bp, Artificial Sequence
  ENSG00000179698_44 (sequence is synthesized)
tctggcaaagagaagaattgacaaaggcaccaggagcttttttctgagcggcaacgcagagcatcctctgacccctttagcctgaaagtccctaggggaggggcttggtccggaagggct

SEQ ID NO: 631059 - DNA, 120 bp, Artificial Sequence
  ENSG00000179698_45 (sequence is synthesized)
cggcctctgggccgggcccctctgccctgtgtggcctggcagggcgcaagacctgtgcacagagttcttggggcagctctggggggaatccccggcttttacacctgtcttttgtgttgt

SEQ ID NO: 631060 - DNA, 120 bp, Artificial Sequence
  ENSG00000179698_46 (sequence is synthesized)
ctgagcagtgatttccctcctgtatctgtagcctctgactttactagtttcttcttgatggctctggttagaatcgcttctccacaccttccctgtcaccccaaactgtgcggtggctct

SEQ ID NO: 631061 - DNA, 120 bp, Artificial Sequence
  ENSG00000179698_47 (sequence is synthesized)
tgttatggggccaccaaatggctgctctttcccaggccggtgcttgacacagtggtgccaccatcccaagagcatgggtgcgcaggaccgtgcgggacagccaagttgctgggcccagct

SEQ ID NO: 631062 - DNA, 120 bp, Artificial Sequence
  ENSG00000179698_48 (sequence is synthesized)
gaacctgcctcttcacctccaggcactaccgcatcctcccactgcagaaggccaaggttcacaggtgtgcgatgagactgaggactgagtctgtcactagaggacttgacactttttata

SEQ ID NO: 631063 - DNA, 120 bp, Artificial Sequence
  ENSG00000179698_49 (sequence is synthesized)
aaaaaaatgagtaaacctagatacctcgatcagtgtctagcgatgtcaaggcccccagtttgggttcaagcctgctgggacagtcctgcagctgctgggtcacagagtggccaaggccct

SEQ ID NO: 631064 - DNA, 120 bp, Artificial Sequence
  ENSG00000179698_50 (sequence is synthesized)
ctgatttttggtcaggacacagaaagatagcagggggcagggggggatctgagggaccccacatgacttacaatcagacaaggtaggtcagaggatttctttatggctatctgttttgtt

SEQ ID NO: 631065 - DNA, 120 bp, Artificial Sequence
  ENSG00000179698_51 (sequence is synthesized)
acaagcatgagccactgtgcccagccttctttatggctatctccaagacagcaaaggcaggggaaagtcctgccttggggagaaaaaggagggtgggaaaaggtcaaagagaaagatgct

SEQ ID NO: 631066 - DNA, 120 bp, Artificial Sequence
  ENSG00000179698_52 (sequence is synthesized)
agaaaaaggagggtgggaaaaggtcaaagagaaagatgctgttgtctgagtcttgcctctgaggcctaagttccccaacattataacaagggatatgggagttataagccaggaactgtg

SEQ ID NO: 631067 - DNA, 120 bp, Artificial Sequence
  ENSG00000179698_53 (sequence is synthesized)
ccaggaactgtggatggaaaccaatgacagatatcataatatcacacccacacatcaggcaagagacttgttccttaaaaattatctagtttagccgagcgtggtggctcacacctgtaa

SEQ ID NO: 631068 - DNA, 61 bp, Artificial Sequence
  ENSG00000179698_54 (sequence is synthesized)
agagatcacaccactgcactacagcctcggcaatagagcgagactctgtgtcaaaaaaaaa

SEQ ID NO: 631069 - DNA, 120 bp, Artificial Sequence
  ENSG00000179698_55 (sequence is synthesized)
gggacaaggaacctctctctagcctcaggggcttctttcctgccaccgtgcagccccacaaggtgagaccccctcccagctcctggagagccactcctctccaggcatcactcttgtgcc

SEQ ID NO: 631070 - DNA, 120 bp, Artificial Sequence
  ENSG00000179698_56 (sequence is synthesized)
tgccatctcccctttgctacaaatctttgtgtccaaatctgacccaagggccatgcccacctacaaccagagggccaggctgtagcctcccacgcacccctcacccctcacccttcaccc

SEQ ID NO: 631071 - DNA, 120 bp, Artificial Sequence
  ENSG00000179698_57 (sequence is synthesized)
tctgtctagccctgttccagtacagctgtgtttgtggccacaggctccttgctgctctgggagctgacatcaggcaaagccagtccccccagccggttatgccacacacccctttccccc

SEQ ID NO: 631072 - DNA, 120 bp, Artificial Sequence
  ENSG00000179698_58 (sequence is synthesized)
gtggaggcgctgggagggcaggtcccctagggacttttcctggaagatcagaatccctgccctttagaggagcaaagtcaagggaacctggccctttagaatccactgtcttcccaccct

SEQ ID NO: 631073 - DNA, 120 bp, Artificial Sequence
  ENSG00000179698_59 (sequence is synthesized)
cacgtacaccaggtgcccaggcaggcctcagcccctcccccagcatattcctggcactgtcacctgcccaggtgggtaattgactctttgggcctgggtgccaccatcatgctcttcatt

SEQ ID NO: 631074 - DNA, 120 bp, Artificial Sequence
  ENSG00000179698_60 (sequence is synthesized)
gccctttctccaagctccttccttcctccctggcccctgtgcttcttttagactttcttgtcccagggctggggccaagtcctgtaaggagcttgcagggtgtcagggcccctagaagcc

SEQ ID NO: 631075 - DNA, 120 bp, Artificial Sequence
  ENSG00000179698_61 (sequence is synthesized)
agcacttctccaggtttcccttctcgtttgtcagagctgatgctcactgagggcctcgcccctggtatctcagggttctcctgccatctgtgttgagagtaggggttgctagctcagcca

SEQ ID NO: 631076 - DNA, 120 bp, Artificial Sequence
  ENSG00000179698_62 (sequence is synthesized)
gctctcggaggcctggcaggcagagctggactggcggctgaggggctctgagaggttatacaggtgaccaagggtggtgtccaggctggggaatccaggtcctcagcattccctgctgtg

SEQ ID NO: 631077 - DNA, 120 bp, Artificial Sequence
  ENSG00000179698_63 (sequence is synthesized)
cctcccagagaaagctcgaggcaaggggcagggctgggggttttgccggcaggggagggctctgctgtccttgcaacccatcaggcaccatctcttgcccctctgcagccaggggcaagc

SEQ ID NO: 631078 - DNA, 120 bp, Artificial Sequence
  ENSG00000179698_64 (sequence is synthesized)
tcagtagctcccctgccaaaggccaggccgccacagagccccctcccctccgacaaggcccagccagattccgctgcccacaggtggggacctgacggtgaagatgtggcgcgtcttccc

SEQ ID NO: 631079 - DNA, 120 bp, Artificial Sequence
  ENSG00000179698_65 (sequence is synthesized)
ggggcagccagcctcaggtcccatgcaggcctgctcagccctcctggaggccctcctttcccactctgggtgggggcctggcggtgtggggccctctggagttgatacaagcctgcctga

SEQ ID NO: 631080 - DNA, 120 bp, Artificial Sequence
  ENSG00000179698_66 (sequence is synthesized)
gccctggcacacccgtttggggttggtccttgtcccagcctctgccccagcccactggcatgccacccagcatcccacctgtgcctgtccctgtttgcagcgaggccttgtctctcatcc

SEQ ID NO: 631081 - DNA, 120 bp, Artificial Sequence
  ENSG00000179698_67 (sequence is synthesized)
atcgtcggagggcaacatctcagcacctggtgccgaaggaggtggggtgggtcctccttagcccgccctgccccggctcaggccccagccgtcagccctggggcaggcctgggatcccca

SEQ ID NO: 631082 - DNA, 120 bp, Artificial Sequence
  ENSG00000179698_68 (sequence is synthesized)
agggaactggggatgcatgagaagcatgggttagggtgagggacaggggagaaggtaggggctggcttgggtgtgacatgggagcagggcctcagcatgctaccctgcaggcatacccgg

SEQ ID NO: 631083 - DNA, 120 bp, Artificial Sequence
  ENSG00000179698_69 (sequence is synthesized)
ccacatcactggtgagggggcagcatgggtgaagcccagccaccgcccagctccggttcctgaccctgaaccctgccgccaggcctgtgctgctgccccacgctcaaactgtatgcctgc

SEQ ID NO: 631084 - DNA, 120 bp, Artificial Sequence
  ENSG00000179698_70 (sequence is synthesized)
tccagcctggactgcaccgttcgcatctggactgctgagaaccgcctcctgcggtaggctaggaggtggggagggctggggtctcctacctctgctcctcaccagagcccactggctgga

SEQ ID NO: 631085 - DNA, 120 bp, Artificial Sequence
  ENSG00000179709_0 (sequence is synthesized)
gtctcgtgtttctctcttccaatcggttgtctttatcgtggacactgaggtgttctctgccttgactaaagatgagtgacgtgaatccaccctctgacacccccattcccttttcatcct

SEQ ID NO: 631086 - DNA, 120 bp, Artificial Sequence
  ENSG00000179709_1 (sequence is synthesized)
cctccactcacagttctcatattccgccctggacattctcttgctaccccggctccccatgtgaaaatggggtcatgctgtacatgagaaacgtgagccatgaggagctacaacggttca

SEQ ID NO: 631087 - DNA, 120 bp, Artificial Sequence
  ENSG00000179709_2 (sequence is synthesized)
agcagctcttactgactgagctcagtactggcaccatgcccatcacctgggaccaggtcgagacagccagctgggcagaggtggttcatctcttgatagagcgtttccctggacgacgcg

SEQ ID NO: 631088 - DNA, 120 bp, Artificial Sequence
  ENSG00000179709_3 (sequence is synthesized)
cttgggatgtgacttcgaacatctttgccattatgaactgtgataaaatgtgtgttgtagtccgcagagagataaatgccattctgcctaccttggaaccagaggacttgaatgtgggag

SEQ ID NO: 631089 - DNA, 120 bp, Artificial Sequence
  ENSG00000179709_4 (sequence is synthesized)
aaacacaggtgaatctggaggaaggagaatctggtaaaatacggcggtataaatcgaatgtgatggaaaagtttttccccatatgggacattacgacttggcctggaaaccagagggact

SEQ ID NO: 631090 - DNA, 120 bp, Artificial Sequence
  ENSG00000179709_5 (sequence is synthesized)
tcttctaccaaggtgtacacaggcacgaggagtacttaccatgtctgcttctgcccaaaagaccccagggtagacagcccaagaccgtggccatacagggagctcctgggatcggaaaaa

SEQ ID NO: 631091 - DNA, 120 bp, Artificial Sequence
  ENSG00000179709_6 (sequence is synthesized)
caatcctggccaaaaaggtgatgtttgagtgggccagaaacaagttctacgcccacaagcgctggtgtgctttctacttccattgccaagaggtgaaccagacgacagaccagagcttct

SEQ ID NO: 631092 - DNA, 120 bp, Artificial Sequence
  ENSG00000179709_7 (sequence is synthesized)
ccgagctgattgagcaaaagtggcctggatctcaggacctcgtgtcaaagattatgtccaaacccgaccaacttctgctgctcttggatggctttgaggagctcacatctaccctcattg

SEQ ID NO: 631093 - DNA, 120 bp, Artificial Sequence
  ENSG00000179709_8 (sequence is synthesized)
acagactggaggacctgagtgaagactggaggcagaaattgcctgggtctgtcctactgagcagtttgctgagcaaaacgatgcttccagaggccacgctactgatcatgataagattta

SEQ ID NO: 631094 - DNA, 120 bp, Artificial Sequence
  ENSG00000179709_9 (sequence is synthesized)
cctcttggcagacatgcaagcccttgctgaaatgtccctctctcgtaacccttccggggtttaatacgatggaaaaaatcaagtatttccagatgtattttggacacacagaggagggag

SEQ ID NO: 631095 - DNA, 120 bp, Artificial Sequence
  ENSG00000179709_10 (sequence is synthesized)
accaagtcttgagtttcgccatggaaaacaccattctcttctccatgtgccgggtccctgtggtttgctggatggtctgctctggtctgaaacagcaaatggagagaggaaacaatctca

SEQ ID NO: 631096 - DNA, 120 bp, Artificial Sequence
  ENSG00000179709_11 (sequence is synthesized)
cacagtcatgtccaaatgccacctctgtgttcgtccggtatatttctagcttgtttcccaccagagctgagaacttttccagaaagatccaccaagcacaactggaaggtctgtgtcact

SEQ ID NO: 631097 - DNA, 120 bp, Artificial Sequence
  ENSG00000179709_12 (sequence is synthesized)
tggccgcagacagcatgtggcacaggaaatgggtgttaggtaaagaagatcttgaggaagccaagctggatcagacgggagtcaccgccttccttggcatgagtattcttcggagaattg

SEQ ID NO: 631098 - DNA, 120 bp, Artificial Sequence
  ENSG00000179709_13 (sequence is synthesized)
caggtgaggaagaccactatgtctttaccctcgtgacttttcaggaattttttgcggccttgttttatgttctctgtttcccacaaagactcaaaaattttcatgtgttgagccacgtga

SEQ ID NO: 631099 - DNA, 120 bp, Artificial Sequence
  ENSG00000179709_14 (sequence is synthesized)
atatccagcgcctgatagcgagtcccagaggaagcaaaagctatctctctcacatgggacttttcttattcggttttctgaacgaggcctgcgcttcggccgtggaacagtcattccaat

SEQ ID NO: 631100 - DNA, 120 bp, Artificial Sequence
  ENSG00000179709_15 (sequence is synthesized)
gcaaggtgtctttcggtaataagaggaaactgctgaaagtcatacctctgttgcataaatgtgacccaccttctccgggcagtggggtcccgcagttattctactgtctgcatgaaatcc

SEQ ID NO: 631101 - DNA, 120 bp, Artificial Sequence
  ENSG00000179709_16 (sequence is synthesized)
cctgaagcggtgtcaatatttgcatgaggtggaactgaccgtcaccctgaacttcatgaacgtgtggaagctcagctccagctcccatcctggctctgaagcgccagagagcaatgggct

SEQ ID NO: 631102 - DNA, 120 bp, Artificial Sequence
  ENSG00000179709_17 (sequence is synthesized)
gcatcgttggtggcaagacttatgctctgtgtttgcaacgaatgataagctggaagtcctgactatgaccaacagtgttttggggcctccttttttgaaggctctcgcggccgcactgag

SEQ ID NO: 631103 - DNA, 120 bp, Artificial Sequence
  ENSG00000179709_18 (sequence is synthesized)
gcaccctcagtgcaaactgcaaaagctactcctaaggcgtgtgaatagcaccatgttgaaccaggacttaatcggtgttttgacggggaaccagcatctgagatacttggaaatacaaca

SEQ ID NO: 631104 - DNA, 120 bp, Artificial Sequence
  ENSG00000179709_19 (sequence is synthesized)
tgtggaagtggagtccaaagctgtgaagcttctatgcagggtgctgagatccccccggtgccgtctgcagtgtctcaggttggaagactgcttggccacccctagaatttggactgatct

SEQ ID NO: 631105 - DNA, 120 bp, Artificial Sequence
  ENSG00000179709_20 (sequence is synthesized)
tggcaataatcttcaaggtaacgggcatctaaagactctcatactaagaaaaaactccctggagaactgtggggcgtattacctgtctgtggcccagctggagaggctgtcgatagagaa

SEQ ID NO: 631106 - DNA, 120 bp, Artificial Sequence
  ENSG00000179709_21 (sequence is synthesized)
ctgcaaccttacacagcttacttgtgaaagccttgcctcctgtctcaggcagagtaagatgctgacccacctgagcttggcagaaaacgccttgaaagatgaaggggccaagcatatttg

SEQ ID NO: 631107 - DNA, 120 bp, Artificial Sequence
  ENSG00000179709_22 (sequence is synthesized)
gaatgccctgccacacctgagatgtcctctgcagaggctggtactgagaaagtgtgacttgacctttaattgctgtcaggatatgatctctgcgctctgtaaaaataaaaccctgaaaag

SEQ ID NO: 631108 - DNA, 120 bp, Artificial Sequence
  ENSG00000179709_23 (sequence is synthesized)
tcttgacctaagttttaatagcctgaaggatgatggggtgatcctgctgtgtgaggccctgaagaaccctgactgtacattacagatcctggagctggaaaactgcctgttcacctccat

SEQ ID NO: 631109 - DNA, 120 bp, Artificial Sequence
  ENSG00000179709_24 (sequence is synthesized)
ctgctgccaggccatggcttccatgctccgcaaaaaccaacatctgagacatctggacttgagcaagaatgcgattggagtctatggtattctgaccttgtgcgaggccttctcaagcca

SEQ ID NO: 631110 - DNA, 120 bp, Artificial Sequence
  ENSG00000179709_25 (sequence is synthesized)
aaagaagagagaagaggtcattttctgtattcctgcctggactcgaataactagcttctccccaactcctcacccacccgacttcacgggaaaaagtgactgcctatcccagattaatcc

SEQ ID NO: 631111 - DNA, 120 bp, Artificial Sequence
  ENSG00000179709_26 (sequence is synthesized)
ttaggccgtccagtcatctttctctggggcttgattgatcagttcccactctgacaactggcaaataccaggcgttatcatcctgtatgcattaacgtactttcccctgaaacagagcaa

SEQ ID NO: 631112 - DNA, 120 bp, Artificial Sequence
  ENSG00000179709_27 (sequence is synthesized)
ccctgaaacagagcaacccagtcaacaccacagaacctcagctttgaaccctggagtgaggacggtgatgccctgtgtgtattaatatgctatgtaaggctgggcgtggtggctcacgcc

SEQ ID NO: 631113 - DNA, 80 bp, Artificial Sequence
  ENSG00000179709_28 (sequence is synthesized)
atatatatatatgctatataaagtttaaatgaaatgctttgagtcacctaagacaggatatagacaaagtcttcatcgtc

SEQ ID NO: 631114 - DNA, 120 bp, Artificial Sequence
  ENSG00000179709_29 (sequence is synthesized)
acaggatatagacaaagtcttcatcgtcttcttgcttcttctacctttatttattctcagctctgaatgtatgaacctgctcaatcacctcatcttaaaaataaaatcactgtccctaga

SEQ ID NO: 631115 - DNA, 120 bp, Artificial Sequence
  ENSG00000179715_0 (sequence is synthesized)
gccggctctcaactttgaggagtttcaagcagccgcggcggcagcagcagccctggacgcagcagccaagctcttcgctggctcccgggggctctcccgggttcctctcattgcaggctg

SEQ ID NO: 631116 - DNA, 120 bp, Artificial Sequence
  ENSG00000179715_1 (sequence is synthesized)
aaggtaatgagaggccctaagatcccagaggatgccataagaggaaaagtcaggggagtgttgaagactctgcctcctacaaatatccatccgcagagccatcctgtgcaaaggaaggag

SEQ ID NO: 631117 - DNA, 120 bp, Artificial Sequence
  ENSG00000179715_2 (sequence is synthesized)
ctaggctgtgcgccctgggcgtcatgatccttctgcgggcctccgaagtgcggcagctgcttcacaataagttcgtggtcatcctgggggactctgtgcatagggcagtatacaaggacc

SEQ ID NO: 631118 - DNA, 120 bp, Artificial Sequence
  ENSG00000179715_3 (sequence is synthesized)
tggtgcttctgctgcagaaggaccgcctgctcactcccgggcagcttagagcaaggggggagctgaacttcgaacaagatgagctggtggacggaggccagcggggccacatgcacaacg

SEQ ID NO: 631119 - DNA, 120 bp, Artificial Sequence
  ENSG00000179715_4 (sequence is synthesized)
gccttaactaccgtgaggtccgcgagttccgctccgaccaccatctggtacgtttttacttcctcacccgcgtgtactccgattacctccagaccatcttgaaagagctgcagtcgggcg

SEQ ID NO: 631120 - DNA, 120 bp, Artificial Sequence
  ENSG00000179715_5 (sequence is synthesized)
agcacgcccccgacctggtcatcatgaattcctgcctctgggacatctccaggtatggtccgaactcctggagaagctacctggagaacctggagaacctgttccagtgcctgggccagg

SEQ ID NO: 631121 - DNA, 120 bp, Artificial Sequence
  ENSG00000179715_6 (sequence is synthesized)
tgctgcccgagtcttgcctcctggtgtggaacacggccatgcctgtgggcgaggaagtcaccgggggttttcttccgcccaagctccggcggcagaaggccaccttcctgaaaaacgaag

SEQ ID NO: 631122 - DNA, 120 bp, Artificial Sequence
  ENSG00000179715_7 (sequence is synthesized)
ttgcatttccacttccgccacgcgagggagaacctgcactgggacggggtgcactggaatggacgtgtgcaccgctgcctctcccagctgctgctggcccacgtggccgacgcctggggt

SEQ ID NO: 631123 - DNA, 120 bp, Artificial Sequence
  ENSG00000179715_8 (sequence is synthesized)
gtggagctgccccaccgccaccccgtgggcgagtggatcaagaagaaaaaacctggcccgagagtcgaagggccgccccaggccaacagaaatcacccggccttacctctgtccccaccc

SEQ ID NO: 631124 - DNA, 120 bp, Artificial Sequence
  ENSG00000179715_9 (sequence is synthesized)
ttaccttcccccacataccgccccctgcttgggttcccaccccagcgcttgccgctgctcccgctcctgtccccacagcctcctcctcccattctccatcaccagggaatgccccggttc

SEQ ID NO: 631125 - DNA, 120 bp, Artificial Sequence
  ENSG00000179715_10 (sequence is synthesized)
ccacagggtcccccagatgcctgtttttcctcagaccatactttccagtcggatcaattctattgccattcagatgtcccctcatcagcccatgcaggtttcttcgtcgaagacaatttt

SEQ ID NO: 631126 - DNA, 120 bp, Artificial Sequence
  ENSG00000179715_11 (sequence is synthesized)
atggttggtcctcagctgcctatgcccttcttccccacaccccgttatcagcggcctgccccagtggtacataggggttttggcaggtatcgtccccgtggcccctatacgccctgggga

SEQ ID NO: 631127 - DNA, 120 bp, Artificial Sequence
  ENSG00000179715_12 (sequence is synthesized)
cagcggcctcgaccttcaaagagaagggccccagccaatcctgagccaaggcctcaatagacggacctaggccttatttcctctttatgaacatggattggacagatctgacacttcctt

SEQ ID NO: 631128 - DNA, 120 bp, Artificial Sequence
  ENSG00000179715_13 (sequence is synthesized)
tccattgcttggcctgaacagactgaccttgttaacttaagcctggagtccatgcctcgtcttccttttgttcattgctgttaccaagaaagccaaggaagagcagcctgactcattctt

SEQ ID NO: 631129 - DNA, 120 bp, Artificial Sequence
  ENSG00000179715_14 (sequence is synthesized)
cttggctgcagcctcttccccacttcctgggagtgacccagcgttattcctgcctcctcactcctattctctttgcctttgtgtaaaaataaaatggaaataaacaagttgcacagaagt

SEQ ID NO: 631130 - DNA, 120 bp, Artificial Sequence
  ENSG00000179715_15 (sequence is synthesized)
ttaatcaaaggaagagtcaaaataagctacacccagattactgagaaaggtgaaatgaaaacaagctcaaaaccaaattccaggaagatgctgtctttgtattgacttaccatttcatgt

SEQ ID NO: 631131 - DNA, 120 bp, Artificial Sequence
  ENSG00000179715_16 (sequence is synthesized)
tttcacacatgtcaaagtcttgaagcttcggtcattagtcttccgcttcctaaagcaagaaactaaatgctgacttgtgtcgtttgccccagatgccaccggaaatgtcatcttctcccc

SEQ ID NO: 631132 - DNA, 120 bp, Artificial Sequence
  ENSG00000179715_17 (sequence is synthesized)
agacgctggcttgcaagcacagcagcacccagaggctaacctatttcccctatagcccaagctctgagatctcccgtctggtcacaatgatctacaggagaggaagaaagctatctaggg

SEQ ID NO: 631133 - DNA, 120 bp, Artificial Sequence
  ENSG00000179715_18 (sequence is synthesized)
caaagatgtttcctttctttttcaaagcaagaaactagaatgtgtttaatgctaaaaagaaggatccaggccaaggagggtaaagaaaatgcagaatgcaaattatcccctcactggggg

SEQ ID NO: 631134 - DNA, 120 bp, Artificial Sequence
  ENSG00000179715_19 (sequence is synthesized)
ccgtctggtcacaatgatctacaggagaggaagaaagctatctagggacgagatctagaatcaactgagagagatgcttaaaaatcaccagttactttaatgaaccatcttgaaagagct

SEQ ID NO: 631135 - DNA, 120 bp, Artificial Sequence
  ENSG00000179750_0 (sequence is synthesized)
actttaaggagggctgtccaactgcaaggacgctgtaagcaggaagtgaaaccacagagcttcaaaaaaagagcgggacagggacaagcgtatctaagaggctgaacatgaatccacaga

SEQ ID NO: 631136 - DNA, 120 bp, Artificial Sequence
  ENSG00000179750_1 (sequence is synthesized)
tcagaaatccgatggagcggatgtatcgagacacattctacgacaactttgaaaacgaacccatcctctatggtcggagctacacttggctgtgctatgaagtgaaaataaagaggggcc

SEQ ID NO: 631137 - DNA, 120 bp, Artificial Sequence
  ENSG00000179750_2 (sequence is synthesized)
gctcaaatctcctttgggacacaggggtctttcgaggccaggtgtatttcaagcctcagtaccacgcagaaatgtgcttcctctcttggttctgtggcaaccagctgcctgcttacaagt

SEQ ID NO: 631138 - DNA, 120 bp, Artificial Sequence
  ENSG00000179750_3 (sequence is synthesized)
gtttccagatcacctggtttgtatcctggaccccctgcccggactgtgtggcgaagctggccgaattcctgtctgagcaccccaatgtcaccctgaccatctctgccgcccgcctctact

SEQ ID NO: 631139 - DNA, 120 bp, Artificial Sequence
  ENSG00000179750_4 (sequence is synthesized)
actactgggaaagagattaccgaagggcgctctgcaggctgagtcaggcaggagcccgcgtgacgatcatggactatgaagaatttgcatactgctgggaaaactttgtgtacaatgaag

SEQ ID NO: 631140 - DNA, 120 bp, Artificial Sequence
  ENSG00000179750_5 (sequence is synthesized)
gtcagcaattcatgccttggtacaaattcgatgaaaattatgcattcctgcaccgcacgctaaaggagattctcagatacctgatggatccagacacattcactttcaactttaataatg

SEQ ID NO: 631141 - DNA, 120 bp, Artificial Sequence
  ENSG00000179750_6 (sequence is synthesized)
acttgtgctatgaggtggagcgcctggacaatggcacctgggtcctgatggaccagcacatgggctttctatgcaacgaggctaagaatcttctctgtggcttttacggccgccatgcgg

SEQ ID NO: 631142 - DNA, 120 bp, Artificial Sequence
  ENSG00000179750_7 (sequence is synthesized)
agctgcgcttcttggacctggttccttctttgcagttggacccggcccagatctacagggtcacttggttcatctcctggagcccctgcttctcctggggctgtgccggggaagtgcgtg

SEQ ID NO: 631143 - DNA, 120 bp, Artificial Sequence
  ENSG00000179750_8 (sequence is synthesized)
cgttccttcaggagaacacacacgtgagactgcgcatcttcgctgcccgcatctatgattacgaccccctatataaggaggcgctgcaaatgctgcgggatgctggggcccaagtctcca

SEQ ID NO: 631144 - DNA, 120 bp, Artificial Sequence
  ENSG00000179750_9 (sequence is synthesized)
tcatgacctacgatgagtttgagtactgctgggacacctttgtgtaccgccagggatgtcccttccagccctgggatggactagaggagcacagccaagccctgagtgggaggctgcggg

SEQ ID NO: 631145 - DNA, 120 bp, Artificial Sequence
  ENSG00000179750_10 (sequence is synthesized)
ccattctccagaatcagggaaactgaaggatgggcctcagtctctaaggaaggcagagacctgggttgagcagcagaataaaagatcttcttccaagaaatgcaaacagaccgttcacca

SEQ ID NO: 631146 - DNA, 120 bp, Artificial Sequence
  ENSG00000179750_11 (sequence is synthesized)
ccatctccagctgctcacagacaccagcaaagcaatgtgctcctgatcaagtagattttttaaaaatcagagtcaattaattttaattgaaaatttctcttatgttccaagtgtacaaga

SEQ ID NO: 631147 - DNA, 120 bp, Artificial Sequence
  ENSG00000179750_12 (sequence is synthesized)
gtaagattatgctcaatattcccagaatagttttcaatgtattaatgaagtgattaattggctccatatttagactaataaaacattaagaatcttccataattgtttccacaaacacta

SEQ ID NO: 631148 - DNA, 120 bp, Artificial Sequence
  ENSG00000179750_13 (sequence is synthesized)
cccctgtgccttgccttcccctctgctcagagcctcctctgggttccctgctccccacagggcgcccagctccgtccctccctttccttctcacagcctccttctctttcccacctcccg

SEQ ID NO: 631149 - DNA, 120 bp, Artificial Sequence
  ENSG00000179751_0 (sequence is synthesized)
ggcactgccaccatgtccccgctgcgcccgctgctgctggccctggcccttgcctccgtgccttgcgcccagggcgcctgccccgcctccgccgacctcaagcactcggacgggacgcgc

SEQ ID NO: 631150 - DNA, 120 bp, Artificial Sequence
  ENSG00000179751_1 (sequence is synthesized)
acttgcgccaagctctatgacaagagcgacccctactatgagaactgctgcgggggcgccgagctgtcgctggagtcgggcgcagacctgccctacctgccctccaactgggccaacacc

SEQ ID NO: 631151 - DNA, 120 bp, Artificial Sequence
  ENSG00000179751_2 (sequence is synthesized)
tacccgcgcctggaggagtaccgccggggcatcttaggagactggtccaacgctatctccgcgctctactgcaggtgcagctgatgcattgctggtctctcatctgcagcttccacagag

SEQ ID NO: 631152 - DNA, 120 bp, Artificial Sequence
  ENSG00000179751_3 (sequence is synthesized)
tgccaagcccctcactcagcccatccctgggctctgctccggggccccaagacccaggaggaggagcgttctgcctgccccctcccacctcccctgcaatacagcctttgtgcagttgtc

SEQ ID NO: 631153 - DNA, 120 bp, Artificial Sequence
  ENSG00000179761_0 (sequence is synthesized)
gccttcctcctcgtcctttagccgggagcctgtctttgcttgcctttgcctttgaggctctgtggctgtggggctgagtggcatcatggcggctcagaaagatctctgggacgccattgt

SEQ ID NO: 631154 - DNA, 120 bp, Artificial Sequence
  ENSG00000179761_1 (sequence is synthesized)
gattggggcggggatccagggctgcttcactgcataccacctggccaaacacaggaagaggatcctcctgctggagcagttctttctaccacactcccgaggaagctcccatggacaaag

SEQ ID NO: 631155 - DNA, 120 bp, Artificial Sequence
  ENSG00000179761_2 (sequence is synthesized)
ccggataatccgaaaggcgtacctggaagacttttacacccggatgatgcatgagtgctatcagatatgggcccagctggagcacgaggctggaacccaattgcacaggcagactggatt

SEQ ID NO: 631156 - DNA, 120 bp, Artificial Sequence
  ENSG00000179761_3 (sequence is synthesized)
actgctgctgggaatgaaagagaatcaagaattaaagacaatccaggccaatctgtcgaggcagagggtagaacaccagtgtctttcatctgaggaactgaagcaacgtttcccaaatat

SEQ ID NO: 631157 - DNA, 120 bp, Artificial Sequence
  ENSG00000179761_4 (sequence is synthesized)
tcggttgcccaggggagaagtggggctcttggacaattccggaggagttatctatgcatataaggccctcagagccctgcaggatgcaattcgacagctaggaggcatagtgcgtgacgg

SEQ ID NO: 631158 - DNA, 120 bp, Artificial Sequence
  ENSG00000179761_5 (sequence is synthesized)
agagaaggtggtggagataaacccagggctactggtcacggtgaaaaccacctccaggagctaccaagctaagagcttggtcatcacagcaggtccttggaccaaccagctcctccgtcc

SEQ ID NO: 631159 - DNA, 120 bp, Artificial Sequence
  ENSG00000179761_6 (sequence is synthesized)
cctgggcattgagatgcctctccagaccctgcggatcaacgtgtgttactggcgagagatggttcctgggagctatggtgtgtcccaggcctttccgtgcttcctgtggctgggcttgtg

SEQ ID NO: 631160 - DNA, 120 bp, Artificial Sequence
  ENSG00000179761_7 (sequence is synthesized)
tccccaccacatctacggactgcccacaggagagtacccagggctgatgaaggtcagctatcaccacggcaaccacgcagaccctgaggagcgggactgccccacagcacgcacagacat

SEQ ID NO: 631161 - DNA, 120 bp, Artificial Sequence
  ENSG00000179761_8 (sequence is synthesized)
cggagacgtccagatcctgagcagctttgtcagagatcacttacctgatctgaagcccgagcctgctgtcattgagagctgcatgtacacgaatacccctgatgagcagttcattctcga

SEQ ID NO: 631162 - DNA, 120 bp, Artificial Sequence
  ENSG00000179761_9 (sequence is synthesized)
aaagtatgacaacattgtcattggtgctggattctctgggcacgggttcaagctggcccctgtggtggggaagatcctgtatgaattaagcatgaaattaacaccatcttatgacttggc

SEQ ID NO: 631163 - DNA, 120 bp, Artificial Sequence
  ENSG00000179761_10 (sequence is synthesized)
accttttcgaatcagccgtttcccaagcctgggcaaagcccacctttgacctctggccagaagcctcccttctgtgcacaggagccagtttcacagatggagaagatgtctcagatgaag

SEQ ID NO: 631164 - DNA, 120 bp, Artificial Sequence
  ENSG00000179761_11 (sequence is synthesized)
ggagtgtccctgagatatcatccttttcttctgcctcgcctgaatcccccataaacaccagatgattgagtctaccttctttccttggcccgctccctttttcttctgcctcacttgaat

SEQ ID NO: 631165 - DNA, 120 bp, Artificial Sequence
  ENSG00000179761_12 (sequence is synthesized)
cccccgtaaacaccagacgattgagtctaccttcttttcttggccacctccccattcacaactactttctcgctcccagaaggttgatcagatattctacaatcacagagtagcaaggac

SEQ ID NO: 631166 - DNA, 120 bp, Artificial Sequence
  ENSG00000179761_13 (sequence is synthesized)
gcaaggacgtttgagatgggtatatcagtaagaagagggcacaagaactggctctggagaccaaagcagttgttaaaaattctctttgctgggggccgggtgtggtggctcacacctgta

SEQ ID NO: 631167 - DNA, 120 bp, Artificial Sequence
  ENSG00000179761_14 (sequence is synthesized)
ctgtctcaaaaaaaaaacaaaacaaaaaaaacctctttgctggtatatttgaagagcttgggatggatttgactaaatctgccccgaggagggtgaacaaggtgatctcagagatcacta

SEQ ID NO: 631168 - DNA, 120 bp, Artificial Sequence
  ENSG00000179761_15 (sequence is synthesized)
ctgctcttggagttccttctcctaaagctaaggccagcctccatcacaaatgcccataaaatctggctcgtctttgatgaacaataaatatttgttgaacaaataaataactgccctgca

SEQ ID NO: 631169 - DNA, 120 bp, Artificial Sequence
  ENSG00000179761_16 (sequence is synthesized)
agggggtggggaggcctgccggtgcaacgagatggagtgggctggcgcctcgggagagcgaatcgagggcggcggagctggaatcttgctccattgcccaggctggagtacaatggtgtg

SEQ ID NO: 631170 - DNA, 120 bp, Artificial Sequence
  ENSG00000179761_17 (sequence is synthesized)
gggaactgtagttccatgtgcgtgcgatgcactctatgggcccagctgtgctgctgtgttaacctggaggcattatggaacaggaggccctgagtacctgcggtggggtgaggccagagt

SEQ ID NO: 631171 - DNA, 120 bp, Artificial Sequence
  ENSG00000179761_18 (sequence is synthesized)
gagctccagctcagatgatcagggagaaggctgcaccagtctcattggattcttcacaccagctggtgctgaaggttcaggggttgaagttgaaagaagcccgtggggtcctccataaag

SEQ ID NO: 631172 - DNA, 120 bp, Artificial Sequence
  ENSG00000179761_19 (sequence is synthesized)
gtcagcatcagtttccttgttcataaaatgaaggggctggagtagttgaactggaaggttttttctaattttgcttctttgtgaatctaagtgaggtgagattgcagcaggatggttgaa

SEQ ID NO: 631173 - DNA, 120 bp, Artificial Sequence
  ENSG00000179761_20 (sequence is synthesized)
ttgccacttccttgtatggacagtgggggactccaaagacccgctcgggagaggcccaaagcccggtacccggacgtgctgggggaagcacaaaggggccaacaagaagggggtggggag

SEQ ID NO: 631174 - DNA, 120 bp, Artificial Sequence
  ENSG00000179761_21 (sequence is synthesized)
gcctgccggtgcaacgagatggagtgggctggcgcctcgggagagcgaatcgagggcggcggggcccagctgtgctgctgtgttaacctggaggcattatggaacagagctggaatcttg

SEQ ID NO: 631175 - DNA, 120 bp, Artificial Sequence
  ENSG00000179761_22 (sequence is synthesized)
cagatgggtgcaacaaccacagataccaaggggagtggcagcaggaaagagggagagggatccttgggtaggagactctcagaagcgcacaatcctcctctttgccaggaggacaggaat

SEQ ID NO: 631176 - DNA, 120 bp, Artificial Sequence
  ENSG00000179761_23 (sequence is synthesized)
caggccctcacaagaaagctgctcctttcgccattttggtaatgggatatgggctatcatgcccttggagtcctcaggcatgaacagaaaggagcaaggtgtggtgttggatggagctgg

SEQ ID NO: 631177 - DNA, 120 bp, Artificial Sequence
  ENSG00000179761_24 (sequence is synthesized)
tcgcctgtcggtgacagcagtattcctagggatgttgtacttgaccgtttggttctaccatcgggtgtggctggaccaggccaccatattggtaaagagaaaagccatttgagacagaaa

SEQ ID NO: 631178 - DNA, 120 bp, Artificial Sequence
  ENSG00000179761_25 (sequence is synthesized)
atgacgcttttggaggcgtgtgggatgactgtggttcctaattctctcccgctcctgacagataattttatcagttaattgtatcctcagcatccctgccttgcgtggtggtggcactgg

SEQ ID NO: 631179 - DNA, 120 bp, Artificial Sequence
  ENSG00000179761_26 (sequence is synthesized)
taaagtggagagtttgtaatcctgacaacgcccagctacctgcgtaccccggactccaactcccagtttgcaacgccaaagggtctaaagggcgaacgggggcgcattgcatcctgggag

SEQ ID NO: 631180 - DNA, 120 bp, Artificial Sequence
  ENSG00000179761_27 (sequence is synthesized)
caagaatcgcgataggtctgatggattgtgggaactgtagttccatggcccagctgtgctgctgtgttaacctggaggcattatggaacagttctttctaccacactcccgaggaagctc

SEQ ID NO: 631181 - DNA, 120 bp, Artificial Sequence
  ENSG00000179772_0 (sequence is synthesized)
acgccagccctggaagctgagcctgacccagcaggtcccagcagcctggcagcccggccagcatgcagcagcagcctctgcccgggcctggcgcccccacaactgagccaaccaagcctc

SEQ ID NO: 631182 - DNA, 120 bp, Artificial Sequence
  ENSG00000179772_1 (sequence is synthesized)
cctacagctacatcgcccttattgctatggccatccagagctcaccggggcagcgggccaccctcagtggcatctaccgctacatcatgggccgattcgccttctaccgccacaaccggc

SEQ ID NO: 631183 - DNA, 120 bp, Artificial Sequence
  ENSG00000179772_2 (sequence is synthesized)
ccggctggcagaacagcatccgccacaacctgtcactcaacgagtgctttgtcaaggtgccccgcgatgaccgcaagccaggcaagggcagctactggacgctggaccctgactgccacg

SEQ ID NO: 631184 - DNA, 120 bp, Artificial Sequence
  ENSG00000179772_3 (sequence is synthesized)
acatgtttgagcacggcagcttcctacgccgccgccgccgcttcacccggcagacaggtgctgagggcacccggggccccgccaaggcacgccgtggacccctcagggcgaccagccagg

SEQ ID NO: 631185 - DNA, 120 bp, Artificial Sequence
  ENSG00000179772_4 (sequence is synthesized)
acccaggagtccccaacgccacgaccggcaggcagtgctcattcccaccagagctgccagatcccaagggcctaagctttgggggtctggtgggggccatgccagccagtatgtgcccag

SEQ ID NO: 631186 - DNA, 120 bp, Artificial Sequence
  ENSG00000179772_5 (sequence is synthesized)
catgcccagcgtttggctttcctgccggcttctcagaggctgagagttttaataaggcccctacgcccgtcttgtccccggaatcaggcatcgggagcagctaccagtgtcggctgcagg

SEQ ID NO: 631187 - DNA, 120 bp, Artificial Sequence
  ENSG00000179772_6 (sequence is synthesized)
cactgaatttttgcatgggggctgacccaggccttgagcacctcttggcctcagcagccccctcccctgcaccacccacccctccaggctcactccgggccccactgcccctgccaactg

SEQ ID NO: 631188 - DNA, 120 bp, Artificial Sequence
  ENSG00000179772_7 (sequence is synthesized)
accacaaggaaccctgggttgcaggtggcttccctgtccagggaggctccggctacccattggggctgaccccctgcctataccggacgccaggaatgttcttctttgagtaaaggcagc

SEQ ID NO: 631189 - DNA, 120 bp, Artificial Sequence
  ENSG00000179772_8 (sequence is synthesized)
ctcacctcgggcagtccctgcaggtccctcaccctccgggctgagcctggctctaggacctgaagaactctcgaaggacccagccctggtgagccaaggacaaccacacagaaagccagg

SEQ ID NO: 631190 - DNA, 120 bp, Artificial Sequence
  ENSG00000179772_9 (sequence is synthesized)
attgaagcggtgctcagccaggcccctggggcctccggacaaacttgggggtgaggggaagcagggcctcttgggatttactctgtggctctcagggccaataaagccatgtgatgatga

SEQ ID NO: 631191 - DNA, 120 bp, Artificial Sequence
  ENSG00000179774_0 (sequence is synthesized)
ctgcactctccgacagctactgcgctaaaagcgctccttccctgagcttcgggaaagagttcatcttcctgcaaaggagtctcaggctttcccagaggacttgaaaggccttcctcgaac

SEQ ID NO: 631192 - DNA, 120 bp, Artificial Sequence
  ENSG00000179774_1 (sequence is synthesized)
cagccacaccaaactctgctgcagaaggtttccttctctttttcaacttcatgttgagaaaatgactttctcttgagcatctcattttcccctaaatttgggcaagtgaagagatatcag

SEQ ID NO: 631193 - DNA, 120 bp, Artificial Sequence
  ENSG00000179774_2 (sequence is synthesized)
cctggtcatccagtagaacagaaggccgagtcccgcactcccccactgtaaactatttgattgcacgtgagttgctttgtttatgacttatttgctcagaagaggcacgttgggaagcgg

SEQ ID NO: 631194 - DNA, 120 bp, Artificial Sequence
  ENSG00000179774_3 (sequence is synthesized)
ctcgagagaccagcccacgcgcaggtcctgagcgggcgggcgtgcgaggtcggcgcctcgctgcttggggccggggatgaagtcctgcaagcccagcggcccgccggcgggagcgcgcgt

SEQ ID NO: 631195 - DNA, 80 bp, Artificial Sequence
  ENSG00000179774_4 (sequence is synthesized)
gggcggctggagagcgcggcgcgcaggcgcctggcggccaacgcgcgcgagcgccgccgcatgcaggggctcaacactgc

SEQ ID NO: 631196 - DNA, 120 bp, Artificial Sequence
  ENSG00000179774_5 (sequence is synthesized)
gctcaacactgccttcgaccgcttacgcagggtggttccccagtggggccaggataaaaagctgtccaagtacgagaccctgcagatggccctgagctacatcatggctctgacccggat

SEQ ID NO: 631197 - DNA, 120 bp, Artificial Sequence
  ENSG00000179774_6 (sequence is synthesized)
ctcccgttcccgggcgcgaagctgccgggcgagagcgagctgtacagccagagactcttcggcttccagcccgagcccttccagatggccacctagggcgcgcgcctccgcgggggtggg

SEQ ID NO: 631198 - DNA, 120 bp, Artificial Sequence
  ENSG00000179774_7 (sequence is synthesized)
tgtccggcagccgctccgagcctcggccctgccccaagtagcccagaagcctccggcggcccaggattctaaggatgcaatcctcgaggaaaattagtcgattctcagattacctttatt

SEQ ID NO: 631199 - DNA, 120 bp, Artificial Sequence
  ENSG00000179774_8 (sequence is synthesized)
cgcatcatcagacctatggacgcaatcatttaattgcctttcttttcccctcctcctttgtattttgtagatttcattaatggatcttgtgaatgggttgattgctgtgaaaataatgcc

SEQ ID NO: 631200 - DNA, 120 bp, Artificial Sequence
  ENSG00000179774_9 (sequence is synthesized)
ccctttccccttttctgggctactttgagggaaaacaatcttaagaaaaataggattaagctattctgttccagtcctcagagaaataatcactttcttaaactttgtgagtttgtcctg

SEQ ID NO: 631201 - DNA, 120 bp, Artificial Sequence
  ENSG00000179774_10 (sequence is synthesized)
ttcgggtgaagttacagtatccattacttgtgtttgctcacaacagagctaccttcctgttgtgtaaatgcgtttttgctttagtgcattgtgtgtgcaagcatgaagtagaaacacttt

SEQ ID NO: 631202 - DNA, 120 bp, Artificial Sequence
  ENSG00000179774_11 (sequence is synthesized)
ttttttctgggtacagtacatgggtatcggtgctctgtatttttttaaactgtgtacacattattaaaatatacattttataaaatataaataaaaacgtggatttgtttttcatgccaa

SEQ ID NO: 631203 - DNA, 120 bp, Artificial Sequence
  ENSG00000179776_0 (sequence is synthesized)
actcacgctcagccctggacggacaggcagtccaacggaacagaaacatccctcagcccacaggcacgatctgttcctcctgggaagatgcagaggctcatgatgctcctcgccacatcg

SEQ ID NO: 631204 - DNA, 120 bp, Artificial Sequence
  ENSG00000179776_1 (sequence is synthesized)
ggcgcctgcctgggcctgctggcagtggcagcagtggcagcagcaggtgctaaccctgcccaacgggacacccacagcctgctgcccacccaccggcgccaaaagagagattggatttgg

SEQ ID NO: 631205 - DNA, 120 bp, Artificial Sequence
  ENSG00000179776_2 (sequence is synthesized)
aaccagatgcacattgatgaagagaaaaacacctcacttccccatcatgtaggcaagatcaagtcaagcgtgagtcgcaagaatgccaagtacctgctcaaaggagaatatgtgggcaag

SEQ ID NO: 631206 - DNA, 120 bp, Artificial Sequence
  ENSG00000179776_3 (sequence is synthesized)
gtcttccgggtcgatgcagagacaggagacgtgttcgccattgagaggctggaccgggagaatatctcagagtaccacctcactgctgtcattgtggacaaggacactggcgaaaacctg

SEQ ID NO: 631207 - DNA, 120 bp, Artificial Sequence
  ENSG00000179776_4 (sequence is synthesized)
gagactccttccagcttcaccatcaaagttcatgacgtgaacgacaactggcctgtgttcacgcatcggttgttcaatgcgtccgtgcctgagtcgtcggctgtggggacctcagtcatc

SEQ ID NO: 631208 - DNA, 120 bp, Artificial Sequence
  ENSG00000179776_5 (sequence is synthesized)
tctgtgacagcagtggatgcagacgaccccactgtgggagaccacgcctctgtcatgtaccaaatcctgaaggggaaagagtattttgccatcgataattctggacgtattatcacaata

SEQ ID NO: 631209 - DNA, 120 bp, Artificial Sequence
  ENSG00000179776_6 (sequence is synthesized)
acgaaaagcttggaccgagagaagcaggccaggtatgagatcgtggtggaagcgcgagatgcccagggcctccggggggactcgggcacggccaccgtgctggtcactctgcaagacatc

SEQ ID NO: 631210 - DNA, 120 bp, Artificial Sequence
  ENSG00000179776_7 (sequence is synthesized)
aatgacaacttccccttcttcacccagaccaagtacacatttgtcgtgcctgaagacacccgtgtgggcacctctgtgggctctctgtttgttgaggacccagatgagccccagaaccgg

SEQ ID NO: 631211 - DNA, 120 bp, Artificial Sequence
  ENSG00000179776_8 (sequence is synthesized)
atgaccaagtacagcatcttgcggggcgactaccaggacgctttcaccattgagacaaaccccgcccacaacgagggcatcatcaagcccatgaagcctctggattatgaatacatccag

SEQ ID NO: 631212 - DNA, 120 bp, Artificial Sequence
  ENSG00000179776_9 (sequence is synthesized)
caatacagcttcatcgtcgaggccacagaccccaccatcgacctccgatacatgagccctcccgcgggaaacagagcccaggtcattatcaacatcacagatgtggacgagccccccatt

SEQ ID NO: 631213 - DNA, 120 bp, Artificial Sequence
  ENSG00000179776_10 (sequence is synthesized)
ttccagcagcctttctaccacttccagctgaaggaaaaccagaagaagcctctgattggcacagtgctggccatggaccctgatgcggctaggcatagcattggatactccatccgcagg

SEQ ID NO: 631214 - DNA, 120 bp, Artificial Sequence
  ENSG00000179776_11 (sequence is synthesized)
accagtgacaagggccagttcttccgagtcacaaaaaagggggacatttacaatgagaaagaactggacagagaagtctacccctggtataacctgactgtggaggccaaagaactggat

SEQ ID NO: 631215 - DNA, 120 bp, Artificial Sequence
  ENSG00000179776_12 (sequence is synthesized)
tccactggaacccccacaggaaaagaatccattgtgcaagtccacattgaagttttggatgagaatgacaatgccccggagtttgccaagccctaccagcccaaagtgtgtgagaacgct

SEQ ID NO: 631216 - DNA, 120 bp, Artificial Sequence
  ENSG00000179776_13 (sequence is synthesized)
gtccatggccagctggtcctgcagatctccgcaatagacaaggacataacaccacgaaacgtgaagttcaaattcatcttgaatactgagaacaactttaccctcacggataatcacgat

SEQ ID NO: 631217 - DNA, 120 bp, Artificial Sequence
  ENSG00000179776_14 (sequence is synthesized)
aacacggccaacatcacagtcaagtatgggcagtttgaccgggagcataccaaggtccacttcctacccgtggtcatctcagacaatgggatgccaagtcgcacgggcaccagcacgctg

SEQ ID NO: 631218 - DNA, 120 bp, Artificial Sequence
  ENSG00000179776_15 (sequence is synthesized)
accgtggccgtgtgcaagtgcaacgagcagggcgagttcaccttctgcgaggatatggccgcccaggtgggcgtgagcatccaggcagtggtagccatcttactctgcatcctcaccatc

SEQ ID NO: 631219 - DNA, 120 bp, Artificial Sequence
  ENSG00000179776_16 (sequence is synthesized)
cctacgacgaggagggcggcggcgagatggacaccaccagctacgatgtgtcggtgctcaactcggtgcgccgcggcggggccaagcccccgcggcccgcgctggacgcccggccttccc

SEQ ID NO: 631220 - DNA, 120 bp, Artificial Sequence
  ENSG00000179776_17 (sequence is synthesized)
tctatgcgcaggtgcagaagccaccgaggcacgcgcctggggcacacggagggcccggggagatggcagccatgatcgaggtgaagaaggacgaggcggaccacgacggcgacggccccc

SEQ ID NO: 631221 - DNA, 120 bp, Artificial Sequence
  ENSG00000179776_18 (sequence is synthesized)
cctacgacacgctgcacatctacggctacgagggctccgagtccatagccgagtccctcagctccctgggcaccgactcatccgactctgacgtggattacgacttccttaacgactggg

SEQ ID NO: 631222 - DNA, 120 bp, Artificial Sequence
  ENSG00000179776_19 (sequence is synthesized)
gacccaggtttaagatgctggctgagctgtacggctcggacccccgggaggagctgctgtattaggcggccgaggtcactctgggcctggggacccaaaccccctgcagcccaggccagt

SEQ ID NO: 631223 - DNA, 120 bp, Artificial Sequence
  ENSG00000179776_20 (sequence is synthesized)
cagacgccaggcaccacagcctccaaaaatggcagtgactccccagcccagcaccccttcctcgtgggtcccagagacctcatcagccttgggatagcaaactccaggttcctgaaatat

SEQ ID NO: 631224 - DNA, 120 bp, Artificial Sequence
  ENSG00000179776_21 (sequence is synthesized)
ccaggaatatatgtcagtgatgactattctcaaatgctggcaaatccaggctggtgttctgtctgggctcagacatccacataaccctgtcacccacagaccgccgtctaactcaaagac

SEQ ID NO: 631225 - DNA, 120 bp, Artificial Sequence
  ENSG00000179776_22 (sequence is synthesized)
ttcctctggctccccaaggctgcaaagcaaaacagactgtgtttaactgctgcagggtctttttctagggtccctgaacgccctggtaaggctggtgaggtcctggtgcctatctgcctg

SEQ ID NO: 631226 - DNA, 120 bp, Artificial Sequence
  ENSG00000179776_23 (sequence is synthesized)
gaggcaaaggcctggacagcttgacttgtggggcaggattctctgcagcccattcccaagggagactgaccatcatgccctctctcgggagccctagccctgctccaactccatactcca

SEQ ID NO: 631227 - DNA, 120 bp, Artificial Sequence
  ENSG00000179776_24 (sequence is synthesized)
ctccaagtgccccaccactccccaacccctctccaggcctgtcaagagggaggaaggggccccatggcagctcctgaccttgggtcctgaagtgacctcactggcctgccatgccagtaa

SEQ ID NO: 631228 - DNA, 120 bp, Artificial Sequence
  ENSG00000179776_25 (sequence is synthesized)
ctgtgctgtactgagcactgaaccacattcagggaaatggcttattaaactttgaagcaactgtgaattcattctggaggggcagtggagatcaggagtgacagatcacagggtgagggc

SEQ ID NO: 631229 - DNA, 120 bp, Artificial Sequence
  ENSG00000179776_26 (sequence is synthesized)
cacctccacacccaccccctctggagaaggcctggaagagctgagaccttgctttgagactcctcagcacccctccagttttgcctgagaaggggcagatgttcccggagcagaagacgt

SEQ ID NO: 631230 - DNA, 120 bp, Artificial Sequence
  ENSG00000179776_27 (sequence is synthesized)
ctccccttctctgcctcacctggtcgccaatccatgctctctttcttttctctgtctactccttatcccttggtttagaggaacccaagatgtggcctttagcaaaactggacaatgtcc

SEQ ID NO: 631231 - DNA, 120 bp, Artificial Sequence
  ENSG00000179776_28 (sequence is synthesized)
aaacccactcatgactgcatgacggagccgagccatgtgtctttacacctcgctgttgtcacatctcagggaactgaccctcaggcacaccttgcagaaggcaaggccctgccctgccca

SEQ ID NO: 631232 - DNA, 120 bp, Artificial Sequence
  ENSG00000179776_29 (sequence is synthesized)
acctctgtggtcacccatgcatcttccactggaacgtttcactgcaaacacaccttggagaagtggcatcagtcaacagagaggggcagggaaggagacaccaagctcacccttcgtcat

SEQ ID NO: 631233 - DNA, 120 bp, Artificial Sequence
  ENSG00000179776_30 (sequence is synthesized)
ggaccgaggttcccactctgggcaaagcccctcacactgcaagggattgtagataacactgacttgtttgttttaaccaataactagcttcttataatgatttttttactaatgatactt

SEQ ID NO: 631234 - DNA, 120 bp, Artificial Sequence
  ENSG00000179776_31 (sequence is synthesized)
acaagtttctagctctcacagacatatagaataagggtttttgcataataagcaggttgttatttaggttaacaatattaattcaggttttttagttggaaaaacaattcctgtaacctt

SEQ ID NO: 631235 - DNA, 120 bp, Artificial Sequence
  ENSG00000179776_32 (sequence is synthesized)
ctattttctataattgtagtaattgctctacagataatgtctatatattggccaaactggtgcatgacaagtactgtatttttttatacctaaataaagaaaaatctttagcctgggcaa

SEQ ID NO: 631236 - DNA, 120 bp, Artificial Sequence
  ENSG00000179776_33 (sequence is synthesized)
aggcagtccaacggaacagaaacatccctcagcccacaggcacgtcacactgaagcaactatgagaattcccatttgacagatgggaccatcgaggctgagggaagctgtgcagccagtc

SEQ ID NO: 631237 - DNA, 120 bp, Artificial Sequence
  ENSG00000179776_34 (sequence is synthesized)
cctgcctcctttcttctccaagcctttcctcaccgccttcctcctgcctagagcatcccttcaagggcctcaagtctcttccaggttgaccccctcatttatggctgaggaaactgaggc

SEQ ID NO: 631238 - DNA, 120 bp, Artificial Sequence
  ENSG00000179776_35 (sequence is synthesized)
ccagaggggtcagggcctctcccaggcatatggcacttgcattctggggcctatccccaccctgggagtccacttcctccagggccagaggcaggaaccagaaggcaggggccgtcgata

SEQ ID NO: 631239 - DNA, 120 bp, Artificial Sequence
  ENSG00000179776_36 (sequence is synthesized)
ctcttgtgatgtacagagtccagcctctccctctggccagacaggggacagtcaagggaggaggccatcccatccagcaccttgtagatccttgtctgtctccatatgtgagtcctggtt

SEQ ID NO: 631240 - DNA, 120 bp, Artificial Sequence
  ENSG00000179776_37 (sequence is synthesized)
ccctctcccacccacctgttcttcctctacatcatcccaggagttgcagatctgttcctcctgggaagatgcagaggctcatgatgctcctcgccacatcgggcgcctgcctgggcctgc

SEQ ID NO: 631241 - DNA, 120 bp, Artificial Sequence
  ENSG00000179776_38 (sequence is synthesized)
attttgcagcacatgactctatttatccatctgaccgctggctgcggtcagccctagggatcactaacccatcccaataggccccaggaaagagaaaaccacattcccgctcactgtatt

SEQ ID NO: 631242 - DNA, 120 bp, Artificial Sequence
  ENSG00000179776_39 (sequence is synthesized)
agagatggggttcccagcaggaaacagagcgaaccctgggaggccaattgaagagattttatgaagggactgcttcagagagatctgttcctcctgggaagatgcagaggctcatgatgc

SEQ ID NO: 631243 - DNA, 71 bp, Artificial Sequence
  ENSG00000179776_40 (sequence is synthesized)
aggactgtttgttctgggattttcctcattaatagcaactattattcctatatacacaaaacatatatatt

SEQ ID NO: 631244 - DNA, 120 bp, Artificial Sequence
  ENSG00000179776_41 (sequence is synthesized)
attcctatatacacaaaacatatatatttatctttccatagatttttcctgatttctgaaagaactttttaagttttttatttcacaaagttaatttctttgtaattacttcttatctct

SEQ ID NO: 631245 - DNA, 120 bp, Artificial Sequence
  ENSG00000179776_42 (sequence is synthesized)
ctcttccagctctttttgtattccttcctggctcttgcccaatgatcttttcattaatcactaaaacaagtcccagctatggtgtgatgtcacctgttcagctctgaaagtgcatctgat

SEQ ID NO: 631246 - DNA, 120 bp, Artificial Sequence
  ENSG00000179776_43 (sequence is synthesized)
attatatctagctgctcttatgtgaaatacctgtgtctaagtactcctttcatcgtcactggccagagtctgaatgtgtctcctctttccccagatctgttcctcctgggaagatgcaga

SEQ ID NO: 631247 - DNA, 120 bp, Artificial Sequence
  ENSG00000179776_44 (sequence is synthesized)
aagggggcgtgtgtcgatgagaatgataaggacaatccggcctggatgttcctatgcctgctggtctgaggccaggactcagagaggggaactggcttctcctagcacttacagggaaag

SEQ ID NO: 631248 - DNA, 120 bp, Artificial Sequence
  ENSG00000179776_45 (sequence is synthesized)
tgacagaggcaagaccagaagcccaagctcttgcacttggcagcctggcatcttgacctgcctggactcccccacctagcatggtcctgggcatccagagctacttgtcctctgtccggc

SEQ ID NO: 631249 - DNA, 120 bp, Artificial Sequence
  ENSG00000179776_46 (sequence is synthesized)
cttgaaggcttattctctgcaccacagctctcaccagtcctatgtggtaagatctgacagtcaagaaagcaaccaatcagacgacacaccagaggccccttcactaaaactgtattcttg

SEQ ID NO: 631250 - DNA, 120 bp, Artificial Sequence
  ENSG00000179776_47 (sequence is synthesized)
aatctatcttccccaaaccacaaaagtaagaagtgttcattttatacagtgaaacaacacagagatctaccaagaaaacactgataacccccactctcagataactcatgttcgtggcct

SEQ ID NO: 631251 - DNA, 120 bp, Artificial Sequence
  ENSG00000179776_48 (sequence is synthesized)
aacctggtcctattgctcctttcttttcgtgaccacacaaacatgtggatgcatttatggtgggtttgttgttgtctgtttgcttttgatgtttgattgttttaaaatttttttggatca

SEQ ID NO: 631252 - DNA, 120 bp, Artificial Sequence
  ENSG00000179796_0 (sequence is synthesized)
attgactgagccgactgcatctctgggcaagcggcgctttgcctctctcctgtctttgtctgctcttcctgcaaggctacggcgcctggagcagggtctgcagcggccgccgcagcaacg

SEQ ID NO: 631253 - DNA, 80 bp, Artificial Sequence
  ENSG00000179796_1 (sequence is synthesized)
cctcgctcggtggcggcgcccgaagacgccagccgcgccacgcactgcctgcgtcccgcgccccagccgccgcgcaccaa

SEQ ID NO: 631254 - DNA, 120 bp, Artificial Sequence
  ENSG00000179796_2 (sequence is synthesized)
ccttcgccgggagccaagcccgccgggccggcccggtcccaggtgggcagctcggcttgcagctggttggaggtggcggccgctgcagccctggcagcgggcacacccctaagcatacgc

SEQ ID NO: 631255 - DNA, 120 bp, Artificial Sequence
  ENSG00000179796_3 (sequence is synthesized)
gcatacgcacccaacgcctcctccctgagccacgaggatggagcagccaccccggcccgggactggcgcaaggtgcccaagcaaggaaagaaataatgaagagacacatgtgttagctgc

SEQ ID NO: 631256 - DNA, 120 bp, Artificial Sequence
  ENSG00000179796_4 (sequence is synthesized)
agccttttgaaacacgcaagaaggaaatcaatagtgtggacagggctggaacctttaccacgcttgttggagtagatgaggaatgggctcgtgattatgctgacattccagcatgaatct

SEQ ID NO: 631257 - DNA, 120 bp, Artificial Sequence
  ENSG00000179796_5 (sequence is synthesized)
ggtagacctgtggttaacccgttccctctccatgtgtctcctcctacaaagttttgttcttatgatactgtgctttcattctgccagtatgtgtcccaagggctgtctttgttcttcctc

SEQ ID NO: 631258 - DNA, 120 bp, Artificial Sequence
  ENSG00000179796_6 (sequence is synthesized)
tgggggtttaaatgtcacctgtagcaatgcaaatctcaaggaaatacctagagatcttcctcctgaaacagtcttactgtatctggactccaatcagatcacatctattcccaatgaaat

SEQ ID NO: 631259 - DNA, 120 bp, Artificial Sequence
  ENSG00000179796_7 (sequence is synthesized)
caactgagagttctcaacctgtccaaaaatggcattgagtttatcgatgagcatgccttcaaaggagtagctgaaaccttgcagactctggacttgtccgacaatcggattcaaagtgtg

SEQ ID NO: 631260 - DNA, 120 bp, Artificial Sequence
  ENSG00000179796_8 (sequence is synthesized)
cacaaaaatgccttcaataacctgaaggccagggccagaattgccaacaacccctggcactgcgactgtactctacagcaagttctgaggagcatggcgtccaatcatgagacagcccac

SEQ ID NO: 631261 - DNA, 120 bp, Artificial Sequence
  ENSG00000179796_9 (sequence is synthesized)
aacgtgatctgtaaaacgtccgtgttggatgaacatgctggcagaccattcctcaatgctgccaacgacgctgacctttgtaacctccctaaaaaaactaccgattatgccatgctggtc

SEQ ID NO: 631262 - DNA, 120 bp, Artificial Sequence
  ENSG00000179796_10 (sequence is synthesized)
accatgtttggctggttcactatggtgatctcatatgtggtatattatgtgaggcaaaatcaggaggatgcccggagacacctcgaatacttgaaatccctgccaagcaggcagaagaaa

SEQ ID NO: 631263 - DNA, 120 bp, Artificial Sequence
  ENSG00000179796_11 (sequence is synthesized)
gcagatgaacctgatgatattagcactgtggtatagtgtccaaactgactgtcattgagaaagaaagaaagtagtttgcgattgcagtagaaataagtggtttacttctcccatccattg

SEQ ID NO: 631264 - DNA, 120 bp, Artificial Sequence
  ENSG00000179796_12 (sequence is synthesized)
taaacatttgaaactttgtatttcagtttcttttgaattatgccactgctgaacttttaacaaacactacaacataaataatttgagtttaggtgatccaccccttaattgtacccccga

SEQ ID NO: 631265 - DNA, 120 bp, Artificial Sequence
  ENSG00000179796_13 (sequence is synthesized)
tggtatatttctgagtaagctactatctgaacattagttagatccatctcactatttaataatgaaatttatttttttaatttaaaagcaaataaaagcttaactttgaaccatggaaaa

SEQ ID NO: 631266 - DNA, 120 bp, Artificial Sequence
  ENSG00000179796_14 (sequence is synthesized)
ggaaacgcagagctaggaggtgtgggcctcgggtgaggggagacccagctcttagacctgggagcccagacagaggtggatctgcccaccttgcagctcccagaggactcctgctgcctt

SEQ ID NO: 631267 - DNA, 120 bp, Artificial Sequence
  ENSG00000179796_15 (sequence is synthesized)
gtaccagttgggaaaaagcaaaattcagagcagttcctttttctgggtccctcgccttggccacatcggaggaaacgtcgactcgccagggctcccgggagaaatcccgaggtcagtccc

SEQ ID NO: 631268 - DNA, 120 bp, Artificial Sequence
  ENSG00000179796_16 (sequence is synthesized)
tcccattctggggcacccctggagcagctagctccctgcctagcggtggcaaactccagagccccaaggagcagaacggggattccctgtgcgcaggctcctggtgcagctcctgagcac

SEQ ID NO: 631269 - DNA, 120 bp, Artificial Sequence
  ENSG00000179796_17 (sequence is synthesized)
atcagaaccacatcggaaatcaatgaaataagcattattcttagttctagttgaggaaactgacatgcggaacaattagttggcctgtccaagacctcctagctggtatcagaaatgaaa

SEQ ID NO: 631270 - DNA, 120 bp, Artificial Sequence
  ENSG00000179796_18 (sequence is synthesized)
gttgaacttgattttatctagcttcaggttctggatgatttctgtacattttgttgagaccaagaaagtttaaacggtccagggtggctccactggctcaaagggaaagaggatttagta

SEQ ID NO: 631271 - DNA, 120 bp, Artificial Sequence
  ENSG00000179796_19 (sequence is synthesized)
gggtacctgggggcgcgtggagacaaggaatggagccccggaatgccgggcccttgggtacttgggaaggcaggctgctgagtgcctgggatggggcgatcttcctccccagaagcaaac

SEQ ID NO: 631272 - DNA, 120 bp, Artificial Sequence
  ENSG00000179796_20 (sequence is synthesized)
aaacctccccgcgagaatctgaatgcgttggcatcttgggtggtgactgaatggtcagatcgtggactagggatgcttctccaagctctaagaggaccatagtctgctctcttctctggc

SEQ ID NO: 631273 - DNA, 120 bp, Artificial Sequence
  ENSG00000179796_21 (sequence is synthesized)
gctaggaggtgtgggcctcgggtgaggggagacccagctcttagacctgggagcccagacagaggtggatctgcccaccttgcagctcccaggtagattcttcttgtggctccagatgct

SEQ ID NO: 631274 - DNA, 120 bp, Artificial Sequence
  ENSG00000179796_22 (sequence is synthesized)
ctggcgaatgcaggagggggaggctcttttctcctttgcaccccagcaatctggagtgcaagaccgtttgcgggagggggcttagtcggctgtttcgaagaggcagcctcccctcccttt

SEQ ID NO: 631275 - DNA, 120 bp, Artificial Sequence
  ENSG00000179796_23 (sequence is synthesized)
tatccatcaagccccctatttcctggtgggggcacagtgactgccaaggccagtaagcacctcacttaacccttctctccctgaggaggtgcatgctcctctcccagaggtgcctttggc

SEQ ID NO: 631276 - DNA, 120 bp, Artificial Sequence
  ENSG00000179796_24 (sequence is synthesized)
agccctgagaggccatctgacgaagaggaaaagggatttgagtccggagggcgctggcctggacaaggaaaccacgactcagagactaaaggactagtcaaaatggtcatactaataaat

SEQ ID NO: 631277 - DNA, 120 bp, Artificial Sequence
  ENSG00000179796_25 (sequence is synthesized)
gatagtgccggacttcagactaaggttcatttgactgcaaagcctgacctcatctacttctctattctgcctccaactgactatgcctggttgttcagcttattttagctcaatgattta

SEQ ID NO: 631278 - DNA, 120 bp, Artificial Sequence
  ENSG00000179796_26 (sequence is synthesized)
tgaaagccctgaagaatcactgcaaggatggatttgatagtctctgtaaggcagaacaagaggtatattggtgctgctgctgctgccactgccactgccactgccactgctgctgtccca

SEQ ID NO: 631279 - DNA, 120 bp, Artificial Sequence
  ENSG00000179796_27 (sequence is synthesized)
aatgagctgacacgcaggatggttgcatattgcagcgaagatcgtctaatcactataacaaactgatccaaatacgtaatgactcaccacaacaaaagtttatttcttgattacatgatt

SEQ ID NO: 631280 - DNA, 120 bp, Artificial Sequence
  ENSG00000179796_28 (sequence is synthesized)
gtgcgggcagtttgagggtggtggtaaagtgggaggggaaggtaggtttgctccctgtagtcattcagggagctaagttgactctagctctattattgtgtatacatggcttccaagttt

SEQ ID NO: 631281 - DNA, 120 bp, Artificial Sequence
  ENSG00000179796_29 (sequence is synthesized)
gccactgttatctctgttactgttagccacaaggcaacaaagaggagcacgcataggatgattttatggaccaagcttcagaaaagacatgaattttttgcatttccattccactggcca

SEQ ID NO: 631282 - DNA, 120 bp, Artificial Sequence
  ENSG00000179796_30 (sequence is synthesized)
gaattctgttacatggctacacctaattgcaagagaggcagtggaatgttgtcaagccaggtatccaagaagaaatgaattttagagagacccgtattagggaaggagaggaaagcattt

SEQ ID NO: 631283 - DNA, 120 bp, Artificial Sequence
  ENSG00000179796_31 (sequence is synthesized)
aagactagaaatccacagattgggatctgaatcctgacaaccattgctagagtcacttgacaagttgctcatctgaaaatcagaatcaatggctcctgttgctttctactccacagggtg

SEQ ID NO: 631284 - DNA, 120 bp, Artificial Sequence
  ENSG00000179796_32 (sequence is synthesized)
agacaacctttatgaactcaaagaactatcacaatgaaaaaatgtgttattaagccctactgtacactggggagccgtagctgaattactggccgagttaagtgtctgtcagactctaaa

SEQ ID NO: 631285 - DNA, 120 bp, Artificial Sequence
  ENSG00000179796_33 (sequence is synthesized)
atactgagctttactaggtggttatacacaagtgtggcatccttcagaggcttaagtcaggatgccttttggcatttactcttcaaaaatagatataattagctattgaatccaaatact

SEQ ID NO: 631286 - DNA, 120 bp, Artificial Sequence
  ENSG00000179796_34 (sequence is synthesized)
tacttattgtacctttgctctatgctggacaaaatggaaaagaaaaagacagcacatagcctgtactcaagattactttctggtggactgaggtgtgtgtgacaaatacagaaatggtta

SEQ ID NO: 631287 - DNA, 120 bp, Artificial Sequence
  ENSG00000179796_35 (sequence is synthesized)
tgctagggaggaaggtcctcgtaatcatgtagcatcaacagggtgcaagcactgtgagaggcatttttatgctattattgtgtcctgtaaactctcacaacaagagaagaaagtgacagc

SEQ ID NO: 631288 - DNA, 120 bp, Artificial Sequence
  ENSG00000179796_36 (sequence is synthesized)
tgctctatttacataggaaaaaacttcaagtaagagagcttcattgagttgccaggtagaaagtattagaacttcttaaatttgaatcagatctttctgtctccaaagaaaggtcttcac

SEQ ID NO: 631289 - DNA, 120 bp, Artificial Sequence
  ENSG00000179796_37 (sequence is synthesized)
attatgttcctactgagttggtttatagttataattttctgttaaaaaaagcacctaggttaagtacacagttctgagttttaaaatatatatactcctggcatctgtcatacaatcaag

SEQ ID NO: 631290 - DNA, 120 bp, Artificial Sequence
  ENSG00000179796_38 (sequence is synthesized)
atattgtgtccttgtcattggccagagatagataggagaaagcacatttggttcttaagagtagggaattgtgtggaagttattggttttaaggtaccattacagataatctttaaaact

SEQ ID NO: 631291 - DNA, 120 bp, Artificial Sequence
  ENSG00000179796_39 (sequence is synthesized)
tgggtgggatctcataaggtgatgatgtagacaaggaagatagaagaagcagagggataccatatagggaggtgtttgggatgaaggagtccatgcaaagaagtgagaaacaaggctgga

SEQ ID NO: 631292 - DNA, 120 bp, Artificial Sequence
  ENSG00000179796_40 (sequence is synthesized)
actatatagtagagatctcagttccagactaaggaataatagaactgatggcatttatggaacacttactatgcaccaagtactttctttggagtatcttaatgagtccttacaaactcc

SEQ ID NO: 631293 - DNA, 120 bp, Artificial Sequence
  ENSG00000179796_41 (sequence is synthesized)
tagcaggcattgaaacccagtctgtcaactccagaacctatgaacattttatccactgtgctgccttatggtcatcaactttactacctaaagttgctgattcctcagacctagagtttt

SEQ ID NO: 631294 - DNA, 120 bp, Artificial Sequence
  ENSG00000179796_42 (sequence is synthesized)
gcagcctcctacatgatggttttatttttcaaatagcacaaaaatagccctttgtgagatttatgtaggtaagagggaacctctgcccttttgagacacttagccttctccaacccaagt

SEQ ID NO: 631295 - DNA, 120 bp, Artificial Sequence
  ENSG00000179796_43 (sequence is synthesized)
tagggtatctttgggcctaatatttctgctctcggaaagccctagaggtcctaggcagcaatagtctctttaaatgtttatttattgcaagggacaatcagggtcagctaatccaggacc

SEQ ID NO: 631296 - DNA, 120 bp, Artificial Sequence
  ENSG00000179796_44 (sequence is synthesized)
tgtggcgaggcatgcagagcactgtggccaggctctgctcatggtacacacaccccagggccatgggcttttcaccccaaccccaccaaacttgctaaaagtgttagatctagtctagaa

SEQ ID NO: 631297 - DNA, 120 bp, Artificial Sequence
  ENSG00000179796_45 (sequence is synthesized)
gcctgaggtaactcctagatgtaaaattcaggatataggcccaagaattcctgcatcccagcaagaaggaagccagactgtctgcttttacgaactgaattgagaattcacctttccagt

SEQ ID NO: 631298 - DNA, 120 bp, Artificial Sequence
  ENSG00000179796_46 (sequence is synthesized)
gagactgaagctttgctgaagatttatcgccccctggaggacaatagtataatatatctcttcaggtactctagaaaagatgcccaactgaactgaaatacacatttttttcctaaagaa

SEQ ID NO: 631299 - DNA, 120 bp, Artificial Sequence
  ENSG00000179796_47 (sequence is synthesized)
taggaaaatcaagcctttgctaagacaaccctttaaaaaggctatggcacccgtttgtgatcagaattgagaagaagcactcttcctgccagcttgtgggaatgctgtgtcccccaaggc

SEQ ID NO: 631300 - DNA, 120 bp, Artificial Sequence
  ENSG00000179796_48 (sequence is synthesized)
caacagtatatgctgccaatgagtgaaaagaactaagactcaagtctgcacagaaaaaggcccaacatgcatgcttcagttttgatcccagcttggcccttaattttccaaacccttgca

SEQ ID NO: 631301 - DNA, 120 bp, Artificial Sequence
  ENSG00000179796_49 (sequence is synthesized)
gatggagagctacctattttgggactgtaaggtttttgaaattaactgtcaactcattatccaaggcacatactatcttacctctatcttaccttctaaatattttaaataacgcttttc

SEQ ID NO: 631302 - DNA, 120 bp, Artificial Sequence
  ENSG00000179796_50 (sequence is synthesized)
tcagccttctcttttggcatctctttcttaaccccaaccttttaaattcagaaatacctaggaattttactctaatttttgacaatgtgcttatctttgaagcaaggaaaatcggaaaac

SEQ ID NO: 631303 - DNA, 120 bp, Artificial Sequence
  ENSG00000179796_51 (sequence is synthesized)
atgccaacccaactggaacatttttaacaaagtaatgaaaagttatgtaatggaagatttagctttcaagaacactttggcaaattgtaatgcaatgatatacaaaatctgccagatgtc

SEQ ID NO: 631304 - DNA, 120 bp, Artificial Sequence
  ENSG00000179796_52 (sequence is synthesized)
caggcatccaaatggcaggagttctctggatctgacctcaaaagctaggcctgaaatgaatacattgtgggtctctctggggttggaaccaaaacctcatttttttttttgttttattct

SEQ ID NO: 631305 - DNA, 120 bp, Artificial Sequence
  ENSG00000179796_53 (sequence is synthesized)
ttttattttcttacaaagaagagtttgtaaaacaaaaggcaatctgaaatctggctgttggtccaagaattaacaagcaatctgttgtgctaatgacatcgactgttgaatagatttcca

SEQ ID NO: 631306 - DNA, 120 bp, Artificial Sequence
  ENSG00000179796_54 (sequence is synthesized)
aagaaaatgacccatggggagtaggatgaggttaattcacagaaagccggcttccttgggattgtctgcatttcttctgaaggaaaatgtctgaaagatgctggtcttccctcaaagtct

SEQ ID NO: 631307 - DNA, 120 bp, Artificial Sequence
  ENSG00000179796_55 (sequence is synthesized)
ttcattcccacagacagccctgccagttcctgggctcccacaggagccaactgctgtgagaagaggtgaatgagatacgagaaaggaagaagaaaatctcggaaaagtgttgcctggagt

SEQ ID NO: 631308 - DNA, 120 bp, Artificial Sequence
  ENSG00000179796_56 (sequence is synthesized)
aagtctttaggaggacaaacaggactgacttaaactgatattttcagcacttcaccattaacaagactttttatattcacatgaactgaggaatcctgtgcataagccacagataaagaa

SEQ ID NO: 631309 - DNA, 120 bp, Artificial Sequence
  ENSG00000179796_57 (sequence is synthesized)
tgtcttatcaaataattccacctttccctaacaatggttatcatttatttggcatagtgcaagattctgtttccatctttcctagttctcacaacatttattatcaagtagatattattt

SEQ ID NO: 631310 - DNA, 120 bp, Artificial Sequence
  ENSG00000179796_58 (sequence is synthesized)
ttctcattttacagatgaggaaactaaaacttagaaagcatcctgcaagagcagagccagttagctatctgcaaagccctttgctccaccaatgtcacattgcctagtcctttcgtttta

SEQ ID NO: 631311 - DNA, 120 bp, Artificial Sequence
  ENSG00000179796_59 (sequence is synthesized)
tgaagtctcatcttaagacatgataagtggaggaggatagggaaagacatttttcttaatttgcacaagagggaagtgaggttctaaagaacaaagcaagtcttagctcactcagctagt

SEQ ID NO: 631312 - DNA, 120 bp, Artificial Sequence
  ENSG00000179796_60 (sequence is synthesized)
cagcagagcttggtgtttggggaccactatggtttatcccttttttatacccatccctttaggcccagctctgaaatcccacatacacctaaagtaaactaggctcctggatggggcaga

SEQ ID NO: 631313 - DNA, 120 bp, Artificial Sequence
  ENSG00000179796_61 (sequence is synthesized)
tgtacatatagttttcaatcatgggaatgatgacttttatttcaaggttgctcatgggatggtggggatgttgaggagggtggtgtcactggcagccacatgtgccttcagtcctaccat

SEQ ID NO: 631314 - DNA, 120 bp, Artificial Sequence
  ENSG00000179796_62 (sequence is synthesized)
ctgcatgtacaccagccaaattccaactggcacctcctgcctccacttgcctgagggttttctgtggccaccatggcacattttgccacttacatagcaggtttggaatgctggcgagtt

SEQ ID NO: 631315 - DNA, 120 bp, Artificial Sequence
  ENSG00000179796_63 (sequence is synthesized)
gcacctttcaggtgcaatcctcaaccgatgactactaagaacttggtgtataaacacccagacccctcactcttggaagcatacattctaccccatgttgcagagtttccccagcagaat

SEQ ID NO: 631316 - DNA, 120 bp, Artificial Sequence
  ENSG00000179796_64 (sequence is synthesized)
gaagctcaactcatacatcaaaataatgggctttgtgagggatgaattcttgctgtcttttttcccttgtctcacttttctacttccctttttgtgtttcccaaataaacctttgggaaa

SEQ ID NO: 631317 - DNA, 120 bp, Artificial Sequence
  ENSG00000179796_65 (sequence is synthesized)
cacttcctaaataaactctttgcattcaaatttcatctcattgcccacttttcgggagaacccaacctaagtcacctgaatataccctacatcaatactttccaaacctggctaatgatc

SEQ ID NO: 631318 - DNA, 120 bp, Artificial Sequence
  ENSG00000179796_66 (sequence is synthesized)
agacagattgagaaagtctttgaaaaatataagtatgaatgcgttacccagatctactaaactaagatctctggaggttgggttcatgcctctgtcttttctgttaatctcccttcttct

SEQ ID NO: 631319 - DNA, 120 bp, Artificial Sequence
  ENSG00000179796_67 (sequence is synthesized)
gaagatttagtgattagtcaggataccaacactgacccataaagcatcctgcactagaaattttttctggaacattgcacttggcaaaactttgctgccattaaaaaaaaaaaaaaaaaa

SEQ ID NO: 631320 - DNA, 120 bp, Artificial Sequence
  ENSG00000179796_68 (sequence is synthesized)
aaaagtgaactctgttccttcgggaagagtgagtgtcatgtgagcccataataatgttccctgttttgccttacatcctaggaatatcatgagaaaaacaaatctatgcttcagatatac

SEQ ID NO: 631321 - DNA, 120 bp, Artificial Sequence
  ENSG00000179796_69 (sequence is synthesized)
aacctcacagcccatctagctgtagcccaatttcctctacttttggctatttcatttaagtcattagttattctgattattttaaatttgttatttgtatgttcccattttattataagt

SEQ ID NO: 631322 - DNA, 120 bp, Artificial Sequence
  ENSG00000179796_70 (sequence is synthesized)
gaaataagagaggtgggacatggaggatggctgcggccacccctgaagcttcgtccagcgcgatgggagtcagtccatccttgcacacgccacccccaactcggcaatgaaacctttgga

SEQ ID NO: 631323 - DNA, 120 bp, Artificial Sequence
  ENSG00000179813_0 (sequence is synthesized)
agcatataaacagagtccgcgtaagaaaactacactgaataggaatggcagcttttaaaagtgggggaactacagtatagggtataggataaacgatgggacaaaactggaaaagacaac

SEQ ID NO: 631324 - DNA, 120 bp, Artificial Sequence
  ENSG00000179813_1 (sequence is synthesized)
aaaagctttggaatgttccacaacttccttttattcgagttcctccctccatctatgacacttccttactaaaggccctcaaccaagggcaacagcgctacttttacagcattatgagga

SEQ ID NO: 631325 - DNA, 120 bp, Artificial Sequence
  ENSG00000179813_2 (sequence is synthesized)
tttacaactccaggccccagtgggaggccctgcagacccgctacattcacagccttcagcaccaacagctgcttggctatattactcaacgggaagccttgtcttatgctcttgtactta

SEQ ID NO: 631326 - DNA, 120 bp, Artificial Sequence
  ENSG00000179813_3 (sequence is synthesized)
gagattcaaccaagagagcctcagccaaggtagctcctcaaagaaccattccccggaaaacttcagccatgacaagaagatgtccatcagtactacctgtatctgtggttctacctaggg

SEQ ID NO: 631327 - DNA, 120 bp, Artificial Sequence
  ENSG00000179813_4 (sequence is synthesized)
cccaaagtaaaaggcgccaagtgctcaggaactgagacttggcagcattttcagaaacaggaagtttgcccatgtatccctggtatctagtgggtgctttgtgcatatttgttgaatgac

SEQ ID NO: 631328 - DNA, 120 bp, Artificial Sequence
  ENSG00000179813_5 (sequence is synthesized)
agtgaataatttctaatataaaccccagacctaaaaataatctctgattcatataaattttgccagcaagaccaagaggtttaagagcaatggagccgagagtaagcaagcctttccaca

SEQ ID NO: 631329 - DNA, 120 bp, Artificial Sequence
  ENSG00000179813_6 (sequence is synthesized)
taacatccgtagagtaaaaggacttttaaagctttcaaagtaaaagtttactttggattagaacctcctagagaagtccccaaaacagtgaaaggggacaagtgaccagaaagggccagg

SEQ ID NO: 631330 - DNA, 120 bp, Artificial Sequence
  ENSG00000179813_7 (sequence is synthesized)
tcctctgtcactgggtgaccatttctagcaaactatcatgtatacattttgaaaatatacaaaacaacacaggattaacactgatcatagagggcttacaaaatcatatcatcccagcaa

SEQ ID NO: 631331 - DNA, 120 bp, Artificial Sequence
  ENSG00000179813_8 (sequence is synthesized)
caattggcctgtgcatttccttcctctcctcttccccatcaggcaatggcatttaatttagccccaaagctcttctagttctcacctggcttgatcactttgtgtcatcttgaaacatgc

SEQ ID NO: 631332 - DNA, 120 bp, Artificial Sequence
  ENSG00000179813_9 (sequence is synthesized)
acttatcagtctaccacagctgaattgattttatggagctgtaactggccttgacatgggtaagagaattcatgcacacatctttccctggcagctgaagaaacactcttaaaagaatat

SEQ ID NO: 631333 - DNA, 120 bp, Artificial Sequence
  ENSG00000179813_10 (sequence is synthesized)
gaaataaccccgaagactttatttcatgtccaacctttctgtggcctcaaatgttttaagcaaagcacataaaactatactaagcagtgagtcagttcatcatacaaaggcatagtattg

SEQ ID NO: 631334 - DNA, 83 bp, Artificial Sequence
  ENSG00000179813_11 (sequence is synthesized)
aaatcagtcaccagtgctcatgtaaagtcaaaacaaaaaaatgcttcttcctcatcattgtaaaatacgtcaccccattcaaa

SEQ ID NO: 631335 - DNA, 120 bp, Artificial Sequence
  ENSG00000179813_12 (sequence is synthesized)
cttcttcctcatcattgtaaaatacgtcaccccattcaaatcagctgatgcctatgaaaggaattggttgaggtggaatataaattttattgacaagggatgtgctaacattgatctgaa

SEQ ID NO: 631336 - DNA, 120 bp, Artificial Sequence
  ENSG00000179813_13 (sequence is synthesized)
attatcttctctttgcaatcatgaacatataagatataaaaattgtcatgagattctgaacactagtattgaggtccagcactacttccaagctcctatctgacttttctttgggaggaa

SEQ ID NO: 631337 - DNA, 120 bp, Artificial Sequence
  ENSG00000179813_14 (sequence is synthesized)
tgggaagtgtggttggcccactagtctgataagaagtcttggtgaagctaatactgaccttgctggggtcattcacttaatcataaagaagcttcttgacctctgcaaattctggccctg

SEQ ID NO: 631338 - DNA, 120 bp, Artificial Sequence
  ENSG00000179813_15 (sequence is synthesized)
acatgtattctaaatacctttacagttctaagtgagaaattgttacataggcttagaagaagaaaagactccagtgggactgggatgagctgcgtggtagccctcataaagcagagaggt

SEQ ID NO: 631339 - DNA, 120 bp, Artificial Sequence
  ENSG00000179813_16 (sequence is synthesized)
tggtgggagacctaacttggcctatactagccttcccattgttttcacaatgggccttttatcccctctgaactgcttgcctgcacttttatcttagacttttttttttgatgagcatag

SEQ ID NO: 631340 - DNA, 120 bp, Artificial Sequence
  ENSG00000179813_17 (sequence is synthesized)
gtatttgctgtgtaagccttatctagtgatgcagaatatcaaggaggccacttacaattctaagctgcatccctgtatcaaaaatctcagaagcaccttgcatctgatagaggcttgtaa

SEQ ID NO: 631341 - DNA, 120 bp, Artificial Sequence
  ENSG00000179813_18 (sequence is synthesized)
gagcagattgacaggtgaatgtcacaggtccataagaaggacaaatagatctaagttgggcaaaagattctatttgttggttctcccttctaagatgataatatgcccctgcacttgaga

SEQ ID NO: 631342 - DNA, 120 bp, Artificial Sequence
  ENSG00000179813_19 (sequence is synthesized)
ccttacttgaaacttaaagaaatgtgattggttatggtgctgggagaaaggggtgcacctgggaggacactgagaaagataaacaaaggggaaggaagagaggacaacctgtaactttta

SEQ ID NO: 631343 - DNA, 120 bp, Artificial Sequence
  ENSG00000179813_20 (sequence is synthesized)
gaaaaggctactacttttaactgttggagaaaatgctattgcttgcactcacaatgtcaatatacattatcagaacttaagtcctggagatcagagactgtttcacctgaaattgctagc

SEQ ID NO: 631344 - DNA, 120 bp, Artificial Sequence
  ENSG00000179813_21 (sequence is synthesized)
acctagaatggcccccggttgcggtaggcaatcaataatactctttgaataataatgaggttttcaaagattctgcaagtcagactggcctctggctttgtgatattattctagagtccc

SEQ ID NO: 631345 - DNA, 120 bp, Artificial Sequence
  ENSG00000179813_22 (sequence is synthesized)
agtaacccacaattgttgatgaggagtagcagtagaatatcaaggacaggtgatgagacaacaagtctatcccgcaaagggcagggaatagagggtacactggaaagaatttgaaaacaa

SEQ ID NO: 631346 - DNA, 120 bp, Artificial Sequence
  ENSG00000179813_23 (sequence is synthesized)
taataaagctgactacaagttggtctattttttattaccaccatgagccagcaattctaaataatatcagtgataaagtattcatcccccaaaatattttattgaactaggttctaaaca

SEQ ID NO: 631347 - DNA, 120 bp, Artificial Sequence
  ENSG00000179813_24 (sequence is synthesized)
atttctgaggttactgttgagttttaaataatacatatatgtaagcttcaaagtagcacatttgtactgtttttcttcaataatcattttactccacatggaaactaattcagggaatat

SEQ ID NO: 631348 - DNA, 120 bp, Artificial Sequence
  ENSG00000179813_25 (sequence is synthesized)
cctgctatatagttggctctcagtacatatggtgtcagctcatgtgtctccagcccctgtagtactatatattattgcatttaaatgatggatttgaaataaacaatgattataccatga

SEQ ID NO: 631349 - DNA, 120 bp, Artificial Sequence
  ENSG00000179813_26 (sequence is synthesized)
ttgtaaagacaagaaacagaacctgaaatacttcaatttttgattctatgtggcagtttagagttttttaaaacaatttttatgtataatttatatgcaataaatgccctcaaagttcaa

SEQ ID NO: 631350 - DNA, 120 bp, Artificial Sequence
  ENSG00000179813_27 (sequence is synthesized)
atcagcttatcaacagacttccaccaccaccaccagcatataaacagagtccgcgtaagaaaactacactgaataggaatggcagcttttaaaagtgggggaactacagtatagggataa

SEQ ID NO: 631351 - DNA, 120 bp, Artificial Sequence
  ENSG00000179817_0 (sequence is synthesized)
cttcctgtccatggatgaccagtcctagtcacgagtgtgtcacaaccacctctttgtgtatctgaattcctccacctgaaagaaaatttcagacccaggatagattaatcatcgggtcca

SEQ ID NO: 631352 - DNA, 120 bp, Artificial Sequence
  ENSG00000179817_1 (sequence is synthesized)
aagccctggccggatgagtgggggtgttttgatcctaatgttattcccatgtcagcacagaacttgtgtggcagtagagagatgtcaggcttcagagtcaacaagaactggatttcaaac

SEQ ID NO: 631353 - DNA, 120 bp, Artificial Sequence
  ENSG00000179817_2 (sequence is synthesized)
tggatttgaggacccccacctttggtaagtgacttattatctgcgagcctctgtttctctcttctttaaatgaggacagtaaatcccatacggcagggtggtggggagaatcagagatga

SEQ ID NO: 631354 - DNA, 120 bp, Artificial Sequence
  ENSG00000179817_3 (sequence is synthesized)
tacagctggtgatcacatctggtttgtgttcccaggggcaccagactagggtttctgagcatggatccaaccgtcccagtcttcggtacaaaactgacaccaatcaacggacgtgaggag

SEQ ID NO: 631355 - DNA, 120 bp, Artificial Sequence
  ENSG00000179817_4 (sequence is synthesized)
actccttgctacaatcagaccctgagcttcacggtgctgacgtgcatcatttcccttgtcggactgacaggaaacgcggttgtgctctggctcctgggctaccgcatgcgcaggaacgct

SEQ ID NO: 631356 - DNA, 120 bp, Artificial Sequence
  ENSG00000179817_5 (sequence is synthesized)
gtctccatctacatcctcaacctggccgcagcagacttcctcttcctcagcttccagattatacgtttgccattacgcctcatcaatatcagccatctcatccgcaaaatcctcgtttct

SEQ ID NO: 631357 - DNA, 120 bp, Artificial Sequence
  ENSG00000179817_6 (sequence is synthesized)
tgacctttccctactttacaggcctgagtatgctgagcgccatcagcaccgagcgctgcctgtctgttctgtggcccatctggtaccgctgccgccgccccacacacctgtcagcggtcg

SEQ ID NO: 631358 - DNA, 120 bp, Artificial Sequence
  ENSG00000179817_7 (sequence is synthesized)
tgtgtgtcctgctctggggcctgtccctgctgtttagtatgctggagtggaggttctgtgacttcctgtttagtggtgctgattctagttggtgtgaaacgtcagatttcatcccagtcg

SEQ ID NO: 631359 - DNA, 120 bp, Artificial Sequence
  ENSG00000179817_8 (sequence is synthesized)
cgtggctgatttttttatgtgtggttctctgtgtttccagcctggtcctgctggtcaggatcctctgtggatcccggaagatgccgctgaccaggctgtacgtgaccatcctgctcacag

SEQ ID NO: 631360 - DNA, 120 bp, Artificial Sequence
  ENSG00000179817_9 (sequence is synthesized)
tgctggtcttcctcctctgcggcctgcccttcggcattctgggggccctaatttacaggatgcacctgaatttggaagtcttatattgtcatgtttatctggtttgcatgtccctgtcct

SEQ ID NO: 631361 - DNA, 120 bp, Artificial Sequence
  ENSG00000179817_10 (sequence is synthesized)
ctctaaacagtagtgccaaccccatcatttacttcttcgtgggctcctttaggcagcgtcaaaataggcagaacctgaagctggttctccagagggctctgcaggacaagcctgaggtgg

SEQ ID NO: 631362 - DNA, 120 bp, Artificial Sequence
  ENSG00000179817_11 (sequence is synthesized)
ataaaggtgaagggcagcttcctgaggaaagcctggagctgtcgggaagcagattggggccatgagggagagcctctgccctgtcagtcagacgggactttgagagcaacactgtcctgc

SEQ ID NO: 631363 - DNA, 120 bp, Artificial Sequence
  ENSG00000179820_0 (sequence is synthesized)
cgcctccacagccgccgcccagggttctcccgccactgccgcccgcacccccgcccccgcggggttaagatcacacacgcgcccacgccggcccgcggggcgtgcactttcgctgggttc

SEQ ID NO: 631364 - DNA, 120 bp, Artificial Sequence
  ENSG00000179820_1 (sequence is synthesized)
cgtgcactttcgctgggttccgtccgccgcagcccaaacagttaactgaacggggaggggagggggcggggcttacccggggtcaccgccagggccctgctgggttccacgccacgttcc

SEQ ID NO: 631365 - DNA, 120 bp, Artificial Sequence
  ENSG00000179820_2 (sequence is synthesized)
tgtctccgcagggcgttcgatccctagagggaggagcctgtccaaacggacgctaacggcctacctccccctcaggtgctcttacagcctgttccaagtgtggcttaatccgtctccacc

SEQ ID NO: 631366 - DNA, 120 bp, Artificial Sequence
  ENSG00000179820_3 (sequence is synthesized)
accagatctttctccgtggattcctctgctaagaccgctgccatgccagtgacggtaacccgcaccaccatcacaaccaccacgacgtcatcttcgggcctggggtcccccatgatcgtg

SEQ ID NO: 631367 - DNA, 120 bp, Artificial Sequence
  ENSG00000179820_4 (sequence is synthesized)
gggtcccctcgggccctgacacagcccctgggtctccttcgcctgctgcagctggtgtctacctgcgtggccttctcgctggtggctagcgtgggcgcctggacggggtccatgggcaac

SEQ ID NO: 631368 - DNA, 120 bp, Artificial Sequence
  ENSG00000179820_5 (sequence is synthesized)
tggtccatgttcacctggtgcttctgcttctccgtgaccctgatcatcctcatcgtggagctgtgcgggctccaggcccgcttccccctgtcttggcgcaacttccccatcaccttcgcc

SEQ ID NO: 631369 - DNA, 120 bp, Artificial Sequence
  ENSG00000179820_6 (sequence is synthesized)
atgtccagttcctgtcccacggccgttcgcgggaccacgccatcgccgccaccttcttctcctgcatcgcgtgtgtggcttacgccaccgaagtggcctggacccgggcccggcccggcg

SEQ ID NO: 631370 - DNA, 120 bp, Artificial Sequence
  ENSG00000179820_7 (sequence is synthesized)
agatcactggctatatggccaccgtacccgggctgctgaaggtgctggagaccttcgttgcctgcatcatcttcgcgttcatcagcgaccccaacctgtaccagcaccagccggccctgg

SEQ ID NO: 631371 - DNA, 120 bp, Artificial Sequence
  ENSG00000179820_8 (sequence is synthesized)
agtggtgcgtggcggtgtacgccatctgcttcatcctagcggccatcgccatcctgctgaacctgggggagtgcaccaacgtgctacccatccccttccccagcttcctgtcggggctgg

SEQ ID NO: 631372 - DNA, 120 bp, Artificial Sequence
  ENSG00000179820_9 (sequence is synthesized)
ccttgctgtctgtcctcctctatgccaccgcccttgttctctggcccctctaccagttcgatgagaagtatggcggccagcctcggcgctcgagagatgtaagctgcagccgcagccatg

SEQ ID NO: 631373 - DNA, 120 bp, Artificial Sequence
  ENSG00000179820_10 (sequence is synthesized)
cctactacgtgtgtgcctgggaccgccgactggctgtggccatcctgacggccatcaacctactggcgtatgtggctgacctggtgcactctgcccacctggtttttgtcaaggtctaag

SEQ ID NO: 631374 - DNA, 120 bp, Artificial Sequence
  ENSG00000179820_11 (sequence is synthesized)
actctcccaagaggctcccgttccctctccaacctctttgttcttcttgcccgagttttctttatggagtacttctttcctccgcctttcctctgttttcctcttcctgtctcccctccc

SEQ ID NO: 631375 - DNA, 120 bp, Artificial Sequence
  ENSG00000179820_12 (sequence is synthesized)
agttcttggatgcatcttcttccttccctttcctcttgctgtttccttcctgtgttgttttgttgcccacatcctgttttcacccctgagctgtttctctttttcttttctttttttttt

SEQ ID NO: 631376 - DNA, 120 bp, Artificial Sequence
  ENSG00000179820_13 (sequence is synthesized)
tcctgccccagcctcccaagtagctgggaggacaggtgtgagctgccgcacccagcctgtttctctttttccactcttcttttttctcatctcttttctgggttgcctgtcggctttctt

SEQ ID NO: 631377 - DNA, 120 bp, Artificial Sequence
  ENSG00000179820_14 (sequence is synthesized)
gctttcttatctgcctgttttgcaagcaccttctcctgtgtccttgggagccctgagacttctttctctccttgcctccacccacctccaaaggtgctgagctcacatccacaccccttg

SEQ ID NO: 631378 - DNA, 120 bp, Artificial Sequence
  ENSG00000179820_15 (sequence is synthesized)
acatccacaccccttgcagccgtccatgccacagccccccaaggggccccattgccaaagcatgcctgcccaccctcgctgtgccttagtcagtgtgtacgtgtgtgtgtgtgtgtgtgt

SEQ ID NO: 631379 - DNA, 120 bp, Artificial Sequence
  ENSG00000179820_16 (sequence is synthesized)
ggggtggggggtgggtagctggggattgggccctctttctcccagtggaggaaggtgtgcagtgtacttcccctttaaattaaaaaacatatatatatatatatttggaggtcagtaatt

SEQ ID NO: 631380 - DNA, 120 bp, Artificial Sequence
  ENSG00000179820_17 (sequence is synthesized)
tccaatgggcgggaggctttaagcaccgaccctgggtccctaggccccgcctggcactcagccttgccagagattggctccagaatttttgccaggcttacagaacacccactgcctaga

SEQ ID NO: 631381 - DNA, 120 bp, Artificial Sequence
  ENSG00000179820_18 (sequence is synthesized)
tagaggccatcttaaaggaagcaggggctggatgcctttcatcccaactattctctgtggtatcaaaaagaaaaaaaaaaaaaaagaaggagtcggggccgggcgtggtggctcacgcct

SEQ ID NO: 631382 - DNA, 120 bp, Artificial Sequence
  ENSG00000179820_19 (sequence is synthesized)
gcgggcgcctgtaatcccaggtatttggggggactgagacaggagaatcccttcaacccgggaggtggaggttgcagtaagtcaagatggcaccactgtgctccagcctgggggacagag

SEQ ID NO: 631383 - DNA, 120 bp, Artificial Sequence
  ENSG00000179820_20 (sequence is synthesized)
cgagactccatctcaaaaaaaaaaaggaatcggacgaagaaccacaggatgttgaagacaactgtctgaagtatttgtgagggacagcgatgtggccctctgtgttaagaataacgtgtc

SEQ ID NO: 631384 - DNA, 120 bp, Artificial Sequence
  ENSG00000179820_21 (sequence is synthesized)
ctgctttggcagagagaagaaaatagccactgcccgctttcaaggcaagatcgaccttttctgttttgttttgtttttctttctttttcctggccatgaggacaaaaattactgagtggc

SEQ ID NO: 631385 - DNA, 120 bp, Artificial Sequence
  ENSG00000179820_22 (sequence is synthesized)
ccttaaagagggaagtttgttttcagctgttctcttttgcccgtaggtgggagggtggggattgctgcgtcctagctagaggaatggctttgcttgaatgtgtagtgcacacgcacgggt

SEQ ID NO: 631386 - DNA, 120 bp, Artificial Sequence
  ENSG00000179820_23 (sequence is synthesized)
gtttctgtgtgctagttgcttcttgctgctgcttcctgcttgtctgggactcacatacataacgtgatatatatatatatatatataaatgtataaatatatattttatttttttttaaa

SEQ ID NO: 631387 - DNA, 120 bp, Artificial Sequence
  ENSG00000179820_24 (sequence is synthesized)
tccctggagcttctggttcctatcagttcctgttgttaatcgtagaaccgttgtcccttcccccattcccgtatccatcatgttctttttcttttaaatatcaatataaaggtaaaagaa

SEQ ID NO: 631388 - DNA, 120 bp, Artificial Sequence
  ENSG00000179820_25 (sequence is synthesized)
agggcacgtagacccggatccccagctcccggaccccttccgactgctcccttcgccactcgcgcggcttccactcctggactcggcctccacccctgggcttggcctcaaagcctcctc

SEQ ID NO: 631389 - DNA, 120 bp, Artificial Sequence
  ENSG00000179820_26 (sequence is synthesized)
agttgtcggccctggaaggtgcccagcggcggcagcgccagacgcgccccgttagctcagcgtcgctgagcatccgcagccgccaccaggccccgcccagcggccgcagccagccaggcc

SEQ ID NO: 631390 - DNA, 120 bp, Artificial Sequence
  ENSG00000179820_27 (sequence is synthesized)
caaagtgctaggattacagaggtgagccaccgtgaccggccttcactcttcaaatgtttgcttcctgttcctgctaccctgaaccctgctgttgaggggttctagtgtctacaagggaac

SEQ ID NO: 631391 - DNA, 72 bp, Artificial Sequence
  ENSG00000179820_28 (sequence is synthesized)
gcctgttccaagtgtggcttaatccgtctccaccaccagatctttctccgtggattcctctgctaagaccgc

SEQ ID NO: 631392 - DNA, 120 bp, Artificial Sequence
  ENSG00000179820_29 (sequence is synthesized)
attaccccaaagcagccagcctcatggaacagcacggcctgtttgagactgggttacagggccagtttggagtcatcatctttggggtcggggtgctgttacaggatgggtaaccactct

SEQ ID NO: 631393 - DNA, 120 bp, Artificial Sequence
  ENSG00000179820_30 (sequence is synthesized)
ctgtgtccccttccctttgcagaagcacatcaagcccgcacacaggctctaccttcctctacccaaccccctctccactcctgcagacccccgccttcctgcaggtccccctccggcccc

SEQ ID NO: 631394 - DNA, 70 bp, Artificial Sequence
  ENSG00000179826_0 (sequence is synthesized)
ctcctgtaggcatctcctgaattaagcaacacagaaaagtcctctgaagtcactgaatcccataaaggct

SEQ ID NO: 631395 - DNA, 120 bp, Artificial Sequence
  ENSG00000179826_1 (sequence is synthesized)
acagaaaagtcctctgaagtcactgaatcccataaaggctctctacctttagcacaagggaggtcttcaccactggacaaagaaggaacgataaggggtcatcagactggggtttctgag

SEQ ID NO: 631396 - DNA, 120 bp, Artificial Sequence
  ENSG00000179826_2 (sequence is synthesized)
catggattcaaccatcccagtcttgggtacagaactgacaccaatcaacggacgtgaggagactccttgctacaagcagaccctgagcttcacggggctgacgtgcatcgtttcccttgt

SEQ ID NO: 631397 - DNA, 120 bp, Artificial Sequence
  ENSG00000179826_3 (sequence is synthesized)
cgcgctgacaggaaacgcggttgtgctctggctcctgggctgccgcatgcgcaggaacgctgtctccatctacatcctcaacctggtcgcggccgacttcctcttccttagcggccacat

SEQ ID NO: 631398 - DNA, 120 bp, Artificial Sequence
  ENSG00000179826_4 (sequence is synthesized)
tatatgttcgccgttacgcctcatcaatatccgccatcccatctccaaaatcctcagtcctgtgatgacctttccctactttataggcctaagcatgctgagcgccatcagcaccgagcg

SEQ ID NO: 631399 - DNA, 120 bp, Artificial Sequence
  ENSG00000179826_5 (sequence is synthesized)
tgggccctgtccctgctgcggagtatcctggagtggatgttctgtgacttcctgtttagtggtgctaattctgtttggtgtgaaacgtcagatttcattacaatcgcgtggctggttttt

SEQ ID NO: 631400 - DNA, 120 bp, Artificial Sequence
  ENSG00000179826_6 (sequence is synthesized)
ttatgtgtggttctctgtgggtccagcctggtcctgctggtcaggattctctgtggatcccggaagatgccgctgaccaggctgtacgtgaccatcctcctcacagtgctggtcttcctc

SEQ ID NO: 631401 - DNA, 120 bp, Artificial Sequence
  ENSG00000179826_7 (sequence is synthesized)
ctctgtggcctgccctttggcattcagtgggccctgttttccaggatccacctggattggaaagtcttattttgtcatgtgcatctagtttccattttcctgtccgctcttaacagcagt

SEQ ID NO: 631402 - DNA, 120 bp, Artificial Sequence
  ENSG00000179826_8 (sequence is synthesized)
gccaaccccatcatttacttcttcgtgggctcctttaggcagcgtcaaaataggcagaacctgaagctggttctccagagggctctgcaggacacgcctgaggtggatgaaggtggaggg

SEQ ID NO: 631403 - DNA, 120 bp, Artificial Sequence
  ENSG00000179826_9 (sequence is synthesized)
tggcttcctcaggaaaccctggagctgtcgggaagcagattggagcagtgaggaagaacctctgccctgtcagacaggactttgagagcaatgctgccctgccacccttgacaattatat

SEQ ID NO: 631404 - DNA, 120 bp, Artificial Sequence
  ENSG00000179826_10 (sequence is synthesized)
gcatttttcttagccttctgcctcagaaatgtctcagtggtccctcaaggtcttcgaatagatgtttatctaacctgacagttgcagttttcacccatggaaagcattagtctgacagta

SEQ ID NO: 631405 - DNA, 120 bp, Artificial Sequence
  ENSG00000179826_11 (sequence is synthesized)
caatgtttggattctccttgatattaccaatacattttccctgttatcttgcactgaatctttcctactgaacactttttctgcacttttcattgtaataaaaggagttgctgtccacaa

SEQ ID NO: 631406 - DNA, 120 bp, Artificial Sequence
  ENSG00000179826_12 (sequence is synthesized)
aaatacctctggcctctgatttgcccatagtcctcatacaggaaataacaagactgtccagcatcttcgtaagcctggattgctcaccagctttcatttcagctcctgtaggcatctcct

SEQ ID NO: 631407 - DNA, 120 bp, Artificial Sequence
  ENSG00000179832_0 (sequence is synthesized)
gatgggagaagaagttgtccatgttcacactgggtgaaggaagctgaaaccacagacatgactgagtcctccatgaagaagctggcctccaccctgctggacgccatcaccgataaggac

SEQ ID NO: 631408 - DNA, 120 bp, Artificial Sequence
  ENSG00000179832_1 (sequence is synthesized)
cccctggtgcaggagcaggtctgcagtgccctgtgctccctcggggaggcgcggccggtggagacgctccgtgcctgcgaggagtatctgcggcagcatgacaagctggcacacccatac

SEQ ID NO: 631409 - DNA, 120 bp, Artificial Sequence
  ENSG00000179832_2 (sequence is synthesized)
cgagcagcggtcctgagggccatggagagggtcctgagcagtcgcgccagtgagctggacaaggacacagccagcaccatcatcctcctggcctccagcgagatgaccaagacgaaggac

SEQ ID NO: 631410 - DNA, 120 bp, Artificial Sequence
  ENSG00000179832_3 (sequence is synthesized)
ctggtctgggactggcagcaggcggcgagtggcgtcctggtggccgtgggaagacagttcatcagcaaggtgatggaggagctgctgcgcaggctgcaccctgggaccctgccacactgc

SEQ ID NO: 631411 - DNA, 120 bp, Artificial Sequence
  ENSG00000179832_4 (sequence is synthesized)
gccgtgctgcacaccctcgccagcctctcggtggccaacgcgttcggcgtagtccccttcctgccatccgtcctgagctccctgctgcccgtgctgggcgtggccaagcaggacacggtg

SEQ ID NO: 631412 - DNA, 120 bp, Artificial Sequence
  ENSG00000179832_5 (sequence is synthesized)
cgcgtggccttctgctccgctctgcagcgcttcagcgagggtgccctggagtacctagccaacctggaccgagccccagaccccacggtcaggaaggacgcctttgccaccgacatcttc

SEQ ID NO: 631413 - DNA, 120 bp, Artificial Sequence
  ENSG00000179832_6 (sequence is synthesized)
agcgcctacgatgttctcttccatcagtggctgcagagtcgagaagccaagctccgtcttgccgtggtggaggctctggggcctatgagccatctgctgcccagtgagaggctggaagag

SEQ ID NO: 631414 - DNA, 120 bp, Artificial Sequence
  ENSG00000179832_7 (sequence is synthesized)
cagctgcccaagctcctccctgggattctcgccctctacaagaagcacgcagagaccttctacttgtccaagagcctgggccagatcctcgaggcagctgtgagtgtgggcagccgcaca

SEQ ID NO: 631415 - DNA, 120 bp, Artificial Sequence
  ENSG00000179832_8 (sequence is synthesized)
ctggagacccagctggatgccctcttggctgcactgcactcccagatctgtgtgcctgtggagtcctcaagccccctggtgatgagtaaccagaaggaggtgctgcgctgcttcactgtg

SEQ ID NO: 631416 - DNA, 120 bp, Artificial Sequence
  ENSG00000179832_9 (sequence is synthesized)
ctggcctgcagctcgcctgaccgcctactggccttcctgctgcccaggctggacaccagcaatgagaggacccgcgtgggcaccctgcaggtggtcagacatgtcatcaactcagctgct

SEQ ID NO: 631417 - DNA, 120 bp, Artificial Sequence
  ENSG00000179832_10 (sequence is synthesized)
gctcagatggaagataaaaagccctttatcctgtcttccatgaggcttcctctcctggacaccaacagcaaggtgaagcgggcagtggtgcaggtgattagcgccatggcccaccacggc

SEQ ID NO: 631418 - DNA, 120 bp, Artificial Sequence
  ENSG00000179832_11 (sequence is synthesized)
tacctggagcagcctggaggtgaggcgatgatcgagtacatcgtgcagcagtgcgcgctgccccccgagcaggagcctgagaagccaggccccggcagcaaggaccccaaggccgacagc

SEQ ID NO: 631419 - DNA, 120 bp, Artificial Sequence
  ENSG00000179832_12 (sequence is synthesized)
gtgcgggccatcagcgtgcgcaccctctacctggtcagcaccaccgtggacaggatgagtcacgtcctctggccatacctgctccagttcctcacccctgtgcgcttcactggggccctg

SEQ ID NO: 631420 - DNA, 120 bp, Artificial Sequence
  ENSG00000179832_13 (sequence is synthesized)
actccgctctgcaggagcctcgtgcatctggcgcagaagaggcaggaggccggggccgacgccttcctcatccagtacgacgcccatgcgagcctcccgtctccctatgctgtaaccgga

SEQ ID NO: 631421 - DNA, 120 bp, Artificial Sequence
  ENSG00000179832_14 (sequence is synthesized)
agactgttggttgtgtcttccagcccctacctaggggacggacgtggggcagcggcgctgcgcctcctcagtgttctgcacccaaacattcaccctttgctgggtcagcattgggaaacg

SEQ ID NO: 631422 - DNA, 120 bp, Artificial Sequence
  ENSG00000179832_15 (sequence is synthesized)
actgtcccgctgctgctggggtacctggatgagcacacagaagagaccctgccacaggaggagtgggaggagaagctgttgatgttcctgcgagacaccctggccatcatttctgacaac

SEQ ID NO: 631423 - DNA, 120 bp, Artificial Sequence
  ENSG00000179832_16 (sequence is synthesized)
gcgtggatctgccagctgagcctggagctgtgcaggcagctgccctgctacgatgaggcaccccaggagaagaacttcctgtacaaatgcataggcaccaccctgggtgctgcttcaagt

SEQ ID NO: 631424 - DNA, 120 bp, Artificial Sequence
  ENSG00000179832_17 (sequence is synthesized)
aaggaggtggtgaggaagcaccttcaagagctgctggagacggccagataccaggaggaggcagaacgcgagggcctcgcctgctgcttcgggatctgtgccatctcccacctcgaggac

SEQ ID NO: 631425 - DNA, 120 bp, Artificial Sequence
  ENSG00000179832_18 (sequence is synthesized)
acgctggcccagctggaggacttcgtgaggtcagaggtcttcagaaaatccattggcattctcaacatttttaaggatcgaagtgagaacgaagtggagaaggtgaagagtgctctgatc

SEQ ID NO: 631426 - DNA, 120 bp, Artificial Sequence
  ENSG00000179832_19 (sequence is synthesized)
ctgtgctatgggcacgtggcggcccgggccccccgggagctggtgctggccaaggtagagtcagacatcctccggaacatctgccagcacttcagcaccaaggttctaggaataaaggta

SEQ ID NO: 631427 - DNA, 120 bp, Artificial Sequence
  ENSG00000179832_20 (sequence is synthesized)
gaaaccaaggacccagccctgaagctgtgccttgtccagagtgtgtgcatggtcagccgcgccatctgcagcagcacccaggctggctccttccacttcacccggaaagcagagctggtg

SEQ ID NO: 631428 - DNA, 120 bp, Artificial Sequence
  ENSG00000179832_21 (sequence is synthesized)
ggcagagcccccggactccttgaggacacctattcggaagaaagccatgctcacctgcacttacttggtctccgtggagccagcgctggacgagcaggcccgggcggatgtgatccatgg

SEQ ID NO: 631429 - DNA, 120 bp, Artificial Sequence
  ENSG00000179832_22 (sequence is synthesized)
ctgcctgcacagcatcatggccctgctgcctgagcccaaggaggaggacggaggctgccagaagtccctgtatctggagacactgcacgcccttgaggatctgctgacgagcctcctgca

SEQ ID NO: 631430 - DNA, 120 bp, Artificial Sequence
  ENSG00000179832_23 (sequence is synthesized)
gcggaacatgaccccccaaggcctgcagatcatgattgagcacctgagcccatggatcaagtccccaagaggtcacgagcgggcgcgggccctgggcctgagcgccctcctgctgcgcta

SEQ ID NO: 631431 - DNA, 120 bp, Artificial Sequence
  ENSG00000179832_24 (sequence is synthesized)
cttcctggagcacctgcgtgtcagcgccctggtgcccttccacaacctgggccttctcatcggcctcttctccccacggtgtgcggacctgtggcctgccacccgccaggaggccgtgga

SEQ ID NO: 631432 - DNA, 120 bp, Artificial Sequence
  ENSG00000179832_25 (sequence is synthesized)
ctgtgtctactccctgctgtacctccagctcggctatgagggcttctcccgggactaccgcgatgacgtggcggagcggctcctcagcctcaaggacggcctcgtgcaccctgaccccgc

SEQ ID NO: 631433 - DNA, 120 bp, Artificial Sequence
  ENSG00000179832_26 (sequence is synthesized)
cattctcttccacacctgccacagtgtaggccagattattgccaagcgcctccccccagaccagctcatcagcctcttgctaaccatgtttgaggccctgggagaccccgaaaagaactg

SEQ ID NO: 631434 - DNA, 120 bp, Artificial Sequence
  ENSG00000179832_27 (sequence is synthesized)
ctcccgagcagctaccgtcatgatcaactgcctgctgcaggagcggggcggtgtgctccaggagaaggtgcccgagatcgtgagcgtcctgcgctccaagcttcaggaggcccagggaga

SEQ ID NO: 631435 - DNA, 120 bp, Artificial Sequence
  ENSG00000179832_28 (sequence is synthesized)
gcacgtcctgccggccgcccagcacagcgtgtacctcctggccacccagcactgcgcagccgtggtgtccagcctcctgggcagccccttgcccttggacagccacacctgcatgctgtg

SEQ ID NO: 631436 - DNA, 120 bp, Artificial Sequence
  ENSG00000179832_29 (sequence is synthesized)
gcgggcgctggcggtggagcctcgcctagctgcccaggtcctggggctgctgctggagaagatgagtagggacgtccctttcaaggagagccgggccttcctgctgggccgcaccccaga

SEQ ID NO: 631437 - DNA, 120 bp, Artificial Sequence
  ENSG00000179832_30 (sequence is synthesized)
ccgcgtggccacgctgctgcctctctcggctacctgtgcactgtttgaggtcatgtccacgcctgcagcggggcccgcggtgctcgagctctacccccagctgtttgtggtgcttctgct

SEQ ID NO: 631438 - DNA, 120 bp, Artificial Sequence
  ENSG00000179832_31 (sequence is synthesized)
gcgcgtcagctgcaccgtgggtgtccagctgccccggaacctgcaggcccaggaaaggaggggtgccagtccagccctagccaccaggaacctggaaccctgcagctctgcagtggacac

SEQ ID NO: 631439 - DNA, 120 bp, Artificial Sequence
  ENSG00000179832_32 (sequence is synthesized)
cctgcggtccatgctactccgcagcggcagcgaggatgtggtacagcgcatggacctggagggaggctgggaactgctcaggacctcggcggggcatgaggagggggccaccaggttggc

SEQ ID NO: 631440 - DNA, 120 bp, Artificial Sequence
  ENSG00000179832_33 (sequence is synthesized)
cagggccatggctgagcacgcagggccccgactccccctggtgctgaagacgctggcatgcacacacagcagtgcgtatgagaaccagagggtgaccaccaccgccttcctggccgagct

SEQ ID NO: 631441 - DNA, 120 bp, Artificial Sequence
  ENSG00000179832_34 (sequence is synthesized)
gctgaacagcaacgtggccaacgacctcatgctcttggactcgctgctggagagcctggcggctcgccagaaggacacatgcgccagcgtgcggaggctggtgctccgcggcctggccaa

SEQ ID NO: 631442 - DNA, 120 bp, Artificial Sequence
  ENSG00000179832_35 (sequence is synthesized)
cctggcctccggctgccctgacaaggtgcgaacccacggcccccagctcctcacagccatgattggcgggctggacgacggggacaaccctcacagcccagtggccctggaggccatgct

SEQ ID NO: 631443 - DNA, 120 bp, Artificial Sequence
  ENSG00000179832_36 (sequence is synthesized)
gggccttgcgaggctggtgcacctggtggagtcctgggacctgcgctcagggctgctgcacgtggccatccgcatccggcctttcttcgacagtgagaagatggagttccggacggcatc

SEQ ID NO: 631444 - DNA, 120 bp, Artificial Sequence
  ENSG00000179832_37 (sequence is synthesized)
tatccgcctctttgggcaccttaacaaggtctgccacggagactgtgaggacgtcttcctggaccaggtggtgggcgggctggcgcccctgctgctgcacctgcaggaccctcaggccac

SEQ ID NO: 631445 - DNA, 120 bp, Artificial Sequence
  ENSG00000179832_38 (sequence is synthesized)
cgtggccagcgcctgcaggtttgccctgcgcatgtgtggccccaatctggcatgtgaggagctctcagctgctttccagaaacacctgcaggagggccgagccctgcacttcggggagtt

SEQ ID NO: 631446 - DNA, 120 bp, Artificial Sequence
  ENSG00000179832_39 (sequence is synthesized)
cctcaacaccacctgcaagcacctgatgcaccatttcccagacctgctgggccgtctcctgaccacctgcctgttctacttcaagagcagctgggagaacgtccgagctgctgcacccct

SEQ ID NO: 631447 - DNA, 120 bp, Artificial Sequence
  ENSG00000179832_40 (sequence is synthesized)
gttcaccgggttcctggtgctgcactcggagcccaggcagcagccgcaggtggacctggaccagctcattgcggcgctccagatcctgctgaaggacccggcccccgaggtgcggacgag

SEQ ID NO: 631448 - DNA, 120 bp, Artificial Sequence
  ENSG00000179832_41 (sequence is synthesized)
ggctgctgaggccctgggccgcctggtgaagctcgcctaaggctccggccagcacccccagcgaggagtatgcacccagacctgtgcctgagctccaagacagggcctcctgaggaccac

SEQ ID NO: 631449 - DNA, 120 bp, Artificial Sequence
  ENSG00000179832_42 (sequence is synthesized)
agcctgggcacacgactggaggggcctggccccagaacaggcactgctggggaccaaacccaagcccttcagtgagggatgtgcccaataaactcatctgctcccagcgagtgactgaca

SEQ ID NO: 631450 - DNA, 120 bp, Artificial Sequence
  ENSG00000179832_43 (sequence is synthesized)
ggtccctctggaatgatgctccccctggaatgatgctccccgagccctccacccggctctgcaccccgactttctgcatgagttcccatggctgtaggccacgtgggacagaaagtgaca

SEQ ID NO: 631451 - DNA, 120 bp, Artificial Sequence
  ENSG00000179832_44 (sequence is synthesized)
tggagccaggccccagtctctcaggtacccacggggacctctcctctccaggcgttttgggatcctcactggctccggtgggccctgcacagcacccccacagggaagctgctgtttctg

SEQ ID NO: 631452 - DNA, 120 bp, Artificial Sequence
  ENSG00000179832_45 (sequence is synthesized)
ccttcctctaaggtcccaaaactgcctggctgctctgttggccccaggctccagcacacactggaggctgcccctcaccctgtgtcttggttccggctactccaagccttgtcctctgca

SEQ ID NO: 631453 - DNA, 120 bp, Artificial Sequence
  ENSG00000179832_46 (sequence is synthesized)
cttggcagcactgccaggtctccctgggagctgcgctctttgaccctgtgacgtcctgaggcctgggccagatgctgcttcctccagggaagatttgttctccctcccagtagctcccca

SEQ ID NO: 631454 - DNA, 120 bp, Artificial Sequence
  ENSG00000179832_47 (sequence is synthesized)
gggacctcccacaccactgccctgggccctgtgtgtataggcccagatttttctctgtgtcctttattaccagctctgtttacagatccctggagtcaggggaaggggtgagctcagatc

SEQ ID NO: 631455 - DNA, 120 bp, Artificial Sequence
  ENSG00000179832_48 (sequence is synthesized)
catgtccaggatggagcaggtcctggcagattgtgtccctctaagtgaaagcaccatcctgctttgaattctctagaaagatttccctacttactattttgcaaaattctaaactttttg

SEQ ID NO: 631456 - DNA, 120 bp, Artificial Sequence
  ENSG00000179832_49 (sequence is synthesized)
aaaagttgcaagggtggtacctttctacccttcgccatatgatggtggctcacacttgctttgacagctggctgcagacaccatgcgtggccacactccccaggtgaccatgcctctgag

SEQ ID NO: 631457 - DNA, 120 bp, Artificial Sequence
  ENSG00000179832_50 (sequence is synthesized)
ggttcccagagcctaagacagccatccctgagcccactgctctagctcattctgggatctattcaaagacacactttggtttagtttggttgtctcttagacttgtttgcccaagaggag

SEQ ID NO: 631458 - DNA, 120 bp, Artificial Sequence
  ENSG00000179832_51 (sequence is synthesized)
cctttttactctttttaagagatgaggagaccaattgtttcgtagaatgtccctcaatttacatatgtgtgacggtttcttcgcaattagactaaaaaaattcacgtttccttgttttaa

SEQ ID NO: 631459 - DNA, 60 bp, Artificial Sequence
  ENSG00000179832_52 (sequence is synthesized)
taaaaaaattcacgtttccttgttttaaggctaattttttttttttttagtacctcccgg

SEQ ID NO: 631460 - DNA, 120 bp, Artificial Sequence
  ENSG00000179832_53 (sequence is synthesized)
acctcccagctcccagcaaagggcagggcgtgtctaccacccaccagcccactggggtcccccttcctcgccgaggcctccggagcatgggtctgctggcccttcctttctttgccatct

SEQ ID NO: 631461 - DNA, 120 bp, Artificial Sequence
  ENSG00000179832_54 (sequence is synthesized)
tagtcatggacagaggctggcccaggggcacctggcttcctgtgacctccgggagactccatgctgggcaaggcagagtgacccttcccctggcaggcgggggcatgaggctgccacggg

SEQ ID NO: 631462 - DNA, 120 bp, Artificial Sequence
  ENSG00000179832_55 (sequence is synthesized)
gaacacaggtttccttgcacctggccctttaccctgtcagctttgctgttttcatgtgctctgacgccctcccattaggtgcatccaagctgcaatgcccacttcctcctggcagggggg

SEQ ID NO: 631463 - DNA, 120 bp, Artificial Sequence
  ENSG00000179832_56 (sequence is synthesized)
acccgcaggcaccttctgctcagaggtgcacttgtctggtggccctgctccttcctggtactgttgacctttctgtgtgtttgttttaaatctcttgcatggtaaatagctgcattttgt

SEQ ID NO: 631464 - DNA, 120 bp, Artificial Sequence
  ENSG00000179832_57 (sequence is synthesized)
tactgataagagtgagtttaaatccactgtcatatcttttgcgtctttgttacacattttgttttttaaaaatcttctttcttgtccttttttagattgacagtgtccctcttacctcac

SEQ ID NO: 631465 - DNA, 120 bp, Artificial Sequence
  ENSG00000179832_58 (sequence is synthesized)
tttctccactcagtttgtaatcctgcagtctgttgcttttcttttagcgtttgccctaaaggtggctgcatgtgtcctcactgaagtccagcatgggccccaaatgcaggctgaggtctg

SEQ ID NO: 631466 - DNA, 120 bp, Artificial Sequence
  ENSG00000179832_59 (sequence is synthesized)
ggtctggctgggctgctgggcgcccgagtcatcatgaccattgttcctgggcacagccggcgttgacttgtatttcctccgtgattaccgcctggctcatcaatcactgttttcgttttc

SEQ ID NO: 631467 - DNA, 120 bp, Artificial Sequence
  ENSG00000179832_60 (sequence is synthesized)
cgtggaggcgtggctcacacaaagggcaagcacggagtcactgggtcctgcaggactttccaggtcaaggcagaggaggtgtccggtccccagcaggctcctgtgtgcccctcagtcccc

SEQ ID NO: 631468 - DNA, 120 bp, Artificial Sequence
  ENSG00000179832_61 (sequence is synthesized)
tagagggtcacggccacctgaccgccaccactagaggttttggcgattgtgctgtgtggtgggtcttcccggcctctgcttagcacagcagtgctgctgcccatccttcctccttgccag

SEQ ID NO: 631469 - DNA, 120 bp, Artificial Sequence
  ENSG00000179832_62 (sequence is synthesized)
gtagtgccgggtgctgctgcccatccttcctctgccgggcagtgccgggtgctgctgcccatcctttctccttgccgggtagtgccgggtgctgctgcccatcctttctccttgccggac

SEQ ID NO: 631470 - DNA, 120 bp, Artificial Sequence
  ENSG00000179832_63 (sequence is synthesized)
agtgctgggtgccgtgtgggctgcactgtgtgtgtgtttctaggtgatggacattcagattgttttttggtttggggctgctggggatggcgatgctttgaatgttcctgggagtgtctg

SEQ ID NO: 631471 - DNA, 120 bp, Artificial Sequence
  ENSG00000179832_64 (sequence is synthesized)
ttggtgggtagagcatgcatttctctttcgtgtgtatataggagtggaatcaaggccgggcactgtggctcatacctgtaatcccagcagtgtgggaggctgaggcaggaggattacctg

SEQ ID NO: 631472 - DNA, 66 bp, Artificial Sequence
  ENSG00000179832_65 (sequence is synthesized)
atcccagcagtgtgggaggctgaggcaggaggattacctgaggtcagaagtttgggccaggcatgg

SEQ ID NO: 631473 - DNA, 120 bp, Artificial Sequence
  ENSG00000179832_66 (sequence is synthesized)
ctccgggcccctgctgggcgggaaggcggcgccccggccgaggtggcggcggctcctcaggacggaagctcctgttttcttgtcagccgccagctgagggccattcgcagcttctccagg

SEQ ID NO: 631474 - DNA, 120 bp, Artificial Sequence
  ENSG00000179832_67 (sequence is synthesized)
cccttccgtgggaagttgctggacaaggggtgcagaaagcaagttggggtggatggctcagccacgtggggctgaggactgggcattccctgaaggtcactcgggtgacttcttagcgat

SEQ ID NO: 631475 - DNA, 120 bp, Artificial Sequence
  ENSG00000179832_68 (sequence is synthesized)
gtggcgatgctcttgccctgcccagtagtggcacatgcaggtgacatagcagcccccaggatggaggtggcaggagtgggtgcccaggcccagtgcaggcccagtacaggtggtcccaga

SEQ ID NO: 631476 - DNA, 120 bp, Artificial Sequence
  ENSG00000179832_69 (sequence is synthesized)
gaaaggtcagcgcagctgaagtgccagctgggggagactgccctgagtttctggggactgagctcagaggagcagaggagaggccctgggctgcaggacgggggtcttgaaggccctgct

SEQ ID NO: 631477 - DNA, 120 bp, Artificial Sequence
  ENSG00000179832_70 (sequence is synthesized)
ggagaggaagtgatgtggggaggaggctgagcagctggggcagctgggacccctccccaggtcgggtgaatgaggctgagaacgactgagggatgcaggtgccgggtcacccgtgacctt

SEQ ID NO: 631478 - DNA, 120 bp, Artificial Sequence
  ENSG00000179832_71 (sequence is synthesized)
ggcactgggggtcatctgtccatgggactttctggatgagagaggagaggggcagggagctagagagggtggtgtggtgaagtctgcaaggaaactttctgaaaagaagtgtggaggtgg

SEQ ID NO: 631479 - DNA, 120 bp, Artificial Sequence
  ENSG00000179832_72 (sequence is synthesized)
gtttactgcttggctctgcccctcacctggcccactccagctgggccccactctccaccgcctggatggtcctggctgcatcccagaaacaaaggggaagaggggacggcagccacagag

SEQ ID NO: 631480 - DNA, 120 bp, Artificial Sequence
  ENSG00000179832_73 (sequence is synthesized)
ctagtaaacataatgtaagtgctgtgaacagttacatggtaacaaactgttaaaactgtatgaaatggttaggttcctagaaagattaaaatgtcaacattggtacgaaaagcaacagag

SEQ ID NO: 631481 - DNA, 120 bp, Artificial Sequence
  ENSG00000179832_74 (sequence is synthesized)
cgtctgttgcttgagtcaccacggctgttacatcccgtgctctcccttctctgccttcttggtgttggttctgcgggcgactgcccatgtggccctcagccccatcctctgttcatggct

SEQ ID NO: 631482 - DNA, 120 bp, Artificial Sequence
  ENSG00000179832_75 (sequence is synthesized)
ctctgccactcttgttgtccaaagctctttctctgtaggttccgtgggaagagctcatgggaacatgatcttcgacctcatgcttgctgatcatagtttattgtgccttttatcgttgat

SEQ ID NO: 631483 - DNA, 120 bp, Artificial Sequence
  ENSG00000179832_76 (sequence is synthesized)
ggttttgctggttacaggattcttggctgacatttccttgagtgtcttaagttattccatattcttctggcagagagttgccagatttagcaaaaacaaataaacaggatgccccgaata

SEQ ID NO: 631484 - DNA, 120 bp, Artificial Sequence
  ENSG00000179832_77 (sequence is synthesized)
tctgggaggatttcaggagtttctgagccgaggattcccgtcggggagtgtaattgtgtaactgaagtcccgctggttcctctggcctctcaggatcgaagtgagaacgaagtggagaag

SEQ ID NO: 631485 - DNA, 120 bp, Artificial Sequence
  ENSG00000179832_78 (sequence is synthesized)
ccttggccacactcggctgcctgatgttggaggctcttccagcctggaatcatctttctgtggctcccacatagccagctctcttcctttgagtcttagcttcagggtcacttttcagaa

SEQ ID NO: 631486 - DNA, 120 bp, Artificial Sequence
  ENSG00000179832_79 (sequence is synthesized)
tagcccttggtgttgacccccttcttccagtgcagcacccccatgaatatgtttctcagcctctcgtctgcacctctcctgatgctgccacagtgtgtggtgatcttatttactgtccag

SEQ ID NO: 631487 - DNA, 120 bp, Artificial Sequence
  ENSG00000179832_80 (sequence is synthesized)
ttgtctttgtgtcttttccattaggacataagctacttgagggcaagccccatctgccttataaagggcctagcagggagttggcctccccataaacttgaggagtgaataaaatattgc

SEQ ID NO: 631488 - DNA, 120 bp, Artificial Sequence
  ENSG00000179833_0 (sequence is synthesized)
actcctgcacggcgagtgctggagcacgacgtaccgctcgctcggtcagggcgccccctccgcccgcctcctgcttcctcctccgctgcctgccgccgccgcctccaccattgtataatg

SEQ ID NO: 631489 - DNA, 120 bp, Artificial Sequence
  ENSG00000179833_1 (sequence is synthesized)
ctcggggcgcgcaggcagagaacggcggagtcttagcttcagcctcgcctgctgcccgctccccggcgccaccctcgggcccctggagcggggcactccgcatggagcgggagtagctga

SEQ ID NO: 631490 - DNA, 120 bp, Artificial Sequence
  ENSG00000179833_2 (sequence is synthesized)
ggagtgggcggaaacccctcctgatgcgttagttcccaggtggagctgcatgtgatatatgttgggtaaaggaggaaaacggaagtttgatgagcatgaagatgggctggaaggcaaaat

SEQ ID NO: 631491 - DNA, 120 bp, Artificial Sequence
  ENSG00000179833_3 (sequence is synthesized)
cgtgtctccctgtgacggtccatccaaggtgtcttacaccttacagcgccagactatcttcaacatttcccttatgaaactctataaccacaggcccctgacagagcccagcttgcaaaa

SEQ ID NO: 631492 - DNA, 120 bp, Artificial Sequence
  ENSG00000179833_4 (sequence is synthesized)
gaccgttttaattaacaacatgttgaggcggatccaggaggaactcaaacaggaaggcagcctgaggcccatgttcaccccctcctcccagcccaccaccgagcccagcgacagctaccg

SEQ ID NO: 631493 - DNA, 120 bp, Artificial Sequence
  ENSG00000179833_5 (sequence is synthesized)
agaggccccgccggccttcagccacctggcgtccccgtcctcccacccctgcgacctcggaagcactacgcccctggaggcctgcctcaccccggcctcactgctcgaggacgacgatga

SEQ ID NO: 631494 - DNA, 120 bp, Artificial Sequence
  ENSG00000179833_6 (sequence is synthesized)
cacgttttgcacctcccaggccatgcagcccacggctcccaccaaactgtcacctccagccctcttgccagaaaaggacagtttctcctctgccttggacgagatcgaggagctctgtcc

SEQ ID NO: 631495 - DNA, 120 bp, Artificial Sequence
  ENSG00000179833_7 (sequence is synthesized)
cacatctacctccacagaggcggccacggctgcgactgacagtgtgaaagggacctccagcgaggctggcacccagaaactcgacggtcctcaagagagccgcgcagatgactcaaaact

SEQ ID NO: 631496 - DNA, 120 bp, Artificial Sequence
  ENSG00000179833_8 (sequence is synthesized)
gatggactctctgcctgggaattttgaaataacgacgtccacgggtttcctgacagacttgaccctggatgacatcctgtttgctgacattgatacgtccatgtatgattttgacccctg

SEQ ID NO: 631497 - DNA, 120 bp, Artificial Sequence
  ENSG00000179833_9 (sequence is synthesized)
cacttcctcatcagggacagcctcaaaaatggcccctgtgtctgccgacgacctcctcaaaactctggctccttacagcagtcagcctgtcaccccaagtcagcctttcaaaatggacct

SEQ ID NO: 631498 - DNA, 120 bp, Artificial Sequence
  ENSG00000179833_10 (sequence is synthesized)
cacagagctggaccacatcatggaggtgcttgttgggtcctaagacccagggacccagcgactatgcccacccagaccccagagcgttcccataaccctgacagttctccacactgtgca

SEQ ID NO: 631499 - DNA, 120 bp, Artificial Sequence
  ENSG00000179833_11 (sequence is synthesized)
tgcacccttgcttgcctttttcagagaaaaagaaaattttacaacaggatcacactagtttttgctttgagcagagttggagtgccttcatccaagtatgaccacttttaatacactttt

SEQ ID NO: 631500 - DNA, 120 bp, Artificial Sequence
  ENSG00000179833_12 (sequence is synthesized)
ttgagtggttcctcagagacctactaccctggtataggaaagaatccatttgaagacaatgttgcaatgttgaatgacaaaaataaacagttcaagtgaagcacaaggattaagttggaa

SEQ ID NO: 631501 - DNA, 120 bp, Artificial Sequence
  ENSG00000179833_13 (sequence is synthesized)
aagctgtaaattgcatgtgcatatttgtctattttttctataagttttattgcaagaggtaaagaagaaaactatatatatatatcttatttagataatctcagtaccttttctggcatt

SEQ ID NO: 631502 - DNA, 120 bp, Artificial Sequence
  ENSG00000179833_14 (sequence is synthesized)
tttgccctgtataggttgacttggcaattcggcctttttagaggcattaactactcctcgtaagtgttgcatttacatggctgtttagaaaactgctgcccaaatttattttatattttt

SEQ ID NO: 631503 - DNA, 120 bp, Artificial Sequence
  ENSG00000179833_15 (sequence is synthesized)
gtacagattctgcagtttatgatattgtttttctaaaaacaaatgctgtttatacatatgagatagctattttgataggatttgctcacatagttcctgcaaacttcagatgtacaagtt

SEQ ID NO: 631504 - DNA, 120 bp, Artificial Sequence
  ENSG00000179833_16 (sequence is synthesized)
gcacttgtacttttatagagttgtaatgttttatatgtgtatggtgcaagagaaaattggatcaaatcaatctgcagttgatgtccccaaatgcaaacacaggcacacacatgcacacac

SEQ ID NO: 631505 - DNA, 120 bp, Artificial Sequence
  ENSG00000179833_17 (sequence is synthesized)
ccataaacacacacacagtgctttaagaaagggccaggtgatatcacacccaaatttcacaagcactgaccccctggcaccaacacccgccagtactgtgacttccaaagccagagccac

SEQ ID NO: 631506 - DNA, 120 bp, Artificial Sequence
  ENSG00000179833_18 (sequence is synthesized)
atgtgctcatcaaacttgcattaagcagttggcgggagatggctgtggagctgggggtttaagtgatggttctcttttgctccctcttttgagggtaaagctactgtctttcttaagagt

SEQ ID NO: 631507 - DNA, 120 bp, Artificial Sequence
  ENSG00000179833_19 (sequence is synthesized)
gtatttatgccaagtttgcgcttttaattgtttttattttgttttttaatgaaaacccagatctttcctttttggcataatttttatgatgacctgaaattttacatccgaacaaaattt

SEQ ID NO: 631508 - DNA, 120 bp, Artificial Sequence
  ENSG00000179833_20 (sequence is synthesized)
tacatccgaaaagcaaccaacttcttcatggaactcagccctgttgcaatgcttagggcccttaaagaagaaaatctccccagaaggcatccatcatgttgcttaattgtcttctgcagc

SEQ ID NO: 631509 - DNA, 120 bp, Artificial Sequence
  ENSG00000179833_21 (sequence is synthesized)
ttcctttccctagagctttccctgtgttgctaagagctgaaaatggcatcttcgtgatcaccacagtgagcttggctcgcctcggccggcccgggatgcactcttacaacatgtgtgact

SEQ ID NO: 631510 - DNA, 120 bp, Artificial Sequence
  ENSG00000179833_22 (sequence is synthesized)
cttgaacctggagttcatcacattacgtcacagcttcccatctggttgctttcctgagtcagctacttcacacttgtcaaggctgttttaccccaaaactcagacaggactttctatgca

SEQ ID NO: 631511 - DNA, 120 bp, Artificial Sequence
  ENSG00000179833_23 (sequence is synthesized)
cccatcaccttatctcccaggacacacttgagaagtagctttttattcctagtggtgtacatttaattttaaaaaggttgcaatgtatcatgcttgttgccgaaactgtttatggccttc

SEQ ID NO: 631512 - DNA, 120 bp, Artificial Sequence
  ENSG00000179833_24 (sequence is synthesized)
ttgtttcagttttttcttttcttccaatggtactttagctgttgagtgcaggttacaacctatattgttatgcagatggcttctttaggaataacttttatatttatttaaaaattttta

SEQ ID NO: 631513 - DNA, 120 bp, Artificial Sequence
  ENSG00000179833_25 (sequence is synthesized)
aattatgggatgttttgttgttgttgttgtctttgttgttggtcatttgtcaatattcagtcaccaattctgctcacttcttgccatggataaaattgggtctttctggctaattaaaaa

SEQ ID NO: 631514 - DNA, 120 bp, Artificial Sequence
  ENSG00000179833_26 (sequence is synthesized)
agacaactttataaaatggcactttaagcaagccatagttagttttatttttgtaatgcacatggcaaagcaaagacgtttgtgatgaaggaactgctcatctaagcaaaagatttgagt

SEQ ID NO: 631515 - DNA, 120 bp, Artificial Sequence
  ENSG00000179833_27 (sequence is synthesized)
atgatatgataaaggctttctacattctaatttactttttccccccacttgaatgtgttttaaaggctaattatcagctcagtagagcagtgagaaactgatcaaattgcacttgttctc

SEQ ID NO: 631516 - DNA, 120 bp, Artificial Sequence
  ENSG00000179833_28 (sequence is synthesized)
ctacaagcaacctccacgcagacacctcgtactgctacaggtgtgtcatttcctttaataggaccagggaccatgtaactgaggtgagggttgtagtagatgcttccagtgtcagtatgc

SEQ ID NO: 631517 - DNA, 120 bp, Artificial Sequence
  ENSG00000179833_29 (sequence is synthesized)
ctgttaattttaagagcttccctttcttgcagagaacaagtctgcccagattccatgctttctataactggaggacctggcaaacctgccgcatgctgcacacatctacctacgtacaca

SEQ ID NO: 631518 - DNA, 120 bp, Artificial Sequence
  ENSG00000179833_30 (sequence is synthesized)
tatacaatagtattgatgattctgaacaataacagggtaaaacagttggtttgccattgttaaaaactgatttacagtaacttacaacaactgtacttttgttggattagcaaatcatgt

SEQ ID NO: 631519 - DNA, 120 bp, Artificial Sequence
  ENSG00000179833_31 (sequence is synthesized)
gtttaaacaaatcccatatgttgggcaacagttcaaataagcacggagaagtgttgcccaaacttggttctctgactcttatgtatttgtaaggctgggcttcaaaatcaaaacaaaaac

SEQ ID NO: 631520 - DNA, 120 bp, Artificial Sequence
  ENSG00000179833_32 (sequence is synthesized)
cccaaaaacagcaggcaaatgctttttaactctgacaccgttgccataaatccctgatactcaaagtctaacaagaaagacatggaaaattagcagcccattttcagaaagatcaaaatg

SEQ ID NO: 631521 - DNA, 120 bp, Artificial Sequence
  ENSG00000179833_33 (sequence is synthesized)
atctagggttctaattgcttttgcatcctattcttacaaagtgatgtcccaacagggaacagtaggagctggagtgggatctccaagtcccagtttgagtgtgggatgtgcttccagcag

SEQ ID NO: 631522 - DNA, 120 bp, Artificial Sequence
  ENSG00000179833_34 (sequence is synthesized)
tgccttccctttatgaaagacatcacatggcatccagggccaggcaggcagcttgaggtgcctttacgagaaaaccgagctggggctgggagaggacagttattgacactgatgtgcaat

SEQ ID NO: 631523 - DNA, 120 bp, Artificial Sequence
  ENSG00000179833_35 (sequence is synthesized)
gaagtgacaagatgagagcagaatcgtaagagctttgaatttgaagtgagtttttttccccccataagttatttattccttttttctgtgtaaatatatttattttactgtggagcgcta

SEQ ID NO: 631524 - DNA, 120 bp, Artificial Sequence
  ENSG00000179833_36 (sequence is synthesized)
acatctggatcgtaacatgtgcagaatgtatggtaggaatgtattctcttgtaggaatgtaaatctgtattaaaagggggtccaagccaggcccccaggtcttctcattgtatgcacagt

SEQ ID NO: 631525 - DNA, 120 bp, Artificial Sequence
  ENSG00000179833_37 (sequence is synthesized)
ccgcattcatttttactcttctctaatatgggtctatttgaaatatgcaaaaggtatgaggaatgttttaatacctccaaatttttaagaaaagcatcaaagggttgatattttttaaag

SEQ ID NO: 631526 - DNA, 120 bp, Artificial Sequence
  ENSG00000179833_38 (sequence is synthesized)
tttttttagtagcactttctctggatgacagaaggagcaaccacatgggcacccttgttcataccaaagggtgagcagtggccagagcctcctctgcacctctcgagtgtctttaccaat

SEQ ID NO: 631527 - DNA, 120 bp, Artificial Sequence
  ENSG00000179833_39 (sequence is synthesized)
tgagctttttatcgccatagccccttggagtgccccagctgccctgaggtcaatcaaggaaaatttcttaatgaaataagctccaaagagccaaagtatcaacttacagatcgtttttaa

SEQ ID NO: 631528 - DNA, 120 bp, Artificial Sequence
  ENSG00000179833_40 (sequence is synthesized)
agcttaaatttatgaaccacctttgtggtaaacaatgaattatgaataccgcagggcagccttcttaaatgacaaatgtaaaaaaaaaaaaaaaaaagactctacttcgtgcagcaattg

SEQ ID NO: 631529 - DNA, 120 bp, Artificial Sequence
  ENSG00000179833_41 (sequence is synthesized)
ctactctatacgaattgtcttaatttgaaaaccttgctgttacaaattggacctttatacattttctgaaaacaatgaaaagagtatatttaaccttttctggctgtaaatggttacctt

SEQ ID NO: 631530 - DNA, 120 bp, Artificial Sequence
  ENSG00000179833_42 (sequence is synthesized)
cctgtaactgccccgcacctggaggcatggagttgtgtgcatcctgcttatgtacaattgttttcagtgtttctaagaatgagtctgaatggttcttgaaaattagccaggatcaaatgc

SEQ ID NO: 631531 - DNA, 120 bp, Artificial Sequence
  ENSG00000179833_43 (sequence is synthesized)
tattgcagacaaagccaataaaaagttggacttcttttggggataacaagttttggaagagaaatgcaggccatatgtgcgcatgaccgagattttgaaaaaagatgtacatagtgacat

SEQ ID NO: 631532 - DNA, 120 bp, Artificial Sequence
  ENSG00000179833_44 (sequence is synthesized)
gtttggtgcatggtttttgaggagggcttttgtcaaaaaggaggtataacctttcccccacagacctgagagctgtgccttttctatgcaatattacagacgttacatcggaacccagat

SEQ ID NO: 631533 - DNA, 120 bp, Artificial Sequence
  ENSG00000179833_45 (sequence is synthesized)
ggctgtattcacatgtaggtttgggctgtaatctaaacaattggacagattaaatgtacatggaaatgagcagtcttacttttgtagttttatattatacaataaacagttaaaagatga

SEQ ID NO: 631534 - DNA, 120 bp, Artificial Sequence
  ENSG00000179833_46 (sequence is synthesized)
agcgagccgagcaggcggtgctgccgcccgccgccgctcgccccgccgcggccgcccctgctcctgcttgcagcgcccctctgatccatggctgtctgtctgtacttgttacggtgtaac

SEQ ID NO: 631535 - DNA, 120 bp, Artificial Sequence
  ENSG00000179833_47 (sequence is synthesized)
actgcaaaggcatgggatagacccagagccgcttccctctgtctcccctccagccctcgctcaattttcccccctttaaattaaagtctgttcctcgctcctcgtcgttttagagattta

SEQ ID NO: 631536 - DNA, 120 bp, Artificial Sequence
  ENSG00000179833_48 (sequence is synthesized)
ctcccacccctcgaactcaccgtcctgtactcgagtgacgcacagacaccccccgcccacagcccagacgccccctccctcgctgccaccccgacccgtctcggagctggactgggtgcc

SEQ ID NO: 631537 - DNA, 120 bp, Artificial Sequence
  ENSG00000179841_0 (sequence is synthesized)
tttttttactaatgaaacactgcagattagtatccccaaacaattcattttctgacgaaactcttaaagcccagtttcagaacataagctttaagcaacaagcaatcttgtgttaatctg

SEQ ID NO: 631538 - DNA, 120 bp, Artificial Sequence
  ENSG00000179841_1 (sequence is synthesized)
agctctgttacagctctgccgtaatctcagccaaattgcttcatctgtacgtggtgataccaccatctttgtaatattgtggtgaggattagagatgtatgtaaaagtgcatgcactgcc

SEQ ID NO: 631539 - DNA, 120 bp, Artificial Sequence
  ENSG00000179841_2 (sequence is synthesized)
taatacccaagaattgctcaataaatgtcagctattactactcttactgacttccaactatgtgcagattatggtggaaacatgtgatacagcagatacagtacttaaatgaaaatgtca

SEQ ID NO: 631540 - DNA, 120 bp, Artificial Sequence
  ENSG00000179841_3 (sequence is synthesized)
aaattgtacaactaatttaagagtgggaaatgacagtaatgctaaattttcctaagaatatgtatgaaaaatagcacttccttgatggaacatacatttttagaacagaaaccttatgtt

SEQ ID NO: 631541 - DNA, 120 bp, Artificial Sequence
  ENSG00000179841_4 (sequence is synthesized)
ataatggtaaaactagagagtcaaagtctctagttctaactctggctatgaccttatctagttgcatggcttttgacaagacaactgctcccctctggagttcagttttgtcatctggct

SEQ ID NO: 631542 - DNA, 120 bp, Artificial Sequence
  ENSG00000179841_5 (sequence is synthesized)
ggatttgagtaatctcaaataatctctaaagtcctttgcagctttaaaattatctattgagtgtgataaagattacatcagcttgcttttcatcctgcacttcatttttggttcttgttg

SEQ ID NO: 631543 - DNA, 120 bp, Artificial Sequence
  ENSG00000179841_6 (sequence is synthesized)
tttgcttaacttgcactttagagtcataagcaattcacacagacaacacaactaaagaactgataatatcagacttgcagggtaatccaaaatgaagtttcaacaaggaggataaaacaa

SEQ ID NO: 631544 - DNA, 120 bp, Artificial Sequence
  ENSG00000179841_7 (sequence is synthesized)
aatagaatcacactgaactctttaatagggccaaagtaaaccccaatgtttattctccagtcatttcattaagttattatatggaaaatatgcctggtagaatcttatacattcactgaa

SEQ ID NO: 631545 - DNA, 120 bp, Artificial Sequence
  ENSG00000179841_8 (sequence is synthesized)
atagtctccacagaaaataataggctcatagtgaaataaaataccactttcttttctctcatcaggttgatctttaaataaagcaaaaatttatccaaagaagggctttcatcaagaaat

SEQ ID NO: 631546 - DNA, 120 bp, Artificial Sequence
  ENSG00000179841_9 (sequence is synthesized)
taaagagagaaattacaagccatagagaaactgggcatttctatactagagaaaccacctaaaacaactgtatggagtaagatgaaaggtatgaatatgcctggaagaaattttacctag

SEQ ID NO: 631547 - DNA, 120 bp, Artificial Sequence
  ENSG00000179841_10 (sequence is synthesized)
tgtaaaaatggaaaccacaatttcagaaattcatgtagaaaacaaggatgagaagagatcagcagaaggtagtcctggggctgaaaggcagaaggaaaaggcatccatgctttgcttcaa

SEQ ID NO: 631548 - DNA, 120 bp, Artificial Sequence
  ENSG00000179841_11 (sequence is synthesized)
gagaagaaagaaagcagccaaagcactgaagcccaaagctggctctgaagctgctgatgtggcaaggaagtgtccacaagaagcaggagcttctgatcagccagagcccacacggggggc

SEQ ID NO: 631549 - DNA, 120 bp, Artificial Sequence
  ENSG00000179841_12 (sequence is synthesized)
ctgggcctcactcaaacgtcttgtaacacgcaggaaaaggtcagagtcttcaaagcagcaaaagccattggagggtgaaatgcaacctgcaataaatgctgaggatgctgatctttctaa

SEQ ID NO: 631550 - DNA, 120 bp, Artificial Sequence
  ENSG00000179841_13 (sequence is synthesized)
gaaaaaggcaaaatctagacttaagattccctgcataaaattcccaagagggccaaaaaggagtaatcattccaaaattatagaagactcagactgcagcatcaaagtccaggaagaagc

SEQ ID NO: 631551 - DNA, 120 bp, Artificial Sequence
  ENSG00000179841_14 (sequence is synthesized)
tgaaattttggatatacaaacacagaccccattgaatgatcaggcaacaaaggctaagtcaacccaggatctaagtgaaggcatctcacggaaagatggtgatgaggtctgtgaatcaaa

SEQ ID NO: 631552 - DNA, 120 bp, Artificial Sequence
  ENSG00000179841_15 (sequence is synthesized)
tgtgagcaatagcacaacttctggagagaaagtgatttcagtagaacttggattagataatgggcattctgctattcaaacgggaactctaatccttgaagaaattgaaacgatcaagga

SEQ ID NO: 631553 - DNA, 120 bp, Artificial Sequence
  ENSG00000179841_16 (sequence is synthesized)
aaaacaagatgttcaaccccagcaagcaagcccacttgaaacttcagaaacagaccatcagcagccagtactttctgatgttcctcctttacctgcaattccagatcaacaaattgtgga

SEQ ID NO: 631554 - DNA, 120 bp, Artificial Sequence
  ENSG00000179841_17 (sequence is synthesized)
agaagccagtaacagtaccctagaaagtgcaccaaatggaaaagactatgaaagtacagagattgtagctgaagaaactaagccaaaagatactgaattgagccaagaatcagattttaa

SEQ ID NO: 631555 - DNA, 120 bp, Artificial Sequence
  ENSG00000179841_18 (sequence is synthesized)
agaaaatgggatcactgaagagaaatccaaatcagaagaaagcaaaagaatggagccaattgctattattattacagacactgaaatcagtgaatttgatgttacaaaatctaaaaatgt

SEQ ID NO: 631556 - DNA, 120 bp, Artificial Sequence
  ENSG00000179841_19 (sequence is synthesized)
ccctaagcaattcttaatttcagctgaaaatgagcaagtaggggtttttgctaatgataatggttttgaggatagaacttcagaacaatatgaaacactcttaattgaaacagcctcttc

SEQ ID NO: 631557 - DNA, 120 bp, Artificial Sequence
  ENSG00000179841_20 (sequence is synthesized)
tctagtcaagaatgctattcagttgtcaatagaacagctggttaatgaaatggcctctgatgataataaaataaacaatcttctacagtgacttactctccagagtcacggcagaaaaaa

SEQ ID NO: 631558 - DNA, 120 bp, Artificial Sequence
  ENSG00000179841_21 (sequence is synthesized)
gcagagggcgccttgctccgggtgcgaccgcggctccctggaggcctgggcggcgggccccgcgagcgcgccgccacctcgggagcagtgttggccaaggaccccgacgccctacgttga

SEQ ID NO: 631559 - DNA, 120 bp, Artificial Sequence
  ENSG00000179841_22 (sequence is synthesized)
ctaaagattaagtcaagtttataaaactctaccactgaaatgcagtcacttctggattggaggaagtcagcacagattgcagtgtaaaatgacataacatacagggagttgctaaaatgg

SEQ ID NO: 631560 - DNA, 120 bp, Artificial Sequence
  ENSG00000179841_23 (sequence is synthesized)
catatggagattggagtgctttgggggaggaaggtgtatttattgagcacttatggtatgccataagctttttaatgacctctgatataacaaagtctggtttccttttgataattcagc

SEQ ID NO: 631561 - DNA, 120 bp, Artificial Sequence
  ENSG00000179841_24 (sequence is synthesized)
tctgtgtataggctaacatcacattaagtttttaaaaacttattttttacagtgcacatatatgtttaaaatggtgaataaggtgagctacttttgtgaatgtgatttgtaattgttaca

SEQ ID NO: 631562 - DNA, 120 bp, Artificial Sequence
  ENSG00000179841_25 (sequence is synthesized)
ttcctaagcagcaggcttaactcaaaaaatacattgcattttcccaatttcagcagatagtgtgcagaatatgcatattgatattaaacgtgagtggtttcctagtcttaagtctcttat

SEQ ID NO: 631563 - DNA, 77 bp, Artificial Sequence
  ENSG00000179841_26 (sequence is synthesized)
tcacaaatccttcaatcaggcaaattgttactaagtgcaaaagtgtagaaacagggagagtgggtttttcccccgct

SEQ ID NO: 631564 - DNA, 120 bp, Artificial Sequence
  ENSG00000179841_27 (sequence is synthesized)
caaaagtgtagaaacagggagagtgggtttttcccccgcttttctttctgcctcaacagatctgtatatatccatttctgcatggatttatctgtgaaaagttaaaaaatgaaacagcaa

SEQ ID NO: 631565 - DNA, 120 bp, Artificial Sequence
  ENSG00000179841_28 (sequence is synthesized)
aaacaaaacaaggggaatattattcttcatccaggagaagggaaaattcccaagtaaattatcacagataatataggattcatcttgcagaattacttctttaagagccatattcatcaa

SEQ ID NO: 631566 - DNA, 120 bp, Artificial Sequence
  ENSG00000179841_29 (sequence is synthesized)
cttctctccaaagaggggagagtagattcaaagccagcctggtagtaatggtcctggaaaatcctaataatctagtgcaaatatttattctcggccaaaaatgagccatgaatgtgggtg

SEQ ID NO: 631567 - DNA, 120 bp, Artificial Sequence
  ENSG00000179841_30 (sequence is synthesized)
aatagaaaagtgaaaagttattgctaaagcacattataatttaaatgtcagtattccttcatgtctgtgtgttgagaccagtaaaaagcattttacatgaatattgaaagttaacttttt

SEQ ID NO: 631568 - DNA, 89 bp, Artificial Sequence
  ENSG00000179841_31 (sequence is synthesized)
atcactattttcaatccagatatactttacaaaaatgagaagggcttatttgcatttttatttacatattgaaagggaagcatctgatc

SEQ ID NO: 631569 - DNA, 120 bp, Artificial Sequence
  ENSG00000179841_32 (sequence is synthesized)
ttgcatttttatttacatattgaaagggaagcatctgatctcatcaatgattgccatattttttgaaaaagtaatcctatttcaatctttccttgtgtgaaatggccataataccagagt

SEQ ID NO: 631570 - DNA, 120 bp, Artificial Sequence
  ENSG00000179841_33 (sequence is synthesized)
gcacttccctacctcacaggttaggattcaaagtgtgtattcccccattgtgtaaattgagtgattgtgttactacttgaaacagatgaagtaataaagatgaagtatgagatgtaaggt

SEQ ID NO: 631571 - DNA, 120 bp, Artificial Sequence
  ENSG00000179841_34 (sequence is synthesized)
atttgttcaagagctccacttggaggaaataatgcacattagatgattttaaatgatctgggtgaattcttgcattgtgtatggattgcatatagaaagtatttgctactttgtcctaca

SEQ ID NO: 631572 - DNA, 120 bp, Artificial Sequence
  ENSG00000179841_35 (sequence is synthesized)
gaatcatcttcatttctttctgtaaatacatattgagacctctaacaaaagaaactaatctgacttggaaattgaaccaaatcatggatattattagcaagattctttgctgaagtgcaa

SEQ ID NO: 631573 - DNA, 120 bp, Artificial Sequence
  ENSG00000179841_36 (sequence is synthesized)
aaatatttcccccagattttcctaccttcatgcttataatccggggaggagggtggaaatcctgagcaagatgaaaagtgtcattcaaaacacatgacccaagaagtcaatttcttttaa

SEQ ID NO: 631574 - DNA, 120 bp, Artificial Sequence
  ENSG00000179841_37 (sequence is synthesized)
ttgtacaacttttaaacattaaaaacaaaaaagacgagtcatcttctctgaaaacactctttaactcactatatgtggtgctaatggacttggacagctaccagctatcatatttaaaag

SEQ ID NO: 631575 - DNA, 120 bp, Artificial Sequence
  ENSG00000179841_38 (sequence is synthesized)
tgaaccattttaaaaacctgactaaggttggtgcattttacagtgtattgaagaatcctgccctcatttactgcaaggatgcctccaagccaatacacttgcattgtaaatgtttagtaa

SEQ ID NO: 631576 - DNA, 120 bp, Artificial Sequence
  ENSG00000179841_39 (sequence is synthesized)
tctcatgaacaagcaaaaagtatagtacttagcagttattggaaatattttgggggatttttaaaaaaacagataaatggtaaatatgtgcaatgaattttttggttaagaaagtaaaat

SEQ ID NO: 631577 - DNA, 120 bp, Artificial Sequence
  ENSG00000179841_40 (sequence is synthesized)
tttatctaatactaggtttttacttttttcactgtggtttgatatatatttttggttagaatgtactgattgtttttatgataagatgtatattttacttgcattcattcttaagaggtt

SEQ ID NO: 631578 - DNA, 120 bp, Artificial Sequence
  ENSG00000179841_41 (sequence is synthesized)
tctgtttttctattgagaatatctgttgaattaagtaggatttcagttagaaaaaggaattccgaaattaactggtctcaatctgattatatgtgctacatggccaaatcctattacagt

SEQ ID NO: 631579 - DNA, 120 bp, Artificial Sequence
  ENSG00000179841_42 (sequence is synthesized)
gaattctaaggtgattcaaattgttttattgttatagaaatatgcagaaatcagatggcttcagagtcataaaatatttttcttgtaatagtatttaagcaatttgaccttatatgcaaa

SEQ ID NO: 631580 - DNA, 120 bp, Artificial Sequence
  ENSG00000179841_43 (sequence is synthesized)
cgttaagtgaatataaataagttctgtttcaattcatgtccatttaacaacattaaaataattattaggaacaccacatgaattttctttacatttgctgtggtataaattctgctttta

SEQ ID NO: 631581 - DNA, 120 bp, Artificial Sequence
  ENSG00000179841_44 (sequence is synthesized)
atgaatgtttatttatttattagccaaaattcagtttctctttgaacccagaattttgcaaagctgggggttggggagggggattattagctacttgttaactttttcagcatattatca

SEQ ID NO: 631582 - DNA, 120 bp, Artificial Sequence
  ENSG00000179841_45 (sequence is synthesized)
ttcctcttttaagactcaagtattattcactttgcttcttacaacccagagaatgtgaaaattctcctctattttatgtagcactattcacttaacattttttcaaagcactttatagga

SEQ ID NO: 631583 - DNA, 120 bp, Artificial Sequence
  ENSG00000179841_46 (sequence is synthesized)
tataaaaatagtacccggtaacatttaagtaaaggtagcagaaaacaaaagaactttcaaacagaaattatgttccctgccacctcctccacctcaaagaataataagcatgtggcataa

SEQ ID NO: 631584 - DNA, 120 bp, Artificial Sequence
  ENSG00000179841_47 (sequence is synthesized)
atggagttgttcagaaaagctgtctgcataattttccttcaaggtaatgtatttgacagcatgaagtttgtgatgatcttacttggtctactactcagcggagtcttagaatctctttta

SEQ ID NO: 631585 - DNA, 120 bp, Artificial Sequence
  ENSG00000179841_48 (sequence is synthesized)
tttacttctgagagattgttatttcaccagtatatgtgaacaggcttgctaaaggcattaaagatatggatcatggaggcaccaaatttggcttctgtatgcaatccagcattaacttca

SEQ ID NO: 631586 - DNA, 120 bp, Artificial Sequence
  ENSG00000179841_49 (sequence is synthesized)
tccatacatttctaacttcatccataaatttctaacttcaagttaccttattttttatagttaagaatgtttttcgaggtttacaacagaatttaaaaaataattgttaggctttagaat

SEQ ID NO: 631587 - DNA, 120 bp, Artificial Sequence
  ENSG00000179841_50 (sequence is synthesized)
cccactgtttgaaaagatccttttaatgtcaactttattgaaatatgtagtctactttctaatttcatctgataatatagcaggatttgatttttctgcctgccatttgtgcatttaaaa

SEQ ID NO: 631588 - DNA, 120 bp, Artificial Sequence
  ENSG00000179841_51 (sequence is synthesized)
aaaaatcctcatttaagatttagagttctttaggttcaaattcctatgatgttttattgggtaacatgaactctcttatacataattcaaaatttcaatccatggtatattttatggtac

SEQ ID NO: 631589 - DNA, 120 bp, Artificial Sequence
  ENSG00000179841_52 (sequence is synthesized)
attttgaaaagaaaatttgtaatgctccttagttacaaaaattagaaggaagctacataaaattcaggtgtcctaattaaattcaatttgattcaacacacgtattaggcataactcata

SEQ ID NO: 631590 - DNA, 120 bp, Artificial Sequence
  ENSG00000179841_53 (sequence is synthesized)
cctaacactatttgataagggagacaggctccctgccatccaagaactcaacctagggagcagtgacaacagaaaccgggttgggttaaggcaaagagccatggataatgctgcaacatg

SEQ ID NO: 631591 - DNA, 120 bp, Artificial Sequence
  ENSG00000179841_54 (sequence is synthesized)
agtggcacagaggggagtacacagagagagcaattaatttggtgtggggaaggtggtgatctgaatacagcagcagtttgaaagtgttccgtttttaaataaacagtatgcttattttga

SEQ ID NO: 631592 - DNA, 120 bp, Artificial Sequence
  ENSG00000179841_55 (sequence is synthesized)
tttgtgactaggtgtagaaaaaagcctgcatagtgttacatatttatagtagttctttgtaaaaatgttaagtggatgagctattatgaaagtaaaagtttcattttttctcattaaaat

SEQ ID NO: 631593 - DNA, 120 bp, Artificial Sequence
  ENSG00000179846_0 (sequence is synthesized)
agcccagcgagcccactgatgcccggcccctgcccgccccagcggcctgtggctccttcactgcctacagctccgacatcctgacagaggatgacgtctactgcagctgcctggccaaga

SEQ ID NO: 631594 - DNA, 120 bp, Artificial Sequence
  ENSG00000179846_1 (sequence is synthesized)
cactctgccacgtgccggtccctgtgaccgtgggtttctatgcccctttcggctgccgcctgcacatgatgctggacaagatcacggcgctgatgcagcaggaggccgcgcagcgcgaga

SEQ ID NO: 631595 - DNA, 120 bp, Artificial Sequence
  ENSG00000179846_2 (sequence is synthesized)
gcgaggagctgcagcacgtgcagtggcggccgcgtgccgtgagcggctggggcgtcccgcagctactgtggtacctggtgttcctgcagcccatcatcaccgaggtgcacctgcggcgca

SEQ ID NO: 631596 - DNA, 120 bp, Artificial Sequence
  ENSG00000179846_3 (sequence is synthesized)
ggaacgtgcagttccttttcatccgctttagcgcctggcagtacgcgggcaccgacaagctgtgggccggcctggtgaccacgttgtgcgagggcatccgccgccactatggcgcactgc

SEQ ID NO: 631597 - DNA, 120 bp, Artificial Sequence
  ENSG00000179846_4 (sequence is synthesized)
ccttcagcgtgtactcggtgctgggcaacaagccggccaccaggcaggactgctgccagagcgagtggcattgtcggcgccgcgtgtgcctggggctgctggcgctgctggcggcgctgg

SEQ ID NO: 631598 - DNA, 120 bp, Artificial Sequence
  ENSG00000179846_5 (sequence is synthesized)
gcctgggtgtggggctgctctacttgtcactgggcggccacgcgctgggccacggcagcccgagcggcagcctgctcaaggtgtttggcggcgcggccaccacactgtcgggctcggggc

SEQ ID NO: 631599 - DNA, 120 bp, Artificial Sequence
  ENSG00000179846_6 (sequence is synthesized)
tgctcatggccgtgtactcggtgggcaagcacctgttcgtaagccagcgcaagaagatcgagcggctggtgtcgcgtgaaaagttcggcagccagctgggtttcatgtgcgaggtgaaga

SEQ ID NO: 631600 - DNA, 120 bp, Artificial Sequence
  ENSG00000179846_7 (sequence is synthesized)
aggaggtggagctgctcaccgacttcctgtgcttcctggagatctaccagcggcgcaggctgcgcgtggtgctggaggtcaccgggctggacacgtgctacccggagcgcgtggtgggcg

SEQ ID NO: 631601 - DNA, 120 bp, Artificial Sequence
  ENSG00000179846_8 (sequence is synthesized)
tgctcaacgccatcaacacgctgctgtccgacagccacgcgcccttcatcttcatcctggtcgtggaccccagcatcctggccgcgtgcctagagagcgcgggcaacatgaagggcacgg

SEQ ID NO: 631602 - DNA, 120 bp, Artificial Sequence
  ENSG00000179846_9 (sequence is synthesized)
ccgataacggctacctcttcctcaaccgcactgtcacgctgcccttctctgtgcccattatgggccgccgcaccaagctgcagttcctgcacgatgcggtgcagagccgcgacgacctgt

SEQ ID NO: 631603 - DNA, 120 bp, Artificial Sequence
  ENSG00000179846_10 (sequence is synthesized)
tgtaccgcgagatgacgcgcaagccgtggctgccgggggacgccgggggcgagagcgcgcagctgctggcggtgcaggcgcaggcggggacggagcgcgggcagggccgcatcgacgacg

SEQ ID NO: 631604 - DNA, 120 bp, Artificial Sequence
  ENSG00000179846_11 (sequence is synthesized)
aggcggcgcggcgaatccaggaggcgctcttctgccttcacgacgagcgcgactgcctctacgagtacgtgcccgacaacgtggtgtccatgcggcgcatcgtcaacaccgtgcccatca

SEQ ID NO: 631605 - DNA, 120 bp, Artificial Sequence
  ENSG00000179846_12 (sequence is synthesized)
ccgtgcgcctgctgcagcagcagcagcagcagggggactttgggggccccacgccgcgccaggcggtggcgtgggtggtgctcgccaaccagtggccgtgccgcctgagctgggcgctgc

SEQ ID NO: 631606 - DNA, 120 bp, Artificial Sequence
  ENSG00000179846_13 (sequence is synthesized)
agtgcctggaggaccggcagcagaccgggggcgcgcccgagggccgcgcgcgcctctgggacgttttccgcgacaacagccgcgagctgcacaccatgaccaaggcgttgcagaacgtgc

SEQ ID NO: 631607 - DNA, 120 bp, Artificial Sequence
  ENSG00000179846_14 (sequence is synthesized)
tcgacctggacggcgaccccgagctcttcgagcgcttcctgggcgccgacttccccttcaccgtggccgaggcgcagagcctgctgcgctgcacggtcaacctggaccactccatccgcc

SEQ ID NO: 631608 - DNA, 120 bp, Artificial Sequence
  ENSG00000179846_15 (sequence is synthesized)
ggcgcatgggtctcatccgagccgtcagcgcgctcaagccgcccagcccgcccaagtcccctacccgcgataccccccacgctgcccaccgggccaacagcgcctccagggcgcccccgt

SEQ ID NO: 631609 - DNA, 120 bp, Artificial Sequence
  ENSG00000179846_16 (sequence is synthesized)
cgggccgtgcctcagggcaagccggcgaaggccaccacactggggacttggcccacaggggcaagctatggccggtggcctgtgcgctcttccgtccagggcaatccagcccaggtgggc

SEQ ID NO: 631610 - DNA, 120 bp, Artificial Sequence
  ENSG00000179846_17 (sequence is synthesized)
aagggttcctccatctgcccagatgggagaatagggggctggactggggccgcaacccagggtccgaatgagccctgtgaggcccacacccccaggtgaacctgagccagagccgtggac

SEQ ID NO: 631611 - DNA, 120 bp, Artificial Sequence
  ENSG00000179846_18 (sequence is synthesized)
atagcttccaaggagtgcggccacaagccggtgccagcatgagagcaggcacagaaggaccagtgaggaagtcagggtatacatgcaataaatggaggtgttgagagcccggagttgctc

SEQ ID NO: 631612 - DNA, 120 bp, Artificial Sequence
  ENSG00000179846_19 (sequence is synthesized)
tccgcatcctgatctgaccagggaccaggcctgccccgtcctgccacagggcctgccccatcctgctaagcccacttactcctctgcaccatgctggcctcctcatctggcatctctgtg

SEQ ID NO: 631613 - DNA, 120 bp, Artificial Sequence
  ENSG00000179846_20 (sequence is synthesized)
gcaggagaggctgcgggggtggtgggtgaggctgcagagatgacaggtggatgggccaggttgactcaggcaacatggagcgcccaggcctcagggaatcccagtccttgtccccatgcc

SEQ ID NO: 631614 - DNA, 120 bp, Artificial Sequence
  ENSG00000179846_21 (sequence is synthesized)
ctagcttgcccctctgtgagtagggcaggggctggcatttctgaggatgacctcggtgacctcagcaagctgctccacccctagggtggctccattctcaacgtaatgggttagacctcg

SEQ ID NO: 631615 - DNA, 120 bp, Artificial Sequence
  ENSG00000179846_22 (sequence is synthesized)
ctggcacctcagccagctggagtgggtggcactaacctcccccagacaaataactgtccacagggtacctgccttacgagtcactccagggccactggttagtcactgacactgaagcca

SEQ ID NO: 631616 - DNA, 120 bp, Artificial Sequence
  ENSG00000179846_23 (sequence is synthesized)
ctgcatcagccccctgatgaggacagggaagttgggcagagatggggacatacagggcccaagccacagccagccaggaggggttacactagggctcccccactttccctctgggcagag

SEQ ID NO: 631617 - DNA, 120 bp, Artificial Sequence
  ENSG00000179846_24 (sequence is synthesized)
ccctgggctgggggtgggtgtcactcctctgggcagttcctgattcctcactggtcaaatgttcagccacacgctcaggccctggggtgcctggcccagttccaagtgtgtgccggcagg

SEQ ID NO: 631618 - DNA, 120 bp, Artificial Sequence
  ENSG00000179846_25 (sequence is synthesized)
ggccacaagggccaacactgaacataccctgggatgaggctgagggtgtggcttctgagccagggccctgaggctggtggaggggacagcccccgaggaacctgagagctctgcaaaggc

SEQ ID NO: 631619 - DNA, 120 bp, Artificial Sequence
  ENSG00000179846_26 (sequence is synthesized)
acacaccctcaggccatgggactgggtcactgacctcacagttctttagttccaaggctgggcatagcatccaggtctggctgcagcaccggagttctctggccacagcaattgtcacag

SEQ ID NO: 631620 - DNA, 120 bp, Artificial Sequence
  ENSG00000179846_27 (sequence is synthesized)
gtgcatgcaggtcagtgggagccctctatgatcttccctggggctgggcaagcagaggtgctgtttcccattcctggactgactaagctggtaggatacgcctggacctcctgggagctg

SEQ ID NO: 631621 - DNA, 120 bp, Artificial Sequence
  ENSG00000179846_28 (sequence is synthesized)
tttcccagcagtcagggagagctggcctcagagggagaaggatggggcctcgtgacaccgttaagtctgtttctgtagatgtgtggttggggtcaatatatccctgtagcctcccttaag

SEQ ID NO: 631622 - DNA, 120 bp, Artificial Sequence
  ENSG00000179846_29 (sequence is synthesized)
ccagtttcagttgggtttgtttcttaccacctggaatccaagctgaaaataaattttcactcctgttaccaggagtggggtgctgtgagagatgctaacgtgtagacttggctggaggtg

SEQ ID NO: 631623 - DNA, 87 bp, Artificial Sequence
  ENSG00000179846_30 (sequence is synthesized)
tgctgtgagagatgctaacgtgtagacttggctggaggtgagggcaggactgaagccccccatgcctcagtaagaagctgcatataa

SEQ ID NO: 631624 - DNA, 64 bp, Artificial Sequence
  ENSG00000179846_31 (sequence is synthesized)
tgaacccgggaggtggtggctgattaaaaaaaaaagccgcagcctctgttacgtggtacaagct

SEQ ID NO: 631625 - DNA, 120 bp, Artificial Sequence
  ENSG00000179846_32 (sequence is synthesized)
taaaaaaaaaagccgcagcctctgttacgtggtacaagctgtggccaaactgttggtcactgtatcttcacgtggagctgctatgagaacttgcacctgtgtaaagccacgggaccgttg

SEQ ID NO: 631626 - DNA, 120 bp, Artificial Sequence
  ENSG00000179846_33 (sequence is synthesized)
tcacgaacaaaaaaggagcacggctgacctgtgcgcctttcccagcaatgagtcagggagcaggtttcccttctccactcccttcccccatctgcccacttgatccgggatccttgaggc

SEQ ID NO: 631627 - DNA, 120 bp, Artificial Sequence
  ENSG00000179846_34 (sequence is synthesized)
cctggggagcaacagagccctaagagcttcaaaggggcctgggtccaggaataacttggtgaagagctgcctgccactctgaacatccacatgtgacaataaacatctcctgtgttagga

SEQ ID NO: 631628 - DNA, 80 bp, Artificial Sequence
  ENSG00000179855_0 (sequence is synthesized)
gatccccttacccgggcgtctcggctgtcgcgccctgggccgggggaggggaggctgcaggaagcggcggatccggcggc

SEQ ID NO: 631629 - DNA, 80 bp, Artificial Sequence
  ENSG00000179855_1 (sequence is synthesized)
ccgaacttctcccgccatggagggagcagcggcccgggaggcccgggggaccgagaccccgcgcgcgtctgcgcccccgc

SEQ ID NO: 631630 - DNA, 120 bp, Artificial Sequence
  ENSG00000179855_2 (sequence is synthesized)
acgcagctggcgcacgggagccccacgggcaagatcgagggcttcaccaacgtccgcgagctgtacgccaagatcgccgaagccttcgggatcgcgcccaccgagattttattctgcacc

SEQ ID NO: 631631 - DNA, 120 bp, Artificial Sequence
  ENSG00000179855_3 (sequence is synthesized)
ctcaacagccacaaagtggacatgcagaagctcctggggggtcagataggcctggaggacttcatctttgcccacgtgcgaggcgagaccaaggaggtggaggtcactaagacagaggat

SEQ ID NO: 631632 - DNA, 120 bp, Artificial Sequence
  ENSG00000179855_4 (sequence is synthesized)
gctctggggctgaccatcacggacaacggggctggctacgccttcatcaagagaatcaaggaaggcagtatcatcaaccggatcgaggcagtgtgcgtgggtgacagcatcgaagccatc

SEQ ID NO: 631633 - DNA, 120 bp, Artificial Sequence
  ENSG00000179855_5 (sequence is synthesized)
aacgaccactccattgtgggctgccgccactacgaggtggccaagatgctccgggagctgcccaagtcccagcccttcaccctgcgcctggtgcagcccaagagggccttcgatatgatt

SEQ ID NO: 631634 - DNA, 120 bp, Artificial Sequence
  ENSG00000179855_6 (sequence is synthesized)
ggccagagaagtcggtccagcaaatgtccagtagaggcgaaagtgaccagcgggagggagaccctgcggcttcgttctgggggggctgccacagtggaggaagcgcccagtgagtttgag

SEQ ID NO: 631635 - DNA, 120 bp, Artificial Sequence
  ENSG00000179855_7 (sequence is synthesized)
gaggaggcatctcggaaggttgatgacctgctggaaagctacatgggcattcgggaccccgagctggcgtccaccatggtggagacgtccaagaagacagcgagcgcccaggagtttgca

SEQ ID NO: 631636 - DNA, 120 bp, Artificial Sequence
  ENSG00000179855_8 (sequence is synthesized)
cgctgtttagactccgtcttgggcgagttcgccttccccgacgagtttgtggtggaagtgtgggccgccatcggcgaggccagagaggcctgtggctagtttgccctgggggggcccagc

SEQ ID NO: 631637 - DNA, 120 bp, Artificial Sequence
  ENSG00000179855_9 (sequence is synthesized)
acagccccagcccggagcccagccccctgccccggccctgctccagaacccagcccagatcggaggacaagttcctctctagaacccaatccaatttggagccccagcccaactccagaa

SEQ ID NO: 631638 - DNA, 120 bp, Artificial Sequence
  ENSG00000179855_10 (sequence is synthesized)
cccaacccttctctagaatccagcccagatctgaggccaagctatgtgctagagcccaggccagctctgagaccaagcccagcattgagaataagctctgttctaaaactcaggccagcc

SEQ ID NO: 631639 - DNA, 120 bp, Artificial Sequence
  ENSG00000179855_11 (sequence is synthesized)
ctgagaccaagcccagctctagaactcagatgagctttgagaccatgcccagcactgagaccaagccctgttctagaactcaggcctgctctgaggccaagcccagctctagaacccaga

SEQ ID NO: 631640 - DNA, 120 bp, Artificial Sequence
  ENSG00000179855_12 (sequence is synthesized)
tgagctctgagaccatgcccagctctagaactcagatgggctctgagaccatgcccagctctagaactcagatgggctctgagaccgagcccagctctagaactcagatgggctctgaga

SEQ ID NO: 631641 - DNA, 120 bp, Artificial Sequence
  ENSG00000179855_13 (sequence is synthesized)
ccgagcccagctctaaaactcagatgggctctgagaccatgcccagctctagaactcagatgggctctgagaccgagcccagctctagaactcagatgggctctgagaccgagcccagct

SEQ ID NO: 631642 - DNA, 120 bp, Artificial Sequence
  ENSG00000179855_14 (sequence is synthesized)
ctagaactcagatgggctctgagaccatgcccagctctagaactcagatgggctccgagaccaagcccagctctagaacccagatgagctctgagaccatgcccagctctagaactcaga

SEQ ID NO: 631643 - DNA, 120 bp, Artificial Sequence
  ENSG00000179855_15 (sequence is synthesized)
tgagctctgagacagagcccagtattgagaccaagccctgttctagagtccaggccagctccgagaccaagcccagctctagaacccagataagctctgaaaccaagcccagcatagaga

SEQ ID NO: 631644 - DNA, 120 bp, Artificial Sequence
  ENSG00000179855_16 (sequence is synthesized)
ccaagccgtgttctagaattcaggccacatctgaagccaagcccagctctagaactcaggtcagccctgagaccaagcccagctctagaacccagataagctctgaaaccaatcccagca

SEQ ID NO: 631645 - DNA, 120 bp, Artificial Sequence
  ENSG00000179855_17 (sequence is synthesized)
ttgagaccaagccctgttctagaactcaggccacctctgaggccaaacccagctctagaacccagataagatctgagaccaagccctgctctgaagcccaggccagctctgagacgaagc

SEQ ID NO: 631646 - DNA, 120 bp, Artificial Sequence
  ENSG00000179855_18 (sequence is synthesized)
ccagttccagaatccaggctagctcggagaccaagccctgctggaaaactcaagctgactctggaactctggacagctccacgatgcagccacacctggacactcggtctagctccggaa

SEQ ID NO: 631647 - DNA, 120 bp, Artificial Sequence
  ENSG00000179855_19 (sequence is synthesized)
ccccagttaattttggaacccatgtgagattcatgaagcagcccagctctggaaccccagtcagctcaggattcagagacagctcccaaatcaaatcctattcaagaactcagaccagct

SEQ ID NO: 631648 - DNA, 120 bp, Artificial Sequence
  ENSG00000179855_20 (sequence is synthesized)
cagaaacccaggtccacacggctgcccagtccagatcccaaccccagttgcatccaagtgcccatccccatcctgcagcccagtccagctccagtgatgattccagctctgagactgagc

SEQ ID NO: 631649 - DNA, 120 bp, Artificial Sequence
  ENSG00000179855_21 (sequence is synthesized)
ccagctctagaacctcgcctagtgctacaaccaggcccaactccaggattcagaccagctctggaaccccatccatcttggaagcaagacccagctccagcacacagcttggtgccaagc

SEQ ID NO: 631650 - DNA, 120 bp, Artificial Sequence
  ENSG00000179855_22 (sequence is synthesized)
cccactctccttgcacaatgcagctcagctctagaatgcagtttacttccaggacccagaccaatttcaaggcctggccaagctccagagctcaatccagcccaagcaccgcacccagct

SEQ ID NO: 631651 - DNA, 120 bp, Artificial Sequence
  ENSG00000179855_23 (sequence is synthesized)
ctggaactcagctcagttctggagcacaggctggttctgaaatcccagccagctccaaaacacagacagcagctgagacccagccaagttccagaatccagctaagctctggagtccaat

SEQ ID NO: 631652 - DNA, 120 bp, Artificial Sequence
  ENSG00000179855_24 (sequence is synthesized)
ctagtcctgggacccaggccatcgcagcaatagaattaagctccacagccctgtctagttccgacagcaggtccagctccaggacccagcgctgcccaggagctcgaccagcctctggga

SEQ ID NO: 631653 - DNA, 120 bp, Artificial Sequence
  ENSG00000179855_25 (sequence is synthesized)
ctcaattcgcctctaaaaccctgccaggttctagataccagctccagaccacagccccagacagctctggtattcaactggactttgggaagcagagcagttctgaaagtcagcttagct

SEQ ID NO: 631654 - DNA, 120 bp, Artificial Sequence
  ENSG00000179855_26 (sequence is synthesized)
ttggaactcagcccagctctgggacccagataagctcaagaattcaagccagctctggaagtcagcttagttcgggaacccagctgatttccggagcccaacccagctccagaactcaga

SEQ ID NO: 631655 - DNA, 120 bp, Artificial Sequence
  ENSG00000179855_27 (sequence is synthesized)
ctagttctggaaaccagctcagctccgggacccagaccactgcaagaattcagctcagccctggagctcatcttagctccagaacccagtccagtcctgagaccaggctcagctctgagg

SEQ ID NO: 631656 - DNA, 120 bp, Artificial Sequence
  ENSG00000179855_28 (sequence is synthesized)
ctcagtccagctctggaacccagttcagttctgggattcagtttggctctgaaacccagaccggctcaagaattcagcccgactctggagcccaacttagttccagaacccagtccagct

SEQ ID NO: 631657 - DNA, 120 bp, Artificial Sequence
  ENSG00000179855_29 (sequence is synthesized)
ctgagaccgggctcagctctgaaacccagaccggctcaagaattcagcccagccctggagcccaccttagttctggaacccagcctgtttctggaacccaatccagttccagaactcaca

SEQ ID NO: 631658 - DNA, 120 bp, Artificial Sequence
  ENSG00000179855_30 (sequence is synthesized)
ccagttcaagaatctggctgagccctggaaatggaatctgcccacagacccctggccttgaccctagaatccagcttgaggcccctgccccagcccaacctcagcccccaggcccatccc

SEQ ID NO: 631659 - DNA, 120 bp, Artificial Sequence
  ENSG00000179855_31 (sequence is synthesized)
ccagagaccccaccccagcccctagcaaagacccccagcctctgcctcagccccatgatcaggtatgtggcatccaggccagccttggccccatcccaggcttaccccaagcctcctacc

SEQ ID NO: 631660 - DNA, 120 bp, Artificial Sequence
  ENSG00000179855_32 (sequence is synthesized)
tggccccacagtcacaggtctcctcaaccccccagaagccagccgtctctcccaagccccgggtgggaccccagaagtccaccccacccaccatatctgtcactcctagtcctgccccta

SEQ ID NO: 631661 - DNA, 120 bp, Artificial Sequence
  ENSG00000179855_33 (sequence is synthesized)
gggcagccctcctgagttcccagctgtctgagtccccagctttggcgccagccctttgccccactctgggggagccaggagcccgcccttaccgcggggggccgtagcttggctgtgact

SEQ ID NO: 631662 - DNA, 120 bp, Artificial Sequence
  ENSG00000179855_34 (sequence is synthesized)
tagccctggttcatgtggttctcgtcctctcctgtcccttccagcctggggcccccagaagcagcaagtgaccttatttctccagcaggcggtggtagggagtgtgcggtggtgaaaaca

SEQ ID NO: 631663 - DNA, 120 bp, Artificial Sequence
  ENSG00000179855_35 (sequence is synthesized)
ggggcttcaccggtcctggctcagatccaggtccttggagggaaaaggagggcaggagacgggttgcaccgcatgtaccctgagggctcatggtgaataaaggcaccttccatctctgca

SEQ ID NO: 631664 - DNA, 120 bp, Artificial Sequence
  ENSG00000179859_0 (sequence is synthesized)
gacccggccccaggagagtgtgctcgttctgttcacggagctggccgcgttagcgacgtcctcgagtccgcggcgggcacgatgcagctcttggtgagggtaccctctcttccggagcgg

SEQ ID NO: 631665 - DNA, 120 bp, Artificial Sequence
  ENSG00000179859_1 (sequence is synthesized)
ggcgagctggactgcaacatctgctaccgtcctttcaacctcgggtgccgcgcgccccgccgcctgcccggaacggcgcgcgcccgctgcggccacacgatctgcaccgcctgcctccgc

SEQ ID NO: 631666 - DNA, 120 bp, Artificial Sequence
  ENSG00000179859_2 (sequence is synthesized)
cggcggcggggcggccgcgcgcgtggtgcgcctgcgccgcgtggtcacgtgccccttctgccgcgcgccctcgcagctccctcgcggcggcctcacggagatggctcttgactcggactt

SEQ ID NO: 631667 - DNA, 120 bp, Artificial Sequence
  ENSG00000179859_3 (sequence is synthesized)
atggctcttgactcggacttgtggtcgcgattggaggaaaaagcgcgggccaagtgcgaacgagatgaggctgggaacccggccaaggaaagcagcgacgctgacggagaggcggaggaa

SEQ ID NO: 631668 - DNA, 120 bp, Artificial Sequence
  ENSG00000179859_4 (sequence is synthesized)
gaaggggagagcgagaagggggcggggcctaggagtgctgggtggcgcgcgctccggcggctctgggacagggtcctggggcctgcgcggcgctggcggcgtccgctgcctagcaacgtg

SEQ ID NO: 631669 - DNA, 120 bp, Artificial Sequence
  ENSG00000179859_5 (sequence is synthesized)
ctctactgtgcggagatcaaggacattggccacctgacccgttgcacgttgtaaccgaggaactcggaagctacagccgaaggaaggtgggagctgcagcctcgcgggggctgatgtcaa

SEQ ID NO: 631670 - DNA, 120 bp, Artificial Sequence
  ENSG00000179859_6 (sequence is synthesized)
gactactctctctcagatcccaggattggcatgtgatgagagagatgagccgaaggcaggagggaacgccctgggaggtgttgatgctgagttggggaggctcctagacgaactcgcccc

SEQ ID NO: 631671 - DNA, 120 bp, Artificial Sequence
  ENSG00000179859_7 (sequence is synthesized)
catctactgactgtgccagtcttacattttcaggatggagtggccaagggatgatataaacaaagcctacgttaccgtgggaagaagacagactgttttcttagctgggacgttggcttt

SEQ ID NO: 631672 - DNA, 120 bp, Artificial Sequence
  ENSG00000179859_8 (sequence is synthesized)
tgtccagggtggctctggtgtgtgggagcaacaggtcccattttagcaattctttgtcaatggtttgaattttttttttttttaagatggaacgggagagaagaggctaattttcgcgtc

SEQ ID NO: 631673 - DNA, 120 bp, Artificial Sequence
  ENSG00000179859_9 (sequence is synthesized)
atgttaatctcacttctctggcatgtaagggtgctggtatgcctgctgtctccccactcccagttctgtgttccagaaattgagatggctccctgcctgtgactatgattaggagccttg

SEQ ID NO: 631674 - DNA, 120 bp, Artificial Sequence
  ENSG00000179859_10 (sequence is synthesized)
cttcatttcagaatctcccttcaacctgctagggcaggtatcagaaattccaaagggcatttatgtgaggcacctaattagagcctatcaaagtaggaagggagagccatttgaaaggca

SEQ ID NO: 631675 - DNA, 120 bp, Artificial Sequence
  ENSG00000179859_11 (sequence is synthesized)
gtctttaaaatttgtgtcccataatgggacatcacctgttgtatatatgccatgtattctattttagaatcctgtatcttatgaccataaagtcatagtcaaggaccagcagtgttggtg

SEQ ID NO: 631676 - DNA, 120 bp, Artificial Sequence
  ENSG00000179859_12 (sequence is synthesized)
tactgtcaacggaagtgcacagtctcactctaggatcccactccagacttcctgaatcagactctggcagggttttttgtttttttgtttttgttttgagccagagtctcactgtgtcgc

SEQ ID NO: 631677 - DNA, 120 bp, Artificial Sequence
  ENSG00000179859_13 (sequence is synthesized)
agtgagccaccgcgccgggccagactctggcattttaacaatcccaggtgatgtgtgtgcatgtgaaaatttaagtaccattggtctagatcctacactctttaggatatcaccatctgt

SEQ ID NO: 631678 - DNA, 120 bp, Artificial Sequence
  ENSG00000179859_14 (sequence is synthesized)
ttggtctagatcctacactctttaggatatcaccatctgtaggtagaatatttaaagcataataggtatgactgatagattattttatccaaagttctttttttttttttttgagatgga

SEQ ID NO: 631679 - DNA, 120 bp, Artificial Sequence
  ENSG00000179859_15 (sequence is synthesized)
ttctaaagtaacattctattgctaaagaaatcctaacctactatgtaacatttttctcttagttaaaaatgtgaacttattattaacctcaattttttagaggcctccaatctttttaaa

SEQ ID NO: 631680 - DNA, 120 bp, Artificial Sequence
  ENSG00000179859_16 (sequence is synthesized)
atataaatatttttgattgacaaatcataattatacacttatgggggtataaacctcaatttttgtaaccctattttggcattttcctgtccttacatctcagcttaaatgctccctctt

SEQ ID NO: 631681 - DNA, 120 bp, Artificial Sequence
  ENSG00000179859_17 (sequence is synthesized)
ttgggaggcctttttctgccttcaacatagtagagccttttcccccacccctctgtaacataatgccctgttttatttttactgcttttattttcatgctttgtgggtgtccccactgga

SEQ ID NO: 631682 - DNA, 120 bp, Artificial Sequence
  ENSG00000179859_18 (sequence is synthesized)
gtgtaagccctatgggagcaagggctgacctgtgactgttttatctccagggccaacagcagtgttactgtatagtatgtactcaataaatatttgttggctttatctcttattttttaa

SEQ ID NO: 631683 - DNA, 120 bp, Artificial Sequence
  ENSG00000179862_0 (sequence is synthesized)
gcggaggtttcggagcactacaggttgcgggcctttgtgaccccaggctgcggccgcaaggtgcgcagtagtgggctgggccggggcaccagtcgggtttggttttgctccgcccggccg

SEQ ID NO: 631684 - DNA, 80 bp, Artificial Sequence
  ENSG00000179862_1 (sequence is synthesized)
ggccgggggagccggcgctgaccaccgcgcgctgtccccgcaggcagccggcctgccgccatggccgaccacctgatgct

SEQ ID NO: 631685 - DNA, 120 bp, Artificial Sequence
  ENSG00000179862_2 (sequence is synthesized)
ccgaccacctgatgctcgccgagggctaccgcctggtgcagaggccgccgtccgccgcggccgcccatggccctcatgcgctccggactctgccgccgtacgcgggcccgggcctggaca

SEQ ID NO: 631686 - DNA, 80 bp, Artificial Sequence
  ENSG00000179862_3 (sequence is synthesized)
gccccgccaacccggggccctggcgtacggggccttcgggccgccgtcctccttccagccctttccggccgtgcctccgc

SEQ ID NO: 631687 - DNA, 80 bp, Artificial Sequence
  ENSG00000179862_4 (sequence is synthesized)
ctttccggccgtgcctccgccggccgcgggcatcgcgcacctgcagcctgtggcgacgccgtaccccggccgcgcggccg

SEQ ID NO: 631688 - DNA, 120 bp, Artificial Sequence
  ENSG00000179862_5 (sequence is synthesized)
gagctcttcctgggccagagcgagttcgactgcttctcggacttggggtccgcgccgcccgccggctccgtgagctgctgagggcggccggcgcccgcccggcgtgccggagaggagaaa

SEQ ID NO: 631689 - DNA, 120 bp, Artificial Sequence
  ENSG00000179862_6 (sequence is synthesized)
cgactgggccccgcgcgcgccctccgcgagggtggaggcggcggctgtgtgcgcagggcccggcaccggactgggaccctggcgtccctccaggccttgcctcctgcgggaggacagttt

SEQ ID NO: 631690 - DNA, 120 bp, Artificial Sequence
  ENSG00000179862_7 (sequence is synthesized)
tccaggccttgcctcctgcgggaggacagtttggcttcacttctctgaccccagcctcggccgtaaagtgaaagagaccggaccagcttcagctttcggactctggttcttggatcgtgt

SEQ ID NO: 631691 - DNA, 120 bp, Artificial Sequence
  ENSG00000179862_8 (sequence is synthesized)
cctctccccctcgccgccctcttcccccaatctgagccattgcaggcctctgcctgctgccccctctctcctcgggatcgggtccccagagccaccatctcctgagcctcccaccccgct

SEQ ID NO: 631692 - DNA, 120 bp, Artificial Sequence
  ENSG00000179862_9 (sequence is synthesized)
gcctgggccctgtggttgctgggcctcccacctcaaggaggggaaggttgtacagcccgaacccgtggagcaatgccctgtctggcctccaaaaccaaaataaaactgggtcactttaca

SEQ ID NO: 631693 - DNA, 120 bp, Artificial Sequence
  ENSG00000179869_0 (sequence is synthesized)
ctgactgagagcagggagcagcaggcatggggcatgccgggtgccagttcaaagccctgctgtggaagaattggctctgcagactcaggaacccggtccttttccttgctgaattcttct

SEQ ID NO: 631694 - DNA, 120 bp, Artificial Sequence
  ENSG00000179869_1 (sequence is synthesized)
ggccttgtatcctgtttgtaattctgacagttcttcgttttcaagaacctcccagatacagagacatttgttatttgcagccccgagatctacccagctgtggtgttatcccctttgttc

SEQ ID NO: 631695 - DNA, 120 bp, Artificial Sequence
  ENSG00000179869_2 (sequence is synthesized)
aaagccttctttgtaacactggatcaaggtgtaggaacttcagctatgaagggtcaatggagcatcattttcgtttgtctaggttccaaactgcagctgaccccaagaaagtcaacaacc

SEQ ID NO: 631696 - DNA, 120 bp, Artificial Sequence
  ENSG00000179869_3 (sequence is synthesized)
tggcctttttaaaagagatacaagacctggcagaggaaattcatggaatgatggacaaggcaaaaaacttaaaaagactttgggtagaacgatccaacactccagattcttcttatggtt

SEQ ID NO: 631697 - DNA, 120 bp, Artificial Sequence
  ENSG00000179869_4 (sequence is synthesized)
ccagtttttttacaatggatctcaataagaccgaggaggtaatattgaaactggaaagcctccatcagcagcctcatatctgggattttctacttttactgccgagactacacacaagcc

SEQ ID NO: 631698 - DNA, 120 bp, Artificial Sequence
  ENSG00000179869_5 (sequence is synthesized)
atgatcatgtggaagatggcatggatgttgcagtgaaccttctccagaccattttgaattccttaatatccctagaagatttagattggcttccactcaaccaaactttttcccaggttt

SEQ ID NO: 631699 - DNA, 120 bp, Artificial Sequence
  ENSG00000179869_6 (sequence is synthesized)
ctgaacttgtactgaatgtgaccatttcgacactgacatttctgcagcaacatggagtagcagtcaccgagccagtttaccacctgtccatgcagaatatagtgtgggatccacagaaag

SEQ ID NO: 631700 - DNA, 120 bp, Artificial Sequence
  ENSG00000179869_7 (sequence is synthesized)
tccagtatgatctcaaatcccagtttggctttgatgatcttcacacggaacagatcctgaactcttcagctgaactgaaggagattcccacagacacttccttggagaagatggtgtgtt

SEQ ID NO: 631701 - DNA, 120 bp, Artificial Sequence
  ENSG00000179869_8 (sequence is synthesized)
cagtcttgtctagcacatcagaggatgaagctgagaaatggggccacgttggaggctgccaccctaagtggtcagaagccaaaaactatcttgtccatgcagtcagctggctgcgagtct

SEQ ID NO: 631702 - DNA, 120 bp, Artificial Sequence
  ENSG00000179869_9 (sequence is synthesized)
accaacaggtgtttgttcagtggcaacagggtagcctgcttcagaagacactcacaggcatgggccatagtctggaggctctcaggaatcagtttgaagaagagagcaagccctggaagg

SEQ ID NO: 631703 - DNA, 120 bp, Artificial Sequence
  ENSG00000179869_10 (sequence is synthesized)
tggtggaagctctgcacactgcactgctcctgctgaatgacagcttgtcagcagatggcccaaaagataatcatacatttccaaagatattacagcatctgtggaaattgcaaagcttgc

SEQ ID NO: 631704 - DNA, 120 bp, Artificial Sequence
  ENSG00000179869_11 (sequence is synthesized)
tgcaaaacctgccccagtggccggcactgaagagatttcttcagcttgatggagctctcagaaatgcgatagctcagaatttacattttgtccaagaagtcctcatttgcctggagacat

SEQ ID NO: 631705 - DNA, 120 bp, Artificial Sequence
  ENSG00000179869_12 (sequence is synthesized)
cagctaatgattttaaatggtttgaacttaaccaattgaaactggaaaaggatgtgttcttttgggagctgaaacagatgttggcgaagaatgctgtctgcccgaatggtcgtttctctg

SEQ ID NO: 631706 - DNA, 120 bp, Artificial Sequence
  ENSG00000179869_13 (sequence is synthesized)
agaaggaggtctttttgccgcctggaaactccagcatatggggtggtctccagggactgttgtgctattgtaactcctctgagacgagtgttttaaacaagctacttggttcagtagagg

SEQ ID NO: 631707 - DNA, 120 bp, Artificial Sequence
  ENSG00000179869_14 (sequence is synthesized)
atgctgatcgtattttgcaagaggtcattacttggcacaaaaatatgtcagttttaatacctgaagaatatttggactggcaggaacttgagatgcagctgtcagaagcaagcctttcct

SEQ ID NO: 631708 - DNA, 120 bp, Artificial Sequence
  ENSG00000179869_15 (sequence is synthesized)
gtactcggctcttcctgctgctgggagctgatccctctcctgagaatgatgtcttttctagtgactgtaagcaccagcttgtctccacagtgatatttcatacacttgaaaaaacacaat

SEQ ID NO: 631709 - DNA, 120 bp, Artificial Sequence
  ENSG00000179869_16 (sequence is synthesized)
ttttcctggaacaagcatattattggaaagccttcaaaaagtttatcaggaagacttgcgaagtggcccaatatgtaaatatgcaagagagtttccagaacagactattggcttttcctg

SEQ ID NO: 631710 - DNA, 120 bp, Artificial Sequence
  ENSG00000179869_17 (sequence is synthesized)
aggaatctccttgttttgaagaaaacatggattggaaaatgatcagtgataattattttcaatttttgaataacttactcaagtctccaacagcttccatatccagggctttaaatttca

SEQ ID NO: 631711 - DNA, 120 bp, Artificial Sequence
  ENSG00000179869_18 (sequence is synthesized)
caaagcaccttctaatgatggaaaagaagttgcacacccttgaggatgaacaaatgaactttcttttatcatttgtggaattttttgagaaattattgttgcctaatctttttgactcct

SEQ ID NO: 631712 - DNA, 120 bp, Artificial Sequence
  ENSG00000179869_19 (sequence is synthesized)
ccattgttcccagtttccacagcctcccatctctcacagaggatattctgaatataagttctctgtggacaaatcatttaaaaagtttaaagagagacccatctgccactgatgctcaga

SEQ ID NO: 631713 - DNA, 120 bp, Artificial Sequence
  ENSG00000179869_20 (sequence is synthesized)
aactcttggaatttggcaacgaagtgatttggaaaatgcagactctcggaagtcactggataaggaaggaaccaaaaaatcttttgagattcatagaattaatactttttgaaattaatc

SEQ ID NO: 631714 - DNA, 120 bp, Artificial Sequence
  ENSG00000179869_21 (sequence is synthesized)
ccaaattactagaattatgggcctatggcatttcaaaaggaaaaagagctaaattggaaaacttctttacacttttaaatttttctgttccagaaaatgagattctgagtacaagtttta

SEQ ID NO: 631715 - DNA, 120 bp, Artificial Sequence
  ENSG00000179869_22 (sequence is synthesized)
acttttcccagttgttccattcagattggcctaaatcaccagctatgaacatagattttgtacgtttaagtgaggctataataactagtctccatgaatttggatttttggagcaggaac

SEQ ID NO: 631716 - DNA, 120 bp, Artificial Sequence
  ENSG00000179869_23 (sequence is synthesized)
agatctcagaagctctgaacacagtctacgctatcaggaatgcatctgatcttttctcagccctttctgaaccacaaaaacaagaagttgataaaattttgactcacatacacctaaatg

SEQ ID NO: 631717 - DNA, 120 bp, Artificial Sequence
  ENSG00000179869_24 (sequence is synthesized)
tcttccaggacaaggattcagctttacttctgcaaatttattcttcattttaccgatatatttatgaattattgaatattcagagtagaggctcttcgttgactttccttacacaaatct

SEQ ID NO: 631718 - DNA, 120 bp, Artificial Sequence
  ENSG00000179869_25 (sequence is synthesized)
caaaacacattttggatatcataaaacaatttaatttccaaaacatcagtaaagcatttgcatttttatttaagacagcagaggttcttgggggaatttctaatgtatcttactgtcagc

SEQ ID NO: 631719 - DNA, 120 bp, Artificial Sequence
  ENSG00000179869_26 (sequence is synthesized)
aattgctttcaatttttaactttttggagcttcaggcccaatccttcatgtctacagagggccaagaactggaagtgatccacactactttgacaggcctcaaacagctgctcataattg

SEQ ID NO: 631720 - DNA, 120 bp, Artificial Sequence
  ENSG00000179869_27 (sequence is synthesized)
atgaagattttcgtatttctttatttcaatatatgagccaattcttcaacagttcagtagaagacctattggataataaatgcttgatttcggacaataaacacatttcttccgtaaatt

SEQ ID NO: 631721 - DNA, 120 bp, Artificial Sequence
  ENSG00000179869_28 (sequence is synthesized)
attcaacaagtgaggagtcttcatttgtttttccattggcacaaattttttcaaacctctcagcaaatgtcagtgtgttcaacaagtttatgtccattcactgtaccgtttcatggcttc

SEQ ID NO: 631722 - DNA, 120 bp, Artificial Sequence
  ENSG00000179869_29 (sequence is synthesized)
aaatgtggactgaaatctgggaaaccatatctcaattatttaagtttgacatgaatgttttcacatctcttcatcatggtttcactcagcttttggatgaattggaagatgatgtgaaag

SEQ ID NO: 631723 - DNA, 120 bp, Artificial Sequence
  ENSG00000179869_30 (sequence is synthesized)
tctctaaaagctgccagggtatacttcccacccataatgttgctagactcatattaaatttgtttaaaaatgtaactcaagccaatgacttccataattgggaggacttcctggatctca

SEQ ID NO: 631724 - DNA, 120 bp, Artificial Sequence
  ENSG00000179869_31 (sequence is synthesized)
gggattttttggtagctttaggtaatgcattagtttcagtaaaaaaacttaacttggagcaagtggagaaatcccttttcaccatggaagctgccctgcatcagttgaagacatttccat

SEQ ID NO: 631725 - DNA, 120 bp, Artificial Sequence
  ENSG00000179869_32 (sequence is synthesized)
tcaacgaaagtacaagcagagagtttttaaattctctgcttgaagttttcattgagtttagcagtacctcagaatatatagtcagaaatctagattcaataaatgactttctttcaaata

SEQ ID NO: 631726 - DNA, 120 bp, Artificial Sequence
  ENSG00000179869_33 (sequence is synthesized)
atctcacaaattatggagaaaaatttgaaaatatcatcactgagctaagagaagcaatagtatttcttagaaatgtatcacatgatcgagatttgttttcctgtgctgatattttccaaa

SEQ ID NO: 631727 - DNA, 120 bp, Artificial Sequence
  ENSG00000179869_34 (sequence is synthesized)
atgttactgagtgtattttagaagatggctttttatatgtaaatacctcacagaggatgttacgtattctagacacgttaaattccacattttcctctgagaacacaattagcagtctga

SEQ ID NO: 631728 - DNA, 120 bp, Artificial Sequence
  ENSG00000179869_35 (sequence is synthesized)
aaggatgcattgtatggttagatgtcataaaccatttgtatttgttgtctaactccagtttttcacaaggtcatcttcaaaatattttggggaatttcagagatatagaaaacaaaatga

SEQ ID NO: 631729 - DNA, 120 bp, Artificial Sequence
  ENSG00000179869_36 (sequence is synthesized)
actctatattaaaaattgtaacttgggtgttaaatataaaaaaacctctttgttcatcaaatggctcacatataaattgtgtcaatatttacttgaaagatgtaactgactttctaaata

SEQ ID NO: 631730 - DNA, 120 bp, Artificial Sequence
  ENSG00000179869_37 (sequence is synthesized)
ttgtacttactacagtctttgaaaaagagaagaaacctaaatttgagattttattagctcttttaaatgattccacaaagcaagtaaggatgagtatcaacaacttaacaacagactttg

SEQ ID NO: 631731 - DNA, 120 bp, Artificial Sequence
  ENSG00000179869_38 (sequence is synthesized)
attttgcatctcagtccaattggagatattttactgaattaattctaagaccaatagaaatgtcagatgaaattcctaatcagtttcaaaatatttggcttcatttaataacactgggga

SEQ ID NO: 631732 - DNA, 120 bp, Artificial Sequence
  ENSG00000179869_39 (sequence is synthesized)
aggaatttcagaagcttgtaaaaggtatttactttaacatcctggaaaataattcctcttctaaaactgaaaacttgttaaacatatttgccaccagtccaaaagaaaaggatgtaaaca

SEQ ID NO: 631733 - DNA, 120 bp, Artificial Sequence
  ENSG00000179869_40 (sequence is synthesized)
gtgtaggcaattccatttatcacttagctagttaccttgccttcagcttatctcatgacctccaaaattcaccaaaaataataatttcacctgaaataatgaaagctacaggtcttggta

SEQ ID NO: 631734 - DNA, 120 bp, Artificial Sequence
  ENSG00000179869_41 (sequence is synthesized)
ttcaactgataagggatgtgttcaactccttaatgcctgtagttcatcacactagtccacaaaatgcaggttatatgcaagctttgaagaaggtaacttctgtcatgcgtacccttaaga

SEQ ID NO: 631735 - DNA, 120 bp, Artificial Sequence
  ENSG00000179869_42 (sequence is synthesized)
aggcagacatagaccttttagtggatcagcttgaacaagttagtgtaaacctaatggatttctttaagaatatcagtagtgtgggaactggcaatttagtggtcaatttgcttgttggct

SEQ ID NO: 631736 - DNA, 120 bp, Artificial Sequence
  ENSG00000179869_43 (sequence is synthesized)
tgatggaaaaatttgcagacagctcacattcttggaatgttaatcatctgctgcagctctcacgcctgtttcctaaagatgttgtggatgctgtgatagatgtgtactatgtgcttcctc

SEQ ID NO: 631737 - DNA, 120 bp, Artificial Sequence
  ENSG00000179869_44 (sequence is synthesized)
atgctgtaaggctcctgcagggagtacctggtaaaaacatcactgaaggcctcaaggatgtctacagcttcacactccttcatggcataaccatttcaaatatcaccaaggaagacttcg

SEQ ID NO: 631738 - DNA, 120 bp, Artificial Sequence
  ENSG00000179869_45 (sequence is synthesized)
caattgtgataaaaattcttttggatacaattgaattagtatcagataagccagatattatttcagaggctttagcttgttttcctgtggtttggtgctggaatcacacaaattctggat

SEQ ID NO: 631739 - DNA, 120 bp, Artificial Sequence
  ENSG00000179869_46 (sequence is synthesized)
ttcggcagaattcaaagatagacccctgcaatgtccatgggctcatgtcttcttccttttatggcaaagtggccagtatacttgatcatttccacctgtctccccaaggtgaagattcac

SEQ ID NO: 631740 - DNA, 120 bp, Artificial Sequence
  ENSG00000179869_47 (sequence is synthesized)
catgttcaaatgaaagctcccgaatggaaataactaggaaagtggtctgcataattcatgaattagtggactggaattctattcttctggagctctctgaagtcttccatgttaacattt

SEQ ID NO: 631741 - DNA, 120 bp, Artificial Sequence
  ENSG00000179869_48 (sequence is synthesized)
ctcttgtgaaaactgtgcagaaattttggcataagatattaccgtttgtcccaccttcaataaatcaaactagggatagcatctctgaactctgtcctagtggttccataaagcaagttg

SEQ ID NO: 631742 - DNA, 120 bp, Artificial Sequence
  ENSG00000179869_49 (sequence is synthesized)
ctttgcaaatcatagaaaaacttaaaaatgtcaactttacaaaagttacatcaggtgaaaatattcttgacaaactaagtagtttaaacaagatccttaacattaatgaagacacagaga

SEQ ID NO: 631743 - DNA, 120 bp, Artificial Sequence
  ENSG00000179869_50 (sequence is synthesized)
catctgttcaaaatattatttcctcaaatttggaaaggacagtacaattgatttctgaagactggagcctagaaaaaagtacgcataatctactctctttattcatgatgctccagaatg

SEQ ID NO: 631744 - DNA, 120 bp, Artificial Sequence
  ENSG00000179869_51 (sequence is synthesized)
caaatgtcacaggtagcagtttagaagcattatcaagttttattgaaaaaagtgaaacaccttacaactttgaagaactatggcccaagtttcaacaaatcatgaaagacctaacccaag

SEQ ID NO: 631745 - DNA, 120 bp, Artificial Sequence
  ENSG00000179869_52 (sequence is synthesized)
attttagaatcagacacctgctttctgaaatgaacaaaggaatcaaaagtataaattcaatggctcttcaaaagataactttgcagtttgcccatttcctggaaatcctggattcaccgt

SEQ ID NO: 631746 - DNA, 120 bp, Artificial Sequence
  ENSG00000179869_53 (sequence is synthesized)
cattgaagacattagaaattattgaagattttctattggtcacaaaaaactggcttcaggaatatgcaaatgaggattactccagaatgatagaaacattattcattcctgtgaccaatg

SEQ ID NO: 631747 - DNA, 120 bp, Artificial Sequence
  ENSG00000179869_54 (sequence is synthesized)
agagttcaactgaagatatagctttgttagccaaagctattgctactttttggggctctttaaaaaatatatctagagcaggcaattttgatgttgcctttcttacccatctgctaaatc

SEQ ID NO: 631748 - DNA, 120 bp, Artificial Sequence
  ENSG00000179869_55 (sequence is synthesized)
aagaacagctgactaatttctcagttgttcagctgctttttgaaaacatcctaattaatttgatcaataacttagctgggaattctcaggaagcagcttggaacttaaatgatactgacc

SEQ ID NO: 631749 - DNA, 120 bp, Artificial Sequence
  ENSG00000179869_56 (sequence is synthesized)
ttcaaataatgaatttcattaaccttatcttgaaccatatgcagtcagaaactagtaggaaaacagttctctctctgagaagcatagtagatttcacagaacagtttttgaaaacattct

SEQ ID NO: 631750 - DNA, 120 bp, Artificial Sequence
  ENSG00000179869_57 (sequence is synthesized)
tctccctttttctaaaggaagattctgagaacaaaatatctcttctgctgaaatatttccacaaagatgttattgcagagatgagttttgtcccaaaagataaaattctagaaattctga

SEQ ID NO: 631751 - DNA, 120 bp, Artificial Sequence
  ENSG00000179869_58 (sequence is synthesized)
aactggatcaatttcttaccctgatgatacaagacagattgatgaacattttttcaagtttaaaggagactatatatcacctaatgaaaagttcatttatattagacaatggagaatttt

SEQ ID NO: 631752 - DNA, 120 bp, Artificial Sequence
  ENSG00000179869_59 (sequence is synthesized)
attttgatactcatcaaggactgaagttcatgcaagatttatttaatgcccttctcagggaaacttcaatgaaaaataagactgaaaataatatagactttttcacagtggtgagtcagt

SEQ ID NO: 631753 - DNA, 120 bp, Artificial Sequence
  ENSG00000179869_60 (sequence is synthesized)
tgtttttccatgtgaataagtctgaggacctcttcaaactcaatcaagatcttgggtcagctcttcaccttgtaagagaatgttcaacagagatggcaagacttctggatacaattttac

SEQ ID NO: 631754 - DNA, 120 bp, Artificial Sequence
  ENSG00000179869_61 (sequence is synthesized)
actctcctaataaggacttctatgctttgtatcctaccctccaagaagttatacttgctaatctaacggatttgcttttctttataaataattcattccctctaagaaacagagcaacat

SEQ ID NO: 631755 - DNA, 120 bp, Artificial Sequence
  ENSG00000179869_62 (sequence is synthesized)
tagaaattactaagagattagttggtgctatttcaagagcaagtgaagaaagtcacgtcctgaaacccctcttagaaatgtctgggactctggtcatgctgttgaatgacagtgctgacc

SEQ ID NO: 631756 - DNA, 120 bp, Artificial Sequence
  ENSG00000179869_63 (sequence is synthesized)
tgagagatcttgccacatcaatggactccattgtgaaacttcttaagctggtcaagaaagtttcggggaagatgtccacagtttttaaaactcattttatctccaataccaaggacagtg

SEQ ID NO: 631757 - DNA, 120 bp, Artificial Sequence
  ENSG00000179869_64 (sequence is synthesized)
tgaaattctttgacactctgtattccatcatgcaacaaagtgttcaaaatcttgtgaaagaaatagctactttaaaaaaaatagatcatttcacatttgaaaagataaatgatttgttgg

SEQ ID NO: 631758 - DNA, 120 bp, Artificial Sequence
  ENSG00000179869_65 (sequence is synthesized)
tgccatttcttgacttggcctttgaaatgattggggtagaaccttatatatcatcaaactctgatattttcagtatgtcacctagcatactctcatatatgaaccaatctaaggactttt

SEQ ID NO: 631759 - DNA, 120 bp, Artificial Sequence
  ENSG00000179869_66 (sequence is synthesized)
ctgatattttggaagaaattgctgaatttttaacatctgtgaaaatgaacttggaagatatgaggagtcttgcggtagcatttaacaatgagactcaaacattttctatggattctgtca

SEQ ID NO: 631760 - DNA, 120 bp, Artificial Sequence
  ENSG00000179869_67 (sequence is synthesized)
acttacgggaagaaattctgggttgcttagttcctataaataacatcaccaaccaaatggacttcttataccctaatccaatttccactcatagtggccctcaagatataaaatgggaaa

SEQ ID NO: 631761 - DNA, 120 bp, Artificial Sequence
  ENSG00000179869_68 (sequence is synthesized)
taattcatgaagtgatcccttttttggataaaatattatcacaaaacagcacagaaataggatctttcttgaaaatggtgatctgtctcaccttagaagctctttggaaaaacttaaaga

SEQ ID NO: 631762 - DNA, 120 bp, Artificial Sequence
  ENSG00000179869_69 (sequence is synthesized)
aagataattggaatgtttctaatgtgttgatgacatttactcagcatccaaataaccttttgaaaaccatagaaacagttttagaggcctccagtggaattaaaagtgactatgaaggtg

SEQ ID NO: 631763 - DNA, 120 bp, Artificial Sequence
  ENSG00000179869_70 (sequence is synthesized)
atttgaataaaagtttatattttgacacacctttgagtcagaatataactcatcatcaacttgaaaaagcaatccataatgttttaagtagaatagctctctggaggaaaggacttctgt

SEQ ID NO: 631764 - DNA, 120 bp, Artificial Sequence
  ENSG00000179869_71 (sequence is synthesized)
aagaactttgtttcagccactttttgagattttcattaaagcaaccaccggaaagaatgtcacatcagaaaaagaagagagaaccaagaaagagatgattgactttccttatagtttcaa

SEQ ID NO: 631765 - DNA, 120 bp, Artificial Sequence
  ENSG00000179869_72 (sequence is synthesized)
accatttttctgtttggagaaatacctgggaggattatttgtattgactaaatactggcaacaaatcccactaacagatcaaagtgttgttgagatttgtgaagttttccagcagactgt

SEQ ID NO: 631766 - DNA, 120 bp, Artificial Sequence
  ENSG00000179869_73 (sequence is synthesized)
gaagccctcagaagccatggagatgctgcagaaagtgaagatgatggtcgtacgtgtgctcaccatcgttgcagaaaacccttcctggaccaaggacattttgtgtgctactctgagttg

SEQ ID NO: 631767 - DNA, 120 bp, Artificial Sequence
  ENSG00000179869_74 (sequence is synthesized)
caagcaaaatgggataaggcatctcattttatctgctatacaaggggtcactttggcgcaggaccacttccaggaaattgaaaagatatggtcctcgccgaatcagctaaattgtgaaag

SEQ ID NO: 631768 - DNA, 120 bp, Artificial Sequence
  ENSG00000179869_75 (sequence is synthesized)
tcttagcaagaatctttctagcaccttggagagcttcaagagcagcttggaaaatgccactggccaggactgcacaagccagccgaggctggagacggtgcagcagcacttgtacatgtt

SEQ ID NO: 631769 - DNA, 120 bp, Artificial Sequence
  ENSG00000179869_76 (sequence is synthesized)
ggccaaaagcctcgaggaaacttggtcatcagggaatcccatcatgacttttctcagcaatttcacagtaactgaggatgtaaaaataaaagatttgatgaagaatatcaccaagttgac

SEQ ID NO: 631770 - DNA, 120 bp, Artificial Sequence
  ENSG00000179869_77 (sequence is synthesized)
tgaggagcttcgctcttccatccaaatctcgaatgagactatccatagcattctagaagcaaatatttcccactccaaggttctcttcagtgccctcaccgtagctctgtctggaaagtg

SEQ ID NO: 631771 - DNA, 120 bp, Artificial Sequence
  ENSG00000179869_78 (sequence is synthesized)
tgatcaggaaatccttcatctcctgctgacatttcccaaaggggaaaaatcttggatcgcagcggaggaactctgtagcctgccagggtcaaaagtgtattctctgattgtgttgctgag

SEQ ID NO: 631772 - DNA, 120 bp, Artificial Sequence
  ENSG00000179869_79 (sequence is synthesized)
tcgaaacttggatgtgcgagctttcatttacaagactctgatgccttctgaagcaaatggcttgctcaactccttgctggatatagtttccagcctcagcgccttgcttgccaaagccca

SEQ ID NO: 631773 - DNA, 120 bp, Artificial Sequence
  ENSG00000179869_80 (sequence is synthesized)
gcacgtctttgagtatcttcctgagtttcttcacacatttaaaatcactgccttgctagaaaccctggactttcaacaggtttcacaaaatgtccaggccagaagttcagcttttggttc

SEQ ID NO: 631774 - DNA, 120 bp, Artificial Sequence
  ENSG00000179869_81 (sequence is synthesized)
tttccagtttgtgatgaagatggtttgcaaggaccaagcatcattccttagcgattctaatatgtttattaatttgcccagagttaaggaactcttggaagatgacaaagaaaaattcaa

SEQ ID NO: 631775 - DNA, 120 bp, Artificial Sequence
  ENSG00000179869_82 (sequence is synthesized)
cattcctgaagattcaacaccgttttgcttgaagctttatcaggaaattctacaattgccaaatggtgctttggtgtggaccttcctaaaacccatattgcatggaaaaatactatacac

SEQ ID NO: 631776 - DNA, 120 bp, Artificial Sequence
  ENSG00000179869_83 (sequence is synthesized)
accaaacactccagaaattaacaaggtcattcaaaaggctaattacaccttttatattgtggacaaactaaaaactttatcagaaacactgctggaaatgtccagccttttccagagaag

SEQ ID NO: 631777 - DNA, 120 bp, Artificial Sequence
  ENSG00000179869_84 (sequence is synthesized)
tggaagtggccagatgttcaaccagctgcaggaggccctgagaaacaaatttgtaagaaactttgtagaaaaccagttgcacattgatgtagacaaacttactgaaaaactccagacata

SEQ ID NO: 631778 - DNA, 120 bp, Artificial Sequence
  ENSG00000179869_85 (sequence is synthesized)
cggagggctgctggatgagatgtttaaccatgcaggcgctggacgcttccgtttcttgggcagcatcttggtcaatctctcttcctgcgtggcactgaaccgtttccaggctctgcagtc

SEQ ID NO: 631779 - DNA, 120 bp, Artificial Sequence
  ENSG00000179869_86 (sequence is synthesized)
tgtcgacatcctggagactaaagcacatgaactcttgcagcagaacagcttcttggccagtatcattttcagcaattccttattcgacaagaacttcagatcagagtctgtcaaactgcc

SEQ ID NO: 631780 - DNA, 120 bp, Artificial Sequence
  ENSG00000179869_87 (sequence is synthesized)
accccatgtctcatacacaatccggaccaatgtgttatacagcgtgcgaacagatgtggtaaaaaacccttcttggaagttccaccctcagaatctaccagctgatgggttcaaatataa

SEQ ID NO: 631781 - DNA, 120 bp, Artificial Sequence
  ENSG00000179869_88 (sequence is synthesized)
ctacgtctttgccccactgcaagacatgatcgaaagagccatcattttggtgcagactgggcaggaagccctggaaccagcagcacagactcaggcggccccttacccctgccataccag

SEQ ID NO: 631782 - DNA, 120 bp, Artificial Sequence
  ENSG00000179869_89 (sequence is synthesized)
cgacctattcctgaacaacgttggtttcttttttccactgataatgatgctgacgtggatggtgtctgtggccagcatggtcagaaagttggtgtatgagcaggagatacagatagaaga

SEQ ID NO: 631783 - DNA, 120 bp, Artificial Sequence
  ENSG00000179869_90 (sequence is synthesized)
gtatatgcggatgatgggagtgcatccagtgatccatttcctggcctggttcctggagaacatggctgtgttgaccataagcagtgctactctggccatcgttctgaaaacaagtggcat

SEQ ID NO: 631784 - DNA, 120 bp, Artificial Sequence
  ENSG00000179869_91 (sequence is synthesized)
ctttgcacacagcaatacctttattgttttcctctttctcttggattttgggatgtcagtcgtcatgctgagctacctcttgagtgcatttttcagccaagctaatacagcggccctttg

SEQ ID NO: 631785 - DNA, 120 bp, Artificial Sequence
  ENSG00000179869_92 (sequence is synthesized)
taccagcctggtgtacatgatcagctttctgccctacatagttctattggttctacataaccaattaagttttgttaatcagacatttctgtgccttctttcgacaaccgcctttggaca

SEQ ID NO: 631786 - DNA, 120 bp, Artificial Sequence
  ENSG00000179869_93 (sequence is synthesized)
aggggtattttttattacattcctggaaggacaagagacagggattcaatggaataatatgtaccaggctctggaacaagggggcatgacatttggctgggtttgctggatgattctttt

SEQ ID NO: 631787 - DNA, 120 bp, Artificial Sequence
  ENSG00000179869_94 (sequence is synthesized)
tgattcaagcctttattttttgtgtggatggtacttgagcaacttgattcctggaacatttggtttacggaaaccatggtatttcccctttactgcctcatattggaagagtgtgggttt

SEQ ID NO: 631788 - DNA, 120 bp, Artificial Sequence
  ENSG00000179869_95 (sequence is synthesized)
cttggtggagaaaaggcaatactttctaagttctagtctgttcttcttcaatgagaactttgacaataaagggtcatcactgcaaaacagggaaggagagcttgaaggaagtgccccggg

SEQ ID NO: 631789 - DNA, 120 bp, Artificial Sequence
  ENSG00000179869_96 (sequence is synthesized)
agtcaccctggtgtctgtgaccaaggaatatgagggccacaaggctgtggtccaagacctcagcctgaccttctacagagaccaaatcaccgccctgctggggacaaacggtgccgggaa

SEQ ID NO: 631790 - DNA, 120 bp, Artificial Sequence
  ENSG00000179869_97 (sequence is synthesized)
aaccactatcatatccatgttgacggggctccaccctcccacttctggaaccatcatcatcaatggcaagaacctacagacagacctgtcgagggtcagaatggagcttggtgtgtgtcc

SEQ ID NO: 631791 - DNA, 120 bp, Artificial Sequence
  ENSG00000179869_98 (sequence is synthesized)
gcagcaggacatcctgttggacaacctcaccgtccgggaacatttgctgctctttgcttccataaaggcgcctcagtggaccaagaaggagctgcatcagcaagtcaatcaaactcttca

SEQ ID NO: 631792 - DNA, 120 bp, Artificial Sequence
  ENSG00000179869_99 (sequence is synthesized)
ggatgtggacttaactcagcatcagcacaaacagacccgagctctgtctggaggcctgaagaggaagctctcccttggcattgctttcatgggcatgtcgaggaccgtggttctggatga

SEQ ID NO: 631793 - DNA, 120 bp, Artificial Sequence
  ENSG00000179869_100 (sequence is synthesized)
gcccaccagtggggtggacccttgctcccggcatagcctgtgggacattctgctcaagtaccgagaaggtcgtacgatcatcttcacaacccaccacctggatgaagctgaagcgctgag

SEQ ID NO: 631794 - DNA, 120 bp, Artificial Sequence
  ENSG00000179869_101 (sequence is synthesized)
tgaccgcgtggccgtcctccagcatgggaggctcaggtgctgcggtcctcccttctgcctgaaggaggcatatggccaggggctccgcctgacactcacgaggcagccttctgttctgga

SEQ ID NO: 631795 - DNA, 120 bp, Artificial Sequence
  ENSG00000179869_102 (sequence is synthesized)
ggcccatgatctgaaagacatggcttgtgttacatccctgataaagatctatattccacaagcatttctcaaagacagcagtggaagtgagctgacctacaccattccaaaggacacaga

SEQ ID NO: 631796 - DNA, 120 bp, Artificial Sequence
  ENSG00000179869_103 (sequence is synthesized)
caaggcctgcttgaaagggctcttccaggccctggatgagaacctgcatcagctgcacctgacgggctatgggatctcagacaccaccttagaagaggtgtttttgatgcttttgcaaga

SEQ ID NO: 631797 - DNA, 120 bp, Artificial Sequence
  ENSG00000179869_104 (sequence is synthesized)
ttccaacaagaaatctcacattgccctggggactgagtcagagctgcagaaccacaggcctacaggacatctgtctggctactgtggctccctagcacggcccgcaactgtgcagggcgt

SEQ ID NO: 631798 - DNA, 120 bp, Artificial Sequence
  ENSG00000179869_105 (sequence is synthesized)
ccagctgctccgcgcacaagtggccgcgatcctggcccggaggctccgccgcacgctgcgcgccgggaagagcaccctcgccgacctgctgctgccagtcctcttcgtggccttggccat

SEQ ID NO: 631799 - DNA, 120 bp, Artificial Sequence
  ENSG00000179869_106 (sequence is synthesized)
gggcttgttcatggtgagacccctggccaccgagtaccctcccctcagactcacacctggacattaccagcgggccgagacctactttttcagcagtgggggcgacaacttggacctcac

SEQ ID NO: 631800 - DNA, 120 bp, Artificial Sequence
  ENSG00000179869_107 (sequence is synthesized)
ccgtgtgcttctgcggaagtttagagatcaagatttgccctgtgcagatttaaacccacgccagaagaattcttcatgctggcgcacagatcccttttctcacccagaattccaggattc

SEQ ID NO: 631801 - DNA, 120 bp, Artificial Sequence
  ENSG00000179869_108 (sequence is synthesized)
atgtggctgcctgaagtgtccaaatagaagtgctagtgctccctacctgaccaaccacctgggccacacactgttgaatctctcaggcttcaatatggaggagtacttgctggcaccatc

SEQ ID NO: 631802 - DNA, 120 bp, Artificial Sequence
  ENSG00000179869_109 (sequence is synthesized)
tgaaaaaccaaggcttggaggttggtcttttggattaaaaatccccagtgaagctggaggtgcaaatggaaacatatcaaaacccccaactctggcaaaggtgtggtataatcagaaggg

SEQ ID NO: 631803 - DNA, 120 bp, Artificial Sequence
  ENSG00000179869_110 (sequence is synthesized)
ttttcattccctaccttcctacttaaatcatctaaacaaccttattttgtggcagcacctaccccctactgtggactggagacaatacggaataacactctacagccacccatatggagg

SEQ ID NO: 631804 - DNA, 120 bp, Artificial Sequence
  ENSG00000179869_111 (sequence is synthesized)
ggccttgctgaacgaggacaagatcctggagagcatccgtcagtgtggagtggccctctgcatcgtgctgggattctccatcctgtctgcatccatcggcagctctgtggtgagggacag

SEQ ID NO: 631805 - DNA, 120 bp, Artificial Sequence
  ENSG00000179869_112 (sequence is synthesized)
ggtgattggagccaaaaggttgcagcacataagtggccttggctacaggatgtactggttcacaaacttcctatatgacatgctcttttacttggtttccgtctgcctgtgtgttgccgt

SEQ ID NO: 631806 - DNA, 120 bp, Artificial Sequence
  ENSG00000179869_113 (sequence is synthesized)
tattgtcgccttccagttaacagcttttactttccgcaagaacttggcagccacggccctcctgctgtcacttttcggatatgcaactcttccatggatgtacctgatgtccagaatctt

SEQ ID NO: 631807 - DNA, 120 bp, Artificial Sequence
  ENSG00000179869_114 (sequence is synthesized)
ttccagttcggacgtggctttcatttcctatgtctcactaaacttcatctttggcctttgtaccatgctcataaccattatgccccggttgctagccatcatctccaaagctaagaattt

SEQ ID NO: 631808 - DNA, 120 bp, Artificial Sequence
  ENSG00000179869_115 (sequence is synthesized)
acagaatatctatgatgtcctcaagtgggtctttactatttttcctcaattctgtcttggtcaaggactggtagaactctgctataatcagatcaaatatgacctgacccacaacttcgg

SEQ ID NO: 631809 - DNA, 120 bp, Artificial Sequence
  ENSG00000179869_116 (sequence is synthesized)
cattgattcctatgtgagtccctttgagatgaactttctgggctggatcttcgtgcaactggcctcgcagggcacagtacttctcctcttgagggttctgctacactgggaccttctgcg

SEQ ID NO: 631810 - DNA, 120 bp, Artificial Sequence
  ENSG00000179869_117 (sequence is synthesized)
atggccaaggggtcattctactctccaaggcacagtcaaatcttctaaggatacagatgttgaaaaagaggaaaagagagtgtttgaaggaaggaccaatggagacattcttgtgttata

SEQ ID NO: 631811 - DNA, 120 bp, Artificial Sequence
  ENSG00000179869_118 (sequence is synthesized)
caaccttagtaaacattatcgacgctttttccagaatattattgctgtgcaagatattagtttgggcataccaaaaggagagtgctttggacttctaggggtgaatggagctgggaagag

SEQ ID NO: 631812 - DNA, 120 bp, Artificial Sequence
  ENSG00000179869_119 (sequence is synthesized)
cacgactttcaaaatgctgaatggtgaagtttctctaacttcaggacatgctatcatcaggactcccatgggagacgccgtggacctgtcttctgctggcacggcaggcgtgctcattgg

SEQ ID NO: 631813 - DNA, 120 bp, Artificial Sequence
  ENSG00000179869_120 (sequence is synthesized)
ctactgtccccagcaggatgccctggacgagcttctgactggttgggaacatctctattattactgtagcttacgcgggattccaaggcagtgcatccctgaggttgctggagacctcat

SEQ ID NO: 631814 - DNA, 120 bp, Artificial Sequence
  ENSG00000179869_121 (sequence is synthesized)
caggcgcttacacctcgaagcccacgcggacaaacctgtggccacctacagtgggggaaccaagcggaaactctctacagccctggccctggtggggaaacctgacattcttttattgga

SEQ ID NO: 631815 - DNA, 120 bp, Artificial Sequence
  ENSG00000179869_122 (sequence is synthesized)
tgagcccagctctgggatggatccctgctctaagcggtacctgtggcaaacaataatgaaggaggttcgggaaggctgtgctgcggtgctgacctcccacagcatggaggagtgtgaggc

SEQ ID NO: 631816 - DNA, 120 bp, Artificial Sequence
  ENSG00000179869_123 (sequence is synthesized)
tctttgcacaagactggccataatggttaacggcagcttcaaatgtcttggttctcctcagcacatcaaaaataggtttggtgatggttatacagtcaaagtttggctctgtaaggaagc

SEQ ID NO: 631817 - DNA, 120 bp, Artificial Sequence
  ENSG00000179869_124 (sequence is synthesized)
aaatcaacattgcactgtttctgaccacttgaagctttattttccaggaattcagttcaagggacagcacctgaatttattagaatatcatgtgccaaaaagatggggatgcctagctga

SEQ ID NO: 631818 - DNA, 120 bp, Artificial Sequence
  ENSG00000179869_125 (sequence is synthesized)
cttgttcaaagttatagagaacaataaaaccttcttgaatattaagcattattccattaaccaaaccactttggagcaggtatttattaattttgcttctgagcagcagcaaactctaca

SEQ ID NO: 631819 - DNA, 120 bp, Artificial Sequence
  ENSG00000179869_126 (sequence is synthesized)
atctactcttgatccatccactgacagtcaccacacacatcacttgcccatctgagcactaaagaagtttccataaggaataaaaccttgtcttccattacaattaacagtcaaggataa

SEQ ID NO: 631820 - DNA, 120 bp, Artificial Sequence
  ENSG00000179869_127 (sequence is synthesized)
aacaagcacgcgcacaatcaaggagctggaacacactctccaggccgtcaaattattctcttgttcattttctattttgaatctccttgttagttaataaccaccaaatggaaaggtcat

SEQ ID NO: 631821 - DNA, 120 bp, Artificial Sequence
  ENSG00000179869_128 (sequence is synthesized)
tctttctgcagacttttggggagctcctccaaaacatttgttctctttaccatgccagatggacaccagcttctttgtgacaaaggcatgaatgatttgacagtgtccaaactgagacat

SEQ ID NO: 631822 - DNA, 120 bp, Artificial Sequence
  ENSG00000179869_129 (sequence is synthesized)
tctggagctggaaagcctgtcacactagagtgtgtgtgacatgtccactctaaacatgtcacttttctgttaagaaaactgagccccctccccacaggttaaaaaactttagtaacttgt

SEQ ID NO: 631823 - DNA, 120 bp, Artificial Sequence
  ENSG00000179869_130 (sequence is synthesized)
ttgtttgtatagaaaatagtaacaaggactattttctattgttgtcatctatttactagatacatgtttttaatgattttaatgtaagcttttattaatactgatgacattatatggtat

SEQ ID NO: 631824 - DNA, 120 bp, Artificial Sequence
  ENSG00000179869_131 (sequence is synthesized)
tgaaaaaatcaccaattttttacatataaaagatacctttttaaaaaaataggttttaagagctcttttagtatacactttagcaaaattaattaaattgaactagttactctgtatcaa

SEQ ID NO: 631825 - DNA, 120 bp, Artificial Sequence
  ENSG00000179869_132 (sequence is synthesized)
ttacagtagttctaccagaatctcccaggttataatttatgagggtagagaaataaaatgtagatgcattttctttttcttcatttggatgaataattactgttttttgttattctaagt

SEQ ID NO: 631826 - DNA, 120 bp, Artificial Sequence
  ENSG00000179869_133 (sequence is synthesized)
cagtgtttttcaaagcgtagtggtccccatattagctgcattgccatcttctgggagcttgcaagaaatgtacattctcaggatccactccagacctattgaatctcaaattctggggct

SEQ ID NO: 631827 - DNA, 120 bp, Artificial Sequence
  ENSG00000179869_134 (sequence is synthesized)
ggcttaaacaagcacattccaagttaagaaccaatgacctaagggaatgtctggttacctcctagttatacaagcaaaatctgcatagtatgtagtcttttttatttatttatttttttt

SEQ ID NO: 631828 - DNA, 120 bp, Artificial Sequence
  ENSG00000179869_135 (sequence is synthesized)
attacaggcgtgagccaccgtgtccggccgtagtttattttaaaatatatttttaaaagctttgtaaaaattatgtcattctcagaattgttgtcttcaaagcattgtcagatgtagagt

SEQ ID NO: 631829 - DNA, 120 bp, Artificial Sequence
  ENSG00000179869_136 (sequence is synthesized)
cagatgtagagtgctcagatgtggctcttaaagactatatacatctgaatttttcatcctatagttagtaagatgcataaaatcaatccactactgaaatagtttccagtcagacatttc

SEQ ID NO: 631830 - DNA, 120 bp, Artificial Sequence
  ENSG00000179869_137 (sequence is synthesized)
tgagttcagacatttctcaacattcttttaacaacatttttctgaatcctcaatagaaaatcacattaatcttattttaaaatttggcctttttcaacactaacgttgagtaccggtagc

SEQ ID NO: 631831 - DNA, 120 bp, Artificial Sequence
  ENSG00000179869_138 (sequence is synthesized)
ttgtgatcaaaggcatatacttccttatgagatttctttactaaagcaagatttcattaaatctctatttcctaaatatcattctatacaaaagatattttttaaacggtaaggattaag

SEQ ID NO: 631832 - DNA, 120 bp, Artificial Sequence
  ENSG00000179869_139 (sequence is synthesized)
acaatcactgatagctttgttgtgagcaattttgattcccatgtatcacatgaattacacttccttaaataaattacagtttatggctgtatgatttattctctaattctaacatagtct

SEQ ID NO: 631833 - DNA, 120 bp, Artificial Sequence
  ENSG00000179869_140 (sequence is synthesized)
agttgtcaaaaggaaatatgtaatctttttatgattgttgaatcaataaataccaatttgtgaaacatgaatgtgtttaaactgcagtgaataaatgagatgtgctttaatttaacccga

SEQ ID NO: 631834 - DNA, 120 bp, Artificial Sequence
  ENSG00000179869_141 (sequence is synthesized)
tgtacagtagaatcaagttgtatcccagtgaggctacattatccttttcagaaaaatataaatttttaaaagcacttatagggatatattcgttagataacatctctatagtgcttagaa

SEQ ID NO: 631835 - DNA, 120 bp, Artificial Sequence
  ENSG00000179869_142 (sequence is synthesized)
ttgcttactttgtgtttgaccttttaactcaataacagcaatgacatctatgtacattatacattatcatacatgatttcaaggaaaattgtcttcttctggaagcatagtttcttagaa

SEQ ID NO: 631836 - DNA, 120 bp, Artificial Sequence
  ENSG00000179869_143 (sequence is synthesized)
gaggcatcccagatcataggacaagcctcccttgtctcagatgaagaaatgaaggctcagagagacgggcatgtgatttacttgtagctacagagaaagtttcctgaactgagggtggat

SEQ ID NO: 631837 - DNA, 120 bp, Artificial Sequence
  ENSG00000179869_144 (sequence is synthesized)
gttgaacctcttgtccatgtttctcacatctattattgtttctttccaatttaggacatttgatgggcagttactaatttccaacttctgattctttctgcaatcctgacagctaggaag

SEQ ID NO: 631838 - DNA, 120 bp, Artificial Sequence
  ENSG00000179869_145 (sequence is synthesized)
cattgttctatgtattttctgtgagaatactcccttttggaaagaaacattgcaacagtaaaacacatcttggtgctggtaaataagtgtagaggcatcagtggcaggattaatacagat

SEQ ID NO: 631839 - DNA, 120 bp, Artificial Sequence
  ENSG00000179869_146 (sequence is synthesized)
tctcataaaatgttattttgctttttcttttgccttttgagtataaattttcttctgacttaacctaaagtctccatttccctggaggtgaactaggatttgcaaaggaagaaataaagg

SEQ ID NO: 631840 - DNA, 120 bp, Artificial Sequence
  ENSG00000179869_147 (sequence is synthesized)
agacaaactgaagtcaactggtgaccaagcacatggagaaggcagcatgggtgcaggagacgctgaagaacacgataatagaactttacagccggctgatctgagcttgagaaaaggagg

SEQ ID NO: 631841 - DNA, 120 bp, Artificial Sequence
  ENSG00000179869_148 (sequence is synthesized)
tgcctttgggtttgggacatggaaagatagtgatgtctttagagaaacagaagttgggtgggctgtgagggtgaggaggattctgggtgttgagtatgttcctagggacactgatgggct

SEQ ID NO: 631842 - DNA, 120 bp, Artificial Sequence
  ENSG00000179869_149 (sequence is synthesized)
gtttggagaattcctacgaggaagggctgttgatattcatgttctctttgctatggcaagaagcaggagagaaaacttaaagttgggggtgattattgcgtatggttgagacggaggaat

SEQ ID NO: 631843 - DNA, 120 bp, Artificial Sequence
  ENSG00000179869_150 (sequence is synthesized)
aagtagctgaactcatcacaactttgaagcaatatttataaactctgaagtagagtgagctgagctcagattcatgttgctgcatttattttaattattactaaatataggcaatttgcc

SEQ ID NO: 631844 - DNA, 120 bp, Artificial Sequence
  ENSG00000179869_151 (sequence is synthesized)
cctggagagcatccgtcagtgtggagtggccctctgcatcgtgctgggattctccatcctgtctgcatccatcggcagctctgtgctcttttacttggtttccgtctgcctgtgtgttgc

SEQ ID NO: 631845 - DNA, 120 bp, Artificial Sequence
  ENSG00000179869_152 (sequence is synthesized)
cgtctggtcctggactttttttggaaaatatataaagcatatttggaaaatttatgacatgtatctcttggacttcatgctaagcaactataacaaagaaacctcaacttacagtggccc

SEQ ID NO: 631846 - DNA, 120 bp, Artificial Sequence
  ENSG00000179869_153 (sequence is synthesized)
agacaagacacattttttcctctcgctaaattcatgtcagtgggctgtgcatcatcaggccaaccaaggccttgggttctttccaccgtgccaccatcaccatcatcatggttgatgttg

SEQ ID NO: 631847 - DNA, 120 bp, Artificial Sequence
  ENSG00000179873_0 (sequence is synthesized)
cgaccagccaaggagacctggtggcagggttgatctcatatttcttgtgcctcaaaatcccttctctgaagtctgccttccctggagaagcaagatggcagaatcggattctactgactt

SEQ ID NO: 631848 - DNA, 120 bp, Artificial Sequence
  ENSG00000179873_1 (sequence is synthesized)
tgacctgctgtggtatctagagaatctcagtgacaaggaatttcagagttttaagaagtatctggcacgcaagattcttgatttcaaactgccacagtttccactgatacagatgacaaa

SEQ ID NO: 631849 - DNA, 120 bp, Artificial Sequence
  ENSG00000179873_2 (sequence is synthesized)
agaagaactggctaacgtgttgccaatctcttatgagggacagtatatatggaatatgctcttcagcatattttcaatgatgcgtaaggaagatctttgtaggaagatcattggcagacg

SEQ ID NO: 631850 - DNA, 120 bp, Artificial Sequence
  ENSG00000179873_3 (sequence is synthesized)
aaaccgcaatcaggaggcatgcaaagctgtcatgaggagaaaattcatgctgcaatgggaaagtcacacttttggaaaatttcattataaattttttcgtgacgtttcgtcagatgtgtt

SEQ ID NO: 631851 - DNA, 120 bp, Artificial Sequence
  ENSG00000179873_4 (sequence is synthesized)
ctacatacttcaattagcctatgattctaccagctattattcagcaaacaatctcaatgtgttcctgatgggagagagagcatctggaaaaactattgttataaatctggctgtgttgag

SEQ ID NO: 631852 - DNA, 120 bp, Artificial Sequence
  ENSG00000179873_5 (sequence is synthesized)
gtggatcaagggtgagatgtggcagaacatgatctcgtacgtcgttcacctcactgctcacgaaataaaccagatgaccaacagcagcttggctgagctaatcgccaaggactggcctga

SEQ ID NO: 631853 - DNA, 120 bp, Artificial Sequence
  ENSG00000179873_6 (sequence is synthesized)
cggccaggctcccattgcagacatcctgtctgatcccaagaaactccttttcatcctcgaggacttggacaacataagattcgagttaaatgtcaatgaaagtgctttgtgtagtaacag

SEQ ID NO: 631854 - DNA, 120 bp, Artificial Sequence
  ENSG00000179873_7 (sequence is synthesized)
cacccagaaagttcccattccagttctcctggtcagtttgctgaagagaaaaatggctccaggctgctggttcctcatctcctcaaggcccacacgtgggaataatgtaaaaacgttctt

SEQ ID NO: 631855 - DNA, 120 bp, Artificial Sequence
  ENSG00000179873_8 (sequence is synthesized)
gaaagaggtagattgctgcacgaccttgcagctgtcgaatgggaagagggagatatattttaactctttctttaaagaccgccagagggcgtcggcagccctccagcttgtacatgagga

SEQ ID NO: 631856 - DNA, 120 bp, Artificial Sequence
  ENSG00000179873_9 (sequence is synthesized)
tgaaatactcgtgggtctgtgccgagtcgccatcttatgctggatcacgtgtactgtcctgaagcggcagatggacaaggggcgtgacttccagctctgctgccaaacacccactgatct

SEQ ID NO: 631857 - DNA, 120 bp, Artificial Sequence
  ENSG00000179873_10 (sequence is synthesized)
acatgcccactttcttgctgatgcgttgacatcagaggctggacttactgccaatcagtatcacctaggtctcctaaaacgtctgtgtttgctggctgcaggaggactgtttctgagcac

SEQ ID NO: 631858 - DNA, 120 bp, Artificial Sequence
  ENSG00000179873_11 (sequence is synthesized)
cctgaatttcagtggtgaagacctcagatgtgttgggtttactgaggctgatgtctctgtgttgcaggccgcgaatattcttttgccgagcaacactcataaagaccgttacaagttcat

SEQ ID NO: 631859 - DNA, 120 bp, Artificial Sequence
  ENSG00000179873_12 (sequence is synthesized)
acacttgaacgtccaggagttttgtacagccattgcatttctgatggcagtacccaactatctgatcccctcaggcagcagagagtataaagagaagagagaacaatactctgactttaa

SEQ ID NO: 631860 - DNA, 120 bp, Artificial Sequence
  ENSG00000179873_13 (sequence is synthesized)
tcaagtgtttactttcatttttggtcttctaaatgcaaacaggagaaagattcttgagacatcctttggataccagctaccgatggtagacagcttcaagtggtactcggtgggatacat

SEQ ID NO: 631861 - DNA, 120 bp, Artificial Sequence
  ENSG00000179873_14 (sequence is synthesized)
tctctatgagaatcgggaagaagaatttgtgaagacgattgtggatgctctcatggaggttacagtttaccttcaatcagacaaggatatgatggtctcattatactgtctggattactg

SEQ ID NO: 631862 - DNA, 120 bp, Artificial Sequence
  ENSG00000179873_15 (sequence is synthesized)
ctgtcacctgaggacacttaagttgagtgttcagcgcatctttcaaaacaaagagccacttataaggccaactgctagtcaaatgaagagccttgtctactggagagagatctgctctct

SEQ ID NO: 631863 - DNA, 120 bp, Artificial Sequence
  ENSG00000179873_16 (sequence is synthesized)
tttttatacaatggagagcctccgggagctgcatatctttgacaatgaccttaatggtatttcagaaaggattctgtctaaagccctggagcattctagctgtaaacttcgcacactcaa

SEQ ID NO: 631864 - DNA, 120 bp, Artificial Sequence
  ENSG00000179873_17 (sequence is synthesized)
gttgtcctatgtctcgactgcttctggttttgaagacttactcaaggctttggctcgtaatcggagcctgacatacctgagtatcaactgtacgtccatttccctaaatatgttttcact

SEQ ID NO: 631865 - DNA, 120 bp, Artificial Sequence
  ENSG00000179873_18 (sequence is synthesized)
tctgcatgacatcctgcacgagcccacatgccaaataagtcatctgagcttgatgaaatgtgatttgcgagccagcgaatgtgaagaaatcgcctctctcctcatcagtggcgggagtct

SEQ ID NO: 631866 - DNA, 120 bp, Artificial Sequence
  ENSG00000179873_19 (sequence is synthesized)
gagaaaactgaccttatccagcaatccgctgaggagcgacgggatgaacatactgtgtgatgccttgcttcatcccaactgcactcttatatcactggtgttagtcttctgctgtctcac

SEQ ID NO: 631867 - DNA, 120 bp, Artificial Sequence
  ENSG00000179873_20 (sequence is synthesized)
tgaaaattgctgcagcgcccttggaagagtgcttctgttcagcccaactctaagacaactagacctgtgtgtgaatcgcttaaaaaattacggagtgttgcatgtgacgtttcccttgct

SEQ ID NO: 631868 - DNA, 120 bp, Artificial Sequence
  ENSG00000179873_21 (sequence is synthesized)
gtttccaacctgtcagttagaggagcttcatctgtctggctgtttctttagcagcgatatctgtcaatatattgccatagttattgctactaatgaaaaactgaggagcctggagattgg

SEQ ID NO: 631869 - DNA, 120 bp, Artificial Sequence
  ENSG00000179873_22 (sequence is synthesized)
gagcaacaaaatagaagatgcaggaatgcagctgctatgtggtggtttgagacatcccaactgcatgttggtgaatattgggctagaagagtgcatgttaaccagtgcctgctgtcgatc

SEQ ID NO: 631870 - DNA, 120 bp, Artificial Sequence
  ENSG00000179873_23 (sequence is synthesized)
tcttgcctctgttcttaccaccaacaaaacactagaaagactcaacttgcttcaaaatcacttgggcaatgatggagttgcaaaacttcttgagagcttgatcagcccagattgtgtact

SEQ ID NO: 631871 - DNA, 120 bp, Artificial Sequence
  ENSG00000179873_24 (sequence is synthesized)
taaggtagttgggcttccattaactggcctgaacacacaaacccagcagttgctgatgactgtaaaggaaagaaaacccagtttgatctttctgtctgaaacttggtctttaaaggaagg

SEQ ID NO: 631872 - DNA, 120 bp, Artificial Sequence
  ENSG00000179873_25 (sequence is synthesized)
cagagaaattggtgtgacacctgcttctcagccaggttcaataatacctaattctaatttggattacatgtttttcaaatttcccagaatgtctgcagccatgagaacgtcaaatacagc

SEQ ID NO: 631873 - DNA, 120 bp, Artificial Sequence
  ENSG00000179873_26 (sequence is synthesized)
atctaggcaacccctttgatcatgttgtacgtaaacagtatttattataaattactaccgtgactgggatgcaagagaattaggactataattttcctatttgatgtgtgtgtgtgtgtg

SEQ ID NO: 631874 - DNA, 87 bp, Artificial Sequence
  ENSG00000179873_27 (sequence is synthesized)
ttgatccagtcaaccacttcaaattcctacactgtctcaagagtattaaaaggattatatgaagtaataaaggataaaatgcattgg

SEQ ID NO: 631875 - DNA, 120 bp, Artificial Sequence
  ENSG00000179873_28 (sequence is synthesized)
agatccagaaaatatgtgaagcgaaacgcccaccgccccttgaggggctgttctagacctttgctcctggtgtcgtatagagcgggggatatttcaagctggagatccgttttcttgtcc

SEQ ID NO: 631876 - DNA, 120 bp, Artificial Sequence
  ENSG00000179873_29 (sequence is synthesized)
cagtgaacaggtgcactatgttgaaataagagtggtgacggaggccttgtttatcttgtatcttattgtaaaaggtcatcaagaacccaccttggccaatcaagagaggagtcagctggc

SEQ ID NO: 631877 - DNA, 66 bp, Artificial Sequence
  ENSG00000179873_30 (sequence is synthesized)
tgacttcctcaacggctttcactttcattccaaatagaatacacaggccaacgcgacggctcacgc

SEQ ID NO: 631878 - DNA, 83 bp, Artificial Sequence
  ENSG00000179873_31 (sequence is synthesized)
aagtagctgggatttcaggccctcaacggctttcactttcattccaaatagaatacacaggccaacgcgacggctcacgcctg

SEQ ID NO: 631879 - DNA, 120 bp, Artificial Sequence
  ENSG00000179873_32 (sequence is synthesized)
ataaacacagggcgttcatctaccccactaactggagagaaggaaaacgctgggtaaatagaatggagaggcctggctgtgatcgatcagcctcaagaaaggagacagggtaaaagggag

SEQ ID NO: 631880 - DNA, 120 bp, Artificial Sequence
  ENSG00000179873_33 (sequence is synthesized)
aaagaaaaggaagacccaaagtaacccaggaaatcagcacatagaagagacgaacagcccagcacgaagcgctgactcaccgctccacgccttcctggtccttaatgattggcggctgga

SEQ ID NO: 631881 - DNA, 120 bp, Artificial Sequence
  ENSG00000179886_0 (sequence is synthesized)
gccccagcccccgtccccgctgcacggccgccgccccccgcgcccgggccgcggccccgcgtggccgtgaagatggccttccgcaaggcctactccatcaaggacaagctgcaggccatc

SEQ ID NO: 631882 - DNA, 120 bp, Artificial Sequence
  ENSG00000179886_1 (sequence is synthesized)
ctccatcaaggacaagctgcaggccatcgagcgcgtcaagggcggcgagcggcaggccagtgtgtgccgcgacttcggcgtgccgggcgggacgctgcgcggctggctcaaggacgagcc

SEQ ID NO: 631883 - DNA, 120 bp, Artificial Sequence
  ENSG00000179886_2 (sequence is synthesized)
caagctgcgctggttcctggagcagctgggcggtgaggtgggcactcagcgcaagaagatgcggctggccaacgaggaggagatcgaccgcgccgtgtacgcctggttcctggcgctgcg

SEQ ID NO: 631884 - DNA, 120 bp, Artificial Sequence
  ENSG00000179886_3 (sequence is synthesized)
ccagcacggggtgccgctgtctggcccgctcatccaggcgcaggccgaggccttcgcgcgccagatctacgggcccgagtgcaccttcaaggccagccacggctggttctggcgctggca

SEQ ID NO: 631885 - DNA, 120 bp, Artificial Sequence
  ENSG00000179886_4 (sequence is synthesized)
ggctggttctggcgctggcagaagcgccacggcatctccagccagcgcttctacggcgaggccgggcccccagccccgagccccgcgcccggcccgcccgtcaaggaggagcccgcgctg

SEQ ID NO: 631886 - DNA, 120 bp, Artificial Sequence
  ENSG00000179886_5 (sequence is synthesized)
gcccgaccgcgccccggccccgccgcccccggccgagggcggctacggggacgagcagatttacagcgccagcgtcaccggcctctactggaagctgcttccggagcaggctgcgccccc

SEQ ID NO: 631887 - DNA, 120 bp, Artificial Sequence
  ENSG00000179886_6 (sequence is synthesized)
gggcgcaggggaccccggggcggggggctgtggccggcgctggcggggcgaccgcgtaacggtgctgctggccgcaaacctgaccggcagccacaagctgaagccgctggtcatcgggcg

SEQ ID NO: 631888 - DNA, 120 bp, Artificial Sequence
  ENSG00000179886_7 (sequence is synthesized)
gctgccggacccgcccagcctgcgccaccacaaccaggacaagttcccggcctcctaccgctacagccccgacgcctggctcagccgcccgctgctgcggggctggttctttgaggaatt

SEQ ID NO: 631889 - DNA, 120 bp, Artificial Sequence
  ENSG00000179886_8 (sequence is synthesized)
tgtcccaggcgtcaaacgctacctgcgccgaagctgcctgcagcagaaggccgtgctgctggtggcccacccgccctgcccaagcccagctgccagtatgcccgccctggacagcgagga

SEQ ID NO: 631890 - DNA, 120 bp, Artificial Sequence
  ENSG00000179886_9 (sequence is synthesized)
tgcccccgtgcggtgcaggccggagcccctcggtcccccggaggagctgcagacaccggatggcgctgtgcgggtgctgttcctgtccaaaggcagcagccgggcacatatccccgcacc

SEQ ID NO: 631891 - DNA, 120 bp, Artificial Sequence
  ENSG00000179886_10 (sequence is synthesized)
gctggagcagggcgtggtggccgccttcaaacagctgtacaagcgcgagctgctgcgactggctgtgtcctgcgccagcggctccccgctggacttcatgcgcagcttcatgctcaagga

SEQ ID NO: 631892 - DNA, 120 bp, Artificial Sequence
  ENSG00000179886_11 (sequence is synthesized)
catgctctacctggctggcctctcctgggacctggtgcaggcgggcagcattgagcgctgctggctgctgggcctgcgggctgccttcgagccccggcccggcgaggacagtgctgggca

SEQ ID NO: 631893 - DNA, 120 bp, Artificial Sequence
  ENSG00000179886_12 (sequence is synthesized)
gccggcccaggccgaggaagccgccgagcacagcagggtgctcagcgacctcacccacctggcggctctggcctacaagtgcctggctccggaggaggttgcggagtggctgcacctgga

SEQ ID NO: 631894 - DNA, 120 bp, Artificial Sequence
  ENSG00000179886_13 (sequence is synthesized)
cgatgatgggggtccgcccgagggctgcagggaggaggtgggcccagccctgccccctgcagcgcctccggccccagccagtctgccctctgccatggggggcggagaggacgaggagga

SEQ ID NO: 631895 - DNA, 120 bp, Artificial Sequence
  ENSG00000179886_14 (sequence is synthesized)
ggccaccgactatggagggacctcagtgccgactgccggggaggccgtgcgggggctagaaacagctctgcggtggctggagaaccaggaccccagagaggtggggccactgaggctggt

SEQ ID NO: 631896 - DNA, 120 bp, Artificial Sequence
  ENSG00000179886_15 (sequence is synthesized)
gcagttgcgctcactcatcagcatggcccggaggctggggggcatcgggcataccccagcaggcccctatgacggtgtgtgaccaggccagcccagtgacctttctcctgctgcacttgg

SEQ ID NO: 631897 - DNA, 120 bp, Artificial Sequence
  ENSG00000179886_16 (sequence is synthesized)
agggaggggacatacacacagtctcccatctctcctcccctccccctggggtggcccaccgcatgggtacagggggttccaggaatccaaatccagcatggcttggaggagctctgttgg

SEQ ID NO: 631898 - DNA, 120 bp, Artificial Sequence
  ENSG00000179886_17 (sequence is synthesized)
tgagaggtcgccctgcctcactggcaccctgggggcacagctggaagagaggcctggcccatgctcctctcagggcaggcacatgtacggggcatacaaggcacagcgcctgttggaaca

SEQ ID NO: 631899 - DNA, 120 bp, Artificial Sequence
  ENSG00000179886_18 (sequence is synthesized)
ggtggctgtgttcctgctctggcccccgtggggctgggcctccgcccctgcaccagtcacatgcactggacgagggccgaaactcctgtctgctatcgagccctggtgctatgtggcccc

SEQ ID NO: 631900 - DNA, 120 bp, Artificial Sequence
  ENSG00000179886_19 (sequence is synthesized)
ggagccacagcacaatcatctcagtggcgaagcacaccacttgattctatttttttttaacacattaaatctgtttttaaagatactcttcagaggggccgtgagaacaggggccgggtg

SEQ ID NO: 631901 - DNA, 120 bp, Artificial Sequence
  ENSG00000179886_20 (sequence is synthesized)
ggctggtctcgggccgccctgcggtttctctggaggtcagaggccccaggtactggagcatcactgtggagtgggaggggtggagccctgtattaggttctgggtgcagcagggaggtgt

SEQ ID NO: 631902 - DNA, 120 bp, Artificial Sequence
  ENSG00000179886_21 (sequence is synthesized)
agagtttcccctgcttcctcatcagccacagaccattctgtccagtcccagggcctggagccacctgacttacctggaagcaggccctggcattagcccccagggcaatacgcagtgcca

SEQ ID NO: 631903 - DNA, 120 bp, Artificial Sequence
  ENSG00000179886_22 (sequence is synthesized)
ccctctgtgggctctcctccccaccctcagacttttctgcctctcctgggactgccaaggatgtggctgacaagctgctcctgggaggcctactttgaaaggaggaaagggccccagggc

SEQ ID NO: 631904 - DNA, 120 bp, Artificial Sequence
  ENSG00000179886_23 (sequence is synthesized)
ctgtcaaaccctggttctgttctgctctggccaggtctagacctacagtccttctggttggactggggccagggatgcccatgcctcctcaggtagggtgggaactgcctttgcagagat

SEQ ID NO: 631905 - DNA, 120 bp, Artificial Sequence
  ENSG00000179886_24 (sequence is synthesized)
gctgcccgagctggtgtgaggggcagggagctggcctgcttgcctccaggtgttgacccctcgtccccatctgcccccagtgtcctcctaggagagggaaccttgaaaacccagagttgt

SEQ ID NO: 631906 - DNA, 120 bp, Artificial Sequence
  ENSG00000179886_25 (sequence is synthesized)
ggagtgcaggggtaggctggaggcctgcacggggaagggaagggctgtgcaccagcttggcagtggggcagctggagggtgtcccccaaaagtgacctttatacaggtccaggaacaaac

SEQ ID NO: 631907 - DNA, 120 bp, Artificial Sequence
  ENSG00000179886_26 (sequence is synthesized)
agttccttggaactgcccgcaagtgaagaaatatatacatatatatgtatatatctatatctcaaaatctgagagctcagggaggccgtggaaatttggggaagaagaaacagactccct

SEQ ID NO: 631908 - DNA, 120 bp, Artificial Sequence
  ENSG00000179886_27 (sequence is synthesized)
gagcagagctcagggcagcagctccaggcatgcctgctgagcccatcaggccaccgccacctgcaggaagagcctctggcctgaactgctggggatgggctgcagaaagcctgagacatt

SEQ ID NO: 631909 - DNA, 120 bp, Artificial Sequence
  ENSG00000179886_28 (sequence is synthesized)
tgggccagcaccttcccaggggcacaggcccccaaggcggggacaccacctctgctctgccaggcctgcctccagggctctgaggagaagctgacttcacggccgcggtgccagtgaggg

SEQ ID NO: 631910 - DNA, 120 bp, Artificial Sequence
  ENSG00000179886_29 (sequence is synthesized)
ctgcatagccaggccttgtctgtagtctgggcggcccgtggcgctgcccttcagcccaactactcattgccgctgcgtctttggcgaggctttcatttccaacctttcttcccatctcag

SEQ ID NO: 631911 - DNA, 120 bp, Artificial Sequence
  ENSG00000179886_30 (sequence is synthesized)
cccttttgttggcccgggtcccaggaggctggtgtcggtgagggcaggcccgctcctctcatcggggtggctgtggcctgtcccccagtccctcaatggccactttctataaacaaggca

SEQ ID NO: 631912 - DNA, 79 bp, Artificial Sequence
  ENSG00000179886_31 (sequence is synthesized)
tcccccagtccctcaatggccactttctataaacaaggcagcactaatttttgctataagataaaagaggccaggcacg

SEQ ID NO: 631913 - DNA, 75 bp, Artificial Sequence
  ENSG00000179886_32 (sequence is synthesized)
cagtctgcaggtgcacgctggtggggacattaggagcctgtcaagagtgggtctgcctgctggcacttactagac

SEQ ID NO: 631914 - DNA, 120 bp, Artificial Sequence
  ENSG00000179886_33 (sequence is synthesized)
gcctgtcaagagtgggtctgcctgctggcacttactagacgggaaataccccctaaagagggcttaaaaagcatcttctccctagcacggggcatgctggcacagggtgctgtgtgacag

SEQ ID NO: 631915 - DNA, 120 bp, Artificial Sequence
  ENSG00000179886_34 (sequence is synthesized)
aggcttggccgctgggccccgctgctgagaaggctgctctgcccatgcctggccctgtgggcagtgccagccatggatccctgagaccctgggctggaacctggggccccgtcccagccc

SEQ ID NO: 631916 - DNA, 120 bp, Artificial Sequence
  ENSG00000179886_35 (sequence is synthesized)
tacctgcagctcactaaccctctctgggttctgctcagtgtctgaagtgatggaaagaccccagggttggtggctgtagcggcccccaggggtggcagaaccctttgggaggccaagtgt

SEQ ID NO: 631917 - DNA, 120 bp, Artificial Sequence
  ENSG00000179886_36 (sequence is synthesized)
tctttcccaaagctgcgcgggtgccatcgcctgccaggccctggctgtggtgacagacgtgggctggggtgaggctgcatctgcttcctctaacagccgtggctgcctgcgggctctggc

SEQ ID NO: 631918 - DNA, 120 bp, Artificial Sequence
  ENSG00000179886_37 (sequence is synthesized)
ctccgctctggcagattctgcacattccctgcaggcgcaggggtgggtgggggtgcctgtggcctcggaggtacagccagctgtcctcagctcagatggcccccaagagcccccagctcc

SEQ ID NO: 631919 - DNA, 120 bp, Artificial Sequence
  ENSG00000179886_38 (sequence is synthesized)
tgttcactgctcttccagttagtgacccccgtgtcagcatcattgtcagagttcctgggcttgtgggggctggagaagggaaggcgctgaggagggaaagatgagtgcaggttttgttga

SEQ ID NO: 631920 - DNA, 120 bp, Artificial Sequence
  ENSG00000179886_39 (sequence is synthesized)
aaccacccgacccgcgttttcagggggacgaggccactgccttggcccaaggacctgcaggcttgggggaccccctcgatgtccactgggctgcggatgaaacatcacactgtggtagga

SEQ ID NO: 631921 - DNA, 120 bp, Artificial Sequence
  ENSG00000179886_40 (sequence is synthesized)
aaggaaggggagcacccccagacgggggggtcctgcagagaccccaaccccttacctacctagttgagacacccatggggagcagccccaacagcatgtcggagtccctaggcttgtggg

SEQ ID NO: 631922 - DNA, 120 bp, Artificial Sequence
  ENSG00000179886_41 (sequence is synthesized)
gtcatgctctgttgagggcccttcctctaactggcgagcttgtttacagctgagctcgcctggtcagatgggcccagtggctttatctaataaaggctggacatgtccacttcatgagca

SEQ ID NO: 631923 - DNA, 120 bp, Artificial Sequence
  ENSG00000179889_0 (sequence is synthesized)
ctctcaaccatcaggttcggcagcccgcggcgccgcctggcagctcctcctcttctccgccccgccggccgcgggcgcgggggacgtcagcgctgccagcgtggaaggagctgcggggcg

SEQ ID NO: 631924 - DNA, 120 bp, Artificial Sequence
  ENSG00000179889_1 (sequence is synthesized)
cgggaggaggaagtagagcccgggaccgccaggccaccaccggccgcctcagccatggacgcgtccctggagaagatagcagaccccacgttagctgaaatgggaaaaaacttgaaggag

SEQ ID NO: 631925 - DNA, 120 bp, Artificial Sequence
  ENSG00000179889_2 (sequence is synthesized)
gcagtgaagatgctggaggacagtcagagaagaacagaagaggaaaatggaaagaagctcatatccggagatattccaggcccactccagggcagtgggcaagatatggtgagcatcctc

SEQ ID NO: 631926 - DNA, 120 bp, Artificial Sequence
  ENSG00000179889_3 (sequence is synthesized)
cagttagttcagaatctcatgcatggagatgaagatgaggagccccagagccccagaatccaaaatattggagaacaaggtcatatggctttgttgggacatagtctgggagcttatatt

SEQ ID NO: 631927 - DNA, 120 bp, Artificial Sequence
  ENSG00000179889_4 (sequence is synthesized)
tcaactctggacaaagagaagctgagaaaacttacaactaggatactttcagataccaccttatggctatgcagaattttcagatatgaaaatgggtgtgcttatttccacgaagaggaa

SEQ ID NO: 631928 - DNA, 120 bp, Artificial Sequence
  ENSG00000179889_5 (sequence is synthesized)
agagaaggacttgcaaagatatgtaggcttgccattcattctcgatatgaagacttcgtagtggatggcttcaatgtgttatataacaagaagcctgtcatatatcttagtgctgctgct

SEQ ID NO: 631929 - DNA, 120 bp, Artificial Sequence
  ENSG00000179889_6 (sequence is synthesized)
agacctggcctgggccaatacctttgtaatcagctcggcttgcccttcccctgcttgtgccgtgtaccctgtaacactgtgtttggatcccagcatcagatggatgttgccttcctggag

SEQ ID NO: 631930 - DNA, 120 bp, Artificial Sequence
  ENSG00000179889_7 (sequence is synthesized)
aaactgattaaagatgatatagagcgaggaagactgcccctgttgcttgtcgcaaatgcaggaacggcagcagtaggacacacagacaagattgggagattgaaagaactctgtgagcag

SEQ ID NO: 631931 - DNA, 120 bp, Artificial Sequence
  ENSG00000179889_8 (sequence is synthesized)
tatggcatatggcttcatgtggagggtgtgaatctggcaacattggctctgggttatgtctcctcatcagtgctggctgcagccaaatgtgatagcatgacgatgactcctggcccgtgg

SEQ ID NO: 631932 - DNA, 120 bp, Artificial Sequence
  ENSG00000179889_9 (sequence is synthesized)
ctgggtttgccagctgttcctgcggtgacactgtataaacacgatgaccctgccttgactttagttgctggtcttacatcaaataagcccacagacaaactccgtgccctgcctctgtgg

SEQ ID NO: 631933 - DNA, 120 bp, Artificial Sequence
  ENSG00000179889_10 (sequence is synthesized)
ttatctttacaatacttgggacttgatgggtttgtggagaggatcaagcatgcctgtcaactgagtcaacggttgcaggaaagtttgaagaaagtgaattacatcaaaatcttggtggaa

SEQ ID NO: 631934 - DNA, 120 bp, Artificial Sequence
  ENSG00000179889_11 (sequence is synthesized)
gatgagctcagctccccagtggtggtgttcagatttttccaggaattaccaggctcagatccggtgtttaaagccgtcccagtgcccaacatgacaccttcaggagtcggccgggagagg

SEQ ID NO: 631935 - DNA, 120 bp, Artificial Sequence
  ENSG00000179889_12 (sequence is synthesized)
cactcgtgtgacgcgctgaatcgctggctgggagaacagctgaagcagctggtgcctgcaagcggcctcacagtcatggatctggaagctgagggcacgtgtttgcggttcagccctttg

SEQ ID NO: 631936 - DNA, 120 bp, Artificial Sequence
  ENSG00000179889_13 (sequence is synthesized)
atgaccgcagcagttttaggaactcggggagaggatgtggatcagctcgtagcctgcatagaaagcaaactgccagtgctgtgctgtacgctccagttgcgtgaagagttcaagcaggaa

SEQ ID NO: 631937 - DNA, 120 bp, Artificial Sequence
  ENSG00000179889_14 (sequence is synthesized)
gtggaagcaacagcaggtctcctatatgttgatgaccctaactggtctggaataggggttgtcaggtatgaacatgctaatgatgataagagcagtttgaaatcagatcccgaaggggaa

SEQ ID NO: 631938 - DNA, 120 bp, Artificial Sequence
  ENSG00000179889_15 (sequence is synthesized)
aacatccatgctggactcctgaagaagttaaatgaactggaatctgacctaacctttaaaataggccctgagtataagagcatgaagagctgcctttatgtcggcatggcgagcgacaac

SEQ ID NO: 631939 - DNA, 120 bp, Artificial Sequence
  ENSG00000179889_16 (sequence is synthesized)
gtcgatgctgctgagctcgtggagaccattgcggccacagcccgggagatagaggagaactcgaggcttctggaaaacatgacagaagtggttcggaaaggcattcaggaagctcaagtg

SEQ ID NO: 631940 - DNA, 120 bp, Artificial Sequence
  ENSG00000179889_17 (sequence is synthesized)
gagctgcagaaggcaagtgaagaacggcttctggaagagggggtgttgcggcagatccctgtagtgggctccgtgctgaattggttttctccggtccaggctttacagaagggaagaact

SEQ ID NO: 631941 - DNA, 120 bp, Artificial Sequence
  ENSG00000179889_18 (sequence is synthesized)
tttaacttgacagcaggctctctggagtccacagaacccatatatgtctacaaagcacaaggtgcaggagtcacgctgcctccaacgccctcgggcagtcgcaccaagcagaggcttcca

SEQ ID NO: 631942 - DNA, 120 bp, Artificial Sequence
  ENSG00000179889_19 (sequence is synthesized)
tgctttgagtgagaccagctcagtcagtcacattgaagacttagaaaaggtggagcgcctatccagtgggccggagcagatcaccctcgaggccagcagcactgagggacacccaggggc

SEQ ID NO: 631943 - DNA, 120 bp, Artificial Sequence
  ENSG00000179889_20 (sequence is synthesized)
tcccagccctcagcacaccgaccagaccgaggccttccagaaaggggtcccacacccagaagatgaccactcacaggtagaaggaccggagagcttaagatgagactcattgtgtggttt

SEQ ID NO: 631944 - DNA, 120 bp, Artificial Sequence
  ENSG00000179889_21 (sequence is synthesized)
gagactgtactgagtattgtttcagggaagatgaagttctattggaaatgtgaactgtgccacatactaatataaattactgttgtttgtgcttcactgggattttggcacaaatatgtg

SEQ ID NO: 631945 - DNA, 120 bp, Artificial Sequence
  ENSG00000179889_22 (sequence is synthesized)
cctgaaaggtaggctttctaggaggggagtcagcttgtctaacttcatgtacatgtagaaccacgtttgctgtcctactacgacttttccctaagttaccataaacacattttattcaca

SEQ ID NO: 631946 - DNA, 120 bp, Artificial Sequence
  ENSG00000179889_23 (sequence is synthesized)
aaaaacacttcgaatttcaagtgtctaccagtagcacccttgctctttctaaacataagcctaagtatatgaggttgcccgtggcaactttttggtaaaacagcttttcattagcactct

SEQ ID NO: 631947 - DNA, 120 bp, Artificial Sequence
  ENSG00000179889_24 (sequence is synthesized)
ccaggttctctgcaacacttcacagaggcgagactggctgtatcctttgctgtcggtctttagtacgatcaagttgcaatatacagtgggactgctagacttgaaggagagcagtgattg

SEQ ID NO: 631948 - DNA, 120 bp, Artificial Sequence
  ENSG00000179889_25 (sequence is synthesized)
tgggattgtaaataagagcatcagaagccctccccagctactgctcttcgtggagacttagtaaggactgtgtctacttgagctgtggcaaggctgctgtctgggactgtcctctgccac

SEQ ID NO: 631949 - DNA, 120 bp, Artificial Sequence
  ENSG00000179889_26 (sequence is synthesized)
aaggccatttctcccattatataccgtttgtaaagagaaactgtaaagtctcctcctgaccatatatttttaaatactggcaaagcttttaaaattggcacacaagtacagactgtgctc

SEQ ID NO: 631950 - DNA, 120 bp, Artificial Sequence
  ENSG00000179889_27 (sequence is synthesized)
atttctgtttagtatctgaaaacctgatagatgctacccttaagagcttgctcttccgtgtgctacgtagcacccacctggttaaaatctgaaaacaagtacccctttgacctgtctccc

SEQ ID NO: 631951 - DNA, 120 bp, Artificial Sequence
  ENSG00000179889_28 (sequence is synthesized)
actgaagcttctactgccctggcagctcgcctgggcccaactcagaaacaggagccagcagagcactctctcacgctgatccagccgggcaccctgcttaagtcagtagaagctcgctgg

SEQ ID NO: 631952 - DNA, 120 bp, Artificial Sequence
  ENSG00000179889_29 (sequence is synthesized)
cactgcccgttcctacttttccgaagtactgcgtcactttgtcgtaagtaatggcccctgtgccttcttaatccagcagtcaagcttttgggagacctgaaaatgggaaaattcacactg

SEQ ID NO: 631953 - DNA, 120 bp, Artificial Sequence
  ENSG00000179889_30 (sequence is synthesized)
ggtttctggactgtagtattggaagccttagttatagtatattaagcctataattatactctgatttgatgggatttttgacatttacacttgtcaaaatgcagggggttttttttggtg

SEQ ID NO: 631954 - DNA, 120 bp, Artificial Sequence
  ENSG00000179889_31 (sequence is synthesized)
cagatgattaaacagtcttccctatttggtgcaatgaagtatagcagataaaatgggggaggggtaaattatcaccttcaagaaaattacatgtttttatatatatttggaattgttaaa

SEQ ID NO: 631955 - DNA, 120 bp, Artificial Sequence
  ENSG00000179889_32 (sequence is synthesized)
ttggttttgctgaaacatttcacccttgagatattatttgaatgttggtttcaataaaggttcttgaaattgttaccagtgaattcagtttataaatcttattacaaaagacttacccac

SEQ ID NO: 631956 - DNA, 120 bp, Artificial Sequence
  ENSG00000179889_33 (sequence is synthesized)
gtacctgaaatagctgccgatagaccagtgagaggtaggttctcctctgcccgttattaccgaccaaaaaaaaaactggacatcaattttttagtaaaccaaaaaataagtctcaacaaa

SEQ ID NO: 631957 - DNA, 120 bp, Artificial Sequence
  ENSG00000179889_34 (sequence is synthesized)
tgcctttgccaaaataaggttttattttgaaagtcatttgatgaaagtcatttgaaagacactgaggagggaaggaggcctaagacccaacagatgtaggatccagatctggattcgtgc

SEQ ID NO: 631958 - DNA, 120 bp, Artificial Sequence
  ENSG00000179889_35 (sequence is synthesized)
cagccccaccaatggtctgtcaggccaagaaggtgctttctttggtaattcatgttttttaacttcctggagaagagatcttttcccacaagccatcttcattttttttgtagagtaggg

SEQ ID NO: 631959 - DNA, 120 bp, Artificial Sequence
  ENSG00000179889_36 (sequence is synthesized)
ctttatttccagaaaacagtgtgtgagctggagatgggtgtttttttaaaaacatcaaggtagatctaatatgttcaacaaagtggggtggctcagccagaggcgaagtggaaagattct

SEQ ID NO: 631960 - DNA, 120 bp, Artificial Sequence
  ENSG00000179889_37 (sequence is synthesized)
gaaaacacaagatggtgggcattagagaagccaaccttactgtcccctgctgtgataaagatgtcaaagtatctttgttcttggacacaaatatatataataaaatacgttaagaaatga

SEQ ID NO: 631961 - DNA, 120 bp, Artificial Sequence
  ENSG00000179889_38 (sequence is synthesized)
ggtgagaatggcagtcacccccctttcctttcaggtccccgtccatcaccatccgacctgctggtgagggtgacgcgtgctcgtgtatgggaactgaggcccacaggaggagccgccctg

SEQ ID NO: 631962 - DNA, 120 bp, Artificial Sequence
  ENSG00000179889_39 (sequence is synthesized)
ccagtgctgggcctgctctggagttctgttccccattgcgttaccacctcacgagctgggtcacctctggcaagtccttctggcattgctccctcactttccttgctgctgtataaggct

SEQ ID NO: 631963 - DNA, 120 bp, Artificial Sequence
  ENSG00000179889_40 (sequence is synthesized)
gtgagacaacaggcaaaaggtgggctgcagggcagctgcggtgggttctggtgagcctgggcagcacagccgggagccccaggcagagtctgccgagcatctgcagctggcagtgtggag

SEQ ID NO: 631964 - DNA, 120 bp, Artificial Sequence
  ENSG00000179889_41 (sequence is synthesized)
ccaggcctgcactttgatagcgttttgggcactgaatagcagctctaggatttgagtctgaagggtcttgtgaacagtgtgggatggcggcagcagcagttctagccaatgctggacacg

SEQ ID NO: 631965 - DNA, 120 bp, Artificial Sequence
  ENSG00000179889_42 (sequence is synthesized)
cccagcctagcagggttggcagataagtcctggtacatccatgctggggctcagcacagctgtgagagaccacagagctgagtgtctcaagcagaaaggaactggtcataaacgaaatga

SEQ ID NO: 631966 - DNA, 120 bp, Artificial Sequence
  ENSG00000179889_43 (sequence is synthesized)
atcaatgcaggttactaagcagtgtcaagtagcatgttttatgacaacaactacaactccctgcccgccactaggagaaaagacgctgggggcagaccacatgtcagcagtgggtgtcgc

SEQ ID NO: 631967 - DNA, 120 bp, Artificial Sequence
  ENSG00000179889_44 (sequence is synthesized)
tcgcttagtaatatattgtgggtcattgttattttcttctttttgtttacttgtatttcctaaatttttctacaatgaacttgtattaataagaaaaaaccataaaatttactgttttta

SEQ ID NO: 631968 - DNA, 120 bp, Artificial Sequence
  ENSG00000179889_45 (sequence is synthesized)
ataaacccagagaaacaagacctccaagacggccaggcactggggcacacgccggtaacacagcaccgtgggagctgagacggaaggatcgcctgagcccaggattttgaaaccaccctg

SEQ ID NO: 631969 - DNA, 120 bp, Artificial Sequence
  ENSG00000179889_46 (sequence is synthesized)
ggcaacacagtgagaccccgtatctacaaaaaaatacacattagccaggcatggcggcatgcgcctggggtcccaagtactcgggaggtagaggagagaaaaatcacttgagcccagaga

SEQ ID NO: 631970 - DNA, 120 bp, Artificial Sequence
  ENSG00000179889_47 (sequence is synthesized)
ggtcaaggctacagggagctgagatcgcatcactgtactccagctggggtgaaacggcgagactctacctcaaaaataaataaatacatacataattaataaataaaacatcaaagacca

SEQ ID NO: 631971 - DNA, 120 bp, Artificial Sequence
  ENSG00000179889_48 (sequence is synthesized)
agcttagatcagtgccttctctgaacagcgttcactaagcagcccccaaccccaaaacccccaagtccccgggcgccgaggacgctgcgagtcctgcgcatgcgcaaggttgcccactcg

SEQ ID NO: 631972 - DNA, 120 bp, Artificial Sequence
  ENSG00000179889_49 (sequence is synthesized)
ctcaccgcctccttggcgaatggcctgttccattctcgagggatgccggcgggaggtgaggcgggagacttggaagcctgggcccggaagtgagatagcagaccccacgttagctgaaat

SEQ ID NO: 631973 - DNA, 120 bp, Artificial Sequence
  ENSG00000179889_50 (sequence is synthesized)
atttcttttgtcaaggtagttttattttctagttcaggtacatcagtgagtaatagtagagatacattcttggctgttttaggagagttaagagaacatttcatttaaatgtaaatgttt

SEQ ID NO: 631974 - DNA, 120 bp, Artificial Sequence
  ENSG00000179889_51 (sequence is synthesized)
aaaatcaaagaaatgttcctgcatatgtacagtttttacctttaattttgtttaactgatttttctagtcttcaaggaaaactatttgattttcacatctatgatgagagaaaacagaaa

SEQ ID NO: 631975 - DNA, 120 bp, Artificial Sequence
  ENSG00000179889_52 (sequence is synthesized)
tcagccatggacgcgtccctggagaagcagaccccacgttagctgaaatgggaaaaaacttgaaggaggcagtgaagatgctggaggacagtcagagaagaacagaagaggaaaatggaa

SEQ ID NO: 631976 - DNA, 120 bp, Artificial Sequence
  ENSG00000179889_53 (sequence is synthesized)
ggacagccccccacgctggagaattctctggcccaaaatgtcagcagtgttgaggctgagaaatcctggtcaagatcatgtttataacaccagcagttgagtacaaaacgatgcaaagtg

SEQ ID NO: 631977 - DNA, 120 bp, Artificial Sequence
  ENSG00000179889_54 (sequence is synthesized)
aggtgcgtcactagtatttccagcctttcactccatgaatagtactttgtgattattatacttctaccttgatgattgcaacaggctgctggaaagagtttggtgaacaatccaccgggc

SEQ ID NO: 631978 - DNA, 120 bp, Artificial Sequence
  ENSG00000179889_55 (sequence is synthesized)
gttcagaatctcatgcatggagatgaagatgaggagccccagagccccaggtaatgaacctggcagcttctcttttcaagtaatccaaaatattggagaacaaggtcatatggctttgtt

SEQ ID NO: 631979 - DNA, 120 bp, Artificial Sequence
  ENSG00000179889_56 (sequence is synthesized)
aaggtgtgtctgcctaggcctctatgagcatgttatctgcttgtctttgagtttctgttcgttttacgccggcttttcaatgcaggatttcattgacctgcttttgaaaaattccctcag

SEQ ID NO: 631980 - DNA, 120 bp, Artificial Sequence
  ENSG00000179889_57 (sequence is synthesized)
tgctgtgttactagctcttctgggccccaggtgagaaccttaaacaagtaatgtctttcttggtcttgccacagcttctggaaaacatgacagaagtggttcggaaaggcattcaggaag

SEQ ID NO: 631981 - DNA, 120 bp, Artificial Sequence
  ENSG00000179889_58 (sequence is synthesized)
gttccattctcgagggatgccggcgggaggtgaggcgggagacttggaagcctgggcccggaagtgaggctgctggaaagagtttggtgaacaatccaccgggcatcctccccccttcac

SEQ ID NO: 631982 - DNA, 120 bp, Artificial Sequence
  ENSG00000179889_59 (sequence is synthesized)
ttacacacattgacatttgagaccactgagttcaaagaaagaaaagatgatcataatattcatagcagtcttggcactcacctcattctgccatctcctagctgaggatgggagaatggg

SEQ ID NO: 631983 - DNA, 120 bp, Artificial Sequence
  ENSG00000179889_60 (sequence is synthesized)
cggattattttgttgcctttttgttcctccttgcttattgggcgtgcgcccctatttaaatattaagcaccgcccccctgccgcccgccgccgtacctttaaaagtatcacgttttattt

SEQ ID NO: 631984 - DNA, 120 bp, Artificial Sequence
  ENSG00000179889_61 (sequence is synthesized)
gtctctgtgaaagttaaagatgatagatgtgaaggcacttagcacaggactggccccctaaataattggcagatttgaattcacatcctgcttggtatgaatactgtccacacggtcctt

SEQ ID NO: 631985 - DNA, 120 bp, Artificial Sequence
  ENSG00000179889_62 (sequence is synthesized)
tgaaaagttagtagaaaagatcttgggccactgcttcttgtctttccaagttagcatttcctgttgcggccctaccagtgagtcatcacactcagagccttggaacataagttttattac

SEQ ID NO: 631986 - DNA, 120 bp, Artificial Sequence
  ENSG00000179889_63 (sequence is synthesized)
tagagctatagtactgggattgttggatgcttagagatcttccccctccagggccacccacactcccctacagtaccacagagcctgccaaggacatggatgcttacggtaccctgaccc

SEQ ID NO: 631987 - DNA, 120 bp, Artificial Sequence
  ENSG00000179889_64 (sequence is synthesized)
catggcttgaccaagtcagggtatactgtttgatgcaaaacaggaactcgctgctggattatcataatacataatgcagtggatgttttcaactgttaggaaacccactaatgaagttag

SEQ ID NO: 631988 - DNA, 120 bp, Artificial Sequence
  ENSG00000179889_65 (sequence is synthesized)
tcgtcttcggcctgtctttaataataattaaatatattagaaaatacacagatccagttctcagctgtgcttgtctacatcaccagcaggacttgcatcttgttctgaaagttttgcaaa

SEQ ID NO: 631989 - DNA, 120 bp, Artificial Sequence
  ENSG00000179889_66 (sequence is synthesized)
ggggaggaaagtacttgttgccccctctttttttctatgagtatgaaaaattctagttggccaggcacggtgtctcacgtctgtaatcccaacacttggaaagccaaagtaggaggatta

SEQ ID NO: 631990 - DNA, 120 bp, Artificial Sequence
  ENSG00000179889_67 (sequence is synthesized)
aacatagcaagaccccatctctaaaaaaaccgtttaagtttcaataaatcctgcataatttctgggattcttgaaagcatgggctctctccgcactgagtctagtttcactgcttcttac

SEQ ID NO: 631991 - DNA, 120 bp, Artificial Sequence
  ENSG00000179889_68 (sequence is synthesized)
tccgcactgagtctagtttcactgcttcttactggttttaatctttaatgttagacctatgtttatcccttattaaaatttccccctgctttaatttcaatgtaccagggtcaaacatct

SEQ ID NO: 631992 - DNA, 120 bp, Artificial Sequence
  ENSG00000179889_69 (sequence is synthesized)
caactgaaattaacctctgaactttttagtgtgtttatttacaaatagagcatttctaagcgagtttttgaactcagcatttcattttgaaggcgtctggagtttaatgttacttggtga

SEQ ID NO: 631993 - DNA, 120 bp, Artificial Sequence
  ENSG00000179889_70 (sequence is synthesized)
tggagacttttctgtataaagaacatgagtgggtcattttctgaaccaccttagaaatccaagatgaacgtgtagtcacaatatgcttaacgaaaatgcaactcggttttctgggcattt

SEQ ID NO: 631994 - DNA, 120 bp, Artificial Sequence
  ENSG00000179889_71 (sequence is synthesized)
acaaaagcacagtgcaagcaggcaatttggccagcgtggcgctcagggaggggagttgctgaatgttctgtctgtaggtgccgactctcagctacctaggagaagatgccaacaggtata

SEQ ID NO: 631995 - DNA, 120 bp, Artificial Sequence
  ENSG00000179889_72 (sequence is synthesized)
tatcactcactgagaatggttactatccagggcatatagagaattgcaaatcagtaagaaaaagaacccagctctcggggagagaactgggtgcagtcctatggctgctttctcgccttc

SEQ ID NO: 631996 - DNA, 120 bp, Artificial Sequence
  ENSG00000179889_73 (sequence is synthesized)
atggctgctttctcgccttcagaggtgaggcaaacctctttttgtattgcccatgagacttccagaccttgtatggaactaaagacttaggctttcagctgggcacggtggctcatgcct

SEQ ID NO: 631997 - DNA, 120 bp, Artificial Sequence
  ENSG00000179889_74 (sequence is synthesized)
ggccaacaggagcatagatgacttgaggccaggagcttgagtccagcctggacaacatggcgaaaccccatctctagaaaaaatacaaaaattagccagaggtggtggtgcacacctgta

SEQ ID NO: 631998 - DNA, 120 bp, Artificial Sequence
  ENSG00000179889_75 (sequence is synthesized)
aggctttcctgtgactttctctttactcctggcacacttccagaaagtttgtggtctggagacactcgcagtagctcttttgcccactggttccactgcattgtcttgctaatatttaga

SEQ ID NO: 631999 - DNA, 120 bp, Artificial Sequence
  ENSG00000179889_76 (sequence is synthesized)
ggtttctaatcctgtatcagaagagacatttgatcttttaagctgaaatgctgtggtttgatgttgttttaggtatgaacatgctaatgatgataagagcagtttgaaatcagatcccga

SEQ ID NO: 632000 - DNA, 120 bp, Artificial Sequence
  ENSG00000179902_0 (sequence is synthesized)
gcgcgcccggggtgcgcaaccggcccaacaggcaggcccggggctcgtgtgaagaacacagtggaagcatcctccaagccagccaacaaatttccgttttctactgccctttcgggccag

SEQ ID NO: 632001 - DNA, 120 bp, Artificial Sequence
  ENSG00000179902_1 (sequence is synthesized)
gggttattttatgagcatctccgatgttgcacacgtggcgtgtgaaccgagagaaagaagatggagagatcaccctccagacgtcgtcgcctggaagaggccccaaaattgccatataag

SEQ ID NO: 632002 - DNA, 120 bp, Artificial Sequence
  ENSG00000179902_2 (sequence is synthesized)
aacccaacacaccttgctcagcagcaggaaccctggagtcggctcaactcaacccccacaattacttccatgaggcgggatgcctactattttgatcccgagataccaaaggatgacctg

SEQ ID NO: 632003 - DNA, 120 bp, Artificial Sequence
  ENSG00000179902_3 (sequence is synthesized)
agcagccttgtacaaccaccacactgggacattcaagaacaaaagtgagatactgttaaaccagaaaaccacgcaggatacctatagaaccaagatccaattccctggagaatttttaac

SEQ ID NO: 632004 - DNA, 120 bp, Artificial Sequence
  ENSG00000179902_4 (sequence is synthesized)
ccctcccactccacccatcactttcctggctaacatcagacactggatcaaccctaaaaaggagtccatccacagcatccaaggatccatagtgtcccctcacactgcagccaccaatgg

SEQ ID NO: 632005 - DNA, 120 bp, Artificial Sequence
  ENSG00000179902_5 (sequence is synthesized)
aggctactcccgaaagaaagatggtggcttcttctccacctagtgttgacagatccctgaactaattatagtgaaacatactgcggcccacttccattaaatagatttgtgcaagatgaa

SEQ ID NO: 632006 - DNA, 120 bp, Artificial Sequence
  ENSG00000179902_6 (sequence is synthesized)
gggatcttatgccagtgaggctgtgctgcggctgagcgggcctcccatccctcttaaaagagttaggcatttagccatgcctcccacccgggaccctttccagcagcctacattagataa

SEQ ID NO: 632007 - DNA, 120 bp, Artificial Sequence
  ENSG00000179902_7 (sequence is synthesized)
gccatccagtcatataaggtaaaatgtcacctggaaaatgataatcactaggtactcatttgtatacaaatttctgtatttttacatctgtgtctataatatagtttctgtattttcact

SEQ ID NO: 632008 - DNA, 120 bp, Artificial Sequence
  ENSG00000179902_8 (sequence is synthesized)
gtctaagatgaacagaaatctcccaagattgtgctcatctgtataaacaaaatctttggttaatcccacagaggtaaaaagagtctttggctgctttattcttgagatcacattcaacta

SEQ ID NO: 632009 - DNA, 120 bp, Artificial Sequence
  ENSG00000179909_0 (sequence is synthesized)
cggatcagagatagcagagcgccgagttggggccacgaaggcgtgaggggagtcgtcgtccctcctgcacgaaagcgtctaagccttggcgacgccgccctgggggacccacgtcaggcc

SEQ ID NO: 632010 - DNA, 120 bp, Artificial Sequence
  ENSG00000179909_1 (sequence is synthesized)
tgggatagggaccgctgtccccgggtccctaccaatgtcgcccgtcgctcccggcccagctctacccgcagagtctgatggcagcggccactctgaggacgccaactcagggcactgtga

SEQ ID NO: 632011 - DNA, 120 bp, Artificial Sequence
  ENSG00000179909_2 (sequence is synthesized)
cctttgaagatgtggccgtacacttctcctgggaggaatggggtctccttgatgaggctcaaagatgcctgtaccgtgatgtgatgctggagaacttggctcttttaacctctctagatg

SEQ ID NO: 632012 - DNA, 120 bp, Artificial Sequence
  ENSG00000179909_3 (sequence is synthesized)
ttcatcatcagaagcagcaccttggagaaaaacatttcagaagcaatgtgggcagagccttgtttgtgaagacctgcacattccatgtgtcaggggagccttccacctgcagagaagttg

SEQ ID NO: 632013 - DNA, 120 bp, Artificial Sequence
  ENSG00000179909_4 (sequence is synthesized)
ggaaggacttcctggccaagttgggatttctccatcaacaggctgctcacactggggagcaatcaaatagcaaaagcgacggtggggccatcagtcacagaggaaaaactcattacaact

SEQ ID NO: 632014 - DNA, 120 bp, Artificial Sequence
  ENSG00000179909_5 (sequence is synthesized)
gtggagaacacacaaaagcattcagcggtaaacacacacttgttcagcagcagagaaccctcactacagaaagatgttacatatgcagtgaatgtgggaaatcctttagcaaaagctaca

SEQ ID NO: 632015 - DNA, 120 bp, Artificial Sequence
  ENSG00000179909_6 (sequence is synthesized)
gtctcaatgaccattggagacttcacactggagaaaagccttatgaatgtcgagagtgtgggaagtcctttaggcaaagctctagtctcattcagcaccggagagttcacactgcagtac

SEQ ID NO: 632016 - DNA, 120 bp, Artificial Sequence
  ENSG00000179909_7 (sequence is synthesized)
gacctcatgaatgtgatgaatgtggaaaattatttagcaacaagtctaacctcattaaacatcggagagttcacactggggaaaggccatatgagtgcagtgaatgtgggaaatccttta

SEQ ID NO: 632017 - DNA, 120 bp, Artificial Sequence
  ENSG00000179909_8 (sequence is synthesized)
gccaaaggtctgcactccttcaacatcggggagttcacactggggagaggccttatgagtgcagtgaatgtgggaagttttttacatatcattccagtctcataaaacaccagaaagttc

SEQ ID NO: 632018 - DNA, 120 bp, Artificial Sequence
  ENSG00000179909_9 (sequence is synthesized)
acagtggatccaggccttatgagtgcagcgaatgtgggaagtcatttagccaaaactctagcctcattgaacaccatagggttcacactggagaaaggccttataagtgcagcgaatgtg

SEQ ID NO: 632019 - DNA, 120 bp, Artificial Sequence
  ENSG00000179909_10 (sequence is synthesized)
ggaaatcctttagccaaaggtctgcactccttcaacatcggggagttcacactggggagaggccttatgagtgcagtgaatgtgggaagttctttccctacagctccagtctccgaaaac

SEQ ID NO: 632020 - DNA, 120 bp, Artificial Sequence
  ENSG00000179909_11 (sequence is synthesized)
accagagagttcacactggatcaagaccctatgagtgcagtgaatgtgggaaatcctttactcaaaattccggcctcattaagcacaggagggttcacactggggagaagccttatgagt

SEQ ID NO: 632021 - DNA, 120 bp, Artificial Sequence
  ENSG00000179909_12 (sequence is synthesized)
gcacggaatgtgggaaatcctttagccataactccagccttattaaacatcagagaattcatagtcgataaaagccttatgagtggcaaatgtggaaaatctgttagcaccctggagaaa

SEQ ID NO: 632022 - DNA, 120 bp, Artificial Sequence
  ENSG00000179909_13 (sequence is synthesized)
gtccttgagtacacagtgaatgtcagaaagcttcagctgaaggccatatctcattgagtgccacacagttcacaagggaaagacacttttgatatgtagggatgtccagttgatataaca

SEQ ID NO: 632023 - DNA, 120 bp, Artificial Sequence
  ENSG00000179909_14 (sequence is synthesized)
gctctgaaggagatcccttatgagggtggcatcagcctgaattgaacatcctatatctgaacatctgcataaattccaggtatgtgtgaactgcattgcaccttttgccctgcccagggc

SEQ ID NO: 632024 - DNA, 120 bp, Artificial Sequence
  ENSG00000179909_15 (sequence is synthesized)
ccatgtcagatttatgtctctgctgatactatagtggaagccattttacctctactgcctggcaggtgaccaccagtgtgcaccactcacccatcccagtgtattcaggccatggacctg

SEQ ID NO: 632025 - DNA, 120 bp, Artificial Sequence
  ENSG00000179909_16 (sequence is synthesized)
acccagtttggcccagaggactctgctggtgacctgaaaagagggactacatatttcaggatattgttggtctcacatgactcttgatagagtttgccagccttcaaatcaccaactgtg

SEQ ID NO: 632026 - DNA, 120 bp, Artificial Sequence
  ENSG00000179909_17 (sequence is synthesized)
ggaaccaactgcctcttattgccttggtttgtacaataacaaaggccttattaatcttgggggttctatatgtatgggttggtttgaaaacagttgggttctgctaacatgaaggggtga

SEQ ID NO: 632027 - DNA, 120 bp, Artificial Sequence
  ENSG00000179909_18 (sequence is synthesized)
ataactttttttggagatcccaaacattgtgtagctcaacagggacagggacagggacagtaggatggcagaatatagctctctctctagtttgagcctagttttcattgctattcaagg

SEQ ID NO: 632028 - DNA, 120 bp, Artificial Sequence
  ENSG00000179909_19 (sequence is synthesized)
cctctgagaaaaaactacagggtattgtcctaatttatatcctggatgccatagaggtcagcctgaggaggcagcagttacttgacatcctttgatgtttctgaaagcaacatgaaattg

SEQ ID NO: 632029 - DNA, 120 bp, Artificial Sequence
  ENSG00000179909_20 (sequence is synthesized)
ttctcttgttcacaaggaatactgcatcgtgttcagtgccagtgggggaaatctgttccccaggtcctgtatgccttgatatcctgaattccacagggtagcaccacaggtggtaagatt

SEQ ID NO: 632030 - DNA, 120 bp, Artificial Sequence
  ENSG00000179909_21 (sequence is synthesized)
atagtaggaattataattgttatagaagtactggattgatagagagtggaaaactgcaataacactgcaataaatagaatgtgccccttttacagaggtttccatgatgttcgttattat

SEQ ID NO: 632031 - DNA, 120 bp, Artificial Sequence
  ENSG00000179909_22 (sequence is synthesized)
ggctcttaaggatgagcaggtacagaaatcctcaggacctacagaattgtgtatcttgtgtagctgaggtcattgtcagaaattttatggaatcctgtagcctctgggattttcacctca

SEQ ID NO: 632032 - DNA, 120 bp, Artificial Sequence
  ENSG00000179909_23 (sequence is synthesized)
taggccattgatacagcctttgtgatccagccaacatttctgttgagtcaggtggaaatggccttcactgttcacttgtatttgtgatcactgaggcaaaatcctctcccaggacatgag

SEQ ID NO: 632033 - DNA, 120 bp, Artificial Sequence
  ENSG00000179909_24 (sequence is synthesized)
gagagagatggtggaatcaacatagggttgtcaaacctgattttccaaaaacaataggaaattcagacttttattttgaaccatattttgttaggttggtgcaaaagtaactgtggtttt

SEQ ID NO: 632034 - DNA, 120 bp, Artificial Sequence
  ENSG00000179909_25 (sequence is synthesized)
aactgtggttttgaaccatgatttatttttatttttatttttttttgagtcagagtcttgctctgttgcccagtctggagggcaatggcactatctcagctcattgcaacctccgcctcc

SEQ ID NO: 632035 - DNA, 88 bp, Artificial Sequence
  ENSG00000179909_26 (sequence is synthesized)
tgctgggattttttcaccattccaatttccttcaaatgctgaacagccgtggaatggttgacattgagttcttaggcaacttctcatg

SEQ ID NO: 632036 - DNA, 120 bp, Artificial Sequence
  ENSG00000179909_27 (sequence is synthesized)
gtggaatggttgacattgagttcttaggcaacttctcatgtagttgtaagaggatcagcttctaatattgctctcaattggtcattgtcaacttccagtggctggccactacttctcttc

SEQ ID NO: 632037 - DNA, 120 bp, Artificial Sequence
  ENSG00000179909_28 (sequence is synthesized)
cttcttgaaccaccactgcactgtacattcgttagcagttcctgggccaaatgtgtttatatcgtgagttgtctctgctgctttacgacccattgggaactcaagtaagaaaatctcagc

SEQ ID NO: 632038 - DNA, 73 bp, Artificial Sequence
  ENSG00000179909_29 (sequence is synthesized)
gaggcagaagtcaaaacaagactccgtctcaaaaaaaagaggccagatgcggtggcttacacctgtaatccca

SEQ ID NO: 632039 - DNA, 69 bp, Artificial Sequence
  ENSG00000179909_30 (sequence is synthesized)
gctgggcatagtggcatgcacctgtaatcccagctactggggagcctgaggcacgagaattgtttgaac

SEQ ID NO: 632040 - DNA, 120 bp, Artificial Sequence
  ENSG00000179909_31 (sequence is synthesized)
aatcgctgaaatttgagttttgtctaacatttccatagtctaaaataaacataaacagcaagtagtaagtcagcaaaaaaacataaagcgagaaatgcctattaaaatgatgtataacca

SEQ ID NO: 632041 - DNA, 120 bp, Artificial Sequence
  ENSG00000179909_32 (sequence is synthesized)
catttatttaagaatgttttccaatataaaatggcaaaatccaacatgcaaaaacggcaattacttttgcactaacctgataataattttaataagaataaatggtacatatttaaacta

SEQ ID NO: 632042 - DNA, 120 bp, Artificial Sequence
  ENSG00000179909_33 (sequence is synthesized)
tataatttgatcagctttgatattcatattaacctgtaattgctcccaccatgccaattttgaaactgccaacatgttactgaatgtagaattgggaagagttgctgatagcatcctaat

SEQ ID NO: 632043 - DNA, 120 bp, Artificial Sequence
  ENSG00000179909_34 (sequence is synthesized)
atattctgtttctaccatactgatacagtggccacgaataacctcaagaatgtagaaaataaaatgtagtgaaatgattaggaagaagttgtttcttcacaatcatgacaatgaacgtgt

SEQ ID NO: 632044 - DNA, 120 bp, Artificial Sequence
  ENSG00000179909_35 (sequence is synthesized)
cattccacaagttacctcattgtcctttaataattatctgcctataggcaactattgatttactttccattataatacattagttttcatttgctagaattttatatgattgaaaccata

SEQ ID NO: 632045 - DNA, 120 bp, Artificial Sequence
  ENSG00000179909_36 (sequence is synthesized)
atgtatttactcttttttaatccctgggtatagtcacgtatttattttgagattcatcattatacctctatgagtagtttcttttttttgtattgctgagaagtatgatgttctgtggat

SEQ ID NO: 632046 - DNA, 120 bp, Artificial Sequence
  ENSG00000179909_37 (sequence is synthesized)
ataccagtattcgtttattcattcattcatttgttatggatattttgagtagttttttaaagtagtttgaggtataatggaacttaaagtgcttatatttaaaatgcatattttgatatt

SEQ ID NO: 632047 - DNA, 120 bp, Artificial Sequence
  ENSG00000179909_38 (sequence is synthesized)
ttcatacatgcttacaccctggaacgcagtttccttctgtctttttagttcattctcaacatataaaattaattttcattgtgtaaaattactggtacaatgacatattttgtctcctgt

SEQ ID NO: 632048 - DNA, 120 bp, Artificial Sequence
  ENSG00000179909_39 (sequence is synthesized)
tacagctgtgttcaattacaaaaaaagatggaaaagactgttatgaagccagatgaacctttctccagtcttccttcactatttttttttccttcaccatttatcatttcatagtcattt

SEQ ID NO: 632049 - DNA, 120 bp, Artificial Sequence
  ENSG00000179909_40 (sequence is synthesized)
atgtttcatcggtcctcatgtgtactagtgcgttattttacttatactcccggatatcatattatttaatgcatagcctcttcagaatgcaattttaaaatgtaaaggctcttttataac

SEQ ID NO: 632050 - DNA, 120 bp, Artificial Sequence
  ENSG00000179909_41 (sequence is synthesized)
cccccaaaaaatcacacaaatatattttaaaatgtaaatattttatcgcttctgttttctcagttgtctaaaacaatgtgtttcttaaggaagatcatttttattcaggatccaaatgta

SEQ ID NO: 632051 - DNA, 120 bp, Artificial Sequence
  ENSG00000179909_42 (sequence is synthesized)
tatttaatagctttcagtagttgtatctcataagtctgtaacctacaggttccatttacctttgttttcttatttcttgaagttgctgagtcattttttaattagaatttgctgtattct

SEQ ID NO: 632052 - DNA, 120 bp, Artificial Sequence
  ENSG00000179912_0 (sequence is synthesized)
ggcttttcttccccttctgattttcccctccccccttttctccctttccgggtttggttccccccttttcttcccctctcccccctccttcccaagcccctttcccctcccccgtcccag

SEQ ID NO: 632053 - DNA, 120 bp, Artificial Sequence
  ENSG00000179912_1 (sequence is synthesized)
ctccttcccaagcccctttcccctcccccgtcccagtcccccctgcttcccagccctcggccccggggaagccccggccgagaaaagcccgcccccagaagcgcgccgccgccggccgtc

SEQ ID NO: 632054 - DNA, 120 bp, Artificial Sequence
  ENSG00000179912_2 (sequence is synthesized)
cggcgggcggagacgtgggcgccctccccgccaaggcccgtgcgagaggttagacttgtttcttatatgtgatgccattccagcactggactcatggaggctgagcatttattcaggagt

SEQ ID NO: 632055 - DNA, 120 bp, Artificial Sequence
  ENSG00000179912_3 (sequence is synthesized)
ccatagaggccactgtattctattgaagaacatgtctaacagtaacactactcaagagaccctggaaataatgaaagaatcagaaaaaaaactggtggaagaatctgtaaacaaaaacaa

SEQ ID NO: 632056 - DNA, 120 bp, Artificial Sequence
  ENSG00000179912_4 (sequence is synthesized)
gtttatatctaagactccaagtaaggaagaaattgagaaagaatgtgaagataccagtttgcgtcaggagacacagaggcggacatctaaccatggtcatgccaggaaaagagccaagtc

SEQ ID NO: 632057 - DNA, 120 bp, Artificial Sequence
  ENSG00000179912_5 (sequence is synthesized)
taattccaagctaaagttggtgcgtagcctggcagtgtgtgaggagtcctccaccccatttgctgatgggccattagaaacccaggatataattcaattgcacatcagttgcccttctga

SEQ ID NO: 632058 - DNA, 120 bp, Artificial Sequence
  ENSG00000179912_6 (sequence is synthesized)
caaggaggaagaaaagtccacaaaagatgtctctgaaaaggaagacaaggacaaaaacaaagaaaagatcccaaggaagatgctgtccagagactccagccaggaatatacggactccac

SEQ ID NO: 632059 - DNA, 120 bp, Artificial Sequence
  ENSG00000179912_7 (sequence is synthesized)
tggaatagacctacatgaatttcttgtaaatacactgaaaaagaacccaagggacagaatgatgctgctaaaattagaacaggagattctggaatttattaatgacaacaataatcagtt

SEQ ID NO: 632060 - DNA, 120 bp, Artificial Sequence
  ENSG00000179912_8 (sequence is synthesized)
caagaagttccctcagatgacctcatatcaccggatgctattacaccgggtagctgcctattttgggatggaccacaatgttgatcaaactgggaaagctgtcatcatcaacaaaactag

SEQ ID NO: 632061 - DNA, 120 bp, Artificial Sequence
  ENSG00000179912_9 (sequence is synthesized)
taacacaagaatccctgaacagaggttctcagaacatataaaggatgagaagaatacagaatttcaacagaggttcattctcaagagagatgatgccagtatggaccgagatgataacca

SEQ ID NO: 632062 - DNA, 120 bp, Artificial Sequence
  ENSG00000179912_10 (sequence is synthesized)
gatcagagttccattgcaggatggaaggaggagcaagtcaatagaagagagagaggaggaatatcaaagggtccgagagagaatatttgcccgagagactggccagaacggatatctaaa

SEQ ID NO: 632063 - DNA, 120 bp, Artificial Sequence
  ENSG00000179912_11 (sequence is synthesized)
tgacatcagggggaaccgtgaaggactgagccgcacctcaagcagccgccagagcagcacagacagcgaactcaaatccctggagccacgcccttggagcagcacagactctgatggctc

SEQ ID NO: 632064 - DNA, 120 bp, Artificial Sequence
  ENSG00000179912_12 (sequence is synthesized)
tgtccggagcatgcgaccccctgtcaccaaagctagcagcttcagtggaatctctatccttacccgaggtgacagcatcggcagcagtaaaggcggcagtgcgggaaggatctccaggcc

SEQ ID NO: 632065 - DNA, 120 bp, Artificial Sequence
  ENSG00000179912_13 (sequence is synthesized)
aggtatggcactaggtgccccagaagtgtgcaaccaggtcacctcatcccagtctgtccgggggcttctcccttgtactgcccagcagcaacagcagcagcagcagcagcaacttcctgc

SEQ ID NO: 632066 - DNA, 120 bp, Artificial Sequence
  ENSG00000179912_14 (sequence is synthesized)
tctcccacccacgcctcagcaacagccacccttgaataatcacatgatctcacaggcagatgacctcagcaacccctttggacaaatgagccttagtcgccaaggttctactgaagcagc

SEQ ID NO: 632067 - DNA, 120 bp, Artificial Sequence
  ENSG00000179912_15 (sequence is synthesized)
tgacccatctgcagctctattccagaccccacttatctcccagcaccctcagcagactagcttcatcatggcttccacgggtcagcccctccccacttccaactattccacctctagcca

SEQ ID NO: 632068 - DNA, 120 bp, Artificial Sequence
  ENSG00000179912_16 (sequence is synthesized)
tgcaccacctactcagcaagttctgccaccccaggggtacatgcagccccctcaacagatccaggtttcttactatccccctggacaatatcctaactccaaccagcaatatcgacctct

SEQ ID NO: 632069 - DNA, 120 bp, Artificial Sequence
  ENSG00000179912_17 (sequence is synthesized)
ctctcacccggtggcctatagcccccaacgtggtcagcagctgcctcagccatcccagcagcctggtttacagcccatgatgcctaaccagcagcaggcggcttaccaaggcatgattgg

SEQ ID NO: 632070 - DNA, 120 bp, Artificial Sequence
  ENSG00000179912_18 (sequence is synthesized)
gggggccagatgcaaggcctggtggttcagtacactccactgccttcttaccaagttccagtgggtagtgactcgcaaaatgtggtccagccgcctttccagcaacccatgctggtccct

SEQ ID NO: 632071 - DNA, 120 bp, Artificial Sequence
  ENSG00000179912_19 (sequence is synthesized)
gtgagccagtctgtgcaaggaggcctcccagcagcgggggtaccagtgtactatagcatgatcccacctgctcagcagaacggtacgagcccttctgtagggtttctgcaaccccctggc

SEQ ID NO: 632072 - DNA, 120 bp, Artificial Sequence
  ENSG00000179912_20 (sequence is synthesized)
tctgagcagtaccagatgcctcagtctccctctccctgcagtccaccacagatgccacagcagtactcaggagtgtcaccttctggaccaggtgtagtggtcatgcagctgaatgtccct

SEQ ID NO: 632073 - DNA, 120 bp, Artificial Sequence
  ENSG00000179912_21 (sequence is synthesized)
aatggaccccagccccctcagaacccatccatggtccagtggagtcattgtaaatactacagcatggaccagcgggggcagaagcctggagacctgtacagtcctgacagcagcccccag

SEQ ID NO: 632074 - DNA, 120 bp, Artificial Sequence
  ENSG00000179912_22 (sequence is synthesized)
gccaacacacaaatgagcagcagccctgtcacatctcctacccagtctccagcaccctctcctgtcaccagcctcagcagtgtctgcacaggactcagtcccctgcctgtcctcacacag

SEQ ID NO: 632075 - DNA, 120 bp, Artificial Sequence
  ENSG00000179912_23 (sequence is synthesized)
ttcccccggcctgggggtccagcacagggtgatgggcgctactcccttttgggccagccattacagtacaatctgtccatctgccctcccttgctccatggccagtcaacttacacggtg

SEQ ID NO: 632076 - DNA, 120 bp, Artificial Sequence
  ENSG00000179912_24 (sequence is synthesized)
caccagggacagagtggactgaagcatggaaaccggggcaagagacaagcactcaaatctgcctccactgacctggggacagcagatgttgtcctggggcgggtgctggaggtgacagat

SEQ ID NO: 632077 - DNA, 120 bp, Artificial Sequence
  ENSG00000179912_25 (sequence is synthesized)
ctccctgagggcatcacccgtactgaggcggacaaactcttcacgcagctcgccatgtctggcgccaagatccagtggctcaaggatgctcaggggctgcctggagggggtgggggggac

SEQ ID NO: 632078 - DNA, 120 bp, Artificial Sequence
  ENSG00000179912_26 (sequence is synthesized)
aacagtgggactgctgagaatggccgccactcggacctcgctgccttgtacaccattgtggctgtgttccccagccccctggctgcccaaaatgcctcccttcgtctcaacaactccgtg

SEQ ID NO: 632079 - DNA, 120 bp, Artificial Sequence
  ENSG00000179912_27 (sequence is synthesized)
agtcgcttcaaacttcgaatggccaaaaagaactatgacctgaggatcctggagcgagccagctcccaataaatggaggaggggaaagggactgtcacagaaggagcaagggcagggtgg

SEQ ID NO: 632080 - DNA, 120 bp, Artificial Sequence
  ENSG00000179912_28 (sequence is synthesized)
agggggttgaaggatcctgacagaccatggacagaggcaggaagtaaggaaactgatgttaaactggaacctaagacagtgatgaagatggaaacacagatacctacactggcattggac

SEQ ID NO: 632081 - DNA, 120 bp, Artificial Sequence
  ENSG00000179912_29 (sequence is synthesized)
tacctacactggcattggactccttcttgctcccctgccatgggtcctctctttttccctggttgaccccccttgcatcactcttcttcccatcctcttctttttttttttttttttttt

SEQ ID NO: 632082 - DNA, 73 bp, Artificial Sequence
  ENSG00000179912_30 (sequence is synthesized)
tttgagacggagtttcgctcttgtcaccccagctggagtgcagtagcacgatcttggctaactgcaacctcca

SEQ ID NO: 632083 - DNA, 120 bp, Artificial Sequence
  ENSG00000179912_31 (sequence is synthesized)
acaggcgtgagccactgtgcctggcttccatcctcttctatcatttttttaaatctcttctcctatcataaaattaatttctcattttttggtcaggtagaattgggaaagtcccacact

SEQ ID NO: 632084 - DNA, 120 bp, Artificial Sequence
  ENSG00000179912_32 (sequence is synthesized)
gtcctcctattaccttaacatcccaagcttcctttccttttttggtctttatgaatatatttatatggacagaattaagataaacaaaattgattgccccattctctcacttccccatct

SEQ ID NO: 632085 - DNA, 120 bp, Artificial Sequence
  ENSG00000179912_33 (sequence is synthesized)
tgtcttcctagaccccacagagttaaaacttgggattcccctggcccccccagaacacttgtatattgtttgtttgaggttcgtgccgcagtaacagacacagtatttaattgcacatac

SEQ ID NO: 632086 - DNA, 120 bp, Artificial Sequence
  ENSG00000179912_34 (sequence is synthesized)
agatgtttgctgggtatattcactgtaaattttatttaatctgtttttttgtttgtttgggggttatttggggggaggttggttttgtttttaaatataaaaaaaaaaatctgtcactgg

SEQ ID NO: 632087 - DNA, 120 bp, Artificial Sequence
  ENSG00000179912_35 (sequence is synthesized)
aatttcttgtaaatacactgaaaaagaacccaaggtaataacatgatgggtataagaggaaaaggggttaggggatagcaagattccaagaggccaaacggcttcccagaatttttccat

SEQ ID NO: 632088 - DNA, 120 bp, Artificial Sequence
  ENSG00000179912_36 (sequence is synthesized)
atcacatgatctcacagccagtcccggctctgcagccctctccgcagcctgttcagttctctccaagctcctgtccccaagtccttctgccagtctctccgccccagcagtacaacatgg

SEQ ID NO: 632089 - DNA, 82 bp, Artificial Sequence
  ENSG00000179912_37 (sequence is synthesized)
agcgccgtggtacagtcttgactcactgcaatattgagtagctgggatgacaggcacatgcctagctaatttttgtattttt

SEQ ID NO: 632090 - DNA, 60 bp, Artificial Sequence
  ENSG00000179912_38 (sequence is synthesized)
caggctggtcttgaactcctgaactcaaagcaatgagtagtcttaatgaggaaagtaggt

SEQ ID NO: 632091 - DNA, 120 bp, Artificial Sequence
  ENSG00000179912_39 (sequence is synthesized)
ctgcacccagcaatgagtagtcttaatgaggaaagtaggtcatagtaatctgcagaatactgtagataaagaaactgagaaaaacctatttggttcccatttagtaaatatctatattcc

SEQ ID NO: 632092 - DNA, 120 bp, Artificial Sequence
  ENSG00000179912_40 (sequence is synthesized)
ttataatatgtctatttctcctaagaaactttccactttagacacttgtaagaaaaattaaaattggttgttattgcagttgtttgtcttatttcactttttttccccgggtttcccttc

SEQ ID NO: 632093 - DNA, 120 bp, Artificial Sequence
  ENSG00000179912_41 (sequence is synthesized)
aacttctgtgaaagaagaatgcagaaacaaagaaatatgaagtcttgggagtatactgattaaaaagcacacattgggagtgatagtaagaagagctaaaataaaaagcacagaaggaaa

SEQ ID NO: 632094 - DNA, 120 bp, Artificial Sequence
  ENSG00000179912_42 (sequence is synthesized)
tgatgcaaggcagtcaatgttgtttacatgggatgagagtcgtctttcaaatgttgaagggacagagtggactgaagcatggaaaccggggcaagagacaagcactcaaatctgcctcca

SEQ ID NO: 632095 - DNA, 120 bp, Artificial Sequence
  ENSG00000179912_43 (sequence is synthesized)
tttccactggcctaagaaaggcaggggtaaagatcccagtagttccctaaagcaggggaggaccaggaagcagcagctgtttgccaggagctgtgttcatccctctactgcttcaccact

SEQ ID NO: 632096 - DNA, 120 bp, Artificial Sequence
  ENSG00000179912_44 (sequence is synthesized)
ccctctacctccagtgacgtagtgattttgtttgcagtctttttcttctgagagggaggggacggagagaaggaagaagaaaaatccatctgaagcggtgcgttcttccttctgtgactt

SEQ ID NO: 632097 - DNA, 120 bp, Artificial Sequence
  ENSG00000179912_45 (sequence is synthesized)
gatgttggtaactgggtgccattgaatagagctgaagccaaagtgggatgttttaaaggtgctataattttgtttgtttccttttaaaatagggtcagaccgaagtcagaattgctgaag

SEQ ID NO: 632098 - DNA, 120 bp, Artificial Sequence
  ENSG00000179913_0 (sequence is synthesized)
aaactctttcttcggctcgcgagctgagaggagcaggtagaggggcagaggcgggactgtcgtctgggggagccgcccaggaggctcctcaggccgaccccagaccctggctggccagga

SEQ ID NO: 632099 - DNA, 120 bp, Artificial Sequence
  ENSG00000179913_1 (sequence is synthesized)
tgaagtatctccggcaccggcggcccaatgccaccctcattctggccatcggcgctttcaccctcctcctcttcagtctgctagtgtcaccacccacctgcaaggtccaggagcagccac

SEQ ID NO: 632100 - DNA, 120 bp, Artificial Sequence
  ENSG00000179913_2 (sequence is synthesized)
cggcgatccccgaggccctggcctggcccactccacccacccgcccagccccggccccgtgccatgccaacacctctatggtcacccacccggacttcgccacgcagccgcagcacgttc

SEQ ID NO: 632101 - DNA, 120 bp, Artificial Sequence
  ENSG00000179913_3 (sequence is synthesized)
agaacttcctcctgtacagacactgccgccactttcccctgctgcaggacgtgcccccctctaagtgcgcgcagccggtcttcctgctgctggtgatcaagtcctcccctagcaactatg

SEQ ID NO: 632102 - DNA, 120 bp, Artificial Sequence
  ENSG00000179913_4 (sequence is synthesized)
tgcgccgcgagctgctgcggcgcacgtggggccgcgagcgcaaggtacggggtttgcagctgcgcctcctcttcctggtgggcacagcctccaacccgcacgaggcccgcaaggtcaacc

SEQ ID NO: 632103 - DNA, 120 bp, Artificial Sequence
  ENSG00000179913_5 (sequence is synthesized)
ggctgctggagctggaggcacagactcacggagacatcctgcagtgggacttccacgactccttcttcaacctcacgctcaagcaggtcctgttcttacagtggcaggagacaaggtgcg

SEQ ID NO: 632104 - DNA, 120 bp, Artificial Sequence
  ENSG00000179913_6 (sequence is synthesized)
ccaacgccagcttcgtgctcaacggggatgatgacgtctttgcacacacagacaacatggtcttctacctgcaggaccatgaccctggccgccacctcttcgtggggcaactgatccaaa

SEQ ID NO: 632105 - DNA, 120 bp, Artificial Sequence
  ENSG00000179913_7 (sequence is synthesized)
acgtgggccccatccgggctttttggagcaagtactatgtgccagaggtggtgactcagaatgagcggtacccaccctattgtgggggtggtggcttcttgctgtcccgcttcacggccg

SEQ ID NO: 632106 - DNA, 120 bp, Artificial Sequence
  ENSG00000179913_8 (sequence is synthesized)
ctgccctgcgccgtgctgcccatgtcttggacatcttccccattgatgatgtcttcctgggtatgtgtctggagcttgagggactgaagcctgcctcccacagcggcatccgcacgtctg

SEQ ID NO: 632107 - DNA, 120 bp, Artificial Sequence
  ENSG00000179913_9 (sequence is synthesized)
gcgtgcgggctccatcgcaacgcctgtcctcctttgacccctgcttctaccgagacctgctgctggtgcaccgcttcctaccttatgagatgctgctcatgtgggatgcgctgaaccagc

SEQ ID NO: 632108 - DNA, 120 bp, Artificial Sequence
  ENSG00000179913_10 (sequence is synthesized)
ccaacctcacctgcggcaatcagacacagatctactgagtcagcatcagggtccccagcctctgggctcctgtttccataggaaggggcgacaccttcctcccaggaagctgagaccttt

SEQ ID NO: 632109 - DNA, 120 bp, Artificial Sequence
  ENSG00000179913_11 (sequence is synthesized)
tattctggctggcgaactcctacacatccttcaaaacccacctggtactgttccagcatcttccctggatggctggaggaactccagaaaatatccatcttctttttgtggctgctaatg

SEQ ID NO: 632110 - DNA, 120 bp, Artificial Sequence
  ENSG00000179913_12 (sequence is synthesized)
gcagaagtgcctgtgctagagttccaactgtggatgcatccgtcccgtttgagtcaaagtcttacttccctgctctcacctactcacagacgggatgctaagcagtgcacctgcagtggt

SEQ ID NO: 632111 - DNA, 120 bp, Artificial Sequence
  ENSG00000179913_13 (sequence is synthesized)
ttaatggcagataagctccgtctgcagttccaggccagccagaaactcctgtgtccacatagagctgacgtgagaaatatctttcagcccaggagagaggggtcctgatcttaacccttt

SEQ ID NO: 632112 - DNA, 120 bp, Artificial Sequence
  ENSG00000179913_14 (sequence is synthesized)
cctgggtctcagacaactcagaaggttggggggataccagagaggtggtggaataggaccgccccctccttacttgtgggatcaaatgctgtaatggtggaggtgtgggcagaggaggga

SEQ ID NO: 632113 - DNA, 120 bp, Artificial Sequence
  ENSG00000179913_15 (sequence is synthesized)
ggcaagtgtcctttgaaagttgtgagagctcagagtttctggggtcctcattaggagcccccatccctgtgttccccaagaattcagagaacagcactggggctggaatgatctttaatg

SEQ ID NO: 632114 - DNA, 120 bp, Artificial Sequence
  ENSG00000179913_16 (sequence is synthesized)
ggcccaaggccaacaggcatatgcctcactactgcctggagaagggagagattcaggtcctccagcagcctccctcacccagtatgttttacagattacggggggaccgggtgagccagt

SEQ ID NO: 632115 - DNA, 120 bp, Artificial Sequence
  ENSG00000179913_17 (sequence is synthesized)
gaccccctgtagcccccagcttcaggcctcagtgtctgccagtcaagcttcacaggcattgtgatggggcagccttggggaatataaaattttgtgaagacttggagatctttttttttt

SEQ ID NO: 632116 - DNA, 120 bp, Artificial Sequence
  ENSG00000179913_18 (sequence is synthesized)
tttaagcaaatttacaagtttcaacagacaagtccacattcatccctaaaagtctcattttccagtagaaaatatacactggtaaaaacggggcatggggccgtggctcagggctgtaat

SEQ ID NO: 632117 - DNA, 120 bp, Artificial Sequence
  ENSG00000179913_19 (sequence is synthesized)
gggaggatcacttgagcccaggagttctggatcctgtctctgcacaaaataaaaaattactcaggcgtggtggtgctcacatgcctgtagtcccagctatacttgggaggctgaggcgag

SEQ ID NO: 632118 - DNA, 120 bp, Artificial Sequence
  ENSG00000179913_20 (sequence is synthesized)
gcccaggagttggaggctgcagtgaaccatgattgcgccactgtactccactgggcggcaataagaagacaaaaacataaaacaggacatgtgtgaggcaaaagctgcaggaatttctat

SEQ ID NO: 632119 - DNA, 120 bp, Artificial Sequence
  ENSG00000179913_21 (sequence is synthesized)
ggacatgtgtgaggcaaaagctgcaggaatttctatcaggcagatctgacctcatcccacccaccccctgctcagatacccttcatagctccttattgctttcagctcataaccccacat

SEQ ID NO: 632120 - DNA, 120 bp, Artificial Sequence
  ENSG00000179913_22 (sequence is synthesized)
cgagctgagaggagcaggtagaggggcagaggcgggactgtcgtctggggtgagttttgttttccacaggagccgcccaggaggctcctcaggccgaccccagaccctggctggccagga

SEQ ID NO: 632121 - DNA, 120 bp, Artificial Sequence
  ENSG00000179914_0 (sequence is synthesized)
attccacatcaggagcgtttttggagaaagctgcactctgttgagctccagggcgcagtggagggagggagtgaaggagctctctgtacccaaggaaagtgcagctgagactcagacaag

SEQ ID NO: 632122 - DNA, 120 bp, Artificial Sequence
  ENSG00000179914_1 (sequence is synthesized)
attacaatgaaccaactcagcttcctgctgtttctcatagcgaccaccagaggatggagtacagatgaggctaatacttacttcaaggaatggacctgttcttcgtctccatctctgccc

SEQ ID NO: 632123 - DNA, 120 bp, Artificial Sequence
  ENSG00000179914_2 (sequence is synthesized)
agaagctgcaaggaaatcaaagacgaatgtcctagtgcatttgatggcctgtattttctccgcactgagaatggtgttatctaccagaccttctgtgacatgacctctgggggtggcggc

SEQ ID NO: 632124 - DNA, 120 bp, Artificial Sequence
  ENSG00000179914_3 (sequence is synthesized)
tggaccctggtggccagcgtgcacgagaatgacatgcgtgggaagtgcacggtgggcgatcgctggtccagtcagcagggcagcaaagcagtctacccagagggggacggcaactgggcc

SEQ ID NO: 632125 - DNA, 120 bp, Artificial Sequence
  ENSG00000179914_4 (sequence is synthesized)
cccccatgcagcactggagaaacagctccctgctgaggtaccgcacggacactggcttcctccagacactgggacataatctgtttggcatctaccagaaatatccagtgaaatatggag

SEQ ID NO: 632126 - DNA, 120 bp, Artificial Sequence
  ENSG00000179914_5 (sequence is synthesized)
aaggaaagtgttggactgacaacggcccggtgatccctgtggtctatgattttggcgacgcccagaaaacagcatcttattactcaccctatggccagcgggaattcactgcgggatttg

SEQ ID NO: 632127 - DNA, 120 bp, Artificial Sequence
  ENSG00000179914_6 (sequence is synthesized)
ttcagttcagggtatttaataacgagagagcagccaacgccttgtgtgctggaatgagggtcaccggatgtaacactgagcaccactgcattggtggaggaggatactttccagaggcca

SEQ ID NO: 632128 - DNA, 120 bp, Artificial Sequence
  ENSG00000179914_7 (sequence is synthesized)
gtccccagcagtgtggagatttttctggttttgattggagtggatatggaactcatgttggttacagcagcagccgtgagataactgaggcagctgtgcttctattctatcgttgagagt

SEQ ID NO: 632129 - DNA, 120 bp, Artificial Sequence
  ENSG00000179914_8 (sequence is synthesized)
tttgtgggagggaacccagacctctcctcccaaccatgagatcccaaggatggagaacaacttacccagtagctagaatgttaatggcagaagagaaaacaataaatcatattgactcaa

SEQ ID NO: 632130 - DNA, 120 bp, Artificial Sequence
  ENSG00000179914_9 (sequence is synthesized)
tgtctctggttcctagggcctttcttgtcatggggctgaaatgaaccctcagctctcagacagggaggctctgggctggttctctctacagatggcctgtattttctccgcactgagaat

SEQ ID NO: 632131 - DNA, 120 bp, Artificial Sequence
  ENSG00000179914_10 (sequence is synthesized)
acactttgaatcacaacttcctcctaacaaggctgttagggccctgggtgtggtgggatcatcggctgggagtggggtgtctgagtatggttggccatctgctcatctggagtccagagc

SEQ ID NO: 632132 - DNA, 120 bp, Artificial Sequence
  ENSG00000179914_11 (sequence is synthesized)
tctcacagtccagctgaagttgcatgtgtggaccttctgcctcctgggacctcctggcccagtcaggctcagtgtctgttgctttccagaaccctggctactacgacatccaggccaagg

SEQ ID NO: 632133 - DNA, 120 bp, Artificial Sequence
  ENSG00000179915_0 (sequence is synthesized)
tctctctctctctctttctttctttccgatggggaagagagggtggtgacaagttagaagcgcttgcggaaggtccccgcccccaggatcaggctccccctgcaaggggacgatgcaaag

SEQ ID NO: 632134 - DNA, 120 bp, Artificial Sequence
  ENSG00000179915_1 (sequence is synthesized)
aggatcaggctccccctgcaaggggacgatgcaaaggtaaaagcacctcgctccgcagcatccagacctggaggggctgcgaccacgggccgagcccacccattccccagccaaaggacg

SEQ ID NO: 632135 - DNA, 120 bp, Artificial Sequence
  ENSG00000179915_2 (sequence is synthesized)
ggcccgccgctctccatggtactgcggagagctcagctccgcccttctctttcagaaggacagcacccggcgtcacgtaacccagccttctcaggctccaccaccgccttttccttccca

SEQ ID NO: 632136 - DNA, 120 bp, Artificial Sequence
  ENSG00000179915_3 (sequence is synthesized)
gctctttccctctcctccccctcctcctccttctcctcctcctcctcctcctgctcccctccgttgcctgttctcccctcccgcactcctggagatagacgctcaagcctgacgcctctg

SEQ ID NO: 632137 - DNA, 120 bp, Artificial Sequence
  ENSG00000179915_4 (sequence is synthesized)
aaaaggcagcagcagtcgccttatccatagacctcaggaaattcgctttgaccgatgcatgcttcaggctctggctcgagctgaggggaataaccgggcagatgtctgagtccttaaaaa

SEQ ID NO: 632138 - DNA, 120 bp, Artificial Sequence
  ENSG00000179915_5 (sequence is synthesized)
agacaagataaaaccaaaatgcatcaccaacacacaaccaattgatgtgctggcatcttagcttggccctgcagaggcagagagaaaagaagaggagctgttgcgatttccacatctaac

SEQ ID NO: 632139 - DNA, 120 bp, Artificial Sequence
  ENSG00000179915_6 (sequence is synthesized)
agcttctggctatttcgcaactgctgggtttgagtcctactgttgccgtggctgaaaagagaagtaaaatccaacttgtgagaccacgcacaaggaattaggctttggctgcagcggtgc

SEQ ID NO: 632140 - DNA, 120 bp, Artificial Sequence
  ENSG00000179915_7 (sequence is synthesized)
tgaagcccatgctatgacagaagaagcaggcctttgaagctatcctcgggttaagaaatggtgccctaaagaggcaagcatccctttctccgttctgctgtaagacaccacatctgaagg

SEQ ID NO: 632141 - DNA, 120 bp, Artificial Sequence
  ENSG00000179915_8 (sequence is synthesized)
agacagacttgaggcattcacaagcatccaaggatactggctcactgctggcttcctgtactttcttgagaaaagtgttttctttttactgactctcactgcttccttttggcctggtac

SEQ ID NO: 632142 - DNA, 120 bp, Artificial Sequence
  ENSG00000179915_9 (sequence is synthesized)
cactggtggaacctggcagataatgggatttgaggagttaagtatctgttgacactgcagatactcttaaattagttaatcagactcaaatgggtcagtgctttcccttgatcttttgtt

SEQ ID NO: 632143 - DNA, 120 bp, Artificial Sequence
  ENSG00000179915_10 (sequence is synthesized)
gaagccttttccagaacgttgtctccaaagtgcatcctccctttggtctggaagttctgtggctaccctgtaccactggggtcaacgttttccagttggaagaggactacagggagagag

SEQ ID NO: 632144 - DNA, 120 bp, Artificial Sequence
  ENSG00000179915_11 (sequence is synthesized)
ggcggggttattggaagaagaagaagaaaaaaagaactagataaaggagggcacatccctctcactcccgcctttccccttacctttctgtctctcgggacccttatttcttcgtcacgg

SEQ ID NO: 632145 - DNA, 120 bp, Artificial Sequence
  ENSG00000179915_12 (sequence is synthesized)
tgtccaggaccattttgaccctgtcggccccggcacccccccgccgcaccccagccccgagcatggggacggcgctgctccagcgcgggggctgttttcttctgtgcctctcgctgctgc

SEQ ID NO: 632146 - DNA, 120 bp, Artificial Sequence
  ENSG00000179915_13 (sequence is synthesized)
tcctgggctgctgggcggagctgggcagcgggctggagtttccgggcgccgagggccaatggacgcgcttccccaagtggaacgcctgctgcgagagcgagatgagcttccagctcaaga

SEQ ID NO: 632147 - DNA, 120 bp, Artificial Sequence
  ENSG00000179915_14 (sequence is synthesized)
ctcgcagcgcccgcggcctcgtgctctacttcgacgacgagggcttctgcgacttcctggagctgattctgacgcgcggcggccgcctgcagctcagcttctccatcttctgcgctgagc

SEQ ID NO: 632148 - DNA, 120 bp, Artificial Sequence
  ENSG00000179915_15 (sequence is synthesized)
ctgcgacgctcctggccgacacgccggttaacgacggcgcctggcacagcgtgcgcatccgccgccagttccgcaacaccacgctcttcatcgaccaggtggaggccaagtgggtggagg

SEQ ID NO: 632149 - DNA, 120 bp, Artificial Sequence
  ENSG00000179915_16 (sequence is synthesized)
tcaagtccaagcgcagggacatgacggtgttcagcggccttttcgtcggggggctgcccccggaactgcgcgccgcggcgctcaagctcaccctggcctcggtgagggagcgggagccct

SEQ ID NO: 632150 - DNA, 120 bp, Artificial Sequence
  ENSG00000179915_17 (sequence is synthesized)
tcaaggggtggattcgtgacgtgagggtcaactcctcgcaggtcctgcccgtggacagcggcgaggtgaagctggacgatgagccgcccaacagcggcgggggaagcccgtgcgaggcgg

SEQ ID NO: 632151 - DNA, 120 bp, Artificial Sequence
  ENSG00000179915_18 (sequence is synthesized)
gcgaggagggcgagggcggggtgtgcctcaacggaggtgtgtgctccgtggtggacgaccaggccgtgtgcgactgctcgcgaaccggcttccgcggcaaggactgcagccaagaagaca

SEQ ID NO: 632152 - DNA, 120 bp, Artificial Sequence
  ENSG00000179915_19 (sequence is synthesized)
acaatgtggaaggtctggcgcacctgatgatgggcgaccaaggtaaaagtaaaggaaaagaagaatatattgccacgttcaaaggatctgaatacttctgctacgacttgtctcaaaacc

SEQ ID NO: 632153 - DNA, 120 bp, Artificial Sequence
  ENSG00000179915_20 (sequence is synthesized)
ccattcaaagcagcagtgatgaaataactctgtcatttaaaacccttcagaggaatggactgatgcttcacactgggaaatcggctgattatgtcaatcttgccctgaaaaatggagctg

SEQ ID NO: 632154 - DNA, 120 bp, Artificial Sequence
  ENSG00000179915_21 (sequence is synthesized)
tctctctggtcattaatttgggatcaggggcctttgaagcactagtggagcctgtgaatggaaagtttaatgataatgcctggcatgatgtgaaagtcaccaggaatctgcgtcagcact

SEQ ID NO: 632155 - DNA, 120 bp, Artificial Sequence
  ENSG00000179915_22 (sequence is synthesized)
caggcattggacacgctatggtgacaatatcagtggatgggattcttaccacaacgggctacacgcaagaagattataccatgctggggtctgatgactttttctatgttggaggcagtc

SEQ ID NO: 632156 - DNA, 120 bp, Artificial Sequence
  ENSG00000179915_23 (sequence is synthesized)
ccagcacagccgaccttccagggtcaccagtcagtaacaactttatgggctgtctcaaagaggttgtatataaaaataatgatgtgaggctggaattatctcgacttgccaagcaaggag

SEQ ID NO: 632157 - DNA, 120 bp, Artificial Sequence
  ENSG00000179915_24 (sequence is synthesized)
atcctaagatgaagatccatggagtggtggcatttaaatgtgagaatgttgcaactttagacccaatcacctttgaaaccccagagtctttcatctctttgcctaaatggaatgcaaaga

SEQ ID NO: 632158 - DNA, 120 bp, Artificial Sequence
  ENSG00000179915_25 (sequence is synthesized)
aaactggctccatatcatttgatttccgtacaacagagccaaatggcctcatcttatttagccatggcaagccaagacatcagaaagatgccaagcacccacagatgataaaggtggact

SEQ ID NO: 632159 - DNA, 120 bp, Artificial Sequence
  ENSG00000179915_26 (sequence is synthesized)
tctttgctattgagatgctagatggccacctctacctcctcctggacatggggtcaggtactataaaaataaaagccctgttgaagaaagtgaatgatggagaatggtatcatgtggact

SEQ ID NO: 632160 - DNA, 120 bp, Artificial Sequence
  ENSG00000179915_27 (sequence is synthesized)
tccagagagacggacggtcaggtaccatttctgtcaacacgttgcgtactccctacactgctcctggtgagagtgagattctggacctggatgatgagttgtacctgggggggctgccag

SEQ ID NO: 632161 - DNA, 120 bp, Artificial Sequence
  ENSG00000179915_28 (sequence is synthesized)
aaaataaagctggccttgtcttccccaccgaggtgtggactgctctgctcaactatggctacgtgggctgcatcagggatttgttcatcgatggccaaagcaaagatatccggcaaatgg

SEQ ID NO: 632162 - DNA, 120 bp, Artificial Sequence
  ENSG00000179915_29 (sequence is synthesized)
ctgaagttcaaagtactgctggagtgaagccttcctgctcaaaggaaacagcaaaaccgtgccttagcaacccttgcaaaaacaatggcatgtgcagggatgggtggaacagatatgtct

SEQ ID NO: 632163 - DNA, 120 bp, Artificial Sequence
  ENSG00000179915_30 (sequence is synthesized)
gtgattgttccggaacaggctatcttggcaggtcctgtgagagagaggcaacggttttgagctatgatgggagcatgtttatgaaaattcagctccccgtagtcatgcatacggaggctg

SEQ ID NO: 632164 - DNA, 120 bp, Artificial Sequence
  ENSG00000179915_31 (sequence is synthesized)
aggatgtttccttacggttccgatcccagcgtgcatatggcattctgatggcaaccacttctagagactctgctgacaccctccgcctggagctagacgcaggacgtgtgaaactgacgg

SEQ ID NO: 632165 - DNA, 120 bp, Artificial Sequence
  ENSG00000179915_32 (sequence is synthesized)
tcaatctagattgtatcaggattaactgtaattccagcaaaggtcccgagactctttttgctggctataacctcaatgataacgagtggcacacagtgcgtgtagttcggcgtggaaaaa

SEQ ID NO: 632166 - DNA, 120 bp, Artificial Sequence
  ENSG00000179915_33 (sequence is synthesized)
gtttaaagttaacagtggatgaccaacaggccatgacaggtcaaatggcaggtgatcatactaggctggagttccataacatagagactggcatcatcacagaacgacggtatctttctt

SEQ ID NO: 632167 - DNA, 120 bp, Artificial Sequence
  ENSG00000179915_34 (sequence is synthesized)
ctgtcccctccaacttcattggacacctgcagagcttgacatttaatggaatggcatacattgacctgtgtaaaaatggcgacatagattactgtgagcttaatgccagatttggcttca

SEQ ID NO: 632168 - DNA, 120 bp, Artificial Sequence
  ENSG00000179915_35 (sequence is synthesized)
ggaacatcatagcagatcctgtcaccttcaagaccaaatcgagctatgttgccttagctaccttgcaagcctacacttctatgcatctttttttccagttcaagacaacatccctagatg

SEQ ID NO: 632169 - DNA, 120 bp, Artificial Sequence
  ENSG00000179915_36 (sequence is synthesized)
gattaattctatataacagtggggatggaaatgactttattgtggttgaattagttaaagggtacttacattacgtgtttgatttgggaaatggtgctaacctcatcaaaggaagctcaa

SEQ ID NO: 632170 - DNA, 120 bp, Artificial Sequence
  ENSG00000179915_37 (sequence is synthesized)
ataaacctctcaatgacaatcagtggcacaacgtgatgatatcaagggacaccagcaacctccacactgtaaagattgacacaaaaatcacaacgcaaatcaccgccggagccaggaact

SEQ ID NO: 632171 - DNA, 120 bp, Artificial Sequence
  ENSG00000179915_38 (sequence is synthesized)
tagacctcaagagtgacttatatataggaggagtagctaaagaaacatacaaatccttaccaaaacttgtacatgccaaagaaggctttcaaggctgcctggcatcagttgatttaaatg

SEQ ID NO: 632172 - DNA, 120 bp, Artificial Sequence
  ENSG00000179915_39 (sequence is synthesized)
tcatctccgatgctcttttctgcaacggacagatcgagagaggatgtgaagggcccagcacaacctgccaagaggactcatgttccaatcaaggtgtgtgcttgcaacaatgggatggct

SEQ ID NO: 632173 - DNA, 120 bp, Artificial Sequence
  ENSG00000179915_40 (sequence is synthesized)
tcagctgtgactgtagtatgacttccttcagtggaccactctgcaatgaccctgggacgacatatatctttagcaaaggtggtggacaaatcacgtataagtggcctcctaatgaccgac

SEQ ID NO: 632174 - DNA, 120 bp, Artificial Sequence
  ENSG00000179915_41 (sequence is synthesized)
ccagtacacgagcagacagactggccataggttttagcactgttcagaaagaagccgtattggtgcgagtggacagttcttcaggcttgggtgactacctagaactgcatatacaccagg

SEQ ID NO: 632175 - DNA, 120 bp, Artificial Sequence
  ENSG00000179915_42 (sequence is synthesized)
gaaaaattggagttaagtttaatgttgggacagatgacatcgccattgaagaatccaatgcaatcattaatgatgggaaataccatgtagttcgtttcacgaggagtggtggcaatgcca

SEQ ID NO: 632176 - DNA, 120 bp, Artificial Sequence
  ENSG00000179915_43 (sequence is synthesized)
cgttgcaggtggacagctggccagtgatcgagcgctaccctgcagggcgtcagctcacaatcttcaatagccaagcaaccataataattggcgggaaagagcagggccagcccttccagg

SEQ ID NO: 632177 - DNA, 120 bp, Artificial Sequence
  ENSG00000179915_44 (sequence is synthesized)
gccagctctctgggctgtactacaatggcttgaaagttctgaatatggcagccgaaaacgatgccaacatcgccatagtgggaaatgtgagactggttggtgaagtgccttcctctatga

SEQ ID NO: 632178 - DNA, 120 bp, Artificial Sequence
  ENSG00000179915_45 (sequence is synthesized)
caactgagtcaacagccactgccatgcaatcagagatgtccacatcaattatggagactaccacgaccctggctactagcacagccagaagaggaaagcccccgacaaaagaacccatta

SEQ ID NO: 632179 - DNA, 120 bp, Artificial Sequence
  ENSG00000179915_46 (sequence is synthesized)
gccagaccacagatgacatccttgtggcctcagcagagtgtcccagcgatgatgaggacattgacccctgtgagccgagctcaggtgggttagccaacccaacccgagcaggcggcagag

SEQ ID NO: 632180 - DNA, 120 bp, Artificial Sequence
  ENSG00000179915_47 (sequence is synthesized)
agccgtatccaggctcagcagaagtgatccgggagtccagcagcaccacgggtatggtcgttgggatagtagccgctgccgccctgtgcatccttatcctcctctatgccatgtacaagt

SEQ ID NO: 632181 - DNA, 120 bp, Artificial Sequence
  ENSG00000179915_48 (sequence is synthesized)
acagaaaccgggatgaaggctcataccatgtggacgagagtcgaaactacatcagtaactcagcacagtccaatggggctgttgtaaaggagaaacaacccagcagtgcgaaaagctcca

SEQ ID NO: 632182 - DNA, 120 bp, Artificial Sequence
  ENSG00000179915_49 (sequence is synthesized)
acaaaaataagaaaaacaaggataaagagtattatgtctgatcccaagatcttaaatggacacttgtatagaaatagtcttcattttatctgagacataatataaacttatttactttcc

SEQ ID NO: 632183 - DNA, 120 bp, Artificial Sequence
  ENSG00000179915_50 (sequence is synthesized)
tttttatgaagcacatacaaaagaagacagggaatgcaatcaggaaggaaagactttttaaaaaataaaaacaagtatctcatgctcttgtttctcaaaaaagaaaaacaaaaaacaaaa

SEQ ID NO: 632184 - DNA, 120 bp, Artificial Sequence
  ENSG00000179915_51 (sequence is synthesized)
aacaggggccaataaattccctaacatccacagtgttttcatttactctgcttgtctttatgttgctggaacatttctaaaagacagtgatgaccgcacgcattcataaagcaaaggagt

SEQ ID NO: 632185 - DNA, 120 bp, Artificial Sequence
  ENSG00000179915_52 (sequence is synthesized)
actacagcatcaaggcacaacacaaaaaccaacacaaaacataacacaaaaaagaagctacctatgatcctggatttagccaaagtgctagcgctttcctgagaagtcagtccaattgcc

SEQ ID NO: 632186 - DNA, 120 bp, Artificial Sequence
  ENSG00000179915_53 (sequence is synthesized)
agagaagactgtccttttgagtgactcaacctgcaaacctttaagagtttgccgcctggtgcaactggagcagtggttggaacttgcatttgaaacaaagtgctggcttttttgaagact

SEQ ID NO: 632187 - DNA, 120 bp, Artificial Sequence
  ENSG00000179915_54 (sequence is synthesized)
tgtgtaggaacacattcaaaaagcccctttctggttgtgagagaggaaaaaaaagtatggaggccttattttcaaaaatgtgaaatataaggcacgttttcacacaaaatttcaaaacaa

SEQ ID NO: 632188 - DNA, 120 bp, Artificial Sequence
  ENSG00000179915_55 (sequence is synthesized)
aaacaagagggcatagatgcaatcattgggaaattttcatgcacgcttattatgttattacatatgtttatataaaatccatctctgtgtgctttctggactgtgataagtgacgtttta

SEQ ID NO: 632189 - DNA, 120 bp, Artificial Sequence
  ENSG00000179915_56 (sequence is synthesized)
tagcctgttgtatagaaaatgcaaaatatatctctgctcttcagccatttttggtaaattcaatgttataagtgttgctaagtatagggagttttatgacatcagagcaacaattatttc

SEQ ID NO: 632190 - DNA, 120 bp, Artificial Sequence
  ENSG00000179915_57 (sequence is synthesized)
agttgggtttttctttttttttgccaccattataaattgccacaattacttttattttttaaagaaattacagtgtagtgtttattctaaggaagatatgtatgaatgtatatacaaaga

SEQ ID NO: 632191 - DNA, 120 bp, Artificial Sequence
  ENSG00000179915_58 (sequence is synthesized)
ctcagctacttcttttcttatatgtacagccttcattctgttgcaattaagttttagtacttgtatgaaaggtgtgaattagaaagtcacatatatacatatgtatcttataatcttttc

SEQ ID NO: 632192 - DNA, 74 bp, Artificial Sequence
  ENSG00000179915_59 (sequence is synthesized)
agaaagtcacatatatacatatgtatcttataatcttttctccctgaaatactcacattcccacatacattcac

SEQ ID NO: 632193 - DNA, 120 bp, Artificial Sequence
  ENSG00000179915_60 (sequence is synthesized)
atccaaacgtgcatacagtagcaaatatttattgacaaattgaaaagcaggaaggaagagggttgtgccaaggtattgatgacaaatggggtgatttgcttcattgagatcttgctccca

SEQ ID NO: 632194 - DNA, 120 bp, Artificial Sequence
  ENSG00000179915_61 (sequence is synthesized)
ggtaaccttaagaagattttagtccctaaagaaatgaacctttccttatcaaatagaatatcactgatatactgctgcatgaataagaaccattatgtgggcaggttatggaagcaaaat

SEQ ID NO: 632195 - DNA, 120 bp, Artificial Sequence
  ENSG00000179915_62 (sequence is synthesized)
tggttaatctacaccttaactctggctgctgcaattgaaaactttctttctaataaaataatatatatatctctgaatctgatgtgcatgatgaacatttctggaaagtaaacactttct

SEQ ID NO: 632196 - DNA, 120 bp, Artificial Sequence
  ENSG00000179915_63 (sequence is synthesized)
ctcgactaagaaagtatttttcagtaatttttgattctgtattactacccacttaaaaaatcattctctgttaattattgactatgttttaacttttctggttttacatatatatcatta

SEQ ID NO: 632197 - DNA, 120 bp, Artificial Sequence
  ENSG00000179915_64 (sequence is synthesized)
aatatagttttagtttaacacattaagtagtggaaaagtatagattatacacttgttttgcatattattcaatgatgttcacagcaataaattactaatatgagaaggtagtgcaaaaaa

SEQ ID NO: 632198 - DNA, 120 bp, Artificial Sequence
  ENSG00000179915_65 (sequence is synthesized)
tgcattattacattgcaagttgatgtttcaggaaaaattggttgcattacttgaataccttctaaaagaacgataaaaaattttgtagaagagaagaatatctttccaattagctttaat

SEQ ID NO: 632199 - DNA, 120 bp, Artificial Sequence
  ENSG00000179915_66 (sequence is synthesized)
cagcaaaggcaaaaaatgcaaaacatcttttgtgatactttagttgatgaaaaaaaagccaagaagtggcctggatttcagacatacagcaccttagaaatatgtataattcatagcaaa

SEQ ID NO: 632200 - DNA, 120 bp, Artificial Sequence
  ENSG00000179915_67 (sequence is synthesized)
tcaccactatctatggttgccaagtaattgttgtgtacaaagaaatttagtggctttttatgacccagaaagtagaaggtataaaatgaaaatttaatatccattgcttcttttctagat

SEQ ID NO: 632201 - DNA, 120 bp, Artificial Sequence
  ENSG00000179915_68 (sequence is synthesized)
tttcattttttttaatttgccacattaaataattcacgagtcttttcttttcccccgtctcattcagtcttactcagggaaagccagttaaataagaagggaagtgtaaaactactaatt

SEQ ID NO: 632202 - DNA, 120 bp, Artificial Sequence
  ENSG00000179915_69 (sequence is synthesized)
tacagcttgaagggtttttttttttaagattgcttttctattttatctattaagcttgaaccagtttccatctggaaagattctaaaatataatagaaaataaattgaataatggtaatt

SEQ ID NO: 632203 - DNA, 120 bp, Artificial Sequence
  ENSG00000179915_70 (sequence is synthesized)
ttaagcagtatatctatgaaatgtgttgtttgggattgatttcaatgtttctccccagcgtaaattttaaagttacatgcaatgattgatatagtttattatcagcaaaattatttctaa

SEQ ID NO: 632204 - DNA, 120 bp, Artificial Sequence
  ENSG00000179915_71 (sequence is synthesized)
tattattggcttacacaaactctagcaaaaattattttttcctcaatggaaaaagaaaagagaggaacagagttagaaagagaaaatgacttgaatcccaagtatcttcataccaaacat

SEQ ID NO: 632205 - DNA, 120 bp, Artificial Sequence
  ENSG00000179915_72 (sequence is synthesized)
atcagggttccctgcatagtttgcagttgattgaggatttcacacgacttggcataaatttgattacatctctagactgtaacttttctgattgattatgcttcttttttatccatgtaa

SEQ ID NO: 632206 - DNA, 120 bp, Artificial Sequence
  ENSG00000179915_73 (sequence is synthesized)
tgtgttgccttttttaaaagaacaaatactacaataacgtgtgaagtggtcaatccctaagacatcaaagaaaggccacataaccctacccttctagtgctttgtgtgattgggtatcaa

SEQ ID NO: 632207 - DNA, 120 bp, Artificial Sequence
  ENSG00000179915_74 (sequence is synthesized)
aggggttttcttcttctttttttgtttgtttgtttttctgttgcaaggccaatttatccattattggaaatgctaagcaagtggaatttactgttttgttaataaaatatttcttaatac

SEQ ID NO: 632208 - DNA, 120 bp, Artificial Sequence
  ENSG00000179915_75 (sequence is synthesized)
aactgtgatttattgattttaaaaattatatgcggcaccatttcgtgcttaagtgggaaagtaaagaaggctgcatttgaagggaagacccatccttatattatagaggaagaatgttga

SEQ ID NO: 632209 - DNA, 120 bp, Artificial Sequence
  ENSG00000179915_76 (sequence is synthesized)
ctctcttttttctggatttaactagtcattaaagacctctatattcatacacttaaagatgtagccattaaatgtacttttgttatatttgttcatcttgatatgccagaaaccataaac

SEQ ID NO: 632210 - DNA, 120 bp, Artificial Sequence
  ENSG00000179915_77 (sequence is synthesized)
tcatacagtattagttgcaaacaatattaaaatactaatttcataaatatgctttttctctataaaagacaatggaatccaagttaagtaaacctgtgattaaattccaacactatcaca

SEQ ID NO: 632211 - DNA, 120 bp, Artificial Sequence
  ENSG00000179915_78 (sequence is synthesized)
gtggacagctggccagtgatcgagcgctaccctgcaggaaacaatgataacgagcgcctggcgattgctagacagcgaattccatatcgacttggtcgagtagttgatgaatggctactc

SEQ ID NO: 632212 - DNA, 120 bp, Artificial Sequence
  ENSG00000179915_79 (sequence is synthesized)
agatccaggaagctatgagaatgccctctgatgtctacggatggtgagtcaacaaaagaaagtcaagaacctgaaccagcccaccaacaacaatgaaaagtcagcagtctgcaacctgga

SEQ ID NO: 632213 - DNA, 120 bp, Artificial Sequence
  ENSG00000179915_80 (sequence is synthesized)
agagggtcctcaccagaacctgaccaggctggcacacccatctcagacttccagcctccagaggcatttaaccaagttatttttgtcgtggtgtgaagctgaagtgagcgcaaataacat

SEQ ID NO: 632214 - DNA, 120 bp, Artificial Sequence
  ENSG00000179915_81 (sequence is synthesized)
gaagagttaaacaggtagaaaacttggttcaagacagagcacagaaggctggagaatgacgacaggctgcagtaaaaagcaccttgtcagacacagttgatcgtcgtctgcaagttggca

SEQ ID NO: 632215 - DNA, 120 bp, Artificial Sequence
  ENSG00000179915_82 (sequence is synthesized)
tcttaccctggtgggttccttttacatctttttggcacagcctaggcaagtcatgaagatttgttgtgattacccaaggcagagccacagtaaggggtggggcaagggacatcggatcta

SEQ ID NO: 632216 - DNA, 120 bp, Artificial Sequence
  ENSG00000179915_83 (sequence is synthesized)
gaagaatgccagtgcctgtgtgagtcttgcttgcccctgcattcctcgaaaagctgcagcttcttttcaagggttccgagcaggagaccaaggtgcacaagtaaagccagagctcatcat

SEQ ID NO: 632217 - DNA, 120 bp, Artificial Sequence
  ENSG00000179915_84 (sequence is synthesized)
tttccactctgctttcagtgttttcttgttctgtagctgctttcaaaccatcactgcaaaggatgggcaaatgcttgcaaattatatggctgcaaattaaatacatatcttttgttcaca

SEQ ID NO: 632218 - DNA, 120 bp, Artificial Sequence
  ENSG00000179915_85 (sequence is synthesized)
cacacccatctcagacttccagcctccagaggctggtctgcgatttgctttggctgacagaatatgatgaagtgatgttatatgggttccttactcagcctttaagtggacttgcagcta

SEQ ID NO: 632219 - DNA, 120 bp, Artificial Sequence
  ENSG00000179915_86 (sequence is synthesized)
ctgctctctactccacactgctaccaccatctgaagaaccctacagtaggagacacttggcccagataagtaagatcaattcacatcatggaaccccaggatttgaaccacaggataact

SEQ ID NO: 632220 - DNA, 120 bp, Artificial Sequence
  ENSG00000179915_87 (sequence is synthesized)
gtgagaaggacaagtctcataaccacatgttgttaatgaagaagctgaggcaccaagcgacttaaggatttgaccaaaatcagacagcagcagattcaaagataatgccagctcctcatc

SEQ ID NO: 632221 - DNA, 120 bp, Artificial Sequence
  ENSG00000179915_88 (sequence is synthesized)
ttcgtttctggtgctgtttacaccgtgatacttcaacactgaaagaaacacctatcaattctcgtacaactttaaagatgcattcttactgtctcgaggcatcctctaattttgtgttcc

SEQ ID NO: 632222 - DNA, 120 bp, Artificial Sequence
  ENSG00000179915_89 (sequence is synthesized)
tatttgcttcatctagtttaggttattaactcctaaaggctagggcatacattttgaaatttttttttctcaggacattaggaaccttaataaattacttttgatggttactttccacaa

SEQ ID NO: 632223 - DNA, 120 bp, Artificial Sequence
  ENSG00000179915_90 (sequence is synthesized)
gagctctcctgtcaccagtattgatttcagaggatggactaaatttcctaggatttccattaagaattaagaaaaaagctctaagcacgcagggtagccagacagacatggatatgagat

SEQ ID NO: 632224 - DNA, 120 bp, Artificial Sequence
  ENSG00000179915_91 (sequence is synthesized)
ggcactgtgaaaacttgcagctgatatttgaatctcctgaaggcctccttccctcatcactctagcatagagaatggagctaaggacaatattgtggagtaggtaggcaatttccagtat

SEQ ID NO: 632225 - DNA, 120 bp, Artificial Sequence
  ENSG00000179915_92 (sequence is synthesized)
acagaaaaattggagagagtcacagacaattatacattcatggatatatctagggtcttttggcacattaaagacaatatgagttcaaactgagtaacaactattaaaaagcagaaatat

SEQ ID NO: 632226 - DNA, 120 bp, Artificial Sequence
  ENSG00000179915_93 (sequence is synthesized)
atgagagatagtttatatttttgcatcataaactatgtgtattatcactacccgtttccatttgctcctcaaattttcacctttattttaattcatttgattaatcataagtaactagct

SEQ ID NO: 632227 - DNA, 120 bp, Artificial Sequence
  ENSG00000179915_94 (sequence is synthesized)
cagatttcccaaaaatcaatgataatttttttcagtgttgtgctatatattttttgatctgtgggttaagccacaattcatcttcttgggaataaaaaacattcaaatacttgttttact

SEQ ID NO: 632228 - DNA, 120 bp, Artificial Sequence
  ENSG00000179915_95 (sequence is synthesized)
attttcccatgactataatgtatagccttttgttataaagtctccattactttattcattactttgaaagacaaaaactatttatcatggtgggaatgacttgaatattattttggggag

SEQ ID NO: 632229 - DNA, 120 bp, Artificial Sequence
  ENSG00000179915_96 (sequence is synthesized)
ccaaaataagtcagttcccgaaagaaattagttctgcagtctttgtgctctcacctttgttccccctgcttttttattaaaatgtaatgagtcttgtagggttccaccatcttggctcta

SEQ ID NO: 632230 - DNA, 120 bp, Artificial Sequence
  ENSG00000179915_97 (sequence is synthesized)
agcctatttcagatttttgatggaaaacatgattacataagttcacagcctaaatttattagtaaagtcatggatacagtgaaggcttaacagtatggggaaatgccattacctggctga

SEQ ID NO: 632231 - DNA, 120 bp, Artificial Sequence
  ENSG00000179915_98 (sequence is synthesized)
tactattgtttatgtaggattgggggagggaaacagctcatagatcattatgaaggaattaggttcctcttctttattagtctgtaagtaatttacatttgagatttgtgtggacagttg

SEQ ID NO: 632232 - DNA, 120 bp, Artificial Sequence
  ENSG00000179915_99 (sequence is synthesized)
atattagctataaaagaaagtcaaacaaaaagagatactgggtctaaagttgagctaaatggtttacttgcttatttctacttaaatgccataggtgttatgcatacagtgatgactttt

SEQ ID NO: 632233 - DNA, 120 bp, Artificial Sequence
  ENSG00000179915_100 (sequence is synthesized)
ttgagtattaaaagaaaaaagaagaaaaagcaattagcctataggagaagcaacgactatgtaattcaaaacaaaactaaaacaaaataagtctatataatgacataattttcttccctt

SEQ ID NO: 632234 - DNA, 120 bp, Artificial Sequence
  ENSG00000179915_101 (sequence is synthesized)
attttcaacacattctggaggaagtaaatgttatctggtgaatttacttgatatttatctgagcaagatcatcaaactaaatgacatcaataatttcatccctcattatcagctgtagtt

SEQ ID NO: 632235 - DNA, 120 bp, Artificial Sequence
  ENSG00000179915_102 (sequence is synthesized)
gtgtattgtaactttgtataagattggaatttgttgggttttggggagagaaagatgaagaagtccctgaatttcattttttaatgaatattttccataaaagctgtctttaaaaaaatt

SEQ ID NO: 632236 - DNA, 120 bp, Artificial Sequence
  ENSG00000179915_103 (sequence is synthesized)
agcacagcttagatctgcagcatgcagggtttaagataccagaagcctaaaaacaataataatgaaaataagaataaactcatttggataaactaattttaagatttatgttaaaatatt

SEQ ID NO: 632237 - DNA, 120 bp, Artificial Sequence
  ENSG00000179915_104 (sequence is synthesized)
tcttcttgaagattgcatgtcaaatttatgcacgctgtatgtgaaatctagtccttattctcgagaaaagcaaaaatgccttggcattcaaacattccctaggcctgtggagaattagag

SEQ ID NO: 632238 - DNA, 120 bp, Artificial Sequence
  ENSG00000179915_105 (sequence is synthesized)
aagccaaacatctttgacatttaacaattctttacttcacttagatttgtcaccatgtagctttgtttgaattggccatttttaaaaccttctattgttgtttccaatggtaaactttta

SEQ ID NO: 632239 - DNA, 120 bp, Artificial Sequence
  ENSG00000179915_106 (sequence is synthesized)
taacaaaacatctgggctttataagtatgtaaagaataatgatatggagtggccatatttgcatgtgtctgtccccggaagggtggactgtaattttattggatgtctgcagctattacc

SEQ ID NO: 632240 - DNA, 120 bp, Artificial Sequence
  ENSG00000179915_107 (sequence is synthesized)
tgactgtgcctatttatgacagcaggttaattcacttgttatggatcaatgcgtaggattaaagattcttaaatggtcacacctgaatgtttgtaaaagttgtcattttccttgcttgct

SEQ ID NO: 632241 - DNA, 120 bp, Artificial Sequence
  ENSG00000179915_108 (sequence is synthesized)
atgactctaatgggcttgaaaattggtccagcccgcctcttctctgtttcctttctctccctcctctctctctttcttcctttcttctttctctcctctctctccctcaccttcccccct

SEQ ID NO: 632242 - DNA, 120 bp, Artificial Sequence
  ENSG00000179915_109 (sequence is synthesized)
ttctttttctttttctttttctgtttctctcccttactccttcgtctgcatcttcttctcagctgcctttccgccgttcgattcccacttccttcagaagggcgcactcttccctctgaa

SEQ ID NO: 632243 - DNA, 120 bp, Artificial Sequence
  ENSG00000179915_110 (sequence is synthesized)
tgaacccctcgccgggcgtaagtgtcaggaggcggcggacgcggagattgcctcgggagcaggcgatgcgcgccgctgctccgcgcgctgcccgggggaggctggcgctagcgggcgagc

SEQ ID NO: 632244 - DNA, 120 bp, Artificial Sequence
  ENSG00000179915_111 (sequence is synthesized)
cggccggggctgaatggagggaaggggcgcctggattccatggggtctgcttctgtcttgaaaggaggttgggccggcgaagtggcctccctagtccccgcacacaaagctaaatggatt

SEQ ID NO: 632245 - DNA, 120 bp, Artificial Sequence
  ENSG00000179915_112 (sequence is synthesized)
tacctagtggattcgcggtggatgtctgtcatgtagaagtgaggaccttccaggaggagctttaaacaatttctcggccccccacccgccggcacgcactctcgcccgaaactctttggg

SEQ ID NO: 632246 - DNA, 120 bp, Artificial Sequence
  ENSG00000179915_113 (sequence is synthesized)
agtatctctcgagaacctggagccctggaaatctgggagcagccacccgctccgcgcttgctgttcccggggctgcctttccggacaagcccctctccagctgcattcgcctcggctatg

SEQ ID NO: 632247 - DNA, 120 bp, Artificial Sequence
  ENSG00000179915_114 (sequence is synthesized)
tttcggattgtttggggtgctaggcacggcggactccaggaccccgagaagactgtccgaaggagggagaggatgggtgccctggcgcggtgaggcggccggcccctcagcccactccgc

SEQ ID NO: 632248 - DNA, 120 bp, Artificial Sequence
  ENSG00000179915_115 (sequence is synthesized)
cccgctcccctgcgccctctcctctccccgcgccccaaactttgcctcccgcggcggctgcccctcggcgggcgccccgccatgtaccagaggatgctccggtgcggcgccgagctgggc

SEQ ID NO: 632249 - DNA, 120 bp, Artificial Sequence
  ENSG00000179915_116 (sequence is synthesized)
ggcggcggcggcggcggcggcggcggcgcaggggggcgcctggccctgctttggatagtcccgctcaccctcagcggcctcctaggagtggcgtggggggcatccagtttgggagcgcac

SEQ ID NO: 632250 - DNA, 120 bp, Artificial Sequence
  ENSG00000179915_117 (sequence is synthesized)
cagtttgggagcgcaccacatccaccatttccatggcagcagcaagcatcattcagtgcctattgcaatctacaggtcaccggcatccttgcgaggcggacacgctgggacgacatatat

SEQ ID NO: 632251 - DNA, 120 bp, Artificial Sequence
  ENSG00000179915_118 (sequence is synthesized)
gggcgaccaaggtaaaagtaaagaaatgaatgactatttaaattacaaaaaagtcaaaatatgttatacatgaaaatcaagccataatagctggttaatagctcaggagcacaagttaat

SEQ ID NO: 632252 - DNA, 120 bp, Artificial Sequence
  ENSG00000179915_119 (sequence is synthesized)
aattatcagcgaatgttggcactttgattggaggcttgtacttttccttcataagtcatcataattgtaattacatatttgtatttgtgattatacttaatgctaacttttcctagtaga

SEQ ID NO: 632253 - DNA, 120 bp, Artificial Sequence
  ENSG00000179915_120 (sequence is synthesized)
gtgtaagctctatgagggcagaaagcttgtctttctctttgaccattgtatttccagaacatttttcttattgtatcttgaatttgcgattttcatgacttaaatgtatttgtttggggg

SEQ ID NO: 632254 - DNA, 120 bp, Artificial Sequence
  ENSG00000179915_121 (sequence is synthesized)
cggtggtttcaactgtccattttaaagagtcaaatggacatttactgtttaattatccaggcttctcatgttactagaagagcaaaatattacaagtagaactgaaaagaatatagttac

SEQ ID NO: 632255 - DNA, 120 bp, Artificial Sequence
  ENSG00000179915_122 (sequence is synthesized)
acattctgaaagtgcataagccttattctctttgtgaagagtagatcttaaattagtataatttataaaagtaataaagatagatttttctcaaaactaattgttaaagctaattgtaat

SEQ ID NO: 632256 - DNA, 120 bp, Artificial Sequence
  ENSG00000179915_123 (sequence is synthesized)
tgttaagacctggatacaactcttccacctgaactaattgatgagtaatatctaatattaccatgtgctttaaatttttatctatactgtcataccacaataatatttcattaaacttac

SEQ ID NO: 632257 - DNA, 120 bp, Artificial Sequence
  ENSG00000179915_124 (sequence is synthesized)
tcttataatagatttgatattattaatacttagaaaagaataaagcatttggtgtttttttaatacattttcttttgtctttgtcttagtccatttgggcttctatataaaaataccata

SEQ ID NO: 632258 - DNA, 120 bp, Artificial Sequence
  ENSG00000179915_125 (sequence is synthesized)
aactgggtagcttgtaagtaacagaaacttatttctcaaacgtctggaggctgggaagtccaagaccaagggctgacacagtcggtgtccagtgagattttgcttcctggttcatagatc

SEQ ID NO: 632259 - DNA, 120 bp, Artificial Sequence
  ENSG00000179915_126 (sequence is synthesized)
actaccttctctttgtgtcctcacttgaaagggagaaagagagctctctggagtgtcttttataaggacagcaatcccattcataaaggctctgccctcaggacctaatcaaatcccaaa

SEQ ID NO: 632260 - DNA, 120 bp, Artificial Sequence
  ENSG00000179915_127 (sequence is synthesized)
atccccctctcctaatccgtcattttgtgggttcggatttcagtttatcaattttggaaagatacaacattcagatcacacagtttccatgatttttatttttataccattttcaagtcc

SEQ ID NO: 632261 - DNA, 120 bp, Artificial Sequence
  ENSG00000179915_128 (sequence is synthesized)
tgtgttgctatatagcgaatttgtctgtgaagtgcacaacttccagttactaaaatcctaatgcatatttgttttatgctttttaaaatatattttgctgtgatttctgatatagaccta

SEQ ID NO: 632262 - DNA, 120 bp, Artificial Sequence
  ENSG00000179915_129 (sequence is synthesized)
atttggttattaaaatatgatatgtatcttcttctgtataaattcttaaattgtatttcctcatttagtttcataataataagtcatctgtttgttcagaaaagtttgtgaatgttgaca

SEQ ID NO: 632263 - DNA, 120 bp, Artificial Sequence
  ENSG00000179915_130 (sequence is synthesized)
gacccttactgttgaaatgcctgtgtttggtgcatatacaaactaagaagtaagaatatttgtttaaattttctactgtgttacctctactcttgcaatactggatccccttaactcaca

SEQ ID NO: 632264 - DNA, 120 bp, Artificial Sequence
  ENSG00000179915_131 (sequence is synthesized)
gccgcagaccgtgggaagaccggagtttcaccttataatatcagacattaaatatctacttttatctatacagtacacatagaaggctatgtgactatttagaattcaatgtttgtttac

SEQ ID NO: 632265 - DNA, 120 bp, Artificial Sequence
  ENSG00000179915_132 (sequence is synthesized)
tagttcatctttagcttacatgttcattagttctgagtagaaccaagaaaaactaattgaagagtatatgcttatgtattatctcttgctgtgatttaaccaatcttgttacatgtatta

SEQ ID NO: 632266 - DNA, 120 bp, Artificial Sequence
  ENSG00000179915_133 (sequence is synthesized)
atcaagagcacactgtcttccttttctcaatcttgtggaggatgggttgaggaggcaggcagatacagatacaactggacatctgcttgtaaggaaaactggtttgaccgcttttataaa

SEQ ID NO: 632267 - DNA, 120 bp, Artificial Sequence
  ENSG00000179915_134 (sequence is synthesized)
aacttcatctgtaaaataggaataaaaacacctaatgcctggggtgctatgaaaattgtacaaaataacaaatataaagtgtttagcacagatggcagataatgttaataatgttttaat

SEQ ID NO: 632268 - DNA, 120 bp, Artificial Sequence
  ENSG00000179915_135 (sequence is synthesized)
ttttcttggtggcatacatgaactggttgattaggttaaaattatgcgtgaaagcacagctttacttttatgaaaaatgtatttgaggtccactaggttgtatgtgatgttgttgtccac

SEQ ID NO: 632269 - DNA, 120 bp, Artificial Sequence
  ENSG00000179915_136 (sequence is synthesized)
ctcatccaacccaccatgattttggtacttacatacttaaatgtccttggattggatccaaggaagaccagccatatacacatattcggccccgaagtgaattgtgctatggcaattatc

SEQ ID NO: 632270 - DNA, 120 bp, Artificial Sequence
  ENSG00000179915_137 (sequence is synthesized)
ccattgaattgctctttaaaaggtcaattcattagctttgcctttgcttccctcatttttgaatgtggtgctgattaaacctccatgaagccttgtattaaccttttattcaaagtaagt

SEQ ID NO: 632271 - DNA, 120 bp, Artificial Sequence
  ENSG00000179915_138 (sequence is synthesized)
aaaaaccagttcaagattttcactgcaaagctgtcataggtcaccaggttgaaagcatttacaggagaaaaaatgggatgtattttcccagaaaaaaaaaatgacaccaggctcttaaat

SEQ ID NO: 632272 - DNA, 120 bp, Artificial Sequence
  ENSG00000179915_139 (sequence is synthesized)
gttcttgggttcctttttagttggacagtaccaggggaactgtaatcttatcagtgtttctttatatcttacagcacatatttgcaaatggcattgaaaaagagaagtgatggaggttaa

SEQ ID NO: 632273 - DNA, 120 bp, Artificial Sequence
  ENSG00000179915_140 (sequence is synthesized)
aggagtttcagatataataattcttaatcaaaatttcatttaggaaagagcagcacctagatttactaagcaaggtaaagtagtaggactttctttccaggaagaatgagagaaacactt

SEQ ID NO: 632274 - DNA, 120 bp, Artificial Sequence
  ENSG00000179915_141 (sequence is synthesized)
ggtagtaatttatgcctttcttatgggttccagtatattatggagtcagacatgtatatgtacatatatcaagggagcctcagcacctgctgcaaatcactatcttcagtgcattcttgt

SEQ ID NO: 632275 - DNA, 120 bp, Artificial Sequence
  ENSG00000179915_142 (sequence is synthesized)
ttcttccctgggtatcagtgaggaaggaaggacacatactcccttggcaggtgacagaatgatgtagtactacttaatttcagcaacaattgggaatatatgtagcctgaacctcagcat

SEQ ID NO: 632276 - DNA, 120 bp, Artificial Sequence
  ENSG00000179915_143 (sequence is synthesized)
taactaaggatagaattcagtcttcctagaagctctatttttacctactatataagatattctggcaaccagtaaatttacaggccactgaatgaaagtctaacattgttgtgtcttgat

SEQ ID NO: 632277 - DNA, 120 bp, Artificial Sequence
  ENSG00000179915_144 (sequence is synthesized)
atttcagtgactactcatcacagatttcatagaaagagtgaaaggaaattatggagtataactaaatacaaaacatctctttttgtaaaaattgagaatttgatttttttatacaaactt

SEQ ID NO: 632278 - DNA, 120 bp, Artificial Sequence
  ENSG00000179915_145 (sequence is synthesized)
tttgattcaaagtcaagttccgtcacatagtagctacggaatcataagcaaattatctaacatctgcaaccttctgtttccttattggaatccttgacctgcagtcattataatgaaatc

SEQ ID NO: 632279 - DNA, 120 bp, Artificial Sequence
  ENSG00000179915_146 (sequence is synthesized)
tggagccaatgatggatatatgaacctttggattcaatctttccaaacatatttctgactagaaggaatttggttttattttcatccagctaacgtgaaataaaattgtcctttcaaaat

SEQ ID NO: 632280 - DNA, 120 bp, Artificial Sequence
  ENSG00000179915_147 (sequence is synthesized)
attaaccgacgttgaagataagtctgattccgttatggtttttcttctaatatagaagacaacaatgtggaaggtctggcgcacctgatgatgggcgaccaaggtaaaagtaaagaggac

SEQ ID NO: 632281 - DNA, 120 bp, Artificial Sequence
  ENSG00000179915_148 (sequence is synthesized)
tggctgaagttaagagtcttaaagagcagttggatttgcactgaccaatgaggtggaagaagagagaagctgattgatcccaaagaaagccaacacctagactgatgaatgtaatgtagc

SEQ ID NO: 632282 - DNA, 120 bp, Artificial Sequence
  ENSG00000179915_149 (sequence is synthesized)
aagattaattcaacaaatctatattctagagcagaaatacaatcatgactatgacatggcatccacagagtgttcatataacaaggaaatgaaaacatttgggcaagttagaatgaatga

SEQ ID NO: 632283 - DNA, 120 bp, Artificial Sequence
  ENSG00000179915_150 (sequence is synthesized)
cagaatggaagtgctgtgagactggtacaaagtgaagtaggaattcagaaaaaggaaagcataacatcaatccaagtctgtcttatgtgaatatccccaccttgtgccatctgttggagg

SEQ ID NO: 632284 - DNA, 120 bp, Artificial Sequence
  ENSG00000179915_151 (sequence is synthesized)
gatgatgggcgaccaaggtaaaagtaaagagttgatgttgatccttctgtgctccataacaactcagggtttggaaactgcaaaatcccttatcatgtgtacatgacaaaaatggcgaag

SEQ ID NO: 632285 - DNA, 120 bp, Artificial Sequence
  ENSG00000179915_152 (sequence is synthesized)
tcagctggagacatgttagagaccactgctgtgggctggcagaatcacaatgaattaaacacgagtttactcattcttctcataggccatagtgcctcctatttttaattagtcatcctg

SEQ ID NO: 632286 - DNA, 120 bp, Artificial Sequence
  ENSG00000179915_153 (sequence is synthesized)
tttcaaactttagagtcagtctgttacttgtgttttttacattcctaaacaaagatatgtcacctttaactggatatggttaagaataaactttgaatgaattatagttttctttggggc

SEQ ID NO: 632287 - DNA, 120 bp, Artificial Sequence
  ENSG00000179915_154 (sequence is synthesized)
agctgaagatctgttattcaaagccaaccttacttttgctggttgtgggtagatggattcaaatagtcttcatgaaatttggatcacatttttttggggcttgaaatttgtcaatgatgt

SEQ ID NO: 632288 - DNA, 120 bp, Artificial Sequence
  ENSG00000179915_155 (sequence is synthesized)
tgttgttaggatcattgataatgctaattttattctcctttctatttagaatttaggtttatctgtttgccttgaatgaagtatgtcttttctcttttgttcttgtttcttttcctatgt

SEQ ID NO: 632289 - DNA, 120 bp, Artificial Sequence
  ENSG00000179915_156 (sequence is synthesized)
actctacaattctttggcagttagggaaggcgttctaatgttggaagaagtgttttaactttaaattgaagatgagaattagcaagagtttatcaagtggattaagaaagaaaggccata

SEQ ID NO: 632290 - DNA, 120 bp, Artificial Sequence
  ENSG00000179915_157 (sequence is synthesized)
ccatgcagagggactggaccctgaaaaatcaaggaggactgacagaactccataaatcaaagatatgttaataatttaggacatatggatattgttcaaaacattttatgagcaatgata

SEQ ID NO: 632291 - DNA, 120 bp, Artificial Sequence
  ENSG00000179915_158 (sequence is synthesized)
ggacttccagagagacggacggtcagatcaagaagattgtgtttgcctgtttggaaatatgttttttacctaacaaaataaagaaatagaatatatggaaattgagaaggagttgggagt

SEQ ID NO: 632292 - DNA, 120 bp, Artificial Sequence
  ENSG00000179915_159 (sequence is synthesized)
acggcttccggacctcatctccgatgctcttttctgcaacggacagatcgagagaggatgtgaagttgcattgatgaaagctgacttgcaagggcccagcacaacctgccaagaggactc

SEQ ID NO: 632293 - DNA, 120 bp, Artificial Sequence
  ENSG00000179915_160 (sequence is synthesized)
agaccactttcatgacttctggaagcaaatgtcctagtacagactcagcatcattactgcctagaaagtcaaggggtcttatggcttacattcttcctttggttcaactcacctcatcag

SEQ ID NO: 632294 - DNA, 120 bp, Artificial Sequence
  ENSG00000179915_161 (sequence is synthesized)
tgggagaagactgttccttccaaatatccacctttctgtttgatctgtctagcatctcgtgagagccgccttgttactcctaaatctggaaaagaagaatatattgccacgttcaaagga

SEQ ID NO: 632295 - DNA, 120 bp, Artificial Sequence
  ENSG00000179915_162 (sequence is synthesized)
tctcatattccttagaagcaacttaggtctttccctatatggcatttaataatgtctatttgaaatgagactttgcttgcacgtagaacaactaaccctcaattggaaagttacttttgt

SEQ ID NO: 632296 - DNA, 120 bp, Artificial Sequence
  ENSG00000179915_163 (sequence is synthesized)
ataaaataagattagctcaaaataatttggtaaaacctaacctgaacttcatatggtgctttgtttaaaatgacaaggaactttgaatggccgggaattcaaatagagatcaaagtagtt

SEQ ID NO: 632297 - DNA, 120 bp, Artificial Sequence
  ENSG00000179915_164 (sequence is synthesized)
ttttttaaataattcatattttcatcacaagtaaatcaaagtctgggaaaatatctgtactcattgaaaaatgactcacaggtttaaatttgaaaaaaaagagttaaagaaaaattataa

SEQ ID NO: 632298 - DNA, 120 bp, Artificial Sequence
  ENSG00000179915_165 (sequence is synthesized)
ataataaattgccattatatgcagcccatacctatgaaattcttagaagataataggtctttaaaaaaatatgctttctaaatctgatttttgcaaaggcaacactgttttgacagaaat

SEQ ID NO: 632299 - DNA, 120 bp, Artificial Sequence
  ENSG00000179915_166 (sequence is synthesized)
acttgtttatattatttgcattttgataacactgagtaagagctgaaatatatgttgcttaagaattttcgatcattttatatttaattaaattttctaacaagcagtttttgagtgact

SEQ ID NO: 632300 - DNA, 120 bp, Artificial Sequence
  ENSG00000179915_167 (sequence is synthesized)
gctacaaaaggagaggaggttagaaaatcttgcagaaagagaaatcatggtgtctgagatgctcagactctatgaggacatcttgcccatttaccttagaccacttggaaagcattttcc

SEQ ID NO: 632301 - DNA, 120 bp, Artificial Sequence
  ENSG00000179915_168 (sequence is synthesized)
tgtagaaaagtcttacagttaattcttcaggtgctcactagatatattttaagaatctttaaagatagatgaaaatctcactagtatgtgtttctatcccaatattttcatcgtataagt

SEQ ID NO: 632302 - DNA, 120 bp, Artificial Sequence
  ENSG00000179915_169 (sequence is synthesized)
gtttctgtagtcactgacctatcaggaagggtcatggcgctccctcattaatctccccctcagaacctgttcctgcaattattatgcatttcctggtctctttgtgcccccgaaatgctc

SEQ ID NO: 632303 - DNA, 120 bp, Artificial Sequence
  ENSG00000179915_170 (sequence is synthesized)
tgaaatgcttatttccctcctgcagagtgaacattatttaacgtagtttgttagtaaggaaatgaaactgaagaggtaggaaaggactgtgtgttaaataaaacaacctagaatccttta

SEQ ID NO: 632304 - DNA, 120 bp, Artificial Sequence
  ENSG00000179915_171 (sequence is synthesized)
acattgacccctgtgagccgagctcagggacaaagcagaccatgtggaaaacttctagagaccaccgtatcttaccaaatgctagaagagagaggaaggattaaaaactacttttcagtg

SEQ ID NO: 632305 - DNA, 120 bp, Artificial Sequence
  ENSG00000179915_172 (sequence is synthesized)
cactaatttctgactgcagactccagacatatcttcaataaagcaatgcaggagagctatctaatccattctaaattacatatattccctcaagtaagagaataaaaataatgtcactca

SEQ ID NO: 632306 - DNA, 120 bp, Artificial Sequence
  ENSG00000179915_173 (sequence is synthesized)
gcattggatcatgaggcccatgcttagatgctagcactggctcgaacacctactattatgtggcttagcaagtcactgatttctgaacctcaagttcatgaaatataatttgaaggcaat

SEQ ID NO: 632307 - DNA, 120 bp, Artificial Sequence
  ENSG00000179915_174 (sequence is synthesized)
aatctatagcctacccacattacaggcttgttgagaggtcatgtgggtaatatagtgaaattgtaggcaaatgatagcatgctacgcttgagctaagtatagcatgttactgttttaatg

SEQ ID NO: 632308 - DNA, 120 bp, Artificial Sequence
  ENSG00000179915_175 (sequence is synthesized)
gttattattatgattttttaaattatcattacttcagtgactacaagactggttctgttgttcttctggctttttaaatatttggacattttccgttctgaaataaaatccataattaca

SEQ ID NO: 632309 - DNA, 120 bp, Artificial Sequence
  ENSG00000179915_176 (sequence is synthesized)
acagcaaatttttttttctaagagcttgacatatagtaatttatttaatccttccaacaacattataaggtatgtaatactattatctgttttatagaactgttaagaagattactgaat

SEQ ID NO: 632310 - DNA, 120 bp, Artificial Sequence
  ENSG00000179915_177 (sequence is synthesized)
ccagggtcaccagtcagtaacaactttatgggctgtctcaaagaggtaaatatcgttgccatcagaatcattcctaattcatggtctcatcatttcagatccagcatgaaagcacctttg

SEQ ID NO: 632311 - DNA, 120 bp, Artificial Sequence
  ENSG00000179915_178 (sequence is synthesized)
atttaatggtgtagatttctaaacatcaaagttaaataactttgaattcactgttagccataggtgctgttggtaagcagtgatgtacttggtttattctgaagtaaataatttaatcat

SEQ ID NO: 632312 - DNA, 120 bp, Artificial Sequence
  ENSG00000179915_179 (sequence is synthesized)
aggaactttacattgcaatttcctatgtggagttaaatcctagttgtgcataaaatcggggttaagtctggacagtttatataactgatttacagtgtaaacttatgtttcctaaatttt

SEQ ID NO: 632313 - DNA, 120 bp, Artificial Sequence
  ENSG00000179915_180 (sequence is synthesized)
tatatctcaatataatcatggagcaattttctcaatttccccacttttctcttgtgtgagtagtgaattcaggggatctggaatgaagttttgtggattaatgtctttctttatgaaaaa

SEQ ID NO: 632314 - DNA, 120 bp, Artificial Sequence
  ENSG00000179915_181 (sequence is synthesized)
atgtctttctttatgaaaaaaagactataaaaaaataaattcaagaacatcttcattattttgatttcttctttatgaattcttaaatattttctaactgtttaaatgtccagtgataga

SEQ ID NO: 632315 - DNA, 120 bp, Artificial Sequence
  ENSG00000179915_182 (sequence is synthesized)
acaatgaaaagtcagcagtctgcaacctggaagagggtcctcaccagaacctgaccaggctggcacacccatctcagacttccagcctccagagttttcaaatttaggctggtctgcgat

SEQ ID NO: 632316 - DNA, 120 bp, Artificial Sequence
  ENSG00000179918_0 (sequence is synthesized)
aggaagattgtgcatgccgtgggtctgacggcttgagtagcgctagggagaatccctgcaggtaatatttgacttttgcttcatattaatctgagtggaaaataaaagggccctcttctc

SEQ ID NO: 632317 - DNA, 120 bp, Artificial Sequence
  ENSG00000179918_1 (sequence is synthesized)
ctctcgcttccctgccgggcaggcgccatggcggaagcctcggcgacgggcgcctgcggagaggcgatggcagcggcggaaggctcctcgggcccggcgggcttgactctgggccggagc

SEQ ID NO: 632318 - DNA, 120 bp, Artificial Sequence
  ENSG00000179918_2 (sequence is synthesized)
ttctcgaactaccggcccttcgagccccaggcgttgggcctcagcccgagctggcggctgacgggcttctccggcatgaagggctgaggctgcaaggtcccgcaggaggcgctgctcaaa

SEQ ID NO: 632319 - DNA, 120 bp, Artificial Sequence
  ENSG00000179918_3 (sequence is synthesized)
ggaggcgctgctcaaactcctggcgggactgacgcggccggacgtgcggcccccgctgggccggggcctggtgggtggccaggaagaggcgtcccaggaagccggcctgccggcaggagc

SEQ ID NO: 632320 - DNA, 120 bp, Artificial Sequence
  ENSG00000179918_4 (sequence is synthesized)
tttccagccctgggcatcgggatggactcctgcgtcatccccctgaggcacgggggcctgtcactggtgcagaccacggacttcttttaccccttggtagaagatccctacatgatgggg

SEQ ID NO: 632321 - DNA, 120 bp, Artificial Sequence
  ENSG00000179918_5 (sequence is synthesized)
cgcatagcttgtgccaacgtgctgagtgacctctacgccatggggattactgagtgtgacaacatgttgatgttactcagcgtcagccagagtatgagtgaggaggaacgcgaaaaggta

SEQ ID NO: 632322 - DNA, 120 bp, Artificial Sequence
  ENSG00000179918_6 (sequence is synthesized)
acgccactcatggtcaaaggctttcgggatgcggctgaggaaggagggacggcagtgaccggtgggcaaacggtggtcaacccttggattataatcggtggagttgccactgtagtatgc

SEQ ID NO: 632323 - DNA, 120 bp, Artificial Sequence
  ENSG00000179918_7 (sequence is synthesized)
caaccaaatgagttcataatgccggacagcgccgtcgttggggacgtgctggtgttaaccaaaccgttaggaacccaggttgctgtcaatgcccaccaatggctggataatcctgaaaga

SEQ ID NO: 632324 - DNA, 120 bp, Artificial Sequence
  ENSG00000179918_8 (sequence is synthesized)
tggaataaagtaaagatggtggtctccagagaagaggtggagctggcctatcaggaagccatgttcaatatggctaccctcaacagaactgctgcaggtttaatgcacacatttaatgcc

SEQ ID NO: 632325 - DNA, 120 bp, Artificial Sequence
  ENSG00000179918_9 (sequence is synthesized)
gttattcataatctgccaataattgccaagatggctgccgtcagcaaggccagtggacggtttgggcttcttcaaggaacctcagctgaaacctctgggggattactgatttgtctgcca

SEQ ID NO: 632326 - DNA, 120 bp, Artificial Sequence
  ENSG00000179918_10 (sequence is synthesized)
agagaacaggcggctcgcttttgttctgaaatcaaatcctccaagtacggagagggtcaccaagcgtggatcgttggcattgtggaaaagggaaaccgaacggcccggatcattgacaag

SEQ ID NO: 632327 - DNA, 120 bp, Artificial Sequence
  ENSG00000179918_11 (sequence is synthesized)
ccgcgagttattgaagtcctgcctcgtggggccacagctgctgttcttgctcctgacagttcaaatgcctcctctgagcctagctcgtgagatgaaagaacagaagttgtttggacctta

SEQ ID NO: 632328 - DNA, 120 bp, Artificial Sequence
  ENSG00000179918_12 (sequence is synthesized)
gagccattgtccacaatcacggatggttctcaagagttgattgtaagaaatttccaaagaaggctgcctgcatagtggttccggctgccctttctaggtgattggaatcagcccatctaa

SEQ ID NO: 632329 - DNA, 120 bp, Artificial Sequence
  ENSG00000179918_13 (sequence is synthesized)
agcagtctttatatgcattccgaggccagagtaacattttgaactttggggggatatttgttcatcacttgggtagaagaggagcaaaaatacctctgttttctcttgccaaagtaagat

SEQ ID NO: 632330 - DNA, 120 bp, Artificial Sequence
  ENSG00000179918_14 (sequence is synthesized)
gaagctattccaggttgagggatttttctttgcacggggttgattaatttctgcacagggagtgagattattaaagtaacacacacacaaagtaaattgcaaaatgaaaaaaattagaag

SEQ ID NO: 632331 - DNA, 120 bp, Artificial Sequence
  ENSG00000179918_15 (sequence is synthesized)
caaatgagttttggaccaatattgttgataaatctaaattgttaagagagatcttataatgcaacatcaaattctttattcaattttactgaagtactggctctttcctgctctggacaa

SEQ ID NO: 632332 - DNA, 120 bp, Artificial Sequence
  ENSG00000179918_16 (sequence is synthesized)
gaattgagcaacttgtctgatgactgggaaaggaggacctgcaaccatctgacttggtctctgttaatgacgtctctccctctaaaccccattaaggactgggagaggcagagcaagcct

SEQ ID NO: 632333 - DNA, 120 bp, Artificial Sequence
  ENSG00000179918_17 (sequence is synthesized)
cagagcccaggcctcagtggtcattaagatgttaagtcttttgcggcagattcctggtgatttgatcaataaagagtaatttcttgctaaataaataaaagaaaccttgttgaaaaacta

SEQ ID NO: 632334 - DNA, 120 bp, Artificial Sequence
  ENSG00000179919_0 (sequence is synthesized)
atgatctgtgaaaatcacaccagagtcactgaatttattcttcttggttttacaaacaaccccgagatgcaagtttccctctttatttttttcctggccatttatacagtcactttgttg

SEQ ID NO: 632335 - DNA, 120 bp, Artificial Sequence
  ENSG00000179919_1 (sequence is synthesized)
ggcaactttcttattgtcacagttaccagtgtggatctcgcacttcaaacacccatgtacttctttcttcaaaatctgtcacttcttgaagtatgtttcaccttggttatggtgccaaaa

SEQ ID NO: 632336 - DNA, 120 bp, Artificial Sequence
  ENSG00000179919_2 (sequence is synthesized)
atgcttgtagatctagtgtccccaaggaaaattatctcttttgtgggctgtggtacccagatgtacttcttcttcttctttggcagttctgaatgtttccttctctccatgatggcttat

SEQ ID NO: 632337 - DNA, 120 bp, Artificial Sequence
  ENSG00000179919_3 (sequence is synthesized)
ctacagacagcttggatgatggcccttcctttctgtggaccaaatgccgtggaccactttttctgtgatggtcccccagtgttaaaactagtcacagtggatacaaccatgtatgaaatg

SEQ ID NO: 632338 - DNA, 120 bp, Artificial Sequence
  ENSG00000179919_4 (sequence is synthesized)
caagcacttgcctccacactcctgtttatcatgtttcccttttgtctcattttggtttcctacacccgcattatcataacaattctgaggatgtcctctgccactggccgccagaaggca

SEQ ID NO: 632339 - DNA, 120 bp, Artificial Sequence
  ENSG00000179919_5 (sequence is synthesized)
ttttctacttgttcctcacacctcattgtggtgtccctcttctacggaacagccagtctgacctacctgcggcccaaatcaaaccagtcccctgagagcaagaagctagtgtcattgtcc

SEQ ID NO: 632340 - DNA, 120 bp, Artificial Sequence
  ENSG00000179919_6 (sequence is synthesized)
tacactgtcatcacacctatgctaaaccccatcatctacggcctgaggaacaatgaagtgaaaggggctgtcaagaggacaatcactcaaaaagtcttacagaagttagatgtgttttga

SEQ ID NO: 632341 - DNA, 120 bp, Artificial Sequence
  ENSG00000179921_0 (sequence is synthesized)
cccgaccagatcccgtggttctgaggaccggccctggaaccctgcgtccttccgacccaccagctccctcgaggatggacttgaggctggatgctttcctcttcccactttttgtcccaa

SEQ ID NO: 632342 - DNA, 120 bp, Artificial Sequence
  ENSG00000179921_1 (sequence is synthesized)
cagaagtccctgatctccaggatccctgactggctgtgcagagctggcacagccacactccacgggcttccagcccttcaggcccagctctcccggagagcaccagagtccctttgctcc

SEQ ID NO: 632343 - DNA, 120 bp, Artificial Sequence
  ENSG00000179921_2 (sequence is synthesized)
atttacttgcgctcttcagccagcaagtgtttcctaatgtctcacccccagtcccagctttcctgctgcaatttccgcctgttccctcccatttcaggccttaagggagtgtggctgggc

SEQ ID NO: 632344 - DNA, 120 bp, Artificial Sequence
  ENSG00000179921_3 (sequence is synthesized)
ttctctcctccccctcactccaaagccgcacttgatacaaggtggaaatcaaagcaccacttctggcttcccagccttgaacttgcccttccctctcaatgtatctggtttcctcagctt

SEQ ID NO: 632345 - DNA, 120 bp, Artificial Sequence
  ENSG00000179921_4 (sequence is synthesized)
ccctgtgcagcaagagtgtcactcccctcttgcttttcccaagctccccatgcgcccctctcagcagatctgtcttagaggggccaggtgcagagaaaggcagaaatcctaataatgttc

SEQ ID NO: 632346 - DNA, 120 bp, Artificial Sequence
  ENSG00000179921_5 (sequence is synthesized)
ccagcgatcgctgcctgtcgcggagtgctgaagggccaagtgttgatctgagtcctcatcacacgggacttcatttagtctcacgataggcatgccggctgccgctccaggactcccctg

SEQ ID NO: 632347 - DNA, 120 bp, Artificial Sequence
  ENSG00000179921_6 (sequence is synthesized)
tccccaggaccaagatgacgcccaacagcactggcgaggtgcccagccccattcccaagggggctttggggctctccctggccctggcaagcctcatcatcaccgcgaacctgctcctag

SEQ ID NO: 632348 - DNA, 120 bp, Artificial Sequence
  ENSG00000179921_7 (sequence is synthesized)
tggctgggctgctcacgggtctggcattgcccacattgccagggctgtggaaccagagtcgccggggttactggtcctgcctcctcgtctacttggctcccaacttctccttcctctccc

SEQ ID NO: 632349 - DNA, 120 bp, Artificial Sequence
  ENSG00000179921_8 (sequence is synthesized)
tgcttgccaacctcttgctggtgcacggggagcgctacatggcagtcctgaggccactccagccccctgggagcattcggctggccctgctcctcacctgggctggtcccctgctctttg

SEQ ID NO: 632350 - DNA, 120 bp, Artificial Sequence
  ENSG00000179921_9 (sequence is synthesized)
ccagtctgcccgctctggggtggaaccactggacccctggtgccaactgcagctcccaggctatcttcccagccccctacctgtacctcgaagtctatgggctcctgctgcccgccgtgg

SEQ ID NO: 632351 - DNA, 120 bp, Artificial Sequence
  ENSG00000179921_10 (sequence is synthesized)
gtgctgctgccttcctctctgtccgcgtgctggccactgcccaccgccagctgcaggacatctgccggctggagcgggcagtgtgccgcgatgagccctccgccctggcccgggccctta

SEQ ID NO: 632352 - DNA, 120 bp, Artificial Sequence
  ENSG00000179921_11 (sequence is synthesized)
cctggaggcaggcaagggcacaggctggagccatgctgctcttcgggctgtgctgggggccctacgtggccacactgctcctctcagtcctggcctatgagcagcgcccgccactggggc

SEQ ID NO: 632353 - DNA, 120 bp, Artificial Sequence
  ENSG00000179921_12 (sequence is synthesized)
ctgggacactgttgtccctcctctccctaggaagtgccagtgcagcggcagtgcccgtagccatggggctgggcgatcagcgctacacagccccctggagggcagccgcccaaaggtgcc

SEQ ID NO: 632354 - DNA, 120 bp, Artificial Sequence
  ENSG00000179921_13 (sequence is synthesized)
tgcaggggctgtggggaagagcctcccgggacagtcccggccccagcattgcctaccacccaagcagccaaagcagtgtcgacctggacttgaactaaaggaagggcctctgctgactcc

SEQ ID NO: 632355 - DNA, 120 bp, Artificial Sequence
  ENSG00000179921_14 (sequence is synthesized)
taccagagcatccgtccagctcagccatccagcctgtctctaccgggccccacttctctggatcagagaccctgcctctgtttgaccccgcactgactgaataaagctcctctggccgtt

SEQ ID NO: 632356 - DNA, 120 bp, Artificial Sequence
  ENSG00000179921_15 (sequence is synthesized)
gagaacccagacgggcagagcctgggtaggagagcctggccccgctgtccccactgggtggagacaccatgcacttggtccacttgtgctcttcagccaggacaccagacatggtccaaa

SEQ ID NO: 632357 - DNA, 120 bp, Artificial Sequence
  ENSG00000179921_16 (sequence is synthesized)
agcaactccctgacactcaggaaggcccaggctgggcaggcaatacctgctcccaacagccatcgaacatgatacagcccacagcctgcgggtctgcgcccctggattaacatgctgccc

SEQ ID NO: 632358 - DNA, 120 bp, Artificial Sequence
  ENSG00000179921_17 (sequence is synthesized)
cgagtcaagtttatgggctggaagtcctacccggaggctgctcactgagctgtgatggctacaaggacagatggggggaagggtgcagggtgcccgagacctggcccgctggagcctgtc

SEQ ID NO: 632359 - DNA, 120 bp, Artificial Sequence
  ENSG00000179921_18 (sequence is synthesized)
acctaatggctggctggaagaccactacacaccagccagccctggtccattctctcatttagaggcctccccggtggaggcagggatacacaaaatgctttggggctggatgggcccgcc

SEQ ID NO: 632360 - DNA, 120 bp, Artificial Sequence
  ENSG00000179921_19 (sequence is synthesized)
tttcagtctaaacaagagacctcaacacagctgcccagaaaaggcagataccagaaatggataaagctggctgggtggggactgtccgaagggcagccagcagtgagctccggctggttg

SEQ ID NO: 632361 - DNA, 120 bp, Artificial Sequence
  ENSG00000179921_20 (sequence is synthesized)
ctaccacacaggacatatgtgttgccagacctgaattttcaatagaaaccaaagatagttttttatataaatgtttaattggcaattaattgaaaaattctgtgtatcagcgaacatgat

SEQ ID NO: 632362 - DNA, 120 bp, Artificial Sequence
  ENSG00000179922_0 (sequence is synthesized)
agagcgaacattggccttgggggcggggcttgggcacaagatggccgctgcgcgcccagaggcccagagtcggagctcaccgactccggagtcgcgatcccaggagccactggacctggt

SEQ ID NO: 632363 - DNA, 120 bp, Artificial Sequence
  ENSG00000179922_1 (sequence is synthesized)
cctggtgcctgatgactgccggcctggcacacccccgagtgacctcatcgagatccaggtggtgaaggtgacggacaccacgctggtccctgagcccccggagccaggttctttccactg

SEQ ID NO: 632364 - DNA, 120 bp, Artificial Sequence
  ENSG00000179922_2 (sequence is synthesized)
tgccttgtgccctgctgccttccggctggtttccgagctgctgttccacgaacatggccacttggctggggccgagggaggcgggcagggtggggacccgagccggtgccacgtgtgcgg

SEQ ID NO: 632365 - DNA, 120 bp, Artificial Sequence
  ENSG00000179922_3 (sequence is synthesized)
gtgtgcggccacagctgcccgggccccgccagcctgcgcgcgcactacagcttgcacacgggggagcggccctaccgctgcgcgctctgcccccgcgccttcaaggccttggcgcccctg

SEQ ID NO: 632366 - DNA, 120 bp, Artificial Sequence
  ENSG00000179922_4 (sequence is synthesized)
ccagcaccggcacggggtggagccgggcacctctcggaggcctccggacacagcggccgttgcagaacagaggcccggggtggccccggagagggcggaggtggtgatggcggcggcggc

SEQ ID NO: 632367 - DNA, 120 bp, Artificial Sequence
  ENSG00000179922_5 (sequence is synthesized)
ggcgggcgcagcggtggggaagccttttgcctgcaggttctgcgccaagcccttccgccgctcctcagacatgcgagaccacgagcgcgtgcacactggcgagcggccataccattgcgg

SEQ ID NO: 632368 - DNA, 120 bp, Artificial Sequence
  ENSG00000179922_6 (sequence is synthesized)
catctgcggcaagggcttcacccagtcctcggtgcttagcggccacgcccgcatccacactggcgagcgcccgttccgctgcacgctctgcgaccgcaccttcaacaactcctccaactt

SEQ ID NO: 632369 - DNA, 120 bp, Artificial Sequence
  ENSG00000179922_7 (sequence is synthesized)
ccgcaagcaccagcgcacccacttccacgggccggggccggggctgggagactctggaggccagctgggctcgtcggcggctgaggggtcggggagcgggtgtggggtaggggaccctgc

SEQ ID NO: 632370 - DNA, 120 bp, Artificial Sequence
  ENSG00000179922_8 (sequence is synthesized)
ccggggagggggacggggtggggaaacggaggcaggggacagaagaggggagattgggggagagatgacagctgcagggatggttgtgagccgctagtgatggagagcagagggagaggg

SEQ ID NO: 632371 - DNA, 120 bp, Artificial Sequence
  ENSG00000179922_9 (sequence is synthesized)
ccaggctccagactcccacacgcccacacagcacctctgccaggcctaggagaggacaggtgcagctcttgcagctctgcgggtgtgcggccaaaggcaaggcccacgggctggatgtca

SEQ ID NO: 632372 - DNA, 120 bp, Artificial Sequence
  ENSG00000179922_10 (sequence is synthesized)
cttccccgactgtctcttggttggcttgtccttgtgcaagacccagcctgtcacgacagagcctgggcacttcagaggaggagccaggatcgaatggaaggggggaattggggtccacca

SEQ ID NO: 632373 - DNA, 120 bp, Artificial Sequence
  ENSG00000179922_11 (sequence is synthesized)
tagtcttctgctctggtcctccacgggtggaccaggatggagtctcctgcctacctcactgcattgcactggacctgggatgcctatccaccctctggcagaagacactcaccaggttat

SEQ ID NO: 632374 - DNA, 120 bp, Artificial Sequence
  ENSG00000179922_12 (sequence is synthesized)
ctgtgaagagactctgggatcccatcacctcaaagccagagggtccccaagtcaccgctgagagcacttgagcctcaaggatgtaagcctgaccataggatcttgactccaacagcggca

SEQ ID NO: 632375 - DNA, 120 bp, Artificial Sequence
  ENSG00000179922_13 (sequence is synthesized)
acccccacccccattgtggtccgtccttaacccatccactcttcttcggaggcaactgagaacacataaagcaagcagctacctagcatccccctcctaaagctttagactcagagccca

SEQ ID NO: 632376 - DNA, 120 bp, Artificial Sequence
  ENSG00000179922_14 (sequence is synthesized)
gggtcccccacaagcctcaaggtagcctcaggtttctctaatttcctccactcccagttcgaagcaaacagcttactgcctagtccccgccaatcccaagggcgggctggctgatggcag

SEQ ID NO: 632377 - DNA, 120 bp, Artificial Sequence
  ENSG00000179922_15 (sequence is synthesized)
catggtgggctggcctgggtgtggagtgaaagagtcactgtggtgggggcgagaggaggacttgggagctggaggtgtgacaccttcagttctgttcctattaaaggaccttctgaaggg

SEQ ID NO: 632378 - DNA, 120 bp, Artificial Sequence
  ENSG00000179922_16 (sequence is synthesized)
acaagatggccgctgcgcgcccagaggcccagagtcggagctcaccgactccggagtcgcgatcccaggagccactggacctggtgcgggcaaggaaggggcctgggcgtggggctcgag

SEQ ID NO: 632379 - DNA, 120 bp, Artificial Sequence
  ENSG00000179930_0 (sequence is synthesized)
ctctgcagccgctggactggacacaaagcgtgagagacagagacaccatctctgctgatttgtacctaactggttcctgttgctgagagcccacgtgtcacagaagccagggcagaggcc

SEQ ID NO: 632380 - DNA, 120 bp, Artificial Sequence
  ENSG00000179930_1 (sequence is synthesized)
ccacactgctgtctgcatttcccaggtatcctgagccaagcaggatactcctcctcagaggagtaggcaatagaagcgcctgaacatcatggcacaagtggactcccaggacaggtgggg

SEQ ID NO: 632381 - DNA, 120 bp, Artificial Sequence
  ENSG00000179930_2 (sequence is synthesized)
agaggcgtctcctctcagcagcttgactgaggaagctcatgacacccagatgctgagcatgaacttagagagtgacgatgaagatggtggggaggccgaaaaagagggcaccgctgaccc

SEQ ID NO: 632382 - DNA, 120 bp, Artificial Sequence
  ENSG00000179930_3 (sequence is synthesized)
ggtggcctgtccaaggggcagctccccagtaacacacgaaaatcctgacttgccatggccccatccactgggcaaagaggaagagaaattctctgactcctccagtgctgggggcatggg

SEQ ID NO: 632383 - DNA, 120 bp, Artificial Sequence
  ENSG00000179930_4 (sequence is synthesized)
gcagaaaccagtggaaatgtctgggaaagccagttggagcagagatgtgacaaagatcaacgagacccagggttccccgggagcaagcagagctctgggttcccttcccagtggtctcgc

SEQ ID NO: 632384 - DNA, 120 bp, Artificial Sequence
  ENSG00000179930_5 (sequence is synthesized)
acacaaattgttaggtcagatgcaacctcttggggaccgactacctgcgggtgatgatggatactcgggggcaaaccaggacgcagtcttggatgtcccacccagcttccccagcaatgg

SEQ ID NO: 632385 - DNA, 120 bp, Artificial Sequence
  ENSG00000179930_6 (sequence is synthesized)
aaagtatctctgtgcgcacaaaagtgtagacacgtccgcagggaactcttctctgttgtgtttccccaggccggggagcaactgggaccttcccacgcaagagacacatacaccagccca

SEQ ID NO: 632386 - DNA, 120 bp, Artificial Sequence
  ENSG00000179930_7 (sequence is synthesized)
ggcgtcggccaccccagccagcctggctgccgcggtcctggcaaaagcgcggaacagcaggaaagtacagaaccaggcgggccggcgcgagggcggagaggctgaggcgcgtccctacag

SEQ ID NO: 632387 - DNA, 120 bp, Artificial Sequence
  ENSG00000179930_8 (sequence is synthesized)
gtgcctgcggggcgggcgggcctttcagaagcccagcaagccgctgagccccgcggagacgcgcggcggcgccgccaagcgctacgcgtgcgagctatgcgggaaggcctactcccaccg

SEQ ID NO: 632388 - DNA, 120 bp, Artificial Sequence
  ENSG00000179930_9 (sequence is synthesized)
cggcacactccagcagcacaggcgcctgcacacgggcgagcggccctaccagtgctccttctgcgacaaggcctacacctggtcctccgaccaccggaagcacatccgcacccacacagg

SEQ ID NO: 632389 - DNA, 120 bp, Artificial Sequence
  ENSG00000179930_10 (sequence is synthesized)
cgagaaaccctacccgtgtccagactgcgggaaggccttcgtgcgctcttcggacctgcgcaaacaccagcgcaacatgcacagcaacaataagcccttcccgtgctccgagtgcggcct

SEQ ID NO: 632390 - DNA, 120 bp, Artificial Sequence
  ENSG00000179930_11 (sequence is synthesized)
gaccttcaacaagccgctgtcgctgctgcgccaccagcgcacgcacctgggcgccaagcccttccgctgccccgcctgcgaccgggagttcgctgtggccagccgcatggtggagcacca

SEQ ID NO: 632391 - DNA, 120 bp, Artificial Sequence
  ENSG00000179930_12 (sequence is synthesized)
gcgcgtgcactcgggcgagcggcccttcccctgccccacctgcggcaagtgcttcaccaagtcctccaatctgtccgagcaccagacgctgcacaccggccagaggcctttcaagtgcgc

SEQ ID NO: 632392 - DNA, 120 bp, Artificial Sequence
  ENSG00000179930_13 (sequence is synthesized)
tgactgcggcgtggccttcgcgcagccctcgcgcctcgtgcgccaccagcgcatccacactggcgagaggccctttccttgcacgcagtgtggccaggcctttgcccgctcttcgaccct

SEQ ID NO: 632393 - DNA, 120 bp, Artificial Sequence
  ENSG00000179930_14 (sequence is synthesized)
gaagcggcaccaacagatccactccggggagaagggattcctctgtgccgagtgcggcagggccttccgcattgcctctgagttggcccagcacatacgaatgcacaacggagagaggcc

SEQ ID NO: 632394 - DNA, 120 bp, Artificial Sequence
  ENSG00000179930_15 (sequence is synthesized)
caacgacaccgagccaagcacggcacctgcaagaaggagcccatcccttcctcctctgacgagtgaagatagcatcgtcgacctcactacttggaaccttcccaggtgggcccactcaca

SEQ ID NO: 632395 - DNA, 120 bp, Artificial Sequence
  ENSG00000179930_16 (sequence is synthesized)
tggtattgccagcctcactggtcagcctcgcctcccagcaggtcgcgggtcatcagtggtccatttgattatttatttgatcccttgaacagaaagtcaccaccgagagagcacccaggt

SEQ ID NO: 632396 - DNA, 120 bp, Artificial Sequence
  ENSG00000179930_17 (sequence is synthesized)
gggtggtttcacatcagtggttctgagtgtccgaggtcataagcaattggaaaagggaaagacaaagtagtgggagctgatcaaacgttgagttccttgggttggggaacctgaatcaat

SEQ ID NO: 632397 - DNA, 120 bp, Artificial Sequence
  ENSG00000179930_18 (sequence is synthesized)
cagaaactgcttctagaattacatgctgggcactgggccgggctccagggataaggtggggaaaaagactaacctgtcctaccctcaaagccatatgcaaatactgaaaagaaggcctga

SEQ ID NO: 632398 - DNA, 120 bp, Artificial Sequence
  ENSG00000179930_19 (sequence is synthesized)
ggggctggtcctctttagagaaagatgctttttggtttttatataaataaaggaatccccagaagtggtccctatgatgaactcccccaaagcaacgccgtttttggaggaactcaaacc

SEQ ID NO: 632399 - DNA, 120 bp, Artificial Sequence
  ENSG00000179930_20 (sequence is synthesized)
cagtccaacatcccatcatttcacttgactgcagaaatggctttacccttaggatatatctttatgagtcttggctttgaagtggagaagggctttatcttagagaaggtggtttatgtc

SEQ ID NO: 632400 - DNA, 120 bp, Artificial Sequence
  ENSG00000179930_21 (sequence is synthesized)
atattccagttattctagaagttcaggacagccttagcatctgaaaaagaagcccattcctctttatagtggaatttagtaagtagatctaacccgagtctcacccacagaattcatata

SEQ ID NO: 632401 - DNA, 120 bp, Artificial Sequence
  ENSG00000179930_22 (sequence is synthesized)
aattcatatatgccttctctctggctgcctcttttcctgtttgcactctgagggcttaagtcatatgtgatatttacaaagcaattggcccatttacagagagacatatataatttctcc

SEQ ID NO: 632402 - DNA, 120 bp, Artificial Sequence
  ENSG00000179930_23 (sequence is synthesized)
acaaagccttgaccatggttcatgaaaccgtttgggttcatttaaatttgtctgaatcattagtcttgacttgaagtgaacaaaacaccctttgcccaagtgccattggcttgtctgcat

SEQ ID NO: 632403 - DNA, 120 bp, Artificial Sequence
  ENSG00000179930_24 (sequence is synthesized)
ttcaaaatcattaaaaccaggtatggaagcctacgtgctcacagttatctaatgaggttatttcaaagtttgcattactaacagccattctgcaaagtgtattgatgtgtatagtgatct

SEQ ID NO: 632404 - DNA, 120 bp, Artificial Sequence
  ENSG00000179930_25 (sequence is synthesized)
gtataaagtcagtagttcttagctgaacctcaactgtgaggaatctatgactccacagatgtccttggtgcacataggcaaacggcacttctcatcttactgaagttaaataagatattc

SEQ ID NO: 632405 - DNA, 120 bp, Artificial Sequence
  ENSG00000179930_26 (sequence is synthesized)
cataagaaggtatagtgccctttttgggggagtacctttagtatattcctaaaattgccaccaaagaatgccaaatctgaatttctcttggtttccacctgatttggaactagggtgtga

SEQ ID NO: 632406 - DNA, 120 bp, Artificial Sequence
  ENSG00000179930_27 (sequence is synthesized)
cctctaaatagcattctcatgacacatgggggcgccaaagagaagtaagagagatagctagatagctagatagctagatagtcttgtgtcttgtttgaccaaggtaaccgtaataaaaga

SEQ ID NO: 632407 - DNA, 120 bp, Artificial Sequence
  ENSG00000179930_28 (sequence is synthesized)
gtccatccccatcctttactgttgatgtgaccttgggcttcagtttctgcatctgcattggcaaaatagaagtgatagtagtaggtaaaagttagagtgatcctactatatgacggaaac

SEQ ID NO: 632408 - DNA, 120 bp, Artificial Sequence
  ENSG00000179930_29 (sequence is synthesized)
tttggctggatgcaagagctttaaattggtagaaaagtcacaagatgagcttgtgactatgaagagagcaaaagctaacttttttttcctagataatcaataaaatatttgaagactgaa

SEQ ID NO: 632409 - DNA, 120 bp, Artificial Sequence
  ENSG00000179933_0 (sequence is synthesized)
gtgggctgccgggctggcccagcttagggttttcaggaaatttggaagctgccgcagtagttggagtctaaggactcgtgacaatcttcgggtgcccttcgagagaaaaggggaggatgc

SEQ ID NO: 632410 - DNA, 120 bp, Artificial Sequence
  ENSG00000179933_1 (sequence is synthesized)
cactggagtcatcctcttcaatgccactatccttcccatctctcttaccctcagtaccacacaatactaacccttcccctcctctgatgtcttacatcacctcccaggagatgaagtgta

SEQ ID NO: 632411 - DNA, 120 bp, Artificial Sequence
  ENSG00000179933_2 (sequence is synthesized)
ttcttcactggtttgccaattggtcaggtccccagcgtgaacgtttcctagaggacctggtagctaaggcagtgccagaaaaattacaaccactgctggatagtctggagcagcttagtg

SEQ ID NO: 632412 - DNA, 120 bp, Artificial Sequence
  ENSG00000179933_3 (sequence is synthesized)
tgtctggggcagaccgaccaccttctatctttgagtgccagctacatctttgggatcagtggtttcgaggctgggctgagcaggagcgcaatgaatttgtcagacagctggagttcagtg

SEQ ID NO: 632413 - DNA, 120 bp, Artificial Sequence
  ENSG00000179933_4 (sequence is synthesized)
agccagacttcgtggcaaagttttaccaagcagtggctgctacagctggtaaggactgataggcattcagaccaaagaagataaccatagctgatggagccatgactctctacaatgata

SEQ ID NO: 632414 - DNA, 120 bp, Artificial Sequence
  ENSG00000179933_5 (sequence is synthesized)
actcaattcaaatgtgtcgcctaaagctctggaactggtattccaaccagctgaccgaactcactgaccagtacaggcatggttatttcaacattaatagcatgtcaactggactcctat

SEQ ID NO: 632415 - DNA, 120 bp, Artificial Sequence
  ENSG00000179933_6 (sequence is synthesized)
ttgtaaatgttatcaatctaagcaatccagctcatcagtctactagtttgcttctttccgagagatgtcaagtcctcaagaatttgatggcttcttctgcagctataaccacaaggaacc

SEQ ID NO: 632416 - DNA, 120 bp, Artificial Sequence
  ENSG00000179933_7 (sequence is synthesized)
tacacattgtaactcaagtccactgctggctcatgaaatgtgtaaagtagaaccctccttcccgagaaataagacaggacaataaaaggtggcgtttttgtactttacctggattccatt

SEQ ID NO: 632417 - DNA, 120 bp, Artificial Sequence
  ENSG00000179933_8 (sequence is synthesized)
ggctggttttaccactcctatcagattgtagtgtaattgtgtgatacgcaaaccattagttttcccagtgatgatttaataaaattatgaaaaatcaggagagggagataattagttgct

SEQ ID NO: 632418 - DNA, 120 bp, Artificial Sequence
  ENSG00000179933_9 (sequence is synthesized)
tcctccttcacactgtttgaatcgaactcgcggtgacttttttttttttttaaaaacatgggttgtcacttaagtttggagtgcagtggcatgatcatcagtgagcgtgagatcactgta

SEQ ID NO: 632419 - DNA, 120 bp, Artificial Sequence
  ENSG00000179933_10 (sequence is synthesized)
acctcaaattctaggctgaagtaatctttctgcctcagtctcctgagtatctaggactacaggcccgcacaacaatatctggctaatttttaaattattctgtagatacaggggtcatgc

SEQ ID NO: 632420 - DNA, 85 bp, Artificial Sequence
  ENSG00000179933_11 (sequence is synthesized)
ggctaatttttaaattattctgtagatacaggggtcatgctacgttttctagtctggtcttgaactgctggcctcaagcgatcca

SEQ ID NO: 632421 - DNA, 120 bp, Artificial Sequence
  ENSG00000179933_12 (sequence is synthesized)
ctattctgtaagtttgctttacaacaatacgaaaataagtgacaatttacaggttgaacaatttatttttgtaccaaaataaagaatggatctttagaactgtaaaacttcacccttttt

SEQ ID NO: 632422 - DNA, 120 bp, Artificial Sequence
  ENSG00000179933_13 (sequence is synthesized)
tcattgccaggctatataatattgacaaccggggaaagaggcattccaaagaaagtagaaattaagtatacacaatagattttccatccagttgtctcacaagaaattattctcttcctt

SEQ ID NO: 632423 - DNA, 120 bp, Artificial Sequence
  ENSG00000179933_14 (sequence is synthesized)
accccctgtcatgttctgggcaacatcacacctcccttattcctctaactgggacccttgtgctgtggagctctggtgaatggtaagaggcagatggtctcacaggaagagtggctcttt

SEQ ID NO: 632424 - DNA, 120 bp, Artificial Sequence
  ENSG00000179933_15 (sequence is synthesized)
tctggtaggctgtggttcccattacacccaccaggattagcagcattaggcagagtcccatggacagccttaggtgggtcatggagggattatggtctgaagtaaccagcaacctaggaa

SEQ ID NO: 632425 - DNA, 120 bp, Artificial Sequence
  ENSG00000179933_16 (sequence is synthesized)
attatggtctgaagtaaccagcaacctaggaacatagaaggtaatatttggcatggaataatgcctagccttagtagataaagcggcattacctttttttttttttttttttggagacaa

SEQ ID NO: 632426 - DNA, 120 bp, Artificial Sequence
  ENSG00000179933_17 (sequence is synthesized)
tcccaggctcaagcaattctcctgcctcaaccttccgaatagctgggactacaggcgcacgccgcaccaccacgtctggctaaggggctttacccttaaagatagagctcatgaagcccc

SEQ ID NO: 632427 - DNA, 120 bp, Artificial Sequence
  ENSG00000179933_18 (sequence is synthesized)
tttacccttaaagatagagctcatgaagccccgcctcatccaagcattaagctaaacaggaaatcattaagagggactatcgaaccttaaagtagaaataagatcaagatctaagtcttc

SEQ ID NO: 632428 - DNA, 120 bp, Artificial Sequence
  ENSG00000179933_19 (sequence is synthesized)
tagcatcttatattattggaagaagacctaacttggcagcaagggaagtggcttaagggaagagtcagtctatgttctttaggtagctagacacaatccctaacagtgcttaagaaagga

SEQ ID NO: 632429 - DNA, 120 bp, Artificial Sequence
  ENSG00000179933_20 (sequence is synthesized)
agggggctgggagtggtggcagtggctcccagcactttgggaggcagaggccggtgggttgctttagctcaggagttggagacaagcctgggcaacatggtgaaactgtctctatcaaaa

SEQ ID NO: 632430 - DNA, 77 bp, Artificial Sequence
  ENSG00000179933_21 (sequence is synthesized)
gaatcacttgagcctagggaggtcgaggccacagtgagctgagatcaccccactgcattccagcctgggtgacagag

SEQ ID NO: 632431 - DNA, 120 bp, Artificial Sequence
  ENSG00000179933_22 (sequence is synthesized)
agagcgagaccctgtctcaaaaaagaagaagaaaaaggtggggggaggggactaagatccctatgtcctagagatgggggaatgtgttattgtatgggaggagggagtcaggtagtgacg

SEQ ID NO: 632432 - DNA, 120 bp, Artificial Sequence
  ENSG00000179933_23 (sequence is synthesized)
gagggagtcaggtagtgacgggactggatgatcgtgttagggatctttgttctctgaaacgcaaccctgtctaggacaatatacacgtgagtgagtgcttaataaatttaatttcaaaca

SEQ ID NO: 632433 - DNA, 120 bp, Artificial Sequence
  ENSG00000179934_0 (sequence is synthesized)
gtagtgggaggatacctccagagaggctgctgctcattgagctgcactcacatgaggatacagactttgtgaagaaggaattggcaacactgaaacctccagaacaaaggctgtcactaa

SEQ ID NO: 632434 - DNA, 120 bp, Artificial Sequence
  ENSG00000179934_1 (sequence is synthesized)
ggtcccgctgccttgatggattatacacttgacctcagtgtgacaacagtgaccgactactactaccctgatatcttctcaagcccctgtgatgcggaacttattcagacaaatggcaag

SEQ ID NO: 632435 - DNA, 120 bp, Artificial Sequence
  ENSG00000179934_2 (sequence is synthesized)
ttgctccttgctgtcttttattgcctcctgtttgtattcagtcttctgggaaacagcctggtcatcctggtccttgtggtctgcaagaagctgaggagcatcacagatgtatacctcttg

SEQ ID NO: 632436 - DNA, 120 bp, Artificial Sequence
  ENSG00000179934_3 (sequence is synthesized)
aacctggccctgtctgacctgctttttgtcttctccttcccctttcagacctactatctgctggaccagtgggtgtttgggactgtaatgtgcaaagtggtgtctggcttttattacatt

SEQ ID NO: 632437 - DNA, 120 bp, Artificial Sequence
  ENSG00000179934_4 (sequence is synthesized)
ggcttctacagcagcatgtttttcatcaccctcatgagtgtggacaggtacctggctgttgtccatgccgtgtatgccctaaaggtgaggacgatcaggatgggcacaacgctgtgcctg

SEQ ID NO: 632438 - DNA, 120 bp, Artificial Sequence
  ENSG00000179934_5 (sequence is synthesized)
gcagtatggctaaccgccattatggctaccatcccattgctagtgttttaccaagtggcctctgaagatggtgttctacagtgttattcattttacaatcaacagactttgaagtggaag

SEQ ID NO: 632439 - DNA, 120 bp, Artificial Sequence
  ENSG00000179934_6 (sequence is synthesized)
attcaccatctttatgttctgctacattaaaatcctgcaccagctgaagaggtgtcaaaaccacaacaagaccaaggccatcaggttggtgctcattgtggtcattgcatctttactttt

SEQ ID NO: 632440 - DNA, 120 bp, Artificial Sequence
  ENSG00000179934_7 (sequence is synthesized)
ctgggtcccattcaacgtggttcttttcctcacttccttgcacagtatgcacatcttggatggatgtagcataagccaacagctgacttatgccacccatgtcacagaaatcatttcctt

SEQ ID NO: 632441 - DNA, 120 bp, Artificial Sequence
  ENSG00000179934_8 (sequence is synthesized)
tactcactgctgtgtgaaccctgttatctatgcttttgttggggagaagttcaagaaacacctctcagaaatatttcagaaaagttgcagccaaatcttcaactacctaggaagacaaat

SEQ ID NO: 632442 - DNA, 120 bp, Artificial Sequence
  ENSG00000179934_9 (sequence is synthesized)
gcctagggagagctgtgaaaagtcatcatcctgccagcagcactcctcccgttcctccagcgtagactacattttgtgaggatcaatgaagactaaatataaaaaacattttcttgaatg

SEQ ID NO: 632443 - DNA, 120 bp, Artificial Sequence
  ENSG00000179934_10 (sequence is synthesized)
gcatgctagtagcagtgagcaaaggtgtgggtgtgaaaggtttccaaaaaaagttcagcatgaaggatgccatatatgttgttgccaacacttggaacacaatgactaaagacatagttg

SEQ ID NO: 632444 - DNA, 120 bp, Artificial Sequence
  ENSG00000179934_11 (sequence is synthesized)
tgcatgcctggcacaacatcaagcctgtgattgtgtttattgatgatgttgaacaagtggtaactttaaaggattctgtatgccaagtgaaaaaaaaagatgtctgacctccttacatat

SEQ ID NO: 632445 - DNA, 80 bp, Artificial Sequence
  ENSG00000179938_0 (sequence is synthesized)
agaaacagcaggagcgaacaggaacaggaaaacaaatggcagtatccctgagaaagccacttctggtggttgccagccac

SEQ ID NO: 632446 - DNA, 120 bp, Artificial Sequence
  ENSG00000179938_1 (sequence is synthesized)
agtatccctgagaaagccacttctggtggttgccagccacctagggattcagcaacaggtttccacagggaaggccctacatcatctgctaccctgaaagatctggagagcccgtgccaa

SEQ ID NO: 632447 - DNA, 120 bp, Artificial Sequence
  ENSG00000179938_2 (sequence is synthesized)
aaagatctggagagcccgtgccaagaacgagcagtagtcctggattcaaggtccgtagaaatcagtcaactgaagaacaccatcaaatctctgaaacaacagaagaaacaagtggaacat

SEQ ID NO: 632448 - DNA, 120 bp, Artificial Sequence
  ENSG00000179938_3 (sequence is synthesized)
aacaacaagaaacagaaagccaaaagggtgctagaggttcaaatccagacattgaacatacagaaagaggaactaaatacggacctgtaccacatgaaacgttctctcagatactttgaa

SEQ ID NO: 632449 - DNA, 120 bp, Artificial Sequence
  ENSG00000179938_4 (sequence is synthesized)
gaaaagtccaaggatctggctgtccgcctgcaacattcattgcagcgtaaaggagagttagagagtgttctctctaatgtcatggccacacagaagaagaaggcaaaccagttgtccagc

SEQ ID NO: 632450 - DNA, 120 bp, Artificial Sequence
  ENSG00000179938_5 (sequence is synthesized)
cgcagcaaagcacgtacggagtggaagttagagcagtccatgcgggaggaggcactactgaaagtgcagctgacacagttcaaggagtcatttcaacaagtccaattagaaagagatgag

SEQ ID NO: 632451 - DNA, 78 bp, Artificial Sequence
  ENSG00000179938_6 (sequence is synthesized)
agaggatgagaaaaatgtcgcaggagatttgcacattaaagaaagagaagcagcaagatatgcgtcgggtagaggaac

SEQ ID NO: 632452 - DNA, 120 bp, Artificial Sequence
  ENSG00000179938_7 (sequence is synthesized)
tagagagagtggcaggagagctccaggcccaggtcaaaaacaatcagcgcataagtctcctgaaccagcgacaagaagagaggattcgggagcaggaagagaggcttcggaagcaggagg

SEQ ID NO: 632453 - DNA, 120 bp, Artificial Sequence
  ENSG00000179938_8 (sequence is synthesized)
gcaggaggagaggattcaggagcagcacaagagccttcagcagctggccaagccacagagcgtcttcaaggagccgaacaatgagaacaagaacgcactgcagttggagcagcaagtaaa

SEQ ID NO: 632454 - DNA, 120 bp, Artificial Sequence
  ENSG00000179938_9 (sequence is synthesized)
ctacaggagaagcttggcgaggagcacctggaagctgccagccagcagaaccagcagctaacggcccagctgagcctcatggctctccctggggaaggacacggaggagaacatctggac

SEQ ID NO: 632455 - DNA, 120 bp, Artificial Sequence
  ENSG00000179938_10 (sequence is synthesized)
agtgagggggaggaggcacctcggcccatgccgagtgtcccagaggacccggagagcagggaggccatgagcagctttatggaccacctggaggagaaggcagacctgagtgagctggtg

SEQ ID NO: 632456 - DNA, 120 bp, Artificial Sequence
  ENSG00000179938_11 (sequence is synthesized)
aagaaaaaagaactctgcttcatccaccactggcgagagagatgccatcagaaaacccatcaccttttatcagaaccagggggccgtgccaaagatgcggcactgggaggaggacaccat

SEQ ID NO: 632457 - DNA, 120 bp, Artificial Sequence
  ENSG00000179938_12 (sequence is synthesized)
gcccacaactctgctgatgagcccggtccaggagccccagccccccaggagcttggggctgcagacaagcatggtcatctttgtgaggtgagcctcacctcctctgcccaaggagaggcc

SEQ ID NO: 632458 - DNA, 120 bp, Artificial Sequence
  ENSG00000179938_13 (sequence is synthesized)
actgcaagactggcctttgatcttacgacccagtcccctaagcgttctcaccccgtttctggttcctctggtcacagcacaaatttccagctggaaggggaatggagactatgggaccta

SEQ ID NO: 632459 - DNA, 76 bp, Artificial Sequence
  ENSG00000179938_14 (sequence is synthesized)
cccagaaggcagcatggccatttcttgctacttttttgtatggtttttaacactgtgtggagtgagcactggacgc

SEQ ID NO: 632460 - DNA, 120 bp, Artificial Sequence
  ENSG00000179938_15 (sequence is synthesized)
ggtgagttgggggtcactgtgtggagtgagcactggacgcagagcttggaggccaagtgcctgccccgcccttacctgtctgtggtcttgggcaagtcctagtcctaggtggggtattgg

SEQ ID NO: 632461 - DNA, 78 bp, Artificial Sequence
  ENSG00000179938_16 (sequence is synthesized)
gttaccatttctgtagaaagaggaatgtgataatatacataaaacatgtctgcaagggttcataaaaaattcaggaga

SEQ ID NO: 632462 - DNA, 120 bp, Artificial Sequence
  ENSG00000179938_17 (sequence is synthesized)
tgtgtgtgtgtgtgtgtgcatactgtgataatatacataaaacatgtctgcaagggttcataaaaaattcaggagagagcaacaagatggccgggagatacttcccttctgtaccttctg

SEQ ID NO: 632463 - DNA, 81 bp, Artificial Sequence
  ENSG00000179938_18 (sequence is synthesized)
cccatccccagcaagaaaaacgggcttagagaattggatagacctgggtgtttatatcccagctctgcctaagtgaactta

SEQ ID NO: 632464 - DNA, 120 bp, Artificial Sequence
  ENSG00000179941_0 (sequence is synthesized)
gttttcggtcggcccgggtgttctgcaagctggtcaaaaaggggaagcggcccagatatgttaagttctatggccgctgcagggtctgtgaaggcggcgttgcaggtggccgaggtgctg

SEQ ID NO: 632465 - DNA, 120 bp, Artificial Sequence
  ENSG00000179941_1 (sequence is synthesized)
gaagccatcgtgagctgctgcgtggggcccgagggacggcaagttttgtgtacgaagcccactggcgaggtgcttctcagccggaatggaggccgcctcctggaggcgctacacttagag

SEQ ID NO: 632466 - DNA, 120 bp, Artificial Sequence
  ENSG00000179941_2 (sequence is synthesized)
catcccatagccaggatgatagtggactgtgtttccagtcatctcaaaaaaacaggagatggtgcaaaaacatttattatctttctttgccatttgcttagaggacttcatgcaatcaca

SEQ ID NO: 632467 - DNA, 120 bp, Artificial Sequence
  ENSG00000179941_3 (sequence is synthesized)
gacagagaaaaggatcctttgatgtgtgaaaacattcaaacccatggaaggcattggaaaaattgttctcggtggaaatttatttcccaggctctcctaacgtttcagacacaaatatta

SEQ ID NO: 632468 - DNA, 120 bp, Artificial Sequence
  ENSG00000179941_4 (sequence is synthesized)
gacggtattatggaccagtacctaagtagacactttttgtctatcttttcgtctgctaaagagagaacattgtgtaggagctctttagagttgctcttagaagcatacttttgtggaaga

SEQ ID NO: 632469 - DNA, 120 bp, Artificial Sequence
  ENSG00000179941_5 (sequence is synthesized)
gtgggaagaaataatcataaatttatttcacagttgatgtgtgactactttttcaagtgtatgacttgtaaaagtgggattggtgtatttgagttagtggatgaccattttgtagagttg

SEQ ID NO: 632470 - DNA, 120 bp, Artificial Sequence
  ENSG00000179941_6 (sequence is synthesized)
aatgttggtgtcactggccttcctgtttcagattccaggatcatagctggtcttgtgcttcagaaagatttttctgtgtaccgcccagcagatggtgacatgcgaatggtgatagtaaca

SEQ ID NO: 632471 - DNA, 120 bp, Artificial Sequence
  ENSG00000179941_7 (sequence is synthesized)
gaaaccattcagcctcttttttccacttctggatcagagtttattctaaattcagaagcacagtttcagacatctcaattttggattatggaaaagacaaaagcaataatgaaacatcta

SEQ ID NO: 632472 - DNA, 120 bp, Artificial Sequence
  ENSG00000179941_8 (sequence is synthesized)
catagtcagaatgtaaaattgctcatatctagtgtgaaacaaccagatttagttagttattatgcaggggtgaatggcatatcagtggttgagtgtttatcatcagaagaagtttctctt

SEQ ID NO: 632473 - DNA, 120 bp, Artificial Sequence
  ENSG00000179941_9 (sequence is synthesized)
atccggaggatcattggtctttctccatttgtaccaccacaggccttttcgcagtgtgaaatacctaacactgctttggtgaaattttgtaaacctcttatccttagatccaaaagatat

SEQ ID NO: 632474 - DNA, 120 bp, Artificial Sequence
  ENSG00000179941_10 (sequence is synthesized)
gttcatctaggcttgataagcacatgtgcatttataccacactctatagttctttgtggaccagtgcatggtctcattgaacaacatgaggatgctttacatggagcacttaaaatgctt

SEQ ID NO: 632475 - DNA, 120 bp, Artificial Sequence
  ENSG00000179941_11 (sequence is synthesized)
cggcaattatttaaagaccttgatctaaattacatgacacaaaccaatgaccaaaatggcacttcaagtctttttatttataagaacagtggagaaagttatcaagcaccagatcctggt

SEQ ID NO: 632476 - DNA, 120 bp, Artificial Sequence
  ENSG00000179941_12 (sequence is synthesized)
aatggctcaatacaaaggccttatcaggacacagttgcagagaacaaagatgcattggaaaaaactcaaacatatttaaaagtacattctaatttggtaattccagatgtagaattagaa

SEQ ID NO: 632477 - DNA, 120 bp, Artificial Sequence
  ENSG00000179941_13 (sequence is synthesized)
acatatattccgtattcaacccccacactgacaccaacagatacattccaaacagttgaaacgctgacatgtttgtctttggaaagaaacaggctaactgattattatgaaccattactc

SEQ ID NO: 632478 - DNA, 120 bp, Artificial Sequence
  ENSG00000179941_14 (sequence is synthesized)
gaagcatgttaccagtgagctgtaagttaccgaatatgggtacttcccagagttacctttcctcatctatgccagctggttgtgttttgccagtaggtggtaattttgagatcttgttac

SEQ ID NO: 632479 - DNA, 120 bp, Artificial Sequence
  ENSG00000179941_15 (sequence is synthesized)
attactatcttctcaattatgccaaaaaatgccatcaatcagaagaaaccatggttagtatgataatagctaatgcacttttaggcattcccaaagtcctttataaatctaaaacaggaa

SEQ ID NO: 632480 - DNA, 120 bp, Artificial Sequence
  ENSG00000179941_16 (sequence is synthesized)
agtacagctttccacatacatatataagagctgtccatgcactgcaaaccaatcaacccttggtaagcagtcagacaggtttggaatcagtaatgggtaaataccagctactaacttcag

SEQ ID NO: 632481 - DNA, 120 bp, Artificial Sequence
  ENSG00000179941_17 (sequence is synthesized)
ttcttcagtgtttgacaaaaatattaaccattgacatggtaatcactgttaagagacaccctcagaaagttcacaatcaagattcagaagatgaactataacatcagaagtttttaatta

SEQ ID NO: 632482 - DNA, 120 bp, Artificial Sequence
  ENSG00000179941_18 (sequence is synthesized)
accaaacttttcatctaactcaagccaagtaaagcagtcatgtgaccactggttctaaagtcagttcagtctacttaggaaaatagcgtaactttaaaagtctttagaagaagcacacta

SEQ ID NO: 632483 - DNA, 120 bp, Artificial Sequence
  ENSG00000179941_19 (sequence is synthesized)
aggtcaccagaccagatacaaatattaaattactttatggaacaaatctagaggggaagccaagatttggctaagtgtgtctgttttttccctattttatgcctctgtgtctcagctctg

SEQ ID NO: 632484 - DNA, 120 bp, Artificial Sequence
  ENSG00000179941_20 (sequence is synthesized)
tgttagcctatgtgtttaggggagggtttttctttatagctcctttttactctcctgtatctttttcactccagccctccttcatcgttacatgtttagttcatagaatcatttaatctc

SEQ ID NO: 632485 - DNA, 120 bp, Artificial Sequence
  ENSG00000179941_21 (sequence is synthesized)
tgatttgggtgggcttattctaattgtttttaatattgaatacattatttgcattaattttccctactcatactttgtaaagctgagtaaaaggctcaaattatttttttcaaaaagcat

SEQ ID NO: 632486 - DNA, 120 bp, Artificial Sequence
  ENSG00000179941_22 (sequence is synthesized)
aaaattaaattagcagtgagtaaaaggctcaaattttttttcaaaaagcataaaattaatttttacttttatgtggtcattggtttactgccacttcatttggaaaacttggatagattt

SEQ ID NO: 632487 - DNA, 120 bp, Artificial Sequence
  ENSG00000179941_23 (sequence is synthesized)
tcacctttgatatacctttgaatatatgttacctgaaatataactgtgcattgttaactctttcatttctgtagtaaaaggttaatactagaaaggatatgcaattaatactttgatttt

SEQ ID NO: 632488 - DNA, 120 bp, Artificial Sequence
  ENSG00000179941_24 (sequence is synthesized)
ctcctgaccccaagagcttgtaaggatatgtcatgtatttactggtttttcttgtatctggtgcatagccagagttccacagtaacaaataatttgacaatttttatttctaatgtttat

SEQ ID NO: 632489 - DNA, 120 bp, Artificial Sequence
  ENSG00000179941_25 (sequence is synthesized)
ttctgttttatttttaatttttatttctaatttatttcatttacaaatgttcatattttaaaaacttgtcaatgtaaataatatgatgcatcttatcatggacaaggacagtgttttcta

SEQ ID NO: 632490 - DNA, 120 bp, Artificial Sequence
  ENSG00000179941_26 (sequence is synthesized)
cctttatcagttctctgtaatacccaaaacagtgctgtatttactccaagtattcagaagtgcttgttgaacaaaacagtgttatctttaattcattcctttaaatacatgtttccagtt

SEQ ID NO: 632491 - DNA, 120 bp, Artificial Sequence
  ENSG00000179941_27 (sequence is synthesized)
ttccagtttacttattcaacagattcttacttgggattgactgaagaaaaaaaactttaattatagttgaataagtgttgactaatgtattttaaaaactataatatcaaaattttttat

SEQ ID NO: 632492 - DNA, 120 bp, Artificial Sequence
  ENSG00000179941_28 (sequence is synthesized)
taattctgattttttaaacatttatgctatatgatgcattattttgtttctgtgaatatggagagaataaattagctcttttgctgaattcatggatgaatgaactttaaaactgctgca

SEQ ID NO: 632493 - DNA, 120 bp, Artificial Sequence
  ENSG00000179943_0 (sequence is synthesized)
gacgctgcccccgctgcccaaaatgtcggcgcccagagggaggtagagagcccccacataccactgtattccccgccaccatggatgacgtccccgccccaacccctgcaccagcaccgc

SEQ ID NO: 632494 - DNA, 120 bp, Artificial Sequence
  ENSG00000179943_1 (sequence is synthesized)
ccgccgctgccgcccccagggtcccgtttcactgcagtgaatgtggcaagagcttccgctaccgctcagacctgcggcgccactttgcccggcacacagcgctcaagccccacgcatgtc

SEQ ID NO: 632495 - DNA, 120 bp, Artificial Sequence
  ENSG00000179943_2 (sequence is synthesized)
cgcgctgcggcaagggtttcaagcacagcttcaacctagccaaccacctgcgctcgcacaccggggagcggccctaccgctgctctgcctgccccaaggggttccgcgactccaccggcc

SEQ ID NO: 632496 - DNA, 120 bp, Artificial Sequence
  ENSG00000179943_3 (sequence is synthesized)
tgctgcaccaccaggtcgtccacactggtgagaaaccctactgctgcctggtctgcgagctccgcttctcctcacgctccagcctgggccgccacctcaagcgccagcaccgtggggttc

SEQ ID NO: 632497 - DNA, 120 bp, Artificial Sequence
  ENSG00000179943_4 (sequence is synthesized)
gttctcccctctcccctgcagcccggccctggcctgcccgccttgagtgcgccctgctccgtctgctgcaatgtggggccctgctcggtgtgcgggggctcaggggccggcggcggagag

SEQ ID NO: 632498 - DNA, 80 bp, Artificial Sequence
  ENSG00000179943_5 (sequence is synthesized)
ccgagggggcaggcgcgggtctgggcagctgggggctggcagaggcggcagctgcggccgcggcctccttgcccccattt

SEQ ID NO: 632499 - DNA, 120 bp, Artificial Sequence
  ENSG00000179943_6 (sequence is synthesized)
agctggcggcccactgggcggcgcacaccgacgtgaagcccttcaagtgcccgcgctgcgagcgcgacttcaacgcgcccgcgctgctggagcggcacaagctgacgcacgacctgcagg

SEQ ID NO: 632500 - DNA, 80 bp, Artificial Sequence
  ENSG00000179943_7 (sequence is synthesized)
aggcgcagggcccgagacggcgggcgaaggcaccgctgcggaggcgggcgacgctcctctggcttcggaccgcaggctgc

SEQ ID NO: 632501 - DNA, 120 bp, Artificial Sequence
  ENSG00000179943_8 (sequence is synthesized)
gggcggcgtgcccaagctcggggggctgctccccgagggcggtggggaggcgcctgcacctgcggcggccgccgagccctcggaagacaccctgtaccagtgcgactgcgggaccttctt

SEQ ID NO: 632502 - DNA, 120 bp, Artificial Sequence
  ENSG00000179943_9 (sequence is synthesized)
actgcgggaccttctttgcgtcggccgcggccctggccagtcacctggaggcccactcgggcccggccacctacggctgcggccactgcggggctctgtacgcggcgctggccgccttgg

SEQ ID NO: 632503 - DNA, 120 bp, Artificial Sequence
  ENSG00000179943_10 (sequence is synthesized)
aggagcaccggcgggtcagccacggtgagggcggcggggaggaggcggcgaccgccgcccgggaaagggaaccggcgtccggggaacccccgtctggctccggccgcggcaagaagatct

SEQ ID NO: 632504 - DNA, 120 bp, Artificial Sequence
  ENSG00000179943_11 (sequence is synthesized)
tgctccgagtgcgagaagctgttccgctcaccgcgagacctggagcggcacgtgctggtgcacactggcgagaagccgttcccgtgcctggagtgcggcaagttcttccgccacgagtgc

SEQ ID NO: 632505 - DNA, 120 bp, Artificial Sequence
  ENSG00000179943_12 (sequence is synthesized)
tacctcaagcgccaccggctgctgcacggcaccgagcggcccttcccttgccacatctgcggcaagggcttcatcacgctcagcaacctctccaggcacctgaagctgcaccggggcatg

SEQ ID NO: 632506 - DNA, 120 bp, Artificial Sequence
  ENSG00000179943_13 (sequence is synthesized)
gactgactgccaggctgcgtgcgccctgccctccacccagcctcctggactcggcctggaccaggggacctcgggactgcgcgtgaggccccggccctccaaatccaaatccagacgcag

SEQ ID NO: 632507 - DNA, 120 bp, Artificial Sequence
  ENSG00000179943_14 (sequence is synthesized)
gccctgaaatgaggggaccctgactggagaggtgggggccaccaaaaacccacaaaggccccggagctgggggaccacaaacaaacagggtccttagctggggcaggggagcccaaatct

SEQ ID NO: 632508 - DNA, 120 bp, Artificial Sequence
  ENSG00000179943_15 (sequence is synthesized)
agggagagactcctgagcctgaggtccctggaatgagtgtgggtagccgtaagtccccaagacatggggactttgcagtgagcaatgggtctccacaagtacctctcatcttgagagccc

SEQ ID NO: 632509 - DNA, 120 bp, Artificial Sequence
  ENSG00000179943_16 (sequence is synthesized)
taatactaaaagatgggcacccacccccaccaagggaagactgccccattccctgagagccatcattcctaacgaccttgatctggagaatgtggagggagcatgtccctgaattttcct

SEQ ID NO: 632510 - DNA, 120 bp, Artificial Sequence
  ENSG00000179943_17 (sequence is synthesized)
agatccctccaaatgccacccaccagagtcactggtgaccccagaaaatggatatagccgaaatctgcctttcccctttttcattccctgtgctgaaagagggaccagggtagatgcccc

SEQ ID NO: 632511 - DNA, 120 bp, Artificial Sequence
  ENSG00000179943_18 (sequence is synthesized)
ctgccctcgaatcccccctccccgactgtggaatggatcgaccctaacgatcttccccgccccaaacactagaatagactggcctgaaatccccttgcccagtagaatggactgatctat

SEQ ID NO: 632512 - DNA, 120 bp, Artificial Sequence
  ENSG00000179943_19 (sequence is synthesized)
gtgcacacacccccatcacatggaatgggctggtctaggctgtggcctgccaccttccttagagtgaatagggcggacactcctctcttttcctgtagcgtgtggaccggtccacgcaat

SEQ ID NO: 632513 - DNA, 120 bp, Artificial Sequence
  ENSG00000179943_20 (sequence is synthesized)
tctttatcctgtgaactcatctgagtgggaggtggtggacactggggtttccttccctctctccgtagcatccgttggtctttctctccatctctgttggtttgtctgtctctgtcttcc

SEQ ID NO: 632514 - DNA, 120 bp, Artificial Sequence
  ENSG00000179943_21 (sequence is synthesized)
tcccaatccctaggggaagggggcatttggctagggggtgcccctgtgagcctcgaccttgccccctcgtccctctccccagtgtttccaggacccccaataaaccttgtcctgtcagtc

SEQ ID NO: 632515 - DNA, 120 bp, Artificial Sequence
  ENSG00000179943_22 (sequence is synthesized)
gtttgacattcatccagatacacaattttagctatgctggtgggtaaaacagtgagatgatcttgtatcagctgataaacaggcacttccctgagctccaccagacatccctatgcctcc

SEQ ID NO: 632516 - DNA, 120 bp, Artificial Sequence
  ENSG00000179943_23 (sequence is synthesized)
ctaactctccttctggatctagaagttcaagatcaacatgagcaacacccctccccacctccccacaaaaaaaaaccttccagagaggatagagtccaactgagagtgcagaccagtatt

SEQ ID NO: 632517 - DNA, 120 bp, Artificial Sequence
  ENSG00000179943_24 (sequence is synthesized)
gtgatccttgaaacggagagcccatcaaactccagagccatagaggcctcacgaatgctctcatccctccctgctgactggcagaagtggggaaggggttccagagtggaaaaaagggac

SEQ ID NO: 632518 - DNA, 120 bp, Artificial Sequence
  ENSG00000179943_25 (sequence is synthesized)
tggtcccaggtgatatttgaccctgattcctggatgaggaaacatatctgcgatgttaagagcctgggccctggagtcaagacatcattcgttcaaatctttactctctgcgtggccttg

SEQ ID NO: 632519 - DNA, 120 bp, Artificial Sequence
  ENSG00000179943_26 (sequence is synthesized)
ggcaaggtgttcgcttctctaagccttaatcaagacttttgcaaaatgggacacatagttctacgtacttgcccagacatgccatgagcataatacccacaaagtgttcatacacagaag

SEQ ID NO: 632520 - DNA, 120 bp, Artificial Sequence
  ENSG00000179943_27 (sequence is synthesized)
ctttcaggacacattagccattgttatcaggagcagctaagcctcacatcaaccctctgaatagggcatatctgtcccattttgcagatggggaaactgaggcacaggaaagccaagtca

SEQ ID NO: 632521 - DNA, 120 bp, Artificial Sequence
  ENSG00000179943_28 (sequence is synthesized)
gttgcctaagttcctctgccagtaaatggcagggccaaaactggaaacaggtcttgtgacccgaatgtcccagagaatggagaacaaataaacccaaggaggaaaggggacattacgagg

SEQ ID NO: 632522 - DNA, 120 bp, Artificial Sequence
  ENSG00000179943_29 (sequence is synthesized)
gctcagtcctgggtttgaattcagctctgcctataactagcaattgactttgccagtttcctcctctgaaaagtgaataaaccagggttgtcaggagaatcgaataagacagtgggcttt

SEQ ID NO: 632523 - DNA, 120 bp, Artificial Sequence
  ENSG00000179943_30 (sequence is synthesized)
aaaatgcccctcgaacactgcctggtgcacagtaagcactcaataaacttcaccaacgccaccaccatcttcccggcgcccactcagatactgggagcatgggattggggtgtaacggag

SEQ ID NO: 632524 - DNA, 120 bp, Artificial Sequence
  ENSG00000179943_31 (sequence is synthesized)
gggaaggggaggcacaggtgcagctggaagcaggtgctgcaggtgcccccctgcacccccccctcccctttaacagccacatagactgctgtccagagaggagcaaccacctttccatac

SEQ ID NO: 632525 - DNA, 120 bp, Artificial Sequence
  ENSG00000179943_32 (sequence is synthesized)
ggttcgctcccacggggtagcctagtctaggagtctggtctttggaacggtggaaagggggagactggtcccccgaccctccccgtcccctcgccccggtactgacgcgcccatcggccc

SEQ ID NO: 632526 - DNA, 80 bp, Artificial Sequence
  ENSG00000179943_33 (sequence is synthesized)
ccgagctgcgaagcccaagcgcggggcgggccctgcgggggcgacggccaatgagcggcgccgggtaagcgggcggcggg

SEQ ID NO: 632527 - DNA, 120 bp, Artificial Sequence
  ENSG00000179943_34 (sequence is synthesized)
cgagcgcgggagcaggaacaggtgttggaggcgcgctccgggagcgcgcggcccggcctcccctacccccacaccccccctcccgcctgcgccccccgcctctcgggtacctcatttgca

SEQ ID NO: 632528 - DNA, 80 bp, Artificial Sequence
  ENSG00000179943_35 (sequence is synthesized)
acctcatttgcatgtcgccggggctcgcgagtgtgcgcgcgcgcgggggcaacggggccggcgcgtgggaaggggagggg

SEQ ID NO: 632529 - DNA, 120 bp, Artificial Sequence
  ENSG00000179943_36 (sequence is synthesized)
gcgcgcggtgccggccccgcccctcggagaagcgccgggcccctcccttcctgcccttcccgcccgcctgcgcgcccgcgggaaacaaaggggactcgctgggtcctaacgaccggtcgc

SEQ ID NO: 632530 - DNA, 120 bp, Artificial Sequence
  ENSG00000179943_37 (sequence is synthesized)
tcgcggccacgcccggaagccgcgcctgcgcaccggcggccctggtgtgtccccagtgggaaataacccagcaccacatccccaaccacctcgaaacgcctttcctctcacaaagcccac

SEQ ID NO: 632531 - DNA, 120 bp, Artificial Sequence
  ENSG00000179943_38 (sequence is synthesized)
agtcgggtgacccaaagacagataccgaatgatgaggagcgggaaaatggctgcccagtgcccgtaattaacatggcaccggacaggcttcgaagcccatggagtgctaagtggataaga

SEQ ID NO: 632532 - DNA, 120 bp, Artificial Sequence
  ENSG00000179943_39 (sequence is synthesized)
tggtgccggtcttttccagctctgtattgcagttggcgcacttcgctttctttttttttccctagtccaactgtacatcctaatcggaggagtccgaggctgtgaaaaagaaatagtatc

SEQ ID NO: 632533 - DNA, 120 bp, Artificial Sequence
  ENSG00000179943_40 (sequence is synthesized)
tgctctcatttacgttagcatcgcctagtgtcgccacggagaagccccctcgctctcagctccttgcccttagtctgtatggcgccgtgggtgtccctaagccccgccccttcccgctgc

SEQ ID NO: 632534 - DNA, 120 bp, Artificial Sequence
  ENSG00000179943_41 (sequence is synthesized)
ccaagatggcgcgggcctggcttcttcaacctccagggctgggaaaggaaagggaaagagggagaagggcggggatgaggaaggggagccaagagggcgggagaaagggggagtacggcg

SEQ ID NO: 632535 - DNA, 120 bp, Artificial Sequence
  ENSG00000179943_42 (sequence is synthesized)
gcctcccggggccgccccgggtctccaggaccaacgctccgtacgagcgaggtggactcgcctggccccggggcctgcccgacctgccccccaaccgggcgcccagggctgcacctttta

SEQ ID NO: 632536 - DNA, 120 bp, Artificial Sequence
  ENSG00000179943_43 (sequence is synthesized)
accttttaggggcagggggaggggcacaaaaggccggctctcggggcctggggcctggagcagactgggcaagtgggggggcccgctcctcaggctgcggggtggaggaggaggcggggc

SEQ ID NO: 632537 - DNA, 120 bp, Artificial Sequence
  ENSG00000179943_44 (sequence is synthesized)
ctagtggctgctggggcggagcaagggctgggaggagcctgagttgggcggagcttagagtggaagtgggaggggcgtggaggagggagagtctggatagaaaatgggagggtcttaggc

SEQ ID NO: 632538 - DNA, 120 bp, Artificial Sequence
  ENSG00000179943_45 (sequence is synthesized)
aaagaggtggggtttgataaaggggcgtggctcagaaggaatggtgggtaggccctggattgaggggtggaaggaaactcattgaggctggttgggtaaagggagcccaggaagcaggag

SEQ ID NO: 632539 - DNA, 120 bp, Artificial Sequence
  ENSG00000179943_46 (sequence is synthesized)
ggaggagtttagagtagaagggatggagtttgtctggggtgtggcttagagaagtaggtaggcctagtgaggggggtggagtttaagggtgtaatttggaggggtttaatgcaactatca

SEQ ID NO: 632540 - DNA, 120 bp, Artificial Sequence
  ENSG00000179943_47 (sequence is synthesized)
ggtctttataatgaatgtggaaaggacttgcaggggatgggaatagacttcgtagagaaggcctgagaaggtgacgggagtccagtggagagtcttagaaaggatgtggcttctttaaag

SEQ ID NO: 632541 - DNA, 120 bp, Artificial Sequence
  ENSG00000179943_48 (sequence is synthesized)
gaaaaattgggtggagttttggaagtgggtcttagtggacccgagaggggcttagataagtcaaataacttagcaatcatggtaggacttaaggaggaatccaggaggaacttacgggat

SEQ ID NO: 632542 - DNA, 120 bp, Artificial Sequence
  ENSG00000179943_49 (sequence is synthesized)
aatagtcatccaaacagcttacttgttgcgtctttgctgtgcaccagcttaagtgggcacgtagcatttattgccacaattttacttaattctcgccaccactccatgaggtaggtacta

SEQ ID NO: 632543 - DNA, 120 bp, Artificial Sequence
  ENSG00000179943_50 (sequence is synthesized)
ctattcccattttacagatgaagaatttttattatctgatgttacaggagtaattctggtctccctgcaaggatgactccagtgtgcttagccccaaatctttgccctcccattcgctaa

SEQ ID NO: 632544 - DNA, 120 bp, Artificial Sequence
  ENSG00000179943_51 (sequence is synthesized)
gtggtcatcctggaagaggagtgggaggagcttagaggggagtgggagggccttttggaaggaaaagggcttggcaaagaatacaagatccttagggaacattgtgggggactttgaagg

SEQ ID NO: 632545 - DNA, 120 bp, Artificial Sequence
  ENSG00000179943_52 (sequence is synthesized)
gagtaggtgggacttaaggaagagtgggagaggcttaaattacagtgggaggggcacagagagcagtggccgcgcattggcgaagagcgaggagaggcttaaaaacactccgtggagtga

SEQ ID NO: 632546 - DNA, 120 bp, Artificial Sequence
  ENSG00000179943_53 (sequence is synthesized)
ggagactatgaagtgattaggaagattttgccacaggcgtggagccgcgagagaagggtttctaagagagtaggaggattttaaagaacaatgagagtggcttagagaggtgggcagtgg

SEQ ID NO: 632547 - DNA, 120 bp, Artificial Sequence
  ENSG00000179943_54 (sequence is synthesized)
gagggtctcccaggggacaggtggtgggtctgggaacctgggaggagagagctgatggggagccgaccccctcacctgctcctctgtctccccactactccagagagagcccccacatac

SEQ ID NO: 632548 - DNA, 120 bp, Artificial Sequence
  ENSG00000179950_0 (sequence is synthesized)
gacggacgcaagatggcgacggcgaccatagctctccaggtcaatggccagcaaggaggggggtccgagccggcggcggcggcggcagtggtggcagcgggagacaaatggaaacctcca

SEQ ID NO: 632549 - DNA, 120 bp, Artificial Sequence
  ENSG00000179950_1 (sequence is synthesized)
cagggcacagactccatcaagatggagaacgggcagagcacagccgccaagctggggctgcctcccctgacgcccgagcagcaggaggcccttcagaaggccaagaagtacgccatggag

SEQ ID NO: 632550 - DNA, 120 bp, Artificial Sequence
  ENSG00000179950_2 (sequence is synthesized)
cagagcatcaagagtgtgctggtgaagcagaccatcgcgcaccagcagcagcagctcaccaacctgcagatggcagcagtgacaatgggctttggagatcctctctcacctttgcaatcg

SEQ ID NO: 632551 - DNA, 120 bp, Artificial Sequence
  ENSG00000179950_3 (sequence is synthesized)
atggcggctcagcggcagcgggcgctggccatcatgtgccgcgtctacgtgggctctatctactatgagctgggggaggacaccatccgccaggcctttgccccctttggccccatcaag

SEQ ID NO: 632552 - DNA, 120 bp, Artificial Sequence
  ENSG00000179950_4 (sequence is synthesized)
agcatcgacatgtcctgggactccgtcaccatgaagcacaagggctttgccttcgtggagtatgaggtccccgaagctgcacagctggccttggagcagatgaactcggtgatgctgggg

SEQ ID NO: 632553 - DNA, 120 bp, Artificial Sequence
  ENSG00000179950_5 (sequence is synthesized)
ggcaggaacatcaaggtgggcagacccagcaacatagggcaggcccagcccatcatagaccagttggctgaggaggcacgggccttcaaccgcatctacgtggcctctgtgcaccaggac

SEQ ID NO: 632554 - DNA, 120 bp, Artificial Sequence
  ENSG00000179950_6 (sequence is synthesized)
ctctcagacgatgacatcaagagcgtgtttgaggcctttggcaagatcaagtcctgcacactggcccgggaccccacaactggcaagcacaagggctacggcttcattgagtacgagaag

SEQ ID NO: 632555 - DNA, 120 bp, Artificial Sequence
  ENSG00000179950_7 (sequence is synthesized)
gggcaaggctgtcacaccgcccatgcccctactcacaccagccacgcctggaggcctcccacctgccgctgctgtggcagctgctgcagccactgccaagatcacagctcaggaagcagt

SEQ ID NO: 632556 - DNA, 120 bp, Artificial Sequence
  ENSG00000179950_8 (sequence is synthesized)
ggccggagcagcggtgctgggtaccctgggcacacctggactggtgtccccagcactgaccctggcccagcccctgggcactttgccccaggctgtcatggctgcccaggcacctggagt

SEQ ID NO: 632557 - DNA, 120 bp, Artificial Sequence
  ENSG00000179950_9 (sequence is synthesized)
catcacaggtgtgaccccagcccgtcctcctatcccggtcaccatcccctcggtgggagtggtgaaccccatcctggccagccctccaacgctgggtctcctggagcccaagaaggagaa

SEQ ID NO: 632558 - DNA, 120 bp, Artificial Sequence
  ENSG00000179950_10 (sequence is synthesized)
ggaagaagaggagctgtttcccgagtcagagcggccagagatgctgagcgagcaggagcacatgagcatctcgggcagtagcgcccgacacatggtgatgcagaagctgctccgcaagca

SEQ ID NO: 632559 - DNA, 120 bp, Artificial Sequence
  ENSG00000179950_11 (sequence is synthesized)
ggagtctacagtgatggttctgcgcaacatggtggaccccaaggacatcgatgatgacctggaaggggaggtgacagaggagtgtggcaagttcggggccgtgaaccgcgtcatcatcta

SEQ ID NO: 632560 - DNA, 120 bp, Artificial Sequence
  ENSG00000179950_12 (sequence is synthesized)
ccaagagaaacaaggcgaggaggaggatgcagaaatcattgtcaagatctttgtggagttttccatagcctctgagactcataaggccatccaggccctcaatggccgctggtttgctgg

SEQ ID NO: 632561 - DNA, 120 bp, Artificial Sequence
  ENSG00000179950_13 (sequence is synthesized)
ccgcaaggtggtggctgaagtgtacgaccaggagcgttttgataacagtgacctctctgcgtgacagtggtccctctccccggacttgcacttgttccttgtttcctctgggttttatag

SEQ ID NO: 632562 - DNA, 120 bp, Artificial Sequence
  ENSG00000179950_14 (sequence is synthesized)
tgatacagtggtgtccccggggccaggcgcgctctgcccagcccagcctacagtgcggataaaggtgcggatgctgctggccctgaacgtccgtgtgtctgccgtcggtcctgtcaccga

SEQ ID NO: 632563 - DNA, 120 bp, Artificial Sequence
  ENSG00000179950_15 (sequence is synthesized)
gatggcgacggcgaccatagctctcctctcatgggaggttgaatggagcagctgaacttggctgacagtggcctggtggggaaggaagccagaagatgcagaagggcctcccctcccatg

SEQ ID NO: 632564 - DNA, 120 bp, Artificial Sequence
  ENSG00000179950_16 (sequence is synthesized)
taggtctcaaggcccttccatcatctcccgacccccacagcgttacccgtttcctgcccgtggcctgtctttgccctgccatccctcaagaccattgtggagctgctcctccttcctgtg

SEQ ID NO: 632565 - DNA, 120 bp, Artificial Sequence
  ENSG00000179950_17 (sequence is synthesized)
cccccttaggtgtgggtcttactgagtgcagagggctaacctcttggccgtcctcctgcgagacagctctggatggttctgttgccagggaagggaggcctgcgcatccagacccctgcc

SEQ ID NO: 632566 - DNA, 120 bp, Artificial Sequence
  ENSG00000179950_18 (sequence is synthesized)
agtgtcttcaggagagaactgggacctgggctgggccagagcctgtggaaggcactggagctggggctgagttgtgggctggccaagcaggtcaatggccagcaaggaggggggtccgag

SEQ ID NO: 632567 - DNA, 120 bp, Artificial Sequence
  ENSG00000179950_19 (sequence is synthesized)
cggccggagcctctaccgccctccccaccacagccaccatctcctcctcttcacgctcttcctcctcctgggcctgcggccgtccccgcaagctgttacagtgctccgattctcaaagac

SEQ ID NO: 632568 - DNA, 120 bp, Artificial Sequence
  ENSG00000179950_20 (sequence is synthesized)
tcatgctcgggacccccggggtcctctctgaggcacgagtggcccagcctttcccacctgttgctcgctggagcccctaaagcgccgcagcccctttcttggctgcttggctgcagctct

SEQ ID NO: 632569 - DNA, 120 bp, Artificial Sequence
  ENSG00000179950_21 (sequence is synthesized)
gctgagggtggtgaggacaggcctagtgtgagccggactggggcacctggtgctgagggtggtgaagacaggcctagtgtgagccggactggggcacctggtgctgagggtgattaggac

SEQ ID NO: 632570 - DNA, 120 bp, Artificial Sequence
  ENSG00000179950_22 (sequence is synthesized)
aggcctggtgtgagccggactggggcacctggtgccacccacagccagcctttgaccttcagggactggttggggctctggttgcctggggaggggtctccagggcttcctgccctttga

SEQ ID NO: 632571 - DNA, 120 bp, Artificial Sequence
  ENSG00000179950_23 (sequence is synthesized)
gcctgggccagcatcccagcacttggcaggcaggagggggttcttggggcttgggccagcctgtcccttcctgcctcctgtgtccctctgtccttgctcatcacttctgtgctggggacc

SEQ ID NO: 632572 - DNA, 120 bp, Artificial Sequence
  ENSG00000179950_24 (sequence is synthesized)
cttctctcttctctgctgtccctcaaggctgtgtctggaagtctcggagggcccggttggtgggccagtgatctttgtgcttgctgagctggaggacaggcgcaggcatgctgtttgccc

SEQ ID NO: 632573 - DNA, 120 bp, Artificial Sequence
  ENSG00000179950_25 (sequence is synthesized)
atcccacactctgatgggcctgctagccatgcctccctgctcacacagctgcgttcttccctctgcaaaaagcttagagatggattttgacaggagggacgtaaacataatcctggttgg

SEQ ID NO: 632574 - DNA, 120 bp, Artificial Sequence
  ENSG00000179950_26 (sequence is synthesized)
catcagcttgggtctgcagtggctgtgactgcccaagggcctcttggtccccaggcccacctggctagggtgccagtggggtctgctcctggcttctcccagtgggccaggcaaagccca

SEQ ID NO: 632575 - DNA, 120 bp, Artificial Sequence
  ENSG00000179950_27 (sequence is synthesized)
ggcccttgcgggcgagcctggcggggttgcgttcctgtccgctagtgctggtaaaccacagaagtcatctttgattttggcattctttgctggcagctgacaccaggctcctgagagaga

SEQ ID NO: 632576 - DNA, 120 bp, Artificial Sequence
  ENSG00000179950_28 (sequence is synthesized)
aaccagtgggtccctccagcttggatggttcctccttccctcttctgtcgtggtccttggctgggacagtgggaggatctcccagcccagcctgggatacccagcccccagactggaggg

SEQ ID NO: 632577 - DNA, 120 bp, Artificial Sequence
  ENSG00000179950_29 (sequence is synthesized)
gtggtctgggtgggagggcgcacagccctgcctcctgaccatctgtcggctttgctgccgcagtctgcctgggaccttggcgggctggggtgcgtcctgtcctgccgctgggcctggcct

SEQ ID NO: 632578 - DNA, 120 bp, Artificial Sequence
  ENSG00000179950_30 (sequence is synthesized)
gtcaatagaaatgctcacttcttccggggctcatgtccttagtcagggctagaggggggcagtgcagcccacgtgctggggaccttgctcccctggccggccctgcccgccagctctgga

SEQ ID NO: 632579 - DNA, 120 bp, Artificial Sequence
  ENSG00000179950_31 (sequence is synthesized)
cgagcgcagcagagcgccaggcgtggtggggccagtggtgtgggcacccacccgggaccgcccctggggaggcctccatctgctctgagggcccaccttaaaactaatcggccaggtaac

SEQ ID NO: 632580 - DNA, 120 bp, Artificial Sequence
  ENSG00000179950_32 (sequence is synthesized)
ggggtgtgcccacggcctccagccccgtcagtctccaggctgcctggctcttgggttggggtcaggcccctgaggagagaggggtcctaactcatggccccatcagaccctggagggagg

SEQ ID NO: 632581 - DNA, 120 bp, Artificial Sequence
  ENSG00000179954_0 (sequence is synthesized)
cctcctggcaaagcgtccagccctgcctgctcctcctcgggcctgggcgcctccagcaggcacttccctccctccctctctccccagctgcctcctcctcttctctccccgctctccttc

SEQ ID NO: 632582 - DNA, 120 bp, Artificial Sequence
  ENSG00000179954_1 (sequence is synthesized)
ccctttcaccccatcccctgccctggctgcaaccatgagggtcttggcctgcctccttgcggccctggtggggatccaggctgttgagcgcctgcgcctggccgatggcccccatgggtg

SEQ ID NO: 632583 - DNA, 120 bp, Artificial Sequence
  ENSG00000179954_2 (sequence is synthesized)
cgctggccgcctggaggtctggcatggcgggcgctggggcaccgtgtgtgatgacggctgggacctgcgcgatgccgccgtggcctgccggcagctgggctgcggaggggcactggccgc

SEQ ID NO: 632584 - DNA, 120 bp, Artificial Sequence
  ENSG00000179954_3 (sequence is synthesized)
cccgggaggcgccttcttcggggagggggcagggcctgtgtggctcagcgagctggcttgccggggcaacgaggggcagctgggcctctgccaccaccggggctggaaggcccacatctg

SEQ ID NO: 632585 - DNA, 120 bp, Artificial Sequence
  ENSG00000179954_4 (sequence is synthesized)
ctcccacgaggaggacgcgggcgtcgtctgcgcaggtcagcgtgtggctaactccagggacgactcaacatctcccctggatggggctccctggccagggctgttgctggagctgagccc

SEQ ID NO: 632586 - DNA, 120 bp, Artificial Sequence
  ENSG00000179954_5 (sequence is synthesized)
cagcacggaggagcccctggtgacacatgccccccgcccagctgggaacccccagaacgcctcccggaagaagagcccccggcccaagcaggccaagtccacccgggcccctctgctgac

SEQ ID NO: 632587 - DNA, 120 bp, Artificial Sequence
  ENSG00000179954_6 (sequence is synthesized)
gacaggagccccccgccaagagcggctgcgcctggtctctggcccccacaggtgcgccggacgcctggaggtctggcacggcgggcgctggggcaccgtatgtgacgatggctgggacct

SEQ ID NO: 632588 - DNA, 120 bp, Artificial Sequence
  ENSG00000179954_7 (sequence is synthesized)
gcgcgacgctgctgtagcctgccgggaactgggctgtgggggggcgctggctgcccccggcggtgccagattcgggcctggtgcagggcccgtgtggatggacgatgtggggtgtggagg

SEQ ID NO: 632589 - DNA, 120 bp, Artificial Sequence
  ENSG00000179954_8 (sequence is synthesized)
aggagaacaggccctccgagactgcccccgaagcccctggggccggagcaactgtgaccacagcgaggatgcggggctggtctgcaccggcccagcacctcggctgcgcctggccgatgg

SEQ ID NO: 632590 - DNA, 120 bp, Artificial Sequence
  ENSG00000179954_9 (sequence is synthesized)
cccccacgggtgcgccggccgcctggaggtctggcacgggggtcgctgggggtcggtgtgtgacgacgcctgggacctgcgagacgccgctgtggcctgccgagagctgggctgcggagg

SEQ ID NO: 632591 - DNA, 120 bp, Artificial Sequence
  ENSG00000179954_10 (sequence is synthesized)
ggcgctggccgcccccgggggcgccttctttggggaggggtctggacccatcatcctggacgaccttcggtgtcggggaaacgagacggccttacgattctgcccagctcggccctgggg

SEQ ID NO: 632592 - DNA, 120 bp, Artificial Sequence
  ENSG00000179954_11 (sequence is synthesized)
ccagcatgactgtcaccaccgcgaggacgccggggccgtgtgtgacggcatgcccctgggctacgtccctcccacggcccccacggacagcaacaactccacgcccagggaggctgcctc

SEQ ID NO: 632593 - DNA, 120 bp, Artificial Sequence
  ENSG00000179954_12 (sequence is synthesized)
caggcccccgtccaccatgacgagccaggctccagggacggcaggcgtttcacctcctccagcctcccctactgtcctttgggagcctggaccggaagccgggtccccccagctgcgcct

SEQ ID NO: 632594 - DNA, 120 bp, Artificial Sequence
  ENSG00000179954_13 (sequence is synthesized)
ggtggctgggcccagcaagtgctcaggtcgactggaggtgtggcatgaccagcgctgggggaccgtgtgtgacgatagctgggacatgcgggattcagctgtggtctgccgggagctggg

SEQ ID NO: 632595 - DNA, 120 bp, Artificial Sequence
  ENSG00000179954_14 (sequence is synthesized)
ctgtggtggacctcagcagccagaccctgctgctggccgctttggctggggtgcgggccccatctggctagatgatgtgggctgtgtggggaccgaggcttcactgtccgactgccctgc

SEQ ID NO: 632596 - DNA, 120 bp, Artificial Sequence
  ENSG00000179954_15 (sequence is synthesized)
tgctccctggggaaagcacaactgcgctcacaatgaggatgttggggtcacctgcactgggcccccaggcctggactccatctcagaccccttcagctggagctggattcctggactggg

SEQ ID NO: 632597 - DNA, 120 bp, Artificial Sequence
  ENSG00000179954_16 (sequence is synthesized)
gagagatcgggatgcctggctcccgggagagctggccaccaagccctctgcaagtgtgactgccagtgttctggagaaaacaaccacgaaggccccagggaaaatgcctaagagtactaa

SEQ ID NO: 632598 - DNA, 120 bp, Artificial Sequence
  ENSG00000179954_17 (sequence is synthesized)
gaagtgggtgacaaaaaatgcaaagagaccaaccactcaacccccagtgatgccaaccacgaaacactccagggcccaaagccccccagacctaacctcacagaccactgcagcactgac

SEQ ID NO: 632599 - DNA, 120 bp, Artificial Sequence
  ENSG00000179954_18 (sequence is synthesized)
cactgaggcctcccgaagacctacctctgagtttaccagaaggccgaccacggaggccccccagagatggacctctcacaccactgccacgctgacccctcaggccccccgagaacggac

SEQ ID NO: 632600 - DNA, 120 bp, Artificial Sequence
  ENSG00000179954_19 (sequence is synthesized)
cactaagaccatggcaatgctgaccactcaaggcccccaagaaatgacctctgagtccactatcaagagtatccctcaggcctccctggagccatctgctgagatcccagaagggtctcc

SEQ ID NO: 632601 - DNA, 120 bp, Artificial Sequence
  ENSG00000179954_20 (sequence is synthesized)
cctgttccgggttcgtctggccgatgggcccaaccgctgtgctggccggctggaagtgtggcatgccggacgctggggaacagtgtgtgatgacaactgggacctgcgggacgccactgt

SEQ ID NO: 632602 - DNA, 120 bp, Artificial Sequence
  ENSG00000179954_21 (sequence is synthesized)
ggcctgctgggaactgggctgtggaaaggtccggcctcgagtaggcaaaacccattacggccctgggactgggcccatctggctggatgacatgggctgtaagggaagcgaggcctcact

SEQ ID NO: 632603 - DNA, 120 bp, Artificial Sequence
  ENSG00000179954_22 (sequence is synthesized)
gagcgactgcccctcgggggcttgggggaagcacaactgtgaccacgaggaagacgtggggctcacctgcactggctacacagactatgacgattatcccccctggacctgggaccccac

SEQ ID NO: 632604 - DNA, 120 bp, Artificial Sequence
  ENSG00000179954_23 (sequence is synthesized)
ctcaagagaggacctggccaaggggactaccacagcgggggtacctggacacactctcccctggaggaccacccggcgcccgggtagctcctccccagcaataaggcgcctgccggacac

SEQ ID NO: 632605 - DNA, 120 bp, Artificial Sequence
  ENSG00000179954_24 (sequence is synthesized)
aggcagcaaagatggttacaagcttccctggacgtgggacacaccatcaggaaggggcctggctgaggggacccctaccgcaggcaaactaggaccaactcttggggctggcaccaccag

SEQ ID NO: 632606 - DNA, 120 bp, Artificial Sequence
  ENSG00000179954_25 (sequence is synthesized)
gagcccaggcagtcctccaactctgagagtccatggagacacaggttccccgaggaaaccgtggcccgagcgccggccaccgcggcccgctgcgaccaggacagcgcccccaaccccgtc

SEQ ID NO: 632607 - DNA, 120 bp, Artificial Sequence
  ENSG00000179954_26 (sequence is synthesized)
cccaggtccctccgcctctccgggacccccaggcccagcgctgacctctgactccagtcgagagctcactccccactcagccttgacgtccgaggcgacctctgacgctccggacacttc

SEQ ID NO: 632608 - DNA, 120 bp, Artificial Sequence
  ENSG00000179954_27 (sequence is synthesized)
accacccaccccagacccggcctcccggacgaaccccgacctcatcttgacaagccctgactttgctttgtccacccctgactccagtgtggttcccgcgttgaccccggagccctcacc

SEQ ID NO: 632609 - DNA, 120 bp, Artificial Sequence
  ENSG00000179954_28 (sequence is synthesized)
cacgcccttacccaccttgcccaaagagctgacctctgacccttctacaccgtcggaggtgaccagcctttcccctacctcagagcaggtcccagaatctgacacaaccccagatttgga

SEQ ID NO: 632610 - DNA, 120 bp, Artificial Sequence
  ENSG00000179954_29 (sequence is synthesized)
cacaactccatactccagtacagtctcagaatattctagatccccagacccctccccaagccctcaccccactactacccctgatcccaccatggcccctgaccccatcacaacccttaa

SEQ ID NO: 632611 - DNA, 120 bp, Artificial Sequence
  ENSG00000179954_30 (sequence is synthesized)
ccctactgtgacccctcacttccctaccacccctcaccccaccacgacccctcaccccaccaccatcactcactccaccatgattcctgaccccaccacaacccctcaacccttcaccac

SEQ ID NO: 632612 - DNA, 120 bp, Artificial Sequence
  ENSG00000179954_31 (sequence is synthesized)
catcactcactccaccatgattcctgaccccaccacaacccctcaacccttcaccaccatgcagcccaccacaacccctcactccacaacccctcaccccaccacgacccctcatcccac

SEQ ID NO: 632613 - DNA, 120 bp, Artificial Sequence
  ENSG00000179954_32 (sequence is synthesized)
caccatcactcactccaccatgattcctgaccccaccacaacccctcaacccttcaccaccatgcagcccaccacgatgcctcatcccaccacgacccctcaccccaccacgactcctca

SEQ ID NO: 632614 - DNA, 120 bp, Artificial Sequence
  ENSG00000179954_33 (sequence is synthesized)
ccccaccacaacccctcaccccaccacaacccctcaccccaccatgactcctgaccccaccacgaccccttaccccaccactactcctgatcccaccacgacccctcaccccacaactcc

SEQ ID NO: 632615 - DNA, 120 bp, Artificial Sequence
  ENSG00000179954_34 (sequence is synthesized)
tgacccttcctcaacccctgtcatcactactgtgtcccttccaacctccttggggacagaactctcctctcccactctagcaccaacagtcaagcccagtctgcacccccagttgacctt

SEQ ID NO: 632616 - DNA, 120 bp, Artificial Sequence
  ENSG00000179954_35 (sequence is synthesized)
cacagcacctgcccctcacacctccacatcccagatacccaccttagagccctctccagccttggagtccagcccctccaggtcctccacagccacaagcatggacccactgtccactga

SEQ ID NO: 632617 - DNA, 120 bp, Artificial Sequence
  ENSG00000179954_36 (sequence is synthesized)
ggacttcaagccacccagaagccagagccccaacctaacccctccacccacccataccccacactcagcctctgaccttactgtgtcccctgaccccctcctttcccccacagcccaccc

SEQ ID NO: 632618 - DNA, 120 bp, Artificial Sequence
  ENSG00000179954_37 (sequence is synthesized)
cttggatcatcctccccttgaccccctcaccctagggccaactcctggtcagagcccaggcccccatggtccatgtgtggccccaacaccacctgtaagggtcatggcttgtgagccacc

SEQ ID NO: 632619 - DNA, 120 bp, Artificial Sequence
  ENSG00000179954_38 (sequence is synthesized)
tgccctggtggagctggtggctgctgtgagggatgtgggtggtcagctgcagagactgacccaggtcgtggaacaggagcggcaggagcgccaagccctgctgctggggctgacgcagct

SEQ ID NO: 632620 - DNA, 120 bp, Artificial Sequence
  ENSG00000179954_39 (sequence is synthesized)
ggtagaagctgcccggggtctggggcagctgggtgaggctgtgaagagactggcagagatggcctggaccaccagcatgcctgcaccaaccaccactaccccagaggaagaagaaagacc

SEQ ID NO: 632621 - DNA, 120 bp, Artificial Sequence
  ENSG00000179954_40 (sequence is synthesized)
cctgaggggagacgtgtgaccctctccaggatttgaggggcttaagacacccccaaccaaaaaaaacaaaaacaaaaaaaacccccaaagtatctaattaaaaacaaggtgtgaatggta

SEQ ID NO: 632622 - DNA, 120 bp, Artificial Sequence
  ENSG00000179954_41 (sequence is synthesized)
ggtggaggcgggcacgtgccgggcacagcggctgcggagacagcgggtccggcctcgggacccctcccgtagggtagggaggcagccaatgagcagaaataaatgcagaatcacaaactg

SEQ ID NO: 632623 - DNA, 120 bp, Artificial Sequence
  ENSG00000179954_42 (sequence is synthesized)
gccctggtggggatccaggctgttggtaagtgcccagactcctcccatctgcccgcccccccccccaggcctcccccttctgcccatccaggcctggcctcacccccactgggtccccgg

SEQ ID NO: 632624 - DNA, 120 bp, Artificial Sequence
  ENSG00000179954_43 (sequence is synthesized)
cccatccgaattccactgtgaccttggccccagctccgcaagggaatcccccaggtgtctggccgcatctctctgagcacccaggagtctgggcccaggggccagtgagcagggccactg

SEQ ID NO: 632625 - DNA, 120 bp, Artificial Sequence
  ENSG00000179954_44 (sequence is synthesized)
gcctacagacagtacctgcaggacagccacctgcccctacagttgccctggccttggggcccccaggatgcccctccccagtcacagccattcctccaaccctcagagcgcctgcgcctg

SEQ ID NO: 632626 - DNA, 120 bp, Artificial Sequence
  ENSG00000179954_45 (sequence is synthesized)
tggggcctggccccctcctgtcttcctcagaccccagctccctcttgcccctccaggaagctgcagcgggcctgctcccagctctgcctcctgcccgcctgctctctgcatgcccagcgc

SEQ ID NO: 632627 - DNA, 120 bp, Artificial Sequence
  ENSG00000179954_46 (sequence is synthesized)
gctagtgctcagccctgtcccggggcctaggccagtgaccgtttgtttaagcctcagttttcctgaaggagcgatggagctaagaatgcctgcctcaggcttgagccaagtcctggaacg

SEQ ID NO: 632628 - DNA, 120 bp, Artificial Sequence
  ENSG00000179954_47 (sequence is synthesized)
caagaagccctgcctgccctctgccaccgggctggccatggcaggggaccgtctcggagacctcttgtctctgtggccaacctctgctccttccccatcctcaagggagctggtgggaag

SEQ ID NO: 632629 - DNA, 120 bp, Artificial Sequence
  ENSG00000179954_48 (sequence is synthesized)
gagggagggagggcggtgacttgggggcatggagggagactgaggcagggtggggacacccacgggtgagcctccatctcccctcattcacgccccctcagcgcggggtctcctcccctc

SEQ ID NO: 632630 - DNA, 120 bp, Artificial Sequence
  ENSG00000179954_49 (sequence is synthesized)
atgtctcccagggggtccctcccctctcctgtaccccttggacctgggatagaacccagcaaacagcggttggggggtgttaggtgagagctcaggggctccctccctccttctctcctt

SEQ ID NO: 632631 - DNA, 120 bp, Artificial Sequence
  ENSG00000179954_50 (sequence is synthesized)
ccttccttcctccctctttccctttctctttcctttctttccttccacaaatctttacacaccaccacggcaggccccaccctgctggactgcccgatccattgactgtaggaggccggc

SEQ ID NO: 632632 - DNA, 120 bp, Artificial Sequence
  ENSG00000179954_51 (sequence is synthesized)
aggcagagggcacccacctggcatttcatcagcgttggggtggggacagtacacgggctgcaggcaaagctgggtgcctgcccaggatgggtaggaaatgctgacatcagtgggtatcca

SEQ ID NO: 632633 - DNA, 120 bp, Artificial Sequence
  ENSG00000179954_52 (sequence is synthesized)
ggggggagagaagagagaaagaggctgaccctagtctctgctgtatgctgggccctgcgctgtgcacgttacctggggccgctctgagcctcccgcagcccggacggggtggatcctcat

SEQ ID NO: 632634 - DNA, 120 bp, Artificial Sequence
  ENSG00000179954_53 (sequence is synthesized)
ccctctcttcacagatgtggggccgaggctcagagaggtgacgtaaatggcccaagacccaggtgcctagcaagctccagccccagccgctgacccctctgggtctgtatagacccacgc

SEQ ID NO: 632635 - DNA, 120 bp, Artificial Sequence
  ENSG00000179954_54 (sequence is synthesized)
tccatgcctgtcccactgcacagtcggccatagggacgtggtggggacacggaggtcagagtgggagtgagcagcagagaaggcttgtatggggtgggggtggtgccttcgtgtgcctag

SEQ ID NO: 632636 - DNA, 120 bp, Artificial Sequence
  ENSG00000179954_55 (sequence is synthesized)
tgtacaagctgtgggggaagaagtgggaccttcggagcagagttcattggagggaagttgaggctctggagaggagagggtgaaggtgccaagaaaggaaacaaatgaactaaggcgccc

SEQ ID NO: 632637 - DNA, 120 bp, Artificial Sequence
  ENSG00000179954_56 (sequence is synthesized)
ggtgaagctgggagcttcgccagcatctgatttaattctcatggcaaccccgggagggagacgctcccctcccctgtctgcagatgaggaaaagcagacaggtgtgttagactcctccct

SEQ ID NO: 632638 - DNA, 120 bp, Artificial Sequence
  ENSG00000179954_57 (sequence is synthesized)
agttctgtgctcttctctagaacagtgattgggggcaattctgcacctgcctcgttgggggacagagagagggactccagagtcctccaatgatgagtcaactcttaccccaacagaaat

SEQ ID NO: 632639 - DNA, 120 bp, Artificial Sequence
  ENSG00000179954_58 (sequence is synthesized)
atgagtcaactcttaccccaacagaaatgtacccgaagagccaggcatggttacaggctaacacctgtagcccacgtgctttgggaggatttcttgaggccaggagttcaagaccagtct

SEQ ID NO: 632640 - DNA, 120 bp, Artificial Sequence
  ENSG00000179958_0 (sequence is synthesized)
gagcgtggctcgtgggttttccgtgaagtcgcggtgcagcggtgggcggcatgtctgtggccggtggggagattcgtggggacacggggggagaggacactgctgctcccggccggttca

SEQ ID NO: 632641 - DNA, 120 bp, Artificial Sequence
  ENSG00000179958_1 (sequence is synthesized)
gcttcagcccggagcccacgctcgaggacatccgccgcctccatgctgagtttgctgcggaacgagactgggaacagttccatcagcctcggaatctcctcctggccttggttggggaag

SEQ ID NO: 632642 - DNA, 120 bp, Artificial Sequence
  ENSG00000179958_2 (sequence is synthesized)
tgggggagctggcagaactctttcagtggaaaaccgatggggaacctggcccccaaggctggtcccccagggaacgggcagcccttcaagaggagcttagtgacgtcctcatctacctgg

SEQ ID NO: 632643 - DNA, 120 bp, Artificial Sequence
  ENSG00000179958_3 (sequence is synthesized)
tggcattagcagcccgctgccgtgtggatctgccgctagcagtgctctccaaaatggacatcaaccggcgacgctacccagcccatctggcccgcagctcttcccgcaagtatacagaat

SEQ ID NO: 632644 - DNA, 120 bp, Artificial Sequence
  ENSG00000179958_4 (sequence is synthesized)
tgcaactcagggtggtgtctgaagagcagagagtggcctggccctggagcctttttctagtcttttcagaatagatcatgggcctgaggcctccacttcttgaggtctgaggcccagcag

SEQ ID NO: 632645 - DNA, 120 bp, Artificial Sequence
  ENSG00000179958_5 (sequence is synthesized)
cctctagaaggtagcctcctggtgtttgttctcccagtaaaatggttttgggcgataacttctagattattcctggatggccagggaggctctctgtctcagcaggtgatgacgggggta

SEQ ID NO: 632646 - DNA, 120 bp, Artificial Sequence
  ENSG00000179958_6 (sequence is synthesized)
ccaggggtgcctctgagacccattctcgtgtttccctgttgtaccttttgcctgcagggcagagagatctggtttctagcaaattcccagtaggatgtcatgtaagttccttccccctct

SEQ ID NO: 632647 - DNA, 120 bp, Artificial Sequence
  ENSG00000179958_7 (sequence is synthesized)
tagagattgaaggctgtaagagtccagatggtggagccaggctgtctgggttcaaatgccatctttgacacttgcaagctaaatgacattactcaaattaatcgttctgcacttcagctt

SEQ ID NO: 632648 - DNA, 120 bp, Artificial Sequence
  ENSG00000179958_8 (sequence is synthesized)
ccttgtctatcaaataaaaagaatagtacctgcccaatagggtcgtgaggtttcaatgagttatgtgaatgctcagggcggggcctggcacatagtaaagtacacttggtaagttttgca

SEQ ID NO: 632649 - DNA, 120 bp, Artificial Sequence
  ENSG00000179958_9 (sequence is synthesized)
gcggtgggcggcatgtctgtggccggtggggagattcgtggggacacggggggagaggacactgctgctcccggccggttcagcttcagcccggagcccacgctcgaggacatgtaagca

SEQ ID NO: 632650 - DNA, 120 bp, Artificial Sequence
  ENSG00000179958_10 (sequence is synthesized)
gggaagcgggctggcagcggggctcgggtcctggctctgtgggctgtccctgggtgagccttcttacctcatctgcaaaatgggcgcagcggtgcacacctgaggcaagggaaattgggt

SEQ ID NO: 632651 - DNA, 120 bp, Artificial Sequence
  ENSG00000179958_11 (sequence is synthesized)
ggtgcctccgagtggtaactaggaacgcccttcagcctagccctgggaagataccggcaccagataccgcctctgctctccaggcgccggggccgccgcctccatgctgagtttgctgcg

SEQ ID NO: 632652 - DNA, 120 bp, Artificial Sequence
  ENSG00000179958_12 (sequence is synthesized)
gaattagttgcagaatctcctggtcccaggccccattacatactacgggggtagctgcctctggcccctgcatcaccctctaacccggagacttggacttacactcctttgtcctatttc

SEQ ID NO: 632653 - DNA, 120 bp, Artificial Sequence
  ENSG00000179965_0 (sequence is synthesized)
gagtgcccagccgcccggcgcccaggcctggggcaccgcgagtgccgaaccttcggctggacaccaagatgcctggcgaacagcaggcagaggaagaggaggaggaagagatgcaggagg

SEQ ID NO: 632654 - DNA, 120 bp, Artificial Sequence
  ENSG00000179965_1 (sequence is synthesized)
agatggtgctgctggtgaagggtgaggaggatgagggtgaggagaagtatgaggtggtgaaactcaagatccccatggacaacaaggaggtcccgggcgaggcgcccgcgccgtccgccg

SEQ ID NO: 632655 - DNA, 120 bp, Artificial Sequence
  ENSG00000179965_2 (sequence is synthesized)
cgtccccacgcgtgccccgactgcggccgcgccttcgcgcgccgctccacgctggcgaagcacgcgcgcacgcacacgggcgaacggcccttcgggtgcaccgagtgcgggcggcgcttc

SEQ ID NO: 632656 - DNA, 120 bp, Artificial Sequence
  ENSG00000179965_3 (sequence is synthesized)
ggcgcttctcacagaagtcggcgctgaccaaacacggccgcacgcacacgggcgagcggccctacgagtgccccgagtgcgacaaacgcttctcggccgcctcgaacctgcggcagcacc

SEQ ID NO: 632657 - DNA, 120 bp, Artificial Sequence
  ENSG00000179965_4 (sequence is synthesized)
ggcggcggcacacgggcgagaagccgtacgcatgcgcgcactgcggccgccgcttcgcgcagagctccaactacgcacagcacctgcgcgtgcacacgggcgagaagccgtacgcgtgcc

SEQ ID NO: 632658 - DNA, 120 bp, Artificial Sequence
  ENSG00000179965_5 (sequence is synthesized)
cggactgcggacgcgcctttggcggcagctcgtgcctggcgcgccaccgacgcacgcacacgggcgagcggccctacgcttgcgccgactgcggcacgcgcttcgctcagagctcggcgc

SEQ ID NO: 632659 - DNA, 120 bp, Artificial Sequence
  ENSG00000179965_6 (sequence is synthesized)
tggccaagcaccggcgcgtgcacacgggcgagaagccgcaccgctgcgctgtgtgtggccgtcgcttcggccaccgctccaacctggcggagcacgcgcgcacgcacacaggcgagcggc

SEQ ID NO: 632660 - DNA, 120 bp, Artificial Sequence
  ENSG00000179965_7 (sequence is synthesized)
cctacccctgcgccgagtgcggccgccgcttccgcctaagctcgcacttcattcgccaccgacgcgcgcacatgcggcgccgcctgtatatttgcgccggctgcggcagggacttcaagc

SEQ ID NO: 632661 - DNA, 120 bp, Artificial Sequence
  ENSG00000179965_8 (sequence is synthesized)
accgagcgttgcccggagtgtgagggcagctgagtcccgcagggctgcggaggggcgcgctggggcttcgacctggctgcactaacccaggctcctcctcgccccggcctccgggtctgg

SEQ ID NO: 632662 - DNA, 120 bp, Artificial Sequence
  ENSG00000179965_9 (sequence is synthesized)
gaaattgaggggacggcaggcccggctgccctggaactgggagacagggagaatcccctgccggggtccctggaaacagtgcccaccccacatcactacattccctcggcccgtgttagt

SEQ ID NO: 632663 - DNA, 120 bp, Artificial Sequence
  ENSG00000179965_10 (sequence is synthesized)
gaataaagtattatatcctcaccccacccgtgcctgtgagtgaggtgggtgggagaggaagaaagttggggttctccaggctcaggtgccaagtgagttgtcaaggaaccaaatggggat

SEQ ID NO: 632664 - DNA, 120 bp, Artificial Sequence
  ENSG00000179965_11 (sequence is synthesized)
gtaaacctaaaaggggttcccggcacctcggtttgtgttggttggaggtgatcgcacacttggcccttggttacgtcctcataaccttagacctgaaagggcccataaatatactatgtt

SEQ ID NO: 632665 - DNA, 120 bp, Artificial Sequence
  ENSG00000179965_12 (sequence is synthesized)
cacgatcagacacgcactgcattcggcagagctccagtgagcaaggcacgaccctcagatctcagtctagtgaaggagagaaaactgtaataacactacgttaaaggttttaactgcttt

SEQ ID NO: 632666 - DNA, 73 bp, Artificial Sequence
  ENSG00000179965_13 (sequence is synthesized)
aaaactgtaataacactacgttaaaggttttaactgctttgttatgtaagcttacccagcccggctagcagat

SEQ ID NO: 632667 - DNA, 120 bp, Artificial Sequence
  ENSG00000179965_14 (sequence is synthesized)
gcaatgaaccgagatagtgccattgcactccggcctgggcaacagaggaagactgcctcaaacaaacaaaaaacaacaaaccaaaccaaaccaaaccaaaaaaatctcaaagcgattgga

SEQ ID NO: 632668 - DNA, 88 bp, Artificial Sequence
  ENSG00000179965_15 (sequence is synthesized)
cctagcagctcatgcctgtaatcttcttgaagtcaagagtttgagatcagcctggagaacaaagtgagacccccatctattaaaaaaa

SEQ ID NO: 632669 - DNA, 120 bp, Artificial Sequence
  ENSG00000179965_16 (sequence is synthesized)
gctccaggtgcttgggagtcgggggactgcggaggacgccaagtctgagctcgccgccctctccgagccgtttgggccggacgcctgggtccttcgggctccgccccagggggtggggct

SEQ ID NO: 632670 - DNA, 120 bp, Artificial Sequence
  ENSG00000179965_17 (sequence is synthesized)
ggctatatgttcggaccaatgaccggccgtccctgcggtcccgccccctccccgcccccggagccgcggcctcgctgagtgcccagccgcccggcgcccaggcctggggcaccgcgagtg

SEQ ID NO: 632671 - DNA, 120 bp, Artificial Sequence
  ENSG00000179965_18 (sequence is synthesized)
gggctcaagtgatcctccttcctcggcctaccaagttgttgggactacaagtgcaccccaccacacctggctaatttttcactttttgtagagacgaggtctaactgtgttgcccaggct

SEQ ID NO: 632672 - DNA, 120 bp, Artificial Sequence
  ENSG00000179965_19 (sequence is synthesized)
tttgtagagacgaggtctaactgtgttgcccaggctggtgtccaactcctggcctcaagtaatcctccttccttggcctcccgaagtgctaagattacaggtgtgagtcactgcacctgg

SEQ ID NO: 632673 - DNA, 120 bp, Artificial Sequence
  ENSG00000179965_20 (sequence is synthesized)
gacatcaacagtgcttgtatggagaatttctttttcagaagtcagtgaactcagcatgaggaagccctcaggctgtccaaagtcacctgaaagagggtgccaaggaaaaacgggccagaa

SEQ ID NO: 632674 - DNA, 120 bp, Artificial Sequence
  ENSG00000179965_21 (sequence is synthesized)
aaatgtagatctgatgagacaagttctctccacagtggctgatgtattgaaataaaccaatagatttcaaaaccagggcaagactggaaaatgtgaccttgaattcagatggtaccaaac

SEQ ID NO: 632675 - DNA, 120 bp, Artificial Sequence
  ENSG00000179965_22 (sequence is synthesized)
atactgtggggagtttctccatttaaagtatcaagttgtattttaaccttgaatccctcttggagtgtgccagggacgtggaatccagcctctgtcacatcttggtcacgtgagttcaga

SEQ ID NO: 632676 - DNA, 120 bp, Artificial Sequence
  ENSG00000179965_23 (sequence is synthesized)
acagtgtagcctgaatgacggcatggtctcatgggcaccctgagtccatcctggctcccactggccatgtgaatttcatcgccctcagcctcagctttctcagctatcaaaagagagaac

SEQ ID NO: 632677 - DNA, 120 bp, Artificial Sequence
  ENSG00000179965_24 (sequence is synthesized)
acccagctcaaggcgggtgacaggaggatttaatacaataacatacatagtgttgtcaaagcttaatactttgttattgattgttgctattgttatcagtatagatactatttaaaccag

SEQ ID NO: 632678 - DNA, 120 bp, Artificial Sequence
  ENSG00000179965_25 (sequence is synthesized)
aacagcaaagagcctagcaatcaggaggggaaactgaacccatgaatgtttgaagaccaaataaatgctcccctcccctcccccacaactcagactctaccaggaagctttccatctact

SEQ ID NO: 632679 - DNA, 120 bp, Artificial Sequence
  ENSG00000179965_26 (sequence is synthesized)
cacaagagttctgccagctcccccacttccccaaccaaggccaggaggagattccgaggctgatggaactgttcccagtctcgttccgcagcaaactcagcatggaggcggcggctgaaa

SEQ ID NO: 632680 - DNA, 120 bp, Artificial Sequence
  ENSG00000179965_27 (sequence is synthesized)
taggacaaaggagtgtaagtccaagtctccgggttagagggtgatgcaggggccagaggcagctacccccgtagtatgtaatggggcctgggaccaggagattctgcaactaattcattg

SEQ ID NO: 632681 - DNA, 120 bp, Artificial Sequence
  ENSG00000179965_28 (sequence is synthesized)
gatggtattgtgcaggtcatttcctctttccggaacttggttccctcatctataaaatgggcgtgcccctgaactgcccttaacatctcgccaaaactaacaaaaccctcttcattattc

SEQ ID NO: 632682 - DNA, 120 bp, Artificial Sequence
  ENSG00000179965_29 (sequence is synthesized)
catctcctgctgctacttctgcagtttcctccacctggaatcgccgcacatcaaaatgcaatttctcttacagaaggtagttccacagacccttcctctaagaagcctttcttgacctcc

SEQ ID NO: 632683 - DNA, 120 bp, Artificial Sequence
  ENSG00000179965_30 (sequence is synthesized)
tccagcaaaaaataacgtctcccacctctcagcacttcgtttgcccctctcgtacccccggcgcctggagagcagaggcggtatctggtgccggtatcttcccagggctaggctgaaggg

SEQ ID NO: 632684 - DNA, 120 bp, Artificial Sequence
  ENSG00000179965_31 (sequence is synthesized)
cgttcctagttaccactcggaggcaccacccaatttcccttgcctcaggtgtgcaccgctgcgcccattttgcagatgaggtaagaaggctcacccagggacagcccacagagccaggac

SEQ ID NO: 632685 - DNA, 120 bp, Artificial Sequence
  ENSG00000179965_32 (sequence is synthesized)
ccgagccccgctgccagcccgcttcccgaccacgtggaggaaccctccccaaaacgcgggagaaaggggcgacttccccaccccgagctgggccaggcctgcttacatgtcctcgagcgt

SEQ ID NO: 632686 - DNA, 120 bp, Artificial Sequence
  ENSG00000179965_33 (sequence is synthesized)
gctgaaccggccgggagcagcagtgtcctctccccccgtgtccccacgaatctccccaccggccacagacatgccgcccaccgctgcaccgcgacttcacggaaaacccacgagccacgc

SEQ ID NO: 632687 - DNA, 120 bp, Artificial Sequence
  ENSG00000179965_34 (sequence is synthesized)
tcgaagccccgcctccagagctccgaccaattacgggagttctctattgcctcacggggcggagcctgaggaaagagaccaatgacttttgtggagtttgctacagccctccccttccct

SEQ ID NO: 632688 - DNA, 120 bp, Artificial Sequence
  ENSG00000179965_35 (sequence is synthesized)
cactggaccaatctgagggagcttcaagcgcgcgtttctagtcttaggccctggaattcttccgctaggccctgtgtctaaaggtagaggtaccaattcgacctggggaagagacgaagg

SEQ ID NO: 632689 - DNA, 120 bp, Artificial Sequence
  ENSG00000179965_36 (sequence is synthesized)
gcagagggtgggggaagcgcaggcgcgtcacttcgtttatgggcgccagagggcgccaaagcgaaacggcagcggaagagggcccgtcaggtggaaaaccctataaatgaaaggccctat

SEQ ID NO: 632690 - DNA, 120 bp, Artificial Sequence
  ENSG00000179965_37 (sequence is synthesized)
gcataggtattaaatcagggcttaaggacgttgagaaacctcgaggccaacccccacactatttggatgggattgaaggggaagagcggagtaagatcagacggcagtaggacttcagct

SEQ ID NO: 632691 - DNA, 120 bp, Artificial Sequence
  ENSG00000179965_38 (sequence is synthesized)
ccccgccatcgctgtgtcctgtggttgaaacgatggaggtcgccccatccctgtcctaagggaggcagtaggccccagcgcaacgtacattgccctgaaacacgtggccccttatggtct

SEQ ID NO: 632692 - DNA, 120 bp, Artificial Sequence
  ENSG00000179965_39 (sequence is synthesized)
ggcctgtgccggcctctccagcctcatgggtccccagcacggctcctccaccccacacacgagaactccaggctccactcacaccagggaatacgcgaggtggcgagtcacagggttgct

SEQ ID NO: 632693 - DNA, 120 bp, Artificial Sequence
  ENSG00000179965_40 (sequence is synthesized)
gctttcaaatcagaaccactgagttattggccatgggaggagcagagatctttatgaaaccctagaacaggtgtagtcttgcaaagaatgatttattattgtacccttattagggctact

SEQ ID NO: 632694 - DNA, 120 bp, Artificial Sequence
  ENSG00000179965_41 (sequence is synthesized)
atctctgatttccacgtttaaagaggcttccagcttgctggaagtgaaagcgtaagaaagcgcaggaagaggcagagtcagattttggaaattaaaatcccaaggctgtgacaattgcaa

SEQ ID NO: 632695 - DNA, 120 bp, Artificial Sequence
  ENSG00000179965_42 (sequence is synthesized)
ttctaggtatatgccctagagaaattaatgaatatgtgcagagagacacatgcaagaagttcattacagttttgtttctaagagtgaaaaaaattgaaaataaaatgactatcaacggaa

SEQ ID NO: 632696 - DNA, 120 bp, Artificial Sequence
  ENSG00000179981_0 (sequence is synthesized)
aaaaactgaagcaggaaaagcagctcgatgtgtctgtctatcagttgagactgtctgaaagctctgcgatccgaatgtgtgttatatttcactgaaaagaggagagagcgagagtgcatc

SEQ ID NO: 632697 - DNA, 120 bp, Artificial Sequence
  ENSG00000179981_1 (sequence is synthesized)
tccctctctcccaggagtttgagggggggggggacagtccacgctcatctcgcccacccagtgaatgtctgctcttcaccccctttgcacacactctccgggttgttgttgccttttttt

SEQ ID NO: 632698 - DNA, 120 bp, Artificial Sequence
  ENSG00000179981_2 (sequence is synthesized)
tttcttggaggggggggtgctttttgtgtatttttcaaatttttttctgttggaagatcaagaccggccaaaaatccatgatcaaaatgtgtttgcattagatttcgcattggaagaagc

SEQ ID NO: 632699 - DNA, 120 bp, Artificial Sequence
  ENSG00000179981_3 (sequence is synthesized)
ggcgatcctggcggccaagccccccgggtggaagcgcggggcaccaagtggcgctccggcggggtgacactgtttgatctgtgactgtttggaaggtggagcagcgcctgacatctcccc

SEQ ID NO: 632700 - DNA, 120 bp, Artificial Sequence
  ENSG00000179981_4 (sequence is synthesized)
ccggcgcatcttatgttcctgaggaagaattgaaggcagcagaaatagatgaagagcacgtggaggatgacgggctgtctttggacattcaggaaagtgagtacatgtgcaatgaagaga

SEQ ID NO: 632701 - DNA, 120 bp, Artificial Sequence
  ENSG00000179981_5 (sequence is synthesized)
cggagatcaaagaggcgcagagctaccagaactccccagtcagctctgcgactaaccaggacgccggctacgggtcgcccttcagtgagagcagcgaccagctagcccatttcaaaggct

SEQ ID NO: 632702 - DNA, 120 bp, Artificial Sequence
  ENSG00000179981_6 (sequence is synthesized)
cttcctctcgagaagagaaggaggatccgcagtgtcccgacagcgtctcgtacccccaggacagcctggcacagatcaaagctgtgtatgcaaacttgttctccgagtcctgctggtcca

SEQ ID NO: 632703 - DNA, 120 bp, Artificial Sequence
  ENSG00000179981_7 (sequence is synthesized)
gcttagctctggatttaaagaagtcgggttccaccaccagcaccaacgatgccagccagaaggagagctccgcccccacccccacaccccccacctgccccgtcagcaccactggcccca

SEQ ID NO: 632704 - DNA, 120 bp, Artificial Sequence
  ENSG00000179981_8 (sequence is synthesized)
ccacgagcacgcccagcaccagctgcagctccagcaccagccacagcagtaccaccagtaccagcagcagctccgggtacgactggcaccaggctgcactggccaagacgctgcagcaga

SEQ ID NO: 632705 - DNA, 120 bp, Artificial Sequence
  ENSG00000179981_9 (sequence is synthesized)
cgtcctcgtatgggctgcttcctgagcccagcctgttcagcaccgtgcagctctaccgccagaacaacaagctctacggctccgtcttcacgggcgccagcaagttccggtgcaaagact

SEQ ID NO: 632706 - DNA, 120 bp, Artificial Sequence
  ENSG00000179981_10 (sequence is synthesized)
gcagtgccgcgtacgacacgctggtggaactgacggtgcacatgaacgagacaggccactaccgtgacgacaacagggacaaggactccgagaagaccaagaggtggtccaagcccagga

SEQ ID NO: 632707 - DNA, 120 bp, Artificial Sequence
  ENSG00000179981_11 (sequence is synthesized)
agcgctccctgatggagatggaggggaaggaggatgcccagaaggtgctgaagtgcatgtactgtggacactcctttgagtccttgcaggacctcagcgtccacatgatcaaaaccaagc

SEQ ID NO: 632708 - DNA, 120 bp, Artificial Sequence
  ENSG00000179981_12 (sequence is synthesized)
attaccagaaagtgcctctgaaggagccagtgccagccatcaccaaactggtcccctccaccaaaaagcgggcgcttcaggacctggcgcccccctgctcccctgagccagcaggaatgg

SEQ ID NO: 632709 - DNA, 120 bp, Artificial Sequence
  ENSG00000179981_13 (sequence is synthesized)
ccgcagaggtggccctgagtgagtcagccaaggatcagaaagcagcgaacccgtacgtcacgcccaataaccgctatggctaccagaatggcgccagctacacctggcagtttgaggccc

SEQ ID NO: 632710 - DNA, 120 bp, Artificial Sequence
  ENSG00000179981_14 (sequence is synthesized)
gcaaggcgcagatcctcaagtgcatggagtgtggcagctcccacgacacgctgcagcagctcaccgcccacatgatggtcaccgggcacttcctgaaagtgaccacctcggcttctaaga

SEQ ID NO: 632711 - DNA, 120 bp, Artificial Sequence
  ENSG00000179981_15 (sequence is synthesized)
agggcaagcagttggtgctggaccctgtggtggaagagaagatccagtccatcccactaccgcccaccacccacacgcggctgccggcctccagcatcaaaaagcagcccgactctcccg

SEQ ID NO: 632712 - DNA, 120 bp, Artificial Sequence
  ENSG00000179981_16 (sequence is synthesized)
cggggtccacgacttctgaagaaaagaaagagccagagaaggagaagccgcctgtggctggcgacgcggagaagatcaaggaggagagtgaggacagcttggagaaatttgagcccagca

SEQ ID NO: 632713 - DNA, 120 bp, Artificial Sequence
  ENSG00000179981_17 (sequence is synthesized)
ccctgtacccgtacctgcgtgaggaggacctggacgacagccccaagggagggctggacattctcaagtccctggagaataccgtctccacggccattagcaaagctcagaatggtgcgc

SEQ ID NO: 632714 - DNA, 120 bp, Artificial Sequence
  ENSG00000179981_18 (sequence is synthesized)
cctcatggggtggctaccccagcatccatgcagcctaccagctcccgggcaccgtgaagccactgccggcggccgtgcagagcgtgcaggtgcagccgtcctatgctggcggcgtgaagt

SEQ ID NO: 632715 - DNA, 120 bp, Artificial Sequence
  ENSG00000179981_19 (sequence is synthesized)
cgctgtcttccgccgagcacaacgccctcctgcactccccagggagcctcacgcccccaccgcacaagagcaacgtgtctgccatggaggagctggtggagaaggtcacgggcaaggtca

SEQ ID NO: 632716 - DNA, 120 bp, Artificial Sequence
  ENSG00000179981_20 (sequence is synthesized)
aagagaataaagatttcccgaaaacggaggaagtcagcggcaaaccacagaagaagggccctgaggccgagactgggaaggccaaaaaggagggaccgctggacgttcacaccccaaatg

SEQ ID NO: 632717 - DNA, 120 bp, Artificial Sequence
  ENSG00000179981_21 (sequence is synthesized)
gcacagagcctctcaaagcaaaggtcaccaacggctgtaacaacctggggatcatcatggaccactcaccggagccttccttcatcaacccgctgagcgctttgcagtccatcatgaaca

SEQ ID NO: 632718 - DNA, 120 bp, Artificial Sequence
  ENSG00000179981_22 (sequence is synthesized)
cccacctgggcaaggtgtccaagcccgtgagtccctcgctggacccgctggcgatgctgtacaagatcagcaacagcatgctggacaagccggtgtaccccgccacccctgtgaagcagg

SEQ ID NO: 632719 - DNA, 120 bp, Artificial Sequence
  ENSG00000179981_23 (sequence is synthesized)
ccgatgccatcgaccgctactattatgaaaacagcgaccagcccattgacttaaccaagtccaagaacaagccgctggtgtccagcgtggctgattcggtggcatcacctctgcgggaga

SEQ ID NO: 632720 - DNA, 120 bp, Artificial Sequence
  ENSG00000179981_24 (sequence is synthesized)
gcgcactcatggacatctccgacatggtgaaaaacctcacaggccgcctgacgcccaagtcctccacgccctccacagtttcagagaagtccgatgctgatggcagcagctttgaggagg

SEQ ID NO: 632721 - DNA, 120 bp, Artificial Sequence
  ENSG00000179981_25 (sequence is synthesized)
cgttggacgagctgtcaccggtccacaagaggaagggccggcagtccaactggaacccgcagcaccttctcatcctgcaggcccagttcgcctcgagcttgcgggagaccacagagggca

SEQ ID NO: 632722 - DNA, 120 bp, Artificial Sequence
  ENSG00000179981_26 (sequence is synthesized)
agtacatcatgtcggacttgggcccgcaggagagggtgcacatctcgaagtttactgggctctccatgaccaccatcagccactggctggccaatgtgaagtaccagttgaggaggacag

SEQ ID NO: 632723 - DNA, 120 bp, Artificial Sequence
  ENSG00000179981_27 (sequence is synthesized)
ggggaacgaaattcctaaagaacctggacacagggcatcctgttttcttttgcaacgattgtgcctctcagttcagaactgcttctacatacataagtcatttggagacacacttgggct

SEQ ID NO: 632724 - DNA, 120 bp, Artificial Sequence
  ENSG00000179981_28 (sequence is synthesized)
tcagcctgaaggatctctccaagctgccactcaatcagattcaagaacagcagaatgtttcgaaagtcctcaccaacaaaactctgggcccactgggggccaccgaggaagacttgggct

SEQ ID NO: 632725 - DNA, 120 bp, Artificial Sequence
  ENSG00000179981_29 (sequence is synthesized)
ccacattccaatgtaagctctgcaaccggacttttgcgagcaagcacgcagtcaaactgcaccttagtaagacccacggcaagtctcccgaggaccacctgatctatgtgactgagttgg

SEQ ID NO: 632726 - DNA, 120 bp, Artificial Sequence
  ENSG00000179981_30 (sequence is synthesized)
agaaacagtagcgtccaggtatgcaagagaccgcggaacattgcactaaacgtcgtcgagctgcactaggcctggcctgagcctctgaaatcagtctttcctttgttgctggcccgcctc

SEQ ID NO: 632727 - DNA, 120 bp, Artificial Sequence
  ENSG00000179981_31 (sequence is synthesized)
tctggaccttggttttcttacacatattttgtatatttatatgctctctgtccgatctgtgcatgttatttttctttttccgtgagtcaaagtctgacctttattttcaacatctgttct

SEQ ID NO: 632728 - DNA, 120 bp, Artificial Sequence
  ENSG00000179981_32 (sequence is synthesized)
tggtgttaagctatcttttgtaggaaatagtggggcacactactcagagacattatttagcagtaaagaaagacacaaataacaatgataaaaagacatcctaaaatggtgaagttgcca

SEQ ID NO: 632729 - DNA, 120 bp, Artificial Sequence
  ENSG00000179981_33 (sequence is synthesized)
tgacaataaaggtcatagaacctggtagtgtcaaatttaaccctttgaggactgtaattgcatttctgtgcctttcacttgaaaaaaaaaaaagaagaaaaaaaggcttaaaggcatttc

SEQ ID NO: 632730 - DNA, 120 bp, Artificial Sequence
  ENSG00000179981_34 (sequence is synthesized)
attcagatcaaaagctgtgtcagacacaaaacttatttaataattaaaaaatgagcttttatatgcagaactggtttgtgaggaaacatgcatgcagctgtgggaagatagaaagctgtc

SEQ ID NO: 632731 - DNA, 120 bp, Artificial Sequence
  ENSG00000179981_35 (sequence is synthesized)
taggactcacggggttcggaagccacacctctacatgtctaaaacaaaaaacaacaacaacagataccccactcgccactatgcccaaaccctctggatgctgaaaaatgccactttcgg

SEQ ID NO: 632732 - DNA, 120 bp, Artificial Sequence
  ENSG00000179981_36 (sequence is synthesized)
caaaaaaaaaagtatgcaagctattatttaaaaatgtgtaaaaatgctatttcttttttcctgtaaaatattgcagtttatagttatttacaaatgtaagctttggtacaagctgacctt

SEQ ID NO: 632733 - DNA, 120 bp, Artificial Sequence
  ENSG00000179981_37 (sequence is synthesized)
tctatagcgtgctgcattggtaaatgaaaaaaaatggggcaaacgttggagtcctttccttgtaaattgccagcatcagcttaaaaactcctgtatgttacatatcgtaccattttaatc

SEQ ID NO: 632734 - DNA, 120 bp, Artificial Sequence
  ENSG00000179981_38 (sequence is synthesized)
tcttcaactttctttgtaccttctggctgtatgctttctcttttaactttttatattgtcattttatattaaatttctgtgtatataatgtaaaaccacaatttttgaataaaatttagt

SEQ ID NO: 632735 - DNA, 120 bp, Artificial Sequence
  ENSG00000179981_39 (sequence is synthesized)
tcctgcagcttgatttaaatagaggacttttactggcacctgcatctctccagatgcatgtactcagagggactgtcagacaaaaataaatacataaaaacaaagcaagcaatgcactat

SEQ ID NO: 632736 - DNA, 120 bp, Artificial Sequence
  ENSG00000179981_40 (sequence is synthesized)
taattatacattttgatgttctatcattaatattgtacagtacattttggttcacacaattaaatccactgttttctcagatgtaaaataaacccacatgcagttcttgatttacacgga

SEQ ID NO: 632737 - DNA, 80 bp, Artificial Sequence
  ENSG00000179981_41 (sequence is synthesized)
cggcggtccatgcgagcggctccccgcggtccgcggcgcgcccggagcccggagcccgcggggacgaggccaaagttggg

SEQ ID NO: 632738 - DNA, 120 bp, Artificial Sequence
  ENSG00000179981_42 (sequence is synthesized)
ggccccgcgtccccgcgccccgcgaactccggcggcggctgaggcgacggctgcggcggccgagcagcatgccgaggaggaagcagcaggccccccggcgctcggcagcttatgttcctg

SEQ ID NO: 632739 - DNA, 120 bp, Artificial Sequence
  ENSG00000179981_43 (sequence is synthesized)
gggctggtttagcctgtgcagcagccttcaggcacctgtggccgggagcagaggcacacagagcagtgcgccagcagtgacgggctccccgaactgagcagatccaagtcaagctaaacg

SEQ ID NO: 632740 - DNA, 120 bp, Artificial Sequence
  ENSG00000179981_44 (sequence is synthesized)
tttcctttgcattagtggccatgaaactccctttcacaaagatgggttgacgaaagccgtgaggccgtttcctatagtcgatcctgatagaagggcctcccgcacacagtgggaggggcc

SEQ ID NO: 632741 - DNA, 120 bp, Artificial Sequence
  ENSG00000179981_45 (sequence is synthesized)
tggggccaaggccagcacatgctcaggcctgccgacatcttaaacctgggccttctgcctcccctgggcgttgccctgcccagcacatcctgcagccttcagagtcaccctctgaatcca

SEQ ID NO: 632742 - DNA, 120 bp, Artificial Sequence
  ENSG00000179981_46 (sequence is synthesized)
cagaggagctgcaccttgtagcccaagccaacatggcccaggccaggctggttcaaaggtgatgagtctgaccagtggttcttaaagtggggtccctgggtcctagcagtgaaccctcag

SEQ ID NO: 632743 - DNA, 120 bp, Artificial Sequence
  ENSG00000179981_47 (sequence is synthesized)
aactgggccatcctaaacctttaataattacaggctaatgacaatgtgcctgaacttggcaattatcttttaattttatgagcgttatattttacgggagagtcatagaatcatctagaa

SEQ ID NO: 632744 - DNA, 120 bp, Artificial Sequence
  ENSG00000179981_48 (sequence is synthesized)
cattccccacatgttgatgcccgtagttgaggcctggggtcttacatgattggttattttccacactcacagtacagtgtgaacaggattgtgattcctggctttgctgcttttccacat

SEQ ID NO: 632745 - DNA, 120 bp, Artificial Sequence
  ENSG00000179981_49 (sequence is synthesized)
acctccatgaaatgcgtgaacacaggtgcgcagattgtcgtgtgcagaaaagggcagtgtgtgcaagcactcgggatggcctgaactagaagattctccacatgaccgattcagtcgtct

SEQ ID NO: 632746 - DNA, 120 bp, Artificial Sequence
  ENSG00000179981_50 (sequence is synthesized)
ctcattgtgtgtgtgtgtgtgcgtgtgcttgtgtgtacacatgtgattatgcgtgtgcctgtgagtgctggctgctgctagaatctgaagccctgcatttgcgggttttgaggctctcac

SEQ ID NO: 632747 - DNA, 120 bp, Artificial Sequence
  ENSG00000179981_51 (sequence is synthesized)
actgctccctgctgcccctggcatcctccctttgggcggccaagatgttttctgtccctcccagcagtcctccctgaaaacgtctgtgctccttgtcgtgttccctcaggccctggctct

SEQ ID NO: 632748 - DNA, 120 bp, Artificial Sequence
  ENSG00000179981_52 (sequence is synthesized)
gatgatgtcatcatgaatgatgatatttaatgagacacccctctcaggtcagatgaatgcattttaatagggattttctgcaaaatatctgaaccccaaataccccaagttgttgatgga

SEQ ID NO: 632749 - DNA, 120 bp, Artificial Sequence
  ENSG00000179981_53 (sequence is synthesized)
actgtagtccagctagttgttgcctcgagacgggaaaagtaagtaaaagtgccttggtcaaagaagctgaggcagtgttccttgcagtagtctccccttgggagttaggaaggtgtgttg

SEQ ID NO: 632750 - DNA, 120 bp, Artificial Sequence
  ENSG00000179981_54 (sequence is synthesized)
catagtgaaggatctgacatgtcctgcagtcacaagtccaggtttcatctcggtttctctgccttccagcctcatccatgggacaacttccatatcctggaggcccctctgggaaacgct

SEQ ID NO: 632751 - DNA, 120 bp, Artificial Sequence
  ENSG00000179981_55 (sequence is synthesized)
gccttcagcccatgaagtcgctccgctgtgcagtcgtgggcctgtagtaggcagctggagcgtggaccgttgggcttttgtaattaaacagcttttattgtgataaaatatttataatgt

SEQ ID NO: 632752 - DNA, 120 bp, Artificial Sequence
  ENSG00000179981_56 (sequence is synthesized)
ataagtgaccattttaaccattttaagtgcacagtttcatggcgttaagaacgttcatattgatgtgcagccatcaccaccctccatctccagaactttctcgtcttcccagatggaaac

SEQ ID NO: 632753 - DNA, 120 bp, Artificial Sequence
  ENSG00000179981_57 (sequence is synthesized)
tctgtccccatcccctccttctcctggcacacgccaccactctgctttctttttctatgaatgtggcaactctagggccctcacgtgaggtgagccatgcagtacatgtcctcttgtgtc

SEQ ID NO: 632754 - DNA, 120 bp, Artificial Sequence
  ENSG00000179981_58 (sequence is synthesized)
tggctgccttcaccgagcactatgccctcgaggtgcgtccgcgctgcagtgcgtgtcagaactccctttccaagcctgagtgtggacgggccacaccgcgttcatccctccaactgtcac

SEQ ID NO: 632755 - DNA, 120 bp, Artificial Sequence
  ENSG00000179981_59 (sequence is synthesized)
tggaccttttggtgccttccagcttttggctgcagtcaatgaggctgctctgggccttggtgaacaaccgtggcttttgccgtctggcagccccatgcgggtggcgctttgctctgccag

SEQ ID NO: 632756 - DNA, 120 bp, Artificial Sequence
  ENSG00000179981_60 (sequence is synthesized)
gcaggagattggcggtgccatgttggtgcttttggtgaagaccagagtgttttcattgcttgccattgaggagtgtttttacttatggaaacgatatactgtctgtgaatatcctgctct

SEQ ID NO: 632757 - DNA, 120 bp, Artificial Sequence
  ENSG00000179981_61 (sequence is synthesized)
aaaaattgataaccaggtcctgcccgatgggtgtttacaaatatttgccatatggaagtcatgaggggactcctgggtcacttacagagggaacagcctataggaggggtacttggcagg

SEQ ID NO: 632758 - DNA, 120 bp, Artificial Sequence
  ENSG00000179981_62 (sequence is synthesized)
tggtggctggagtcccaagttcctgcccttcccaccaggctgcaagggtcaaactgacatctttgggacgagcacaggacatcatcctccagctcagtcccctttgctaaagacacactc

SEQ ID NO: 632759 - DNA, 120 bp, Artificial Sequence
  ENSG00000179981_63 (sequence is synthesized)
aggaggggacagcaccttttgaaacctaactcctgcaaaggggtagatatgtaaacttggggtagccttgtgtcctgggggctaggctgacaaatatctttttaaagatcatctaactgc

SEQ ID NO: 632760 - DNA, 120 bp, Artificial Sequence
  ENSG00000179981_64 (sequence is synthesized)
gaccaggccggctttctccagtgcggttgggccggaaccccgggatggtaaaaaagaaaaatgcatggaggagttgaactccacattggtatttttagaagttggatgcgggaaatagcc

SEQ ID NO: 632761 - DNA, 120 bp, Artificial Sequence
  ENSG00000179988_0 (sequence is synthesized)
ggtggtcggactgtcagcctcgccttctattctttgatttccagtaacttattttcgaaagattgctggagggaaaggctcaacgtctcttttgggattttcctaagcagaaagacctca

SEQ ID NO: 632762 - DNA, 120 bp, Artificial Sequence
  ENSG00000179988_1 (sequence is synthesized)
tcctaacaaaactgaggcgccaatcctactggctggcaactttcggcagggagggtgattctatttgaagatcaatcctaactctgggaccccttgggaatgtccaggagctaggaacgc

SEQ ID NO: 632763 - DNA, 120 bp, Artificial Sequence
  ENSG00000179988_2 (sequence is synthesized)
agcgccgcggtctctccagcctctggtccctgggagcaagcagggcaccggtggagcaggtgcctctggggccgcacggaaacccagctaggccagttcctccactgcgccggtaggcgg

SEQ ID NO: 632764 - DNA, 120 bp, Artificial Sequence
  ENSG00000179988_3 (sequence is synthesized)
cggagacgctgcgcgtgcgcgcagggcagacggtagagcggagacgacgctcccagactcctccggtctccccgggcagcatgaagaccgccgagaacatcagaggaaccggcagcgacg

SEQ ID NO: 632765 - DNA, 120 bp, Artificial Sequence
  ENSG00000179988_4 (sequence is synthesized)
ggccgcggaaacgaggcctctgcgtcctctgtggcctccccgcggcaggaaaatcgactttcgcgcgcgccctcgcccaccggctgcagcaggagcagggttgggccatcggtgttgtcg

SEQ ID NO: 632766 - DNA, 120 bp, Artificial Sequence
  ENSG00000179988_5 (sequence is synthesized)
cgtatgatgacgtcatgcccgacgcgtttctcgccggggcaagagcgcgaccggcgccatcccaatggaaattgcttcgacaggaactgttgaagtacctggaatacttcttgatggctg

SEQ ID NO: 632767 - DNA, 120 bp, Artificial Sequence
  ENSG00000179988_6 (sequence is synthesized)
tcattaatgggtgtcagatgtctgtcccacccaacaggactgaagccatgtgggaagattttataacctgcttaaaggatcaagatctgatattttctgcagcatttgaggcccagtctt

SEQ ID NO: 632768 - DNA, 120 bp, Artificial Sequence
  ENSG00000179988_7 (sequence is synthesized)
ttctagacctttgtttttggttttggatgacaatttttattatcagagtatgagatatgaagtctaccagctggctcggaaatattcgttgggcttttgccagctctttttagattgtcc

SEQ ID NO: 632769 - DNA, 120 bp, Artificial Sequence
  ENSG00000179988_8 (sequence is synthesized)
tcttgagacctgtttacagaggaatggccagaggccacaggcactgcctcctgagaccatccacctgatgggaagaaagctagaaaagcccaaccctgagaaaaatgcttgggaacacaa

SEQ ID NO: 632770 - DNA, 120 bp, Artificial Sequence
  ENSG00000179988_9 (sequence is synthesized)
cagcctcacaattccgagtccagcatgtgcttcggaggccagcctggaagtgactgatttattgctcactgctttggaaaatccagtaaaatatgctgaggacaatatggaacaaaagga

SEQ ID NO: 632771 - DNA, 120 bp, Artificial Sequence
  ENSG00000179988_10 (sequence is synthesized)
cacagacagaattatttgttcaactaacattcttcataaaactgatcagacactccgaaggattgtatctcagacaatgaaggaagcaaaaggtaatcaggaagccttctcagagatgac

SEQ ID NO: 632772 - DNA, 120 bp, Artificial Sequence
  ENSG00000179988_11 (sequence is synthesized)
atttaagcaaagatgggtaagagcgaaccatgcagctatctggaggatcattctaggcaatgaacacatcaagtgcagaagcgcaaaggttggctggttgcagtgttgcagaatcgagaa

SEQ ID NO: 632773 - DNA, 120 bp, Artificial Sequence
  ENSG00000179988_12 (sequence is synthesized)
gaggccattgagcacggggtgagatgaacaagtgcttcctcacaacttgaagcttctagcagaagaacttaacaagctcaaagcagagtttttggaagacctaaaacaaggaaacaaaaa

SEQ ID NO: 632774 - DNA, 120 bp, Artificial Sequence
  ENSG00000179988_13 (sequence is synthesized)
atatctgtgctttcagcaaaccattgacataccagatgtcatttctttttttcattatgagaaagataatattgtacagaagtatttttcaaagcagcattaaaatttctgaactgccaa

SEQ ID NO: 632775 - DNA, 120 bp, Artificial Sequence
  ENSG00000179988_14 (sequence is synthesized)
aatggacaaagatgacatcgatgaggtttttcacctgtttcaaaagaaaaatgatggagaaactacaagagtagttcatttatggaaagttttgcttgtccattcattggacaactggaa

SEQ ID NO: 632776 - DNA, 120 bp, Artificial Sequence
  ENSG00000179988_15 (sequence is synthesized)
attgatcaaaaagaaaatgctttcagaaagtcatatttgcatagcatatgagattgttaaaatttgtaaataaacccacaaattgaaataaagcttaagaactcatcagcaacaacctga

SEQ ID NO: 632777 - DNA, 120 bp, Artificial Sequence
  ENSG00000179988_16 (sequence is synthesized)
tagaatggggtttcatgatgggcaagggagaggctgagctgccttctgcatggttgagtctgagaaagctttacacagcactagtaacattagttttccaggcagaaggaatggtatata

SEQ ID NO: 632778 - DNA, 120 bp, Artificial Sequence
  ENSG00000179988_17 (sequence is synthesized)
tggagtcatgtgaaaccaggtgtgttagagaactacagatggttccgtattgtgagctgaaattttcatatggggcagggtggcagtgaggccagatgactgaccaccctagtggcctaa

SEQ ID NO: 632779 - DNA, 120 bp, Artificial Sequence
  ENSG00000179988_18 (sequence is synthesized)
agcctcacaattccgagtccagcatgtgcttcggaggccaggtattccactcaatcatccctccctggatgctcccctgtgccaggtatcatggtcagtgctttgtctatgttggtttag

SEQ ID NO: 632780 - DNA, 120 bp, Artificial Sequence
  ENSG00000179988_19 (sequence is synthesized)
ttagtcctcacacaggcattggagagacattattccccactttgtgtggaagctaaaagtgaaatgggaaaatttagtttgtccagaaagatttgaacccaagtttatttgcaaatgtct

SEQ ID NO: 632781 - DNA, 120 bp, Artificial Sequence
  ENSG00000179988_20 (sequence is synthesized)
gctcataactgttacgattatactgtcttccagtagttggagcagggaattcagagaacacatctttgattctcttgctaaaatagatagtctaaataggttgcctggtagttttcttat

SEQ ID NO: 632782 - DNA, 120 bp, Artificial Sequence
  ENSG00000179988_21 (sequence is synthesized)
agaaagagatctgtgaaagagtgcaacaggtactgggtcctatttgccttagagctcaccatagttacactgcttttgcatatgtgaggcttgtaggctatgctgtctaatgcatttcat

SEQ ID NO: 632783 - DNA, 120 bp, Artificial Sequence
  ENSG00000179988_22 (sequence is synthesized)
tcattacgtatgtcttgagagttctagagcagcatatttctagcagaaacttcgctggcgatggaaatgttctatatttgcactaatatggtagctgctagccacatttgactattgagc

SEQ ID NO: 632784 - DNA, 120 bp, Artificial Sequence
  ENSG00000179988_23 (sequence is synthesized)
ccttaaaagtagctagtgtaactgatgacctgaatttttttgtttaacttattgatttaaacttaagtagcctcatgtggccagtggctatttattggacagcgcagttccagaggtata

SEQ ID NO: 632785 - DNA, 120 bp, Artificial Sequence
  ENSG00000179988_24 (sequence is synthesized)
ttgcccacacttccttagttcctgcatattgtccacgagggatcggtatcagctcactgcaggcttgacctcctgggctcaagcagttctcctgtctcagtcccctaagtaactggaact

SEQ ID NO: 632786 - DNA, 87 bp, Artificial Sequence
  ENSG00000179988_25 (sequence is synthesized)
aagcagttctcctgtctcagtcccctaagtaactggaactacaggcccacactgccaagcccagctaattttttaatttgttgtagt

SEQ ID NO: 632787 - DNA, 120 bp, Artificial Sequence
  ENSG00000179988_26 (sequence is synthesized)
tgggttacattgggaacagtgtctataattccttttgaaattctttttaggaatcttatcttaaggttatagttcccttaaaaaaatatttgctatgctttacctcttttaagactgtaa

SEQ ID NO: 632788 - DNA, 86 bp, Artificial Sequence
  ENSG00000179988_27 (sequence is synthesized)
gggaggccaagaagggaggatcacttgaacccaagagtttgaggttgcagttgagctatgataatgccactgcactccagcctggg

SEQ ID NO: 632789 - DNA, 120 bp, Artificial Sequence
  ENSG00000179988_28 (sequence is synthesized)
agcctgggtgacagtgaaaccctgtctctaaacaaacagactaaatagaacaaaagggcatgggtatgaaaattagctagtgatcactggctgaatagtcactaaaactcaaattctctc

SEQ ID NO: 632790 - DNA, 120 bp, Artificial Sequence
  ENSG00000179988_29 (sequence is synthesized)
ccagttctgaacactttatatatatggtctcattcagtcctcacaaccaccctttaagggtagaaactactatccccattttatagatgggataactgaggcccagataagtaaagtaat

SEQ ID NO: 632791 - DNA, 120 bp, Artificial Sequence
  ENSG00000179988_30 (sequence is synthesized)
atacccaggtaggaagtggcagagccaagatctggacccagtgagatcgcactcactccagaacctgggctcttttcagtgtgaggaagatcatcttgaggttgagctttaacttgatga

SEQ ID NO: 632792 - DNA, 120 bp, Artificial Sequence
  ENSG00000179988_31 (sequence is synthesized)
gctcactcgcttaaaactttttagtgccactcccataatctgagtaaaattcaaactccttaccctaacttaggtgatctaacccagattaattctccaacttcatattctgccactctc

SEQ ID NO: 632793 - DNA, 120 bp, Artificial Sequence
  ENSG00000179988_32 (sequence is synthesized)
ctcctggcttcttttcagcctttctcttgcacgaacacaaggagcatgttcttgccctggggcccttgtacttgctgcccctctgcccttcccacattcttatacttgactgccttcact

SEQ ID NO: 632794 - DNA, 120 bp, Artificial Sequence
  ENSG00000179988_33 (sequence is synthesized)
gaccatcctaactaaagcaaagaacattagttgggctaccctgtcactcttatcattgtcactttattgtctttgctcacttatctacttaccaccatctgaaattattttttgctttat

SEQ ID NO: 632795 - DNA, 120 bp, Artificial Sequence
  ENSG00000179988_34 (sequence is synthesized)
ttaactgtttatctgtctctattacattatcagccttggcaaacgcaaggatcttgctacacccccagctcagcatgtggttgtacagtatttttcatataagacgttcaatacatattt

SEQ ID NO: 632796 - DNA, 120 bp, Artificial Sequence
  ENSG00000179988_35 (sequence is synthesized)
gttaaatcaatgaatgaattctacctgaaaccttcatggacctttgctcagtgagaaactttgctcatccatatccagtaaataagcgggagccagaaagtaaagaccaggcatctttcc

SEQ ID NO: 632797 - DNA, 120 bp, Artificial Sequence
  ENSG00000179988_36 (sequence is synthesized)
atagagaataaagttgagctcttgtggcccccggttcagccttaagaggggaaaagagaatgacttttcaaagcttattgacatgagtcttaggaaattggtattttttaatgaggggtc

SEQ ID NO: 632798 - DNA, 120 bp, Artificial Sequence
  ENSG00000179988_37 (sequence is synthesized)
cttagcttatcatttgttttgagctactgcatttggattgtctacatggaagctagcttctaaatcatttagtttttttccttttgttaagaatcttgggttatagcagtttcattcctc

SEQ ID NO: 632799 - DNA, 86 bp, Artificial Sequence
  ENSG00000179988_38 (sequence is synthesized)
cttttgttaagaatcttgggttatagcagtttcattcctctagaattcagtttaatattcataaatacaagttccttaaaagtcag

SEQ ID NO: 632800 - DNA, 71 bp, Artificial Sequence
  ENSG00000179988_39 (sequence is synthesized)
gaggctgaggcaggagaatggcgcaaatccgggaagcagagcttgcagtgagcgactccatctcaaaaaaa

SEQ ID NO: 632801 - DNA, 120 bp, Artificial Sequence
  ENSG00000179988_40 (sequence is synthesized)
caaagtgtgcggggaggaggtcgagagcggagcatgcgcactggcagacccttgctctttcgctggagactatgcgcaggcgcggtgcactgcgcgccggcacgagggtgttttcgacgt

SEQ ID NO: 632802 - DNA, 120 bp, Artificial Sequence
  ENSG00000179988_41 (sequence is synthesized)
gttctcactcccctgtcctcgtgttttccctccagcttagatttcttaactatgtcaggattctccacagcccttgaccagcacaagattacttgtattctcaagctgtttattcccctc

SEQ ID NO: 632803 - DNA, 120 bp, Artificial Sequence
  ENSG00000179988_42 (sequence is synthesized)
agtttgtttcctccatctttccccatcccatatcaactcatttgttagcctgaggtcttttcttcttgacccagagacttttcacctgatctttttgctgtctactacctttcccatttc

SEQ ID NO: 632804 - DNA, 120 bp, Artificial Sequence
  ENSG00000179988_43 (sequence is synthesized)
aggggaaaacctgcattattatatcttagccagactattttgactccacctttctcttggatgataaataagttctttcatttattcacttattcagtcagtcatccatttaatatacat

SEQ ID NO: 632805 - DNA, 120 bp, Artificial Sequence
  ENSG00000179988_44 (sequence is synthesized)
aaaatcggcaaatggctgggactacaaccctggtctcttgaatcctgtttggaaatctgtgcgttaggagggaaatttccattcctacagcttcatgggaaaaggtctactccatttcag

SEQ ID NO: 632806 - DNA, 120 bp, Artificial Sequence
  ENSG00000179988_45 (sequence is synthesized)
gaggtaacagtcctggcatgcacaattcaagccccctgcttcaccggttcctcactcctcactaggagaagtgattctgctggttgagacaagaccaatatccaagagggctacactgca

SEQ ID NO: 632807 - DNA, 120 bp, Artificial Sequence
  ENSG00000179988_46 (sequence is synthesized)
ttcgagggacaaggctcagtgtcttcctctctcccactgctttcccaagccagtcactatcacattttaatgtgtatgtgaattacttgggggatcttattaaaacacagattataattc

SEQ ID NO: 632808 - DNA, 120 bp, Artificial Sequence
  ENSG00000180008_0 (sequence is synthesized)
tctggaaaagaaggcgagatcttctagagcctctaatcttggcatccttcgtgccctcaccttgtcgcttctgtagagataaagaaggaatgacttaatttctgttccggttggttctct

SEQ ID NO: 632809 - DNA, 120 bp, Artificial Sequence
  ENSG00000180008_1 (sequence is synthesized)
tggtacctgaagatacatccagaaagtgcccagaagaaacttcctgctggaaaaaatgaaaaagcagtatttataacattagaatctggataatttgttaacatggcagaaaataatgaa

SEQ ID NO: 632810 - DNA, 120 bp, Artificial Sequence
  ENSG00000180008_2 (sequence is synthesized)
aatattagtaaaaatgtagatgtaaggcccaaaactagtcggagcagaagtgccgacagaaaagacggttatgtgtggagtggaaagaagttatcttggtcaaaaaagagtgagagttat

SEQ ID NO: 632811 - DNA, 120 bp, Artificial Sequence
  ENSG00000180008_3 (sequence is synthesized)
tcagatgctgagacagtgaatggtatagagaaaaccgaagtgtctttaaggaaccaagaaaggaagcacagctgttcatccattgagttggacttagatcattcctgtgggcatcgattt

SEQ ID NO: 632812 - DNA, 120 bp, Artificial Sequence
  ENSG00000180008_4 (sequence is synthesized)
ttaggccgatctcttaaacagaaactgcaagatgccgtggggcagtgttttccaataaagaattgtagtagtcggcactcttcagggcttccgtctaaaaggaaaattcatatcagtgaa

SEQ ID NO: 632813 - DNA, 120 bp, Artificial Sequence
  ENSG00000180008_5 (sequence is synthesized)
ctcatgttagataagtgtcctttcccacctcgatcagatttagcctttaggtggcattttattaaacgacacactgctcctataaattccaaatcagatgaatgggtaagcacagacttg

SEQ ID NO: 632814 - DNA, 120 bp, Artificial Sequence
  ENSG00000180008_6 (sequence is synthesized)
tctcagactgaattgagggatggtcagctaaaacgaagaaatatggaagaaaatataaactgtttctcacataccaatgttcagccctgtgtcataaccaccgacaatgctttgtgtaga

SEQ ID NO: 632815 - DNA, 120 bp, Artificial Sequence
  ENSG00000180008_7 (sequence is synthesized)
gaaggtcctatgactggctctgtgatgaacctggtttcaaataacagtatagaagatagtgatatggattccgatgatgaaattctaacactttgcacaagttccagaaaaagaaacaaa

SEQ ID NO: 632816 - DNA, 120 bp, Artificial Sequence
  ENSG00000180008_8 (sequence is synthesized)
cccaaatgggatttggatgatgaaatcctgcagttggaaacacctcctaaataccacacgcagattgattatgtccactgtcttgtaccagacctccttcagatcaataacaacccatgt

SEQ ID NO: 632817 - DNA, 120 bp, Artificial Sequence
  ENSG00000180008_9 (sequence is synthesized)
tactggggagtgatggataaatacgcagccgaagcactactggaaggaaaaccagagggtacctttttacttcgagactcagcacaggaagactatttattctctgttagttttagacgc

SEQ ID NO: 632818 - DNA, 120 bp, Artificial Sequence
  ENSG00000180008_10 (sequence is synthesized)
tatagtcgttctcttcatgctagaattgaacagtggaatcacaactttagctttgatgcacatgacccctgtgtcttccattctcctgacattactgggctcctagaacattataaggac

SEQ ID NO: 632819 - DNA, 120 bp, Artificial Sequence
  ENSG00000180008_11 (sequence is synthesized)
ccaagcgcctgtatgttctttgaaccacttctatccactcccttaattcggactttccctttttccctgcagcatatatgcagaacagttatttgtaactgtacaacttatgatggcatc

SEQ ID NO: 632820 - DNA, 120 bp, Artificial Sequence
  ENSG00000180008_12 (sequence is synthesized)
gatgcccttccaattccttcttctatgaaattatatctgaaggaatatcattataaatcaaaagttagagtactcaggattgatgcaccagaacagcaatgctagtaacaggatgggaac

SEQ ID NO: 632821 - DNA, 120 bp, Artificial Sequence
  ENSG00000180008_13 (sequence is synthesized)
atgggaatgataatatatattttttcttttaatattttatttttctttttatgccactttggatttttctacaaaggcagtggtgtccaaaataaaatctctgccctaaattttactaat

SEQ ID NO: 632822 - DNA, 120 bp, Artificial Sequence
  ENSG00000180008_14 (sequence is synthesized)
aaatccatttttctagtgatacacaaattgtttaaggttatacactcgagcttaaatagatatttttaaccaggtgtttggtttttgtttttaccgtgtaggttgtatacttacattttt

SEQ ID NO: 632823 - DNA, 120 bp, Artificial Sequence
  ENSG00000180008_15 (sequence is synthesized)
tctttccttaatttatacatgatcctttttccttaatttatacatgatccaggcacatttgaaatttggtaggcattgcaaacacatttgaatattgtgtatttcatactattctttaaa

SEQ ID NO: 632824 - DNA, 120 bp, Artificial Sequence
  ENSG00000180008_16 (sequence is synthesized)
agtaatcttatgtcctttcctacatgtaaaatattttgttaatctatgccattagtagtattatatataaaatatagttccccgtcccccttttcattgagtttgatattcttcagtaaa

SEQ ID NO: 632825 - DNA, 120 bp, Artificial Sequence
  ENSG00000180008_17 (sequence is synthesized)
gctgaatgttgtaattcaccattcatactaatgttattgacttttgtaacttactaatagggatgttaaaagtaacaaaaccaagtcaaacttggtgtatttttattttaaatattaact

SEQ ID NO: 632826 - DNA, 120 bp, Artificial Sequence
  ENSG00000180008_18 (sequence is synthesized)
ctaaagcaggattactaaatttgattaatctggtcaatgagaatcaaatggaaacatatcattctggaggtgcacttactcttctacaatgtggccggatcatttgtcattcctgaatag

SEQ ID NO: 632827 - DNA, 120 bp, Artificial Sequence
  ENSG00000180008_19 (sequence is synthesized)
gtctttctctcaacctgcaagagctaaaccatcttcaaaacataaatcttgttcctttctcattggaagctttgaaaataatgataacactattagtagctagtagttactaaagtgcta

SEQ ID NO: 632828 - DNA, 120 bp, Artificial Sequence
  ENSG00000180008_20 (sequence is synthesized)
aagtaattgtggggtttttctgtattagcttatgaactgttgcttctacttagcccttttatagaaactctgagctgttactttggggaaattccacaatgtattagcagccacaaattt

SEQ ID NO: 632829 - DNA, 120 bp, Artificial Sequence
  ENSG00000180008_21 (sequence is synthesized)
ccactggtaaccaaagagtacctaagtagtttttcattattttaagttgaatttgaataaagattccagaaataaacatggagctcagtattcaggaagcttaatactgtttttgatcta

SEQ ID NO: 632830 - DNA, 120 bp, Artificial Sequence
  ENSG00000180008_22 (sequence is synthesized)
caagatccaaataattatccctatcttcagaattaacttagtctgtaatgtggcttcaaaaaaagaaagccttttgacagctacatgacttacaccatacagaacagtactggacaaaag

SEQ ID NO: 632831 - DNA, 120 bp, Artificial Sequence
  ENSG00000180008_23 (sequence is synthesized)
gggtgatattttaaatttactatcccagaaacagggcaacgtttttagaaacatctttagcccaaagtaactagtaaaaataaatggagtggtatcctatcttctttttttaaggaatca

SEQ ID NO: 632832 - DNA, 120 bp, Artificial Sequence
  ENSG00000180008_24 (sequence is synthesized)
atgaataataaatgtagatagacaattttcttctggtgagctgtctaaccctttgtacacattgacatttttaatatcgtaactgatttcttgatgctagtttagctatattaggaaact

SEQ ID NO: 632833 - DNA, 120 bp, Artificial Sequence
  ENSG00000180008_25 (sequence is synthesized)
gcttctacctagattgaaagaaatttgactcataaacttccaagttagaacaaatatttcttcattattgttgcttttatgtgagtagcatttccctatcttgcagttctgttaacatga

SEQ ID NO: 632834 - DNA, 120 bp, Artificial Sequence
  ENSG00000180008_26 (sequence is synthesized)
aaatggcatttttccataatagctttaaaataattttttagtaattattacaaaattaaggaaaatctctattaccgttatcttttagcattttttttttcctcagtgatctcaagattg

SEQ ID NO: 632835 - DNA, 120 bp, Artificial Sequence
  ENSG00000180008_27 (sequence is synthesized)
gatatcataacaccaatgtcaggataaatatctcttctaaagacgatatttaccttttacaaggttagaaaagtctcatactacctcatctttattgtggcgcttttgtagatcactgag

SEQ ID NO: 632836 - DNA, 120 bp, Artificial Sequence
  ENSG00000180008_28 (sequence is synthesized)
aagcttatcttattaaccaatataccacttcctaaatatccatctttggtgaaagaaaatagtgtggtaagagtacccatgattatagttttttatcagaatttgataagattttctgtt

SEQ ID NO: 632837 - DNA, 120 bp, Artificial Sequence
  ENSG00000180008_29 (sequence is synthesized)
tctgtgaaacaattattttaaatatttttcttttaaaaataactttttatcagtacagaaaaacctaagggatgactagcttacaaatattctgttaaggggtagttttataaagaaaaa

SEQ ID NO: 632838 - DNA, 120 bp, Artificial Sequence
  ENSG00000180008_30 (sequence is synthesized)
tgatatatagttatgttgtcttttatagtgttaaaattagtatttatatgaaagtcaagatctaagtaccttttcatataattcaaactgattgcttgtgatatgttttctctggctttt

SEQ ID NO: 632839 - DNA, 120 bp, Artificial Sequence
  ENSG00000180008_31 (sequence is synthesized)
ttattttttcaacttcaaggtattaacagctgttaacacttaaaaagtactgccacatatgtagccttgaagtagttgatctaataaatgagagcagggaggagattcattgactctgaa

SEQ ID NO: 632840 - DNA, 120 bp, Artificial Sequence
  ENSG00000180008_32 (sequence is synthesized)
atgatttttatttttcctttggtatttgctacagtgaaaagaagtttggaaagtagatacataaagacttgagaagggaattgtttaagggaaaagaaaagagtaataattttttttaaa

SEQ ID NO: 632841 - DNA, 120 bp, Artificial Sequence
  ENSG00000180008_33 (sequence is synthesized)
acattaaggaattggaattcagaaaggttacccccttcctctgtgtctttgtaaggatacatttggaagaacatacagtattcagaaactaacctatataaaatgtaaacaatatattga

SEQ ID NO: 632842 - DNA, 120 bp, Artificial Sequence
  ENSG00000180008_34 (sequence is synthesized)
ttgcactatataaatgagtaaattttgagaggaacaatgtgggaatgtataaatttgtctaaaattttataactgttgaacaaagggaagatttgaacagtgtaaattccagagttgaga

SEQ ID NO: 632843 - DNA, 120 bp, Artificial Sequence
  ENSG00000180008_35 (sequence is synthesized)
aagcatttagcatggtggaaatgtggagagcttattggtgagagaggatggagctaagagaaataagatcaaatattaaaattaggaatttaggcattacctcagggaaaagccttgaca

SEQ ID NO: 632844 - DNA, 120 bp, Artificial Sequence
  ENSG00000180008_36 (sequence is synthesized)
gtgaaaagaaactacttaatcgctaatagctagtctggaccagacacttaactgcgctttgggaatcatcctgggctaatcaggaaataaacttgacttttctatttttctctgaagctt

SEQ ID NO: 632845 - DNA, 120 bp, Artificial Sequence
  ENSG00000180008_37 (sequence is synthesized)
tacaggacatactcccactcccatttttttctaagcctacagcatcttgattcatagtataattcctgaagtatgctgaatggactttttaaggttcctttagcatttttgtatagagtt

SEQ ID NO: 632846 - DNA, 120 bp, Artificial Sequence
  ENSG00000180008_38 (sequence is synthesized)
atatgtgatctttctataaccatgccattcacttaaataattcatgaagggaatggtttaatttaaaggaagacctaataggaagaagattaaaggaagcttttagtcagcctgtggcta

SEQ ID NO: 632847 - DNA, 120 bp, Artificial Sequence
  ENSG00000180008_39 (sequence is synthesized)
gatttattgatttggtgatcaaacctgtgctatttcctgaatttcagctaatggccaactgtggtcaaagaatggctttcagttaaagttttgacttcttattataaataatataaagaa

SEQ ID NO: 632848 - DNA, 120 bp, Artificial Sequence
  ENSG00000180008_40 (sequence is synthesized)
tgtctcagtaattagaaatcccttaataagtagaacaaatgtggcaagtaggactcctatcggtatacaaattccatttctttttataagaaaaacacataaaccattatcatttattca

SEQ ID NO: 632849 - DNA, 120 bp, Artificial Sequence
  ENSG00000180008_41 (sequence is synthesized)
tgagccaaagccattaagaagataaatccagttatcagcttcctgtctctgaagtttggatcattttatagatccacgcaatagagagcttccttcctatgaaacaaaaaccttgagatc

SEQ ID NO: 632850 - DNA, 74 bp, Artificial Sequence
  ENSG00000180008_42 (sequence is synthesized)
atagagagcttccttcctatgaaacaaaaaccttgagatctctttttttttgagacagagtctcgctgttgtca

SEQ ID NO: 632851 - DNA, 68 bp, Artificial Sequence
  ENSG00000180008_43 (sequence is synthesized)
tgccttccaggttccagcaattctcctacctcagctcccaagtagctgagatgtgtttcactacattg

SEQ ID NO: 632852 - DNA, 120 bp, Artificial Sequence
  ENSG00000180008_44 (sequence is synthesized)
caggcatgagccactgtgcccggccaagatctaactcacgcttacttttcattaaaatatttcttgtcgcttttagctattgtcagaatccaataaacagcttacgcattcattttggta

SEQ ID NO: 632853 - DNA, 120 bp, Artificial Sequence
  ENSG00000180008_45 (sequence is synthesized)
ataaacagcttacgcattcattttggtaaagcaaatttcacaggaaaatagacaaaattataagagattcctggagacaacacaaggaaaacaatgtttaaaagcaaaatagcctgtgta

SEQ ID NO: 632854 - DNA, 120 bp, Artificial Sequence
  ENSG00000180008_46 (sequence is synthesized)
atgttaggtaatgtaatgcccaagtgaataaaagatttttcgtcaagcaaactactgtttctactttgggggaaaaaagtcagttttacatttgtaatttaaggaaagaacagaaagcac

SEQ ID NO: 632855 - DNA, 120 bp, Artificial Sequence
  ENSG00000180008_47 (sequence is synthesized)
aaaggtttttcttttctttattaatggcctactagaaatgagcagtgcaagagtctacctgtactattctaatacagtaagatattggacacaaaatggaggtaactttttaaaatagat

SEQ ID NO: 632856 - DNA, 120 bp, Artificial Sequence
  ENSG00000180008_48 (sequence is synthesized)
tggcttggaagttgaaatgtagattaatggatataacccaatagaaagggattttcaaataaaaccaaagtctatttttttatttactttctaattttgaacagatgactcagtcctaaa

SEQ ID NO: 632857 - DNA, 120 bp, Artificial Sequence
  ENSG00000180008_49 (sequence is synthesized)
tctttgcctttatttcctataaaatgtaggtgatacttgtaactcgacttcctggagttaattcttcagcaagaggtgaccctgggagcgtactttaaaataattgctgtacagccattg

SEQ ID NO: 632858 - DNA, 120 bp, Artificial Sequence
  ENSG00000180008_50 (sequence is synthesized)
agtactaacatgatgataggttttcaaaatatctttgtagtggatgctgcataattacattcacttctcttagactgtaaaagactttcttgacttgttttaacagtagagatagcagta

SEQ ID NO: 632859 - DNA, 120 bp, Artificial Sequence
  ENSG00000180008_51 (sequence is synthesized)
caatttgaatttatggtttaggctctgcaattagaggaacaattgcagtttcctcctacccttcatatggtctgtgtaaaactgatgtttgcttaacttattttaaaagttgattacgtt

SEQ ID NO: 632860 - DNA, 120 bp, Artificial Sequence
  ENSG00000180008_52 (sequence is synthesized)
ttcagaaaataaagataatcacttttgccatggttataatcaaatctaagctttcagacttgagagccatggtgtaaaactcaaggaggtttatttaaattatgctgactttgctagaat

SEQ ID NO: 632861 - DNA, 120 bp, Artificial Sequence
  ENSG00000180008_53 (sequence is synthesized)
tggataaattctgtataagccaagtatgagttcacatgtactcgaatatacagttttcacaaagctattactctcatcagtcaggcttgtatgatctattccttaccacaaaagaagtag

SEQ ID NO: 632862 - DNA, 120 bp, Artificial Sequence
  ENSG00000180008_54 (sequence is synthesized)
acaattgccacttttatttctaatccttaagttgaatgtttcttcttggatgtaagttcaaataaattgatctggataaattttcatttctacttaattaaaacttcctatgtaaaatcc

SEQ ID NO: 632863 - DNA, 120 bp, Artificial Sequence
  ENSG00000180008_55 (sequence is synthesized)
ctgaacacggaagtggtggcggcgcccagggaaccggcggaggcgatgaccgtgacggctgggttgggaccggaacgccgaagcggggttgggggtggcagaaaagcatctgctttgtaa

SEQ ID NO: 632864 - DNA, 120 bp, Artificial Sequence
  ENSG00000180008_56 (sequence is synthesized)
gacctacacgaggtgcaggagtggttgggcctcccctctccacttaagcaagcgcccagactgatggcgatggtgatggcagcagttactcgcacaaccccagttaagctgcgctccggg

SEQ ID NO: 632865 - DNA, 120 bp, Artificial Sequence
  ENSG00000180008_57 (sequence is synthesized)
tcatctgttgtctgctctccagtgacttccgtttgtggagcctaagtgtttctacagaatccaactcaaatatcaaggactatgatcagaatgctttcaaggagtttttgggcacatgat

SEQ ID NO: 632866 - DNA, 120 bp, Artificial Sequence
  ENSG00000180011_0 (sequence is synthesized)
cgggggccgaccccggccagcgtcggcgcagagagcgggcggaggcgcaggccatgctgcggctggtgcccaccggggcccgggccatcgtggacatgtcgtacgcccgccacttcctgg

SEQ ID NO: 632867 - DNA, 120 bp, Artificial Sequence
  ENSG00000180011_1 (sequence is synthesized)
gacatgtcgtacgcccgccacttcctggacttccagggctccgccattccccaagccatgcagaagctggtggtgacccggctgagccccaacttccgcgaggccgtcaccctgagccgg

SEQ ID NO: 632868 - DNA, 120 bp, Artificial Sequence
  ENSG00000180011_2 (sequence is synthesized)
gactgcccggtgccgctccccggggacggagacctcctcgtccggaaccgatttgttggtgttaacgcatctgacatcaactattcagcaggccgctatgacccctcagttaagcctccc

SEQ ID NO: 632869 - DNA, 120 bp, Artificial Sequence
  ENSG00000180011_3 (sequence is synthesized)
tttgacataggtttcgaaggcattggggaggtggtggccctaggcctctctgctagtgccagatacacagttggccaagctgtggcttacatggcacctggttcttttgctgagtacaca

SEQ ID NO: 632870 - DNA, 120 bp, Artificial Sequence
  ENSG00000180011_4 (sequence is synthesized)
gttgtgcctgccagcattgcaactccagtgccctcagtgaaacccgagtatcttaccctgctggtaagtggcaccaccgcatacatcagcctgaaagagctcggaggactgtcggaaggg

SEQ ID NO: 632871 - DNA, 120 bp, Artificial Sequence
  ENSG00000180011_5 (sequence is synthesized)
aaaaaagttttggtgacagcagcagctgggggaacgggccagtttgccatgcagctttcaaagaaggcaaagtgccatgtaattggaacctgctcttctgatgaaaagtctgcttttctg

SEQ ID NO: 632872 - DNA, 120 bp, Artificial Sequence
  ENSG00000180011_6 (sequence is synthesized)
aaatctcttggctgtgatcgtcctatcaactataaaactgaacccgtaggtaccgtccttaagcaggagtaccctgaaggtgtcgatgtggtctatgaatctgttgggggagccatgttt

SEQ ID NO: 632873 - DNA, 120 bp, Artificial Sequence
  ENSG00000180011_7 (sequence is synthesized)
gacttggctgtagacgccctggctacgaaagggcgcttgatagtaatagggtttatctctggctaccaaactcctactggcctttcgcctgtgaaagcaggaacattgccagccaaactg

SEQ ID NO: 632874 - DNA, 120 bp, Artificial Sequence
  ENSG00000180011_8 (sequence is synthesized)
ctcaagaaatctgccagcgtacagggcttcttcctgaaccattacctttctaagtatcaagcagccatgagccacttgctcgagatgtgtgtgagcggagacctggtttgtgaggtggac

SEQ ID NO: 632875 - DNA, 120 bp, Artificial Sequence
  ENSG00000180011_9 (sequence is synthesized)
cttggagatctgtctccagagggcaggtttactggcctggagtccatattccgtgctgtcaattatatgtacatgggaaaaaacactggaaaaattgtagttgaattacctcactctgtc

SEQ ID NO: 632876 - DNA, 120 bp, Artificial Sequence
  ENSG00000180011_10 (sequence is synthesized)
aacagtaagctgtaaaaacagaacaatgacataaatcaagggagaaagaaaatgggcactttatgtctcagaattactcaaatcaatttatttttagttggtaatggatataatatttct

SEQ ID NO: 632877 - DNA, 120 bp, Artificial Sequence
  ENSG00000180011_11 (sequence is synthesized)
taaaacaaaagtaaggtgttaatgaataggtctctccttctcctcctcctcctcctcttcccttgggggaaaaaaaaaaatgtgctaataaaacttccctccatggctaagagggaaaac

SEQ ID NO: 632878 - DNA, 120 bp, Artificial Sequence
  ENSG00000180011_12 (sequence is synthesized)
gcttacattcaattctttagtcatggatggtctcgttccagatgttattgttccagggaactaaattcattcctgatgccagatctgatcgagtcagtatgtcttcagcttgatcagatt

SEQ ID NO: 632879 - DNA, 120 bp, Artificial Sequence
  ENSG00000180011_13 (sequence is synthesized)
ttaaaatcagttttgaaagtggttcccgacttctttgctttgggagaatttggtcttatgctcataagcagttcatgagtgacaagtgtagcaaaagccagccatatattttcagaatct

SEQ ID NO: 632880 - DNA, 120 bp, Artificial Sequence
  ENSG00000180011_14 (sequence is synthesized)
atatcctcaggaaatggtcctttttttttctataaatcaccaaccaactatctaaatggacatttgggggaattccctcccaaatttgattttgttattagaaaaatgattccgtgaaca

SEQ ID NO: 632881 - DNA, 120 bp, Artificial Sequence
  ENSG00000180011_15 (sequence is synthesized)
cagatgtgttttgaagaagtagcacgtaatggcttttatctaccatcaacctgataaggcacatgtgaaatggaaatgttctctttcctctgaagcagcaaattaatgttgaaaacttac

SEQ ID NO: 632882 - DNA, 120 bp, Artificial Sequence
  ENSG00000180011_16 (sequence is synthesized)
atagacagaaagtaggttttggaaagggaaaccacagagattagggggacttaaaattaatataggcacaggaaagagaaaagtgtgcgctccattctcagtgggggttcaccacaaaac

SEQ ID NO: 632883 - DNA, 120 bp, Artificial Sequence
  ENSG00000180011_17 (sequence is synthesized)
acgggccccaggagggaagcgctgtctaggcacacggcaaggccttagtaacagcatgctacactgctcgaggtacggtatgtcccatcgccctgtgcaccgtagagacctcagtcatct

SEQ ID NO: 632884 - DNA, 120 bp, Artificial Sequence
  ENSG00000180011_18 (sequence is synthesized)
caaggaagaatacatttgcttctccttagaggcgttcgaactagaagctatgcgttacctctgattctggaaacagaatagcagccactcattctgcattcccatttttctctccacgtg

SEQ ID NO: 632885 - DNA, 120 bp, Artificial Sequence
  ENSG00000180011_19 (sequence is synthesized)
ttctggtggaatgagatgctccttggcactatagcctgatgtcccacattgacccactgaccacacaggaaaagcagcgaaacctgcaccctctcttctgagtcacgcctgtggctcatc

SEQ ID NO: 632886 - DNA, 120 bp, Artificial Sequence
  ENSG00000180011_20 (sequence is synthesized)
ggcttccctcttaacctttagtgccctgaagactgctgccgctgtcaccgttgcgctgaaaccccatgggcccgttctgattgaaggtgaagcccaccagattatttttcaaagtcttag

SEQ ID NO: 632887 - DNA, 120 bp, Artificial Sequence
  ENSG00000180011_21 (sequence is synthesized)
gtttcggtgtatctaacctgctcagtaaatatggacgcaattaaagatgctctaggaaatttggggactgtatttaatttttctttccttccatctgaggagcaaggaaatcctactgct

SEQ ID NO: 632888 - DNA, 120 bp, Artificial Sequence
  ENSG00000180011_22 (sequence is synthesized)
gaatagctgttagtatctattttacaagatttactcattttcaggtacctaatgtagctgctagcatgcatgcacaacaatacaatttatatggtaaatggaaccaaataatggcttcac

SEQ ID NO: 632889 - DNA, 120 bp, Artificial Sequence
  ENSG00000180011_23 (sequence is synthesized)
tgaatgttatggctgcactgaagggaaatgtcacggtaaatagctgccaaattatggatcatgccgaagtgtcacaactgcactaaagacaaatagcactagaggctattgccactgtga

SEQ ID NO: 632890 - DNA, 120 bp, Artificial Sequence
  ENSG00000180011_24 (sequence is synthesized)
cgcttttgagttatgaagaagggtagcggcctgatgcgaggctctttgtgtcctcattatagcaaagggttactggtgcaggggactaggaaaaacccgtccagtgtggtgcttagttat

SEQ ID NO: 632891 - DNA, 120 bp, Artificial Sequence
  ENSG00000180011_25 (sequence is synthesized)
tcatccatccctttcagacctaacagccacagccacacggaaagagactttgcctcacttttacattcacaaacaaacaaaggaggggggagcaggttttatgaatgtaactgtgcacag

SEQ ID NO: 632892 - DNA, 120 bp, Artificial Sequence
  ENSG00000180011_26 (sequence is synthesized)
gaaatgactggtaatggaaaaaatgttgtaataaaataatctaatcaaagaatattattaaatttaacatagtctatgtccaaaaggcttagttgcttcttatgcagatagatgtgtgaa

SEQ ID NO: 632893 - DNA, 120 bp, Artificial Sequence
  ENSG00000180011_27 (sequence is synthesized)
atctaagcagtaatgtactttctccctttgtaaagacttggggagtaaggacattaccaactaaattgcttcttcgaaactgaagtgagtcccggtttgtttcattttaatgggagggta

SEQ ID NO: 632894 - DNA, 120 bp, Artificial Sequence
  ENSG00000180011_28 (sequence is synthesized)
ataaagatgaaagaccaacattttaactgatggatcccttaagctacagaatagaaatttattgtgttttgagggaatatactaaatgcagctatgtaaaaataaaattcaaacgcccag

SEQ ID NO: 632895 - DNA, 120 bp, Artificial Sequence
  ENSG00000180011_29 (sequence is synthesized)
gattaaaataaaatataatctgaaaacctcatgttctctctttccccaaactaagaaagtgcactgcatgctgttttcacttattcttagaaaacaagcatgaaagattccgcccattca

SEQ ID NO: 632896 - DNA, 120 bp, Artificial Sequence
  ENSG00000180011_30 (sequence is synthesized)
gataatgccaaaaatatgtttaaacttttttttattcttttgaaaaatgatttgtaaattgagggtcatagttcagcatcagtttcatcttctgggattattgttcaagaccagcctcta

SEQ ID NO: 632897 - DNA, 120 bp, Artificial Sequence
  ENSG00000180011_31 (sequence is synthesized)
ttcagggcaattgtcagtctttttagagaaggggccagggtggaacaatcccagtgagtaaattatttctcagcgtggacttctctgcatgtcgggcttaaggtcaccagccgggcaggg

SEQ ID NO: 632898 - DNA, 120 bp, Artificial Sequence
  ENSG00000180011_32 (sequence is synthesized)
tggaaggagcttgcctctttgagaaaccaaggagtcccagtgatctgttaccatttggttatgacttctaaagagccaaatgctattccttcaagcctgttttgcaggcagaaaatacca

SEQ ID NO: 632899 - DNA, 120 bp, Artificial Sequence
  ENSG00000180011_33 (sequence is synthesized)
gcagtgtcatttaggggttcctttgatgatgactactgctgttaactgacctcagcattaaaaaaaaaaaaattcagggaatagtttgcaaagaaatgaaggaagttttgcatgatatat

SEQ ID NO: 632900 - DNA, 120 bp, Artificial Sequence
  ENSG00000180011_34 (sequence is synthesized)
tctataacttgtcattatatgatttcatctggatgaagttcctcaggagtaggatagagcctctgtaaatggtcattagtattacattctgtgtttatctaatgaaagtgcagtgacaag

SEQ ID NO: 632901 - DNA, 120 bp, Artificial Sequence
  ENSG00000180011_35 (sequence is synthesized)
tagctgcttcttattaaaatgaaaatcctgcattatgtacttgaggaacattccagctaatgaggatgtaatgtcctcagtacaacgcagaccttctttttgtgttcaccaccacaagat

SEQ ID NO: 632902 - DNA, 120 bp, Artificial Sequence
  ENSG00000180011_36 (sequence is synthesized)
gctggaagcttgacaaatgatatcatttaagacacatgcctgccttagggacctggtttttggcttcctgtttctggcttttatttgggtaacgtttataatggccacccgacttgtacc

SEQ ID NO: 632903 - DNA, 120 bp, Artificial Sequence
  ENSG00000180011_37 (sequence is synthesized)
tgggtaatgttttaaccccttccccagagttctcaattagcatgaatttactacagtcagagtttcctttaaattggggtgggggtgctaagcactgaaaatatctttcttgattacttt

SEQ ID NO: 632904 - DNA, 120 bp, Artificial Sequence
  ENSG00000180011_38 (sequence is synthesized)
accatgtggacatatgggataaatactgtatttcagatttacataaaagtagattagtaatgcacagctttcagaataaaaactgataaaaaagaccaagcactatcaactttggacagt

SEQ ID NO: 632905 - DNA, 120 bp, Artificial Sequence
  ENSG00000180011_39 (sequence is synthesized)
aatttcctaggtgttaaacaagttttctgaatacaatctggatgcaaaacggcctgatttgatgaattcataattttcttctgtatactttcattttattaaatattttattacttggtt

SEQ ID NO: 632906 - DNA, 120 bp, Artificial Sequence
  ENSG00000180011_40 (sequence is synthesized)
aaacacaagaattatctatgtaaacttcatgggcttttttgttgaaagttagatgttcagtaactaatttcccagttatggcccagaattaaacatttatgatcatatttcagaagtcaa

SEQ ID NO: 632907 - DNA, 120 bp, Artificial Sequence
  ENSG00000180011_41 (sequence is synthesized)
aatacaaaactggattatcaaaacggttggtgtggtcactttaaactggactatcagtatggttgccgtggtcactttaagcgggattatcagtacggttggtgtggtcactttggttta

SEQ ID NO: 632908 - DNA, 120 bp, Artificial Sequence
  ENSG00000180011_42 (sequence is synthesized)
tcatcaatacagttggtgtggtcactttaaactggattaccaatatggttggtgtggtcgctttaaagtttgttttcattttttttctatttttaattcttacgggtatatagaaggtgt

SEQ ID NO: 632909 - DNA, 120 bp, Artificial Sequence
  ENSG00000180011_43 (sequence is synthesized)
atatatttatggggtacatgagatgtcttgaaacaggcatgcaatgtgaaataaataagcacatcatggagaatggggtgtctacctcctcaagcatttatccattgagttgcaaacaat

SEQ ID NO: 632910 - DNA, 120 bp, Artificial Sequence
  ENSG00000180011_44 (sequence is synthesized)
ccagctacactcagttatttaaaaatgtacagttattattgcttatagtcaccctgtttgctatcaaatagtaggtcttactctatttttttcattttaaactttgaattttatttttcc

SEQ ID NO: 632911 - DNA, 120 bp, Artificial Sequence
  ENSG00000180011_45 (sequence is synthesized)
taggcttatagcatcatgctatcccccttgtaaaaggaggaatgcttggcatgagaaccttactgctgttaccatgaacaaactatggaatgttggcaaaagaaaaaaaaaagttacaca

SEQ ID NO: 632912 - DNA, 120 bp, Artificial Sequence
  ENSG00000180011_46 (sequence is synthesized)
aaacacacaaataacattttaataatatgtatcagatcaagtgattcttagtagtagttgatattcacaggaagtcaaaaaaggacctatttcaattatgtctgcttgaatcctgtttaa

SEQ ID NO: 632913 - DNA, 120 bp, Artificial Sequence
  ENSG00000180011_47 (sequence is synthesized)
ttgtttccctggctgagtagctagtgtgacacagcagcaagactaaaggggctctgtggtccacattgtcctcgagtctattcttgcccattatagacctgcccattggtgctcactcac

SEQ ID NO: 632914 - DNA, 120 bp, Artificial Sequence
  ENSG00000180011_48 (sequence is synthesized)
tgcatcccaggaggcttgactgtcctcaggaagcatgttggggtgcccttaagggtaagtatcccggggagcacagtttggagaaaaccaatacgtcttcatgtatgttgagaagcgctg

SEQ ID NO: 632915 - DNA, 77 bp, Artificial Sequence
  ENSG00000180011_49 (sequence is synthesized)
ttttttttgggacaagacctcgattgcaacctcaacctccctggttcaagccatcctcccacctcagtctcctgagt

SEQ ID NO: 632916 - DNA, 64 bp, Artificial Sequence
  ENSG00000180011_50 (sequence is synthesized)
ctagagatgaggttctactatgtagcccaggctgctctggaactcctgggctcaagcaatcctc

SEQ ID NO: 632917 - DNA, 79 bp, Artificial Sequence
  ENSG00000180011_51 (sequence is synthesized)
tggcctaagtgcagaaatttgaacatgtgcctccaccccaagccaaaatttcccttgaggagcactatctatctgatga

SEQ ID NO: 632918 - DNA, 120 bp, Artificial Sequence
  ENSG00000180011_52 (sequence is synthesized)
aagccaaaatttcccttgaggagcactatctatctgatgatgtctttgaaacggtatgaaattaaaataattaaaacatcctgcacataggtggtagcatctaatatgaaagatggattt

SEQ ID NO: 632919 - DNA, 120 bp, Artificial Sequence
  ENSG00000180011_53 (sequence is synthesized)
atgcttagagctcagaaaaatcctcataaaattattgtgtcttatcctcggcacctaaagaactgaacagggtcttagaatgatcaaatggatggtttgtttggttggtgggagatgttg

SEQ ID NO: 632920 - DNA, 120 bp, Artificial Sequence
  ENSG00000180011_54 (sequence is synthesized)
aaacgtgggtaaggaatggtgtccttagaagagaggttgccctagatgccgaaaccctggaggtccatggttgccagcagaaacttacagctgggaggagcctgcacccatctctggctc

SEQ ID NO: 632921 - DNA, 120 bp, Artificial Sequence
  ENSG00000180011_55 (sequence is synthesized)
ttgtgaatgagaagactcaatttgtgtttttgtttttttgagaaagggtcttgctctgtcacccagactgaagtacagtagcgtgatctcagttcactgcagccttgacctcctgggccc

SEQ ID NO: 632922 - DNA, 120 bp, Artificial Sequence
  ENSG00000180011_56 (sequence is synthesized)
ctcccacctcagcctcctgagtagttaagacttcaggtatgcattaccatgcctggctaatgtttttttattttttgtagagacaaggtctccctcgttgcccaggctggtctcaaactc

SEQ ID NO: 632923 - DNA, 85 bp, Artificial Sequence
  ENSG00000180011_57 (sequence is synthesized)
acatgccccagttgcttttaaactgttaaatgtgggatttaaagaataatctagttctacccattttatgaatgaagaaaagaaa

SEQ ID NO: 632924 - DNA, 120 bp, Artificial Sequence
  ENSG00000180011_58 (sequence is synthesized)
ataatctagttctacccattttatgaatgaagaaaagaaactgggacccagagagaaaaggtgcccggtccaaggttacagagcccgttggactcagaagtgaagctggaacactggcca

SEQ ID NO: 632925 - DNA, 120 bp, Artificial Sequence
  ENSG00000180011_59 (sequence is synthesized)
atgccctcccatccgccaggtgacttctctgcagtcccctttaccatctgcccgggtcctttgggatacggctgactaggggtttgaagaacagcaattggcctttgttatgaatctttt

SEQ ID NO: 632926 - DNA, 120 bp, Artificial Sequence
  ENSG00000180011_60 (sequence is synthesized)
tgtggagataaacccagtagaagtatcacggttctgaccatgaaagtgtgttcaactctaatccagcacaattaggattccagatcatttgattctgtgtcgtctaaatatcacagaaag

SEQ ID NO: 632927 - DNA, 120 bp, Artificial Sequence
  ENSG00000180011_61 (sequence is synthesized)
ttaaaaacaaattagcctcaatggaattaatggcttaatatccataatttagttttaatgctaggaggaagggctcctgtgaatgtgttcttacaaatcaaataaagaaaatcaaataga

SEQ ID NO: 632928 - DNA, 120 bp, Artificial Sequence
  ENSG00000180011_62 (sequence is synthesized)
gatttggagaatgcctgcgccggtcctattcttttttcctggggtttctggattttagtcttttaagtggatcctcccgtcggattactagaatcctgcgctcactgcatgcacacagtt

SEQ ID NO: 632929 - DNA, 120 bp, Artificial Sequence
  ENSG00000180011_63 (sequence is synthesized)
tcaattaaagggggggtgggggtacaaggagggtctccaaatgcgcgaatccttcccagtgtgtctttcttgtctttctgtggctccctggcccttccgcccctgctccccatcccgagc

SEQ ID NO: 632930 - DNA, 120 bp, Artificial Sequence
  ENSG00000180011_64 (sequence is synthesized)
cccgcattcgctttgcgcctgctgcgcttgaacttgtttctggtggagcggaaggcgcgagctgcggaccctcacgcagagatttgttggtgttaacgcatctgacatcaactattcagc

SEQ ID NO: 632931 - DNA, 120 bp, Artificial Sequence; identical to SEQ ID NO: 272381
  ENSG00000180016_0 (sequence is synthesized)

SEQ ID NO: 632932 - DNA, 120 bp, Artificial Sequence
  ENSG00000180016_1 (sequence is synthesized)
gggaacctcctcatcattgtcctcattcgactggactcccatctccacacgcctatgtatttgtttctcagcaacttgtccttctctgacctctgcttctcttccgtgaccattcccaag

SEQ ID NO: 632933 - DNA, 120 bp, Artificial Sequence
  ENSG00000180016_2 (sequence is synthesized)
ttgttacagaacatgcagaaccaggacccatccatcccctatgcggactgcctgacccaaatgtacttcttcctgttatttggagacctggagagcttcctccttgtggccatggcctat

SEQ ID NO: 632934 - DNA, 120 bp, Artificial Sequence
  ENSG00000180016_3 (sequence is synthesized)
gaccgctatgtggccatctgcttccccctgcactacaccgccatcatgagccccatgctctgtctcgccctggtggcgctgtcctgggtgctgaccaccttccatgccatgttacacact

SEQ ID NO: 632935 - DNA, 120 bp, Artificial Sequence
  ENSG00000180016_4 (sequence is synthesized)
ttactcatggccaggttgtgtttttgtgcagacaatgtgatcccccactttttctgtgatatgtctgctctgctgaagctggccttctctgacactcgagttaatgaatgggtgatattt

SEQ ID NO: 632936 - DNA, 120 bp, Artificial Sequence
  ENSG00000180016_5 (sequence is synthesized)
ggccttctctacttgtggctcccacctgtctgtggtgtcactgttctatggaaccgttattggtctctacttatgctcatcagctaatagttctactctaaaggacactgtcatggctat

SEQ ID NO: 632937 - DNA, 120 bp, Artificial Sequence
  ENSG00000180016_6 (sequence is synthesized)
gctgaaccccttcatctacagcctgaggaacagagacatgaagggagccctgagcagagtcattcatcagaagaaaactttcttctctctctgatgataacacttggagctattacatag

SEQ ID NO: 632938 - DNA, 120 bp, Artificial Sequence
  ENSG00000180016_7 (sequence is synthesized)
ataacacttggagctattacatagtttatccagtaaaatattgatattaatattggaatattattctaaattatttcctcaccatccttttgttgaaatggcatcgtacataatttttca

SEQ ID NO: 632939 - DNA, 120 bp, Artificial Sequence
  ENSG00000180016_8 (sequence is synthesized)
atatgtagtggagatgaagcatagctgagtagttgaactagggaagagggtcttggtgacctggctaagacttcctgtttgtcttcccaaggtgatcttggaaaaatgtagtttaagaac

SEQ ID NO: 632940 - DNA, 120 bp, Artificial Sequence
  ENSG00000180016_9 (sequence is synthesized)
aactgttttaaatggtcttcatgccccacattcttaaattatcacaggattttgttatgttactcagaattttgctttgattgtagaatcatttttgtttaattaaaaaaatttttaaat

SEQ ID NO: 632941 - DNA, 80 bp, Artificial Sequence
  ENSG00000180035_0 (sequence is synthesized)
agcccgctcccggcttggcgcggagcctgcatcccggagccgctggcggctcgggcgcctgcaccccgctgaggagctcc

SEQ ID NO: 632942 - DNA, 80 bp, Artificial Sequence
  ENSG00000180035_1 (sequence is synthesized)
ggagggcgccggggtggcggagccggaggcggccggcaaggtgagagcggcggctgcgcgctgggaggagcagcaggtgc

SEQ ID NO: 632943 - DNA, 120 bp, Artificial Sequence
  ENSG00000180035_2 (sequence is synthesized)
cgcccgtacctgggacccgacgccgcccggtgcccgcgctggccggcagagggcagcggcagggcgccgcgggccacacatggctgcgtgaccgcgggatgctgtctgtccccttgctca

SEQ ID NO: 632944 - DNA, 120 bp, Artificial Sequence
  ENSG00000180035_3 (sequence is synthesized)
gggcggcgtgccggcgatggagcgcgcggtagagccttggggcccagatctccaccgcccggaggagagggagccacagagaggcgcccgcacaggtctagggagtgagaacgtgatttc

SEQ ID NO: 632945 - DNA, 120 bp, Artificial Sequence
  ENSG00000180035_4 (sequence is synthesized)
tcagccgaatgagtttgaacataccccacaggaagatgacttggggttcaaggaagaagatttggctccagatcatgaagtaggaaatgcctctctcaaacctgaaggcatccagaactg

SEQ ID NO: 632946 - DNA, 120 bp, Artificial Sequence
  ENSG00000180035_5 (sequence is synthesized)
ggatgacttatgggtccagagagagggtctaggaaagcctcagcctcgggacagaggcccccggctcctgggtgaaccacgctggggccaggctagtagtgatcgggccgctgtgtgtgg

SEQ ID NO: 632947 - DNA, 120 bp, Artificial Sequence
  ENSG00000180035_6 (sequence is synthesized)
tgagtgtggcaaaagcttcaggcagatgtcagatctggtgaaacaccagcggacccacacaggggagaaaccctacaagtgtggggtctgtggcaagggctttggggatagctctgcccg

SEQ ID NO: 632948 - DNA, 120 bp, Artificial Sequence
  ENSG00000180035_7 (sequence is synthesized)
gatcaaacaccagcggactcatagtggggagaagccctatagagcccggccaccagcccagggtcccccaaagattcctcggtcccggatccctgctggtgagcgccccactatctgtgg

SEQ ID NO: 632949 - DNA, 120 bp, Artificial Sequence
  ENSG00000180035_8 (sequence is synthesized)
tgaatgtggcaagagcttccggcagagttctgacctggtgaaacaccagcggacacacactggtgagaagccctacaagtgtggcatatgtggcaagggctttggcgacagttccgcccg

SEQ ID NO: 632950 - DNA, 120 bp, Artificial Sequence
  ENSG00000180035_9 (sequence is synthesized)
catcaagcaccagcggacacaccggggggagcagcccccccgaccagtggtgccccgacggcagccatctcgggcagccacggcagctacccagggaccgaaggcccaggacaagccata

SEQ ID NO: 632951 - DNA, 120 bp, Artificial Sequence
  ENSG00000180035_10 (sequence is synthesized)
tatctgcactgattgcggcaagaggtttgtgctcagctgcagcctcctgagtcaccagcgtagtcacttggggcccaagccctttggctgtgatgtgtgtggaaaggagtttgcccgggg

SEQ ID NO: 632952 - DNA, 120 bp, Artificial Sequence
  ENSG00000180035_11 (sequence is synthesized)
atccgacctggtgaagcacctgcgggtgcacacgggtgagaagccctacctctgcccagagtgcggcaaaggtttcgcggacagctccgcccgagtcaaacacctccgcacccacagtgg

SEQ ID NO: 632953 - DNA, 120 bp, Artificial Sequence
  ENSG00000180035_12 (sequence is synthesized)
cgagaggccccatgcctgcccggaatgcgaccgtaccttcagcctcagctccacccttcttcgccaccgcctcactcacatggagccccaggacttcagcttcccaggctatcccctacc

SEQ ID NO: 632954 - DNA, 120 bp, Artificial Sequence
  ENSG00000180035_13 (sequence is synthesized)
tgggggcccacaggctggggagccacccccaccactggcgggcgacaagccccacaagtgccctgagtgtggcaagggcttccgccgaagctctgacctggtgaaacaccatcgtgtgca

SEQ ID NO: 632955 - DNA, 120 bp, Artificial Sequence
  ENSG00000180035_14 (sequence is synthesized)
cacaggggagaaaccctacctctgtcctgaatgcggcaagggttttgctgacagctcagcccgagtcaagcacctccgcacccaccgtggtgaacgggcccggccaccaccaccatccac

SEQ ID NO: 632956 - DNA, 120 bp, Artificial Sequence
  ENSG00000180035_15 (sequence is synthesized)
tctgctgcggccacataacccacctggcccagtacccatggcccctcgaccccgagttcgggcccagccttctggacccagccagccccacgtgtgtggcttctgtgggaaggagttccc

SEQ ID NO: 632957 - DNA, 120 bp, Artificial Sequence
  ENSG00000180035_16 (sequence is synthesized)
ccggagctcagatctggtcaaacacaggcgtacacacacgggggagaagccatacaagtgtgcagagtgtggcaagggttttggtgacagttctgcccgcatcaagcaccagcgtgggca

SEQ ID NO: 632958 - DNA, 120 bp, Artificial Sequence
  ENSG00000180035_17 (sequence is synthesized)
cctggtcctgacgccctttgggataggggatggtagggcaaggcccctcaagcaggaggcagcaacaggactggaatgacgcggtccagggagggcggaggcccaggagaccaaagggag

SEQ ID NO: 632959 - DNA, 120 bp, Artificial Sequence
  ENSG00000180035_18 (sequence is synthesized)
gggctctgccgcttagcagagaagaaagggcctgggaggtggtgggagggagaaggaagggaagaaaggggaggaagaatagatagaaatagggattggagacagtaaccttgaagctca

SEQ ID NO: 632960 - DNA, 120 bp, Artificial Sequence
  ENSG00000180035_19 (sequence is synthesized)
ggaaactgtcctggctgggctgagtcaggaccttgccaggacgggctgtacccctggcttctagaagactgcctagcacacagtaggcattcaatacttgttgaataaataaactggctt

SEQ ID NO: 632961 - DNA, 120 bp, Artificial Sequence
  ENSG00000180035_20 (sequence is synthesized)
ataaataaactggctttcacctaaggactcaaccctaaattcctgctgcctcatctgttaagaactgacactttccccttgctgggcaggtagtacacacctgtaatcccagcagtttgg

SEQ ID NO: 632962 - DNA, 120 bp, Artificial Sequence
  ENSG00000180035_21 (sequence is synthesized)
aatcacttgagcccaaaagtttgaggctgcagtgagctgattgcaccactgatgcctcccaaccttgctctgggagaccaatgcctgaaccagggtttgtttaccttctgagctgcagag

SEQ ID NO: 632963 - DNA, 120 bp, Artificial Sequence
  ENSG00000180035_22 (sequence is synthesized)
atggggcttctggaatttaaggtaacaggatgaggcaggggtatcttgatcatccggatggggcaaatactgctgtgtggcatggtggtacccacccctatggaggggcactcttggaca

SEQ ID NO: 632964 - DNA, 120 bp, Artificial Sequence
  ENSG00000180035_23 (sequence is synthesized)
gagcccagacctttgtgccctggagggagccaacccaccctgacacggagacactggcagaatagaccagagacagaaggtgctctcatggtatccagcctggatgccaagcccaagtcc

SEQ ID NO: 632965 - DNA, 120 bp, Artificial Sequence
  ENSG00000180035_24 (sequence is synthesized)
tggtggatagcagaggccagctgtttgggaaaagggcaggatgctctgaggcctggcagccacatttccatgtgtctttttaccaataaacggcttctcttctgaggcttggacagtgtg

SEQ ID NO: 632966 - DNA, 120 bp, Artificial Sequence
  ENSG00000180035_25 (sequence is synthesized)
tgtgtacacacaggcatgaaaaaggtggagaggggtctctgcgcgcaaaactcagactgtaaattttgtgtgcttcccttgctctctgagcccattaaataaagaggttgtcttggcgta

SEQ ID NO: 632967 - DNA, 120 bp, Artificial Sequence
  ENSG00000180035_26 (sequence is synthesized)
tttctttgtctctcccaggtcggagtggctggcgctgtcggccggccggggaggtcggcgcgggtggctggagacacacagccacaattacgaagagcctcgggcctcaccacccagctg

SEQ ID NO: 632968 - DNA, 120 bp, Artificial Sequence
  ENSG00000180035_27 (sequence is synthesized)
cagcccaggaggcacacggttaataccaccgagttcgggccgccggcctcggcttagagtagcccctgggccgcacgctgccgcccgccggccacagagctaccgccgacgcgggcgacc

SEQ ID NO: 632969 - DNA, 120 bp, Artificial Sequence
  ENSG00000180035_28 (sequence is synthesized)
agcccgcgcgagggcggcacccgcggaggtcccggggggcgctgggcagtgtggggcgcggggattggacaagaggccgactgaaggcggagccgaggtctagggagtgagaacgtgatt

SEQ ID NO: 632970 - DNA, 120 bp, Artificial Sequence
  ENSG00000180035_29 (sequence is synthesized)
tttttccgcaaggaaggagaaggctcgcgtggccgcgggaagctcagtttttattgaagacagagtctgggagaagaagggggactccggaagacagtgatgcggtcggagtggctggcg

SEQ ID NO: 632971 - DNA, 120 bp, Artificial Sequence
  ENSG00000180042_0 (sequence is synthesized)
atggctccgaccaacctcacatctgcccccgtgttcctcctcctcggcctggtggacggaacagacgcccacccgctgctgttcctgctctgccttggcatctatctgctcaacgccctg

SEQ ID NO: 632972 - DNA, 120 bp, Artificial Sequence
  ENSG00000180042_1 (sequence is synthesized)
agcaacctgagcatggtggcgctggtgagatccgacggggccctccgctcccccatgtattacttcttgggtcacctgagcctcgtggacgtctgctttaccaccgtcacggtccccagg

SEQ ID NO: 632973 - DNA, 120 bp, Artificial Sequence
  ENSG00000180042_2 (sequence is synthesized)
ctgctggccggcctgctccacccgggccaggccatatccttccaggcgtgctttgccgagatgtacttcttcgtggctctgggcatcaccgagagctacctcctggcggccatgtcctac

SEQ ID NO: 632974 - DNA, 120 bp, Artificial Sequence
  ENSG00000180042_3 (sequence is synthesized)
tcgctgctgcacacgctgctcctctccgcgctctcctacccctaccccacccccgtgcgccccttcttttgcgacatgacggtgatgctgagcttggcgacctcggacacgtccgccgcg

SEQ ID NO: 632975 - DNA, 120 bp, Artificial Sequence
  ENSG00000180042_4 (sequence is synthesized)
gagacggccatcttctccgagggcctggccgtggtgttggccccgctgctcctcgtgttccttttcctacgcgcgcatcctggtcgcggtgctcggcttgccggcggccggcgccgcgcc

SEQ ID NO: 632976 - DNA, 120 bp, Artificial Sequence
  ENSG00000180042_5 (sequence is synthesized)
ttctccacctgcggggcccacctagtggcggtggcggtggcgcttttctttggctctgtcctctccgtgtatttcccgccgtcgtctgcctactcagcccgctacgaccgcctggccagc

SEQ ID NO: 632977 - DNA, 120 bp, Artificial Sequence
  ENSG00000180042_6 (sequence is synthesized)
gtggtctacgctgtcatcacgccgaccttgaaccctttcatcaacagccttcgcaacaaagaggtcaagggcgccctgaaaagggggctcagatggagggctgcaccccaagaggcgtga

SEQ ID NO: 632978 - DNA, 120 bp, Artificial Sequence
  ENSG00000180043_0 (sequence is synthesized)
agacccctgctgtccaccctggcagggccatggcggaggcccgagtctcccagcctggggcatctccacgctctgtaacgctgagctccaggcacccgtgaagccccacgggtcaaggct

SEQ ID NO: 632979 - DNA, 120 bp, Artificial Sequence
  ENSG00000180043_1 (sequence is synthesized)
ggtgggccggggctgggaggcctgcacgcctgggttctgggtccctaaaccagtacccatccaccacagccaccatgatctggcttcgaaacaggaggtgccttgagccgctccagggca

SEQ ID NO: 632980 - DNA, 120 bp, Artificial Sequence
  ENSG00000180043_2 (sequence is synthesized)
ccccgaagtgggtccctgttctgggggagctgcaaaagaccctccagaagggcgagtacctgcccctccgtccgctgcccatgttcgagagtaactttgttcaggtgacccatcaagggg

SEQ ID NO: 632981 - DNA, 120 bp, Artificial Sequence
  ENSG00000180043_3 (sequence is synthesized)
gcccagtgttcgtgaatcacagaaccaaccggctggccatgggcgtggccgcctccctgccaggcctggtgttgcctgacatcttgctgatcggccagcccgccgaggacagggactgct

SEQ ID NO: 632982 - DNA, 120 bp, Artificial Sequence
  ENSG00000180043_4 (sequence is synthesized)
ccggcctcgtgctgaccaggatgatccccctggacctcgtccacctctgcgtccatgacctctctgcctggcgcctgaagctgcgcctggtctcgggccgccagtactacctggccctgg

SEQ ID NO: 632983 - DNA, 120 bp, Artificial Sequence
  ENSG00000180043_5 (sequence is synthesized)
acgcccctgacaacgaggtgggcttcctgttccactgctgggtccgcctcatcaacctgcttcaggagccggctcccacctggacccccaggaccacgcgcacggcccccctggatatgc

SEQ ID NO: 632984 - DNA, 120 bp, Artificial Sequence
  ENSG00000180043_6 (sequence is synthesized)
cgctggccgaagcgcctgcctccacctggcacctgcaggaccagcccatcagcagacatgcagtcagggttgctgagcgcaactttccgcataagacggtggctgctcagagacagagga

SEQ ID NO: 632985 - DNA, 120 bp, Artificial Sequence
  ENSG00000180043_7 (sequence is synthesized)
aggccaaggcgctcaagcgcagtttcaagtctcaggccgtgggcgactctgtgcccctcatctggtcgcagctggagcatgctgacgtcaggaagaaacctgcagaaaagaagtcccact

SEQ ID NO: 632986 - DNA, 120 bp, Artificial Sequence
  ENSG00000180043_8 (sequence is synthesized)
cagacccccgccccgacagaactcacacccaaatccgcttgcctgagaagaccagcatcaccacctggaccatcttcagcatcatttccagcaccgccaaccagacacagtcctctccaa

SEQ ID NO: 632987 - DNA, 120 bp, Artificial Sequence
  ENSG00000180043_9 (sequence is synthesized)
aggcctgcacatctgcatctgatgaagccacaggccagggacatgtggttgagagcccttcacactgtgtctcagctgacagccctgatggcttctttctgggctcctgcagctccctgg

SEQ ID NO: 632988 - DNA, 120 bp, Artificial Sequence
  ENSG00000180043_10 (sequence is synthesized)
acccgtgcctgtggcatcaggacacggaagacctcatggactctgggggcagcactttgtcgtctgctgcctccggtctggctccctatcccccggctgcctgcctctccacaccctact

SEQ ID NO: 632989 - DNA, 120 bp, Artificial Sequence
  ENSG00000180043_11 (sequence is synthesized)
cttccatccccaggggcagggaaaaggccgggcctatgggctcccaccaggggccggggccaccaccctgccagaaggccccatctggccttgtcacatcttgtaaggcaccgttccttg

SEQ ID NO: 632990 - DNA, 120 bp, Artificial Sequence
  ENSG00000180043_12 (sequence is synthesized)
ttgaccagtcccagaagctcccagctgtacctgcttcatcgtggaaacccccacctggattggctcctccccagaaggccccagctgcgtcagctcctccccggaaggccccagctgtac

SEQ ID NO: 632991 - DNA, 120 bp, Artificial Sequence
  ENSG00000180043_13 (sequence is synthesized)
cggaaggcctcagctgcgtcagcttctccccgaaaggcctcagccgtacctgccccaccccagaagaccccacccccatctcagaaggccccatctgtacctaccattccccagaaggct

SEQ ID NO: 632992 - DNA, 120 bp, Artificial Sequence
  ENSG00000180043_14 (sequence is synthesized)
gtgtcccccactgctccaaagaagaaatctctactcctccctgccccatcccagaaggctctgccaacctcacctaccgaataccagatggcgctgagcccgcctgcctcacgggggaag

SEQ ID NO: 632993 - DNA, 120 bp, Artificial Sequence
  ENSG00000180043_15 (sequence is synthesized)
ctccctggcgattttgacgtgttgccaacaggaattcctggaagagccgtgctggagagaagccagtctggagggaaaccggagccggtggtgacggtgcgcacccaggagacagacgtg

SEQ ID NO: 632994 - DNA, 120 bp, Artificial Sequence
  ENSG00000180043_16 (sequence is synthesized)
gtggagatgacgactcaggccaagtccccggagtcgcccttcaccgtgaccaagaaggagtccaaggacatcctgattagccaaaccaaggaggtgaccctggaggccttcaggggccag

SEQ ID NO: 632995 - DNA, 120 bp, Artificial Sequence
  ENSG00000180043_17 (sequence is synthesized)
gggaagttggaggactgggcccactgggcgaagcttgaagagaggtccccggacctgcctggcgtgagatccaaggagttggagcagcggaagagatgggtcaaggccaaggaactggcc

SEQ ID NO: 632996 - DNA, 120 bp, Artificial Sequence
  ENSG00000180043_18 (sequence is synthesized)
gtcgagggcccctcccaggagcacagcaggcccttctctgtggaagcgctcaccctcaccaagctcatgatcacggccaactccaaagagcagccctcgaaatccgctttggtctcactt

SEQ ID NO: 632997 - DNA, 120 bp, Artificial Sequence
  ENSG00000180043_19 (sequence is synthesized)
ccctcctggctcttggcgactccgcaggcgtcggccacgtcaatgatggcttcagtgccctcccgccccggccagctgtccttactggaggggaagccagtggtggtcagagagcagcca

SEQ ID NO: 632998 - DNA, 120 bp, Artificial Sequence
  ENSG00000180043_20 (sequence is synthesized)
gagtcgcacacctgggtgaaggagggcaagcggccatggggcgagatgaaggagcagccatggggcgagatgaaggagccaccctgggaccccaaggggccacccaaggtgccctttcgc

SEQ ID NO: 632999 - DNA, 120 bp, Artificial Sequence
  ENSG00000180043_21 (sequence is synthesized)
tccaagcccacctctgccagtctgaagagggaaggaatctcccaggcgcctatccccctgaccgcctcaccgtgggaggacttacggccatcgcccctctcggagaccctcatctcaaag

SEQ ID NO: 633000 - DNA, 120 bp, Artificial Sequence
  ENSG00000180043_22 (sequence is synthesized)
atggaggccacagccagggcgtcccagcagcccaagagggtgtcgcaggagcccatgaggatgccagcccagcaccccctggccactgtggggtcgtcttcagaaattcttttgcccatg

SEQ ID NO: 633001 - DNA, 120 bp, Artificial Sequence
  ENSG00000180043_23 (sequence is synthesized)
ctcttagaacttgaaactgtgaggaacacggccaccaaggcagaggagatacaggaggaatcgggcgtcttgaaccttctgcccagcctgcagcactcccagcactccgagtggccggat

SEQ ID NO: 633002 - DNA, 120 bp, Artificial Sequence
  ENSG00000180043_24 (sequence is synthesized)
gcgggggcttaacctcagttggaaactgtccagaggagcccagcgctgccaggccccgagggttctgtgcgcaccgactgtaggaagcggaatgttgaaagccgcttggggggatttgcc

SEQ ID NO: 633003 - DNA, 120 bp, Artificial Sequence
  ENSG00000180043_25 (sequence is synthesized)
ccctctggtagataccagaactatggatatgcctttatatattggggggcgggggggggcgggggcgagcccgtggagccgcccaacttcgcagagattaaagcttgagcctgagactca

SEQ ID NO: 633004 - DNA, 120 bp, Artificial Sequence
  ENSG00000180044_0 (sequence is synthesized)
ggtagctgaggcgcgggaggcggcgcgcgcgggacccgagcggagcgccggggaggggccgacggacgcgagggcggacggactccccagcctcccgtcccggacgttagccgaggtctg

SEQ ID NO: 633005 - DNA, 120 bp, Artificial Sequence
  ENSG00000180044_1 (sequence is synthesized)
agccgaggtctgcgcgggccatgtggggacccggggtcactgctgagggcctgtcggtggctccggcgccgccgcctctgctgccgctgctgctactgctggcgctggcgctggtggcgc

SEQ ID NO: 633006 - DNA, 120 bp, Artificial Sequence
  ENSG00000180044_2 (sequence is synthesized)
cctcgcggggcggcgggggctgcgctgagctggcgtgcggcgagcgggagcgctgctgcgacgcgaccaacgccacggcggtgcgctgctgcaagctgccgctgcacgccttcctggaca

SEQ ID NO: 633007 - DNA, 120 bp, Artificial Sequence
  ENSG00000180044_3 (sequence is synthesized)
acgtgggctggttcgtccgcaagctctccgggctgctcatcctgctggtgctcttcgccatcggctatttcctgcagcgcatcatctgccccagtccacgcaggtacccgcgcggccagg

SEQ ID NO: 633008 - DNA, 120 bp, Artificial Sequence
  ENSG00000180044_4 (sequence is synthesized)
gggcctccggggggcgccggaccgctggggggcgcggggccgcccgacgacgacgacgactcgcccgctctgctgcgcgacgaggcggcagccggctctcaggactcactgctggacagt

SEQ ID NO: 633009 - DNA, 120 bp, Artificial Sequence
  ENSG00000180044_5 (sequence is synthesized)
aggactcactgctggacagtggcggcggcggccggggccggggaggcggcgggcgctcggacccctcctgcgcctcagagcacgagatgcgtgtagtgtcgccggtcttcctgcagctgc

SEQ ID NO: 633010 - DNA, 120 bp, Artificial Sequence
  ENSG00000180044_6 (sequence is synthesized)
ccagctacgaggaggtcaagtatctgcccacctacgaggagtccatgcggctgcagcagctcagccccggggaggtcgtgctgccagtgtcggtgcttggccgccctcgaggcggggtcg

SEQ ID NO: 633011 - DNA, 120 bp, Artificial Sequence
  ENSG00000180044_7 (sequence is synthesized)
ccgcggagcccgacggcggcgagggccgctaccctcttatctgagcgctcggggatcggcggctggtgcagggctgggggctgcgggtggcaagcaacggccggggtgccgccgccaact

SEQ ID NO: 633012 - DNA, 120 bp, Artificial Sequence
  ENSG00000180044_8 (sequence is synthesized)
gcctcagaccttatctggcaccctggcctaactgcccggcaccccgcgactgggttggggtcactcgtctccctcgcgttctcccgggatcttatgtttctctgcgtttcattccgttca

SEQ ID NO: 633013 - DNA, 120 bp, Artificial Sequence
  ENSG00000180044_9 (sequence is synthesized)
aagaaacgtggggcacgcgcggcgggtgcggctgcagcaggcgaccctccagcgcaccttcgaaggacgtccctgccctctgccttgcctcgtattgtggttcactagtaagtgcctgct

SEQ ID NO: 633014 - DNA, 120 bp, Artificial Sequence
  ENSG00000180044_10 (sequence is synthesized)
tccctagtcaaagagaacacgtgagccctttggtgcgtcgagagaagggcggtcttctttagggctgaggagaaaggaccgcagttccactcctttccctacctgccgcctggacaggtc

SEQ ID NO: 633015 - DNA, 120 bp, Artificial Sequence
  ENSG00000180044_11 (sequence is synthesized)
gccacttggttatgatgaaatcgctgccatgcggcagaccccccaaaatccctcagtgtcttcctgatctagcaaatagtcacagctggtgtttcacaattaggtggagtgcggggagtg

SEQ ID NO: 633016 - DNA, 120 bp, Artificial Sequence
  ENSG00000180044_12 (sequence is synthesized)
ggctaggggggacacctgtgatacaaggttagctgctgtacctactcagggaacagcaaccatgtatatccattcggctggacttttgattgttcaataactgaggaggtatttatattt

SEQ ID NO: 633017 - DNA, 120 bp, Artificial Sequence
  ENSG00000180044_13 (sequence is synthesized)
atttgtcttttattctaatatttttaccatgcattgaacgcaacaggagggtatttcagcaaattcacgacaaggtaatcgtcttatcactttttgtaggccattaatggtcaggaaatt

SEQ ID NO: 633018 - DNA, 120 bp, Artificial Sequence
  ENSG00000180044_14 (sequence is synthesized)
gcccatactctgtcattattgtttaataaatcattaaattatttcattaaaaaagaaaaacaggtatggtcaaacgaggaagcatatgtgacataaaaaacatgaaggatatcttatttt

SEQ ID NO: 633019 - DNA, 120 bp, Artificial Sequence
  ENSG00000180044_15 (sequence is synthesized)
ttagtactgtggcataatatataactttttataataataactgtatgcattatgtagtatagcttttaattgtatcattcatcacagttatatgtaaaaataattgacatgtatatgcca

SEQ ID NO: 633020 - DNA, 120 bp, Artificial Sequence
  ENSG00000180044_16 (sequence is synthesized)
tgtaaaaataattgacatgtatatgccataccatgaagcatatgatgttgtgcactttctcctccatttttcatttggaatacattccacaacatgatccaaaacataagaacttacgac

SEQ ID NO: 633021 - DNA, 120 bp, Artificial Sequence
  ENSG00000180044_17 (sequence is synthesized)
ttgtaactcgtttaaagccattaattgtgcagtaatgtgctacaggattcaatcagcttctcttaagaaacaagtgtcattgtatcagtttcctgttctgtgacacgccctttaaaagta

SEQ ID NO: 633022 - DNA, 120 bp, Artificial Sequence
  ENSG00000180044_18 (sequence is synthesized)
aaagataatataacatattttaatacattgtgtgtaatgtacatatgcatattgtctatgtactatatacacattgtttataatattgttattacagtttgtcattcacctgaaaggaga

SEQ ID NO: 633023 - DNA, 120 bp, Artificial Sequence
  ENSG00000180044_19 (sequence is synthesized)
aggaaaagtacgaaaggtttctctgcttgggaaaaggtgaatgttgttatatcaagaacgattacacacatggatctcatacatgtttttagaacattgttcttctgattgaagaagtct

SEQ ID NO: 633024 - DNA, 120 bp, Artificial Sequence
  ENSG00000180044_20 (sequence is synthesized)
gatgctcctgaaaaatcttaaaatatctgacttgtattgaagaaaattatttaattaaatttttaaaggctggttgaaaaagtctgacagttctgagaattttttaaatgtctgaattgt

SEQ ID NO: 633025 - DNA, 120 bp, Artificial Sequence
  ENSG00000180044_21 (sequence is synthesized)
aataaaaaaatggtttactttaaacttctaaaaactaatgaccttgtgactaaagaaaaatcatttgaagtgtattaaaaaatagcaaaacattaaaatcttttctctgtgcaaatttta

SEQ ID NO: 633026 - DNA, 120 bp, Artificial Sequence
  ENSG00000180053_0 (sequence is synthesized)
atgctgctgagccccgtcacctccacccccttctcggtcaaggacatcctgcgactggagcgcgagcggagctgccccgcggcttcgccacatccgcgggtgcggaagagcccggaaaac

SEQ ID NO: 633027 - DNA, 120 bp, Artificial Sequence
  ENSG00000180053_1 (sequence is synthesized)
tttcagtacctgagaatggacgcagagccgcgagggtcagaggttcacaacgctggtggcggcggcggtgacagaaagctggatggttcggagcctcctgggggtccctgtgaggcagtc

SEQ ID NO: 633028 - DNA, 120 bp, Artificial Sequence
  ENSG00000180053_2 (sequence is synthesized)
ttggagatggacgcggaacggatgggggagccacagcccggcctgaacgcggcctcgcccctcggcggcgggaccagggtgccagagcgcggcgttggcaacagcggcgacagcgtgcgg

SEQ ID NO: 633029 - DNA, 120 bp, Artificial Sequence
  ENSG00000180053_3 (sequence is synthesized)
caggtgctggccctggagcggcgcttcaagcagcagcggtacctgtcagcgcccgagcgcgagcacctggccagcgcgctgcagctcacgtccacgcaggtcaagatctggttccagaac

SEQ ID NO: 633030 - DNA, 120 bp, Artificial Sequence
  ENSG00000180053_4 (sequence is synthesized)
cgacgctacaaatgcaagagacagcgccaggacaagtcgctggaactggctggccaccctctaacgccgcgccgagtagctgtgcccgtcctggtgcgcgatggcaagccctgcctgggc

SEQ ID NO: 633031 - DNA, 120 bp, Artificial Sequence
  ENSG00000180053_5 (sequence is synthesized)
cccgggcccggcgcacctgccttccccagcccctacagtgcagcagtgtcgccctactcttgctacggaggctacagcggagcaccctacggcgcaggctacggcacctgctacgcgggc

SEQ ID NO: 633032 - DNA, 120 bp, Artificial Sequence
  ENSG00000180053_6 (sequence is synthesized)
gcgccctcgggtcctgcgccacacacaccactggccagcgcgggcttcggacacggtggccagaatgccaccccgcagggccatctggcagccacgctgcagggtgtcagggcctggtga

SEQ ID NO: 633033 - DNA, 120 bp, Artificial Sequence
  ENSG00000180061_0 (sequence is synthesized)
gagccaggccagcagccctagcttctggaaggatccttcaggctccagacacccaacctacccgtggccggatgtctgcctgagccccaccccgaatgccagcccttcttccctgagctc

SEQ ID NO: 633034 - DNA, 120 bp, Artificial Sequence
  ENSG00000180061_1 (sequence is synthesized)
acccagccccagctccaggactgagagccccaggaagcttggagaggtgtgagagagacaggtgtccagcctcagccccgatccttcacctgcagagcccggcatgtggggctacctgtc

SEQ ID NO: 633035 - DNA, 120 bp, Artificial Sequence
  ENSG00000180061_2 (sequence is synthesized)
gctgatgcctgtcttcctagctgtctgggctatctctggcgtctggatcgtttttgccattgcagtgaccaacaggactgtggacctcagtaaaggctttccctacatcagcatctgcgg

SEQ ID NO: 633036 - DNA, 120 bp, Artificial Sequence
  ENSG00000180061_3 (sequence is synthesized)
atccttcccccctcagagctgcatcttcagccaggtgctcaatatgggagctgctctggccgcgtggatctgcattgtccgttaccaccagctccgggactggggcgtcagaaggtggcc

SEQ ID NO: 633037 - DNA, 120 bp, Artificial Sequence
  ENSG00000180061_4 (sequence is synthesized)
gtcttctgtgtgccctgggcacctccgtggtaggcaatttccaggaaaagaaccagcggcctacgcacttggcaggggccttccttgccttcatcttgggtaacgtctacttctggctgc

SEQ ID NO: 633038 - DNA, 120 bp, Artificial Sequence
  ENSG00000180061_5 (sequence is synthesized)
agctcctcctgtggaggctgaagaggctgccccagcccggggctgcctggattgggcccctccgcctgggcctctgcagcgtctgcaccatcctcattgtggccatgatcgtcctccacg

SEQ ID NO: 633039 - DNA, 120 bp, Artificial Sequence
  ENSG00000180061_6 (sequence is synthesized)
cctgctcgctgcgtagcgtctctgcggcctgcgagtgggtcgtggccatgctgctgttcgcgctcttcggtctcttagccgttgacttctccgccctggagagctgcaccctgtgtgttc

SEQ ID NO: 633040 - DNA, 120 bp, Artificial Sequence
  ENSG00000180061_7 (sequence is synthesized)
agccgtggcccagcctcagccccccgccggcctcccccatctccctgccggtccagctgtagcaggcaccctgacccgggccttgccctcaccagtgaagcaggaaagatggggccaatc

SEQ ID NO: 633041 - DNA, 120 bp, Artificial Sequence
  ENSG00000180061_8 (sequence is synthesized)
aaaccagctgctgaaagctggcggggtgggtctcagacttcaggtggcataataaaataagaaggaatgactcatgctgggacaccgatggcccgtgaaaacatcatgctaggtgaaggg

SEQ ID NO: 633042 - DNA, 120 bp, Artificial Sequence
  ENSG00000180061_9 (sequence is synthesized)
cacctccgtggtaggcaatttccaggtgagacccagtcggcgcccagggtctgtcccggccggcgtctggaactacaactcccagcatgccccgtggccataggcttattgtctcggggg

SEQ ID NO: 633043 - DNA, 120 bp, Artificial Sequence
  ENSG00000180061_10 (sequence is synthesized)
ctggttcccgcccggccctcctgggacttgtatttttctctggccagtggccttggaccggctggattcctttgctctctgagtggggcactacgagcgaggctgtttgtatgtaggact

SEQ ID NO: 633044 - DNA, 120 bp, Artificial Sequence
  ENSG00000180061_11 (sequence is synthesized)
gtttgtatgtaggacttcgttgacttccaggacgttgggataattttctgccagcccctctccccagcttatttaatgatgaaattactggtccaggcgcagtggctcatgcctgtaatt

SEQ ID NO: 633045 - DNA, 84 bp, Artificial Sequence
  ENSG00000180071_0 (sequence is synthesized)
actcggtctgagagttcggagcgctgaggttcaggcgcgcgcctaacggcttagctgggctcactcggtctgagaggtcggagt

SEQ ID NO: 633046 - DNA, 120 bp, Artificial Sequence
  ENSG00000180071_1 (sequence is synthesized)
gctggatcgcggattctgagctacattgcgggtttgggggtggatcttggatttgggggtggatcgcgggttgcgggggggatcgcgggttgcgggggagatcgcggatttggggcggag

SEQ ID NO: 633047 - DNA, 120 bp, Artificial Sequence
  ENSG00000180071_2 (sequence is synthesized)
tgggggtggaaaggccacgaggagccgccgcggctcaggagcgggtggtgggcgtctgagaagtcgccaccatgaggaagctcttcagcttcgggagacgcctgggccaggcgctcctga

SEQ ID NO: 633048 - DNA, 120 bp, Artificial Sequence
  ENSG00000180071_3 (sequence is synthesized)
gctccatggaccaagagtatgcgggtccgggttacgacattcgggactgggaactgcggaagatccacagggctgccatcaagggcgacgccgcggaggtggagcgctgcctgacgcgca

SEQ ID NO: 633049 - DNA, 120 bp, Artificial Sequence
  ENSG00000180071_4 (sequence is synthesized)
ggttccgggacttggacgcccgcgacagaaaagacaggactgttctacatttggcctgtgcccatggccgtgtgcaagtggtcactctcttgctgcacagaagatgccagatcgacatct

SEQ ID NO: 633050 - DNA, 120 bp, Artificial Sequence
  ENSG00000180071_5 (sequence is synthesized)
gtgacagactaaacaggacacctttaatgaaggctgtacacagccaggaagaggcttgtgccatcgttctcctggaatgtggcgccaatccaaacattgaggatatctacggcaacactg

SEQ ID NO: 633051 - DNA, 120 bp, Artificial Sequence
  ENSG00000180071_6 (sequence is synthesized)
ctctccattatgccgtgtataataaggggacttcactggcagaaagactgctttcccaccatgcaaatattgaagcactaaacaaggagggaaacactccacttttgtttgctataaatt

SEQ ID NO: 633052 - DNA, 120 bp, Artificial Sequence
  ENSG00000180071_7 (sequence is synthesized)
ccaggagacagcatatggtggaatttttattgaagaaccaggcaaatatacatgccgttgacaatttcaaaagaacagccctcatacttgcagtacagcataacttgtcaagtatcgtca

SEQ ID NO: 633053 - DNA, 120 bp, Artificial Sequence
  ENSG00000180071_8 (sequence is synthesized)
ccctcctgcttcaacaaaatatacgtatctcttctcaagacatgtttggccaaactgccgaggattatgctctttgttctgatttgagaagcatccgacaacaaattttggaacataaaa

SEQ ID NO: 633054 - DNA, 120 bp, Artificial Sequence
  ENSG00000180071_9 (sequence is synthesized)
ataaaatgcttaaaaatcatcttcgaaatgacaatcaagaaacagcagctatgaagcctgcaaatttgaaaaaaagaaaagaacgtgcaaaagcagaacacaacctaaaagtggcttcag

SEQ ID NO: 633055 - DNA, 120 bp, Artificial Sequence
  ENSG00000180071_10 (sequence is synthesized)
aggaaaagcaagaaaggctccaaagaagtgaaaataaacagccacaggattctcaaagttacggaaaaaagaaggatgcgatgtatggaaattttatgttgaagaaagacattgccatgc

SEQ ID NO: 633056 - DNA, 120 bp, Artificial Sequence
  ENSG00000180071_11 (sequence is synthesized)
tcaaagaggaattatatgcaataaaaaatgacagtctcagaaaggaaaagaaatatattcaggaaattaaaagcattacagaaataaatgctaactttgaaaagagtgtaagactcaatg

SEQ ID NO: 633057 - DNA, 120 bp, Artificial Sequence
  ENSG00000180071_12 (sequence is synthesized)
aaaaaatgataacaaaaacagtggcccggtattcgcaacagcttaatgatctgaaagctgagaatgcaaggctgaattcagaattggagaaggaaaaacacaacaaagaaagactagaag

SEQ ID NO: 633058 - DNA, 120 bp, Artificial Sequence
  ENSG00000180071_13 (sequence is synthesized)
ctgaagttgaatccctccattctagcctggccactgctataaatgagtacaatgaaattgtggaaagaaaagacctagaactagttttatggagagcagatgatgtttctagacatgaaa

SEQ ID NO: 633059 - DNA, 120 bp, Artificial Sequence
  ENSG00000180071_14 (sequence is synthesized)
aaatgggttctaatatttctcaactaacagataagaatgagttgcttactgaacaggtccataaagctcgggtgaagttcaataccttaaaaggtaagctccgtgagacaagagatgctc

SEQ ID NO: 633060 - DNA, 120 bp, Artificial Sequence
  ENSG00000180071_15 (sequence is synthesized)
tcagggaaaagacattggctttaggaagtgtacagctggacctaaggcaagcacagcatcgaataaaggaaatgaagcagatgcatccaaatggagaagctaaagaaagtcaatccattg

SEQ ID NO: 633061 - DNA, 120 bp, Artificial Sequence
  ENSG00000180071_16 (sequence is synthesized)
tctttagaggagagaatacgtcaacaagaacttgaaaatctcttgcttgaacgacaactagaggatgctcgtaaggaaggcgataataaagagatagtcattaatatccacagagactgt

SEQ ID NO: 633062 - DNA, 120 bp, Artificial Sequence
  ENSG00000180071_17 (sequence is synthesized)
cttgagaatggaaaggaagatcttctagaagaaagaaataaggaattaatgaaagaatataattatttaaaagaaaaactgcttcagtgtgaaaaagaaaaagcagaaagagaagtgatt

SEQ ID NO: 633063 - DNA, 120 bp, Artificial Sequence
  ENSG00000180071_18 (sequence is synthesized)
gtgagagaatttcaagaagaactggtcgatcaccttaaaacattttcaatatcagagtctccactggaaggtacatcacattgtcatattaatttgaatgagacatggacttcaaagaag

SEQ ID NO: 633064 - DNA, 120 bp, Artificial Sequence
  ENSG00000180071_19 (sequence is synthesized)
aaattatttcaagtagaaattcaacctgaagaaaaacatgaagaattcagaaaactttttgaattaatatcattactgaactatactgcggaccaaataagaaagaaaaatcgtgaatta

SEQ ID NO: 633065 - DNA, 120 bp, Artificial Sequence
  ENSG00000180071_20 (sequence is synthesized)
gaagaagaggcaactggatataagaaatgcctagaaatgacaataaatatgttaaatgcatttgcaaatgaggacttcagttgccatggagacttaaatacagaccaactgaaaatggat

SEQ ID NO: 633066 - DNA, 120 bp, Artificial Sequence
  ENSG00000180071_21 (sequence is synthesized)
attctgtttaagaagctaaaacagaagtttaatgatcttgtggccgagaaggaagctgtgtcttcagaatgtgtcaatttggccaaagacaatgaagttcttcatcaggagttattatct

SEQ ID NO: 633067 - DNA, 120 bp, Artificial Sequence
  ENSG00000180071_22 (sequence is synthesized)
atgagaaatgtacaagagaaatgtgaaaaacttgagaaggataaaaagatgttggaagaagaagtattaaatcttaagacacatatggaaaaagatatggtagaacttggtaaactacaa

SEQ ID NO: 633068 - DNA, 120 bp, Artificial Sequence
  ENSG00000180071_23 (sequence is synthesized)
gaatataaatcggagctggatgaaagggcagtgcaggaaatagaaaaattagaagaaatccatttacagaaacaagcagaatatgaaaaacaattagagcagttaaacaaggataatacg

SEQ ID NO: 633069 - DNA, 120 bp, Artificial Sequence
  ENSG00000180071_24 (sequence is synthesized)
acacttaaagatgtggaatgtaaattctccaaaatgaaaactgcttatgaagaggttacaactgaattagaagaatttaaggaagcctttgcaggagcagtgaaagctaacaattccatg

SEQ ID NO: 633070 - DNA, 120 bp, Artificial Sequence
  ENSG00000180071_25 (sequence is synthesized)
gcagtgaaagctaacaattccatgtcaaaaaaattaatgaaatcggataagaaaatagcagtgatcagcaccaagctctttacggagaaacagcggatgaaatattttctcagcactctt

SEQ ID NO: 633071 - DNA, 120 bp, Artificial Sequence
  ENSG00000180071_26 (sequence is synthesized)
cctacaaggccagaaccagagttaccttgtgttgaaaatcttaatagtatagaactcaacagaaaatatattcccaaaacggccataagaattcctacttcaaacccacagacttcaaat

SEQ ID NO: 633072 - DNA, 120 bp, Artificial Sequence
  ENSG00000180071_27 (sequence is synthesized)
aactgcaagaacttcttgactgaggttttgctatgttgagcacttgctcccgtctactttcttttgtagaatccactggtaagccacatctaatgaagagattaaccataaaatcttaag

SEQ ID NO: 633073 - DNA, 120 bp, Artificial Sequence
  ENSG00000180071_28 (sequence is synthesized)
atgaagagattaaccataaaatcttaaggaaaagttgtatgatttaaaagatcataaaactttattactgggctatttacatgaaattttaattgtttctcatataatataaaacatcat

SEQ ID NO: 633074 - DNA, 77 bp, Artificial Sequence
  ENSG00000180071_29 (sequence is synthesized)
accagcgttattgagtttggcctactcaaattgcctgaatgtcagctgtttaaacagccaaacaaccaagtcatcat

SEQ ID NO: 633075 - DNA, 120 bp, Artificial Sequence
  ENSG00000180071_30 (sequence is synthesized)
aatgtcagctgtttaaacagccaaacaaccaagtcatcattgatactttagtaaaggtcatcgagggcttctttgcattttacagtttttattaccatatgtagtaggagacttaaagag

SEQ ID NO: 633076 - DNA, 120 bp, Artificial Sequence
  ENSG00000180071_31 (sequence is synthesized)
tatctgccaggtttgtccatactagtgttacggttttcttcttgtagctcaatagtattttgtgtggagatactttgaagctctgtaaatatctggttactcctcaaaacccactagatt

SEQ ID NO: 633077 - DNA, 73 bp, Artificial Sequence
  ENSG00000180071_32 (sequence is synthesized)
tcctcatattactgtgatggttgccagatgattgtttttcttattttcttctttgttctacatggagaaataa

SEQ ID NO: 633078 - DNA, 120 bp, Artificial Sequence
  ENSG00000180071_33 (sequence is synthesized)
cagaagcagcagccatgaagaatgaaagttttaaaacacaaggagcaagttcaaaagtctcgctctatcaccagtctggagtccagtggcatgatctcagattactgcagccttcacctc

SEQ ID NO: 633079 - DNA, 120 bp, Artificial Sequence
  ENSG00000180071_34 (sequence is synthesized)
gctgggacaacaggcacatgcgaccatgcccagaaacagcagctatgaagcctgcaaatttgaaaaaaagaaaagaacgtgcaaaagaacacaacctaaaagtggcttcagaggaaaagc

SEQ ID NO: 633080 - DNA, 120 bp, Artificial Sequence
  ENSG00000180071_35 (sequence is synthesized)
tattaattaaatttaggtttattttagtaataaagtgtaaatagcaaatggcattccttttcattgttgggttagtagatactatattcagtatctttttcttacacacatctaatgaaa

SEQ ID NO: 633081 - DNA, 120 bp, Artificial Sequence
  ENSG00000180071_36 (sequence is synthesized)
tgaaaacgaaaactttcacagtgaagagtatacttatgcatcattaattcatcatgttccatagcttaaaaaattcccaagaagtggatccatctcttttttaccagctctacaatttgt

SEQ ID NO: 633082 - DNA, 120 bp, Artificial Sequence
  ENSG00000180071_37 (sequence is synthesized)
tcagccagcacactgaaacgattctccaaaaacaaaggcatcagttggcttacatctgttctcaggaaaagttccaaaaatttcaccatgaaataaaaacactcacatcaatgtaactct

SEQ ID NO: 633083 - DNA, 120 bp, Artificial Sequence
  ENSG00000180071_38 (sequence is synthesized)
tgtcaggttactcagccttgtctctcaccacttactgcattctgccctttgctctagcaccaaagtggacagaatagagctccgcagggctctttgttacctcaggatctttgccttcgc

SEQ ID NO: 633084 - DNA, 120 bp, Artificial Sequence
  ENSG00000180071_39 (sequence is synthesized)
ctcttccctctatctggcaagattttcctcgtccttcagtcatcaacctatgtatcccctccaccagaaagcccatgatattgacacaaaagtgggatagatgtcccttctgtatgttcc

SEQ ID NO: 633085 - DNA, 120 bp, Artificial Sequence
  ENSG00000180071_40 (sequence is synthesized)
ttccagtagtgccctgctgtatacctgtcatggtatctatgactctatatggacattacctgccggtcttttaggttatagcatatgactattgggaggtggaccatgccatcttcatct

SEQ ID NO: 633086 - DNA, 120 bp, Artificial Sequence
  ENSG00000180071_41 (sequence is synthesized)
attccagtgctggctctagtaccttagcacgtggctgttgagtacatgaatgaagaatgaaaaagctgtgatatttaaccacaattggaattaacgccatgtgtaaatgatttaatagta

SEQ ID NO: 633087 - DNA, 120 bp, Artificial Sequence
  ENSG00000180071_42 (sequence is synthesized)
attttgtattgtaattgcacgtacatatttctcattcttattaactctgataacgttctcaactccacattttaaacttacacttcgttaactgaaatgttttaggtaaagaacataatc

SEQ ID NO: 633088 - DNA, 120 bp, Artificial Sequence
  ENSG00000180083_0 (sequence is synthesized)
tagaatttggctgtgaatccatctggtccagggccttttctggttggggctccatggttcctagaggcaaggaagaagagccaccagtcaaataggtttcagcacctccaactccaacat

SEQ ID NO: 633089 - DNA, 120 bp, Artificial Sequence
  ENSG00000180083_1 (sequence is synthesized)
cctccaactccaacatcttcaaagcagcgactgggaagaaaaataatccttctgacaacacatattcagacacatatggtcagcctcatgaagctctggatacccatgctcatgacattc

SEQ ID NO: 633090 - DNA, 120 bp, Artificial Sequence
  ENSG00000180083_2 (sequence is synthesized)
ctgtctgtgctgggagaaatgaggaagaaaagatatgacaggaaggaattgttacttgaagaatgctggggaaagccaaatgtcaaagaatgtaccaataagtgttctaaagcctttaga

SEQ ID NO: 633091 - DNA, 120 bp, Artificial Sequence
  ENSG00000180083_3 (sequence is synthesized)
tgtaaagacaaaaattacacatgctgctggacctattgtggaaacatctgctggataaacgtcgaaaccagtggagattactaaaaccgtagcttcccaccaggctgccacctgtgtggg

SEQ ID NO: 633092 - DNA, 120 bp, Artificial Sequence
  ENSG00000180083_4 (sequence is synthesized)
ctgggaaatgtttaagaggtctcatagtagtaccctgtggctacttttaggaacaccagtctatttttactgagagctggacaacagcaaacacttgacaaataaacttatttaccagta

SEQ ID NO: 633093 - DNA, 86 bp, Artificial Sequence
  ENSG00000180083_5 (sequence is synthesized)
tgagggccttttctggggctccatggttcctagaggcaaggaagaagagccaccagtcaaataggtttcagcacctccaactccaa

SEQ ID NO: 633094 - DNA, 120 bp, Artificial Sequence
  ENSG00000180089_0 (sequence is synthesized)
cctggtcacccattgaagcagtgtttgtggtggagcccctgagggcttggtggggttgagcagaatgaggaaaggtttcatggagcagggagggagacggctagggcagcaagtgaagga

SEQ ID NO: 633095 - DNA, 120 bp, Artificial Sequence
  ENSG00000180089_1 (sequence is synthesized)
cagactcgccttcccatccctccaggggcactcctgccagccagcccctctcccgcttcccatgatggggtggctgttggaattctgcaccccatctcttctgattgttggggcccagga

SEQ ID NO: 633096 - DNA, 120 bp, Artificial Sequence
  ENSG00000180089_2 (sequence is synthesized)
caaggggacaggcatttgtgggcctaacctccccaggcagataggaggaggaagccatgtcccagcaggctagggcagagggacccccagtgccaacagtgctttatcagcgggcgccag

SEQ ID NO: 633097 - DNA, 120 bp, Artificial Sequence
  ENSG00000180089_3 (sequence is synthesized)
gcagggccatccccagggtgaggacaacatctccctgggccctgttatcagtcacagagtccacaggacgctccttgggttaacgtgtaaccatgagccctcccctccaccccctgaagc

SEQ ID NO: 633098 - DNA, 120 bp, Artificial Sequence
  ENSG00000180089_4 (sequence is synthesized)
cactcgctcccagattaggtcgctctggggctatcaggccagcatggacgctggcaaagcggggcagaccctgaagactcactgctcagcccagcgcccagatgtctgcaggtggctgag

SEQ ID NO: 633099 - DNA, 120 bp, Artificial Sequence
  ENSG00000180089_5 (sequence is synthesized)
ccccttcatcctctcctgctgcgtgtacttctgcctctggattcccgaggaccagctgtcctggttcgctgccctggtcaagtgcctgcccgtcctctgcctggctgggttcctgtgggt

SEQ ID NO: 633100 - DNA, 120 bp, Artificial Sequence
  ENSG00000180089_6 (sequence is synthesized)
tctggccggcagccttcgtccctggcatggccgcctttgccaccgcccacctcctctacgtctgggccttcggcttctctcccctgcagcccggcctgctgctgctcatcatcctggccc

SEQ ID NO: 633101 - DNA, 120 bp, Artificial Sequence
  ENSG00000180089_7 (sequence is synthesized)
ctggcccctacctcagccttgtgctccagcacctcgagccggatatggtcctgccggtggcagcctatgggctgatcctgatggccatgctgtggcgcggcctggcccagggcgggagtg

SEQ ID NO: 633102 - DNA, 120 bp, Artificial Sequence
  ENSG00000180089_8 (sequence is synthesized)
ccggctggggcgcgctgctcttcacgctctctgatggcgtgctggcctgggacaccttcgcccagcccctgccccatgcccacctggtgatcatgaccacctactatgctgcccagctcc

SEQ ID NO: 633103 - DNA, 120 bp, Artificial Sequence
  ENSG00000180089_9 (sequence is synthesized)
tcatcacactgtcagccctcaggagcccggtgcccaagactgactgactagggagcttgaagggccggtgttcaggccctctcctcctgcaaggacctgggcctcccagcccagcccagc

SEQ ID NO: 633104 - DNA, 120 bp, Artificial Sequence
  ENSG00000180089_10 (sequence is synthesized)
ctgagaaataccctcagcagcgaagcttcctgacgcctgtctgcaggcgccgctgccgccgtcgcttctggctgaagacgtttgaggacgatttgcggaattccaagtccactactgggt

SEQ ID NO: 633105 - DNA, 120 bp, Artificial Sequence
  ENSG00000180089_11 (sequence is synthesized)
tccagctgccttcccccggttctgactccagatccctggctcctcagccaggcccacatggagccctcccagccaccagcctgcctccatgttcactgtcggccccacagcctgcccgcc

SEQ ID NO: 633106 - DNA, 120 bp, Artificial Sequence
  ENSG00000180089_12 (sequence is synthesized)
ccctgctgctgctctgaatccgttttccctgtgggtgtggaaccgtagatgttgctgttaccgtaggagaggcctcggggagggtcatgattgtgataaaccatcgcggttaatgacagc

SEQ ID NO: 633107 - DNA, 120 bp, Artificial Sequence
  ENSG00000180089_13 (sequence is synthesized)
agattaggtcgctctggggctatcaggccagcatggacgctggcaaagcggggcagaccctgaagactcactgctcagcccaggtgagagccttctgagctgtgcctggggctgggggga

SEQ ID NO: 633108 - DNA, 120 bp, Artificial Sequence
  ENSG00000180089_14 (sequence is synthesized)
cagggccctggaaccccagcagccggcgggtctgggagctgctgtccttgagttggttgggccctgggaagctgggttctggcagcctggtccctgaatgggtccagcctgtacagctgg

SEQ ID NO: 633109 - DNA, 120 bp, Artificial Sequence
  ENSG00000180089_15 (sequence is synthesized)
ggtcccaggtgggggtgggacaggagccatgagatctgagtcccaagaatgggggctgggctgggtttcggctcagtagctccccactccccaaagcgcccagatgtctgcaggtggctg

SEQ ID NO: 633110 - DNA, 120 bp, Artificial Sequence
  ENSG00000180089_16 (sequence is synthesized)
ggaaggtgctgtgacgctttccagatgcccgtgtgagagaggccccagcacttggatgggagcctgggtgcagagggctcctgtgagagctccagtggtcaaaggcacagtggggggcgc

SEQ ID NO: 633111 - DNA, 120 bp, Artificial Sequence
  ENSG00000180089_17 (sequence is synthesized)
agccgtgaccgaggcagctcacgctccagcgaggggtgggggcaggcggtgttagggcagtagctgaggtggcgcagagggcagtgaggacctgctggaggtactgcagtttgaagcagg

SEQ ID NO: 633112 - DNA, 120 bp, Artificial Sequence
  ENSG00000180089_18 (sequence is synthesized)
gttgctgaggaaggcctcactgaggaagtcacatttgggcagagctgaagggctgtatgcctgtgtggaggaagggcgagtgtaaaggctccggggcagggacgtgtcaggtgcttgtag

SEQ ID NO: 633113 - DNA, 120 bp, Artificial Sequence
  ENSG00000180089_19 (sequence is synthesized)
actgcatgtggggagacctgcaaggaggctcggccagggtggggcctggtgctctgggatggtccttctcttaggccctgaggggtgacctcggggccattcccaggatgggccttcctc

SEQ ID NO: 633114 - DNA, 120 bp, Artificial Sequence
  ENSG00000180090_0 (sequence is synthesized)
atgttggagcagggatccaggatcactcaataagggcagcctgagcctcaagctggatgcctgagagtggtaatccaggaactcatgcagccagaatctggggccaatggaacagtcatt

SEQ ID NO: 633115 - DNA, 120 bp, Artificial Sequence
  ENSG00000180090_1 (sequence is synthesized)
gctgagttcatcctgctgggcttgctggaggcgccagggctgcagccagttgtctttgtgctcttcctctttgcctacctggtcacggtcaggggcaacctcagcatcctggcagctgtc

SEQ ID NO: 633116 - DNA, 120 bp, Artificial Sequence
  ENSG00000180090_2 (sequence is synthesized)
ttggtggagcccaaactccacacccccatgtacttcttcctggggaacctatcagtgctggatgttgggtgcatcagcgtcactgttccatcaatgttgagtcgtctcctgtcccgcaag

SEQ ID NO: 633117 - DNA, 120 bp, Artificial Sequence
  ENSG00000180090_3 (sequence is synthesized)
cgtgcagttccctgtggggcctgccttacccagctcttcttcttccatctgttcgttggagtggactgcttcctgctgaccgccatggcctatgaccgattcctggccatctgccggccc

SEQ ID NO: 633118 - DNA, 120 bp, Artificial Sequence
  ENSG00000180090_4 (sequence is synthesized)
ctcacctacagcacccgcatgagtcagacagtccagaggatgttggtggctgcgtcctgggcttgtgctttcaccaacgcactgacccacactgtggccatgtccacgctcaacttctgt

SEQ ID NO: 633119 - DNA, 120 bp, Artificial Sequence
  ENSG00000180090_5 (sequence is synthesized)
ggccccaatgtgatcaatcacttctactgtgacctcccacagctcttccagctctcctgctccagcacccaactcaatgagctgctgctttttgctgtgggttttataatggcaggtacc

SEQ ID NO: 633120 - DNA, 120 bp, Artificial Sequence
  ENSG00000180090_6 (sequence is synthesized)
acatgtggctcccacctcactgtggttgccatattctatggttcaggtatctttaactatatgcgactgggttcaaccaagctttcagacaaggataaagctgttggaattttcaacact

SEQ ID NO: 633121 - DNA, 120 bp, Artificial Sequence
  ENSG00000180090_7 (sequence is synthesized)
gtcatcaatcccatgctgaacccaatcatctacagcttcagaaaccctgatgtgcagagtgccatctggaggatgctcacagggaggcggtcactggcttgaggaggtctcaattgaccc

SEQ ID NO: 633122 - DNA, 120 bp, Artificial Sequence
  ENSG00000180090_8 (sequence is synthesized)
tttctccctgtgtcttgtactaaaggaaaagtcttctagagccagaaactaggaaaaaaatggttcacacctgtttctgtttcatgggcataagaaggactttttgtagggaataatagt

SEQ ID NO: 633123 - DNA, 120 bp, Artificial Sequence
  ENSG00000180090_9 (sequence is synthesized)
tttcatttctgaaagcagccctgtccaattataagcaatgagtgtataggatctgccaagccagccccttagacaaattcagcttcaggcaccgtgttctctcctttctggctagaggtg

SEQ ID NO: 633124 - DNA, 120 bp, Artificial Sequence
  ENSG00000180090_10 (sequence is synthesized)
aaacctaggaagctgtgagtgctgacaggttcatgttccagaaggaatgactctttggttggttacagccttagttgccagaagtaccccagaaaactccccgccagaagtcatattttt

SEQ ID NO: 633125 - DNA, 120 bp, Artificial Sequence
  ENSG00000180090_11 (sequence is synthesized)
ttttccctcaagttcaggtgtgcttggtctgtttataaaacataggtctagagattaggattgttttatttctcccatcagaactctaaaagcaaaaataaaacaaaaagaaacaaaaac

SEQ ID NO: 633126 - DNA, 120 bp, Artificial Sequence
  ENSG00000180090_12 (sequence is synthesized)
aagtagctctttctattcccattaaacaaggaccccatagcatagacaggggacagaggggaagctgtatgattatgtattctctagtaattctggagcacctgatacctgtgtgcagct

SEQ ID NO: 633127 - DNA, 120 bp, Artificial Sequence
  ENSG00000180096_0 (sequence is synthesized)
ccctgctaacaaagggagccacttccttcctctctgcacataccccatgtctcaccacgatgatggagctacagtgggacttggaatccagatgtgtgaaggatggagggttgaagccgc

SEQ ID NO: 633128 - DNA, 120 bp, Artificial Sequence
  ENSG00000180096_1 (sequence is synthesized)
actcagcttcctgccccaccagaggaagtggggagagacggcaggtgcagtgatggctggcggagtcatggacaaggagtacgtgggttttgctgccctccccaaccagctgcaccgcaa

SEQ ID NO: 633129 - DNA, 120 bp, Artificial Sequence
  ENSG00000180096_2 (sequence is synthesized)
gtctgtcaagaaggggtttgacttcacgctaatggtggcaggggagtcaggcctagggaaatccaccctcatcaacagcctcttcctcaccaacctctatgaggatcgccaggtgccaga

SEQ ID NO: 633130 - DNA, 120 bp, Artificial Sequence
  ENSG00000180096_3 (sequence is synthesized)
ggccagtgctcgcttgacacagaccctggccattgagcgccggggcgtagagattgaggaagggggtgtgaaagtgaagctgacccttgtggacacacctggctttggggactcagtgga

SEQ ID NO: 633131 - DNA, 120 bp, Artificial Sequence
  ENSG00000180096_4 (sequence is synthesized)
ctgctctgactgctggcttccggtggtgaaattcatcgaggagcaatttgagcagtaccttagggatgagagtggcctgaaccggaagaacatccaggactcccgagtccactgctgcct

SEQ ID NO: 633132 - DNA, 120 bp, Artificial Sequence
  ENSG00000180096_5 (sequence is synthesized)
ctacttcatctcacccttcggccgggggctccggcccctagatgtggccttcctccgggcagtacacgagaaagtcaacatcatcccagtcattggcaaagcggatgctctgatgcccca

SEQ ID NO: 633133 - DNA, 120 bp, Artificial Sequence
  ENSG00000180096_6 (sequence is synthesized)
atcagttgaaggaagaggagatccacatctaccagttccccgaatgtgactctgatgaagatgaagacttcaagaggcaggatgcagagatgaaggaaagcatcccttttgcagtcgtgg

SEQ ID NO: 633134 - DNA, 120 bp, Artificial Sequence
  ENSG00000180096_7 (sequence is synthesized)
gatcatgcgaggtggtgagggatggcgggaaccggccggtgaggggacgccgctactcctgggggaccgtggaggtggagaacccacatcactgcgatttcctgaacctgcgacggatgc

SEQ ID NO: 633135 - DNA, 120 bp, Artificial Sequence
  ENSG00000180096_8 (sequence is synthesized)
tggtgcagacacacctgcaggacctgaaagaggtgacgcacgatctgctctacgagggctaccgggcccgctgcctacagagcctggcccggcctggggctcgcgatcgagccagccgca

SEQ ID NO: 633136 - DNA, 120 bp, Artificial Sequence
  ENSG00000180096_9 (sequence is synthesized)
gtaagctttcccgccagagcgccacagagatcccgctgcccatgctgcctctggcggacaccgagaagctgatccgcgagaaagacgaagagctgcgccgcatgcaagagatgctggaga

SEQ ID NO: 633137 - DNA, 120 bp, Artificial Sequence
  ENSG00000180096_10 (sequence is synthesized)
agatgcaggcccaaatgcagcagagccaggcccagggcgagcagtcagacgccctctgaggccacgccccgcccggccttacctcggctccgccttcagtcggcctcttgtccaatcccc

SEQ ID NO: 633138 - DNA, 120 bp, Artificial Sequence
  ENSG00000180096_11 (sequence is synthesized)
ctcttgtccaatccccgcgccccacactgcccagcgccccccgggacctccgcgggtgccgccctcgcgcgggctagggggaggttctcccagcctgagtccgtagccccgccccggcgc

SEQ ID NO: 633139 - DNA, 120 bp, Artificial Sequence
  ENSG00000180096_12 (sequence is synthesized)
gacaccgcccacttcccggcccggggcctgcacaatctccgaccgcatcactgtcttccggagtcccccttcttctcccagactctgtcttcaataaaaactgagcttcccgcggccacg

SEQ ID NO: 633140 - DNA, 120 bp, Artificial Sequence
  ENSG00000180096_13 (sequence is synthesized)
gctcagcctttcacagtggcgactccctggagagttacaggactggtttgtgctggctccctatctcaaaaggtggtgtctgtttcagagggccactgggtccctgtgcttcttgatgac

SEQ ID NO: 633141 - DNA, 120 bp, Artificial Sequence
  ENSG00000180096_14 (sequence is synthesized)
tcacctaggcccccaccagttccccttaatgtctttggagggagccaaagaaatgacattctactcccacagtcctggctagccttgccccctgccctctggcctttgatctctgacctc

SEQ ID NO: 633142 - DNA, 120 bp, Artificial Sequence
  ENSG00000180096_15 (sequence is synthesized)
agacaccgggtaaatgctgctggagagatggaatcagacctggggcccggaacagagaccctgagccagagactcacatcagagccctgagtcacagaggacgcaaaggcagagagagac

SEQ ID NO: 633143 - DNA, 120 bp, Artificial Sequence
  ENSG00000180096_16 (sequence is synthesized)
cgagggacagcggctgaccaaaaataaggggagccaaagattagccgctagagacagagacgtagaaacggataagagataaagtcattgacgcagagtccgaggagcagtaagaggctg

SEQ ID NO: 633144 - DNA, 120 bp, Artificial Sequence
  ENSG00000180096_17 (sequence is synthesized)
agagaaagagacacaaagaaagaggcggccagaaagactccggacagagatggtagaggggcacgtccctctgttgcccaggctggtctggaactccttggctcaagctgtcctccctcc

SEQ ID NO: 633145 - DNA, 89 bp, Artificial Sequence
  ENSG00000180096_18 (sequence is synthesized)
agagccaccttgcccgtcctgggaactgttttctaatcagctcatcaaaaccttcatctcccctgctaacaaagggagccacttccttc

SEQ ID NO: 633146 - DNA, 120 bp, Artificial Sequence
  ENSG00000180096_19 (sequence is synthesized)
cacgctaatggtggcaggtctgggggttttggagagggaactgcggaggggatgtccttaggaggccctggctgtcccctcccctgaccagttgggcctgttctgtccacaggggagtca

SEQ ID NO: 633147 - DNA, 70 bp, Artificial Sequence
  ENSG00000180096_20 (sequence is synthesized)
actttgggaggctgagacgggaggatccctctactaaaaatacacaaatttgccaggaaagcatcccttt

SEQ ID NO: 633148 - DNA, 120 bp, Artificial Sequence
  ENSG00000180096_21 (sequence is synthesized)
atctccccagaggcacagctcacgtccgatcttccaggatctcggccggccacagccaagcatcgcagtccccaccggccgttacctgtccgtggcggcgcacggccgaggccctcacct

SEQ ID NO: 633149 - DNA, 120 bp, Artificial Sequence
  ENSG00000180096_22 (sequence is synthesized)
gtgcgggcgcctctctgtggctccctctcctccgggcggtggagatctgggccccaaggctctaccgcgcgctccatcgccggcacgccgccctgagcaaggggacagacagcatcccgc

SEQ ID NO: 633150 - DNA, 120 bp, Artificial Sequence
  ENSG00000180096_23 (sequence is synthesized)
acataccccatgtctcaccacgatgatggagctacagtgggacttggaatccagatgtgtgaaggatggagggttgaaggacaaggagtacgtgggttttgctgccctccccaaccagct

SEQ ID NO: 633151 - DNA, 120 bp, Artificial Sequence
  ENSG00000180096_24 (sequence is synthesized)
gccaaacctgatttcagcttagacttctttgatcttgaagtggcctttctggagcatggtgcatcaggctagattgtaggagaagcttctgaggaaggcgggtggtaagccgccagcata

SEQ ID NO: 633152 - DNA, 120 bp, Artificial Sequence
  ENSG00000180096_25 (sequence is synthesized)
gccatgtctctgaaggctcaaaataggctacatatgcagcccccgggctagatgcctggctgaggcctatttgagggcaggagcatagacatgagaacatagtgacttccctctggcccc

SEQ ID NO: 633153 - DNA, 120 bp, Artificial Sequence
  ENSG00000180096_26 (sequence is synthesized)
caccccgtgtcttcagagccctttcccactgtttctgcttatatctctctcggcctctctttctctctctttttttttttagatagagtctcactctgtggcccaggctgcagtacagtg

SEQ ID NO: 633154 - DNA, 87 bp, Artificial Sequence
  ENSG00000180096_27 (sequence is synthesized)
agggactatagatgaacaccaccatgcctggctaacttaaaaaatatttttttggctgggcttggtggcagacacctgttaatccca

SEQ ID NO: 633155 - DNA, 84 bp, Artificial Sequence
  ENSG00000180096_28 (sequence is synthesized)
ccccatctctacaaaaagtacaaaaaccagccaggtgtggtggtgtgcacttgtagtcccagttgagaggttgaggctgcagtg

SEQ ID NO: 633156 - DNA, 120 bp, Artificial Sequence
  ENSG00000180096_29 (sequence is synthesized)
ggttgaggctgcagtgaaccaagatggagccactggactccagcctgggtgatagagtgaaaccttgtttcaaaatatatgtgtatatttgttgtagagatgggatctagctatattgcc

SEQ ID NO: 633157 - DNA, 120 bp, Artificial Sequence
  ENSG00000180096_30 (sequence is synthesized)
caggcttctcctggtctcttaatgtctgccccatcttagaatcttgtgtttctcaccatctatgtctctgagattttgtttttgtcttcctgtatgtccatctctccccatctctgtctt

SEQ ID NO: 633158 - DNA, 120 bp, Artificial Sequence
  ENSG00000180096_31 (sequence is synthesized)
tcatgtctttctctctgtctctgaccacccagtatctctgtgtctcactgtctctggtcatgaaatgtctgtcattgtggcccgtttcacactgtctctatatctgtttcccctgagatc

SEQ ID NO: 633159 - DNA, 120 bp, Artificial Sequence
  ENSG00000180098_0 (sequence is synthesized)
gcaaagccccaccccggtgcgcgggtatggcggccagcctgtggatgggcgacctggaaccctacatggatgagaacttcatctccagagcctttgccaccatgggggagaccgtaatga

SEQ ID NO: 633160 - DNA, 120 bp, Artificial Sequence
  ENSG00000180098_1 (sequence is synthesized)
gcgtcaaaattatccgaaaccgcctcactgggatcccagctggctactgctttgtagaatttgcagatttggccacagctgagaagtgtttgcataaaattaatgggaaaccccttccag

SEQ ID NO: 633161 - DNA, 120 bp, Artificial Sequence
  ENSG00000180098_2 (sequence is synthesized)
gagccacacctgcgaaacgttttaaactgaactatgccacttacgggaaacaaccagataacagccctgagtattccctctttgtgggggacctgaccccggacgtggatgatggcatgc

SEQ ID NO: 633162 - DNA, 120 bp, Artificial Sequence
  ENSG00000180098_3 (sequence is synthesized)
tgtatgaattcttcgtcaaagtctacccctcctgtcggggaggcaaggtggttttggaccagacaggcgtgtctaagggttatggttttgtgaaattcacagatgaactggaacagaagc

SEQ ID NO: 633163 - DNA, 120 bp, Artificial Sequence
  ENSG00000180098_4 (sequence is synthesized)
gagccctgacggagtgccagggagcagtgggactggggtctaagcctgtgcggctgagcgtggcaatccctaaagcgagccgtgtaaagccagtggaatatagtcagatgtacagttata

SEQ ID NO: 633164 - DNA, 120 bp, Artificial Sequence
  ENSG00000180098_5 (sequence is synthesized)
gctacaaccagtattatcagcagtaccagaactactatgctcagtggggctatgaccagaacacaggcagctacagctacagttacccccagtatggctatacccagagcaccatgcaga

SEQ ID NO: 633165 - DNA, 120 bp, Artificial Sequence
  ENSG00000180098_6 (sequence is synthesized)
catatgaagaagttggagatgatgcattggaagaccccatgccacagctggatgtgactgaggccaacaaggagttcatggaacagagtgaggagctgtatgacgctctgatggactgtc

SEQ ID NO: 633166 - DNA, 120 bp, Artificial Sequence
  ENSG00000180098_7 (sequence is synthesized)
acctttttggaaatatgatttgtaagattttaataatgactgtttttggagatcatgaatgtttctacaacactgctgcattcatttgaccatttgagtttgaagaccaagggaacaact

SEQ ID NO: 633167 - DNA, 120 bp, Artificial Sequence
  ENSG00000180098_8 (sequence is synthesized)
tttaaacaaggttcaaattggtttccttcacaggaatcctttgtccaggtagttatccacataggacagtttgggattatccaaaactgggatgagcagcttgggataattcacacacta

SEQ ID NO: 633168 - DNA, 120 bp, Artificial Sequence
  ENSG00000180098_9 (sequence is synthesized)
aagcctgagttcaaggtttctcagttgacaggtaggtatgtaaatcagggttctctggagtatttgtaggacctgccatatttgagtcctaacttggtgcaagtctggcagctaggtaga

SEQ ID NO: 633169 - DNA, 120 bp, Artificial Sequence
  ENSG00000180098_10 (sequence is synthesized)
aaaggcactctagcaggtgtggtaggagcacgccccagaaggtagaatgtggtggggtgtgatggaacaggccagttggcctaagaattagtacttgctctaataatgggtttcatctat

SEQ ID NO: 633170 - DNA, 120 bp, Artificial Sequence
  ENSG00000180098_11 (sequence is synthesized)
tttcatgagttgcagcatctgcatatacaaggcctggatcactttaggatcaatattttgacacgggagaaggcagctcagaaaggattaaggaagatagctcaaagccaaagcagaccc

SEQ ID NO: 633171 - DNA, 120 bp, Artificial Sequence
  ENSG00000180098_12 (sequence is synthesized)
tccgtgtgaactttatactgctcacttccgtgtttcccaagtaaatggggaaactgtccaaccttgtcatgtgttgggacttactgcttgaggcaaagcattcatcctacatcataaaaa

SEQ ID NO: 633172 - DNA, 120 bp, Artificial Sequence
  ENSG00000180098_13 (sequence is synthesized)
atctccaaagatctctttaagggctgggcatggtggctcactttgggagatggattgcttgagctcgggaagagaccagttcggtctctacaaaaaaatacaaacacaaatatactttta

SEQ ID NO: 633173 - DNA, 120 bp, Artificial Sequence
  ENSG00000180098_14 (sequence is synthesized)
gggaattgaaataacttgtccaaggcaacacaggtagtaaatggcagagccaggattcagactgaagattggttgcctcccaaatccatgcctttccattctgcattgctgcctcccata

SEQ ID NO: 633174 - DNA, 120 bp, Artificial Sequence
  ENSG00000180098_15 (sequence is synthesized)
accgaagacttgaaactctagacctcttgcctgattgggaaactagaataggctggcagcagcaaggacacatttcaagagagttgcattctgctcttcccacagttacttagcttacag

SEQ ID NO: 633175 - DNA, 120 bp, Artificial Sequence
  ENSG00000180098_16 (sequence is synthesized)
ctgcaccagctggcacacctgggctcatagaaccatggagctggcagtgcccttagcggtcatccgtgcaaccccctcattttatacaggagaaaaagctgaggcttagagagggggaga

SEQ ID NO: 633176 - DNA, 120 bp, Artificial Sequence
  ENSG00000180098_17 (sequence is synthesized)
aaagccccaccccggtgcgcgggtatggcggccagcctgtggatgggcgacgtgagtgagggcagccgtccggggtctgaagacaaggaagcatctcggtttcgcgagagaggaaggatc

SEQ ID NO: 633177 - DNA, 120 bp, Artificial Sequence
  ENSG00000180098_18 (sequence is synthesized)
tgagtgggaggggacttgggatcccagaaaggggagacgtgtgacgggggttctttttggtgacacagaagcgggttccagcatctaagtgaagaggctgagtccgtgaggctaggggtc

SEQ ID NO: 633178 - DNA, 120 bp, Artificial Sequence
  ENSG00000180098_19 (sequence is synthesized)
ctggggccccacctgggttcgtgggagggaaaggtggtgctttggggacatagaatgggagcaatccaaggactgaggcgcgctgttctgggaccggaggagtggggtttctaggtccaa

SEQ ID NO: 633179 - DNA, 120 bp, Artificial Sequence
  ENSG00000180098_20 (sequence is synthesized)
ggggaggctccctaaagcggggcaagcttgaaccaaaagagctggggtttcaggccgctcagtggaggcgaacctcgcccctcgctcccccagcggcgcgtagccagccctgggctgaac

SEQ ID NO: 633180 - DNA, 120 bp, Artificial Sequence
  ENSG00000180098_21 (sequence is synthesized)
gggaggggctctggaacccggagtgggaagcccggccgccggcctgagccgctgtgctcttgtttttacgcagctggaaccctacatggatgagaacttcatctccagagcctttgccac

SEQ ID NO: 633181 - DNA, 120 bp, Artificial Sequence
  ENSG00000180098_22 (sequence is synthesized)
ctaagtaaggccttacttgttactgatgcttaactgtgttagtttcagcctttctctcctgagtggaggtgttttagaaaggccctgcagcatggcgattaagaccacaagctctggagc

SEQ ID NO: 633182 - DNA, 120 bp, Artificial Sequence
  ENSG00000180098_23 (sequence is synthesized)
caaactgcctggttcaaatcccagctccaatacaggtgagggagaatgccagtattgtagaattgaagctctgtgacccttacagccccatctgtaaaatggagctgattaataatagct

SEQ ID NO: 633183 - DNA, 120 bp, Artificial Sequence
  ENSG00000180098_24 (sequence is synthesized)
gcttgtagggttgatgtaaggattaaaggatataatataagtaagtcacatttgaaatgctttataggtgtttgctgttttgcttgttattgttactgagcctttcagtgtagttagaag

SEQ ID NO: 633184 - DNA, 120 bp, Artificial Sequence
  ENSG00000180098_25 (sequence is synthesized)
tggctcatgcctgtaatcctaacactttgagaggcccaggtgggtggattgcgtgagcttaggagttggagaccagcccgggcaacacggtgaaatgccgtctctattaaaatacaaaaa

SEQ ID NO: 633185 - DNA, 64 bp, Artificial Sequence
  ENSG00000180098_26 (sequence is synthesized)
tgggcaacagagccagactctgtctccataaaaaaaaaaaaaaagtatggatcacctgaggtca

SEQ ID NO: 633186 - DNA, 120 bp, Artificial Sequence
  ENSG00000180098_27 (sequence is synthesized)
gtcatggcttctcactacccctagtaatagtcactgtaaaattataacagctaacattttgaggtcccaatgagtggaaggatggcatgtagcttaagggtaggacttgccaggcgttgt

SEQ ID NO: 633187 - DNA, 120 bp, Artificial Sequence
  ENSG00000180098_28 (sequence is synthesized)
gaaaggggagacgtgtgacgggggttctttttggtgacacagaagcgggttccagcatctaagtgaagaggctgactggaaccctacatggatgagaacttcatctccagagcctttgcc

SEQ ID NO: 633188 - DNA, 120 bp, Artificial Sequence
  ENSG00000180098_29 (sequence is synthesized)
ttagataatgatgatgttgccattattattgtcattgcttactaccatctattgaatccctactgtatacttattttatttaatcctaaaacaaccctttacagtaggcattgttatctt

SEQ ID NO: 633189 - DNA, 120 bp, Artificial Sequence
  ENSG00000180104_0 (sequence is synthesized)
gtgcacagagaacacccctagcatgaacagtgtgaggattccaccagctttttcaccatgaaggagacagaccgggaggccgttgcgacagcagtgcaaagggttgctgggatgctccag

SEQ ID NO: 633190 - DNA, 120 bp, Artificial Sequence
  ENSG00000180104_1 (sequence is synthesized)
cgcccggaccagctggacaaggtggagcagtatcgcaggagagaagcgcggaagaaggcctccgtggaggccagattgaaggccgccatccagtcacagttggacggggtgcgcacaggc

SEQ ID NO: 633191 - DNA, 120 bp, Artificial Sequence
  ENSG00000180104_2 (sequence is synthesized)
ctcagccagctccacaacgccctgaatgacgtcaaagacatccagcagtcgctggcagacgtcagcaaggactggaggcagagcatcaacaccattgagagcctcaaggacgtcaaagac

SEQ ID NO: 633192 - DNA, 120 bp, Artificial Sequence
  ENSG00000180104_3 (sequence is synthesized)
gccgtggtgcagcacagccagctcgccgcagccgtggagaacctcaagaacatcttctcagtgcctgagattgtgagggagacccaggacctaattgaacaaggggcactcctgcaagcc

SEQ ID NO: 633193 - DNA, 120 bp, Artificial Sequence
  ENSG00000180104_4 (sequence is synthesized)
caccggaagctgatggacctggagtgctcccgggacgggctgatgtacgagcagtaccgcatggacagtgggaacacgcgtgacatgaccctcatccatggctactttggcagcacgcag

SEQ ID NO: 633194 - DNA, 120 bp, Artificial Sequence
  ENSG00000180104_5 (sequence is synthesized)
gggctctctgatgagctggctaagcagctgtggatggtgctgcagaggtcactggtcactgtccgccgtgaccccaccttgctggtctcagttgtcaggatcattgaaagggaagagaaa

SEQ ID NO: 633195 - DNA, 120 bp, Artificial Sequence
  ENSG00000180104_6 (sequence is synthesized)
attgacaggcgcatacttgaccggaaaaagcaaactggctttgttcctcctgggaggcccaagaattggaaggagaaaatgttcaccatcttggagaggactgtgaccaccagaattgag

SEQ ID NO: 633196 - DNA, 120 bp, Artificial Sequence
  ENSG00000180104_7 (sequence is synthesized)
ggcacacaggcagataccagagagtctgacaagatgtggcttgtccgccacctggaaattataaggaagtacgtcctggatgacctcattgtcgccaaaaacctgatggttcagtgcttt

SEQ ID NO: 633197 - DNA, 120 bp, Artificial Sequence
  ENSG00000180104_8 (sequence is synthesized)
cctccccactatgagatctttaagaacctcctgaacatgtaccaccaagccctgagcacgcggatgcaggacctcgcatcggaagacctggaagccaatgagatcgtgagcctcttgacg

SEQ ID NO: 633198 - DNA, 120 bp, Artificial Sequence
  ENSG00000180104_9 (sequence is synthesized)
tgggtcttaaacacctacacaagtactgagatgatgaggaacgtggagctggccccggaagtggatgtcggcaccctggagccattgctttctccacacgtggtctctgagctgcttgac

SEQ ID NO: 633199 - DNA, 120 bp, Artificial Sequence
  ENSG00000180104_10 (sequence is synthesized)
acgtacatgtccacgctcacttcaaacatcatcgcctggctgcggaaagcgctggagacagacaagaaagactgggtcaaagagacagagccagaagccgaccaggacgggtactaccag

SEQ ID NO: 633200 - DNA, 120 bp, Artificial Sequence
  ENSG00000180104_11 (sequence is synthesized)
cttcaagttgctgctcagataagtgaagatttgaaaacaaaggtactagttttatgtcttcagcagatgaattctttcctaagcagatataaagatgaagcgcagctgtataaagaagag

SEQ ID NO: 633201 - DNA, 120 bp, Artificial Sequence
  ENSG00000180104_12 (sequence is synthesized)
cacctgaggaatcggcagcaccctcactgctacgttcagtacatgatcgccatcatcaacaactgccagaccttcaaggaatccatagtcagtttaaaaagaaagtatttaaagaatgaa

SEQ ID NO: 633202 - DNA, 120 bp, Artificial Sequence
  ENSG00000180104_13 (sequence is synthesized)
gtggaagagggtgtgtctccgagccagcccagcatggacgggattttagacgccatcgcgaaggagggctgcagcggtttgctggaggaggtcttcctggacctggagcaacatctgaat

SEQ ID NO: 633203 - DNA, 120 bp, Artificial Sequence
  ENSG00000180104_14 (sequence is synthesized)
gaattgatgacgaagaagtggctattagggtcaaacgctgtagacattatctgtgtcaccgtggaagactatttcaacgattttgccaaaattaaaaagccgtataagaagaggatgacg

SEQ ID NO: 633204 - DNA, 120 bp, Artificial Sequence
  ENSG00000180104_15 (sequence is synthesized)
gccgaggcgcaccggcgcgtggtggtggagtacctgcgggcggtcatgcagaagcgcatttccttccggagcccggaggagcgcaaggagggtgccgagaagatggttagggaggcagag

SEQ ID NO: 633205 - DNA, 120 bp, Artificial Sequence
  ENSG00000180104_16 (sequence is synthesized)
cagctgcgcttcctgttccggaagctggcgtccggtttcggggaagacgtggacggatactgcgacaccatcgtggctgtggccgaagtgatcaagctgacagacccttctctgctctac

SEQ ID NO: 633206 - DNA, 120 bp, Artificial Sequence
  ENSG00000180104_17 (sequence is synthesized)
ctggaggtctccactctggtcagcaagtatccagacatcagggatgaccacatcggtgcgctgctggctgtgcgtggggacgccagccgtgacatgaagcagaccatcatggagaccctg

SEQ ID NO: 633207 - DNA, 120 bp, Artificial Sequence
  ENSG00000180104_18 (sequence is synthesized)
gagcagggcccagcacaggccagccccagctacgtgcccctcttcaaggacattgtggtgcccagcctgaacgtggccaagctgctcaagtagcctccgccggcctgccctgctcgcccc

SEQ ID NO: 633208 - DNA, 120 bp, Artificial Sequence
  ENSG00000180104_19 (sequence is synthesized)
tccacagcctcggtccctgcctttagaaacgcgggacagctgattgctctccttggccacacgtgctccttttagctgcacggcctgtctttaggtgccagtgtgatgcaccgggtgtgc

SEQ ID NO: 633209 - DNA, 120 bp, Artificial Sequence
  ENSG00000180104_20 (sequence is synthesized)
gtcgagtgagcgtcccgaggccacgtgcggaggcccctcactgtgctgtcaaaggcctgtgggtgcagggctctgccgcacagcctctcttgggtgcttgtttgttgcagtggttgaaag

SEQ ID NO: 633210 - DNA, 120 bp, Artificial Sequence
  ENSG00000180104_21 (sequence is synthesized)
tgtgtggggcacagaggacgtgcacctccctgccctcctcctccctgggccttcaccgcaccccatctgcttaagtgctcggaaccccgtcacctaattaaagtttctcggcttcctcag

SEQ ID NO: 633211 - DNA, 120 bp, Artificial Sequence
  ENSG00000180104_22 (sequence is synthesized)
caaggtctgattaggttaccccgacgggtagctcactgcagcgcagccagcagcctttaactcctgggctcaggtggtctccctgcctcagcctcctaatgagccatattttaaagcctg

SEQ ID NO: 633212 - DNA, 120 bp, Artificial Sequence
  ENSG00000180104_23 (sequence is synthesized)
aggtgaagttattttttgatccatttaaagtaatcaacctctctgtccttccattagtctggatcgtctaaagattgttttatttttagaggctcatccggtcagatgttagtgatgtga

SEQ ID NO: 633213 - DNA, 120 bp, Artificial Sequence
  ENSG00000180104_24 (sequence is synthesized)
aatttcaggccaggcgtgacgtcagcgtggcatttgaaacagctccatgttgcccttagtgctgtctgaccgaagcctgtctgtcctcagatataaagatgaagcgcagctgtataaaga

SEQ ID NO: 633214 - DNA, 120 bp, Artificial Sequence
  ENSG00000180104_25 (sequence is synthesized)
cagcgagtccctccgtgagtgaacgttcacttgttgtcctatcagcccaagggaggcaataggctctgcggacgccacctccctgggacggggctctggtgagaatggccggggccctgt

SEQ ID NO: 633215 - DNA, 120 bp, Artificial Sequence
  ENSG00000180104_26 (sequence is synthesized)
ggcatggccctcgaggtggagggagccatggttcccggagaggcccgcgtgccccgtcttagctccttgccttccactcactccctgaggccccagggatttctttccgcttcagaccct

SEQ ID NO: 633216 - DNA, 120 bp, Artificial Sequence
  ENSG00000180104_27 (sequence is synthesized)
ggcctgtctgtggaccgagtgctcatgcgcggcactgcctcgcccgcgtctgtcctgctgggggccggagctggcctggtgcgggggtccaggtcaccgtcactgttcccccactgagcc

SEQ ID NO: 633217 - DNA, 120 bp, Artificial Sequence
  ENSG00000180104_28 (sequence is synthesized)
cccgctcctcctctgcggtgagatgccagagccgtggcggagcgaggaggagtgggctcagagcctccggggagccaccgggagccccagcctgggtttcaatgagggtgctcctggccg

SEQ ID NO: 633218 - DNA, 120 bp, Artificial Sequence
  ENSG00000180104_29 (sequence is synthesized)
aacgccatgcattctcttttccagttaaggttttctgactactgatctaggattgcccaggaactgttgtcaatcacagagtaaaagtctccgctcagcctggagggcgccctcctggtc

SEQ ID NO: 633219 - DNA, 76 bp, Artificial Sequence
  ENSG00000180104_30 (sequence is synthesized)
tctgacatcccctcagcctagagagggtgccttcctgatcccctcatgtctgacatcccctcagcctggagggcgc

SEQ ID NO: 633220 - DNA, 76 bp, Artificial Sequence
  ENSG00000180104_31 (sequence is synthesized)
gagggtgccctcctgatcccctcatgtctgacatcccctcagcctggatggcgccctcctggtcccctcctgtctg

SEQ ID NO: 633221 - DNA, 120 bp, Artificial Sequence
  ENSG00000180104_32 (sequence is synthesized)
tctgacatcccctcagcctagagggtgccctcctggtcccctcatgtctgacatcccctcagcctagagggcgccctcctgatcccctcatgtctgacatcccctcagcctggagggcgc

SEQ ID NO: 633222 - DNA, 120 bp, Artificial Sequence
  ENSG00000180104_33 (sequence is synthesized)
ccctcctgtttgacatccccagagttactccttgggtcctttgagagatgagacaccagctgcacccagcaagccctgtccccacccccagctaatcaaggcattaccccggaggccggg

SEQ ID NO: 633223 - DNA, 120 bp, Artificial Sequence
  ENSG00000180104_34 (sequence is synthesized)
atcccaacactttgggaggccaagatgtgaaaaattcacaaatgggacttcttgaaagaatcaaaacttgagaagtaactgagaagtagaagcagctcttaacaagcatcaggggctcag

SEQ ID NO: 633224 - DNA, 120 bp, Artificial Sequence
  ENSG00000180104_35 (sequence is synthesized)
aacaagcatcaggggctcagaagaggtagctcttcccagggcatccagcgggcgagctgttccatgtgcctctgaacccagcttcccacttagcagcaggtcttgagtgcacctggcata

SEQ ID NO: 633225 - DNA, 120 bp, Artificial Sequence
  ENSG00000180104_36 (sequence is synthesized)
cacctgtgcaattctcgtcaacacagaacacctgcctgcccacccccggtgctgaagaccgaccagtcaaggaggtgttggtgggagtgttgtgttcaccatgtggagatcaggcggcga

SEQ ID NO: 633226 - DNA, 120 bp, Artificial Sequence
  ENSG00000180104_37 (sequence is synthesized)
ttaccgcatcttctttgctgactttggtaaccgggtgtccagggaggagcgatcgggagtggccaagcagttgcctggactcagcttctgactctgcagctgggagtcagatgcaggccc

SEQ ID NO: 633227 - DNA, 120 bp, Artificial Sequence
  ENSG00000180104_38 (sequence is synthesized)
aagggtccaggggagttgttcagcgcctggaatcgccatgcattgcgcggtggaccgcacgacgctcctgctctgttctcccaggcacagacaggcacttggaaggcagctttgctcctc

SEQ ID NO: 633228 - DNA, 120 bp, Artificial Sequence
  ENSG00000180104_39 (sequence is synthesized)
tggccacccggaaacctcccagcagttcagatgggacaaactgggggcctgtcagaacagccacttgtgccgggaaggccaggccccggcctgctccgatgaacgtcaggacggtggctg

SEQ ID NO: 633229 - DNA, 120 bp, Artificial Sequence
  ENSG00000180104_40 (sequence is synthesized)
cagcagggaaccagggctggccttggatctgtccagtagggtcactgactgggcagggcttgctgcatagaggatggctgcattttgtgctcagagttggttgaaatggctacgaagtgt

SEQ ID NO: 633230 - DNA, 120 bp, Artificial Sequence
  ENSG00000180104_41 (sequence is synthesized)
ggagaataaccactgaatcccaaaaagtcactgcgcttgatctgatccaagtaacagtgactgcagttagggtcgagagcttctccgaagcagcggtcatgcaggcttttgtgtggctga

SEQ ID NO: 633231 - DNA, 120 bp, Artificial Sequence
  ENSG00000180104_42 (sequence is synthesized)
cgcttccctttttcacaacagtaaaaagctatcaatgggaaattgtggacttttcccaccagggactcaatggggactcaatgtgcaatattcagtcaacataaaactctttaagaactc

SEQ ID NO: 633232 - DNA, 120 bp, Artificial Sequence
  ENSG00000180104_43 (sequence is synthesized)
cggcggcggcgtagccgtagaggattttctacgttggtatgccaaatttcataatcagaaaataaagagaaaggaaaggttgcaatgtaggtccagatgaaaaaggagaagagaggtgtc

SEQ ID NO: 633233 - DNA, 120 bp, Artificial Sequence
  ENSG00000180104_44 (sequence is synthesized)
tgtgagtagggctggcctgcgtgccacagaccaccgtgctggttatatgagtaactagggcttggcagcaggcaggaggcaggggggaaatgccttagcgttgacttcctaggatgcatt

SEQ ID NO: 633234 - DNA, 120 bp, Artificial Sequence
  ENSG00000180104_45 (sequence is synthesized)
gctcagttgcccgggctctgcttccaggccttgacaggtcagtttgctagaagaggagaatggccccttctctgggcctggatctgaagcttgtcctctgctggagacgtgagcctgtgc

SEQ ID NO: 633235 - DNA, 120 bp, Artificial Sequence
  ENSG00000180104_46 (sequence is synthesized)
cctactcggcaggctggccagggcccagaacgtctgaaccgtgtgtggcagcacctgccaggctctcggctctgagtcccatggttgggggggtccgtcaaggaccaaagggcgagtcca

SEQ ID NO: 633236 - DNA, 120 bp, Artificial Sequence
  ENSG00000180104_47 (sequence is synthesized)
tttgcagcctggtgaccaccaggtggtctcagagtgagaagaggaggtcagcagggtctgcttcttagacaagggtgcgtccacctagcaaggcagcattatgaccagaagccgaggtgt

SEQ ID NO: 633237 - DNA, 120 bp, Artificial Sequence
  ENSG00000180104_48 (sequence is synthesized)
cctcaggagctggggaaggagcgctgtcttctcttgggacgtgagctgctgtggttgctgagtctgggcatgggaacaggcctgaccggacctggtcggcctcattctctgtgcacctgg

SEQ ID NO: 633238 - DNA, 120 bp, Artificial Sequence
  ENSG00000180104_49 (sequence is synthesized)
ggcatctagtttcttctccctctttatctgtaccaagggttccagttaaacccctgcgggctgctgtggtcactgcctcccatgggggtggctcctgggtccctgctctggagtcctcat

SEQ ID NO: 633239 - DNA, 120 bp, Artificial Sequence
  ENSG00000180104_50 (sequence is synthesized)
ttgagaaagaggacgctggtgccctgtgtctggtttgtggagcttgtgcatgcaactgaccaggtaattggcatgaccctcaggcacctgctcttctctcttctcttctccatgatgctg

SEQ ID NO: 633240 - DNA, 120 bp, Artificial Sequence
  ENSG00000180104_51 (sequence is synthesized)
tatgtctttctgccagtgtgctaatgtacacattgaatgtttttaaaaattagaagcaaaaattttttgatcctactatgcctgttactaagaagaaattaagccggtagattccccacg

SEQ ID NO: 633241 - DNA, 120 bp, Artificial Sequence
  ENSG00000180104_52 (sequence is synthesized)
caagtgtggtgctggctgaacagcaggaactcccccaccccaagccagtgaagtcctgaccgttctctctgcctagacaagaccttttaggaacctaggatgcctgggagagcatgggtg

SEQ ID NO: 633242 - DNA, 120 bp, Artificial Sequence
  ENSG00000180104_53 (sequence is synthesized)
acatccttctgaaggtaccgtagcaggccacggcccagggcagacccgtggtagtgtccaggatcaccaggtgtgaggctagatgaggagtgtcctgaccttttctcatcaaggctttaa

SEQ ID NO: 633243 - DNA, 120 bp, Artificial Sequence
  ENSG00000180104_54 (sequence is synthesized)
acatcaggtaagggatgcacgtcttagaatcctgccttagaatcctggagtggagcggcaggtccctccttctgtctggggcgggtggggctcctggttcgcaagttcagccctgcagca

SEQ ID NO: 633244 - DNA, 120 bp, Artificial Sequence
  ENSG00000180104_55 (sequence is synthesized)
cggcaagggttcaggtgcggcacagcggggcccaggcgcagggagcagagctgcttctgtgctgccttccacctggcctgggctacagtgtgggtgggtggagctcgaggggcacatccc

SEQ ID NO: 633245 - DNA, 120 bp, Artificial Sequence
  ENSG00000180104_56 (sequence is synthesized)
tcctgccgttttctgggccgaagcccagtgcttcctcactgccctctgggacacaggctgtgaactgtaccgtgcggatgccgtctggggagccgggctgtgcacttgcattccggtcag

SEQ ID NO: 633246 - DNA, 120 bp, Artificial Sequence
  ENSG00000180113_0 (sequence is synthesized)
gtgcccggaagcgcgacctcgggcggttggaggggctaccgggtcttaccagtccgtggcgggagtcccggaggaccctcgacgggggagttgccgagaaaaggcctcgccggcattctt

SEQ ID NO: 633247 - DNA, 120 bp, Artificial Sequence
  ENSG00000180113_1 (sequence is synthesized)
cccctccactgggtcctttgaacctagtttggctgggactcgccttcaggcggcgcggaggatttcgaggccctgaggcgcggcccttaatttccggaagtgggggccgcgccgcgccgt

SEQ ID NO: 633248 - DNA, 120 bp, Artificial Sequence
  ENSG00000180113_2 (sequence is synthesized)
caagatgtgctcgacgcccggaatgccggcgccgggggcctcgctggccctgcgggtgtccttcgtggacgtgcatcccgatgtgatcccggtgcagctgtgggggctggtgggcgagcg

SEQ ID NO: 633249 - DNA, 120 bp, Artificial Sequence
  ENSG00000180113_3 (sequence is synthesized)
gcggggcgagtacctgcggctgagccgggaaatccaggaagcggcggccacgcgcggccagtgggcgctgggcagcgcctcggcctcgcccggcgagctgtgcctggtgcaggtcgggct

SEQ ID NO: 633250 - DNA, 120 bp, Artificial Sequence
  ENSG00000180113_4 (sequence is synthesized)
tttgtggcaccgctgccgcgtggtcagccggcaggcacaggagagccgtgtcttcctgctggacgagggccgcaccatcacggccggagcaggctcgctggcgcctgggcgcagagagtt

SEQ ID NO: 633251 - DNA, 120 bp, Artificial Sequence
  ENSG00000180113_5 (sequence is synthesized)
cttcaatttgccctcggaagtgctgggctgcgtgctagcgggcctggtgccggcaggctgcggcgcgggctcaggcgagccgccgcagcactggcccgccgacgccgtggacttccttag

SEQ ID NO: 633252 - DNA, 120 bp, Artificial Sequence
  ENSG00000180113_6 (sequence is synthesized)
caaccttcagggcaaggaggtgcacgggtgcgtcctggacgtgctgctgctccatcgcctggtcctcctggaggtgcctgatgtgttccaacagatgcgggagctgggcctggctcggcg

SEQ ID NO: 633253 - DNA, 120 bp, Artificial Sequence
  ENSG00000180113_7 (sequence is synthesized)
ggtgcccgacagcctcttccgttcgctgctggagcgctatctcacagcggccactgctagcgtgggctccggggtcccggttctctcgcgagtcccgctcaagcaaaagcagcctggtct

SEQ ID NO: 633254 - DNA, 120 bp, Artificial Sequence
  ENSG00000180113_8 (sequence is synthesized)
ggattacttctatccccagctgcagctgggcgtgacggaggccgtggtcataacccaagtgtgccatccccaccgcattcactgccagctccgcagcgtctcgcaggagatccaccgcct

SEQ ID NO: 633255 - DNA, 120 bp, Artificial Sequence
  ENSG00000180113_9 (sequence is synthesized)
ctccgagagcatggcccaggtataccggggttccacggggacaggggatgagaactctaccagtgccacctgggaggagagggaggagagcccagataagccgggctctccgtgtgcatc

SEQ ID NO: 633256 - DNA, 120 bp, Artificial Sequence
  ENSG00000180113_10 (sequence is synthesized)
ctgtggcctggatggacattggtacagagcactgttgcttgagacttttcggccccagcgctgtgcccaggtgcttcatgtggactatggaaggaaggagttagtgagttgcagcagcct

SEQ ID NO: 633257 - DNA, 120 bp, Artificial Sequence
  ENSG00000180113_11 (sequence is synthesized)
tcggtacttgctgcctgaatattttcgaatgccggtggtgacctacccttgtgctttgtatggactctgggacggtgggagaggctggtctcggtcacaggtcggtgacctgaagacact

SEQ ID NO: 633258 - DNA, 120 bp, Artificial Sequence
  ENSG00000180113_12 (sequence is synthesized)
gatactaggcaaggcagtgaatgcaaagattgaattttattgctcctttgagcatgtgtattatgtcagcctgtatggagaagatgggattaatctgaaccgtgtgtttggagtacagtc

SEQ ID NO: 633259 - DNA, 120 bp, Artificial Sequence
  ENSG00000180113_13 (sequence is synthesized)
gtgttgcttggctgaccgagtccttcagagccaggcaacagaggaggaggaaccagaaacatctcagtctcagtctcctgctgaagaagtagatgaagagatttcactcccagccttaag

SEQ ID NO: 633260 - DNA, 120 bp, Artificial Sequence
  ENSG00000180113_14 (sequence is synthesized)
atctatcaggttaaagatgaatgccttctacgatgcgcaggtagagtttgttaaaaatccttctgagttttggattaggttgaggaaacacaatgtcaccttcagtaagctgatgaggag

SEQ ID NO: 633261 - DNA, 120 bp, Artificial Sequence
  ENSG00000180113_15 (sequence is synthesized)
aatgtgtggtttctattcctctgccagtaagctggatggtgtagttttgaaacctgaacctgatgacctttgctgtgtcaagtggaaagaaaatggttattatagggccatagtcaccaa

SEQ ID NO: 633262 - DNA, 120 bp, Artificial Sequence
  ENSG00000180113_16 (sequence is synthesized)
attggatgacaagagtgtggatgtattcttagttgaccgaggcaattcggaaaatgtggactggtatgacgtaaggatgctgcttcctcagtttaggcagctaccaatattggctgtgaa

SEQ ID NO: 633263 - DNA, 120 bp, Artificial Sequence
  ENSG00000180113_17 (sequence is synthesized)
gtgcaccctggctgatatttggcctttgggaaaaacttggagccaggaggcagtttccttttttaaaaagactgtgctccacaaagaattagtcatccatattcttgataaacaggatca

SEQ ID NO: 633264 - DNA, 120 bp, Artificial Sequence
  ENSG00000180113_18 (sequence is synthesized)
tcaatatgttattgagattcttgacgaatcaagaacaggggaagaaaacattagtaaggtaattgcccaagctggatatgccaagtatcaggaatttgaaacaaaggaaaatatcctggt

SEQ ID NO: 633265 - DNA, 120 bp, Artificial Sequence
  ENSG00000180113_19 (sequence is synthesized)
aaatgcccactccccagggcatgtttcaaaccactttactacggagagtaacaaaataccttttgccaagactggagaaggagagcagaaagccaagagagagaataaaaccacatctgt

SEQ ID NO: 633266 - DNA, 120 bp, Artificial Sequence
  ENSG00000180113_20 (sequence is synthesized)
ttcaaaagctttgagtgacacaacagttgtaacaaatggttcaactgaactagttgtgcaggaaaaagtgaaaagagcatctgtttattttcctcttatgcagaattgcttggaaattaa

SEQ ID NO: 633267 - DNA, 120 bp, Artificial Sequence
  ENSG00000180113_21 (sequence is synthesized)
gccaggctcctctagtaaaggagagctggaagttggaagtacagtagaagtcagagtgtcttatgttgaaaaccctggctatttctggtgtcagctgaccaggaacatacaaggacttaa

SEQ ID NO: 633268 - DNA, 120 bp, Artificial Sequence
  ENSG00000180113_22 (sequence is synthesized)
aactctaatgtctgatattcagtactattgcaaaaatacagctgctcctcaccagagaaacacccttgcttgtttggctaagcgaacagtaaacagacagtggtccagagcacttattag

SEQ ID NO: 633269 - DNA, 120 bp, Artificial Sequence
  ENSG00000180113_23 (sequence is synthesized)
tgggatacagtctgtggagcatgtcaatgtaacatttgtagattatggagacagagaaatggtatctgtgaagaatatttattcaattagtgaagaatttctgaaggttaaggcacaggc

SEQ ID NO: 633270 - DNA, 120 bp, Artificial Sequence
  ENSG00000180113_24 (sequence is synthesized)
ttttaggtgcagtctttataatttaattcaaccagttggccagaatccctttgtttgggatgtaaaggcaatacaagctttcaatgaatttatagataatgcatggcaaaaaaatctaga

SEQ ID NO: 633271 - DNA, 120 bp, Artificial Sequence
  ENSG00000180113_25 (sequence is synthesized)
attaaaatgtacaatatttgctctggcttcaattaatgaagaactgtttaacattgtggatttgctaaccccctttcagagtgcatgccatttcttggtagaaaagagacttgcaagacc

SEQ ID NO: 633272 - DNA, 120 bp, Artificial Sequence
  ENSG00000180113_26 (sequence is synthesized)
agtaaaacttcagaagcctttggagtcctctgttcagctacattcctacttctattctacacatgatatgaaaattggaagtgaagaattagtttatataacgcatattgatgacccttg

SEQ ID NO: 633273 - DNA, 120 bp, Artificial Sequence
  ENSG00000180113_27 (sequence is synthesized)
gacattttattgccagctggcaagaaatgcaaatattttagaacagttgtcatgtagtattacacaattaagtaaagttttgctgaatttaaaaacatctcccttgaaccctggaacctt

SEQ ID NO: 633274 - DNA, 120 bp, Artificial Sequence
  ENSG00000180113_28 (sequence is synthesized)
gtgccttgccaagtatactgatggaaactggtataggggcatagtaatagagaaagagccaaagaaagtcttctttgttgattttgggaatatttatgtagtaacaagtgatgatctgct

SEQ ID NO: 633275 - DNA, 120 bp, Artificial Sequence
  ENSG00000180113_29 (sequence is synthesized)
tccaatacctagtgatgcatatgatgtcttacttttgcccatgcaagctgtcagatgttcattatctgatattcctgatcatataccagaagaagtggtggtgtggtttcaggagactat

SEQ ID NO: 633276 - DNA, 120 bp, Artificial Sequence
  ENSG00000180113_30 (sequence is synthesized)
tttagataagtcattgaaggctttagttgtagcaaaagatccagatggaacactgattatagaactatatggtgacaatattcaaattagtgctagtattaataagaagttggggctact

SEQ ID NO: 633277 - DNA, 120 bp, Artificial Sequence
  ENSG00000180113_31 (sequence is synthesized)
tagttacaaagatagaataagaaaaaaagaaagtgaagtcctctgttctacaactgaaactcttgaagaaaaaaatgagaatatgaagttgccatgtacagagtatttaagtaaatcagt

SEQ ID NO: 633278 - DNA, 120 bp, Artificial Sequence
  ENSG00000180113_32 (sequence is synthesized)
agggtacaagttacctaataaagaaattttggaagagtcatataaacctcagatcaactcatcatacaaggaactcaaacttttacaaagtttaacaaaaacaaacttagtcactcaata

SEQ ID NO: 633279 - DNA, 120 bp, Artificial Sequence
  ENSG00000180113_33 (sequence is synthesized)
tcaagactctgtgggaaataaaaatagtcaagtgtttccattaacaacagaaaagaaagaagaaatttctgctgagacacccttgaaaacagcaagagtagaagctactctttcagagag

SEQ ID NO: 633280 - DNA, 120 bp, Artificial Sequence
  ENSG00000180113_34 (sequence is synthesized)
aaaaataggagattcatgtgacaaagatttgcctctgaaattttgtgagttcccacagaagactataatgcctggatttaaaacaactgtatatgtttctcatataaatgacctttcaga

SEQ ID NO: 633281 - DNA, 120 bp, Artificial Sequence
  ENSG00000180113_35 (sequence is synthesized)
cttttatgttcaactaatagaagatgaagctgaaattagtcatctttcagagagattaaacagtgttaaaacaaggcccgaatattatgtaggtccacctttgcaaagaggagatatgat

SEQ ID NO: 633282 - DNA, 120 bp, Artificial Sequence
  ENSG00000180113_36 (sequence is synthesized)
atgtgctgttttcccagaagataatttatggtatcgtgctgtgatcaaggagcaacaacccaatgaccttctctctgtgcagtttatagattatggcaatgtttctgtggttcatactaa

SEQ ID NO: 633283 - DNA, 120 bp, Artificial Sequence
  ENSG00000180113_37 (sequence is synthesized)
taaaaattctaagaaaatgatgcattacttttcccaacggaccagcgaggctgcaataagatgtgaatttgttaaatttcaagacagatgggaagttattcttgctgatgaacatgggat

SEQ ID NO: 633284 - DNA, 120 bp, Artificial Sequence
  ENSG00000180113_38 (sequence is synthesized)
catagcagatgatatgattagcaggtatgctctcagtgaaaaatctcaagtagaactttctacccaagtaattaaaagtgccagttcaaagtctgttaacaaatcagacattgacacttc

SEQ ID NO: 633285 - DNA, 120 bp, Artificial Sequence
  ENSG00000180113_39 (sequence is synthesized)
agtatttcttaactggtataatccagaaaaaaaaatgataagagcttatgccactgtgatagatggacctgagtacttttggtgtcagtttgctgatacggagaaacttcagtgtttaga

SEQ ID NO: 633286 - DNA, 120 bp, Artificial Sequence
  ENSG00000180113_40 (sequence is synthesized)
agtagaagtacagactgctggagaacaggtagcagacaggagaaattgtatcccatgtccttatattggagatccttgtatagtaagatacagagaagatggacattattatagggcact

SEQ ID NO: 633287 - DNA, 120 bp, Artificial Sequence
  ENSG00000180113_41 (sequence is synthesized)
tatcactaatatttgtgaagattatcttgtatctgtcaggcttgtggactttggaaacattgaagactgtgtggacccaaaagcactctgggccattccttctgaacttctgtcggttcc

SEQ ID NO: 633288 - DNA, 120 bp, Artificial Sequence
  ENSG00000180113_42 (sequence is synthesized)
catgcaagcctttccatgttgcctctcagggtttaacatttcagaaggattatgttctcaagagggaaatgactatttctatgaaataataacagaagatgtgttggaaataacaatact

SEQ ID NO: 633289 - DNA, 120 bp, Artificial Sequence
  ENSG00000180113_43 (sequence is synthesized)
agaaatcagaagggatgtttgtgatatccctttagcaattgttgacttgaaaagcaaaggtaaaagtattaatgagaaaatggagaaatattctaagactggtattaaaagtgctcttcc

SEQ ID NO: 633290 - DNA, 120 bp, Artificial Sequence
  ENSG00000180113_44 (sequence is synthesized)
ctatgaaaatattgactcagagataaagcagactcttgggtcctacaatcttgatgtaggacttaagaaattaagtaataaagctgtacaaaataaaatatatatggaacaacagacaga

SEQ ID NO: 633291 - DNA, 120 bp, Artificial Sequence
  ENSG00000180113_45 (sequence is synthesized)
tgagcttgctgaaataactgaaaaagatgtaaacattattggaaccaaaccaagtaacttccgtgaccctaaaactgataacatttgtgaagggtttgaaaacccctgcaaagataaaat

SEQ ID NO: 633292 - DNA, 120 bp, Artificial Sequence
  ENSG00000180113_46 (sequence is synthesized)
tgatactgaggaactggaaggtgaattagagtgccatctggttgacaaagcagagtttgatgataaatacctgattacaggatttaacacattactaccacatgctaatgaaacaaagga

SEQ ID NO: 633293 - DNA, 120 bp, Artificial Sequence
  ENSG00000180113_47 (sequence is synthesized)
gatactagaactgaattcacttgaggtgccgctttctcctgatgatgaatcaaaagaattcttagaactggaatctattgagttacagaattctctggtggtggatgaagaaaaagggga

SEQ ID NO: 633294 - DNA, 120 bp, Artificial Sequence
  ENSG00000180113_48 (sequence is synthesized)
gctaagcccggtgccaccgaatgtgccactctcccaagagtgtgtcacaaaaggcgccatggagctatttacactgcagcttcctctcagctgtgaagctgagaaacagccagaactaga

SEQ ID NO: 633295 - DNA, 120 bp, Artificial Sequence
  ENSG00000180113_49 (sequence is synthesized)
actacctacagcccagctgcctttagatgacaagatggatcctttgtctttaggagttagtcagaaagcacaggaatccatgtgtactgaggacatgagaaagtcaagttgtgtagaatc

SEQ ID NO: 633296 - DNA, 120 bp, Artificial Sequence
  ENSG00000180113_50 (sequence is synthesized)
ttttgatgaccagcgcaggatgtcattgcatctacatggagcagattgtgatcctaaaacacagaatgaaatgaatatatgtgaagaagaatttgtagagtataaaaacagggatgccat

SEQ ID NO: 633297 - DNA, 120 bp, Artificial Sequence
  ENSG00000180113_51 (sequence is synthesized)
ttcggcattgatgcctttgttctctgaggaagaaagcagtgatggaagcaagcacaataatggtttaccagatcatatctcagctcaactacagaacacctacactctgaaagcctttac

SEQ ID NO: 633298 - DNA, 120 bp, Artificial Sequence
  ENSG00000180113_52 (sequence is synthesized)
tgttggatctaaatgtgttgtgtggtcaagtctaagaaacacatggtctaaatgtgagattttagaaacagctgaagaaggaacaagggttttgaacctttcaaatggtatggaggagat

SEQ ID NO: 633299 - DNA, 120 bp, Artificial Sequence
  ENSG00000180113_53 (sequence is synthesized)
agtgaaccctgagaatgtctggaatggcatacccaaattggataagagtccacctgagaaaaggggtttggaggtgatggagatttaaccgtggatctatagctgtggccaatcagtcag

SEQ ID NO: 633300 - DNA, 120 bp, Artificial Sequence
  ENSG00000180113_54 (sequence is synthesized)
aagctgcccttgaacaagtggcatcttacgcagaccaacagagtatttgagaaaattgaaaacatgtaaccacaagaagttgtcattttcaaaaacttctatataggtggaaaacaaatt

SEQ ID NO: 633301 - DNA, 120 bp, Artificial Sequence
  ENSG00000180113_55 (sequence is synthesized)
aggtctcaggttgatggtggggtgtgtttatagtgatcctgttatatatacagatctgggatctttcgtctttattgtcttacgtttctaattagttgggaggatttattttgctaaaca

SEQ ID NO: 633302 - DNA, 120 bp, Artificial Sequence
  ENSG00000180113_56 (sequence is synthesized)
gtttactaacacattacatttcaaaaactattttggtacctttcaaatacagtgtttaaattaaaatagaaaaataagggctcatgacaagtacattatttgattctacttaggatagct

SEQ ID NO: 633303 - DNA, 120 bp, Artificial Sequence
  ENSG00000180113_57 (sequence is synthesized)
ttttagcaggatctccttcagaatttttgtcttgactttgaatctttgcctgtttgtctaaacatttgactaacattctgtttgaatttggaagtattctaatacaagatttgaataaag

SEQ ID NO: 633304 - DNA, 120 bp, Artificial Sequence
  ENSG00000180113_58 (sequence is synthesized)
tttatccttaaataaagtttatccttaatatgatggtctcattttattaaaaaggaaatagaactcttaaatatacttggttccatctctcctctgtaatggaggattggggaaagcata

SEQ ID NO: 633305 - DNA, 120 bp, Artificial Sequence
  ENSG00000180113_59 (sequence is synthesized)
gtaatattaaatgttagctcttatgtattagtcacttagcttatactttaaatgcattttttcactttattcatcaactttgaagtgcatatcaatattatccatattttataggtgaga

SEQ ID NO: 633306 - DNA, 120 bp, Artificial Sequence
  ENSG00000180113_60 (sequence is synthesized)
aaattgaagcttcataaagaggttaaataacttgcctaaggtcagatagctgatgagtctcagaggcttgatcaaacccagacctacctaactttgaagcccatgactttttaaacatga

SEQ ID NO: 633307 - DNA, 120 bp, Artificial Sequence
  ENSG00000180113_61 (sequence is synthesized)
ttttgcaaagcatagatcttagcttttagaaacagatctgagctatatgctgcttaacagatatgtgacatgggcaaattatgtaatattttgaactttgatcttcatctgtaaagtggt

SEQ ID NO: 633308 - DNA, 120 bp, Artificial Sequence
  ENSG00000180113_62 (sequence is synthesized)
gataataaaacctttcttgcagtgtttttttaagatgagaaataattgatataaagtccctgaaaaggagtaggcatttgataaatgtgtctttctttaccctgaaaaatactcagtgtg

SEQ ID NO: 633309 - DNA, 120 bp, Artificial Sequence
  ENSG00000180113_63 (sequence is synthesized)
cactatgttaggttatttctttttaaccttaacttattagatattttcaatagttattttctcctttcagcatcagcatgcgccaccaacaaaagactgtaaaaaacaaacaaacaaaaa

SEQ ID NO: 633310 - DNA, 120 bp, Artificial Sequence
  ENSG00000180113_64 (sequence is synthesized)
agtgttgaatgggacatccatacagttggaatgcttatttctaaaatgaatagggaaaaggtttgctaaatgagactggggtaaaggtgtatctctgtgaagcattatcagactctgaag

SEQ ID NO: 633311 - DNA, 120 bp, Artificial Sequence
  ENSG00000180113_65 (sequence is synthesized)
cctaatggaaatagaattatgaaccttaaaaacccattataatttccgtaagtagaagggagagaggtttgcattaaaagtaattgaggtagatgagtatattacttattcctggaataa

SEQ ID NO: 633312 - DNA, 120 bp, Artificial Sequence
  ENSG00000180113_66 (sequence is synthesized)
tgaatagacaagtttggcttactcatatagataatataatgtgaattgccagaagcaaagctcagagaagatgcattaggatcagattataggaagccttcaatttcaagctgagtttaa

SEQ ID NO: 633313 - DNA, 120 bp, Artificial Sequence
  ENSG00000180113_67 (sequence is synthesized)
ctccctattttaaaaaatttaatctgaatggctacagaagtaaaatttctcagaatgagtgactttgcacctgacaccactaagataggactagggtaccaaatgagtggtataaatttt

SEQ ID NO: 633314 - DNA, 120 bp, Artificial Sequence
  ENSG00000180113_68 (sequence is synthesized)
tatgtcccctgggaaataaaatcattttccatgattcccatatttataagtataaattcttaagctatatttttacctccatttaatcgtgttattctgttttactactacatatagaat

SEQ ID NO: 633315 - DNA, 120 bp, Artificial Sequence
  ENSG00000180113_69 (sequence is synthesized)
tgaaaacattaaataaaattaactggaatatgaagaagctaaatgtaattctgaatgttttattatccttcacagcctttgtgtgagtaactaatgtattctaactggaatccctgctat

SEQ ID NO: 633316 - DNA, 120 bp, Artificial Sequence
  ENSG00000180113_70 (sequence is synthesized)
atgctgtaatacctgtggaacctttctttagcaagtagaatgccttaaagaattaaagaaagtgtcaaaaaattaccaatttaatccactgcctttgcctcatctctaatattcttaacc

SEQ ID NO: 633317 - DNA, 120 bp, Artificial Sequence
  ENSG00000180113_71 (sequence is synthesized)
cttctctactccttttagtcatcatttgaaattgtgtagtaccaccaatcctgtgctgaaacaatggcttttgcttgttctaatttttcttaccgtgaccaaaagtcaaagagaagagct

SEQ ID NO: 633318 - DNA, 120 bp, Artificial Sequence
  ENSG00000180113_72 (sequence is synthesized)
gccaaattctacctagaatatcatgttgctataattaaactccactgcccatagtagataataaaaggcaagaaattgttttttactctatgtttagggagtcttgtatcattgcaacag

SEQ ID NO: 633319 - DNA, 120 bp, Artificial Sequence
  ENSG00000180113_73 (sequence is synthesized)
gttttcactgggattttgcctgttttaatctacttgtctgtcaaagtaatgtaaaaacagtttttaacttcgacactgaaaaggaatcatctttaaaattaaaatttaggctgatatgaa

SEQ ID NO: 633320 - DNA, 120 bp, Artificial Sequence
  ENSG00000180113_74 (sequence is synthesized)
ggtgataccactattaaagaaaaggggtttggaggtgatggagatttaaccgtggatctatagctgtggccaatcagtcagaagctgcccttgaacaagtggcatcttacgcagaccaac

SEQ ID NO: 633321 - DNA, 120 bp, Artificial Sequence
  ENSG00000180116_0 (sequence is synthesized)
aggttgggcctcaggcggtggaccagaaggagcttactcgggccctgacgttgtcaggaggccctgggggatcctgctgaagctgcgatttggcgcagagctgagatgtctgagctctag

SEQ ID NO: 633322 - DNA, 120 bp, Artificial Sequence
  ENSG00000180116_1 (sequence is synthesized)
acacagggacctcagtgtcaaaagatttgggaagatgaattgggtcggggggtcccggtccagggttctgatcaagcaggaaagaagaaagcaaaaggaatattttgaaaaacacaggtt

SEQ ID NO: 633323 - DNA, 120 bp, Artificial Sequence
  ENSG00000180116_2 (sequence is synthesized)
aaaatcaaaaatgaaatcactgggagttttatctcctgtcaaaaattctgctgtcagcttagacattcttaacctatatatggtaaatcagatatcttgcaagaagaaaattcctgaaac

SEQ ID NO: 633324 - DNA, 120 bp, Artificial Sequence
  ENSG00000180116_3 (sequence is synthesized)
tgtgagaaaaccaacccatgtgaacatgaatagagacataaaaatgcccctaagaaagcataatttagaacttacaatgtcgcctcactgtgtaccttctaaactctgccttgatgatac

SEQ ID NO: 633325 - DNA, 120 bp, Artificial Sequence
  ENSG00000180116_4 (sequence is synthesized)
agaaaccaatgtaaactgtcaaagactaagtagcaaggaagatcttggcccagtccagtcacaaggcatggactcatatagtatgcttcaccctcagttcagcaaaatagagaactgcag

SEQ ID NO: 633326 - DNA, 120 bp, Artificial Sequence
  ENSG00000180116_5 (sequence is synthesized)
tttcactccatcatctttttcagtggagttaccttctaacagacatatttcaaaactaaatttcacatctggaatagcacctactcctcagaaacttgcatatgaaaaaaagcagaatga

SEQ ID NO: 633327 - DNA, 120 bp, Artificial Sequence
  ENSG00000180116_6 (sequence is synthesized)
ccagcgcagtactgttaactgttctgattccttgctttccaaattaaataaaagtcaagatgttttcagtccatcacataaaactacacgatttgggacattatttgaaagattaaacag

SEQ ID NO: 633328 - DNA, 120 bp, Artificial Sequence
  ENSG00000180116_7 (sequence is synthesized)
tctaggaaataggaatttacttactaaaagccctgctgtaattatggatgaagattgtagaagcacggatgaaataagacagtcagactacattactgaaaaacactcaatacagcatat

SEQ ID NO: 633329 - DNA, 120 bp, Artificial Sequence
  ENSG00000180116_8 (sequence is synthesized)
ttgggggaaaaatggaaaggaagtttcaaattttcttgaagatgtgaaccagtctactcctaaccttctatcagagaattgtgactcttttgttagtcaaaatatgatcaatgtattaaa

SEQ ID NO: 633330 - DNA, 120 bp, Artificial Sequence
  ENSG00000180116_9 (sequence is synthesized)
catagatgagcaaaggataaagaaaacatttaacaagtgtgattatgatagtatgggagatacttgtgtagtcactagttctgataaaaaccatgtcactgacagatgcattagaaacat

SEQ ID NO: 633331 - DNA, 120 bp, Artificial Sequence
  ENSG00000180116_10 (sequence is synthesized)
ttttacagttccagagttgacttttagtaattcgactttgaataaaacaagttatccagaaaaatgtcagccaaacaagaagtatcagagagagtataacaaaaatgaaagaaatgatct

SEQ ID NO: 633332 - DNA, 120 bp, Artificial Sequence
  ENSG00000180116_11 (sequence is synthesized)
aacgattactacccaagcagctctgaaagaaaagaaaaatttgaaaatgattaccaagagaagacaccacagaaaagtattcagaaatatccagcaaactctatgggaaatataccttcg

SEQ ID NO: 633333 - DNA, 120 bp, Artificial Sequence
  ENSG00000180116_12 (sequence is synthesized)
gaagaattgcactctaagcagtcatgggactttggacttgatgagattctgatggaagaaggaggaatatattctttaaaaagcaagcgaatatctactaagaaaatctctcttgattct

SEQ ID NO: 633334 - DNA, 120 bp, Artificial Sequence
  ENSG00000180116_13 (sequence is synthesized)
gcacagagtagtcggtctactagttactctccaagaccaacagacagctgtttcagttctagttcagatttgccatctgaagatgaagatcaaatatcacagcaaattgaagattcaaat

SEQ ID NO: 633335 - DNA, 120 bp, Artificial Sequence
  ENSG00000180116_14 (sequence is synthesized)
aggatgaccatcaaaaccaaggaaaaaatgaataatttttatgtagaaaggatggcaaaactttcaggtgacaggattgttaaaaacgatgacaaaattcacaaacagaatgagaatttc

SEQ ID NO: 633336 - DNA, 120 bp, Artificial Sequence
  ENSG00000180116_15 (sequence is synthesized)
taccagttctcagtgaaaaataatacagatcagtttccacagttgcagtgcaattcagcccacattttgcaaaacaaaaccaatgataactgcgttctgcaggctgcaaggtgtgatgca

SEQ ID NO: 633337 - DNA, 120 bp, Artificial Sequence
  ENSG00000180116_16 (sequence is synthesized)
gggatacaaacagagagtgaatctgtaatggaggaaaaattagatgttgccatacagtgtgatctaatttcaaaatgtacatgtagaagtgatgtttctctttgcaaccttgaaaggtgc

SEQ ID NO: 633338 - DNA, 120 bp, Artificial Sequence
  ENSG00000180116_17 (sequence is synthesized)
agtggaaatattaaggcagataccactggagggcaggaaatccataagaacaactaatattctaaaatctctacctaggatgtagaatttcacttgcccttagaaaacaacagtaaatgt

SEQ ID NO: 633339 - DNA, 120 bp, Artificial Sequence
  ENSG00000180116_18 (sequence is synthesized)
tgaaaatttcattaacatgataagaaatgagaaaaagtagctaagcataagctgacagtgttcagggtgtatattcacggttcatgttaaaacattttaatattattaatgtatgtattt

SEQ ID NO: 633340 - DNA, 120 bp, Artificial Sequence
  ENSG00000180116_19 (sequence is synthesized)
aatttgtatatagccatttccttaatagctttggtatatggtagagtttttagaaaataatatatttgtaaatgtactagcgtttttatgtgattattcagtatattacaatgatgcgct

SEQ ID NO: 633341 - DNA, 120 bp, Artificial Sequence
  ENSG00000180116_20 (sequence is synthesized)
gttatttatgggttaaaatatgcttaattgcttccttccttgtagcatttattttaatattctttgcagttgcattttctggcaaaaatgttccctttcaagatatttaagatagaaaat

SEQ ID NO: 633342 - DNA, 120 bp, Artificial Sequence
  ENSG00000180116_21 (sequence is synthesized)
attttatgtcctcattataataattttgttagctacttctctttaatattacagtcctatttaaaaattctagcattaatttgtagataacacatatcttctatttgcataacatagttt

SEQ ID NO: 633343 - DNA, 120 bp, Artificial Sequence
  ENSG00000180116_22 (sequence is synthesized)
ttgcataacatagtttttttgttggtgctattaattcaaaggaaaatgttctgtaggattaaaagatgttttaatgtttttataaaataattgtttgaaattaaaaaatgatttatgtta

SEQ ID NO: 633344 - DNA, 120 bp, Artificial Sequence
  ENSG00000180116_23 (sequence is synthesized)
gttgatgttaaatttattccttaaaagtttgagaactgccttccaggcttttctgaataatgacctgcaattataagtaactaaagaaaactttattttagctagtagtttctagctaaa

SEQ ID NO: 633345 - DNA, 120 bp, Artificial Sequence
  ENSG00000180116_24 (sequence is synthesized)
tctccaagaccaacagacagctgtttcagttctagttcagatttggacacatgccgtgggtatcctgagctgccatttaagaagtctagctaccctaaagcctccatgctggagagacca

SEQ ID NO: 633346 - DNA, 120 bp, Artificial Sequence
  ENSG00000180116_25 (sequence is synthesized)
tgtggagggaccacacaaagattgacagtaagatgcttgagaagtcccagctttcccagccccagcgttttgggtcttctcagcccaagcactagatgtgcagccccagcccatgcctgg

SEQ ID NO: 633347 - DNA, 120 bp, Artificial Sequence
  ENSG00000180116_26 (sequence is synthesized)
gaaaaacttccgctattcctttgctgactgcaggaatgcttgagatgcatggacctattcatttttaaaaatttattgagcacagggtccggttccaagatggttgaataggaacagctc

SEQ ID NO: 633348 - DNA, 120 bp, Artificial Sequence
  ENSG00000180116_27 (sequence is synthesized)
gggtgatttctgcatttccaactgaggattggacaattaaatgaggatttttctgcccactgatactgacatgttctgcactattcaggtgtccgttattcaggtgcaaagaagacaaga

SEQ ID NO: 633349 - DNA, 120 bp, Artificial Sequence
  ENSG00000180116_28 (sequence is synthesized)
tcaggtgtccgttattcaggtgcaaagaagacaagatataaaataaggcccagaagtgcagtccaggagtatggagtagggcagaaattgaaactgaaactgtggaacgagaaaccatgg

SEQ ID NO: 633350 - DNA, 120 bp, Artificial Sequence
  ENSG00000180116_29 (sequence is synthesized)
ataagggaggactacagtacatcaaatggaccaatcatggctttctgcaggtcctcatattatgtagcctgtcattcagggatatgtgatctgaatgacaataagaagccagacgtatgt

SEQ ID NO: 633351 - DNA, 120 bp, Artificial Sequence
  ENSG00000180116_30 (sequence is synthesized)
gaagatggtggaaggacattctatgagtaaacagcaagtgcaacgtaacgttgattacaattcacctacccattactttggaaatagaatgaggtgcatctcaccaaccatcctcctgca

SEQ ID NO: 633352 - DNA, 120 bp, Artificial Sequence
  ENSG00000180116_31 (sequence is synthesized)
gaaagccctctgacctgtgaaacaggaagctgtaaatgtctggaaagtatgtggattggacacatgtcttggattaaattatcttacacgccactggaatgaacctgcctgattctccac

SEQ ID NO: 633353 - DNA, 120 bp, Artificial Sequence
  ENSG00000180116_32 (sequence is synthesized)
tttctctgcttcattctgagcgttcttgcctcccctgggtactggaaagagaatggagccttagaatcaatgctcccaacccacccattctttttcccggcactttccacctttacaact

SEQ ID NO: 633354 - DNA, 120 bp, Artificial Sequence
  ENSG00000180116_33 (sequence is synthesized)
acgcctccaaaagtttcagtctattgcagctatggtgggagccacataggaacttctcagggatgcaaaattcatgaaccacaattccctggccagaagaaccacatagacttatctatt

SEQ ID NO: 633355 - DNA, 120 bp, Artificial Sequence
  ENSG00000180116_34 (sequence is synthesized)
accaggatcggagagagcgggcccctttcttcctagatttcactttttctcttaatttattctgacaatgaggagacagaaaaagctgcatgatagtgatgtagagtctaatggtgtatc

SEQ ID NO: 633356 - DNA, 120 bp, Artificial Sequence
  ENSG00000180116_35 (sequence is synthesized)
tctggatacacaaagagccatctcaggtaacaactttaatccttgaaatgagactattatcttcctgttaattattccattatttcctaatgtttttaataataaaaccccccaaacaac

SEQ ID NO: 633357 - DNA, 120 bp, Artificial Sequence
  ENSG00000180138_0 (sequence is synthesized)
tttgtggttggctgaggtggaggaacaaaatggcggcgccggcggcgtgaccgggccctctggcccacagccgttggtagcggtggcagcagtactgctgccccaactcgctgtgccccc

SEQ ID NO: 633358 - DNA, 120 bp, Artificial Sequence
  ENSG00000180138_1 (sequence is synthesized)
tttctcagcccacgacatcgccacgacagcgaggcagcgaccgccaccgagaaagaggtggtggcccagcctggaaccttgagaaaccctcgcaaactgtggcctggcggaaatcctggt

SEQ ID NO: 633359 - DNA, 120 bp, Artificial Sequence
  ENSG00000180138_2 (sequence is synthesized)
gtgctgcagggatcaggctgactccacgccctgtaacaccgggaaacgcctcggtggccatttccagcagccctcatcctcagccttgcgggccggtgggccccggaggcctccatcctc

SEQ ID NO: 633360 - DNA, 120 bp, Artificial Sequence
  ENSG00000180138_3 (sequence is synthesized)
ccctagaggggtcagggctgagcccagcctccatctttgcctctcaggatgacaaacaacagcggctccaaagccgaactcgttgtgggagggaaatacaaactggtgcggaagatcggg

SEQ ID NO: 633361 - DNA, 120 bp, Artificial Sequence
  ENSG00000180138_4 (sequence is synthesized)
tctggctcctttggagacgtttatctgggcatcaccaccaccaacggcgaggacgtagcagtgaagctggaatctcagaaggtcaagcacccccagttgctgtatgagagcaaactctac

SEQ ID NO: 633362 - DNA, 120 bp, Artificial Sequence
  ENSG00000180138_5 (sequence is synthesized)
acgattcttcaaggtggggttggcatcccccacatgcactggtatggtcaggaaaaagacaacaatgtgctagtcatggaccttctgggacccagcctcgaagacctctttaatttctgt

SEQ ID NO: 633363 - DNA, 120 bp, Artificial Sequence
  ENSG00000180138_6 (sequence is synthesized)
tcaagaaggttcaccatgaaaactgtacttatgttagccgaccagatgatcagcagaattgaatacgtgcatacaaagaattttctacaccgagacattaaaccagataacttcctgatg

SEQ ID NO: 633364 - DNA, 120 bp, Artificial Sequence
  ENSG00000180138_7 (sequence is synthesized)
ggtactgggcgtcactgtaataagttgttccttattgattttggtttggccaaaaagtacagagacaacaggaccaggcaacacataccgtacagagaagataaacacctcattggcact

SEQ ID NO: 633365 - DNA, 120 bp, Artificial Sequence
  ENSG00000180138_8 (sequence is synthesized)
gtccgatatgccagcatcaatgcacatcttggtattgagcagagccgccgagatgacatggaatccttaggctacgttttcatgtattttaatagaaccagcctgccgtggcaaggacta

SEQ ID NO: 633366 - DNA, 120 bp, Artificial Sequence
  ENSG00000180138_9 (sequence is synthesized)
agggctatgacaaaaaaacaaaaatatgaaaagattagtgagaagaagatgtccacccctgttgaagttttatgtaaggggtttcctgcagaattcgccatgtacttgaactactgtcgt

SEQ ID NO: 633367 - DNA, 120 bp, Artificial Sequence
  ENSG00000180138_10 (sequence is synthesized)
cgctttgaggaagtcccagattacatgtatctgaggcagctattccgcattcttttcaggaccctgaaccaccaatatgactacacatttgattggacgatgttaaagcagaaagcagca

SEQ ID NO: 633368 - DNA, 120 bp, Artificial Sequence
  ENSG00000180138_11 (sequence is synthesized)
cagcaggcagcctcttccagtgggcagggtcagcaggcccaaacccagacaggcaagcaaactgaaaaaaacaagaataatgtgaaagataactaagcgtgaatgaggaacagaagaagc

SEQ ID NO: 633369 - DNA, 120 bp, Artificial Sequence
  ENSG00000180138_12 (sequence is synthesized)
agagcagatgattcgagcagcatttgtttctccccacatctagaaattgtagttcatatgtacaccagctagtggctgtgaacaaccatttagttggtgtaaaaaactttatttcaatat

SEQ ID NO: 633370 - DNA, 120 bp, Artificial Sequence
  ENSG00000180138_13 (sequence is synthesized)
aaactgactctggggagcgttggtgatgctgtatcccaaagtgtagcctctgtaattgtgaatattaactgaggtagtgaaacgtggtgtctggttttctattgcatttattcaagtaga

SEQ ID NO: 633371 - DNA, 120 bp, Artificial Sequence
  ENSG00000180138_14 (sequence is synthesized)
aaagttaactaaatggttgacacacacgaattggtggagacattgtccatatgccaattttttgttaaaaccttttattttgaactagactgctttgagatatcatttcagaaggacagt

SEQ ID NO: 633372 - DNA, 120 bp, Artificial Sequence
  ENSG00000180138_15 (sequence is synthesized)
attcagccacagctgcaaaggttgtaaatgcttatgattgagcatttttagggtttctccatccctggggtttgcaaattgttcacataaagagcattcttaaaatggttggcttcttgt

SEQ ID NO: 633373 - DNA, 120 bp, Artificial Sequence
  ENSG00000180138_16 (sequence is synthesized)
ctgtaagccagctgatctagtagtaaccaaaaattccagttttgagaataggaaagattccgcctgcttacctgtgaagacataagaaaatcttagtaactaccagattatctttagaat

SEQ ID NO: 633374 - DNA, 120 bp, Artificial Sequence
  ENSG00000180138_17 (sequence is synthesized)
tccacattaactatatcatgttctcggtattttaaaaacaacaacaaccatatttgtcacagaaatttagttaacatcttacaactgaacatgtatgtacatggcttagataaatgtaat

SEQ ID NO: 633375 - DNA, 120 bp, Artificial Sequence
  ENSG00000180138_18 (sequence is synthesized)
caccgtaaacacccatatgatctgggattttgttcatattttgaaatgggagcttttatgttttacaagttcactaaaatctgaaaactgtttctataaggaaataatacttttttaaac

SEQ ID NO: 633376 - DNA, 120 bp, Artificial Sequence
  ENSG00000180138_19 (sequence is synthesized)
aacaaccaaaaaatgccttgctgattcactaggaaataaaaatctccccaattttttgatagtcaacttcgagccatttgttacatgatattcccttgcaagtaaattttatttcattat

SEQ ID NO: 633377 - DNA, 120 bp, Artificial Sequence
  ENSG00000180155_0 (sequence is synthesized)
ggcaggcctggggcggggcctgcggtgagctcgcgctgggcgggctgttccgggggcgggactgggctgggcctgcggtgagcatcaggcgatgcggcacgggtgctgcgggacacacag

SEQ ID NO: 633378 - DNA, 120 bp, Artificial Sequence
  ENSG00000180155_1 (sequence is synthesized)
acacacagacacgcctacgattagactcaggcaggcacctaccggcgagcggccgcgggtgactcccaggcgcggcggtacctcacggtggtgaaggtcacagggttgcagcactcccag

SEQ ID NO: 633379 - DNA, 120 bp, Artificial Sequence
  ENSG00000180155_2 (sequence is synthesized)
tagaccaggagctccgggaggcagggccggccccacgtcctctgcgcaccaccctgagttggatcctctgtgcgccacccctgagttggatccagggctagctgctgttgacctccccac

SEQ ID NO: 633380 - DNA, 120 bp, Artificial Sequence
  ENSG00000180155_3 (sequence is synthesized)
tcccacgctgccctcctgcctgcagccatgacgcccctgctcaccctgatcctggtggtcctcatgggcttacctctggcccaggccttggactgccacgtgtgtgcctacaacggagac

SEQ ID NO: 633381 - DNA, 120 bp, Artificial Sequence
  ENSG00000180155_4 (sequence is synthesized)
aactgcttcaaccccatgcgctgcccggctatggttgcctactgcatgaccacgcgcacctactacacccccaccaggatgaaggtcagtaagtcctgcgtgccccgctgcttcgagact

SEQ ID NO: 633382 - DNA, 120 bp, Artificial Sequence
  ENSG00000180155_5 (sequence is synthesized)
gtgtatgatggctactccaagcacgcgtccaccacctcctgctgccagtacgacctctgcaacggcaccggccttgccaccccggccaccctggccctggcccccatcctcctggccacc

SEQ ID NO: 633383 - DNA, 120 bp, Artificial Sequence
  ENSG00000180155_6 (sequence is synthesized)
ctctggggtctcctctaaagcccccgaggcagacccactcaagaacaaagctctcgagacacactgctacaccctcgcacccagctcaccctgcctcaccctccacactccctgcgacct

SEQ ID NO: 633384 - DNA, 120 bp, Artificial Sequence
  ENSG00000180155_7 (sequence is synthesized)
cctcagccatgcccagggtcaggactgtgggcaagaagacacccgacctcccccaaccaccacacgacctcacttcgaggccttgacctttcgatgctgtgtgggatcccaaaagtgtcc

SEQ ID NO: 633385 - DNA, 120 bp, Artificial Sequence
  ENSG00000180155_8 (sequence is synthesized)
ggctttgatgggctgatcagcccctcgcctgtccagggctatttatggggaggggcccagtcaggcagggagcactgagcagatgggagctgtggccaagcccaccttctgggaagccct

SEQ ID NO: 633386 - DNA, 120 bp, Artificial Sequence
  ENSG00000180155_9 (sequence is synthesized)
aggagaggcccctgcctcagtctgcccctggtgtgctggggcagggggaagacaaggaatgcccgcaggtggggtggtggggagactcttaggaggaaaggctcctccaggcctagtcac

SEQ ID NO: 633387 - DNA, 120 bp, Artificial Sequence
  ENSG00000180155_10 (sequence is synthesized)
gcttcctactgaggccaggagctgccaggaccggtacgggatcagggctgtgggaggagggcctttggcaccggcccctgtgctaggaagtctgccaggcccgagttggagccaccccct

SEQ ID NO: 633388 - DNA, 120 bp, Artificial Sequence
  ENSG00000180155_11 (sequence is synthesized)
gcaggggagggggcggctctgcctcagcaggccccagggcccccgaagtcacagaagctttttcgggtccagcaaggggtgtgtgtcctctcagtcaaaccccttgacgtttcccacccc

SEQ ID NO: 633389 - DNA, 120 bp, Artificial Sequence
  ENSG00000180155_12 (sequence is synthesized)
ctcacggggagggcaccaggcctgaagctggcaggagctagggccatgctatatttggtgggtcctggacgctgacccggccagcgctattctgggcagggagggaaaggggcagagcag

SEQ ID NO: 633390 - DNA, 120 bp, Artificial Sequence
  ENSG00000180155_13 (sequence is synthesized)
gtggtcccccgagtcctggtccccaaccacagcaggacccagccgagcaaggcaaaagacgcaggactgggggatgcgcgcacaggctgggggttgggagcagcctggggccggcgcggg

SEQ ID NO: 633391 - DNA, 120 bp, Artificial Sequence
  ENSG00000180155_14 (sequence is synthesized)
cctgggcgtgggaaggcggagcatgccaccctctcgtggccgtgcgggggcgggagtggggagggtggggtggggagggcggagacccagcccctcccccgcagcgggatgcgcacagtg

SEQ ID NO: 633392 - DNA, 120 bp, Artificial Sequence
  ENSG00000180155_15 (sequence is synthesized)
agtgggtccctccatcaccttccacctggggatgcacccactgggagggcagggtggaagccccagctgggtgtgtggactcccagggaccccaccccaggcctgggaagcaggggtcag

SEQ ID NO: 633393 - DNA, 120 bp, Artificial Sequence
  ENSG00000180155_16 (sequence is synthesized)
cccaacacgcaccaatccatccccgatgcaggtagcccagggagcacctgcccctgctgtgaatggggcattcgggggcgtgagaccttttggtgccagcggtcacgctgcacctgaggc

SEQ ID NO: 633394 - DNA, 120 bp, Artificial Sequence
  ENSG00000180155_17 (sequence is synthesized)
ccccacctgaccagtgctcccagctctggtgtcctgagaaacccttcaagccatcccgcatgggcaggatggtgacatatccatgtggtaggattgtcccggccccaaagtatggccctg

SEQ ID NO: 633395 - DNA, 120 bp, Artificial Sequence
  ENSG00000180155_18 (sequence is synthesized)
gtcaggggagcccctgctggaaattgcatctccagagctttgatgcaggacccctgggggatcagggaatgagggtctccaccccaggggtctccttgcagtgagtctatatgcaggcct

SEQ ID NO: 633396 - DNA, 120 bp, Artificial Sequence
  ENSG00000180155_19 (sequence is synthesized)
tgcccagcttcagtctcctgagaacatgaggatgggagggggcagagtcttgctgagggcacacccagttcccgctggaggaggacagtgccagtcttctgcaaagggaccttgggtggg

SEQ ID NO: 633397 - DNA, 120 bp, Artificial Sequence
  ENSG00000180155_20 (sequence is synthesized)
aacgggcccggagcgggaggaacgtgactccccagagggaagatgggcatcatactgggcccagagctgggaaggagttgctgccagcacagggtgggcctggactcccctcgcccctac

SEQ ID NO: 633398 - DNA, 120 bp, Artificial Sequence
  ENSG00000180155_21 (sequence is synthesized)
ccccagtggttgtggctgtagccctaagcctggagagcaggaccggcccggggtgtctgggaggctgccaggtgcctcccagagctcccaagggcccccacctgcaagtgccagcctcag

SEQ ID NO: 633399 - DNA, 120 bp, Artificial Sequence
  ENSG00000180155_22 (sequence is synthesized)
ggcagtgcccaaatgaggccctctcagctgcagccagcgatgccttgggatgcttaccgggagggaggcggctttgggctcctaagtccttgggagaggctgggagcagtcactgcgcgg

SEQ ID NO: 633400 - DNA, 120 bp, Artificial Sequence
  ENSG00000180155_23 (sequence is synthesized)
cttgcgcaagcccattgtcgggttgggtggcttcctcagccagggctgggagggactccaggatcaggtcctccctgtctcgagtctcagtggggtgatggggaggagacctggccaccc

SEQ ID NO: 633401 - DNA, 120 bp, Artificial Sequence
  ENSG00000180155_24 (sequence is synthesized)
atggctcaggggcagctgagaacaaggacctgctggagctggaagtgctgtggtgttgaggggtggggtgggcagcttctcacacctgcctcctgcctccttctgtccacctttccacca

SEQ ID NO: 633402 - DNA, 120 bp, Artificial Sequence
  ENSG00000180155_25 (sequence is synthesized)
ccctgacctgtcccagccccacacatggttctgcctggctggcctgcccttggcacctggcgtagagcacacagaaggcactcagctaatgctgggcaggcccactcatggggagtgcgt

SEQ ID NO: 633403 - DNA, 120 bp, Artificial Sequence
  ENSG00000180155_26 (sequence is synthesized)
ggctgtgcagcaccagggaaccggcacagcagcgccggcagaaatcacagcagtaaacttgtccgggttgtatgcatcaaggtggcgatggacgtgggtccccccactgcactgtggccc

SEQ ID NO: 633404 - DNA, 120 bp, Artificial Sequence
  ENSG00000180155_27 (sequence is synthesized)
tgagcactgtatagcagcccggcaatgggagccattatcttgcccctttgacagaggaggacacagaggcacagggaggtgaagtagctgccccacactagtgcctcctcgctcactcac

SEQ ID NO: 633405 - DNA, 120 bp, Artificial Sequence
  ENSG00000180155_28 (sequence is synthesized)
caccccctgcaccacagtgcagccgcttctcccaccagctggggttccttggacccccaagcctgggaagggggaggtgagtttacaaaatggaaagcttaaaaggagaaaagtggaacc

SEQ ID NO: 633406 - DNA, 120 bp, Artificial Sequence
  ENSG00000180155_29 (sequence is synthesized)
agaggtttgagaagccctgagtggtagagtaaggcctccagcgctgcctctgggtgcagggcagagtggcagaggagagggggagaggcactgggcaccatgggggcccagttcccactt

SEQ ID NO: 633407 - DNA, 120 bp, Artificial Sequence
  ENSG00000180155_30 (sequence is synthesized)
cggggatctctctcgcagaaccgagggtccccttcatgggggtagatgcccagggctagctgttgccactgtctgtgtggacctgagtcctggacatgcccgagtgactcaggagtggct

SEQ ID NO: 633408 - DNA, 120 bp, Artificial Sequence
  ENSG00000180155_31 (sequence is synthesized)
gcttgggcgggctctgtcaccctaggatgttatacattctgggaactggacaggagtggctgcttgggcgggctctggcaccctgggatgttatacattctgggaactggacaggagtgg

SEQ ID NO: 633409 - DNA, 120 bp, Artificial Sequence
  ENSG00000180155_32 (sequence is synthesized)
ctgcttgggtgggctctggcaccctgggatgttatacattctgggaactgcaatcagccactagagaagtcggagctacaggaagtgaccctggggtgggacctggggacatggccaggt

SEQ ID NO: 633410 - DNA, 120 bp, Artificial Sequence
  ENSG00000180155_33 (sequence is synthesized)
cagcatggggacacccggctccagcaggagctctggtctgtcctggggtctttgggggcagggctgcggccctgggcaggcttcctccaggcggaggtcctggggaagtgggggagccag

SEQ ID NO: 633411 - DNA, 120 bp, Artificial Sequence
  ENSG00000180155_34 (sequence is synthesized)
gccagctgccgcctcccccactatgtagcatctgattcgtcatctctcatgaaggcgatttggttcataactctgaaactctgaaaaaggtcaaaagaagcagagaggccctcggtggat

SEQ ID NO: 633412 - DNA, 120 bp, Artificial Sequence
  ENSG00000180155_35 (sequence is synthesized)
atgccagcttttctgccggtgctttctcccactactctgggtggtctgctctcctcttcaaacctcagctcgcagggagggcctgaatctgccagcccctcaggatctccttccctctgg

SEQ ID NO: 633413 - DNA, 120 bp, Artificial Sequence
  ENSG00000180155_36 (sequence is synthesized)
gccctccccagccttaaggagcctcccagacagaagggtggacagagccacctgggcagcccgagagacacacgggggtcctccctgtggacagccctgccagcttccgcccagccctga

SEQ ID NO: 633414 - DNA, 120 bp, Artificial Sequence
  ENSG00000180155_37 (sequence is synthesized)
gcttcatttgcatcttgaggagtaaggggtggtgaaatgggaatgctggtctggctcagctggtcgtgggcataagtgcccgctgaatggatggcatctctccctcctgtcttatgttct

SEQ ID NO: 633415 - DNA, 120 bp, Artificial Sequence
  ENSG00000180155_38 (sequence is synthesized)
ggggtccaggtgcttcccagggccatgcccctgctgctaatgcttgccctaacccttaccctaaccagcgtccagcgtcgtctcaccgagccgtaaataaatcaacagattcgcattgtc

SEQ ID NO: 633416 - DNA, 120 bp, Artificial Sequence
  ENSG00000180155_39 (sequence is synthesized)
gagggggttgggaagctcgaagccgcaggcctgactctggcctttggcatcctggggttggcctgggcaaatgtgtcgtgagagacggatttgttgttctcgggaaggcggttgcagcac

SEQ ID NO: 633417 - DNA, 120 bp, Artificial Sequence
  ENSG00000180155_40 (sequence is synthesized)
gacaccccaggagcagagaggaggggaacagcgagaagagacccagcttttgggcccagtcctgccatggccagccatccggcccccagggccctgcttgggatggggctgcagaccacc

SEQ ID NO: 633418 - DNA, 120 bp, Artificial Sequence
  ENSG00000180176_0 (sequence is synthesized)
ggacccagagggggctttgacgtcagctcagcttataagaggctgctgggccagggctgtggagacggagcccggacctccacactgagccatgcccacccccgacgccaccacgccaca

SEQ ID NO: 633419 - DNA, 120 bp, Artificial Sequence
  ENSG00000180176_1 (sequence is synthesized)
ggccaagggcttccgcagggccgtgtctgagctggacgccaagcaggcagaggccatcatgtccccgcggttcattgggcgcaggcagagcctcatcgaggacgcccgcaaggagcggga

SEQ ID NO: 633420 - DNA, 120 bp, Artificial Sequence
  ENSG00000180176_2 (sequence is synthesized)
ggcggcggtggcagcagcggccgctgcagtcccctcggagcccggggaccccctggaggctgtggcctttgaggagaaggaggggaaggccgtgctaaacctgctcttctccccgagggc

SEQ ID NO: 633421 - DNA, 120 bp, Artificial Sequence
  ENSG00000180176_3 (sequence is synthesized)
caccaagccctcggcgctgtcccgagctgtgaaggtgtttgagacgtttgaagccaaaatccaccatctagagacccggcccgcccagaggccgcgagctgggggcccccacctggagta

SEQ ID NO: 633422 - DNA, 120 bp, Artificial Sequence
  ENSG00000180176_4 (sequence is synthesized)
cttcgtgcgcctcgaggtgcgccgaggggacctggccgccctgctcagtggtgtgcgccaggtgtcagaggacgtgcgcagccccgcggggcccaaggtcccctggttcccaagaaaagt

SEQ ID NO: 633423 - DNA, 120 bp, Artificial Sequence
  ENSG00000180176_5 (sequence is synthesized)
gtcagagctggacaagtgtcatcacctggtcaccaagttcgaccctgacctggacttggaccacccgggcttctcggaccaggtgtaccgccagcgcaggaagctgattgctgagatcgc

SEQ ID NO: 633424 - DNA, 120 bp, Artificial Sequence
  ENSG00000180176_6 (sequence is synthesized)
cttccagtacaggcacggcgacccgattccccgtgtggagtacaccgccgaggagattgccacctggaaggaggtctacaccacgctgaagggcctctacgccacgcacgcctgcgggga

SEQ ID NO: 633425 - DNA, 120 bp, Artificial Sequence
  ENSG00000180176_7 (sequence is synthesized)
aggagcgcacgggcttccagctgcggcctgtggccggcctgctgtccgcccgggacttcctggccagcctggccttccgcgtgttccagtgcacccagtatatccgccacgcgtcctcgc

SEQ ID NO: 633426 - DNA, 120 bp, Artificial Sequence
  ENSG00000180176_8 (sequence is synthesized)
ccatgcactcccctgagccggactgctgccacgagctgctggggcacgtgcccatgctggccgaccgcaccttcgcgcagttctcgcaggacattggcctggcgtccctgggggcctcgg

SEQ ID NO: 633427 - DNA, 120 bp, Artificial Sequence
  ENSG00000180176_9 (sequence is synthesized)
atgaggaaattgagaagctgtccacgctgtactggttcacggtggagttcgggctgtgtaagcagaacggggaggtgaaggcctatggtgccgggctgctgtcctcctacggggagctcc

SEQ ID NO: 633428 - DNA, 120 bp, Artificial Sequence
  ENSG00000180176_10 (sequence is synthesized)
tgcactgcctgtctgaggagcctgagattcgggccttcgaccctgaggctgcggccgtgcagccctaccaagaccagacgtaccagtcagtctacttcgtgtctgagagcttcagtgacg

SEQ ID NO: 633429 - DNA, 120 bp, Artificial Sequence
  ENSG00000180176_11 (sequence is synthesized)
ccaaggacaagctcaggagctatgcctcacgcatccagcgccccttctccgtgaagttcgacccgtacacgctggccatcgacgtgctggacagcccccaggccgtgcggcgctccctgg

SEQ ID NO: 633430 - DNA, 120 bp, Artificial Sequence
  ENSG00000180176_12 (sequence is synthesized)
agggtgtccaggatgagctggacacccttgcccatgcgctgagtgccattggctaggtgcacggcgtccctgagggcccttcccaacctcccctggtcctgcactgtcccggagctcagg

SEQ ID NO: 633431 - DNA, 120 bp, Artificial Sequence
  ENSG00000180176_13 (sequence is synthesized)
ccctggtgaggggctgggtcccgggtgccccccatgccctccctgctgccaggctcccactgcccctgcacctgcttctcagcgcaacagctgtgtgtgcccgtggtgaggttgtgctgc

SEQ ID NO: 633432 - DNA, 120 bp, Artificial Sequence
  ENSG00000180176_14 (sequence is synthesized)
ctgtggtgaggtcctgtcctggctcccagggtcctgggggctgctgcactgccctccgcccttccctgacactgtctgctgccccaatcaccgtcacaataaaagaaactgtggtctcta

SEQ ID NO: 633433 - DNA, 120 bp, Artificial Sequence
  ENSG00000180176_15 (sequence is synthesized)
cggacctccacactgagccatgcccacccccgacgccaccacgccacaggccaagggcttccgcagggccgtgtctgagctggacgccaagcaggcagaggccatcatgggcgccccggg

SEQ ID NO: 633434 - DNA, 120 bp, Artificial Sequence
  ENSG00000180176_16 (sequence is synthesized)
gcccagcctcacaggctctccgtggcctggaactgcagccccagctgcatcctacacccccaccccaaggtccccgcggttcattgggcgcaggcagagcctcatcgaggacgcccgcaa

SEQ ID NO: 633435 - DNA, 120 bp, Artificial Sequence
  ENSG00000180176_17 (sequence is synthesized)
catcttgtcaccagcatcagtgcctcctgccaggcagctctgctccagggctttccatgtccccaaatcccagtggggaaactgaggcccaggggggctagagcaacctgccgaggccac

SEQ ID NO: 633436 - DNA, 120 bp, Artificial Sequence
  ENSG00000180176_18 (sequence is synthesized)
atagccggctcacggcacagtcagctggggtgcaccctcctgtccatcctccaacccaaaggcctcgctgcactaggcgggtgtggacctgtgcccagtgaagctccctccctccctcct

SEQ ID NO: 633437 - DNA, 120 bp, Artificial Sequence
  ENSG00000180176_19 (sequence is synthesized)
cttggcgccgggggcgggcggggatcgatgtgcgggtgggtgaagtgtgctgcctgctcccgggccccgccaaggaggctcggcgccccgagggtcgcgcggcatagggcggggctggag

SEQ ID NO: 633438 - DNA, 120 bp, Artificial Sequence
  ENSG00000180176_20 (sequence is synthesized)
gtggaggtgcggatcctgggcggccagggaaggtctctgccgccagggaagtgtcccagagacccctggaggggctgctgacacccccggtgcccccacctcgagcatgacccagggctg

SEQ ID NO: 633439 - DNA, 120 bp, Artificial Sequence
  ENSG00000180176_21 (sequence is synthesized)
cctctccccatccttcatcctccctgctccacaggacattggcctggcgtccctgggggcctcggatgaggaaattgagaagctgtccacggtgggttgacccctccctgcagggcctgg

SEQ ID NO: 633440 - DNA, 120 bp, Artificial Sequence
  ENSG00000180176_22 (sequence is synthesized)
ggtgtgggtttgggggtctgaatccaggcctcaccctcttgccgtccaggctgaggcctctccttccacccacgaattgtgaccctcaccctggcctgcctgcatcctggcctggcctcc

SEQ ID NO: 633441 - DNA, 120 bp, Artificial Sequence
  ENSG00000180176_23 (sequence is synthesized)
aagaggctacccatcctgtcgggccatccccagtgtgctgagggaccgcccctcatggccccctatcccctgggattccctaaagccaccagcaaaagcccctcccgggggcctgggtct

SEQ ID NO: 633442 - DNA, 120 bp, Artificial Sequence
  ENSG00000180176_24 (sequence is synthesized)
tcaggggtccccaagaggcctgcgttggtaggggctcaggcaggcagaggcacccacagttcaggaggggggtttcgggcactggggtggggcattagagggccctgagcctggctgccc

SEQ ID NO: 633443 - DNA, 120 bp, Artificial Sequence
  ENSG00000180176_25 (sequence is synthesized)
cggacctccacactgagccatgcccacccccgacgccaccacgccacaggccaagggcttccgcagggccgtgtctgagctggacgccaagcaggcagaggccatcatggtaagagggca

SEQ ID NO: 633444 - DNA, 120 bp, Artificial Sequence
  ENSG00000180182_0 (sequence is synthesized)
ctgttctgaggcggcccggcggtaggcggtggcgactctgcccgctcccgtttcggcgcggtgaccgagcgcccgggaggctcgaggaccgcatcgtgtgccgttgcgccaagcccggtc

SEQ ID NO: 633445 - DNA, 120 bp, Artificial Sequence
  ENSG00000180182_1 (sequence is synthesized)
ctcgaggaccgcatcgtgtgccgttgcgccaagcccggtcctgcgccgccatggccccagtgcagctggagaaccaccagctggtcccgcccggaggcggcggcgggggcagcggcggac

SEQ ID NO: 633446 - DNA, 120 bp, Artificial Sequence
  ENSG00000180182_2 (sequence is synthesized)
ggcggcggccgctgcagctgcggctagcccgggctaccggctgagcaccctcattgaatttctgctgcaccgggcctactcggagcttatggtgttgacggacctactgccaaggaaatc

SEQ ID NO: 633447 - DNA, 120 bp, Artificial Sequence
  ENSG00000180182_3 (sequence is synthesized)
tgatgtggaaaggaaaatagaaatagtgcagtttgctagccggacacgccaactcttcgttcgattattagctttagtgaaatgggctaataatgctggcaaagtggaaaaatgtgcgat

SEQ ID NO: 633448 - DNA, 120 bp, Artificial Sequence
  ENSG00000180182_4 (sequence is synthesized)
gatttcaagctttttagatcagcaagccatcctgtttgtggacactgctgatcgcctggcctcgttagctagagatgctctggtccatgcacgcctgcctagttttgccatcccatatgc

SEQ ID NO: 633449 - DNA, 120 bp, Artificial Sequence
  ENSG00000180182_5 (sequence is synthesized)
cattgatgtactaactactggatcttacccacggctgccaacctgcattagggacaaaattattcctccagacccaattaccaaaattgaaaaacaagccacactccatcagctgaatca

SEQ ID NO: 633450 - DNA, 120 bp, Artificial Sequence
  ENSG00000180182_6 (sequence is synthesized)
gattcttagacatcggcttgtaaccacagatcttcctcctcagttagcaaatcttacagttgcaaatggccgggtgaagtttcgtgttgaaggagaatttgaagccaccttgactgtgat

SEQ ID NO: 633451 - DNA, 120 bp, Artificial Sequence
  ENSG00000180182_7 (sequence is synthesized)
gggagatgaccctgatgttccatggcgtcttctcaagctagaaattctagttgaggataaggaaacaggagatgggcgagctttggttcatagcatgcaaatcagcttcatccatcaact

SEQ ID NO: 633452 - DNA, 120 bp, Artificial Sequence
  ENSG00000180182_8 (sequence is synthesized)
ggtgcagtctaggctctttgctgatgagaaacctcttcaggatatgtacaactgcctacattctttctgtttatcacttcagttagaagtgttacattcccaaactctaatgttaatccg

SEQ ID NO: 633453 - DNA, 120 bp, Artificial Sequence
  ENSG00000180182_9 (sequence is synthesized)
agaacggtggggagaccttgtgcaggtggaaaggtatcatgctggaaagtgcctctccctttcagtttggaatcaacaggttcttgggagaaaaactggaacagcatctgttcacaaagt

SEQ ID NO: 633454 - DNA, 120 bp, Artificial Sequence
  ENSG00000180182_10 (sequence is synthesized)
tacaattaaaattgatgagaatgatgtctccaagcctttacagatttttcacgatcctcctttgccagcttctgattccaaattagtagaaagagccatgaagatcgaccacttatcaat

SEQ ID NO: 633455 - DNA, 120 bp, Artificial Sequence
  ENSG00000180182_11 (sequence is synthesized)
agaaaaactcctgattgacagtgtccatgcaagagctcatcagaagctccaagaactgaaggccattcttagaggcttcaatgccaatgaaaactcttccatagagactgcactcccagc

SEQ ID NO: 633456 - DNA, 120 bp, Artificial Sequence
  ENSG00000180182_12 (sequence is synthesized)
tcttgttgttcccatcttggagccctgtggtaattcagagtgtctgcacatttttgtagatttacattctggaatgtttcaattgatgctttatggacttgaccaggccactctggatga

SEQ ID NO: 633457 - DNA, 120 bp, Artificial Sequence
  ENSG00000180182_13 (sequence is synthesized)
catggagaagtctgtgaatgatgatatgaaacgaatcataccctggattcagcaacttaagttttggcttggacaacagcgttgcaagcagtctataaaacatctgcctacgataagcag

SEQ ID NO: 633458 - DNA, 120 bp, Artificial Sequence
  ENSG00000180182_14 (sequence is synthesized)
tgaaacattgcagctttccaattactcaactcatcctattggaaacctttctaagaataaactgttcattaaacttacccgccttccacaatactacattgttgtggagatgttggaggt

SEQ ID NO: 633459 - DNA, 120 bp, Artificial Sequence
  ENSG00000180182_15 (sequence is synthesized)
tcccaataaacccacacaactgtcgtacaagtactactttatgtctgtgaatgctgcagatcgtgaagacagccctgcaatggcattgctgctgcagcagttcaaggaaaacattcagga

SEQ ID NO: 633460 - DNA, 120 bp, Artificial Sequence
  ENSG00000180182_16 (sequence is synthesized)
cttggtttttcgtacaaaaaccgggaaacagaccagaaccaatgccaagcgcaagttgtctgatgatccatgtccagtagaatccaagaaaacaaaacgagcaggagaaatgtgtgcctt

SEQ ID NO: 633461 - DNA, 120 bp, Artificial Sequence
  ENSG00000180182_17 (sequence is synthesized)
caataaagttttagcccacttcgtcgctatgtgtgatacaaatatgccatttgtaggacttcggttggagttgtccaatctggagattccacatcaaggagtgcaagtggaaggtgatgg

SEQ ID NO: 633462 - DNA, 120 bp, Artificial Sequence
  ENSG00000180182_18 (sequence is synthesized)
cttcagccatgcaattcgcttattaaaaattcctccctgtaagggtataactgaggaaacccaaaaggctctggaccgctctcttcttgattgcactttccgattacaaggtagaaataa

SEQ ID NO: 633463 - DNA, 120 bp, Artificial Sequence
  ENSG00000180182_19 (sequence is synthesized)
ccgcacttgggtagcagagttagtgtttgcaaattgtccacttaatggcacttctactagggagcaaggaccatcccggcacgtttacctgacatatgaaaatctgttgtctgagcctgt

SEQ ID NO: 633464 - DNA, 120 bp, Artificial Sequence
  ENSG00000180182_20 (sequence is synthesized)
tggtggtagaaaggtggttgaaatgtttcttaatgactggaatagcattgcacgattatatgagtgtgtgttggaatttgcacgttctctaccagacatacctgctcatctaaatatttt

SEQ ID NO: 633465 - DNA, 120 bp, Artificial Sequence
  ENSG00000180182_21 (sequence is synthesized)
ctcagaagttcgtgtttataattaccgaaaacttatcttgtgttatggaaccaccaagggaagctcaattagtatccaatggaattcgatccatcaaaaattccacatttctttgggaac

SEQ ID NO: 633466 - DNA, 120 bp, Artificial Sequence
  ENSG00000180182_22 (sequence is synthesized)
tgttggcccaaactcaggttgcagtaactgtcacaataccattctccatcagcttcaagaaatgttcaacaaaacaccaaatgtggttcagttattacaggtactgtttgatactcaggc

SEQ ID NO: 633467 - DNA, 120 bp, Artificial Sequence
  ENSG00000180182_23 (sequence is synthesized)
tccattaaatgccatcaacaaactccccactgtgccgatgttgggcttgacccagagaaccaatactgcctaccagtgcttctccattctgccacagtcgtccacccacatcagactggc

SEQ ID NO: 633468 - DNA, 120 bp, Artificial Sequence
  ENSG00000180182_24 (sequence is synthesized)
cttcaggaacatgtattgcattgatatatactgccggagtcgaggtgttgtggcaatacgggatggtgcctatagtctttttgataacagcaaactagttgaaggtttctatcctgcacc

SEQ ID NO: 633469 - DNA, 120 bp, Artificial Sequence
  ENSG00000180182_25 (sequence is synthesized)
aggactaaagacgttcctgaatatgtttgttgacagcaatcaggatgctcgaagaaggtctgtaaatgaggacgataatcccccttctcctataggaggagatatgatggattctttaat

SEQ ID NO: 633470 - DNA, 120 bp, Artificial Sequence
  ENSG00000180182_26 (sequence is synthesized)
atcgcagctccagccaccaccccagcaacagccatttccaaagcagccaggaacatcaggtgcttatcctcttacttcaccccctacatcttatcatagcacagtcaatcagtctccctc

SEQ ID NO: 633471 - DNA, 120 bp, Artificial Sequence
  ENSG00000180182_27 (sequence is synthesized)
aatgatgcacacacagtctccaggaaatctgcatgctgccagctcccccagtggggctttgagagccccatcaccagcgtcatttgttccaactcctcccccatcctcgcatggaatctc

SEQ ID NO: 633472 - DNA, 120 bp, Artificial Sequence
  ENSG00000180182_28 (sequence is synthesized)
aataggaccaggggccagttttgctagtccacatggaactcttgaccctagttccccatacactatggtgtcaccaagtggacgagcagggaactggccaggatctcctcaagtgtctgg

SEQ ID NO: 633473 - DNA, 120 bp, Artificial Sequence
  ENSG00000180182_29 (sequence is synthesized)
cccctcaccagcagcacgcatgcctggaatgtcaccagccaacccctcactacattctccggttccagatgcttctcattcccctcgagctggaacaagttctcaaacaatgccaacaaa

SEQ ID NO: 633474 - DNA, 120 bp, Artificial Sequence
  ENSG00000180182_30 (sequence is synthesized)
catgcctccacctcgtaaactacctcagcgctcttgggcggcatccatacctaccatcctcactcacagtgccttgaacattttactgctgccctctccaactccaggccttgtgcccgg

SEQ ID NO: 633475 - DNA, 120 bp, Artificial Sequence
  ENSG00000180182_31 (sequence is synthesized)
cctggcaggtagttacctttgttctccacttgagagattccttggatcagtcatcatgagacgacatcttcaaagaattattcaacaagaaacgctgcagctgataaattctaatgaacc

SEQ ID NO: 633476 - DNA, 120 bp, Artificial Sequence
  ENSG00000180182_32 (sequence is synthesized)
cggagtgatcatgtttaagactgatgcactgaaatgcagagtagctcttagtcccaaaaccaaccaaacgcttcagctaaaagtgacacctgaaaatgcaggacagtggaaacctgatga

SEQ ID NO: 633477 - DNA, 120 bp, Artificial Sequence
  ENSG00000180182_33 (sequence is synthesized)
accaagctattaggagctcctacacacatcctcagggattgtgtgcacattatgaagctggagctgttccctgaccaagcaacacagctaaaatggaatgttcagttttgcctgacgatc

SEQ ID NO: 633478 - DNA, 120 bp, Artificial Sequence
  ENSG00000180182_34 (sequence is synthesized)
cctcccagcgcgccgccgattgcacctcctgggacgcctgctgtggtgctgaaatccaaaatgctattttttcttcaactaactcagaaaacatcggtccctccccaagaacctgttagt

SEQ ID NO: 633479 - DNA, 120 bp, Artificial Sequence
  ENSG00000180182_35 (sequence is synthesized)
attatagttccaatcatttatgacatggcttcaggtacaacccagcaggcagacattcccagacagcagaactcttctgttgctgctcccatgatggtcagcaacattctgaagaggttt

SEQ ID NO: 633480 - DNA, 120 bp, Artificial Sequence
  ENSG00000180182_36 (sequence is synthesized)
gcagagatgaatccaccacgacaaggtgaatgcacaatatttgcagctgttcgtgatttaatggctaatcttacactgccccctggtgggcgtccatagacactattgtttttaaaccag

SEQ ID NO: 633481 - DNA, 120 bp, Artificial Sequence
  ENSG00000180182_37 (sequence is synthesized)
gaaggctgacagatgagacaacaaaaaaaatctgaattcagccttcagtttaaaaaaggaaaaggactttttttttaaactttaagagctaaatattctaaactggcaaaaattttcagg

SEQ ID NO: 633482 - DNA, 120 bp, Artificial Sequence
  ENSG00000180182_38 (sequence is synthesized)
gtgcacttctttcatcaaaatgatcatccatcttttgtataatgaacttgtatagtgtgtttaaatgggacacatttcaaaggaaataaatcagtgtccgtttgccagtaataaatttaa

SEQ ID NO: 633483 - DNA, 120 bp, Artificial Sequence
  ENSG00000180182_39 (sequence is synthesized)
tattctgttttatactataaagttatgaaaatgccaaacttgtttatttaattgttttcttatgttttgggtgtaatagtccttttttggtttttgttttgttttttaaggcaggtctgt

SEQ ID NO: 633484 - DNA, 120 bp, Artificial Sequence
  ENSG00000180182_40 (sequence is synthesized)
catttttgaatactgtaaaactgtgataaactttatattgaagctgtattttaatatgaccgctttgaatccttacatgaaatgttctgggagttgttataaacacaccccaaggaagca

SEQ ID NO: 633485 - DNA, 120 bp, Artificial Sequence
  ENSG00000180182_41 (sequence is synthesized)
atatttaataaaactaggtcaaaaacaaaacaaaacagtgacactcacttgtgtgtatataaactctagagacatcttaggccctcccttcatctttaacctggtggatggagccagtta

SEQ ID NO: 633486 - DNA, 120 bp, Artificial Sequence
  ENSG00000180182_42 (sequence is synthesized)
ttaatttataataatacatgtctgaaatttgaccaaaaacatcttctttatgtcaaggttaatatattttcttcagacattcctaacttgactagtggttaacatttagcaccttggttg

SEQ ID NO: 633487 - DNA, 120 bp, Artificial Sequence
  ENSG00000180182_43 (sequence is synthesized)
tctttcaatatataggatttgggtgaaaaataaggaacttagtctttgagaagggacagtatgtggttcgtattgatcaaggatcccaaataatgcaatcattctcatctgttgaggatg

SEQ ID NO: 633488 - DNA, 120 bp, Artificial Sequence
  ENSG00000180182_44 (sequence is synthesized)
tgggaacttttctgtcaggaaaatttagtttacagaatacttctgcatacaacattaattaggaaacaaagaactttaatgctgtacctctgcatgaagtttctgtgagctttctttatc

SEQ ID NO: 633489 - DNA, 120 bp, Artificial Sequence
  ENSG00000180182_45 (sequence is synthesized)
ttgcttaacttatcctcctttccttccccaccaaaattgggattgttctaaacaatttcaatttaattcattgtcaacaaaacgatagaatgttttgcttggaagaaacctggtccattc

SEQ ID NO: 633490 - DNA, 120 bp, Artificial Sequence
  ENSG00000180182_46 (sequence is synthesized)
ccctcattgtgaagaatcccgaatcctgggcctgtccagggtcaaatggagtttttggtattaatacatctctgcagggtttctttttggagcactgtgctgtctttcctagtcagtcag

SEQ ID NO: 633491 - DNA, 120 bp, Artificial Sequence
  ENSG00000180182_47 (sequence is synthesized)
ggacttttttaagcttcaaagaacatggtctgatgcaaaggtcttctaccgacttcatggtatttaggaaaaatttttaagtgataataccatgccgagttacctggtcactgtaatact

SEQ ID NO: 633492 - DNA, 120 bp, Artificial Sequence
  ENSG00000180182_48 (sequence is synthesized)
ggttctccattaaaatgtagatgctttgtctaattccacttcaagatgatttaattgagcttctataactatcaactatcaaattctagtttcaagtatctcactgtacctatatcatat

SEQ ID NO: 633493 - DNA, 120 bp, Artificial Sequence
  ENSG00000180182_49 (sequence is synthesized)
ctgttctcaactttgtttgattctccactcattttcaatcagagttgaagccttctttgcctttcttctttgtcttatttctgccttcatctcccacttctcacccaactctgccactgt

SEQ ID NO: 633494 - DNA, 120 bp, Artificial Sequence
  ENSG00000180182_50 (sequence is synthesized)
tcaggagcagttgactaaacttttatccttcctttaacttaatctttttatccttctgtttttagttcttacagtggtaatcacatcagtttggcaatctaagatgtctttatcaagggt

SEQ ID NO: 633495 - DNA, 120 bp, Artificial Sequence
  ENSG00000180182_51 (sequence is synthesized)
cagcccttttctatttggagctgaatcttttctttcatgtagaaatctacatgtatatacaagaaatgtatttttatctgcaggataatattgtttcaaataattttattaagagttaac

SEQ ID NO: 633496 - DNA, 120 bp, Artificial Sequence
  ENSG00000180182_52 (sequence is synthesized)
tttttaggtattttcccttttaatgtggttttgaaatgttaattgcatttttacacatgatgcattcagtggacactcttttttcctaattataactcatctctgaatgcattgtgccaa

SEQ ID NO: 633497 - DNA, 120 bp, Artificial Sequence
  ENSG00000180182_53 (sequence is synthesized)
tcaagagtaagataggattcagtgcgcaaaatttgcttttgatgcttattaagagtaaacccatgaatttgaatttttatattatgcttggtacttggaattgatatataccttattaaa

SEQ ID NO: 633498 - DNA, 120 bp, Artificial Sequence
  ENSG00000180182_54 (sequence is synthesized)
gcttgaaaacatttagcatttgaatagtaagtttcatcacaaatcatgtcttttgcctcttttgttacccaggttcgatcaaggggactggatgcccaagtgattttctctaataatcgg

SEQ ID NO: 633499 - DNA, 120 bp, Artificial Sequence
  ENSG00000180182_55 (sequence is synthesized)
gttgggacttaactttaaggtgttttcaatgtgattttagtatttacagtaataaataaaatttatacaaagtttcagagaactaccaactctctagttaattttgatgaagatgttttc

SEQ ID NO: 633500 - DNA, 120 bp, Artificial Sequence
  ENSG00000180182_56 (sequence is synthesized)
attaatagtctggtttagtattaatttaaccttgaaataagaaattggtcctgatttgccaccttcatttttccatctgctgaaatgccatttcagaatgtataaaagtactttcagaat

SEQ ID NO: 633501 - DNA, 120 bp, Artificial Sequence
  ENSG00000180182_57 (sequence is synthesized)
tagaagaaaagtgagagcttcagcagaacgtgtcaagtcgctaataacaggagtcgaaccttatgtttgaaaattaactgagtgagttaagtgcaagcataaactaaaatttatatgact

SEQ ID NO: 633502 - DNA, 120 bp, Artificial Sequence
  ENSG00000180182_58 (sequence is synthesized)
ttgaatttaagaaccactaataactgtgttctaattaacacagtaatctgttcagccaaaggatactaacagccattctttggactgtggttaatttgataacttcaagaagttataact

SEQ ID NO: 633503 - DNA, 120 bp, Artificial Sequence
  ENSG00000180182_59 (sequence is synthesized)
ttgctaccctggattctgatgcaatttcaatataaaaagttgttcctttcatagtttttccccccaaaagaagtgcctattacattttaccttaatgtttatttatcatccaagtgttct

SEQ ID NO: 633504 - DNA, 120 bp, Artificial Sequence
  ENSG00000180182_60 (sequence is synthesized)
tgatataaaatcagtatacagaaaattttaagagaacttacattcaagggacatagagggaaaatgttaatgtgtatttcattgtttcttgtggaatttttttttcattcggtttgagaa

SEQ ID NO: 633505 - DNA, 120 bp, Artificial Sequence
  ENSG00000180182_61 (sequence is synthesized)
tggacagtgtgtctaaggatgtgatttaaatttacttaggatggatttagcattgaggttattaagacaaagttagcagaggccagccagcactgtgctgcacaactccaggaactccat

SEQ ID NO: 633506 - DNA, 120 bp, Artificial Sequence
  ENSG00000180182_62 (sequence is synthesized)
ggtatgctcacaattttctgcaagttgcctccacttccaagtggccagtgatttgttaaaataccttgcccaagaatataactgattgatgaaagggcatatttaggtcaatataaaata

SEQ ID NO: 633507 - DNA, 120 bp, Artificial Sequence
  ENSG00000180182_63 (sequence is synthesized)
atagcaagtatttactgagagcttactgtgtgctaggcattttcttaatatttcaatgtgtatttaatcctcacaacaacccaatgtggtaggttattgatatcctcttcttaaaaatga

SEQ ID NO: 633508 - DNA, 120 bp, Artificial Sequence
  ENSG00000180182_64 (sequence is synthesized)
gtaaatggaggcccagagaaatgtaatttgcctgagatcaaattaaggttgcttaagatcaaactgctaagaaggggcagtttgagtctgagctagtgctcctaaacactggacattttt

SEQ ID NO: 633509 - DNA, 120 bp, Artificial Sequence
  ENSG00000180182_65 (sequence is synthesized)
gctgtgaaccacagtcgggaaggtttaatgtttagactctttcctcagaggcttttaactacacacaattttgacatgttttccaagctcagaaagctcattaaaaacaactaaaactga

SEQ ID NO: 633510 - DNA, 120 bp, Artificial Sequence
  ENSG00000180182_66 (sequence is synthesized)
ggtaccgcctcactcccacgcgccccccagcgctgcggtgctagacagctgagagaacagacacagacctgtcggaaggtcctctgcaggtcccccttccgctctgccgatcgacttccg

SEQ ID NO: 633511 - DNA, 120 bp, Artificial Sequence
  ENSG00000180182_67 (sequence is synthesized)
tggtttttgccttataaccatactgctggaaactcataaatctaaaaaagagtaggtagctacatgagcctgtagtagctgtttacccagtttttctgaaacattaacgtatttaataga

SEQ ID NO: 633512 - DNA, 120 bp, Artificial Sequence
  ENSG00000180182_68 (sequence is synthesized)
tgagtgacatgtgaataatcatatttctgaatgataatgtatatttctgcagaaacttagtatttgtttatggacacctgatcagaaagaagaggagatagctggagacatcattacgtg

SEQ ID NO: 633513 - DNA, 120 bp, Artificial Sequence
  ENSG00000180182_69 (sequence is synthesized)
tcattaccaaccaactctggaagtctgtaagaggaaaaaaccattttattctacttatttttcctaactttgatattatgtgtgtgtaatgttaaggatggagaaatgaattagaaagct

SEQ ID NO: 633514 - DNA, 120 bp, Artificial Sequence
  ENSG00000180182_70 (sequence is synthesized)
tttacttaaagtgacagaaaattattgctcttaatatcaaatactagtgtattaaatatttcttcttcaagttactggagaatatttgaagaactactttgaaatatggaaaactgatac

SEQ ID NO: 633515 - DNA, 120 bp, Artificial Sequence
  ENSG00000180182_71 (sequence is synthesized)
tagacaatattttattgcatatatgttataaaagttcttttgagagacacccctttctcctcttctcttctccctccttacctactctaccacccaatcatagcaatagaggtctggttg

SEQ ID NO: 633516 - DNA, 120 bp, Artificial Sequence
  ENSG00000180182_72 (sequence is synthesized)
ccgtggccctcttaatgtctgcctgtcgctttcttcctttctcactggttcttcatttttgtccatttctctgctgcctggactttttgttagtgatttactattgggactgacccagtt

SEQ ID NO: 633517 - DNA, 120 bp, Artificial Sequence
  ENSG00000180182_73 (sequence is synthesized)
gctaatgccagaagcttgtatttatagcacacattgccacaaagacctaggttaggatgatagaattttccacggctgtgaattcctgccctaccatcaatacctgccactctgtacatc

SEQ ID NO: 633518 - DNA, 120 bp, Artificial Sequence
  ENSG00000180182_74 (sequence is synthesized)
acaaagttgaaatgcatgttggtttctcatatttcatggttcaatcacgaatagaagaatattattaaaagttctgtatcttctaaatgttttgtgaagaataaaagctgatacaaatgg

SEQ ID NO: 633519 - DNA, 120 bp, Artificial Sequence
  ENSG00000180182_75 (sequence is synthesized)
cataggtagagttatgttcttccatcaagaggcacataatgtctgatcgcatctctttttgcagtgttgccagcagctgatgctcaatgctgtaggtgcctttgttttggaataggtatc

SEQ ID NO: 633520 - DNA, 120 bp, Artificial Sequence
  ENSG00000180185_0 (sequence is synthesized)
ttgttttgtccgcgagccccgactgccacgggccgggagacgggcctgggagcggcggcggcggcccgagagctgcgccgggagagctgtgccgcgagcctccgcctcttttttggcacc

SEQ ID NO: 633521 - DNA, 120 bp, Artificial Sequence
  ENSG00000180185_1 (sequence is synthesized)
gcacagtggatccctggaggccgagcgccacgccgcccgggtacccggcagatcgcgaggtggaacgggccgtcgctgcgggggacagcgttccgaggcagttggtcctctccgggatgc

SEQ ID NO: 633522 - DNA, 120 bp, Artificial Sequence
  ENSG00000180185_2 (sequence is synthesized)
cgtaggcatcagctgaccggcccagcccacgtgactacaggggcacttgatgggaatcatggcagcatccaggccattgtcccgcttctgggagtggggaaagaacatcgtctgcgtggg

SEQ ID NO: 633523 - DNA, 120 bp, Artificial Sequence
  ENSG00000180185_3 (sequence is synthesized)
gaggaactacgcggaccacgtcagggagatgcgcagcgcggtgttgagcgagcccgtgctgttcctgaagccgtccacggcctacgcgcccgagggctcgcccatcctcatgcccgcgta

SEQ ID NO: 633524 - DNA, 120 bp, Artificial Sequence
  ENSG00000180185_4 (sequence is synthesized)
cactcgcaacctgcaccacgagctggagctgggcgtggtgatgggcaagcgctgccgcgcagtccccgaggctgcggccatggactacgtgggcggctatgccctgtgcctggatatgac

SEQ ID NO: 633525 - DNA, 120 bp, Artificial Sequence
  ENSG00000180185_5 (sequence is synthesized)
cgcccgggacgtgcaggacgagtgcaagaagaaggggctgccctggactctggcgaagagcttcacggcgtcctgcccggtcagcgcgttcgtgcccaaggagaagatccctgaccctca

SEQ ID NO: 633526 - DNA, 120 bp, Artificial Sequence
  ENSG00000180185_6 (sequence is synthesized)
caagctgaagctctggctcaaggtcaacggcgaactcagacaggagggtgagacatcctccatgattttttccatcccctacatcatcagctatgtttctaagatcataaccttggaaga

SEQ ID NO: 633527 - DNA, 120 bp, Artificial Sequence
  ENSG00000180185_7 (sequence is synthesized)
aggagatattatcttgactgggacgccaaagggagttggaccggttaaagaaaacgatgagatcgaggctggcatacacgggctggtcagtatgacatttaaagtggaaaagccagaata

SEQ ID NO: 633528 - DNA, 90 bp, Artificial Sequence
  ENSG00000180185_8 (sequence is synthesized)
aacaagtttcgagagagaagggagcaagacaagagcaagcaacggctattaaatgtcacaatcctttaattagaaaccatttattgcagc

SEQ ID NO: 633529 - DNA, 70 bp, Artificial Sequence
  ENSG00000180185_9 (sequence is synthesized)
tgcgccactgtacccatttattttaaaaatgattagattgctatgcctcaactcatagaagatgaaccct

SEQ ID NO: 633530 - DNA, 120 bp, Artificial Sequence
  ENSG00000180185_10 (sequence is synthesized)
gattagattgctatgcctcaactcatagaagatgaacccttcaagaaaacgtgaagtagaacgggtgggccagaaatgaaaacaggcaagtaaagtatttcttcggaaaacattttatca

SEQ ID NO: 633531 - DNA, 120 bp, Artificial Sequence
  ENSG00000180185_11 (sequence is synthesized)
aaccaaatgttaaaaagactttccttttgtaaaactggattagagaagacttttcagtgggttatctctaggatgatcagtagttcagcacttaaaaactgcagagaaaactgaaagtta

SEQ ID NO: 633532 - DNA, 120 bp, Artificial Sequence
  ENSG00000180185_12 (sequence is synthesized)
tgttccagataactttccgttgtttaccaaattttcttagatttggtcatcatcaggaagcatttgtaaaaataaaaatctccacaaattactggcccatctcggacttgctgaatcaat

SEQ ID NO: 633533 - DNA, 120 bp, Artificial Sequence
  ENSG00000180185_13 (sequence is synthesized)
ttgataggattaatctccagtgaagctgtgtttacagggcattccaagtgattcttatcaggaaatgtgaaaaacactcctgtacataatcggttaatttaaaattttacttaataagtg

SEQ ID NO: 633534 - DNA, 120 bp, Artificial Sequence
  ENSG00000180185_14 (sequence is synthesized)
aacaagtaatgaagatttcacctgtttacttagggtatctacccagacccatcgattctgagttcgggagatgattttgaaattactgttttccaaataaaggtgctcccttctaagtgg

SEQ ID NO: 633535 - DNA, 120 bp, Artificial Sequence
  ENSG00000180185_15 (sequence is synthesized)
gcatacacgggctgcccaaagtctcctcagcaacacttcctgtgagactacaggaatgaagggtgcctgtgtgatcagtcagatcaatcagcacatggaaactgagaaagacagatttaa

SEQ ID NO: 633536 - DNA, 120 bp, Artificial Sequence
  ENSG00000180185_16 (sequence is synthesized)
agtccaaggagtttttgttgcaagttgtgcacatgttagatgcttcatttacaatataaccacagctggaactgaaaagaaacaaagacaatgataaaatgtgatgccctaagctacaaa

SEQ ID NO: 633537 - DNA, 120 bp, Artificial Sequence
  ENSG00000180185_17 (sequence is synthesized)
tttcatctgtagcagaaaaagaattgtcactaaaaactctacgacagtgtgtggaaaacttactgagtgttcagtgctatgcggtctacaagacagtcgtaaaaaacagtaaaacacact

SEQ ID NO: 633538 - DNA, 120 bp, Artificial Sequence
  ENSG00000180185_18 (sequence is synthesized)
ttctacgcagccattctcaggagtcatctgaaactgcgtacaccagtcctctgcctgccctccttccctccctctgccaagccctcgaggtccatcccagtctcatttccttgctggggc

SEQ ID NO: 633539 - DNA, 120 bp, Artificial Sequence
  ENSG00000180185_19 (sequence is synthesized)
cctcccttctcgtatcccagcctgcagcctttctctcttggaacagcagcagagtgcacgcctcaggactgactggtgctgttgcatcagctccttattctcacctccctggctgggagt

SEQ ID NO: 633540 - DNA, 120 bp, Artificial Sequence
  ENSG00000180185_20 (sequence is synthesized)
tctgagggcaggaactgtgtcttgtgcctggaaagcacgagttcaacagctgctcactggatgggcctgcacggggccttctctacaaatacagaaagccttgcaaggctggccgggtag

SEQ ID NO: 633541 - DNA, 120 bp, Artificial Sequence
  ENSG00000180185_21 (sequence is synthesized)
cacccagatgctattaacactgctggtgatacactctcctctctttcagtgatttatgctattccatatttctgaagcaagccttactttagcaattttaaacagggaaactaattcaaa

SEQ ID NO: 633542 - DNA, 120 bp, Artificial Sequence
  ENSG00000180185_22 (sequence is synthesized)
tttctcaaataggggaaatgaactgaagatagtggtttcttatctagccacagatcacttggtctagcaaattttagatgcttttcctcagatatcaataataaatgtacaggaaaaaaa

SEQ ID NO: 633543 - DNA, 79 bp, Artificial Sequence
  ENSG00000180185_23 (sequence is synthesized)
cacgggcagtgctatcacagctcactgcagcctcgaactcccggggtcaagcaatcctccctcagcttcccgtttctga

SEQ ID NO: 633544 - DNA, 120 bp, Artificial Sequence
  ENSG00000180190_0 (sequence is synthesized)
cttggagcgggcctggttctggggatggtttgggggcgggccgggtcctggggagggtttggggcgggcctggtggggagggggcgggcctagttctgggggtgccccgcccccgcctag

SEQ ID NO: 633545 - DNA, 120 bp, Artificial Sequence
  ENSG00000180190_1 (sequence is synthesized)
cactgggcccgcgtcccgcaggagccgcaggcagagcgtccggcggccgggagggacgcggagccacagcccgacgcacggacggagggacgccggagcccgcctgaccatgtggaagct

SEQ ID NO: 633546 - DNA, 120 bp, Artificial Sequence
  ENSG00000180190_2 (sequence is synthesized)
cggggccgagtgctgctggacgagccccccgaggaggaggacggcctgcgtggggggccgccaccggccgccgccgccgccgcccaggcgcaggttcagggagcaagtttccgaggttgg

SEQ ID NO: 633547 - DNA, 120 bp, Artificial Sequence
  ENSG00000180190_3 (sequence is synthesized)
aagtttccgaggttggaaagaagtgacttcactgtttaacaaagatgatgagcagcatctcctggaaagatgtaaatctcccaagtccaaaggaactaacttacgattaaaagaagagtt

SEQ ID NO: 633548 - DNA, 120 bp, Artificial Sequence
  ENSG00000180190_4 (sequence is synthesized)
gaaggcagagaagaaatctggattttgggacaatttggttttaaaacagaatatacagtctaaaaaaccagatgaaattgaaggttgggagcctccaaaacttgctcttgaagacatatc

SEQ ID NO: 633549 - DNA, 120 bp, Artificial Sequence
  ENSG00000180190_5 (sequence is synthesized)
ggctgaccctgaggacaccgtgggtggccacccatcctggtcaggctgggaggatgacgccaagggctcgaccaagtacaccagcctggccagctctgccaacagctccaggtggagcct

SEQ ID NO: 633550 - DNA, 120 bp, Artificial Sequence
  ENSG00000180190_6 (sequence is synthesized)
gcgcgcggcagggaggctggtgagcatccgacggcagagtaaaggccacctgacagatagcccggaggaggcggagtgaggggggctgcgtggcaagtgtgccccgacatggtggccttt

SEQ ID NO: 633551 - DNA, 120 bp, Artificial Sequence
  ENSG00000180190_7 (sequence is synthesized)
tatgagtataccatgtagttgttgagtcttttccgcgttagaaagaatagagagtctactttttgcctatatttgatatttggacctctgtttctttatttaatgaactctcacacacac

SEQ ID NO: 633552 - DNA, 120 bp, Artificial Sequence
  ENSG00000180190_8 (sequence is synthesized)
tgtgactccttggtgaacacgtgcagggattgtacatttgattgccttattgcagaaatattcacctatcagtccatgttttgcagaaactggagatgtgaatttatgatgctctcccat

SEQ ID NO: 633553 - DNA, 120 bp, Artificial Sequence
  ENSG00000180190_9 (sequence is synthesized)
aatacagcagtaatgatttgcagtttctcacaaaatgattttcatgctgctctgtgttgtagttctgtttcagaacttccgtacctttttcttgtatgtagcacgtataaatgcagctgt

SEQ ID NO: 633554 - DNA, 120 bp, Artificial Sequence
  ENSG00000180190_10 (sequence is synthesized)
catgcagttcttttcttttgctagaaaattagtcaggaggtaagatgaatcttccaaagttatgttaaattttgtttaacttgacaaattaaactttgttcttattaaacaaatacgtaa

SEQ ID NO: 633555 - DNA, 120 bp, Artificial Sequence
  ENSG00000180190_11 (sequence is synthesized)
acaaatactggaaaagcaaagcttatatttgggagtaaaatgtatcttaaaatgcatgttcatcttttgctgagggaggaatagcttcttgtatgtccactggatagtaacagtggttct

SEQ ID NO: 633556 - DNA, 120 bp, Artificial Sequence
  ENSG00000180190_12 (sequence is synthesized)
tttttggaattttatttttacctcttttgaacttctaaatcggtccctttattttcttaaaacatttgctctcttttttgtttacagattaaagaagtatggatcaattttagtcagttg

SEQ ID NO: 633557 - DNA, 120 bp, Artificial Sequence
  ENSG00000180190_13 (sequence is synthesized)
ataatttcatttaggaaacattgtcttgctcattatagagagttaagactgtgcataaaatactgaagtgcctcttttttattaggctcatatgtttgttcttgcaaagcgagatgccta

SEQ ID NO: 633558 - DNA, 120 bp, Artificial Sequence
  ENSG00000180190_14 (sequence is synthesized)
ttttccacaagaataatcgacgaccggtttgagagcatctctcgcgttctttttctgtctgcttactgtccttgacaatgtgatcctgcacagtatcaggtgccagttatgcgtccctgg

SEQ ID NO: 633559 - DNA, 120 bp, Artificial Sequence
  ENSG00000180190_15 (sequence is synthesized)
aaggttggctcttatcagcaagtcctgcagatatctcttagataaaagtggtttgaaagaaaaggtatatttttcttttttgtttaaaagtaaaataaaacctccagttacactgtgcat

SEQ ID NO: 633560 - DNA, 120 bp, Artificial Sequence
  ENSG00000180190_16 (sequence is synthesized)
tcccctcacgtaaaaacaagacaaaaaccctttcctgagttgctcggcatgcactcctgtgctgtttcatgcatgtggatgttccttccgtttgttcctgtggaataactgagtgtgcct

SEQ ID NO: 633561 - DNA, 120 bp, Artificial Sequence
  ENSG00000180190_17 (sequence is synthesized)
gatggcagaacacactgcagtgttatcagtgtctgcatgttttttaatagaacaggtttacttgatctgtcatctgttatgcaaaaaacagcaattacttttgcatccatctagctaaat

SEQ ID NO: 633562 - DNA, 120 bp, Artificial Sequence
  ENSG00000180190_18 (sequence is synthesized)
ctataatctgtgtcaatcacttatacctatcaatcatccgtatctattcacctgtcctctatgtctgtcttctctcagtctacatccatctagccttctgtcaatcatctactttttttt

SEQ ID NO: 633563 - DNA, 120 bp, Artificial Sequence
  ENSG00000180190_19 (sequence is synthesized)
ttaatagaacaagaagtttacttatcaagtcttgaaagggggacatgtttcaattggtgttcaaacaaaaattccagcttgtattagaaccttgaaatggtgaagttgtggaggttttct

SEQ ID NO: 633564 - DNA, 120 bp, Artificial Sequence
  ENSG00000180190_20 (sequence is synthesized)
ttgttccataatacagagacaagttcataatttttagtataacagctaagttgacaaattctaagtttcctcaggtaaatagtcataactgtccttttccctagagaagtgcttgctggg

SEQ ID NO: 633565 - DNA, 120 bp, Artificial Sequence
  ENSG00000180190_21 (sequence is synthesized)
atagtaaaaacatacaccatttcatgacttctgcaaatactttccagcggaagtcagtgtaggtttgtttttggctaacatggtcttgctgcgcaggaatgtaaacactgtgtttgaaac

SEQ ID NO: 633566 - DNA, 120 bp, Artificial Sequence
  ENSG00000180190_22 (sequence is synthesized)
tctggaaatcacgtgtgtggggagatggggacgcttcccatgttgtggggagctctgtggctgtgatggctgcagttgccgtgcctctgttggaacgctaagtgcctgcaactcacgtca

SEQ ID NO: 633567 - DNA, 120 bp, Artificial Sequence
  ENSG00000180190_23 (sequence is synthesized)
atcatagaattgtgacgcacagttggcaaaatagttctttatgctatttctcaaaatttgaggacaaacccagattgggattggaatatgcactgtaaatcaaatttttcttatctacaa

SEQ ID NO: 633568 - DNA, 120 bp, Artificial Sequence
  ENSG00000180190_24 (sequence is synthesized)
agactaatgtaaaaatgattttttcttctgtgcctgattaaattaactgtggtttttaatataaatatttattggtgtgctttgggagaaaaattatcttttcttgaaagaagttatcaa

SEQ ID NO: 633569 - DNA, 120 bp, Artificial Sequence
  ENSG00000180190_25 (sequence is synthesized)
agcaaatttattatcttcacaagttaatgggagaatgtggttttgattctgggtgtttgaattgtgtaaacacacagcttccttgtgtgaagagagttgtcctgtgctccttctactgta

SEQ ID NO: 633570 - DNA, 120 bp, Artificial Sequence
  ENSG00000180190_26 (sequence is synthesized)
ctttttttattttttaataggaaagtgatgtgcttcagagaagggttcctccttaatgttgaggttttttaaaaataaaaatactgtttttaagctctttccttattggtttgcatgatt

SEQ ID NO: 633571 - DNA, 120 bp, Artificial Sequence
  ENSG00000180190_27 (sequence is synthesized)
attggcatctgcttacgatggctttaatcactcagagctaatggcacctttcctatttagcctcattttagaatgcagtcaacacatgtagacttttcacaaataaatgaacaacttcaa

SEQ ID NO: 633572 - DNA, 120 bp, Artificial Sequence
  ENSG00000180190_28 (sequence is synthesized)
ccaccgcccaccagggctgggcgaggcttcctcccggcgcccccactatcccgcgacctcgggcgccggaggggatgagtcccggatgcccggcgcccaggccccgagggatgccctgaa

SEQ ID NO: 633573 - DNA, 120 bp, Artificial Sequence
  ENSG00000180198_0 (sequence is synthesized)
ccagcccgggagcgcgccacatgcagatcctgggatggccgccaggggccgccgggctctttgttttcctttctcacccgggtcggggccagaggcctgcagagcgcatgctctggggca

SEQ ID NO: 633574 - DNA, 120 bp, Artificial Sequence
  ENSG00000180198_1 (sequence is synthesized)
gttcgcggcccggcggggagcgccggagttccttgtggccgacgtgcaccaaggacaggaagatgtcacccaagcgcatagctaaaagaaggtcccccccagcagatgccatccccaaaa

SEQ ID NO: 633575 - DNA, 120 bp, Artificial Sequence
  ENSG00000180198_2 (sequence is synthesized)
gcaagaaggtgaaggtctcacacaggtcccacagcacagaacccggcttggtgctgacactaggccagggcgacgtgggccagctggggctgggtgagaatgtgatggagaggaagaagc

SEQ ID NO: 633576 - DNA, 120 bp, Artificial Sequence
  ENSG00000180198_3 (sequence is synthesized)
cggccctggtatccattccggaggatgttgtgcaggctgaggctgggggcatgcacaccgtgtgtctaagcaaaagtggccaggtctattccttcggctgcaatgatgagggtgccctgg

SEQ ID NO: 633577 - DNA, 120 bp, Artificial Sequence
  ENSG00000180198_4 (sequence is synthesized)
gaagggacacatcagtggagggctcggagatggtccctgggaaagtggagctgcaagagaaggtggtacaggtgtcagcaggagacagtcacacagcagccctcaccgatgatggccgtg

SEQ ID NO: 633578 - DNA, 120 bp, Artificial Sequence
  ENSG00000180198_5 (sequence is synthesized)
tcttcctctggggctccttccgggacaataacggtgtgattggactgttggagcccatgaagaagagcatggtgcctgtgcaggtgcagctggatgtgcctgtggtaaaggtggcctcag

SEQ ID NO: 633579 - DNA, 120 bp, Artificial Sequence
  ENSG00000180198_6 (sequence is synthesized)
gaaacgaccacttggtgatgctgacagctgatggtgacctctacaccttgggctgcggggaacagggccagctaggccgtgtgcctgagttatttgccaaccgtggtggccggcaaggcc

SEQ ID NO: 633580 - DNA, 120 bp, Artificial Sequence
  ENSG00000180198_7 (sequence is synthesized)
tcgaacgactcctggtccccaagtgtgtgatgctgaaatccaggggaagccggggccacgtgagattccaggatgccttttgtggtgcctatttcacctttgccatctcccatgagggcc

SEQ ID NO: 633581 - DNA, 120 bp, Artificial Sequence
  ENSG00000180198_8 (sequence is synthesized)
acgtgtacggcttcggcctctccaactaccatcagcttggaactccgggcacagaatcttgcttcataccccagaacctaacatccttcaagaattccaccaagtcctgggtgggcttct

SEQ ID NO: 633582 - DNA, 120 bp, Artificial Sequence
  ENSG00000180198_9 (sequence is synthesized)
ctggtggccagcaccatacagtctgcatggattcggaaggaaaagcatacagcctgggccgggctgagtatgggcggctgggccttggagagggtgctgaggagaagagcatacccaccc

SEQ ID NO: 633583 - DNA, 120 bp, Artificial Sequence
  ENSG00000180198_10 (sequence is synthesized)
cctcggtggcttgtggggcctctgtggggtatgctgtgaccaaggatggtcgtgttttcgcctggggcatgggcaccaactaccagctgggcacagggcaggatgaggacgcctggagcc

SEQ ID NO: 633584 - DNA, 120 bp, Artificial Sequence
  ENSG00000180198_11 (sequence is synthesized)
ctgtggagatgatgggcaaacagctggagaaccgtgtggtcttatctgtgtccagcgggggccagcatacagtcttattagtcaaggacaaagaacagagctgatgaagcctctgagggc

SEQ ID NO: 633585 - DNA, 120 bp, Artificial Sequence
  ENSG00000180198_12 (sequence is synthesized)
ctggcttctgtcctgcacaacctccctcacagaacagggaagcagtgacagctgcagatggcagcgggcctctccccagccctgagcactgtgtcagttcctgccttttctcatcagcag

SEQ ID NO: 633586 - DNA, 120 bp, Artificial Sequence
  ENSG00000180198_13 (sequence is synthesized)
aacagaatccttttcctcttttccttcctcctctttggaattttcctgggacctacagaataaagggggggatggacagggggttttcaaaaggaacatggctcactcagagctatatgg

SEQ ID NO: 633587 - DNA, 120 bp, Artificial Sequence
  ENSG00000180198_14 (sequence is synthesized)
ttagacgtttctccccttttccctaccttccatggtcctggttggccctggctttgcctactagaaaaccaaaacttcccccctggggttttgtgcccactctctgagaagttggggctc

SEQ ID NO: 633588 - DNA, 120 bp, Artificial Sequence
  ENSG00000180198_15 (sequence is synthesized)
catcaagccccattctagtcatgtgcccctttcctgtccctaacagtccacaggcaaacaaatggtacagtcataagagccatctgtcacggacccacgcccagaggaacgtgcagaaaa

SEQ ID NO: 633589 - DNA, 120 bp, Artificial Sequence
  ENSG00000180198_16 (sequence is synthesized)
aagcagagctacatggctgtgggcaactataagccaaatatttggctcagaacaggtgtccatgggacaaaaaagaacgatcctccacttgaccaagaaaaaagtgattctcccagaagc

SEQ ID NO: 633590 - DNA, 120 bp, Artificial Sequence
  ENSG00000180198_17 (sequence is synthesized)
acaaagcatactcttgcccctcaggtgttgcttgtgtacatcgtacccatccattcggcttcacctgcagccaacggcctggaatcgcaaagagacaccactctgggcagagcagagcag

SEQ ID NO: 633591 - DNA, 120 bp, Artificial Sequence
  ENSG00000180198_18 (sequence is synthesized)
ggtatggggtggggagagagggtggagggttttataaacaaacttaacagcaatattgaaaggaggtgggggattgagggagggacagagtgttggagggccagagactagtcctgagat

SEQ ID NO: 633592 - DNA, 120 bp, Artificial Sequence
  ENSG00000180198_19 (sequence is synthesized)
ggaaacagcaacttgtacagtggctgagaaaataggatatagttttgatttttttaattgtaaaatattttggagggagaacaaaatcttttaacattttgaataaatttagagttttat

SEQ ID NO: 633593 - DNA, 120 bp, Artificial Sequence
  ENSG00000180198_20 (sequence is synthesized)
gattcgcagtggtcgcttcttctccttggatttgttaaggattccaagtaactcttatttggagagaagacgatctgcacttcgcattttggcattgacatttaattttagggtccttta

SEQ ID NO: 633594 - DNA, 120 bp, Artificial Sequence
  ENSG00000180198_21 (sequence is synthesized)
tatagaagggagactacatgaatgtgtaagatcttggaggaagacagcagagagagagagagagatcagagatcccagggttaaaagttggagaaatttcacagtacatcatccaaaaga

SEQ ID NO: 633595 - DNA, 120 bp, Artificial Sequence
  ENSG00000180198_22 (sequence is synthesized)
gacagaataaactataaacctggtgttgaggctacaacttaagtgatgtcaagatgtcctgaggtgccaaccagctgtcagtgtgactgtaacaaaggcttcaaatctgtcaagaagtaa

SEQ ID NO: 633596 - DNA, 120 bp, Artificial Sequence
  ENSG00000180198_23 (sequence is synthesized)
ggaaaagttttgtttgaattttgtttgggtatttctgttttgggagtcactggattatttttaaatgctgcatagtacaatagaggcagggtggatcttttaataccaaaccaaaaaaaa

SEQ ID NO: 633597 - DNA, 120 bp, Artificial Sequence
  ENSG00000180198_24 (sequence is synthesized)
ggcgggccgggtgcgcgcggccgcccgggcgggggatgggtctctgccgcgaggaggatggttttgtccggcatgcgcttggagaaggcggtttgcagatcggggagggagccctgcccg

SEQ ID NO: 633598 - DNA, 120 bp, Artificial Sequence
  ENSG00000180198_25 (sequence is synthesized)
ggagagggtgggtcgtaggagctcgagggtctcccgctgtggacctttgggagccgtgtgtcttgaactccgcagcagctcagtctgtcagcagattatttgctggccatttattgcgtc

SEQ ID NO: 633599 - DNA, 120 bp, Artificial Sequence
  ENSG00000180198_26 (sequence is synthesized)
ctctcttgcggggctgggggacagtagtgagaagagcaggcccgtgtcattagcgaactatgcccttgaacccaggcgacggacgctactggacaggaagatgtcacccaagcgcatagc

SEQ ID NO: 633600 - DNA, 120 bp, Artificial Sequence
  ENSG00000180198_27 (sequence is synthesized)
attcattgtgcatcctttgcggggtcgtctaacccctccaagccagttttgtcatctgtaaagtgagaatgtccatatcctgatgggaggtggcctcactgtgggaggagattgagaagg

SEQ ID NO: 633601 - DNA, 120 bp, Artificial Sequence
  ENSG00000180198_28 (sequence is synthesized)
caagaaggtgaaggacacgagggccgctgcctcccgccgcgttcctggcgcccgctcctgccaaggtgcctgcgggccgagccctcctgaccagaaaacccgaccagtctcacacaggtc

SEQ ID NO: 633602 - DNA, 120 bp, Artificial Sequence
  ENSG00000180205_0 (sequence is synthesized)
aacaccaggacgcaagacaagtggggcatctgtaggggccacagtgagctctcaatgatcatctgtagtggcagcaaaagagttcgagccccacttcaaacaacttcataataaaaggcc

SEQ ID NO: 633603 - DNA, 120 bp, Artificial Sequence
  ENSG00000180205_1 (sequence is synthesized)
agacaaaagagctgtcagccagttactacagacactcaatgcagacaccttcagagtattgggaaaagacttgccttctgccagaacttaacccaaatacacacagagagcaccatgaag

SEQ ID NO: 633604 - DNA, 120 bp, Artificial Sequence
  ENSG00000180205_2 (sequence is synthesized)
aaagatccctttctagatatgataagagaaactgagcagtgctgggtacagcctccatataagtactgtgagaaaaggtgtactaaaataatgacttgtgtacgtccaaatcatacatgc

SEQ ID NO: 633605 - DNA, 120 bp, Artificial Sequence
  ENSG00000180205_3 (sequence is synthesized)
tgctggacctactgtggaaacatctgcttagacaacgaagagccccttaaatcaatgctaaacccctagattctattggccgatcactactgtgggctgaaggatgaccatctggtctaa

SEQ ID NO: 633606 - DNA, 120 bp, Artificial Sequence
  ENSG00000180205_4 (sequence is synthesized)
gaagagtgctgcctacttccttcttgggacacccactggctctagctggtaacctttctgctatttccttgacctctttaccctgaagcttttgtcaaataaactgctacatcaacctga

SEQ ID NO: 633607 - DNA, 120 bp, Artificial Sequence
  ENSG00000180209_0 (sequence is synthesized)
gactccttgcttctttccagccggagccgctgccttgccccccggagactgaagacatggcacccaagagggccaagagaaggacagtagagggcggaagctccagcgtcttctccatgt

SEQ ID NO: 633608 - DNA, 120 bp, Artificial Sequence
  ENSG00000180209_1 (sequence is synthesized)
tcgaccagactcagatccaggagttcaaagaggccttcactgtgatcgaccagaaccgtgatggtattatagacaaggaggaccttcgggacaccttcgcagccatgggccgcctcaatg

SEQ ID NO: 633609 - DNA, 120 bp, Artificial Sequence
  ENSG00000180209_2 (sequence is synthesized)
ccgtcttcctgaccatgttcggggagaagctcaagggtgccgaccctgaggatgtgatcaccggagccttcaaggtcttggaccctgagggaaagggcaccatcaagaagaagttcctgg

SEQ ID NO: 633610 - DNA, 120 bp, Artificial Sequence
  ENSG00000180209_3 (sequence is synthesized)
aggagctgctgaccacgcagtgtgaccgcttctcccaggaggagatcaagaacatgtgggcggccttcccccccgacgtgggcggcaacgtcgactacaaaaacatctgctacgtcatca

SEQ ID NO: 633611 - DNA, 120 bp, Artificial Sequence
  ENSG00000180209_4 (sequence is synthesized)
cgcacggcgacgccaaggaccaggagtaggggcacccgcgggcctccgctgcccgacgcttctgttcggcccgacctccaccccggctcccaataaaatttaactgatctttgtttctta

SEQ ID NO: 633612 - DNA, 120 bp, Artificial Sequence
  ENSG00000180209_5 (sequence is synthesized)
ggtggctggggcctcagtgcccagaaaagaaaatgtcttagaggcctttgctcaggccatgccctccgcccagcacatctgctcctccacctgcacctgactccctggccctcgtgaagc

SEQ ID NO: 633613 - DNA, 120 bp, Artificial Sequence
  ENSG00000180209_6 (sequence is synthesized)
tgctgaccacgcagtgtgaccgcttctcccaggaggaggtgagtggggaccggggcggggccggagcagcaaaggggctggggccggggagactaagggcctgtgcgagacgcccctacg

SEQ ID NO: 633614 - DNA, 120 bp, Artificial Sequence
  ENSG00000180209_7 (sequence is synthesized)
tctttccccagatcaagaacatgtgggcggccttcccccccgacgtgggcggcaacgtcgactacaaaaacatctgctacgtcatcacgcacggcgacgccaaggaccaggagtaggggc

SEQ ID NO: 633615 - DNA, 120 bp, Artificial Sequence
  ENSG00000180210_0 (sequence is synthesized)
ttaacccagaggggtcaggacagacaattcctcagtgacccaggagctgacacactatggcgcacgtccgaggcttgcagctgcctggctgcctggccctggctgccctgtgtagccttg

SEQ ID NO: 633616 - DNA, 120 bp, Artificial Sequence
  ENSG00000180210_1 (sequence is synthesized)
tgcacagccagcatgtgttcctggctcctcagcaagcacggtcgctgctccagcgggtccggcgagccaacaccttcttggaggaggtgcgcaagggcaacctggagcgagagtgcgtgg

SEQ ID NO: 633617 - DNA, 120 bp, Artificial Sequence
  ENSG00000180210_2 (sequence is synthesized)
aggagacgtgcagctacgaggaggccttcgaggctctggagtcctccacggctacggatgtgttctgggccaagtacacagcttgtgagacagcgaggacgcctcgagataagcttgctg

SEQ ID NO: 633618 - DNA, 120 bp, Artificial Sequence
  ENSG00000180210_3 (sequence is synthesized)
catgtctggaaggtaactgtgctgagggtctgggtacgaactaccgagggcatgtgaacatcacccggtcaggcattgagtgccagctatggaggagtcgctacccacataagcctgaaa

SEQ ID NO: 633619 - DNA, 120 bp, Artificial Sequence
  ENSG00000180210_4 (sequence is synthesized)
tcaactccactacccatcctggggccgacctacaggagaatttctgccgcaaccccgacagcagcaccacgggaccctggtgctacactacagaccccaccgtgaggaggcaggaatgca

SEQ ID NO: 633620 - DNA, 120 bp, Artificial Sequence
  ENSG00000180210_5 (sequence is synthesized)
gcatccctgtctgtggccaggatcaagtcactgtagcgatgactccacgctccgaaggctccagtgtgaatctgtcacctccattggagcagtgtgtccctgatcgggggcagcagtacc

SEQ ID NO: 633621 - DNA, 120 bp, Artificial Sequence
  ENSG00000180210_6 (sequence is synthesized)
aggggcgcctggcggtgaccacacatgggctcccctgcctggcctgggccagcgcacaggccaaggccctgagcaagcaccaggacttcaactcagctgtgcagctggtggagaacttct

SEQ ID NO: 633622 - DNA, 120 bp, Artificial Sequence
  ENSG00000180210_7 (sequence is synthesized)
gccgcaacccagacggggatgaggagggcgtgtggtgctatgtggccgggaagcctggcgactttgggtactgcgacctcaactattgtgaggaggccgtggaggaggagacaggagatg

SEQ ID NO: 633623 - DNA, 120 bp, Artificial Sequence
  ENSG00000180210_8 (sequence is synthesized)
tgggctgcgacctctgttcgagaagaagtcgctggaggacaaaaccgaaagagagctcctggaatcctacatcgacgggcgcattgtggagggctcggatgcagagatcggcatgtcacc

SEQ ID NO: 633624 - DNA, 120 bp, Artificial Sequence
  ENSG00000180210_9 (sequence is synthesized)
ttggcaggtgatgcttttccggaagagtccccaggagctgctgtgtggggccagcctcatcagtgaccgctgggtcctcaccgccgcccactgcctcctgtacccgccctgggacaagaa

SEQ ID NO: 633625 - DNA, 120 bp, Artificial Sequence
  ENSG00000180210_10 (sequence is synthesized)
cttcaccgagaatgaccttctggtgcgcattggcaagcactcccgcaccaggtacgagcgaaacattgaaaagatatccatgttggaaaagatctacatccaccccaggtacaactggcg

SEQ ID NO: 633626 - DNA, 120 bp, Artificial Sequence
  ENSG00000180210_11 (sequence is synthesized)
ggagaacctggaccgggacattgccctgatgaagctgaagaagcctgttgccttcagtgactacattcaccctgtgtgtctgcccgacagggagacggcagccagcttgctccaggctgg

SEQ ID NO: 633627 - DNA, 120 bp, Artificial Sequence
  ENSG00000180210_12 (sequence is synthesized)
atacaaggggcgggtgacaggctggggcaacctgaaggagacgtggacagccaacgttggtaaggggcagcccagtgtcctgcaggtggtgaacctgcccattgtggagcggccggtctg

SEQ ID NO: 633628 - DNA, 120 bp, Artificial Sequence
  ENSG00000180210_13 (sequence is synthesized)
caaggactccacccggatccgcatcactgacaacatgttctgtgctggttacaagcctgatgaagggaaacgaggggatgcctgtgaaggtgacagtgggggaccctttgtcatgaagag

SEQ ID NO: 633629 - DNA, 120 bp, Artificial Sequence
  ENSG00000180210_14 (sequence is synthesized)
cccctttaacaaccgctggtatcaaatgggcatcgtctcatggggtgaaggctgtgaccgggatgggaaatatggcttctacacacatgtgttccgcctgaagaagtggatacagaaggt

SEQ ID NO: 633630 - DNA, 120 bp, Artificial Sequence
  ENSG00000180210_15 (sequence is synthesized)
cattgatcagtttggagagtagggggccactcatattctgggctcctggaaccaatcccgtgaaagaattatttttgtgtttctaaaactatggttcccaataaaagtgactctcagcga

SEQ ID NO: 633631 - DNA, 120 bp, Artificial Sequence
  ENSG00000180210_16 (sequence is synthesized)
agcatggtaagggagtgcttgcaggctggaacaggctggaggactggggtgtgggcccatgggctggggtctcctggctggacagagcacacagagctggcccctaatgttcctggctcc

SEQ ID NO: 633632 - DNA, 120 bp, Artificial Sequence
  ENSG00000180210_17 (sequence is synthesized)
ttcgaggctctggagtcctccacggctacggtgagcctgggctgctcggacggtgccggggcctcagaccgggcccaactctagacacttccacagagaagcaagcgaggaacgccacag

SEQ ID NO: 633633 - DNA, 120 bp, Artificial Sequence
  ENSG00000180210_18 (sequence is synthesized)
ccccttcgctgctcacagcctcatttcaactctgagcccctcctcacagggctggcaagaggagcggcctcagcctttcctgggggtctctgtgcctggactgtgtccctgtgcagctcc

SEQ ID NO: 633634 - DNA, 120 bp, Artificial Sequence
  ENSG00000180210_19 (sequence is synthesized)
atgacatggggaggcctccacagtcttcagacatccacctgccctggagctctgtgtccacatggcctcctcagcggcagactcccacaccacccttgaggggtgggactctggggaggc

SEQ ID NO: 633635 - DNA, 120 bp, Artificial Sequence
  ENSG00000180210_20 (sequence is synthesized)
gtaactgtgctgagggtctgggtacgaactaccgagggcatgtgaacatcacccggtcaggcattgagtgccagctatggaggagtcgctacccacataagcctgagtgagtgaggggcc

SEQ ID NO: 633636 - DNA, 120 bp, Artificial Sequence
  ENSG00000180219_0 (sequence is synthesized)
agcagtggatggttcaggttgggaagaagagcagtgggattgccagttaaggttgtggaatcaaagagcaaaggctgttgtgaagtggaatatcaggctcaaatggaggtccctcccgaa

SEQ ID NO: 633637 - DNA, 120 bp, Artificial Sequence
  ENSG00000180219_1 (sequence is synthesized)
tgagcactgacacctgtgtgcccggacatccacgagggccccaacacctgtgctcctgacagctccatgcactaagcagggcacagtctggatccaggggactgactgtctctggcattg

SEQ ID NO: 633638 - DNA, 120 bp, Artificial Sequence
  ENSG00000180219_2 (sequence is synthesized)
agcggttggtaatcaataccccaccctccctgttctcagtcacttggggacaaaaaagaaagcctgcagaacacgactgctggcccacctgccagagtagccaaggaaacaggatgcccg

SEQ ID NO: 633639 - DNA, 120 bp, Artificial Sequence
  ENSG00000180219_3 (sequence is synthesized)
ctaaagcatgttaaggaaggtgtggagcagctgctgggaactgtcttgatttaaaggaagacatggaggactgctgtatgctaccgtattacacggcccaaagcagccccgcaatgggca

SEQ ID NO: 633640 - DNA, 120 bp, Artificial Sequence
  ENSG00000180219_4 (sequence is synthesized)
tgtttaacacctccatggggaagctgcagcggcaactgtacaaaggcgagtatactatattcaggtatgcacccatgtttgagagcgactttatccagatcagcaaaagaggagaagtga

SEQ ID NO: 633641 - DNA, 120 bp, Artificial Sequence
  ENSG00000180219_5 (sequence is synthesized)
ttgacgtgcacaaccgtgcccgaatggtaacaatgggcatcgttcgcaccagcccctgcctcacactacctgatgtcatgctgctggcccgaccagctgctgtctgtgacaatgccaggt

SEQ ID NO: 633642 - DNA, 120 bp, Artificial Sequence
  ENSG00000180219_6 (sequence is synthesized)
gtggtcctgccacccagaaaagagaaagtccgcctgcagagatcttagaactaaccaggctgcttcccttgatgtttgtgaaaataaccatccacaacagcgtaaaaaaacagctccacc

SEQ ID NO: 633643 - DNA, 120 bp, Artificial Sequence
  ENSG00000180219_7 (sequence is synthesized)
cctttttgttcactgggaaaaccttgtttacatcctgagaccaccagtggaggcttacagtgataccagggctatcctagctgggaacacattggactcatctgtgttggaggaagtgca

SEQ ID NO: 633644 - DNA, 120 bp, Artificial Sequence
  ENSG00000180219_8 (sequence is synthesized)
gaggagcccagtgggatatgccatgaagttttgtgaagagaaggagcaattcagaatcagtagacttcacatgaatgctgaaatgtttgggtccacctattgtgattatacaatagagat

SEQ ID NO: 633645 - DNA, 120 bp, Artificial Sequence
  ENSG00000180219_9 (sequence is synthesized)
atgaatccaacatacctcccacatatactacgttcaagagttcacacacccctgcagtcataaaacctatagtgcctgatgaaggggcagggtagcaacagcagtagtgatgacagtaag

SEQ ID NO: 633646 - DNA, 120 bp, Artificial Sequence
  ENSG00000180219_10 (sequence is synthesized)
caccaccacaggtaccatggatgtggctgcaaccaagtctgcagactcaggagagaaacacagcactggcaaaagcagccttcagaggtccaggaggaagtatagccagcatggctatta

SEQ ID NO: 633647 - DNA, 120 bp, Artificial Sequence
  ENSG00000180219_11 (sequence is synthesized)
gtgggtgcttccatgtcttaatcttgttatagcaagggctgcatgcacattcttgtcctaaaagggtacttcaagcatatcagtaagtgctactggcctctccctagagagcagtatgaa

SEQ ID NO: 633648 - DNA, 120 bp, Artificial Sequence
  ENSG00000180219_12 (sequence is synthesized)
tgtggtggctacaggagcagagagatactgagaaggctgttgcattgacagtatctctctgctactcaaaggctgactctctgctactcagcattgggagtcagttatctcaactctgca

SEQ ID NO: 633649 - DNA, 120 bp, Artificial Sequence
  ENSG00000180219_13 (sequence is synthesized)
ggatgaggccacatgcgtgaatgggatggaagccagagggtctctacctagctggattgactctgcagtaataacctcaaagcccagtactacacatggtgcagaggtggacatctcacc

SEQ ID NO: 633650 - DNA, 120 bp, Artificial Sequence
  ENSG00000180219_14 (sequence is synthesized)
taagactgtggaggggaacaatgtgattcaccataataaaatccatcaactcaaattatctgctctaataacatatgctctattgacaggaagggtagcaataaaactaatggcaattta

SEQ ID NO: 633651 - DNA, 120 bp, Artificial Sequence
  ENSG00000180228_0 (sequence is synthesized)
ccctcgctggagcaacgcaagcaggaggcgggggagtcggaggaggtggcggcgctggagctcctcccggggaccagcgacccggggagcgagcacgtcgctccgcaccgctcttcctcc

SEQ ID NO: 633652 - DNA, 120 bp, Artificial Sequence
  ENSG00000180228_1 (sequence is synthesized)
agccgctgagccgtcccttctcgccatgtcccagagcaggcaccgcgccgaggccccgccgctggagcgcgaggacagtgggaccttcagtttggggaagatgataacagctaagccagg

SEQ ID NO: 633653 - DNA, 120 bp, Artificial Sequence
  ENSG00000180228_2 (sequence is synthesized)
gaaaacaccgattcaggtattacacgaatacggcatgaagaccaagaacatcccagtttatgaatgtgaaagatctgatgtgcaaatacacgtgcccactttcaccttcagagtaaccgt

SEQ ID NO: 633654 - DNA, 120 bp, Artificial Sequence
  ENSG00000180228_3 (sequence is synthesized)
tggtgacataacctgcacaggtgaaggtacaagtaagaagctggcgaaacatagagctgcagaggctgccataaacattttgaaagccaatgcaagtatttgctttgcagttcctgaccc

SEQ ID NO: 633655 - DNA, 120 bp, Artificial Sequence
  ENSG00000180228_4 (sequence is synthesized)
cttaatgcctgacccttccaagcaaccaaagaaccagcttaatcctattggttcattacaggaattggctattcatcatggctggagacttcctgaatataccctttcccaggagggagg

SEQ ID NO: 633656 - DNA, 120 bp, Artificial Sequence
  ENSG00000180228_5 (sequence is synthesized)
acctgctcataagagagaatatactacaatttgcaggctagagtcatttatggaaactggaaagggggcatcaaaaaagcaagccaaaaggaatgctgctgagaaatttcttgccaaatt

SEQ ID NO: 633657 - DNA, 120 bp, Artificial Sequence
  ENSG00000180228_6 (sequence is synthesized)
tagtaatatttctccagagaaccacatttctttaacaaatgtagtaggacattctttaggatgtacttggcattccttgaggaattctcctggtgaaaagatcaacttactgaaaagaag

SEQ ID NO: 633658 - DNA, 120 bp, Artificial Sequence
  ENSG00000180228_7 (sequence is synthesized)
tgaactgagcgccaatggacaatatcaatgtcttgctgaactgtccaccagccccatcacagtctgtcatggctccggtatctcctgtggcaatgcacaaagtgatgcagctcacaatgc

SEQ ID NO: 633659 - DNA, 120 bp, Artificial Sequence
  ENSG00000180228_8 (sequence is synthesized)
tttgcagtatttaaagataatagcagaaagaaagtaaatctggagcaacttaaaaaatctttcagtagcacataaaaagttcccctctggccccttcccaagtaaaacttttaccgtagt

SEQ ID NO: 633660 - DNA, 120 bp, Artificial Sequence
  ENSG00000180228_9 (sequence is synthesized)
gtttatgtcttgtttctaaatctcttcatagattccatcaacactccagatttaattatctcctcatagttgttattaagctctttttaatggcttcaactttgtatcagtatactgtat

SEQ ID NO: 633661 - DNA, 120 bp, Artificial Sequence
  ENSG00000180228_10 (sequence is synthesized)
ttataaactttgtaccacaagagagagtgtagcacccattttacagtgccatgcacatcagagaaagaaactgcatgtttgttgttgatgatgaaataaaaatgctagcgacagtctttc

SEQ ID NO: 633662 - DNA, 120 bp, Artificial Sequence
  ENSG00000180228_11 (sequence is synthesized)
ttactggtgcttaagctcttctttgcacaaagctttataaagggaattcaaaggaagccctttagaattagagtcttgagggacagcactaacaggcctttattaagtatgattgattgt

SEQ ID NO: 633663 - DNA, 120 bp, Artificial Sequence
  ENSG00000180228_12 (sequence is synthesized)
taaatttcagggaacatgattggtctgctgtgtatttgaattcatgtaacaaagaactgttacgatgggattctgctcattttattaaaaagctactgacttgactgtcatcctgttctt

SEQ ID NO: 633664 - DNA, 120 bp, Artificial Sequence
  ENSG00000180228_13 (sequence is synthesized)
gttagccattgtgaataagattttaatgttgataattctgttatttacatatctctaatttactttgaaattcaaaggtgaaaataaaaaatgatggcctaagtaaaatttacaaacata

SEQ ID NO: 633665 - DNA, 120 bp, Artificial Sequence
  ENSG00000180228_14 (sequence is synthesized)
gcggcgcgcggggcgggcggaggtgacgctcggtcggcgcgcccgggaagggatcgtcaggttttccctgagaggctgcggcgctgctgccagccctgttctgttgagaatctctcctac

SEQ ID NO: 633666 - DNA, 120 bp, Artificial Sequence
  ENSG00000180228_15 (sequence is synthesized)
gcaagactctgtctccaaacaaacaaaaaaaagacatgccaaatgacatggcaggtattgggttctcccccactggtgatggccatgctgtttctgtatagcctgaaggtgaacccaacc

SEQ ID NO: 633667 - DNA, 120 bp, Artificial Sequence
  ENSG00000180228_16 (sequence is synthesized)
attaagtacatttgtagaaatgaggggtatggagtgtcctttctgcatcttggcactttgtcagcaaaaaaagctaacaaactttactatatttgtgcttcttgacagataaaatgggaa

SEQ ID NO: 633668 - DNA, 120 bp, Artificial Sequence
  ENSG00000180228_17 (sequence is synthesized)
gaacatgcttacaaaagcaacaaagtgaacagttgttagcatcctacctctcaaattctatttccttatgaaaacttatcatccattaaagaaaactttatccaatcaaatccagcaatt

SEQ ID NO: 633669 - DNA, 120 bp, Artificial Sequence
  ENSG00000180228_18 (sequence is synthesized)
ttatctatacacacacaaacacacacacatatattcagctttgaatttctatatgcagaatatccttcttgcagattatccatgtgctctgttaggccatttccctccccattattcagc

SEQ ID NO: 633670 - DNA, 120 bp, Artificial Sequence
  ENSG00000180228_19 (sequence is synthesized)
cagtcctttggtctccttttcctgcacagtgagcttttctatagttttcttcaccttctgtcccccactttatgcaagtctgttgtttgctgtccctactcctcatgtgttcttggccag

SEQ ID NO: 633671 - DNA, 120 bp, Artificial Sequence
  ENSG00000180228_20 (sequence is synthesized)
ctgtgggtttggaagtctatagctaggaggggagggactttaggaactgatggcagtgaaacctgtagatggtctcctctggtgttgccaaagagggcggtagtagcctgtttttctagt

SEQ ID NO: 633672 - DNA, 120 bp, Artificial Sequence
  ENSG00000180228_21 (sequence is synthesized)
tgatgtctgataccagctcactgtggtttaatgcaagaacaccattcgtagcacaaaactgcttcagttttggtattggggtataaaaatataaaatgcgggaatgtctttgagaaatag

SEQ ID NO: 633673 - DNA, 120 bp, Artificial Sequence
  ENSG00000180228_22 (sequence is synthesized)
agggtcttccctcttttttctgttgcagaatatcactattcttttcaaacatatacatagaaatgggatcaaaattaagaaaacacttatgtgattgagccattgcataaaattactatt

SEQ ID NO: 633674 - DNA, 120 bp, Artificial Sequence
  ENSG00000180228_23 (sequence is synthesized)
tcaatacttggtgttgcttttcagttcggaaaagttctctttttgccagacagctgtgaggaacaggctctgaaactgagacctctcatctcaggtcgttagggcttttcagctgcatct

SEQ ID NO: 633675 - DNA, 120 bp, Artificial Sequence
  ENSG00000180228_24 (sequence is synthesized)
ctccagccgctgagccgtcccttctcgccatgtcccagagcaggcaccgcgccgaggccccgccgctggagcgcgaggacagtgggaccttcaggtcagcgtgcgggcagtcagggcccc

SEQ ID NO: 633676 - DNA, 120 bp, Artificial Sequence
  ENSG00000180228_25 (sequence is synthesized)
cttcaggtcagcgtgcgggcagtcagggccccagggccgggagcgttgggcggcagggccggggcgcggggagccggccctccagaggcattctgggtaaagccgtgcccggcgcccacg

SEQ ID NO: 633677 - DNA, 120 bp, Artificial Sequence
  ENSG00000180228_26 (sequence is synthesized)
ctgcggagtgactgccgcagcggggccggaagacaggtgcgccccagcctcgccagctctggccctggcctccggggaactcggcgcctccctcgtcaccgtcggtggcggttaaaactg

SEQ ID NO: 633678 - DNA, 120 bp, Artificial Sequence
  ENSG00000180228_27 (sequence is synthesized)
aaaggcttaactttaggcctcaacgaccctagacccacgccggacaatccctctaatccctctctcccggcaagaaacggcctcctgctaaggacaaagaactgcggcctaggggccagt

SEQ ID NO: 633679 - DNA, 80 bp, Artificial Sequence
  ENSG00000180233_0 (sequence is synthesized)
aaacacacgggccgggcgcaccctgcagccgcgccgctccgcggccttccggcgcggggccggggaacctcctccccatc

SEQ ID NO: 633680 - DNA, 120 bp, Artificial Sequence
  ENSG00000180233_1 (sequence is synthesized)
cccggcccctccttcgcagggggagcgaggcgacggttgccgggaagcgcgcgccacctctccctcccatttttcgttctcccctcgcgcgccacccgtttttcctctttctccgttaat

SEQ ID NO: 633681 - DNA, 120 bp, Artificial Sequence
  ENSG00000180233_2 (sequence is synthesized)
taataacagctgggtggctgggggaggagggaaggtggccccggcggagtctgggcgggcgcctcccactcagccgccagccgccgtgggagccggaggatggcggcggtagcagcggcc

SEQ ID NO: 633682 - DNA, 120 bp, Artificial Sequence
  ENSG00000180233_3 (sequence is synthesized)
gagaggaggcggtgccgagatcgggggcgccgagcgcggcagcagagagcggtagcggcccgtcgtggcgcaccagaaccgaaaccagcggcagccgcacggccacttgagccgcccctt

SEQ ID NO: 633683 - DNA, 120 bp, Artificial Sequence
  ENSG00000180233_4 (sequence is synthesized)
cctgctggagccagcgaggggtgcctgcagccgggaccccttcctctccgcgtctcctcgtctcccgcgcccgcgtcaggccgtcggcctcgcccgccgccccaagaagagcgcgccggg

SEQ ID NO: 633684 - DNA, 80 bp, Artificial Sequence
  ENSG00000180233_5 (sequence is synthesized)
gcctctctgggccggccgcggcgcctgggccctgccctctagctcccgcgctcgctcccgccctcccggctctcggggcg

SEQ ID NO: 633685 - DNA, 120 bp, Artificial Sequence
  ENSG00000180233_6 (sequence is synthesized)
tcggggcgcagcgcgcgggcccggcccggggcagggcggacatgggcgccaaacagagcggcccggccgccgctaacggccgcacgcgcgcgtactcgggctcggatctaccttccagta

SEQ ID NO: 633686 - DNA, 120 bp, Artificial Sequence
  ENSG00000180233_7 (sequence is synthesized)
ctcggatctaccttccagtagcagcggaggcgccaatgggaccgcgggcggcggcgggggcgctcgggccgccgccgcggggaggttcccggctcaggtgcccagcgcgcaccagcccag

SEQ ID NO: 633687 - DNA, 120 bp, Artificial Sequence
  ENSG00000180233_8 (sequence is synthesized)
ccgcgcagccgctccctcggcggggccgtggggagcgtggcgtcgggggcccgcgcggcgcagtcccccttcagcatcccgaacagcagcagcggcccgtacggctcgcaggactcggtg

SEQ ID NO: 633688 - DNA, 120 bp, Artificial Sequence
  ENSG00000180233_9 (sequence is synthesized)
ccgtacggctcgcaggactcggtgcacagcagccctgaggacggcggcggcggccgggaccggccggtgggcgggagccccggcgggccgcgcctggtgatcggctccttaccagctcac

SEQ ID NO: 633689 - DNA, 120 bp, Artificial Sequence
  ENSG00000180233_10 (sequence is synthesized)
cagctcacctctcgccgcacatgtttggaggatttaagtgccctgtatgctcaaaatttgtatcctcagatgaaatggatttgcatcttgtaatgtgtttaacaaagccacgaataacct

SEQ ID NO: 633690 - DNA, 120 bp, Artificial Sequence
  ENSG00000180233_11 (sequence is synthesized)
ataatgaggatgtactgagtaaagatgctggggaatgtgcaatatgccttgaagaattgcagcagggagatactatagcacgactgccttgtctatgcatatatcataaaggctgcatag

SEQ ID NO: 633691 - DNA, 120 bp, Artificial Sequence
  ENSG00000180233_12 (sequence is synthesized)
atgaatggtttgaagtaaatagatcttgccctgagcacccttcagattaagcgtcagcttcctgttttataggttttcttgtcttgacaagatgcttgaaaaaccaagaggatatgaaaa

SEQ ID NO: 633692 - DNA, 120 bp, Artificial Sequence
  ENSG00000180233_13 (sequence is synthesized)
gagttttgtgagacttggtaatacagagatggacaatcgtactggggtaaaaaaaccctgctgaagagaggacagtgaccacagaactcagtgtaccaaacatgcatacaaaggacacac

SEQ ID NO: 633693 - DNA, 120 bp, Artificial Sequence
  ENSG00000180233_14 (sequence is synthesized)
agggattttgaaaatgctgcacatcccttaatagtcatctacataggtaatactgataaacattttgtattcagacgccaaagttaactgatttaaaagttgatttactttttattaagt

SEQ ID NO: 633694 - DNA, 120 bp, Artificial Sequence
  ENSG00000180233_15 (sequence is synthesized)
tctccagagctgcacaactagttatgttttgatttgttttgttttttaatttggggtctctttgttttccccaacataatgttcataatgtttctgcattcatctgttcttaaattgaaa

SEQ ID NO: 633695 - DNA, 120 bp, Artificial Sequence
  ENSG00000180233_16 (sequence is synthesized)
aacatataatttacttcttataaattgaagtcttaaatgtgaaaccaagaaatgtaatcaagcagtaaaaacatctgaatgtagaccatgatctcaagttcttccattttctcccccacg

SEQ ID NO: 633696 - DNA, 120 bp, Artificial Sequence
  ENSG00000180233_17 (sequence is synthesized)
agtggaaaatagacttctacataggaaagctaaaatatgttaatatttttaaattaaaggtttaatatcagaatgcagtccaaagagcaaatcatattacataattacattttaattaaa

SEQ ID NO: 633697 - DNA, 120 bp, Artificial Sequence
  ENSG00000180233_18 (sequence is synthesized)
tatagaatattctactgaattgcaatttattaaatattcttatcctcttaaataaaactgctcaacagttaatcagcagtgaatcatcttgcagctatgcaatttaaaaaaaatacagat

SEQ ID NO: 633698 - DNA, 120 bp, Artificial Sequence
  ENSG00000180233_19 (sequence is synthesized)
taccaatttcaagtgctgccagctaaaataactgttttaacgggtatcttttgtttgttcttttcacttaattattttattgtgctttgcatctccaggcagttctctcacatttgggta

SEQ ID NO: 633699 - DNA, 120 bp, Artificial Sequence
  ENSG00000180233_20 (sequence is synthesized)
aaatgtttagcaggctgtaaacttaagaaaagggtaaaataaaattttctggagaggaacttggaatttgagggagattttatatacctttaaaaactgtaatttaattgggatgccagg

SEQ ID NO: 633700 - DNA, 120 bp, Artificial Sequence
  ENSG00000180233_21 (sequence is synthesized)
tttatagcaatttgcaactttaattttccagataatctggaggttagcatttgataaatgattttttaaagtagatatgaagattttgttaatttataatttattcatgtgttattactg

SEQ ID NO: 633701 - DNA, 120 bp, Artificial Sequence
  ENSG00000180233_22 (sequence is synthesized)
taattgaaaatgttatagacacttttaaattcagtttgtgtagaaagaaatgtgttaaacaaaattatgttaataaatattcccacataatacatctgaatggttaaaaatactggaaga

SEQ ID NO: 633702 - DNA, 120 bp, Artificial Sequence
  ENSG00000180233_23 (sequence is synthesized)
gttgtcagggctacaatagtgaatgtccttttttttaatatcaaaaatatcgataagtaggttttgtgttttcaacgtagggaaaatgttatcagtgaataggtggtgtactttacttgg

SEQ ID NO: 633703 - DNA, 120 bp, Artificial Sequence
  ENSG00000180233_24 (sequence is synthesized)
tataatttaaagttgcacagtaagtactgtttccttattttaatctttctttactcataatgtatttaagaatttgctgttttatttaacgctgctactcttaatcttctctaaattttt

SEQ ID NO: 633704 - DNA, 120 bp, Artificial Sequence
  ENSG00000180233_25 (sequence is synthesized)
ccccctactttcttgcttctgtttcacattttttaaaagggcaagtacaggagcaactgctgctacccagaaaaatgtgtgtattataaataattaaagagtttttaattgctttctgta

SEQ ID NO: 633705 - DNA, 120 bp, Artificial Sequence
  ENSG00000180233_26 (sequence is synthesized)
ggagactgaggagtgttaaagtgaacagacgctttcttgactactgctagtgtcgtccatcacctttgttttaaaacaggtcttaagggtatttcctaatatttaaaaatgttgatggta

SEQ ID NO: 633706 - DNA, 120 bp, Artificial Sequence
  ENSG00000180233_27 (sequence is synthesized)
ttttagggtttgtttggctttaatttacgtctacgtttttttttccactgtcaagtagctgttgttcataagagcataatatgagtggtcaaatagcctttaatgatgcagcaaggatgg

SEQ ID NO: 633707 - DNA, 120 bp, Artificial Sequence
  ENSG00000180245_0 (sequence is synthesized)
agttcataattatcgaaggcttattatgaagggtgtttcggtatcttccctccaaaatgctaagaaataatttaggcaacagttcagactctaaaaatgaagatggctcggtcttttcac

SEQ ID NO: 633708 - DNA, 120 bp, Artificial Sequence
  ENSG00000180245_1 (sequence is synthesized)
agactgaacacaatattgttgcaacttacttgattatggcaggtatgataagtattatcagcaacataatagttctgggcatcttcattaagtacaaggaacttcggacacccacaaatg

SEQ ID NO: 633709 - DNA, 120 bp, Artificial Sequence
  ENSG00000180245_2 (sequence is synthesized)
caattattattaacctggctgttactgatataggggtcagtagcattggctatcccatgtctgctgcctcagatctgtatggaagttggaaatttggatacgcaggctgtcaggtttatg

SEQ ID NO: 633710 - DNA, 120 bp, Artificial Sequence
  ENSG00000180245_3 (sequence is synthesized)
ctggattgaatattttttttggaatggcaagcattggattactcacggtcgtggctgtggaccgatacctgaccatctgccttcctgacgtagggagaagaatgaccaccaacacttaca

SEQ ID NO: 633711 - DNA, 120 bp, Artificial Sequence
  ENSG00000180245_4 (sequence is synthesized)
tcggcttgattctgggagcctggatcaatggcctgttttgggctttgatgcctatcatagggtgggctagttatgccccagatcctactggtgctacgtgtaccataaactggaggaaaa

SEQ ID NO: 633712 - DNA, 120 bp, Artificial Sequence
  ENSG00000180245_5 (sequence is synthesized)
atgatagatcttttgtgtcttacaccatgacagttattgcgataaattttattgtgcccttgacagtgatgttttactgctattaccatgtcacgctatccattaaacatcacactacca

SEQ ID NO: 633713 - DNA, 120 bp, Artificial Sequence
  ENSG00000180245_6 (sequence is synthesized)
gtgactgcactgagtccctcaacagagactggtcagatcagatagatgtaacaaagatgtctgtgatcatgatctgcatgtttctggtggcatggtccccttattccatcgtgtgcttat

SEQ ID NO: 633714 - DNA, 120 bp, Artificial Sequence
  ENSG00000180245_7 (sequence is synthesized)
gggcttcttttggtgacccaaagaagattcctccccccatggccatcatagctccactgtttgcaaaatcttctacattctataacccctgcatttatgtggttgctaataaaaagtttc

SEQ ID NO: 633715 - DNA, 120 bp, Artificial Sequence
  ENSG00000180245_8 (sequence is synthesized)
ggagggcaatgcttgccatgttcaaatgtcagactcaccaaacaatgcctgtgacaagtattttacccatggatgtatctcaaaacccattggcttctggaagaatctgaaataagataa

SEQ ID NO: 633716 - DNA, 120 bp, Artificial Sequence
  ENSG00000180245_9 (sequence is synthesized)
aaggacacactatcaaaacactttagttttttgacaatgcttttcttttaaatatgagcccatttagatcaagtgcagacatggatcattgtcctatgagagtgtaagctcctcaagcac

SEQ ID NO: 633717 - DNA, 120 bp, Artificial Sequence
  ENSG00000180245_10 (sequence is synthesized)
agctcgtgcttctgtttgtgcactctggctgctgtagtgtatgcttctctgtgtcctgatatatcaacttattgctcatctcctttgatgaattaggcatcagaggttaaggtccccttt

SEQ ID NO: 633718 - DNA, 120 bp, Artificial Sequence
  ENSG00000180245_11 (sequence is synthesized)
ctttctccctattatggcatgcattacactgtactgatgacctttaacttgcctggctcctccattagaataaaagcagtcactaatttaatgttagaataaatgaataattctagataa

SEQ ID NO: 633719 - DNA, 120 bp, Artificial Sequence
  ENSG00000180245_12 (sequence is synthesized)
ttactgaaatgagttgttggatgttcccagttagaatagaaagcattttttgaatttcaacattttaacatttaaatcaattaacttatgttattaaacaaaaataaatgaacattaaac

SEQ ID NO: 633720 - DNA, 120 bp, Artificial Sequence
  ENSG00000180245_13 (sequence is synthesized)
atgattgtttctaaataaaatgttaagtcaatgcatatatattatatagcattatgacccctgtgcatattttgatgttttctgcaattttgagtaccatttttctgcatatatattcca

SEQ ID NO: 633721 - DNA, 120 bp, Artificial Sequence
  ENSG00000180245_14 (sequence is synthesized)
tatatttgccaacagagttaacttcaatcagagtggagatttttatatgtttgttctttgatgtatccttagcacatatacccaattctgtctggcatgtagtaggcactcaataaatat

SEQ ID NO: 633722 - DNA, 120 bp, Artificial Sequence
  ENSG00000180245_15 (sequence is synthesized)
tttttcaatgtcaaatgaatttgtagacttcacatatttgtcattctaaatgactgttaagcataatacaatataccattgtttaaatagtagacatttaaattgctttccagtttttag

SEQ ID NO: 633723 - DNA, 120 bp, Artificial Sequence
  ENSG00000180245_16 (sequence is synthesized)
tttcatggatataccactgaaaatatttcagtgcaaatatattttttcttttggagaagttattctatttgagtgtttcttttcagactagaaatactggatacaaatacaaaaacacta

SEQ ID NO: 633724 - DNA, 120 bp, Artificial Sequence
  ENSG00000180245_17 (sequence is synthesized)
ttatttttgctagcttgctttatggaaagattgaattagttttcactgatactggcagtgtctaagtgagcttttcactgcatattcctgctcatagtcctgtatatatttaaattatga

SEQ ID NO: 633725 - DNA, 120 bp, Artificial Sequence
  ENSG00000180245_18 (sequence is synthesized)
gttatatactctaacttaaagtcattttatttcacatttctttaactgctagtgaggctgtgtatctttgcatattgtattttttaatctctattttttcttcctataaattgtctcttt

SEQ ID NO: 633726 - DNA, 120 bp, Artificial Sequence
  ENSG00000180245_19 (sequence is synthesized)
agcacctttggctacatattaagtaaaatacaggtattagttttatgtgtacagtcttctacgtatatggaaaggtaaactgtcatagtaatctaccttatctcctaactctctgacttt

SEQ ID NO: 633727 - DNA, 120 bp, Artificial Sequence
  ENSG00000180245_20 (sequence is synthesized)
cccactgcaatcaattcatacaatacaacctcaatcaatacaatttcatagctaatcttttaaaaataaagttccaatgcccaaattctttggctaaaaaccttcactcacccaccaagt

SEQ ID NO: 633728 - DNA, 120 bp, Artificial Sequence
  ENSG00000180245_21 (sequence is synthesized)
aagtataaacccctcagctggattttcaaggccctctttaacatacttcaagagggacttttcagctttttgtctctcttcatggccaaattaaaatgtctagtgttccgagagagctct

SEQ ID NO: 633729 - DNA, 120 bp, Artificial Sequence
  ENSG00000180245_22 (sequence is synthesized)
gaatgctttgtgtcactaggtcttcgctcatcctgtctatcatagccgagcctttttacagggaaagcatagtgaaatctgcacccaaagtcccagagccattaaaaggccaggacaact

SEQ ID NO: 633730 - DNA, 120 bp, Artificial Sequence
  ENSG00000180245_23 (sequence is synthesized)
tctgtaataatgtctagaaaaatggactcagagttccaatttgcaaggctgtgaactcatttccagcgataagcaagaagcaactttgcctcaaatataaaggacttcaacagtgtacag

SEQ ID NO: 633731 - DNA, 120 bp, Artificial Sequence
  ENSG00000180245_24 (sequence is synthesized)
gtttttatctttaaacagcgtttctatgctcaatttggcacgtcttgcttccatgtaagtcataacatccatgaaattaatgattcaaaaacccttggtcacttggcgatcagagcttta

SEQ ID NO: 633732 - DNA, 120 bp, Artificial Sequence
  ENSG00000180245_25 (sequence is synthesized)
cccatccaatttctttttcctcttgtgctcaaaaactcgaggccaccacctctcactgcatctccagcactgggaaaccttagggttgtttttaaatcccttcttcatccttacgtctaa

SEQ ID NO: 633733 - DNA, 120 bp, Artificial Sequence
  ENSG00000180245_26 (sequence is synthesized)
tcaatcatttctctctcctgggtgtttcctgaagctgcattatcctaacgattactagcacagcagtcaaggctgtagcctaatggctgctcacctggactataaccacagacatccacc

SEQ ID NO: 633734 - DNA, 120 bp, Artificial Sequence
  ENSG00000180245_27 (sequence is synthesized)
tgaagcctcctcctttcttcttgcttgctctatctagaagcttcctcctttcttcttgcttgctctgtctaaaccttttctccacacagccgccagagaattcttcctgaaaggataagc

SEQ ID NO: 633735 - DNA, 120 bp, Artificial Sequence
  ENSG00000180245_28 (sequence is synthesized)
tgatatgccactcccaagcctaacttttattgctcccattgcctgtaggctgagagtaagctctccatagggaatctaagggtttccttgataacttcatccccgcttatctctccagct

SEQ ID NO: 633736 - DNA, 120 bp, Artificial Sequence
  ENSG00000180245_29 (sequence is synthesized)
ttatcttttttaacttcctgcctcaaaatcttatgcctgagcaacaagaagtgcttgaaattctctgaggacaatacactgtttctcacttccctccctttgttcccactattccctttg

SEQ ID NO: 633737 - DNA, 120 bp, Artificial Sequence
  ENSG00000180245_30 (sequence is synthesized)
cttgcaatgcaactttctggattttcccataatacatcgtcatgcaccctgtaaaaggcagccaggcaccacccaccctaggaagtcttgcttgactaacacaggctgggtttgatgctc

SEQ ID NO: 633738 - DNA, 120 bp, Artificial Sequence
  ENSG00000180245_31 (sequence is synthesized)
ttttctcgtgcttctttagtagtctgttcctccctttatcgtgtgagttccttatgtgtaataactgtcttatttatctttgtacccctcaatgctcagcagagaataagtactcagtaa

SEQ ID NO: 633739 - DNA, 120 bp, Artificial Sequence
  ENSG00000180245_32 (sequence is synthesized)
atatttgatgaacaaacgagttgtgcagaatctgaaaacctgcagtattttattttaattgagcacagtttttcagactgtatggtttttatatacattctattggttttaaataacatt

SEQ ID NO: 633740 - DNA, 120 bp, Artificial Sequence
  ENSG00000180245_33 (sequence is synthesized)
ttctataatatgcttatttttatagaattaattttcttttaaaaaggtttttagttaaagaggatggttagaagcagccactaagaaggttaaatgacgtatatttattacttaaatcct

SEQ ID NO: 633741 - DNA, 120 bp, Artificial Sequence
  ENSG00000180245_34 (sequence is synthesized)
tgattgtccctgtggattctccactctatgagtgtggagatacttttaaatttaattacatttaatttttattttctgacagagcctaatatagctgaaagaattagagttgatcttcaa

SEQ ID NO: 633742 - DNA, 120 bp, Artificial Sequence
  ENSG00000180245_35 (sequence is synthesized)
atatggctttgatgctgataacttgggaaactattgaacagagatagttgcctgcattaaaaataaatgtgctgggataaaccttccacacactgagatgacctggaagagtctcagaac

SEQ ID NO: 633743 - DNA, 120 bp, Artificial Sequence
  ENSG00000180245_36 (sequence is synthesized)
acgttcttattggagaacttagtcctgccacatcagtagtggattgaagcattttccctataaaatctgtgtaactgacttgttttactttacttttagagatagccagtatgtggcaac

SEQ ID NO: 633744 - DNA, 120 bp, Artificial Sequence
  ENSG00000180245_37 (sequence is synthesized)
atcgataactcttttctaaatcatttttatgtcatgtgcttctatttttaaaactaaattttgtaaaactgaattagtaacacattctggcaaaaaccaaatgcaaaacattttataatg

SEQ ID NO: 633745 - DNA, 120 bp, Artificial Sequence
  ENSG00000180245_38 (sequence is synthesized)
ttgtaacatgtaaataatctacagaattttcttgcatctgccaagactgaattattttacattaagtatatttttaaggtgtagtggcaagtacatccagaagaaagggatttaataggc

SEQ ID NO: 633746 - DNA, 120 bp, Artificial Sequence
  ENSG00000180245_39 (sequence is synthesized)
attttcttgcaaatctagttacgggtaactattgaaattgcttgtcatgtgtttgattttcattttccttagaatgtgttactttgctgaaactgtattcaaaggctggatcaattgatc

SEQ ID NO: 633747 - DNA, 120 bp, Artificial Sequence
  ENSG00000180245_40 (sequence is synthesized)
tcctgcaagatacacttgaaggttaagtaactacagatctcagctaatcccgtgtaatctgctgttactaaatggctgtttgtattccaggcataccaggttctgaatgcttaggattcg

SEQ ID NO: 633748 - DNA, 120 bp, Artificial Sequence
  ENSG00000180245_41 (sequence is synthesized)
gtttttaccttttgtttaaataacctctaaaaggagcaatgcatctctttgcatgtctgtgcattgtccttagctttttggaaggagtgggctgtttgtgtccttcacagtgcacctgtg

SEQ ID NO: 633749 - DNA, 120 bp, Artificial Sequence
  ENSG00000180245_42 (sequence is synthesized)
attatcacggcagaaatgacggctcaggatcaaggtatgctcctctgcttgttactaagtgttctcattattttgacaaaaaggacccaaacaagaaagcctacttttgaaagcaaatgt

SEQ ID NO: 633750 - DNA, 120 bp, Artificial Sequence
  ENSG00000180245_43 (sequence is synthesized)
ttggggatcagaaatcacagaagagaatgtttagtgtccataagctttaacttaattgttttaacactggtcacctactccttcactgttttcgttttgagcagtttaactctcaaaggc

SEQ ID NO: 633751 - DNA, 120 bp, Artificial Sequence
  ENSG00000180245_44 (sequence is synthesized)
ctctcaaggtattggaaatttctaaacacattctatgttccaaaatttttattatgctcatgttcacaaattgttgcttgagatcaaacgatttaaaggtgcatggccagctaagccctt

SEQ ID NO: 633752 - DNA, 120 bp, Artificial Sequence
  ENSG00000180245_45 (sequence is synthesized)
gattatagaaaggctaagagggcaggctgaacaggagctgcgtgacatgctcagatcctttgctttcatggctctccacttcctttgagaactattcatgccaattgaatggcagaaaga

SEQ ID NO: 633753 - DNA, 120 bp, Artificial Sequence
  ENSG00000180245_46 (sequence is synthesized)
aagatctcaagagtgaagttagagaggttaatagttagaatttttcattttaagctgatggaatttacaaaataaagaagattgaaaaagatactgtctgtttcagacactgcaggatct

SEQ ID NO: 633754 - DNA, 120 bp, Artificial Sequence
  ENSG00000180245_47 (sequence is synthesized)
cacagaagttattcaatctctaggttgctttagcatctacttgtgtagtgagaagagttatttacttatattgtgcatgaggccttttagatatgttaaatgcaaaacagaactcttgct

SEQ ID NO: 633755 - DNA, 120 bp, Artificial Sequence
  ENSG00000180245_48 (sequence is synthesized)
agctaaacacagtagaacttgaattttttttttgagaggttatttaataacaaaatcaggttatttgtgacttggttgaagtaaacggtgtctcagataaaataatttgttaaaagagtt

SEQ ID NO: 633756 - DNA, 120 bp, Artificial Sequence
  ENSG00000180245_49 (sequence is synthesized)
tactgagctgatgttgtatgttggtgcttggaaactgtccctctctgacaatagttggggattgatcaccaagtaattcttttcttgatggggaactcaactctattcctgcttgttgca

SEQ ID NO: 633757 - DNA, 120 bp, Artificial Sequence
  ENSG00000180245_50 (sequence is synthesized)
caaccctcctttagtctctaacaatccagtaatgattctagcttcttggatgaaatctactcacaccccaccccctcacacccctttaggatctagtatgcccatatctggcttatgccc

SEQ ID NO: 633758 - DNA, 120 bp, Artificial Sequence
  ENSG00000180245_51 (sequence is synthesized)
tttacagcatgtaggggatgttgaacatgcacatccagtacactcgacagtatttctcagtgtaaaataaaacagtggcattctggttaataagtttagttatctgtctacctcagtgca

SEQ ID NO: 633759 - DNA, 120 bp, Artificial Sequence
  ENSG00000180245_52 (sequence is synthesized)
accaatctggggcactgacaacactgaggttctggaaacttgatttccagaaacttgattaaggtggtatcagctgtgaggcttctctatggaccaaaaagctggctcaacttcctctct

SEQ ID NO: 633760 - DNA, 76 bp, Artificial Sequence
  ENSG00000180245_53 (sequence is synthesized)
gcttctctatggaccaaaaagctggctcaacttcctctctggatagtcaagtcttgtagtatgcattcttctattg

SEQ ID NO: 633761 - DNA, 120 bp, Artificial Sequence
  ENSG00000180245_54 (sequence is synthesized)
ggaatagtcatatgagcttacatatggtagatgcttagtaaacgacaatgagttcaatgaaaaaagaagatatggaactggagcttgtgtcatggctgaaaatagtgacaaaagtgctgt

SEQ ID NO: 633762 - DNA, 120 bp, Artificial Sequence
  ENSG00000180245_55 (sequence is synthesized)
gaggatagaatgataattgaagcttgagaaaggcaactatcgaaaaagaagagccccaggccccaggaaggaagaggaggaagttaagctgacaaaaagagggcatggtcagtcatatat

SEQ ID NO: 633763 - DNA, 120 bp, Artificial Sequence
  ENSG00000180245_56 (sequence is synthesized)
ttgtcctaaaaatcagtaggaatggtatgaaagccaatgaaggagtttcaaggacagaacactcaatagcaatgacattaaaaccaacgttcagtgctgccttgtgcaattaccagattc

SEQ ID NO: 633764 - DNA, 120 bp, Artificial Sequence
  ENSG00000180245_57 (sequence is synthesized)
tttgtgttttaattttctcatttctgtttcacagaagggatgtgaagatgtcacatacagttttaagaacagcaggagctcttcaaataaatgaactaaaatagatctgttatgttttta

SEQ ID NO: 633765 - DNA, 120 bp, Artificial Sequence
  ENSG00000180245_58 (sequence is synthesized)
aaggggcttaaatatttaattttgagtctactttgaaacattcaaattaaacaaaatgcatcatatttttgtgtgtgttctcaggtatgataagtattatcagcaacataatagttctgg

SEQ ID NO: 633766 - DNA, 120 bp, Artificial Sequence
  ENSG00000180251_0 (sequence is synthesized)
attcaaaacaaatgagaggacagggggaggagagaaggaacaagcgcagatcaggtagctccttcttgggatctgatagacagggaaggtttcctttcctcattagaaggactccagtga

SEQ ID NO: 633767 - DNA, 120 bp, Artificial Sequence
  ENSG00000180251_1 (sequence is synthesized)
tctgtggaatgagcactacagtatccttttaaattttcacccacaagacaaagccagtatgcagtgaaatgaggaaatgcctttaagtgaagagatttttatttctttcataaattgctc

SEQ ID NO: 633768 - DNA, 120 bp, Artificial Sequence
  ENSG00000180251_2 (sequence is synthesized)
aagccatgattggatggaggtcctccaggtagctccatggactttaacaagtctattgaataactgcatttgagttggaagctgagttgcctgaacacaaacgatttaaaccagattaga

SEQ ID NO: 633769 - DNA, 120 bp, Artificial Sequence
  ENSG00000180251_3 (sequence is synthesized)
aagtgtctacatacagagctcaataacacactcggaatcttcttgggaggacccacagactgtacctatattacttttgacccaggtggatgcagtcactctctagaagcctccccgact

SEQ ID NO: 633770 - DNA, 120 bp, Artificial Sequence
  ENSG00000180251_4 (sequence is synthesized)
tcagatgtgtggcacacatccacacaggggtgtaggtaggagaagcccacaggaatggctctgcagatgttcgtgacttacagtccttggaattgtttgctactgctagtggctcttgag

SEQ ID NO: 633771 - DNA, 120 bp, Artificial Sequence
  ENSG00000180251_5 (sequence is synthesized)
tgttctgaagcatcttctgatttgaatgaatctgcaaattccactgctcagtatgcatctaacgcttggtttgctgctgccagctcagagccagaggaagggatatctgtttttgaactg

SEQ ID NO: 633772 - DNA, 120 bp, Artificial Sequence
  ENSG00000180251_6 (sequence is synthesized)
gattatgactatgtgcaaattccttatgaggtcactctctggatacttctagcatcccttgcaaaaataggcttccacctctaccacaggctgccaggcctcatgccagaaagctgcctc

SEQ ID NO: 633773 - DNA, 120 bp, Artificial Sequence
  ENSG00000180251_7 (sequence is synthesized)
ctcatcctggtgggggcgctggtgggcggcatcatcttcggcaccgaccacaaatcgcctccggtcatggactccagcatctacttcctgtatctcctgccacccatcgttctggagggc

SEQ ID NO: 633774 - DNA, 120 bp, Artificial Sequence
  ENSG00000180251_8 (sequence is synthesized)
ggctacttcatgcccacccggcccttctttgagaacatcggctccatcctgtggtgggcagtattgggggccctgatcaacgccttgggcattggcctctccctctacctcatctgccag

SEQ ID NO: 633775 - DNA, 120 bp, Artificial Sequence
  ENSG00000180251_9 (sequence is synthesized)
gtgaaggcctttggcctgggcgacgtcaacctgctgcagaacctgctgttcggcagcctgatctccgccgtggacccagtggccgtgctagccgtgtttgaggaagcgcgcgtgaacgag

SEQ ID NO: 633776 - DNA, 120 bp, Artificial Sequence
  ENSG00000180251_10 (sequence is synthesized)
cagctctacatgatgatctttggggaggccctgctcaatgatggcattactgtggtcttatacaatatgttaattgcctttacaaagatgcataaatttgaagacatagaaactgtcgac

SEQ ID NO: 633777 - DNA, 120 bp, Artificial Sequence
  ENSG00000180251_11 (sequence is synthesized)
attttggctggatgtgcccgattcatcgttgtggggcttggaggggtattgtttggcatcgtttttggatttatttctgcatttatcacacgtttcactcagaatatctctgcaattgag

SEQ ID NO: 633778 - DNA, 120 bp, Artificial Sequence
  ENSG00000180251_12 (sequence is synthesized)
ccactcatcgtcttcatgttcagctatttgtcttacttagctgctgaaaccctctatctctccggcatcctggcaatcacagcctgcgcagtaacaatgaaaaagtacgtggaagaaaac

SEQ ID NO: 633779 - DNA, 120 bp, Artificial Sequence
  ENSG00000180251_13 (sequence is synthesized)
gtgtcccagacatcatacacgaccatcaagtacttcatgaagatgctgagcagcgtcagcgagaccttgatcttcatcttcatgggtgtgtccactgtgggcaagaatcacgagtggaac

SEQ ID NO: 633780 - DNA, 120 bp, Artificial Sequence
  ENSG00000180251_14 (sequence is synthesized)
tgggccttcatctgcttcaccctggccttctgccaaatctggagagccatcagcgtatttgctctcttctatatcagtaaccagtttcggactttccccttctccatcaaggaccagtgc

SEQ ID NO: 633781 - DNA, 120 bp, Artificial Sequence
  ENSG00000180251_15 (sequence is synthesized)
atcattttctacagtggtgttcgaggagctggaagtttttcacttgcatttttgcttcctctgtctctttttcctaggaagaaaatgtttgtcactgctactctagtagttatatacttt

SEQ ID NO: 633782 - DNA, 120 bp, Artificial Sequence
  ENSG00000180251_16 (sequence is synthesized)
actgtatttattcagggaatcacagttggccctctggtcaggtacctggatgttaaaaaaaccaataaaaaagaatccatcaatgaagagcttcatattcgtctgatggatcacttaaag

SEQ ID NO: 633783 - DNA, 120 bp, Artificial Sequence
  ENSG00000180251_17 (sequence is synthesized)
gtgtgtgggcactggagtcactaccaagtgagagacaagtttaagaagtttgatcatagatacttacggaaaatcctcatcagaaagaacctacccaaatcaagcattgtttctttgtac

SEQ ID NO: 633784 - DNA, 120 bp, Artificial Sequence
  ENSG00000180251_18 (sequence is synthesized)
aagaagctggaaatgaagcaagccatcgagatggtggagactgggatactgagctctacagctttctccataccccatcaggcccagaggatacaaggaatcaaaagactttcccctgaa

SEQ ID NO: 633785 - DNA, 120 bp, Artificial Sequence
  ENSG00000180251_19 (sequence is synthesized)
gatgtggagtccataagggacattctgacatccaacatgtaccaagttcggcaaaggaccctgtcctacaacaaatacaacctcaaaccccaaacaagtgagaagcaggctaaagagatt

SEQ ID NO: 633786 - DNA, 120 bp, Artificial Sequence
  ENSG00000180251_20 (sequence is synthesized)
ctgatccgccgccagaacaccttaagggagagcatgaggaaaggtcacagcctgccctggggaaagccggctggcaccaagaatatccgctacctctcctacccctacgggaatcctcag

SEQ ID NO: 633787 - DNA, 120 bp, Artificial Sequence
  ENSG00000180251_21 (sequence is synthesized)
tctgcaggaagagacacaagggctgctgggttctcagatgatgacagcagtgatccaggatccccatccatcacgttcagcgcatgctctcggatagggtcacttcagaagcaagaggca

SEQ ID NO: 633788 - DNA, 120 bp, Artificial Sequence
  ENSG00000180251_22 (sequence is synthesized)
caagaaataataccaatgaagagcctacacagaggaaggaaggcattcagctttggttatcaaagaaacacaagccaagaagagtacttgggtggagtaaggagggtggccttaagaccc

SEQ ID NO: 633789 - DNA, 120 bp, Artificial Sequence
  ENSG00000180251_23 (sequence is synthesized)
aaacctctgtttcatgcagtggatgaggagggtgagtctggaggggagagtgagggcaaggcctctttggttgaggttcggtcgaggtggacagctgaccatggacacggcagggaccat

SEQ ID NO: 633790 - DNA, 120 bp, Artificial Sequence
  ENSG00000180251_24 (sequence is synthesized)
cacaggtcccatagtcctttgctccaaaaaaaatagtgttattgtccacaagattgttttggtgtttctcaagagtctgtcttcctataactgtgaaaggaggatttctggaattcagaa

SEQ ID NO: 633791 - DNA, 120 bp, Artificial Sequence
  ENSG00000180251_25 (sequence is synthesized)
gagagctattgagtttgctgtgttgaagctattaaacatggatctataagcagcaggaagattttttccaaggactgggagcaaacttgcaggctctgccatgtacttattgtggggtac

SEQ ID NO: 633792 - DNA, 120 bp, Artificial Sequence
  ENSG00000180251_26 (sequence is synthesized)
ctttagatgaattccctgtgagtgagagaagttgatcaccccaggaattagtcactaagaattcctaagaactttctatcaaaagcattggatccaagccatatattgaaatacaagcgt

SEQ ID NO: 633793 - DNA, 120 bp, Artificial Sequence
  ENSG00000180251_27 (sequence is synthesized)
gattaatcagtaattcacattgccgatatgcatatgcaacttataatcaaatagaactagaagagactttgaagtcacctgactcagccccttgtgtttacagacaaggacatgtagtcc

SEQ ID NO: 633794 - DNA, 120 bp, Artificial Sequence
  ENSG00000180251_28 (sequence is synthesized)
aaggttgcatggtgagttcacagtcggattgtcctccctccaaactgaaactaatttgattttgatttcatattcaatatgcaataattatgttctatcagagataaaatttgttatgaa

SEQ ID NO: 633795 - DNA, 120 bp, Artificial Sequence
  ENSG00000180251_29 (sequence is synthesized)
tttgctttatttaatcagtagcaatgatagatgtgatgcatactataggattaatctgtgaacaatgggtttacggtctatttcataattgaaatatttattttaaaaatgaatattaga

SEQ ID NO: 633796 - DNA, 120 bp, Artificial Sequence
  ENSG00000180251_30 (sequence is synthesized)
aacaaaacagccataaacagagtttaatagcaatgatgttaacaacaagtatttataaggggtgcatttgtagggtgtgacattttaccctagggtataaaactatttttcttttattat

SEQ ID NO: 633797 - DNA, 120 bp, Artificial Sequence
  ENSG00000180251_31 (sequence is synthesized)
cttctgccaaatctggagagccatcagtaagagacggcagggctccagagtctccggtcctgctgcattttcagttctcttattcccttccgcaatgttaaaactggaggactgagtaga

SEQ ID NO: 633798 - DNA, 120 bp, Artificial Sequence
  ENSG00000180251_32 (sequence is synthesized)
tgctaactggttttaccggttagggtagactaggaacctggtcgtgagcaggaatcttttctgtttgttccctcagtcagctcaaagtaattagtggttgataaggttctgcattgaagc

SEQ ID NO: 633799 - DNA, 120 bp, Artificial Sequence
  ENSG00000180251_33 (sequence is synthesized)
aaggctggggcaaggagtacttttttttaattgaagaaagaagtttcacatctacctatttaaatataattcagtcaatggaaaaatacatgtttgttactttttatttggagttgcacc

SEQ ID NO: 633800 - DNA, 120 bp, Artificial Sequence
  ENSG00000180257_0 (sequence is synthesized)
cgtggactgaaagttgcacggcggcgtgtgcgtttcctagttgtctggtgctgctatataggggacgtggggtccccacagacctgcaggttccggcccctcttttctcaacccagagca

SEQ ID NO: 633801 - DNA, 120 bp, Artificial Sequence
  ENSG00000180257_1 (sequence is synthesized)
aattgaaacgtccgggtaacacaccgctgtgccacggttttggcgagggctgacaattgtgagctgtagaagtaccagcctaacaactgttcaagtgactcctgacctagatgggtggtt

SEQ ID NO: 633802 - DNA, 120 bp, Artificial Sequence
  ENSG00000180257_2 (sequence is synthesized)
tcatgcacctccagtacaactgtggctcctagcagctgtggcacaggatttccaaagactcatgttacgtgaggaagccaccaagaagagcaaagaaaaggagccagggatggctcttcc

SEQ ID NO: 633803 - DNA, 120 bp, Artificial Sequence
  ENSG00000180257_3 (sequence is synthesized)
tcagggacgcttgactttcagggatgtggctatagagttctctttggaggagtggaaatgcctgaaccctgcacagagggctttatacagggctgtgatgttggagaactacaggaacct

SEQ ID NO: 633804 - DNA, 120 bp, Artificial Sequence
  ENSG00000180257_4 (sequence is synthesized)
ggagtttgtggatagctctttaaaatccatgatggagttctcatcaaccaggcacagtattacaggagaagtgatccacacagggacgttgcaaagacataaaagtcatcacattggaga

SEQ ID NO: 633805 - DNA, 120 bp, Artificial Sequence
  ENSG00000180257_5 (sequence is synthesized)
tttttgcttcccagaaatgaagaaagatattcatcactttgagtttcagtggcaagaagttgaaagaaatggccatgaagcacccatgacaaaaatcaaaaagttgactggtagtacaga

SEQ ID NO: 633806 - DNA, 120 bp, Artificial Sequence
  ENSG00000180257_6 (sequence is synthesized)
ccgaagtgatcacaggcatgctggaaacaagcctattaaagatcagcttggattaagctttcattcgcatctgcctgaactccacatgtttcagactaaagggaaaattagtaaccaatt

SEQ ID NO: 633807 - DNA, 120 bp, Artificial Sequence
  ENSG00000180257_7 (sequence is synthesized)
ggacaagtctatcggtgcttcctcagcttcagaatcccaaagaatttcttgtaggctcaaaactcatatttctaataagtatgggaagaatttcctccattcttcattcacacaaataca

SEQ ID NO: 633808 - DNA, 120 bp, Artificial Sequence
  ENSG00000180257_8 (sequence is synthesized)
ggaaatatgcatgagagaaaaaccttgccaaagtaatgagtgtggcaaagcctttaattatagctcactcttaaggagacaccacataacccattcaagagagagagaatataaatgtga

SEQ ID NO: 633809 - DNA, 120 bp, Artificial Sequence
  ENSG00000180257_9 (sequence is synthesized)
tgtatgtggcaagatctttaatcagaagcaatacattgtatatcatcatagatgtcacactggtgagaaaacttacaagtgtaatgagtgtgggaagaccttcactcagatgtcatccct

SEQ ID NO: 633810 - DNA, 82 bp, Artificial Sequence
  ENSG00000180257_10 (sequence is synthesized)
taatgagtgtggcaagaccttcagtcagaaatcatcccttcaatgccatcatatacttcactgtttacattcgcagatcaca

SEQ ID NO: 633811 - DNA, 120 bp, Artificial Sequence
  ENSG00000180257_11 (sequence is synthesized)
tgaagaatgtgacaatgtttacattcgcagatcacaccttgaaagacataggaagattcatactggagagggatcatacaaatgtaaggtttgtgacaaggttttccggagtgattcata

SEQ ID NO: 633812 - DNA, 120 bp, Artificial Sequence
  ENSG00000180257_12 (sequence is synthesized)
tactggagagaaaccatacaagtgtaataaatgtggcaggagtttcagtcggaagtcatcccttcaataccatcatacacttcacactggagagaaaccttacacatgtaatgaatgtgg

SEQ ID NO: 633813 - DNA, 120 bp, Artificial Sequence
  ENSG00000180257_13 (sequence is synthesized)
acacttcacactggagagaaaccttacacatgtaatgaatgtggcaaggtttttagtcgaagagaaaaccttgcacgtcatcatagacttcatgctggagagaaaccttacaaatgtgaa

SEQ ID NO: 633814 - DNA, 84 bp, Artificial Sequence
  ENSG00000180257_14 (sequence is synthesized)
tacaaatgtgaagaatgtgacaaagttttcagtcgcagatcacaccttgaaagacataggagaattcatactggggaacggagt

SEQ ID NO: 633815 - DNA, 83 bp, Artificial Sequence
  ENSG00000180257_15 (sequence is synthesized)
ccttgcaaaccatacaaatgtgcgaaggtttttaatcaaaaaggaatccttgcacaacatcagagagttcatactggagagaa

SEQ ID NO: 633816 - DNA, 65 bp, Artificial Sequence
  ENSG00000180257_16 (sequence is synthesized)
ctggacagtcaacacttattcaccatcaagcaatccatgggtgtagggaaactttacaaatgtaa

SEQ ID NO: 633817 - DNA, 120 bp, Artificial Sequence
  ENSG00000180257_17 (sequence is synthesized)
tcaagcaatccatgggtgtagggaaactttacaaatgtaatgattgtcacaaagtcttcagtaatgctacaaccattgcaaatcattacagaatccatattgaagagagatctacaagtg

SEQ ID NO: 633818 - DNA, 120 bp, Artificial Sequence
  ENSG00000180257_18 (sequence is synthesized)
taataaatgtggcaaatttttcagacgtcattcataacttgtagttcatcagtgaactcatactggagagaaaccttacaaatatcatgactgtgacaaggtcttcagtcaagcttcatc

SEQ ID NO: 633819 - DNA, 120 bp, Artificial Sequence
  ENSG00000180257_19 (sequence is synthesized)
ctatgcaaaacatagaattcatacaggagagaaacctcacaagtgtgatgattgtggcaaagcctttacttcatgttcacacctcattagacatcagagaattcatactggacagatgcc

SEQ ID NO: 633820 - DNA, 120 bp, Artificial Sequence
  ENSG00000180257_20 (sequence is synthesized)
ttacaaatgtaagggtggcaaggtcttcactctgtggtcattccatgcagaacatcagaaaattcatttttgagataattgttccaaataaaatgaatataaaaaatcataaaactttaa

SEQ ID NO: 633821 - DNA, 120 bp, Artificial Sequence
  ENSG00000180257_21 (sequence is synthesized)
ctatcttggctctttctggttttatattctcttttgtgattttgccccatacatgcttttgatgtacatgtcattgttttctgcggtgatgaccctcctatctgtcatggacagcttctt

SEQ ID NO: 633822 - DNA, 120 bp, Artificial Sequence
  ENSG00000180257_22 (sequence is synthesized)
ctagttgtctggtgctgctatataggggacgtggggtccccacagacctgcaggttccggcccctcttttctcaacccagagcaaattgaaacgtccgggtcttcctgtggaactttctt

SEQ ID NO: 633823 - DNA, 120 bp, Artificial Sequence
  ENSG00000180257_23 (sequence is synthesized)
atctctgcatggtctctggtgcagtgggtagcaaaggaccatctttctctcgggatttccaaagactcatgttacgtgaggaagccaccaagaagagcaaagaaaaggagccagggatgg

SEQ ID NO: 633824 - DNA, 120 bp, Artificial Sequence
  ENSG00000180263_0 (sequence is synthesized)
gctagtgctcgcccgcccgaccccggcggctcgcgcccgggagcgccgcagggtcgctagagtcggccgcgtcctttgtgtggcgctcaggctgcgccgcggggcggcgggacggaatgt

SEQ ID NO: 633825 - DNA, 120 bp, Artificial Sequence
  ENSG00000180263_1 (sequence is synthesized)
gggcgctgcgggggcttttctctcctacccgaactgtgggaacaatggactgaaaggggaagatggattgaggggccgagcggggaagcgagctgcaccggggaatcatgacttctgcag

SEQ ID NO: 633826 - DNA, 120 bp, Artificial Sequence
  ENSG00000180263_2 (sequence is synthesized)
ccgagataaagaagccaccagtggcccccaagcccaagtttgttgtggcaaataataagccagccccacctcctattgcacctaaacccgacattgtgatttctagtgttccacagtcga

SEQ ID NO: 633827 - DNA, 120 bp, Artificial Sequence
  ENSG00000180263_3 (sequence is synthesized)
caaagaaaatgaaaccagcaatagccccaaaaccaaaagtcctgaagacctcacctgttcgagagattgggcagtcgccatcaaggaaaatcatgttgaacctggaagggcataaacagg

SEQ ID NO: 633828 - DNA, 120 bp, Artificial Sequence
  ENSG00000180263_4 (sequence is synthesized)
aattagctgaaagcactgacaactttaattgtaaatatgaaggcaatcagagcaatgattatatttcaccaatgtgttcctgcagttctgagtgtatccataagctgggccatagagaga

SEQ ID NO: 633829 - DNA, 120 bp, Artificial Sequence
  ENSG00000180263_5 (sequence is synthesized)
atttgtgtgtaaagcagcttgttttagagcccctggaaatgaatgaaaatttagaaaacagtaaaattgatgagactttgactataaaaactaggagtaaatgtgatttgtatggtgaaa

SEQ ID NO: 633830 - DNA, 120 bp, Artificial Sequence
  ENSG00000180263_6 (sequence is synthesized)
aagccaagaaccagggtggggttgttttaaaggcaagcgttttagaagaggagctcaaagatgccttaatacaccaaatgccaccttttatttctgcacagaagcacaggcccacagaca

SEQ ID NO: 633831 - DNA, 120 bp, Artificial Sequence
  ENSG00000180263_7 (sequence is synthesized)
gcccagaaatgaatggtggctgtaattcaaatggacaattcagaattgaatttgcggatttgtcaccttccccatccagctttgaaaaagttcctgatcatcacagttgccacttacagc

SEQ ID NO: 633832 - DNA, 120 bp, Artificial Sequence
  ENSG00000180263_8 (sequence is synthesized)
ttcctagtgatgaatgtgaacattttgaaacttgccaggatgacagtgaaaaaagcaataattgctttcagtcatctgaactagaggctctggaaaatgggaaaaggagtactttaatat

SEQ ID NO: 633833 - DNA, 120 bp, Artificial Sequence
  ENSG00000180263_9 (sequence is synthesized)
cttcagatggagttagtaagaaatcagaagtcaaagaccttggtcccttagaaattcatttagtaccatataccccaaaatttccaactcccaagcccagaaagacacgaactgctcgtc

SEQ ID NO: 633834 - DNA, 120 bp, Artificial Sequence
  ENSG00000180263_10 (sequence is synthesized)
tgttacgccaaaagtgtgtagatactcctagtgaaagcactgaagaaccggggaattcagacagtagctcttcctgtcttactgaaaatagtttgaaaatcaataaaatcagtgttctgc

SEQ ID NO: 633835 - DNA, 120 bp, Artificial Sequence
  ENSG00000180263_11 (sequence is synthesized)
atcagaatgttttgtgtaagcaggaacaggtggataaaatgaagctaggaaataaaagtgaattgaatatggaatccaacagtgatgcacaggacttagtcaattcacagaaagccatgt

SEQ ID NO: 633836 - DNA, 120 bp, Artificial Sequence
  ENSG00000180263_12 (sequence is synthesized)
gtaatgaaacaacttcctttgaaaaaatggcaccttcttttgataaagactctaatttgagttctgacagcacaactgtagatggttctagtatgtcgcttgctgtggacgaagggaccg

SEQ ID NO: 633837 - DNA, 120 bp, Artificial Sequence
  ENSG00000180263_13 (sequence is synthesized)
gttttataagatgtactgtatctatgagcctgcctaagcagctcaaattaacttgcaatgaacatttgcaatctgggagaaacctgggagtttctgcccctcaaatgcaaaaggaatctg

SEQ ID NO: 633838 - DNA, 120 bp, Artificial Sequence
  ENSG00000180263_14 (sequence is synthesized)
ttataaaagaggaaaattctctacgaattgtccccaaaaaacctcaaagacatagcttgcctgctacaggagtgcttaaaaaggctgcctccgaggagcttttggaaaaaagttcttatc

SEQ ID NO: 633839 - DNA, 120 bp, Artificial Sequence
  ENSG00000180263_15 (sequence is synthesized)
cttcaagtgaagaaaaaagttcagagaagagtctagaaagaaatcaccttcagcatttgtgtgcccaaaaccgtggtgtgtcatcctcctttgatatgcctaaacgggcttcagaaaagc

SEQ ID NO: 633840 - DNA, 120 bp, Artificial Sequence
  ENSG00000180263_16 (sequence is synthesized)
cagtgtggaagttacctcatcctattttacccttttcagggaacccagaattcttaaagtctgtcaccgtatcgtcaaacagtgagccttcaacagccctaaccaagcccagagcaaaat

SEQ ID NO: 633841 - DNA, 120 bp, Artificial Sequence
  ENSG00000180263_17 (sequence is synthesized)
cgttatctgctatggatgtggaaaagtgcactaagccttgcaaagactctacaaagaaaaactcttttaaaaagttgctcagcatgaaactgtccatctgtttcatgaagagtgactttc

SEQ ID NO: 633842 - DNA, 120 bp, Artificial Sequence
  ENSG00000180263_18 (sequence is synthesized)
aaaaattttggtccaagagtagccaactcggagacaccaccacaggccacctctccagtggggagcagaaggggattgaaagtgattggcaaggcttgttggtaggagaggagaagagaa

SEQ ID NO: 633843 - DNA, 120 bp, Artificial Sequence
  ENSG00000180263_19 (sequence is synthesized)
gtaaacccatcaaggcatattccacagaaaactatagcctggaatctcaaaagaagaggaagaagtctcggggccagaccagtgcagctaatggtctgagagctgagtctttggatgacc

SEQ ID NO: 633844 - DNA, 120 bp, Artificial Sequence
  ENSG00000180263_20 (sequence is synthesized)
aaatgctctcccgggagtcatcatctcaggcaccttacaagtctgttacaagcctctgtgcaccggagtatgaaaatatacgccattatgaggaaataccagagtacgagaacttgccat

SEQ ID NO: 633845 - DNA, 120 bp, Artificial Sequence
  ENSG00000180263_21 (sequence is synthesized)
ttattatggctatacggaaaactcaagagttggaatggcagaattccagcagcatggaggacgctgatgcaaatgtgtatgaggtagaagagccgtatgaagctccagatggccagctgc

SEQ ID NO: 633846 - DNA, 120 bp, Artificial Sequence
  ENSG00000180263_22 (sequence is synthesized)
agcttggacccagacatcagcattccagttcaggagcatcccaggaggaacagaatgatcttggtcttggtgaccttccctctgatgaggaggaaatcatcaacagttctgatgaagatg

SEQ ID NO: 633847 - DNA, 120 bp, Artificial Sequence
  ENSG00000180263_23 (sequence is synthesized)
atgtcagctctgagtcaagtaaaggagagcctgacccactggaagataaacaggatgaagataatggaatgaaaagtaaagttcatcatattgccaaggagatcatgagctcagagaaag

SEQ ID NO: 633848 - DNA, 120 bp, Artificial Sequence
  ENSG00000180263_24 (sequence is synthesized)
tgtttgtggatgtgttaaaacttttgcatattgatttccgggatgcagtagctcatgcttccaggcaacttgggaaaccagtgattgaggaccggattctaaatcagatcctatactact

SEQ ID NO: 633849 - DNA, 120 bp, Artificial Sequence
  ENSG00000180263_25 (sequence is synthesized)
tgcctcagctgtatgagctcaaccgggatctcttgaaggaactggaggaaagaatgttgcactggactgaacaacaaagaattgctgatatctttgtaaagaagggaccatatctaaaaa

SEQ ID NO: 633850 - DNA, 120 bp, Artificial Sequence
  ENSG00000180263_26 (sequence is synthesized)
tgtattccacatacatcaaagaatttgataagaatatagccttgctggatgaacagtgcaagaaaaatccaggttttgctgctgttgttagagaatttgagatgagccctcgctgtgcta

SEQ ID NO: 633851 - DNA, 120 bp, Artificial Sequence
  ENSG00000180263_27 (sequence is synthesized)
atctggccctcaagcactacctgctcaagccggttcagaggatcccccagtacaggctgttgctgacagattatttgaagaatctcatagaagatgctggagattacagagacactcaag

SEQ ID NO: 633852 - DNA, 120 bp, Artificial Sequence
  ENSG00000180263_28 (sequence is synthesized)
atgcccttgctgttgttatagaggtagccaaccacgccaatgacaccatgaagcaaggagacaactttcagaaacttatgcaaattcagtacagcttaaatggacaccatgaaattgtgc

SEQ ID NO: 633853 - DNA, 120 bp, Artificial Sequence
  ENSG00000180263_29 (sequence is synthesized)
agcctggtcgggtttttctcaaagaaggaattctgatgaagctgtctcggaaagtgatgcaacctcgaatgtttttcctgtttaatgatgccctgctgtatacaacaccagtgcagtctg

SEQ ID NO: 633854 - DNA, 120 bp, Artificial Sequence
  ENSG00000180263_30 (sequence is synthesized)
ggatgtataaactgaacaacatgctctcactggctggaatgaaggtcagaaaacctacccaagaagcctatcagaatgaattaaagattgaaagtgtagaacgttccttcattctctcag

SEQ ID NO: 633855 - DNA, 120 bp, Artificial Sequence
  ENSG00000180263_31 (sequence is synthesized)
ccagttctgccacagaaagggatgaatggctagaagcgatttccagggcaatagaagagtatgccaagaaaagaatcaccttctgtcctagtaggagtcttgatgaggcagactcagaaa

SEQ ID NO: 633856 - DNA, 120 bp, Artificial Sequence
  ENSG00000180263_32 (sequence is synthesized)
ataaagaagaagttagtcctcttggatcgaaggctcccatctggattcctgataccagagccacaatgtgtatgatctgcacaagcgaattcactctcacctggagacgacaccactgcc

SEQ ID NO: 633857 - DNA, 120 bp, Artificial Sequence
  ENSG00000180263_33 (sequence is synthesized)
gggcctgtggaaagattgtatgccaagcttgttcgtctaataagtatggcttagattacctgaaaaatcaaccagcaagagtatgtgaacattgtttccaagaactgcagaaattagatc

SEQ ID NO: 633858 - DNA, 120 bp, Artificial Sequence
  ENSG00000180263_34 (sequence is synthesized)
accagcactcccctaggattggatctcctggaaatcacaaatctccttcaagtgccttatcatcagtcttacatagcattccatcagggaggaaacagaaaaaaatcccagctgctctca

SEQ ID NO: 633859 - DNA, 120 bp, Artificial Sequence
  ENSG00000180263_35 (sequence is synthesized)
aagaagtatcagcaaacacagaggattcttctatgagtggctacttgtacagatcaaagggcaataaaaaaccctggaaacacttttggtttgtcataaaaaataaagtactatatacat

SEQ ID NO: 633860 - DNA, 120 bp, Artificial Sequence
  ENSG00000180263_36 (sequence is synthesized)
atgctgcaagtgaggacgtggccgctttggagagtcagcctttattaggattcactgttattcaagttaaagatgagaattccgagtctaaagtatttcagttactgcacaaaaacatgt

SEQ ID NO: 633861 - DNA, 120 bp, Artificial Sequence
  ENSG00000180263_37 (sequence is synthesized)
tattttatgtattcaaagcagaggatgctcattcggctcagaagtggatagaagcatttcaggaaggcacaatattgtagcagtattggtttcatctcttctgtgattccaaagaggtgg

SEQ ID NO: 633862 - DNA, 120 bp, Artificial Sequence
  ENSG00000180263_38 (sequence is synthesized)
actgccaagataaagccaaccagacccttcatcaaagaaattgttttgttaggtataagcaatttttaaaaggtgtttgttttttcatttatgttatttattaaaattttgatgtttact

SEQ ID NO: 633863 - DNA, 120 bp, Artificial Sequence
  ENSG00000180263_39 (sequence is synthesized)
taatggtcagaattatttctgagacacactgaattctaaagtaccatttctttagagaccagaaaaactatcttaatactgtatactgtattaactattcgtgacatagttcacactgtt

SEQ ID NO: 633864 - DNA, 120 bp, Artificial Sequence
  ENSG00000180263_40 (sequence is synthesized)
ttcttaccttacattgtaacaatcttactggtggaaagtctttgtaaggaaaaaacacatagcaaggagcaaatttccacaaagtgcttggtttaggaattgtgattattataaaactgc

SEQ ID NO: 633865 - DNA, 120 bp, Artificial Sequence
  ENSG00000180263_41 (sequence is synthesized)
tgatgaaaaaaatgcatgtctttgaatcaataaacttgggtgaatatttgtatcttttagtggaaaaacatggccagcttctacctcagtaactgtgaactgaaatttcagtaaattatc

SEQ ID NO: 633866 - DNA, 120 bp, Artificial Sequence
  ENSG00000180263_42 (sequence is synthesized)
taaagtatttctgttgttaggtacctctttggcaggagttaatattacatcatcaaagaattatagcaaagagatagaatctgaattttttaaaactgtgagtaggaatgaagatgtttt

SEQ ID NO: 633867 - DNA, 120 bp, Artificial Sequence
  ENSG00000180263_43 (sequence is synthesized)
tatttgcagaataccacaaataaccaactcttccggcttttaagtccaatcttttaaaaaatctaccacttcgaaacaaacataaatgtatcattttttaaaatagcaaaatatagcaag

SEQ ID NO: 633868 - DNA, 120 bp, Artificial Sequence
  ENSG00000180263_44 (sequence is synthesized)
cattatgtcacataatattccctgctattataagagttctgagcccaagtcaatgatgatatttgtatctataagtaatgttacatttccaaaaatattgtgcattacaaatggaactgg

SEQ ID NO: 633869 - DNA, 120 bp, Artificial Sequence
  ENSG00000180263_45 (sequence is synthesized)
aattactatatcagaaaagcataattataagccagtaataactgaaattctatagtattcattttcaaaaggtctttttctgccagtttgtgatatcctccctcctaattaaaaaaaaaa

SEQ ID NO: 633870 - DNA, 120 bp, Artificial Sequence
  ENSG00000180263_46 (sequence is synthesized)
acaacaaatcctttctctataagcagctatcagcacacctccttaggaaagatttagattcataattctggtgcacttactgtttaacatatgaactaccttgcacatacaattgttgat

SEQ ID NO: 633871 - DNA, 120 bp, Artificial Sequence
  ENSG00000180263_47 (sequence is synthesized)
tagcagaagaaaatgaaataacactgtgataaaagccatccctgatgttcacaatacacaatttattaactaagtttaaactataaattatcttaactgccatgagcggtggctcacacc

SEQ ID NO: 633872 - DNA, 78 bp, Artificial Sequence
  ENSG00000180263_48 (sequence is synthesized)
ctataaattatcttaactgccatgagcggtggctcacacctacaatctcagcattttgggaggccgaggccgttggac

SEQ ID NO: 633873 - DNA, 75 bp, Artificial Sequence
  ENSG00000180263_49 (sequence is synthesized)
gaaaccccatctctattaaaaatacaagaattagccggtcgtggtggtacatggctgtagtcctagctattcagc

SEQ ID NO: 633874 - DNA, 120 bp, Artificial Sequence
  ENSG00000180263_50 (sequence is synthesized)
aaaaaaaaaaaaaaaaaattgaacagcaaggttatccatataatatttctttaaagggtacaagaattttcctttctgcctctaaataaaggatttcctaattcagtgtgatccttaaca

SEQ ID NO: 633875 - DNA, 120 bp, Artificial Sequence
  ENSG00000180263_51 (sequence is synthesized)
cctaattcagtgtgatccttaacagcaaccatgaggattactgagtgcctttctggggccttttgaatgctgtttggtacagcaccagagtccctactagatctagagttggctgctata

SEQ ID NO: 633876 - DNA, 120 bp, Artificial Sequence
  ENSG00000180263_52 (sequence is synthesized)
gttttttgtggcgattttttgccatggagtcatttgaacctcatacacaatcctaacatgccatcccctttctgtcatagcaggtacactaaaatttctttgtagctcaattttatataa

SEQ ID NO: 633877 - DNA, 120 bp, Artificial Sequence
  ENSG00000180263_53 (sequence is synthesized)
tcaagatcacataaataaggcttccatgttagaatcgttgcagtttttagtgtattcctttttggaggctaaagttgtaccttataaactgtttctgcgtctggcatttagcaagacaag

SEQ ID NO: 633878 - DNA, 120 bp, Artificial Sequence
  ENSG00000180263_54 (sequence is synthesized)
ttatttgggttttctttccctcctcttgagctctcagccttctgactacaaggtttggcttaagccttataatctaaaaaatatcagccaggctattctatcttctaagacctggctgaa

SEQ ID NO: 633879 - DNA, 120 bp, Artificial Sequence
  ENSG00000180263_55 (sequence is synthesized)
tcatgagccagttctaaatctaaagagagtgagagagggaagaaatctggcacaaacttacagtctctttaattacatgtaaaatgcatgtgactgtattacctattggcttagccccat

SEQ ID NO: 633880 - DNA, 120 bp, Artificial Sequence
  ENSG00000180263_56 (sequence is synthesized)
ggagggtttagaaaaatgtgtagtctttgtggaagctatccaattatccttctcccaaaaagatgttttaaatgtggaatagtattacattcccctgcccctttatgagtccttcataac

SEQ ID NO: 633881 - DNA, 120 bp, Artificial Sequence
  ENSG00000180263_57 (sequence is synthesized)
ttactaaagctgaccaattgttatttatgtaacctggctcattcattgtcaactaagaacctaattatatgcaatttattgtaaaaaaagctataaaaatatattttgctagtattttag

SEQ ID NO: 633882 - DNA, 120 bp, Artificial Sequence
  ENSG00000180263_58 (sequence is synthesized)
aggaaaaatgatattgggcacagtctataaatggggagaaaagttaagtagtatctagattccaaggatactatatttattatacagatatgtgtgcctgtgcttccatcaaaccctttt

SEQ ID NO: 633883 - DNA, 120 bp, Artificial Sequence
  ENSG00000180263_59 (sequence is synthesized)
tcaggtatctccttttaattcataaggaggaaagagtagggcatttataaagctaagctaaaaatgatgctaagcataacgtagatgagacgccaggctgaaccaggggaaggctggcat

SEQ ID NO: 633884 - DNA, 120 bp, Artificial Sequence
  ENSG00000180263_60 (sequence is synthesized)
tgttagtgtccccaactagcagtccacctttatctgtggcagctataaatgtacaggacccatcagagtcctaagaaaatgagagtaattatctctggcatcatccacatttccgactct

SEQ ID NO: 633885 - DNA, 120 bp, Artificial Sequence
  ENSG00000180263_61 (sequence is synthesized)
ttccaatctcttttccctttttctgtaatgtacccagcatccccctattgtattttggttgcccaagattcttgattctttgagtgtgtagtagcatttcttaaaatgagatcatcagac

SEQ ID NO: 633886 - DNA, 120 bp, Artificial Sequence
  ENSG00000180263_62 (sequence is synthesized)
caacccttgattcacatgaaagctgtaatgacacaacaaagagaaggcgacagttttaaagtataattgtcagccaaatgtgtattttatatttggttcatagaatatatctagatgtgg

SEQ ID NO: 633887 - DNA, 120 bp, Artificial Sequence
  ENSG00000180263_63 (sequence is synthesized)
ggaaagtctcctatttggtaatttagttaaaatgtaaatgttatatcacagcatatgttggtatgttttggagtgtgcttccattgtgctcagcttttgaaaagtttgaaatccacttta

SEQ ID NO: 633888 - DNA, 120 bp, Artificial Sequence
  ENSG00000180263_64 (sequence is synthesized)
gtcaaatgtagtcaatgggatttccagagatacatattgtttttcttagtgtaccacacactccttgaaggcagatactgtacttaatatatcactgtcttccataatactgccctaggt

SEQ ID NO: 633889 - DNA, 120 bp, Artificial Sequence
  ENSG00000180263_65 (sequence is synthesized)
gtcttccataatactgccctaggtctttttagtttttaagagaccgggtctcgctatgtttcccatgctgaactcaaatgcctgggcttaagcaatcctcccacctcagcctctggagta

SEQ ID NO: 633890 - DNA, 120 bp, Artificial Sequence
  ENSG00000180263_66 (sequence is synthesized)
accaggcctggcttcctaggagggtctttaaagagaaaatatttgttcaattgaaaacaggattcttgtcatctacaactccaacacagcctgaaaatatccacattataacctggacct

SEQ ID NO: 633891 - DNA, 120 bp, Artificial Sequence
  ENSG00000180263_67 (sequence is synthesized)
tagacctactttctccactatcctgcaaagctacatctgtaactacctattggctatctatatgagtcctcaagcatctcagactttacatgaataaaactcaacttccttcccattcaa

SEQ ID NO: 633892 - DNA, 120 bp, Artificial Sequence
  ENSG00000180263_68 (sequence is synthesized)
atctgtttattttcttctgtaagagaaagataccatttgagactccagaatctgcctctaactctcaacaagactctgcaattactcaagtatcctttccatcctcattgccctgctgtt

SEQ ID NO: 633893 - DNA, 120 bp, Artificial Sequence
  ENSG00000180263_69 (sequence is synthesized)
attacataggccctggttcaagtccttgttacttgttcccattattgcaataacttctaattccaatgccgttgtgtgatcccattttaaacacggccagagcagtcttccaacaacata

SEQ ID NO: 633894 - DNA, 120 bp, Artificial Sequence
  ENSG00000180263_70 (sequence is synthesized)
gctctaatctagtttcatccccacttttacatgcctcagtggctttcccagtgacttggcatggaacacgtcctcagttgccatacattccagctaactcttacccaacctttctttgtt

SEQ ID NO: 633895 - DNA, 120 bp, Artificial Sequence
  ENSG00000180263_71 (sequence is synthesized)
cacacagtttccttttccttcctcattgacccatccgcatctctgtttatccaagacttctctgtgatagctgacccttagtctttctctcccctattcctccagactagatcctgtctc

SEQ ID NO: 633896 - DNA, 120 bp, Artificial Sequence
  ENSG00000180263_72 (sequence is synthesized)
cttcctgcagccccgacacagccttcagttcatatcttttgcatgatgcttagcaccttctatccctaaggacaacttactcatttgagatttctggcagggtaccttgcatgcagtgga

SEQ ID NO: 633897 - DNA, 120 bp, Artificial Sequence
  ENSG00000180263_73 (sequence is synthesized)
cactcagtatttgctgaattaaattccttcctatggatcccttctgattttttttaagtgcctctaatacacatatcattctagggctcatgccacttttaatgtcattttctaaaggaa

SEQ ID NO: 633898 - DNA, 120 bp, Artificial Sequence
  ENSG00000180263_74 (sequence is synthesized)
aatcttatctatgatattttcccttataagagatagttgttttgagtagggttttttaaaagataaaggtagtaggaaattttttaaagcctaaatatcaaattcctttccctttggagt

SEQ ID NO: 633899 - DNA, 120 bp, Artificial Sequence
  ENSG00000180263_75 (sequence is synthesized)
tgggggaaggaatgaagggggagcaacttgctctttcatatgagttggtcatagcatgtaagaaccaatcttgaaatatcgttttttttttaatggcttataatgtatttctagaaatac

SEQ ID NO: 633900 - DNA, 120 bp, Artificial Sequence
  ENSG00000180263_76 (sequence is synthesized)
atggcagaattccagcagcatggaggacgctgatgcaaatgtgtatgaggtagaagagccgtatgaagctccagatggccagctgcagcttggacccagacatcagcattccagggtctc

SEQ ID NO: 633901 - DNA, 120 bp, Artificial Sequence
  ENSG00000180263_77 (sequence is synthesized)
acagacgtgagccactgcacccagctagattgactcttgatagcagtgattctaagcagctttaattcttattgagccctcacagtgttaagaagcaaaaacattttttgtgtgctcttt

SEQ ID NO: 633902 - DNA, 120 bp, Artificial Sequence
  ENSG00000180263_78 (sequence is synthesized)
cacagtgttaagaagcaaaaacattttttgtgtgctcttttgtactctacaaattaatgtcttctctgcctggtctttgaaatcttggccccagtaaatatctgtgctggctatgcagct

SEQ ID NO: 633903 - DNA, 120 bp, Artificial Sequence
  ENSG00000180263_79 (sequence is synthesized)
gaggtaagatctgaaatctaaagatgagtaatttggggttttgtaatgccaactgcaagtaattacaatattttaaaaatccatttattttacataagattttttgctttgcttttggat

SEQ ID NO: 633904 - DNA, 120 bp, Artificial Sequence
  ENSG00000180263_80 (sequence is synthesized)
gggggaggtgttgttgctgttatttttaatgtgaacagtgttcttgctttgtacctggagagctctttctcaaatgtgttaggaattttccatattattaaaatgcaatttttgtgtgtg

SEQ ID NO: 633905 - DNA, 120 bp, Artificial Sequence
  ENSG00000180263_81 (sequence is synthesized)
agttactggggcagctactggtttcctgttcctcccatctgactcagggtgatcagtcacattcttatgctgcagttaaggccccaggtgattcttaactgtttaaggagatccaggccc

SEQ ID NO: 633906 - DNA, 120 bp, Artificial Sequence
  ENSG00000180264_0 (sequence is synthesized)
atcaggagtctctctgggaccccctccaactccccaggtgaatcaaggaacccttgggccccaggttgcccccgtggccgccggcgaggtggtgaagactgcaggtggggtgtgcaagtt

SEQ ID NO: 633907 - DNA, 120 bp, Artificial Sequence
  ENSG00000180264_1 (sequence is synthesized)
ctctggacagcgactgagctggtggcaggcccaagagtcctgcgagcagcagtttggccacttggcactgcagccccctgatggggttcttgcttcacggctgcgcgatccggtctgggt

SEQ ID NO: 633908 - DNA, 120 bp, Artificial Sequence
  ENSG00000180264_2 (sequence is synthesized)
gggccaaagagaggcccctctgcggagacccccacagaggcgtgcgcgcaccaccgccgtgctggtgttcgacgagaggacggctgaccgggcggcgcggctgcggagccctctgcctga

SEQ ID NO: 633909 - DNA, 120 bp, Artificial Sequence
  ENSG00000180264_3 (sequence is synthesized)
gctggcagcgctgaccgcgtgtactcacgtgcagtgggactgtgcctcgcccgaccccgcagcgctcttctccgttgccgcgcccgcgctgcccaacgcgctgcagctgcgcgccttcgc

SEQ ID NO: 633910 - DNA, 120 bp, Artificial Sequence
  ENSG00000180264_4 (sequence is synthesized)
cgagccggggggcgtcgtgcgcgctgcgctggtggtgcgtgggcagcacgcgcccttcctcgcagccttccgcgccgacggccgctggcaccatgtgtgcgccacgtgggagcagcgggg

SEQ ID NO: 633911 - DNA, 120 bp, Artificial Sequence
  ENSG00000180264_5 (sequence is synthesized)
gctgttctccgatgggaggcggcgcgctggggcgcgggggctgggcgccggccacccggtgccgtccggcggcatcctggtgctgggccaggatcaggactctctgggcggtggcttctc

SEQ ID NO: 633912 - DNA, 120 bp, Artificial Sequence
  ENSG00000180264_6 (sequence is synthesized)
cggtggcttctcggtgcgtcacgccctcagcggcaacctcaccgacttccacctgtgggcgcgggcgctgagccccgctcagctgcaccgggcacgggcctgcgcgccgccctcagaggg

SEQ ID NO: 633913 - DNA, 120 bp, Artificial Sequence
  ENSG00000180264_7 (sequence is synthesized)
cctgctcttccgctgggacccgggcgccctggacgtcacgccctcgctgctgcccactgtgtgggtgcgccttctctgtcccgtgccctccgaggagtgccctacgtggaacccgggacc

SEQ ID NO: 633914 - DNA, 120 bp, Artificial Sequence
  ENSG00000180264_8 (sequence is synthesized)
tcgcagtgagggctctgagctctgcctggagccgcagcccttcctctgctgctaccggacagagccctatcgtcggctgcaggatgcccagtcgtggcctggccaggatgttatcagccg

SEQ ID NO: 633915 - DNA, 120 bp, Artificial Sequence
  ENSG00000180264_9 (sequence is synthesized)
agtcaatgccttggccaacgacattgtgctcctcccggaccccctctccgaagtccatggggccctgtccccagcggaggcctccagcttcctgggccttctggagcatgtcctggcgat

SEQ ID NO: 633916 - DNA, 120 bp, Artificial Sequence
  ENSG00000180264_10 (sequence is synthesized)
ggagatggctcccctggggccggccgcactgctggctgttgtccgcttcctgaagagggtggtggccctcggggctggggacccagagctgttgttgacaggcccctgggagcagctgag

SEQ ID NO: 633917 - DNA, 120 bp, Artificial Sequence
  ENSG00000180264_11 (sequence is synthesized)
ccaaggcgttgtatctgtggccagcctggtcctggaggagcaggtggctgacacatggctctccctccgtgaagtgattggtgggcctatggccctggtggcgagtgtgcagcgcctggc

SEQ ID NO: 633918 - DNA, 120 bp, Artificial Sequence
  ENSG00000180264_12 (sequence is synthesized)
acccctgctgagcacctcaatgacctcagagcggccccgaatgcgcatccagcaccgccatgctggcctggaggtgcggagcttacgcttgagggaggccagcacgaggggctgcttatt

SEQ ID NO: 633919 - DNA, 120 bp, Artificial Sequence
  ENSG00000180264_13 (sequence is synthesized)
atgcctggtgggcgtccagaggggcccggccatatccacattcctgcgagtgaagtgaggcgactcctcaggaaaggcctctctggagtcaccgtgatccacagctggttcacctccaga

SEQ ID NO: 633920 - DNA, 120 bp, Artificial Sequence
  ENSG00000180264_14 (sequence is synthesized)
gtcttccagcacaccctagagggaccggacctagagccccaggcccctgccagctcagaggaggcaaacagggtgcagaggttcctaagcacccaggtggggtcagccatcatctcctct

SEQ ID NO: 633921 - DNA, 120 bp, Artificial Sequence
  ENSG00000180264_15 (sequence is synthesized)
gaagtgtgggacgtcactggagaggtcaacgtggccatgacctttcatctccagcaccgggcccagagccccctgttccctccccatcccccaagcccatatacagggggtgcctgggcc

SEQ ID NO: 633922 - DNA, 120 bp, Artificial Sequence
  ENSG00000180264_16 (sequence is synthesized)
accacaggctgctccgtggctgccctgtacctggactccaccgcctgcttctgcaaccacagcaccagctttgccatcctgctgcaaatctatgaagtacagagaggccctgaggaggag

SEQ ID NO: 633923 - DNA, 120 bp, Artificial Sequence
  ENSG00000180264_17 (sequence is synthesized)
tcgctgctgaggactctgtcatttgtgggctgtggcgtgtccttctgcgccctcaccaccaccttcttgctcttcctggtggccggggtccccaagtcagagcgaaccacagtccacaag

SEQ ID NO: 633924 - DNA, 120 bp, Artificial Sequence
  ENSG00000180264_18 (sequence is synthesized)
aacctcaccttctccctggcctctgccgagggcttcctcatgaccagcgagtgggccaaggccaatgaggtggcatgtgtggctgtcacagtcgcaatgcacttcctctttctggtggca

SEQ ID NO: 633925 - DNA, 120 bp, Artificial Sequence
  ENSG00000180264_19 (sequence is synthesized)
ttctcctggatgctggtggaggggctgctgctgtggaggaaggtggtagctgtgagcatgcacccgggcccaggcatgcggctctaccacgccacaggctggggcgtgcctgtgggcatc

SEQ ID NO: 633926 - DNA, 120 bp, Artificial Sequence
  ENSG00000180264_20 (sequence is synthesized)
gtggcggtcaccctggccatgctcccccatgactacgtggcccccggacattgctggctcaatgtgcacacaaatgccatctgggccttcgtggggcctgtgctcttcgtgctgactgcc

SEQ ID NO: 633927 - DNA, 120 bp, Artificial Sequence
  ENSG00000180264_21 (sequence is synthesized)
aacacctgcatcctggcccgtgtggtaatgatcaccgtgtccagtgcccgccgccgtgcccgcatgttgagcccacagccctgcctgcagcagcagatctggacccagatatgggccacg

SEQ ID NO: 633928 - DNA, 120 bp, Artificial Sequence
  ENSG00000180264_22 (sequence is synthesized)
gtgaagcccgtgctggtcctgctgcccgtcctaggcctgacctggctggcaggcatcctggtgcacctgagccccgcctgggcctacgctgccgtgggcctcaactccatccaggggctg

SEQ ID NO: 633929 - DNA, 120 bp, Artificial Sequence
  ENSG00000180264_23 (sequence is synthesized)
tacatcttcctggtttatgctgcctgcaatgaggaggtgcggagcgccctgcagaggatggctgagaagaaggtggccgagggacctatggccctagaactccctcagcattctcctcca

SEQ ID NO: 633930 - DNA, 120 bp, Artificial Sequence
  ENSG00000180264_24 (sequence is synthesized)
ttgcaaacccggagagacaggctgtggaactgacagcgttcaaagcttcaggtttctagagagtggctgggaaactcgtcgccaaaccctgcccagctcagctctgctgggaccccagac

SEQ ID NO: 633931 - DNA, 120 bp, Artificial Sequence
  ENSG00000180264_25 (sequence is synthesized)
cccagaacggcgcagcgggagtccctgagccccaacagcggccccagctcccgtggcctcagcctctggctttccctaaaggactgtgggcctcagccccctgttcccctagcccaccag

SEQ ID NO: 633932 - DNA, 120 bp, Artificial Sequence
  ENSG00000180264_26 (sequence is synthesized)
gtccccaggctctttcccccagtctttgcctatctgtgatctgctccttcccccatgctccgaagttccaacgggctctgccgtgtctggtaataaataggactgttgggctctcctgtc

SEQ ID NO: 633933 - DNA, 120 bp, Artificial Sequence
  ENSG00000180264_27 (sequence is synthesized)
tttctggtggcattctcctggatgctggtggaggggctgctgctgtggaggaaggtggtagctgtgagcatgcacccgggcccaggcatgcggctctaccacgccacaggctgggggcca

SEQ ID NO: 633934 - DNA, 120 bp, Artificial Sequence
  ENSG00000180264_28 (sequence is synthesized)
ctcacaactgccccatgcccctcaatccacgctcatgcacctgccctgtctctgtctcctgcctccagaccttccgtcataagctggtggagcctgtctgtgctttctggaactacagta

SEQ ID NO: 633935 - DNA, 67 bp, Artificial Sequence
  ENSG00000180264_29 (sequence is synthesized)
aagctggtggagcctgtctgtgctttctggaactacagtatcagatgagtttccatttccagtcaat

SEQ ID NO: 633936 - DNA, 87 bp, Artificial Sequence
  ENSG00000180264_30 (sequence is synthesized)
aacccagccgttaagatgatttttttaaaaatatgtccactctgcttggggatgaggcaagacttacacatggttttgacctctgtt

SEQ ID NO: 633937 - DNA, 120 bp, Artificial Sequence
  ENSG00000180264_31 (sequence is synthesized)
ggggatgaggcaagacttacacatggttttgacctctgttcaccatctgcctttcagggtgactccaggctcctcccagctctaagacaagctgcagcgggaggatgtgttacccagggg

SEQ ID NO: 633938 - DNA, 120 bp, Artificial Sequence
  ENSG00000180264_32 (sequence is synthesized)
gtagtgagctccttgtcataggagtatgtgaaggaggaagcactcactctgtgaggtgcctaggaagagaatcatctgtcaaattggcgttgaacttgatctatctgaggccggggccct

SEQ ID NO: 633939 - DNA, 120 bp, Artificial Sequence
  ENSG00000180264_33 (sequence is synthesized)
tggactcttgaaggagcagagcaggctccagggattatcctggctccctgccctggatctttagctgaggtagggaaccttggtcccagtggctcagtaattaattaagttgataaatga

SEQ ID NO: 633940 - DNA, 120 bp, Artificial Sequence
  ENSG00000180264_34 (sequence is synthesized)
cagtcactgggatcagccctgccctcctaccatcctaagaatgtcaagcacattttacaggtgaaaaactgagacccaggaaggggcggtgactcgccaaggtcacctagctggttagag

SEQ ID NO: 633941 - DNA, 120 bp, Artificial Sequence
  ENSG00000180264_35 (sequence is synthesized)
agaagcatctgagggatgccagctttcatagattgtcggggacagggctgcatgcagtagttcatgcctgttgtcccagcactttgggcggctgatcacttgagcccaggagttcaagac

SEQ ID NO: 633942 - DNA, 120 bp, Artificial Sequence
  ENSG00000180264_36 (sequence is synthesized)
gcactccagcctgggtgacagagcaaaaacctgtctaaaaataaatgagtaaataataaattgtaaaaaaaattgttgggggaaaactctaagaggatgtcaggaggggtcggattcact

SEQ ID NO: 633943 - DNA, 120 bp, Artificial Sequence
  ENSG00000180264_37 (sequence is synthesized)
ctaagaggatgtcaggaggggtcggattcactggagctggaaagggccccggagtggttacttgctgagaagtcaggtgagatgggacgtgagcctcaggaacgctggggtcactacaag

SEQ ID NO: 633944 - DNA, 120 bp, Artificial Sequence
  ENSG00000180264_38 (sequence is synthesized)
gaacaccttgtagtgttgaggggcacactacaaaaacatgttaccaaatgcatttttcctgtagagtcagggccaggcacggtggctcccacctgtaatccgaccactttgggaggccaa

SEQ ID NO: 633945 - DNA, 120 bp, Artificial Sequence
  ENSG00000180264_39 (sequence is synthesized)
cttttgtgcaatccaagttggcctgcctgtgacccctgctgtctgtcacctgctccgttggatccaggatggcaccgtggtgctactgtttcctctgcctcctgatcaggagtctctctg

SEQ ID NO: 633946 - DNA, 120 bp, Artificial Sequence
  ENSG00000180264_40 (sequence is synthesized)
gacgaaaagagctctgcaagaggacaggactcagcaggccatagacatgggcgggttcagccccatccagcccgaatgactccaagcccagtgtccttggctccgcccagccctggaaga

SEQ ID NO: 633947 - DNA, 120 bp, Artificial Sequence
  ENSG00000180264_41 (sequence is synthesized)
gtcagatgcccacaaaatgcaccccccaccgtctctcttatcgtttttagcccccgtggccgccggcgaggtggtgaagactgcaggtggggtgtgcaagttctctggacagcgactgag

SEQ ID NO: 633948 - DNA, 120 bp, Artificial Sequence
  ENSG00000180264_42 (sequence is synthesized)
ctctgcctcctgatcaggagtctctctgggaccccctccaactccccaggtgaatcaaggaacccttgggccccagcccccgtggccgccggcgaggtggtgaagactgcaggtggggtg

SEQ ID NO: 633949 - DNA, 80 bp, Artificial Sequence
  ENSG00000180269_0 (sequence is synthesized)
gtggagcgggtccgaggtgggaggcgcacagacgggctccgggagcccctcccgaggccccgcgcagcgcgccccgcacc

SEQ ID NO: 633950 - DNA, 120 bp, Artificial Sequence
  ENSG00000180269_1 (sequence is synthesized)
aggcgggcaggtgcggagcgagcagaggggatcacggccaagggtaggagccagtcctgcggggagagaggcgctgctgctccagctgccgctgcctccgccgccgccaccaccgagccg

SEQ ID NO: 633951 - DNA, 120 bp, Artificial Sequence
  ENSG00000180269_2 (sequence is synthesized)
gcgaccagagtcgggctggcaggccgggcgcgaagcggcaaggggagcgaggggcgcgctcatggagcacacgcacgcccacctcgcagccaacagctcgctgtcttggtggtcccccgg

SEQ ID NO: 633952 - DNA, 120 bp, Artificial Sequence
  ENSG00000180269_3 (sequence is synthesized)
ctcggcctgcggcttgggtttcgtgcccgtggtctactacagcctcttgctgtgcctcggtttaccagcaaatatcttgacagtgatcatcctctcccagctggtggcaagaagacagaa

SEQ ID NO: 633953 - DNA, 120 bp, Artificial Sequence
  ENSG00000180269_4 (sequence is synthesized)
gtcctcctacaactatctcttggcactcgctgctgccgacatcttggtcctctttttcatagtgtttgtggacttcctgttggaagatttcatcttgaacatgcagatgcctcaggtccc

SEQ ID NO: 633954 - DNA, 120 bp, Artificial Sequence
  ENSG00000180269_5 (sequence is synthesized)
cgacaagatcatagaagtgctggaattctcatccatccacacctccatatggattactgtaccgttaaccattgacaggtatatcgctgtctgccacccgctcaagtaccacacggtctc

SEQ ID NO: 633955 - DNA, 120 bp, Artificial Sequence
  ENSG00000180269_6 (sequence is synthesized)
tgaccagcatcccctattactggtggcccaacatctggactgaagactacatcagcacctctgtgcatcacgtcctcatctggatccactgcttcaccgtctacctggtgccctgctcca

SEQ ID NO: 633956 - DNA, 120 bp, Artificial Sequence
  ENSG00000180269_7 (sequence is synthesized)
tcttcttcatcttgaactcaatcattgtgtacaagctcaggaggaagagcaattttcgtctccgtggctactccacggggaagaccaccgccatcttgttcaccattacctccatctttg

SEQ ID NO: 633957 - DNA, 120 bp, Artificial Sequence
  ENSG00000180269_8 (sequence is synthesized)
ccacactttgggccccccgcatcatcatgattctttaccacctctatggggcgcccatccagaaccgctggctggtacacatcatgtccgacattgccaacatgctagcccttctgaaca

SEQ ID NO: 633958 - DNA, 120 bp, Artificial Sequence
  ENSG00000180269_9 (sequence is synthesized)
cagccatcaacttcttcctctactgcttcatcagcaagcggttccgcaccatggcagccgccacgctcaaggctttcttcaagtgccagaagcaacctgtacagttctacaccaatcata

SEQ ID NO: 633959 - DNA, 120 bp, Artificial Sequence
  ENSG00000180269_10 (sequence is synthesized)
acttttccataacaagtagcccctggatctcgccggcaaactcacactgcatcaagatgctggtgtaccagtatgacaaaaatggaaaacctataaaagtatccccgtgattccataggt

SEQ ID NO: 633960 - DNA, 120 bp, Artificial Sequence
  ENSG00000180269_11 (sequence is synthesized)
gtggcaactactgcctctgtctaatccatttccagatgggaaggtgtcccatcctatggctgagcagctctccttaagagtgctaatccgatttcctgtctcccgcagactgggcaattc

SEQ ID NO: 633961 - DNA, 120 bp, Artificial Sequence
  ENSG00000180269_12 (sequence is synthesized)
tcagactggtagatgagaagagatggaagagaagaaaggagagcatgaagcttgtttttacttatgcatttatttccacagagtcgtaatgacagcaaaagctcctaccagtttgaagat

SEQ ID NO: 633962 - DNA, 120 bp, Artificial Sequence
  ENSG00000180269_13 (sequence is synthesized)
ggtctactacagcctcttgctgtgcctcggtttaccagatatcatgaagccgatcaagttgtaaggagggcggtctgcttgctcagccccaccagtgaccagaggagggactgagataca

SEQ ID NO: 633963 - DNA, 120 bp, Artificial Sequence
  ENSG00000180287_0 (sequence is synthesized)
gtaggtgccgcaaggagccggcgagcggagcgcccgctcgggaccgcagccgccgggcgacgtcgccgccgcaccgggcacttctgtctccccggagcagctcctccagctcagtctcca

SEQ ID NO: 633964 - DNA, 120 bp, Artificial Sequence
  ENSG00000180287_1 (sequence is synthesized)
ccgctgggcctcccgctcgccctccgcgcccggctccccgcgcgcccgtcccgagtccgctgctcgccggcggccgcccggtcatgtcaggatggagatccggcagcacgagtggctctc

SEQ ID NO: 633965 - DNA, 120 bp, Artificial Sequence
  ENSG00000180287_2 (sequence is synthesized)
agcacgagtggctctcggcctccccccatgagggcttcgagcagatgaggctcaaaagccgccccaaggagccctccccaagcctgacccgagtgggcgcgaacttctacagcagcgtca

SEQ ID NO: 633966 - DNA, 120 bp, Artificial Sequence
  ENSG00000180287_3 (sequence is synthesized)
agcagcaggactacagcgccagcgtctggcttcggaggaaagacaagctggagcactcccagcagaagtgcatcgtgatctttgccctggtgtgctgctttgccattctggttgcactga

SEQ ID NO: 633967 - DNA, 120 bp, Artificial Sequence
  ENSG00000180287_4 (sequence is synthesized)
tcttttcagccgtggacatcatgggagaggatgaggatggactctcagaaaaaaattgccaaaataaatgtcgaattgccctggtggaaaatattcctgaaggccttaactattcagaaa

SEQ ID NO: 633968 - DNA, 120 bp, Artificial Sequence
  ENSG00000180287_5 (sequence is synthesized)
atgcaccatttcacttatcacttttccaaggctggatgaatttactcaacatggccaaaaagtctgttgacatagtgtcttcccattgggatctcaaccacactcatccatcagcatgtc

SEQ ID NO: 633969 - DNA, 120 bp, Artificial Sequence
  ENSG00000180287_6 (sequence is synthesized)
agggtcaacgtctttttgaaaagttgctccagctgacttcgcaaaatattgaaatcaagctagtgagtgatgtaacagctgattcaaaggtattagaagccttgaaattaaagggagccg

SEQ ID NO: 633970 - DNA, 120 bp, Artificial Sequence
  ENSG00000180287_7 (sequence is synthesized)
aggtgacgtacatgaacatgaccgcttacaacaagggccggctgcagtcctccttctggatcgtggacaaacagcacgtgtatatcggcagtgccggtttggactggcaatccctgggac

SEQ ID NO: 633971 - DNA, 120 bp, Artificial Sequence
  ENSG00000180287_8 (sequence is synthesized)
agatgaaagaactcggtgtcatcttctacaactgcagctgcctggtcctagatttacaaaggatatttgctctatatagttcattaaaattcaaaagcagagtgcctcaaacctggtcca

SEQ ID NO: 633972 - DNA, 120 bp, Artificial Sequence
  ENSG00000180287_9 (sequence is synthesized)
aaagactctatggagtctatgacaatgaaaagaaattgcaacttcagttgaatgaaaccaaatctcaagcatttgtatcgaattctccaaaactcttttgccctaaaaacagaagttttg

SEQ ID NO: 633973 - DNA, 120 bp, Artificial Sequence
  ENSG00000180287_10 (sequence is synthesized)
acatagatgccatctacagtgtgatagatgatgccaagcagtatgtgtacatcgctgtcatggactacctgcctatctccagcacaagcaccaaaaggacttactggccagacttggatg

SEQ ID NO: 633974 - DNA, 120 bp, Artificial Sequence
  ENSG00000180287_11 (sequence is synthesized)
caaaaataagagaagcattagttttacgaagcgttagagttcgactccttttaagcttctggaaggaaactgatccccttacgtttaactttatttcatctcttaaagcgatttgcactg

SEQ ID NO: 633975 - DNA, 120 bp, Artificial Sequence
  ENSG00000180287_12 (sequence is synthesized)
aaatagccaactgcagtttgaaagttaaattttttgatctggaaagagagaatgcttgtgctacaaaagaacaaaagaatcacacctttcctaggttaaatcgcaacaagtacatggtga

SEQ ID NO: 633976 - DNA, 120 bp, Artificial Sequence
  ENSG00000180287_13 (sequence is synthesized)
acgggccttgttatcaaccaggcagatgtgaggaacaacagaagcatcattaagcaacttaaagatgtgtttgaaagggactggtattcaccgtatgccaaaaccttacagccaaccaaa

SEQ ID NO: 633977 - DNA, 120 bp, Artificial Sequence
  ENSG00000180287_14 (sequence is synthesized)
cagccgaactgctcaagcctgttcaaactcaaacccctctccaacaaaactgccacagacgacacaggcggaaaggatccccggaacgtataacatgatgaagaaactgacaggacagct

SEQ ID NO: 633978 - DNA, 120 bp, Artificial Sequence
  ENSG00000180287_15 (sequence is synthesized)
ctgtatttcatatttatacataaaggacttgaggagagaaaaaacactttaatatgtctctttttttagggaaaaagcacacttataaaaaatattctctgaacaacacataatacctat

SEQ ID NO: 633979 - DNA, 120 bp, Artificial Sequence
  ENSG00000180287_16 (sequence is synthesized)
ctaacaatatcttagcgtcgtgtacactaaaattaagacttttgtatttgttacctctgacagagaatgtcattctggcgtagaagttagtttttacgtttgcatacaaattttaagact

SEQ ID NO: 633980 - DNA, 120 bp, Artificial Sequence
  ENSG00000180287_17 (sequence is synthesized)
ttcattcctgctcctttctagttttagaactttttctgctgacctacccggtcagttgttaggaagcttagcatgaggtgggctctttaacaccattctgagaactgttgatttagagag

SEQ ID NO: 633981 - DNA, 120 bp, Artificial Sequence
  ENSG00000180287_18 (sequence is synthesized)
gaaggtgaggattttgccttggagaagagactgataaaaccaagtgtttattcttgtaaatcgtctccaagacctacacagtcagctaagcatgaatagcttacatctcatgccagcctt

SEQ ID NO: 633982 - DNA, 120 bp, Artificial Sequence
  ENSG00000180287_19 (sequence is synthesized)
caacacccttgaaaaatatccttttctgtcttgctcattttcttcttataccataagttttatttggtatcattttctcttctcacaaaatgttcctattatatagcattttctgtattc

SEQ ID NO: 633983 - DNA, 120 bp, Artificial Sequence
  ENSG00000180287_20 (sequence is synthesized)
acctcaacattacttctaactatgataacatcttttgaaaacatacaaatttttcagaatggatactaagtggaaatagcagtctttcattttcacctttcaactgaatccttttttccc

SEQ ID NO: 633984 - DNA, 120 bp, Artificial Sequence
  ENSG00000180287_21 (sequence is synthesized)
ctaccgaattggtatttaaaaaaaatcacagtcagcaatatgtatcctttctctcaagctcagaaaaattatgtagccacctgctaatatccagcaagctatcaagtctgcattttggga

SEQ ID NO: 633985 - DNA, 120 bp, Artificial Sequence
  ENSG00000180287_22 (sequence is synthesized)
ataaagtagtttttcacatttttgttcagtttatggtattataaaggaaaaaatctctatgcgtcagtggattttaatttctttagaatcattatgctgttaagagtatgccagcaaacg

SEQ ID NO: 633986 - DNA, 120 bp, Artificial Sequence
  ENSG00000180287_23 (sequence is synthesized)
tttctagagctatttaatataccttctgctatttaatataccaaatgcttttcagagaaatgcaatttaaatactgtgcttaacatattttactaagaagcagaaatattgaattattgt

SEQ ID NO: 633987 - DNA, 120 bp, Artificial Sequence
  ENSG00000180287_24 (sequence is synthesized)
tctataacgtaattgtgtgttgttgttttatatctatacaatatatacccctgtattaatggagaccattgctacactagggagaggcatggcctcttcagagcccacagcaggtggccg

SEQ ID NO: 633988 - DNA, 120 bp, Artificial Sequence
  ENSG00000180287_25 (sequence is synthesized)
ggatgtccagttccaatgttgttcccgactctgtgactcaaagcggagcccctcactgcttggcctcgggcttctcttggtaatgtagacggtaataactcacctacctcgcaaggatgt

SEQ ID NO: 633989 - DNA, 120 bp, Artificial Sequence
  ENSG00000180287_26 (sequence is synthesized)
tgtcacggtaggaaatatttataacttgttttgaaatcaaaagaacctatataaatgctaagcattataatatataatctttttcttgaaataaactttgtcatatcttgatggaatcaa

SEQ ID NO: 633990 - DNA, 120 bp, Artificial Sequence
  ENSG00000180287_27 (sequence is synthesized)
gcctcccgcgatcgccccctcccgcccggccgcgctcccagctggcgctcagcaccccgcgctccccgcgcccgctcgctcctccagctcctccagctcagtctccagctccacctccgg

SEQ ID NO: 633991 - DNA, 120 bp, Artificial Sequence
  ENSG00000180287_28 (sequence is synthesized)
cacagcttcctgttgcaaatgtggatgaaaagagcacagccccacagaaaccctggtggagatctggattgtcaacatttcaatagaacattgcgttgggctgctttggcatgaataaca

SEQ ID NO: 633992 - DNA, 120 bp, Artificial Sequence
  ENSG00000180287_29 (sequence is synthesized)
tcaacacaaaactagacgtcgtgctagagctggttcttcaggaccataatatacatgtattttcagagcaaggaaacactcagttattctttttcatttctggagacttgatttctaaat

SEQ ID NO: 633993 - DNA, 120 bp, Artificial Sequence
  ENSG00000180287_30 (sequence is synthesized)
gccaaaagagtgatcgaggagcctgtgaatcttatccaatggatttacttaatatagaatggctatgttggttatccagtgagtgatcacattacttcccttcttgttatttgcaagtat

SEQ ID NO: 633994 - DNA, 120 bp, Artificial Sequence
  ENSG00000180287_31 (sequence is synthesized)
tgcttcactagatatttaaccagttgatcaagagagctggaaggaagctgtatttttaagggtagcatggttttatgactaattgggagattctcactgaaattcttcatcaataatagc

SEQ ID NO: 633995 - DNA, 120 bp, Artificial Sequence
  ENSG00000180287_32 (sequence is synthesized)
cagtccctaagactctaaatatttaccatatacacaatccatatttgagttgggagttataactctgccagttatcccaataaagtaaacgtggctttggtgatgattttaaaaagaaag

SEQ ID NO: 633996 - DNA, 64 bp, Artificial Sequence
  ENSG00000180287_33 (sequence is synthesized)
tagcatagcaagatcctgcctctaaaaataaataaatacagaaaggaaagaaggaatcagaata

SEQ ID NO: 633997 - DNA, 120 bp, Artificial Sequence
  ENSG00000180287_34 (sequence is synthesized)
aaaataaataaatacagaaaggaaagaaggaatcagaataggagtggagacaaacctaccaagttcacactcagacaaacaaaagcgacctgagttggttttaaaaaggacatctaaagg

SEQ ID NO: 633998 - DNA, 120 bp, Artificial Sequence
  ENSG00000180287_35 (sequence is synthesized)
gagaaaaaaaaaccaaataaactaaaatttgttagttctcaagttgtcccctgaagtattcatccacagccatgggacactcataggcttggtgtcatggggccccttcactgtcactat

SEQ ID NO: 633999 - DNA, 120 bp, Artificial Sequence
  ENSG00000180287_36 (sequence is synthesized)
tgctatcaccaggagccgcatcccaggcttttctgccaagcagcagcagcagatgcctaccagacacagcaagcccctaatcaggggagtctgggcagcggtggtgactccatggggcca

SEQ ID NO: 634000 - DNA, 120 bp, Artificial Sequence
  ENSG00000180287_37 (sequence is synthesized)
cactgtccttctgtggcagccagaaaagtgacccccataccaagagtgtcagaaatgggttcatgtctcccaagagaacatttcattctgcagaactttctttcatttggatgctttagc

SEQ ID NO: 634001 - DNA, 120 bp, Artificial Sequence
  ENSG00000180287_38 (sequence is synthesized)
tatccctctagagacggctttcctttcttttagacttgtttctgtgctaaacaaactatcaacctccattcccccccacccctaaatatcccaggaattactttccaggagggaaagaat

SEQ ID NO: 634002 - DNA, 120 bp, Artificial Sequence
  ENSG00000180287_39 (sequence is synthesized)
gcaaaacaaaaacaggttaatttgacaccctctggtggatgtccatgccagaaattatgaggagcagggtgactactccccattaacattcctggatttatttcccaagaggcaaaaagg

SEQ ID NO: 634003 - DNA, 120 bp, Artificial Sequence
  ENSG00000180287_40 (sequence is synthesized)
aaaacaaacacaattagagactatatcttggatttcagtaccactaacactaacttagtgccttatgtatcctcaagtgttgattttaaacaatgacttattctatgagaacacttctct

SEQ ID NO: 634004 - DNA, 120 bp, Artificial Sequence
  ENSG00000180287_41 (sequence is synthesized)
ctcctgtggaattcaaatgaccttccgatgggcctaccagttgaaaacttccatttgagcagtgacagtttttatgctgcctgttctcttcccaagccccatcacctttatccacccccc

SEQ ID NO: 634005 - DNA, 120 bp, Artificial Sequence
  ENSG00000180287_42 (sequence is synthesized)
cgccaaatcaaatcattgcacacaccatcaaagatcaatactgtgggcctccactgcattgtcactggccactagcctatcaaataattgaatctctgcttgtccaaccattggagagga

SEQ ID NO: 634006 - DNA, 120 bp, Artificial Sequence
  ENSG00000180287_43 (sequence is synthesized)
agtggaagagtgagatgacatccatgctttgtaaacaacaagctttaggtacctgaacctgatagaaacaaggaatgctgaaaatgtccccactgacttaaaagaatgctgtaaagagat

SEQ ID NO: 634007 - DNA, 120 bp, Artificial Sequence
  ENSG00000180287_44 (sequence is synthesized)
gctttgcagacttcctaggtcctgtggcacagagaatgaaaaccagcgtctttaacaagtcaaagcagacaaagaaacaaaaggtctgcggatacactttgcacctgtgtaactctgggc

SEQ ID NO: 634008 - DNA, 120 bp, Artificial Sequence
  ENSG00000180287_45 (sequence is synthesized)
accattcgggccctctctgtgctactgtttgtctcatgtctgaatggttcttggtgagaggggtctgatcacatttttggttgatctcaccctttgaaaaatgtgggggattttttttga

SEQ ID NO: 634009 - DNA, 120 bp, Artificial Sequence
  ENSG00000180287_46 (sequence is synthesized)
aatgcagttaatggtttaagtgcctcgatgaacctgggatggatagaagctcatttcccaccagcctgtggctatactcagtgactctgattcattctgtttgtttttaggaacttttat

SEQ ID NO: 634010 - DNA, 120 bp, Artificial Sequence
  ENSG00000180287_47 (sequence is synthesized)
tgaactaaattccaaggggggagaaaagaccataagaatttcttgataagatcagatccagggtctatctgtctcaggaattctatcctacaattaacttttttttttttccacacgtat

SEQ ID NO: 634011 - DNA, 120 bp, Artificial Sequence
  ENSG00000180287_48 (sequence is synthesized)
gaccactggtgtgtgtttctgtgtccaaaattcatttcattatttttaactttaggaatgtaaaacgctgccattacttgcatagaacagccacttcctataatgaaagatactttgtta

SEQ ID NO: 634012 - DNA, 120 bp, Artificial Sequence
  ENSG00000180287_49 (sequence is synthesized)
ttgtttattcaaactcagtccttacgaacagccccatatattgtggacaaatgtttcattcttttatctttctgtacttgttcccaatgaactggtgtgctttattatacaccttttaaa

SEQ ID NO: 634013 - DNA, 120 bp, Artificial Sequence
  ENSG00000180287_50 (sequence is synthesized)
ggcaaaattaatataacttccatttggcccaaggtaaaaaattttccaatttgatttggattagcatctttcattttccttttatatgttgttaacaaaatagctgcttaccattttcac

SEQ ID NO: 634014 - DNA, 120 bp, Artificial Sequence
  ENSG00000180287_51 (sequence is synthesized)
cttattgacttaaatggacggaggcttttgaatagccctgacatcaaccccagttcgcagcctgtctttctcatttgagagaattcccatctttggctgaattatgaagatgctgcttta

SEQ ID NO: 634015 - DNA, 120 bp, Artificial Sequence
  ENSG00000180287_52 (sequence is synthesized)
tacagtgactcaatgggtattcctcagaagtttcttgaagatgtaaaaatgaaattttcttatttttgacccattagcagtcttgtatttacaaggttctaaaacttcactggtcattaa

SEQ ID NO: 634016 - DNA, 120 bp, Artificial Sequence
  ENSG00000180287_53 (sequence is synthesized)
cgcttcttttggcaatttgaaaaaaaaaagttacatttaatagactattacacattttcttttgctatgttcaactactaaacttctaattctgttacaaaaggtatcttgaatttttaa

SEQ ID NO: 634017 - DNA, 120 bp, Artificial Sequence
  ENSG00000180287_54 (sequence is synthesized)
tgttcctttatgtaaataggataaacttgtacctggacatatctatattattaaccttaagatccctaaataaatgggtttgataaagggttgaatttgggggaatcattaaaattatca

SEQ ID NO: 634018 - DNA, 120 bp, Artificial Sequence
  ENSG00000180287_55 (sequence is synthesized)
aacctttcgtataaccagatgctcagttttttcagaagtaaatattagatggctttttcatactgtgagatgaggcatttctttttctcctcaagctgatctcagaaacaaatcagtctc

SEQ ID NO: 634019 - DNA, 120 bp, Artificial Sequence
  ENSG00000180287_56 (sequence is synthesized)
tcatcagtaaccaagctgtactgtggtaaattatgaagaaggtagatgcgactggtccaatgggcccactgttttgtatattcacacaaggaggcatctttgaaacactatacctatctc

SEQ ID NO: 634020 - DNA, 120 bp, Artificial Sequence
  ENSG00000180287_57 (sequence is synthesized)
aaaaaaaaaaaaaaaaaaaaaaacctttccaataaatgttcattctgagtacattaatttttagtgagaaaaagaaacaatcatagagaccccactagagaacctagtgtctgctcagca

SEQ ID NO: 634021 - DNA, 120 bp, Artificial Sequence
  ENSG00000180287_58 (sequence is synthesized)
gtctgctcagcaaacccatattgagctgtagagcatactttaacagccatctcaaccagctcacccaacgtgtaaattcccttcccatttgggcatagaagttgacagcctagagtgtca

SEQ ID NO: 634022 - DNA, 120 bp, Artificial Sequence
  ENSG00000180287_59 (sequence is synthesized)
ggacggccgagtggtctgaggctccagactcaaggtgagaagctgaaaacctacttgagccaaacaatttggagtgctttatatggttcctttctcaagacccacacaggataaaatttt

SEQ ID NO: 634023 - DNA, 120 bp, Artificial Sequence
  ENSG00000180287_60 (sequence is synthesized)
gttgatttactaaagtaatttggatttgaggcagtcttatctctgaaaggatatgcacagcatgtaataaggtgggtgctgttttcataaagagaatcaatctgagaggcatacttttaa

SEQ ID NO: 634024 - DNA, 120 bp, Artificial Sequence
  ENSG00000180287_61 (sequence is synthesized)
aaaaaaaactatcattggagaggttagcaaaggcttaaaagtgaactttgagtctgcaatagtcaatagtattctgattttattggcagtttctgaatgctacaatttcgtgtttttttt

SEQ ID NO: 634025 - DNA, 120 bp, Artificial Sequence
  ENSG00000180287_62 (sequence is synthesized)
taaaaaaatgggctaacagtgcgatgacagtcatgtacaaggagtccaattaaatcatagtaagggtgaagattatttgtgatttatttttatatgagagataaattagtaaggagaaaa

SEQ ID NO: 634026 - DNA, 120 bp, Artificial Sequence
  ENSG00000180287_63 (sequence is synthesized)
gatctctttttatgaagtggatatctggctctcaaacccattccttttggctcagacattaaaaaattattaattcccttatggactctcctattccccatgggcggaaaattctgaaaa

SEQ ID NO: 634027 - DNA, 120 bp, Artificial Sequence
  ENSG00000180287_64 (sequence is synthesized)
gcagatgagacattctgagccccttgcaagacaaacacagatggtttctaatttagagttttcccacacaaatgcacaaccaatcttggaaatatgacctcaattcccaggattaaaaac

SEQ ID NO: 634028 - DNA, 120 bp, Artificial Sequence
  ENSG00000180287_65 (sequence is synthesized)
gttgaaattatatgttactttccaatataaatagaggatgaagatctttaaagacaactcagaaaatatgatccaataacattcaaatcagagcgtaatctacaatttcacttaatagtt

SEQ ID NO: 634029 - DNA, 120 bp, Artificial Sequence
  ENSG00000180287_66 (sequence is synthesized)
aaaagtgaagattagctgcttctttaaaaggggtgagttattaaaggcaacatcctagaaaatgtaataacaagaaggcaacaccatattttcagcaaagttatggtactgataaagcac

SEQ ID NO: 634030 - DNA, 120 bp, Artificial Sequence
  ENSG00000180287_67 (sequence is synthesized)
tttgaaaatcctctgtaggaaaatgtcattgagaaacaaaggccaatttgtctccagtgataaagctatctctcattcatatttcataggtggatctatagttttcctggtgtcttggag

SEQ ID NO: 634031 - DNA, 120 bp, Artificial Sequence
  ENSG00000180287_68 (sequence is synthesized)
agaccctacctccacagctcctgcaggagcaaaaccatgttttctgccatgtgagctctctacactggccacagctgattgtaccaaggttcagtacccgacccaaagagactcattttc

SEQ ID NO: 634032 - DNA, 120 bp, Artificial Sequence
  ENSG00000180287_69 (sequence is synthesized)
aggccagagggcggcctaaggaatgaaagtgtacctagcagtggtattcttgtttgatggtacctggccccaccaatcacggccctcttttagggagtttgaacaccagaaagtaaatga

SEQ ID NO: 634033 - DNA, 120 bp, Artificial Sequence
  ENSG00000180287_70 (sequence is synthesized)
tgaataggaagcacagccagaatagacacagtcaccgtaatggtgactctgagaacagtgacagcagttacttctgcagtcaagacaatttgaggtcttgttgattcaccattctgctct

SEQ ID NO: 634034 - DNA, 120 bp, Artificial Sequence
  ENSG00000180287_71 (sequence is synthesized)
tagcttactggagaaatacttgactcctgaacaatgagtctggactttgtagttcctgggttgctttttttttttcttcctttcttatgtattgacataaataaactcacattaactgaa

SEQ ID NO: 634035 - DNA, 120 bp, Artificial Sequence
  ENSG00000180287_72 (sequence is synthesized)
ggtgatacgtttgtgccacatgaaacattctctgcctctgaaggctccagaggctgtgggaagcagcacatcagcgacagctcctggctgctggactccgcagggagggaaggaagattg

SEQ ID NO: 634036 - DNA, 120 bp, Artificial Sequence
  ENSG00000180287_73 (sequence is synthesized)
cggagcgcccgctcgggaccgcagccgccgggcgacgtcgccgccgcaccgggcacttctgtctccccggagcaggttcctttccctccctgtcccctctcgtcccccttctccccgtcc

SEQ ID NO: 634037 - DNA, 120 bp, Artificial Sequence
  ENSG00000180287_74 (sequence is synthesized)
gaaaagttgctccagctgacttcgcaaaatattgaaatcaagctagtgagtgatgtaacagctgattcaaaggtattagaagccttgaaattaaagggcaaatgaattaacagggatgca

SEQ ID NO: 634038 - DNA, 120 bp, Artificial Sequence
  ENSG00000180287_75 (sequence is synthesized)
ggaggctttttctgaaggacttttccccactctctgcactggaagacacgagaactacactaaaataatgttccaggcaaagccttctgttaacaacatgcctctctgtgaggtgtgtga

SEQ ID NO: 634039 - DNA, 120 bp, Artificial Sequence
  ENSG00000180287_76 (sequence is synthesized)
agcaggttcctactccagcttgcgatgtgatcattgcctgaagcttcttctcttgttaattagagaacctgattcttctaaagtgtctccactctcctttataacatacagacacatgct

SEQ ID NO: 634040 - DNA, 120 bp, Artificial Sequence
  ENSG00000180287_77 (sequence is synthesized)
ttccctccttctcccccaaatcctgatactctcatattcttcttaccattcccttcctttccatggcccaggagcatttcccatttgaaatttctgagtttctcagactgaatgaagact

SEQ ID NO: 634041 - DNA, 120 bp, Artificial Sequence
  ENSG00000180304_0 (sequence is synthesized)
gggcggcggcggcggcggcggcggtggcggccggggagggtcagttggaggcaggcgctcgctgaggcaaaaggaggcgctcggcccgcggcctgacagggacttagcccgcagagatcg

SEQ ID NO: 634042 - DNA, 120 bp, Artificial Sequence
  ENSG00000180304_1 (sequence is synthesized)
cagggacttagcccgcagagatcgaccccgcgcgcgtgaccccacacccacccactcatccatctatccactccctgcgccgcctcctcccaccctgagcagagccgccgaggatgataa

SEQ ID NO: 634043 - DNA, 120 bp, Artificial Sequence
  ENSG00000180304_2 (sequence is synthesized)
acacccaggacagtagtattttgcctttgagtaactgtccccagctccagtgctgcaggcacattgttccagggcctctgtggtgctccgatgcccctcacccactgtcgaagatccccg

SEQ ID NO: 634044 - DNA, 120 bp, Artificial Sequence
  ENSG00000180304_3 (sequence is synthesized)
gtgggcgagggggcggcagggatccttctctctcagctctaatatataaggacgagaagctcactgtgacccaggacctccctgtgaatgatggaaaacctcacatcgtccacttccagt

SEQ ID NO: 634045 - DNA, 120 bp, Artificial Sequence
  ENSG00000180304_4 (sequence is synthesized)
atgaggtcaccgaggtgaaggtctcttcttgggatgcagtcctgtccagccagagcctgtttgtagaaatcccagatggattattagctgatgggagcaaagaaggattgttagcactgc

SEQ ID NO: 634046 - DNA, 120 bp, Artificial Sequence
  ENSG00000180304_5 (sequence is synthesized)
tagagtttgctgaagagaagatgaaagtgaactatgtcttcatctgcttcaggaagggccgagaagacagagctccactcctgaagaccttcagcttcttgggctttgagattgtacgtc

SEQ ID NO: 634047 - DNA, 120 bp, Artificial Sequence
  ENSG00000180304_6 (sequence is synthesized)
caggccatccctgtgtcccctctcggccagatgtgatgttcatggtttatcccctggaccagaacttgtccgatgaggactaatagtcatagaggatgctttacccaagagccacagtgg

SEQ ID NO: 634048 - DNA, 120 bp, Artificial Sequence
  ENSG00000180304_7 (sequence is synthesized)
gggaagaggggaagttaggcagccctgggacagacgagagggctcctcgctgtctagggaaggacactgaggggctcagggtgagggttgcctattgtgttctcggagttgactcgttga

SEQ ID NO: 634049 - DNA, 120 bp, Artificial Sequence
  ENSG00000180304_8 (sequence is synthesized)
aagaacagtataaacatattattcacatgtaatcaccaatagtaaatgaagatgtttatgaactggcattagaagctttctaaactgcgctgtgtgatgtgttctatctagcctagggga

SEQ ID NO: 634050 - DNA, 120 bp, Artificial Sequence
  ENSG00000180304_9 (sequence is synthesized)
ggacattgcctagagggggagggactgtctgggttcaggggcatggcctggagggctggtgggcagcactgtcaggctcaggtttccctgctgttggctttctgttttggttattaagac

SEQ ID NO: 634051 - DNA, 120 bp, Artificial Sequence
  ENSG00000180304_10 (sequence is synthesized)
ttgtgtattttctttctttgcttcctgtcaccccaggggctcctgagtataggcttttcagtccctgggcagtgtccttgagttgttttttgacactcttacctgggcttctctgtgtgc

SEQ ID NO: 634052 - DNA, 120 bp, Artificial Sequence
  ENSG00000180304_11 (sequence is synthesized)
atttgcgtctggcctggagtaagcaggtccgacccctccttctttacagcttagtgttattctggcatttggttaagctggcttaatctgtttaatgttatcagtacattttaaataggg

SEQ ID NO: 634053 - DNA, 120 bp, Artificial Sequence
  ENSG00000180304_12 (sequence is synthesized)
gcattgaaatttactcccaccaccagggcttttttgggggatgcctgggcctttaaaacactagccaaactctaattaattctcaaatcactgccaggagttcttgctcctggctgcagg

SEQ ID NO: 634054 - DNA, 120 bp, Artificial Sequence
  ENSG00000180304_13 (sequence is synthesized)
cccaggccccaaggtctccttcttggggtcacaaacagcagtaaggaagaggaatatatagcaactcagggcctgggaattgtggggcaatccgttcttagggactggatacttctggct

SEQ ID NO: 634055 - DNA, 120 bp, Artificial Sequence
  ENSG00000180304_14 (sequence is synthesized)
ggctgagtatagtactagctgcctccccaccaggttccgagtagtgtctgagactctgctctgcagggcctagggtagcgctgggagtgtagaagtggcctgcccttaactgttttcact

SEQ ID NO: 634056 - DNA, 120 bp, Artificial Sequence
  ENSG00000180304_15 (sequence is synthesized)
aaacagctttttctaaggggagagcaagggggagagatctagattgggtgagggggacggggatgtcagggaggcaagtgtgttgtgttactgtgtcaataaactgatttaaagttgtgg

SEQ ID NO: 634057 - DNA, 120 bp, Artificial Sequence
  ENSG00000180304_16 (sequence is synthesized)
tatataagggaaggaaaagaacatggtgttgggggaaagcgtgggctttcgagtcagggagacctgggtttgaatctcatctctgccattcactgtctttggagccttgggacgagaagc

SEQ ID NO: 634058 - DNA, 120 bp, Artificial Sequence
  ENSG00000180304_17 (sequence is synthesized)
aaaggcgccgtgtgtgctgaggatagatggcaggtatgagagagggcaggatgaagcacaggggtggaggggagcagagagacctacaacaaaacccactcaagggtagtattttgcctt

SEQ ID NO: 634059 - DNA, 120 bp, Artificial Sequence
  ENSG00000180304_18 (sequence is synthesized)
attacagggatgagccaccatgcccagcctgtttcttaaatcatcctttaggtggttgagattaaacaatgcctgccctcaagtggtgtgaccaggaggtgaggaaggattggaaaaagc

SEQ ID NO: 634060 - DNA, 120 bp, Artificial Sequence
  ENSG00000180304_19 (sequence is synthesized)
attggaaaaagctggggataggagccagttagaaacaagactaaactgaatatgaaacccaacctggtttggatcttatgataggaagacttgtgtttagaagtcactgtctgttgtgct

SEQ ID NO: 634061 - DNA, 120 bp, Artificial Sequence
  ENSG00000180304_20 (sequence is synthesized)
taaattcttccaggattcattattcctaatgagcttggtggcgtagcttcaataccatttgaacactaaagccattatcagaagagaaggccattactgggtaatttcatgccccttaat

SEQ ID NO: 634062 - DNA, 120 bp, Artificial Sequence
  ENSG00000180304_21 (sequence is synthesized)
gtctttaactaccacatacgtacccatcccccttcctttctcacttcagaaatgacaggttttttggaagagaagcaatttgccattcacagcaagtaactaataacagatgctttatgt

SEQ ID NO: 634063 - DNA, 120 bp, Artificial Sequence
  ENSG00000180304_22 (sequence is synthesized)
ggacgatgaagataattattgtgatctactgtctactaaacttatcgcaaaccccagctgtttcttttagggaactggaactagttcccagagtgggggcttgaaacacccctccacccc

SEQ ID NO: 634064 - DNA, 120 bp, Artificial Sequence
  ENSG00000180304_23 (sequence is synthesized)
cactcacacacacacttgcttatctgcgcagatttatgggggaggagcagagagcctccaggatccttgtatgtgagaatggggaagtaaatgacatgttaccatggcgtagatatcttg

SEQ ID NO: 634065 - DNA, 120 bp, Artificial Sequence
  ENSG00000180304_24 (sequence is synthesized)
cgtttatttgaagaggagagagatcaggaaaccagaaatatcacaagccccactgctaaatatgactagcttaaagaaagaaatatcacaagctcatagattagtgctggacacagggca

SEQ ID NO: 634066 - DNA, 120 bp, Artificial Sequence
  ENSG00000180304_25 (sequence is synthesized)
ggcaggctccagggattacttctaggaagacaaagggtattatggtctaaaaaaaaatcctcactttattcttgtcttttcagtgagttggcccattgcttctgctgtttgcaagtaaaa

SEQ ID NO: 634067 - DNA, 120 bp, Artificial Sequence
  ENSG00000180304_26 (sequence is synthesized)
attagctaagaatcaagatggtagttgggatgcagggcagaggttgaatgcagctcgctcatctaaagaccatttgaggaataattcctttggaagtaggagcctggcaccagaattcta

SEQ ID NO: 634068 - DNA, 120 bp, Artificial Sequence
  ENSG00000180304_27 (sequence is synthesized)
gaattgcaagggcttggtgattgatagggttattttgtgaacctaattaattctctgtatacaagatgataatctgtctatcccagaggggtttgccccatctttgggtagctccactga

SEQ ID NO: 634069 - DNA, 120 bp, Artificial Sequence
  ENSG00000180304_28 (sequence is synthesized)
ccaatagaagcaaaccagctttctcccgtggtccagccctccttatgcccctgcaggaacctcagcacagagaagtgatcattggggaatgagaacggaatcatatgatgtggtgcatgt

SEQ ID NO: 634070 - DNA, 120 bp, Artificial Sequence
  ENSG00000180304_29 (sequence is synthesized)
gtgtgcatttgcttggggaaactcccctcaccaaactcttgtcttattttttctagtctggacactgttattctgccccttaacacattggaagggggaatcacaatagctcattgtccc

SEQ ID NO: 634071 - DNA, 120 bp, Artificial Sequence
  ENSG00000180304_30 (sequence is synthesized)
acattggaagggggaatcacaatagctcattgtccccagcagaaaataactcctgtccttgaaaacagtagcatagtcctctgttaagccctttctgtttttttgtttgtttttgttttt

SEQ ID NO: 634072 - DNA, 70 bp, Artificial Sequence
  ENSG00000180304_31 (sequence is synthesized)
ggcctccttagtagttgggactacaggcacgctccaccacacccggctaatttttgtgttttcagtagag

SEQ ID NO: 634073 - DNA, 120 bp, Artificial Sequence
  ENSG00000180304_32 (sequence is synthesized)
ttacaggcatgagccactgcgcccagttcagccttttctgttaacagctgttgatgaggccgagagtggaggaggtgaggatgacctgaggttttccagaggagggaagaggtagatatg

SEQ ID NO: 634074 - DNA, 120 bp, Artificial Sequence
  ENSG00000180304_33 (sequence is synthesized)
cctgaggttttccagaggagggaagaggtagatatgtggttacacccctagattttttttttttttttttgggggggaggaatctggctctgtcacccaggctagagtgtagtggcacaa

SEQ ID NO: 634075 - DNA, 120 bp, Artificial Sequence
  ENSG00000180304_34 (sequence is synthesized)
gctagagtgtagtggcacaatctcggctaactgcagcctccacctcctgggttcaagaaattcttctgcctcaggcttttgagtacctggcattacaggcacctgccaccacgcccggct

SEQ ID NO: 634076 - DNA, 84 bp, Artificial Sequence
  ENSG00000180304_35 (sequence is synthesized)
cctgagacccctagatactgatgctgctcctcacccatggacacttccctgggaaatccatttctcaaagaaatttccaagtat

SEQ ID NO: 634077 - DNA, 120 bp, Artificial Sequence
  ENSG00000180304_36 (sequence is synthesized)
ttccctgggaaatccatttctcaaagaaatttccaagtatacttgtaggcccccagttgaaatctttgagagaacagaccctaggagctgagcagtgacgggtttggacttgcattttca

SEQ ID NO: 634078 - DNA, 120 bp, Artificial Sequence
  ENSG00000180304_37 (sequence is synthesized)
gctggagtgcagatacagttctgctaataggactgcccctttggttactgtaccattgccatgttaggtgtgaattcagttttgttgctcttcatttagaagaatccaaaattggcatgc

SEQ ID NO: 634079 - DNA, 120 bp, Artificial Sequence
  ENSG00000180304_38 (sequence is synthesized)
catgctatataaagcaaaggacagtgtgaagaatagttacctcacaccgttttacaatggctttcagggaaaaaaaagccctgacttacagcatttggggactttcgcagtgtaaatact

SEQ ID NO: 634080 - DNA, 120 bp, Artificial Sequence
  ENSG00000180304_39 (sequence is synthesized)
cctcctttggccaattcaggctaccaacatgacatcattaaacacatatttggcaagagatgtgcacgattgtgtgagctggccccagcacaccactgcaatacccgctaaatgtatcca

SEQ ID NO: 634081 - DNA, 120 bp, Artificial Sequence
  ENSG00000180304_40 (sequence is synthesized)
gtgcattccagctgctctgaggctgatgtgtggtggctggggaacaggcctgttgctgagtcgtggtgtgtacacacacacacaatttacctccttctctgtttcacttgcccttggcct

SEQ ID NO: 634082 - DNA, 120 bp, Artificial Sequence
  ENSG00000180304_41 (sequence is synthesized)
agggaatgaactacatctcagtctaaggaaccactaaattggattcaaagacagttgagcagatctacagccctgttgggtccatccgaaaatcaaggtggccagtaaggtgacagctct

SEQ ID NO: 634083 - DNA, 120 bp, Artificial Sequence
  ENSG00000180304_42 (sequence is synthesized)
tttaggagccttttacctgctataatctgtctgattattggattctttactcaggtcatagcacgtatcctcctctcccagcacatagcctgcacccagcacatctgagtgtgtgttctg

SEQ ID NO: 634084 - DNA, 120 bp, Artificial Sequence
  ENSG00000180304_43 (sequence is synthesized)
accacatcactattatgtgacctcccacgctcaggtcacgaaaggatcagcaaagaagggcaagaaggcccagcatttggtgcataccaggggcaaatcagacatcacagtattctatgt

SEQ ID NO: 634085 - DNA, 120 bp, Artificial Sequence
  ENSG00000180304_44 (sequence is synthesized)
gtactattgtgtacctctgctctgggagccaaatccctggatttagttttattcttaaccattgagggatttggttaaatgatttctcactccagctgggtgtggtggctcatgcctgta

SEQ ID NO: 634086 - DNA, 74 bp, Artificial Sequence
  ENSG00000180304_45 (sequence is synthesized)
gggaggcagaggttgcagtgagccaagtgcgtaccactgcactccagcctgggatctcaccccagttcctttgc

SEQ ID NO: 634087 - DNA, 120 bp, Artificial Sequence
  ENSG00000180304_46 (sequence is synthesized)
aaaaaaaaaaaaagtttctcaccccagttcctttgctcagaagggggatggggccatcactggggaagtagccttgagagttcctcaggaacagggtacccagaccatatgacttcccct

SEQ ID NO: 634088 - DNA, 120 bp, Artificial Sequence
  ENSG00000180304_47 (sequence is synthesized)
ctccagcctgtaactgtgggcctttttgattctgccacataggtggttgaggcaccatagggaaatgaaaagagactggcacagggtttgaggcttggcaggtaagccaggacctggtga

SEQ ID NO: 634089 - DNA, 120 bp, Artificial Sequence
  ENSG00000180304_48 (sequence is synthesized)
tttccaaggtctgcccagtgccacagtgatttgttagaagattgctaggtgctcctccggtcaaataaacccagctggagtcccttggccctcctgagacttcctccccatgactttgca

SEQ ID NO: 634090 - DNA, 120 bp, Artificial Sequence
  ENSG00000180304_49 (sequence is synthesized)
acacggtgggttccccttaagacagcagcgtagttctggaagctgaagcccacaggactggggcagctgggagcgttcataagccttcccttgtttagagagagccaggatggggtgggg

SEQ ID NO: 634091 - DNA, 120 bp, Artificial Sequence
  ENSG00000180304_50 (sequence is synthesized)
ccttgtttagagagagccaggatggggtgggggtgggatttgagttatatctttacatcttggccgggcgcagtggctcacgcctatagtcctagcacttcgggaggctgaggtgggtgg

SEQ ID NO: 634092 - DNA, 77 bp, Artificial Sequence
  ENSG00000180304_51 (sequence is synthesized)
tcgtcaagtcttggtgtttactgtctcaccctctctgtctcttgcagtagtattttgcctttgagtaactgtcccca

SEQ ID NO: 634093 - DNA, 120 bp, Artificial Sequence
  ENSG00000180304_52 (sequence is synthesized)
gggcgagggggcggcagggatccttctctctcagctctaatatataaggtaaggaggaccctgggatggaaggctggggttggagctttctcagactccactgtgctgctgctcaagggg

SEQ ID NO: 634094 - DNA, 120 bp, Artificial Sequence
  ENSG00000180304_53 (sequence is synthesized)
aataatcactttcttagtcttctggctcttagcctaggccagtggggggactgtgaaggactctttcagctgaggctgttgcatggcttattgggaatactagaggagagatatcagcac

SEQ ID NO: 634095 - DNA, 120 bp, Artificial Sequence
  ENSG00000180304_54 (sequence is synthesized)
catttgttgccttttaatctgctgtaattgaggcccagaagttagtttagcttctcactaagactgggatggaaggttagcaaggcagctgaattctgggcttttgagattgtgcccaag

SEQ ID NO: 634096 - DNA, 120 bp, Artificial Sequence
  ENSG00000180304_55 (sequence is synthesized)
ggagataacacggaccctgcagtccacttggaatcagactttggctgactggggctccagccaaaccctcatacataccctcatttgtttttggtatttccctttctgacagggaaggaa

SEQ ID NO: 634097 - DNA, 120 bp, Artificial Sequence
  ENSG00000180304_56 (sequence is synthesized)
aagaacatggtgttgggggaaagcgtgggctttcgagtcagggagacctgggtttgaatctcatctctgccattcactgtctttggagccttgggtcagttgcttcattattctcagact

SEQ ID NO: 634098 - DNA, 120 bp, Artificial Sequence
  ENSG00000180304_57 (sequence is synthesized)
taaagtggagttgttaattaccatctcaagtgcttgtcatgatgataaaggtaatatatgggacagcactttgtacttggcacctagtggacaatttaggtaaatatttccctttctgtt

SEQ ID NO: 634099 - DNA, 120 bp, Artificial Sequence
  ENSG00000180304_58 (sequence is synthesized)
tctgtgccttctcccttagctctagactccccaagcagataccgttttgtaacaggttatttttagccagtaagacaggcctgctctaggttataattaaagcagattgttatcacatta

SEQ ID NO: 634100 - DNA, 120 bp, Artificial Sequence
  ENSG00000180305_0 (sequence is synthesized)
actctccgtagacagctctgcagggaagtctgtgacaacctggccagacatagggctcacgatctgatcagagtcatggcaccccagactctgctgcctgtcctggttctctgtgtgctg

SEQ ID NO: 634101 - DNA, 120 bp, Artificial Sequence
  ENSG00000180305_1 (sequence is synthesized)
ctgctgcaggcccagggaggataccgtgacaagaagaggatgcagaaaacacagctatccccagaaatcaaagtctgccagcagcagcctaaactatatctatgcaaacacttatgtgaa

SEQ ID NO: 634102 - DNA, 120 bp, Artificial Sequence
  ENSG00000180305_2 (sequence is synthesized)
gtcaagcaaataacatatgctgttctacctactgtgggaatgtttgcatgagcatcctgtgagtgggagagtgggctgggatgtgcatcctgcttcccaactcctctatccaagactgtg

SEQ ID NO: 634103 - DNA, 120 bp, Artificial Sequence
  ENSG00000180305_3 (sequence is synthesized)
cccacatccgaagcacaaggacctcaagtcaccagcataagaacatcaacaggaatgccgccctctctactgtctgaaccccttgtccctgtcaaataaaccagaacaaatgcccaggga

SEQ ID NO: 634104 - DNA, 120 bp, Artificial Sequence
  ENSG00000180316_0 (sequence is synthesized)
atggaagaacaggtgttcaagggggacccggacacccctcactccatctccttctcgggcagtggattcctctccttctaccaggcgggggctgtggacgccctgcgggacctggccccc

SEQ ID NO: 634105 - DNA, 120 bp, Artificial Sequence
  ENSG00000180316_1 (sequence is synthesized)
cggatgctggaaacagcccaccgctttgcggggacatcggcaggtgctgtgatcgccgccctggccatctgcgggattgaaatggatgagtatctcagagtcctcaacgtgggtgtggcc

SEQ ID NO: 634106 - DNA, 120 bp, Artificial Sequence
  ENSG00000180316_2 (sequence is synthesized)
gaggtgaagaaatccttcctggggcccttgtccccgtcctgtaagatggtgcagatgatgaggcagtttctgtaccgggtcctgcccgaggactcctacaaggtcaccacggggaagctc

SEQ ID NO: 634107 - DNA, 120 bp, Artificial Sequence
  ENSG00000180316_3 (sequence is synthesized)
catgtgagcctcacccgcttaacggacggggagaatgtggtggtttcagagttcacgtccaaggaggagctcattgaggccctatactgcagctgcttcgtcccggtgtactgtggcctc

SEQ ID NO: 634108 - DNA, 120 bp, Artificial Sequence
  ENSG00000180316_4 (sequence is synthesized)
atccccccgacttaccgcggtgtgaggtacatcgatgggggcttcacgggcatgcagccctgtgccttctggaccgacgccatcaccatctccaccttcagtgggcagcaggacatctgt

SEQ ID NO: 634109 - DNA, 120 bp, Artificial Sequence
  ENSG00000180316_5 (sequence is synthesized)
ccccgggactgcccggccatcttccacgacttccgcatgttcaactgctccttccagttctccctggagaacatcgccaggatgacccacgcattgttccccccggacctggtgatcctg

SEQ ID NO: 634110 - DNA, 120 bp, Artificial Sequence
  ENSG00000180316_6 (sequence is synthesized)
tacttgaggcggctgaatgctgtttatcttaattcttcctccaagagagtgattttcccccgggtggaagtgtactgccagatagaactcgcccttggcaatgagtgccctgaacgcagt

SEQ ID NO: 634111 - DNA, 120 bp, Artificial Sequence
  ENSG00000180316_7 (sequence is synthesized)
caaccaagccttcgagcacggcaggccagtctggaaggagccacacaacctcacaaggagtgggttcccaaaggggatggaaggggcagccatggtccgcctgtgtcccaacctgtgcag

SEQ ID NO: 634112 - DNA, 120 bp, Artificial Sequence
  ENSG00000180316_8 (sequence is synthesized)
acacttgaattcacatgcgagtcacctgtttcagcaccagtctctccacttgagcagccacctgcacagccactggcctcttcaactccactttctctaagtggcatgccacctgtatca

SEQ ID NO: 634113 - DNA, 120 bp, Artificial Sequence
  ENSG00000180316_9 (sequence is synthesized)
ttcccagctgtgcacaagccacccagctccacacctggttcatcactgcccaccccaccacctggactgtcacctctgtcacctcagcagcaggtacaaccgtctggatcaccagccaga

SEQ ID NO: 634114 - DNA, 120 bp, Artificial Sequence
  ENSG00000180316_10 (sequence is synthesized)
tccctacactctcaggcacccacttcacccaggccatccctggggccttcaactgtgggggcacctcaaacactgccccgaagttctctttcagccttccctgctcagccacctgtggag

SEQ ID NO: 634115 - DNA, 120 bp, Artificial Sequence
  ENSG00000180316_11 (sequence is synthesized)
gaactaggccaagaacagccccaagctgtagctcttcttgtctcttcaaaaccaaaaagcgccgtgcctctggttcatgtgaaggaaaccgtcagcaagccttatgtaacggagagccct

SEQ ID NO: 634116 - DNA, 120 bp, Artificial Sequence
  ENSG00000180316_12 (sequence is synthesized)
gctgaagactcaaactgggtgaataaggtcttcaagaagaacaagcaaaagacaagtggcaccagaaaaggcttcccaagacattcgggatccaaaaaaccaagcagcaaagtgcagtga

SEQ ID NO: 634117 - DNA, 120 bp, Artificial Sequence
  ENSG00000180316_13 (sequence is synthesized)
ggaattccttaggatgaccttggaaggcagatactgcctgtcctgttctgggatgctgtggtgactcctgggtctcattgatccagctccttttattctcccaccttcccttcctggtca

SEQ ID NO: 634118 - DNA, 120 bp, Artificial Sequence
  ENSG00000180316_14 (sequence is synthesized)
tagtcaaggtcaacactagcccaggcagtaccttttatactaagaaaatagcacctcttcctggagaacctgactaccagccgctggaaaattgtcataatatgctgattttgttagagc

SEQ ID NO: 634119 - DNA, 120 bp, Artificial Sequence
  ENSG00000180316_15 (sequence is synthesized)
aagacacttgactgacaactgctagaaaactacaaagaacatgcacagacatgcataagtctgcgaatcgcctaccccttttatatggcactgtacccttgtatagtgtaaaatctgcac

SEQ ID NO: 634120 - DNA, 120 bp, Artificial Sequence
  ENSG00000180316_16 (sequence is synthesized)
ctttgggaactgtgttcagagagattccgaggaatagaggagagtgtaagggagtagggggtgcagtgggagattgggctttggaacagacacatccgacataaaattcctgctctgcca

SEQ ID NO: 634121 - DNA, 120 bp, Artificial Sequence
  ENSG00000180316_17 (sequence is synthesized)
cagctccactcagggatcatggttgggacacttgctctccctgagcctccatttcctgtaaaatggggatgataccacttcataaagttgtgagagttaaatgtgatcgatgatgtaaat

SEQ ID NO: 634122 - DNA, 120 bp, Artificial Sequence
  ENSG00000180316_18 (sequence is synthesized)
tgcttcatagaatgcagaatgtgtaatagctcacaataagtaggtattatgtttacatattatgtttgtatttatgctacttaaatacaaaactggacaggccaggcatggtggctcatg

SEQ ID NO: 634123 - DNA, 120 bp, Artificial Sequence
  ENSG00000180316_19 (sequence is synthesized)
aacaagagcgaaaccccatctcgaaaaaaaacaaaacaaaactagacaagtgagtgcctacgtgacactcaaatgttgccagcatacagttaagggccctagtcaatgtaggcctgcttc

SEQ ID NO: 634124 - DNA, 120 bp, Artificial Sequence
  ENSG00000180316_20 (sequence is synthesized)
ttatagctttttgactatattatgctgtctttgacttagtcagtcaacacttattgagcacctactaagtgccaaacactctcctggactctggcaaaataaaaaatgaattaaaactct

SEQ ID NO: 634125 - DNA, 120 bp, Artificial Sequence
  ENSG00000180318_0 (sequence is synthesized)
agtttctgtgccccaggagctacgcgacagtcttccaggattatggagtttctgagcgagaagtttgccctcaagagccctccgagtaaaaacagtgacttttacatgggcgcaggaggt

SEQ ID NO: 634126 - DNA, 120 bp, Artificial Sequence
  ENSG00000180318_1 (sequence is synthesized)
cctctggagcacgttatggagacgctggacaatgagtccttttacagcaaagcgtctgcaggcaaatgcgtgcaggccttcggacccctgccccgcgccgagcatcacgtgcgcttggag

SEQ ID NO: 634127 - DNA, 120 bp, Artificial Sequence
  ENSG00000180318_2 (sequence is synthesized)
aggacctcgccctgtcaggacagcagcgtgaactatgggatcactaaagtagaaggacagccccttcacaccgaactgaatagagctatggacaactgtaacagtctccgaatgtctccc

SEQ ID NO: 634128 - DNA, 120 bp, Artificial Sequence
  ENSG00000180318_3 (sequence is synthesized)
gtgaaagggatgcaagagaagggagagctggatgaacttggggataaatgtgatagcaatgtatccagcagtaagaaacggaggcaccgaaccaccttcaccagtttgcagctagaggag

SEQ ID NO: 634129 - DNA, 120 bp, Artificial Sequence
  ENSG00000180318_4 (sequence is synthesized)
ctggagaaagtctttcagaaaactcattacccggatgtgtatgtcagagaacagcttgctctgaggacagagctcactgaggccagggtccaggtttggtttcaaaatcgaagggccaaa

SEQ ID NO: 634130 - DNA, 120 bp, Artificial Sequence
  ENSG00000180318_5 (sequence is synthesized)
gaacgttatggccaaatacaacaagcgaaaagccattttgctgccacctatgatatatcagttttgccaaggactgacagctacccacagattcagaacaatttgtgggcaggaaatgca

SEQ ID NO: 634131 - DNA, 120 bp, Artificial Sequence
  ENSG00000180318_6 (sequence is synthesized)
agtggtggttctgtggttacttcatgcatgttaccacgtgacacttcctcctgtatgacaccttattctcactcgcctcggacagattccagttacacggggttttcaaaccaccagaac

SEQ ID NO: 634132 - DNA, 120 bp, Artificial Sequence
  ENSG00000180318_7 (sequence is synthesized)
cagttcagccacgtgcccctcaacaattttttcactgactctcttcttactggggcaaccaatggacatgcatttgaaacaaagccagagtttgaaaggaggtcttccagtatcgcagtt

SEQ ID NO: 634133 - DNA, 120 bp, Artificial Sequence
  ENSG00000180318_8 (sequence is synthesized)
cttcgaatgaaagccaaggagcacaccgccaatatttcatgggccatgtaacatacagtactcttttatttttcttttaatagcaaagttaaacattcttatttctcatatttaaaggat

SEQ ID NO: 634134 - DNA, 120 bp, Artificial Sequence
  ENSG00000180318_9 (sequence is synthesized)
accacaataagctgctgtgtgtggaattgctaaaggtcaagatattcagtgagaccagcttaaatgaatagttgttatttaacattaaaatctaagaatgaacctctgaaaagactaaat

SEQ ID NO: 634135 - DNA, 120 bp, Artificial Sequence
  ENSG00000180318_10 (sequence is synthesized)
aggtttaccatgtgccagtctccacaaaccctgttttagtagtaaggttttctttttctattgtacaagtcaatgaaatatgatcacgcaacttattaaagaataaatgtgttaaacaaa

SEQ ID NO: 634136 - DNA, 120 bp, Artificial Sequence
  ENSG00000180329_0 (sequence is synthesized)
gcttgcaggaccctgaccccaagatggcggcgcccagcgaagtggccgcgatagcccctggcgaaggcgatggcggaggcggcggctttggctcctggctggacggacggttggaggcac

SEQ ID NO: 634137 - DNA, 120 bp, Artificial Sequence
  ENSG00000180329_1 (sequence is synthesized)
tgggagtggaccgagccgtttatggagcctacatcttgggtatcctgcaggaggaggaggaagaagagaagctggacgctctgcaggggatcctctctgctttcctggaagaagattccc

SEQ ID NO: 634138 - DNA, 120 bp, Artificial Sequence
  ENSG00000180329_2 (sequence is synthesized)
tccttaatatctgcaaggagattgtggaacgatggtcagaaactcagaatgttgtcaccaaagtgaaaaaagaagatgaagtacaggccattgccaccctaattgagaagcaggcacaaa

SEQ ID NO: 634139 - DNA, 120 bp, Artificial Sequence
  ENSG00000180329_3 (sequence is synthesized)
tcgtagtaaagccaaggatggtgtcagaagaggagaagcagagaaaagctgccctcctggcccagtatgctgatgtgacagatgaagaggatgaagcagatgagaaggatgattcaggtg

SEQ ID NO: 634140 - DNA, 120 bp, Artificial Sequence
  ENSG00000180329_4 (sequence is synthesized)
ctaccacaatgaacattggttctgacaaacttctgttccgaaacaccaatgtggaagatgtccttaatgcccgaaaactggagcgagactcacttcgggatgaatcccaaaggaagaagg

SEQ ID NO: 634141 - DNA, 120 bp, Artificial Sequence
  ENSG00000180329_5 (sequence is synthesized)
aacaggacaagctgcagagggagagagacaaactagccaagcaggagcgcaaggaaaaggaaaaaaaaaggacacagagaggggagcgaaagcgataaccttggcctactctattctttc

SEQ ID NO: 634142 - DNA, 120 bp, Artificial Sequence
  ENSG00000180329_6 (sequence is synthesized)
cccccatgaacttatcaaagggagaactggttgtgtatttaagagaaatgagagtgcattgcaaagtagtttcccaaggcatttcccctattgtttacatggtcaaaaggaaaatcaaaa

SEQ ID NO: 634143 - DNA, 120 bp, Artificial Sequence
  ENSG00000180329_7 (sequence is synthesized)
tcacttctaattacaaaatgtgctgttttggtggggtgggcaatcagattattatagttgatgactgtaccaaagatctggaatgggggccacctttatattttaatactcaagtcctgt

SEQ ID NO: 634144 - DNA, 120 bp, Artificial Sequence
  ENSG00000180329_8 (sequence is synthesized)
ctgaaggagcagaaacataatcaatccctccctgagataaaatgtgggcatgcacattgctttggagtcagtattcagctgtaagtgtagtattgttttatggctgaaatagaaagctaa

SEQ ID NO: 634145 - DNA, 120 bp, Artificial Sequence
  ENSG00000180329_9 (sequence is synthesized)
tgaagaggcctacctggatccagattttatgttaacatggcagcaaaactaggaaaatgggaagaaattacttgcggggtgttctagatctgattttttttttttttttgaaagtttcag

SEQ ID NO: 634146 - DNA, 120 bp, Artificial Sequence
  ENSG00000180329_10 (sequence is synthesized)
cctgtgggaggaaaagaggtatcttttaaaatagagatagttacatattttcctcatctaggctgtgtcactattgggtgcaaggatatcattgttggctagattcattttgtataatca

SEQ ID NO: 634147 - DNA, 120 bp, Artificial Sequence
  ENSG00000180329_11 (sequence is synthesized)
tgtatcctcttgtgtgctggtagagattttaatcctgatttttccataaaacatgagtattaagaaataattcctggtttggagaaactggagaaatcacccttttaaggaagaaacact

SEQ ID NO: 634148 - DNA, 120 bp, Artificial Sequence
  ENSG00000180329_12 (sequence is synthesized)
ggaaatttctgctaacaccaagatatttaagagtgtacatagtaggtgctcaacaaatttattgaatgaatgagtgaatggaaaaactgggagagtcaaaagtgagcagaagctctccat

SEQ ID NO: 634149 - DNA, 120 bp, Artificial Sequence
  ENSG00000180329_13 (sequence is synthesized)
ttctacttctgtcacaaaccacattaaattgtaaataaggcccttctccacttgacttcaggcagcagattgtctagaagcctaaggacagcaatttctctgacaagacaaagtagatat

SEQ ID NO: 634150 - DNA, 120 bp, Artificial Sequence
  ENSG00000180329_14 (sequence is synthesized)
tttataccaggggttggcaaactactgcccacgggccgaatttggcccagtctgtttttgtatggtgcaaactaaaaatgatttttacatttttaaagagttataaaagaaaaaaatatg

SEQ ID NO: 634151 - DNA, 120 bp, Artificial Sequence
  ENSG00000180329_15 (sequence is synthesized)
tggtctgtgaaatctaaaatatttactacctggcctgttggaggaaaggtttgccaatctctgttttataccattaactatgagattaacaaaaacttttacctttgtgcagaaggttaa

SEQ ID NO: 634152 - DNA, 120 bp, Artificial Sequence
  ENSG00000180329_16 (sequence is synthesized)
aaaaaaaaaaacatggttaaggaaaaggagacatgttacctcttcatacactcctataactgtggcattgcaaaaaataaaaataaccacctttaaaaaaataaatcttatttaaattgc

SEQ ID NO: 634153 - DNA, 120 bp, Artificial Sequence
  ENSG00000180329_17 (sequence is synthesized)
ttgtcaccaaagtgaaaaaagaaggaactccttgcctttgccgattggaagcattaacaatttcatcctttctacgtgactgtacaatgtgaatagactccaagtgtctatcaagagcag

SEQ ID NO: 634154 - DNA, 120 bp, Artificial Sequence
  ENSG00000180329_18 (sequence is synthesized)
agagatactggcatgaagaagagaactccgaagacgttccattttgcctagtaaagtcacaacctgagggaagcattttaaattttgataagacatgtcctgccattaacttaagtaaaa

SEQ ID NO: 634155 - DNA, 120 bp, Artificial Sequence
  ENSG00000180329_19 (sequence is synthesized)
acaaatcttcagtgaagcagaatagagatgacagcaataatattcattcaataaatcaaagaatgcttactgtgtcctgacaccatgctgggggaaacaaaaatggaaagtgttttctat

SEQ ID NO: 634156 - DNA, 120 bp, Artificial Sequence
  ENSG00000180329_20 (sequence is synthesized)
ctacttgtctatgttaattctaaaaatatgtggtagttgattactgaaaataagcatcaatgaaaatgttaaatattcaaacattaccatgtcattaactgcaaatacaagatctgatac

SEQ ID NO: 634157 - DNA, 120 bp, Artificial Sequence
  ENSG00000180329_21 (sequence is synthesized)
aaagctcaagccagacatatttgtgggtttacagtgacctttggcaagttgctaatccccctctatagcttaattttcccctctaaaatggcagtaatctatggccctttgtggatatgc

SEQ ID NO: 634158 - DNA, 120 bp, Artificial Sequence
  ENSG00000180329_22 (sequence is synthesized)
ggagtgatattggattagttgatactggacttatatttttcaacacataatcattatattcctgaaaactttggtgtaaaacaaataatgtcttaatagtccatttatattatgctttca

SEQ ID NO: 634159 - DNA, 120 bp, Artificial Sequence
  ENSG00000180332_0 (sequence is synthesized)
gcaaaaccgagctgacagcgcaggcgatgctgccagcgtttccattccatcaccaggctggggctgaataaaggcgtgcttgtgtggtagtgtctctttttaaaaaatctcaaagccaag

SEQ ID NO: 634160 - DNA, 120 bp, Artificial Sequence
  ENSG00000180332_1 (sequence is synthesized)
aagaacaagctgaaatagcatcttcaaaaaatggagcgtaaaataaacagaagagaaaaagaaaaggagtatgaagggaaacacaacagcctggaagatactgatcaaggaaagaactgc

SEQ ID NO: 634161 - DNA, 120 bp, Artificial Sequence
  ENSG00000180332_2 (sequence is synthesized)
aaatccacactgatgaccctcaacgttggtggatatttatacattactcaaaaacaaacactgaccaagtacccagacactttccttgaaggtatagtaaatggaaaaatcctctgcccg

SEQ ID NO: 634162 - DNA, 120 bp, Artificial Sequence
  ENSG00000180332_3 (sequence is synthesized)
tttgatgctgatggtcattatttcatagacagggatggtctcctcttcaggcatgtcctaaacttcctacgaaatggagaacttctattgcccgaagggtttcgagaaaatcaacttctt

SEQ ID NO: 634163 - DNA, 120 bp, Artificial Sequence
  ENSG00000180332_4 (sequence is synthesized)
gcacaagaagcagaattctttcagctcaagggactggcagaggaagtgaaatccaggtgggagaaagaacagctaacacccagagagactactttcttggaaataacagataaccacgat

SEQ ID NO: 634164 - DNA, 120 bp, Artificial Sequence
  ENSG00000180332_5 (sequence is synthesized)
cgttcacaaggattaagaatcttctgtaatgctcctgatttcatatcaaaaataaagtctcgcattgttctggtgtccaaaagcaggctggatggatttccagaggagttttcaatatcg

SEQ ID NO: 634165 - DNA, 120 bp, Artificial Sequence
  ENSG00000180332_6 (sequence is synthesized)
tcaaatatcatccaatttaaatacttcataaagtctgaaaatggcactcgacttgtactaaaggaagacaacacctttgtctgtaccttggaaactcttaagtttgaggctatcatgatg

SEQ ID NO: 634166 - DNA, 120 bp, Artificial Sequence
  ENSG00000180332_7 (sequence is synthesized)
cgatgcacttcattttatcaagtaattacctgtgtcacgaacaaaggcaacaagcatgcagccagcaagcttcggaaaaccacagcatcaaagacatcccaaataacatgcccagctagc

SEQ ID NO: 634167 - DNA, 120 bp, Artificial Sequence
  ENSG00000180332_8 (sequence is synthesized)
tctgtactacagagccctgctactaatcaattactgtgagctaacggtatgtaaattctatcgctaaagatgtccttcctctggggtgttcctactgatcagactcttccacctaaaatg

SEQ ID NO: 634168 - DNA, 120 bp, Artificial Sequence
  ENSG00000180332_9 (sequence is synthesized)
aaaacagtaaccttctatatactgtaaataaagactgaaagcttttgctatttatttgtccttaagctgtctttcaattcagattgtcttgggtatttgcacaaaaaagaaagcatgtac

SEQ ID NO: 634169 - DNA, 120 bp, Artificial Sequence
  ENSG00000180332_10 (sequence is synthesized)
attatctatcgttcatttaagtaaatggtaataaaatattttaaggggctattaatatttaaaatccttttctactatggcaaaaatctacagagaaactgaactggcaaaattaactac

SEQ ID NO: 634170 - DNA, 120 bp, Artificial Sequence
  ENSG00000180332_11 (sequence is synthesized)
ctggagcaaaacagatgtgcagatctaactaaaacagagctatagtgaaacaaaatgagattgtaagaagacattaaagctattgatttgatttttccatagcaagcaccaaaagcttat

SEQ ID NO: 634171 - DNA, 120 bp, Artificial Sequence
  ENSG00000180332_12 (sequence is synthesized)
attcacagttcctgtgtttcatattagacttatagctgaattggtattttgctgaaaattcctagaaaactgcttgatgacaataaaaagtaaataaaagcactgctaccttctttgatt

SEQ ID NO: 634172 - DNA, 120 bp, Artificial Sequence
  ENSG00000180332_13 (sequence is synthesized)
gtattaatgattataataaaaagttacaggtcactttaaaagcaaacagtaccacttgatgattttgcataaaattatgcattgatgtcaaccggcaggctacaggaaccctggctggtc

SEQ ID NO: 634173 - DNA, 120 bp, Artificial Sequence
  ENSG00000180332_14 (sequence is synthesized)
ctggaagtgacaaaaaccagcaaattcaattctttgcaggctgagttcccacaaagcatgggtaacttagtctcaatagagtatctgttattagaataataaaggagttcattttcagaa

SEQ ID NO: 634174 - DNA, 120 bp, Artificial Sequence
  ENSG00000180336_0 (sequence is synthesized)
cggaggcggctgcggagacggcggggtgcgggctgagggagccgggcctggacgccccccccatcacccccgtaccccaggagctgtgcctagtccaggagaggctggggggcgccccat

SEQ ID NO: 634175 - DNA, 120 bp, Artificial Sequence
  ENSG00000180336_1 (sequence is synthesized)
gtccaggagaggctggggggcgccccatggaggtgagacgcggagacacctgcccgcgccctcacccctcaggcctgagggaggaaggacttgagcccaaagtcgcgttccccggaggtg

SEQ ID NO: 634176 - DNA, 120 bp, Artificial Sequence
  ENSG00000180336_2 (sequence is synthesized)
cgaatcgctgttggaacctcggcgccgacgccggcagcaggttaaccgacgtcttcggcagcgtgatgttgactggctccgcttccttctacgattgctacacatcgcagagtgaagaca

SEQ ID NO: 634177 - DNA, 120 bp, Artificial Sequence
  ENSG00000180336_3 (sequence is synthesized)
atgtagacctaaggcagacctatactccattttcttcaacagaatattcaagttctgtagattcttcacttttctgtgcaccatggtctacttatggagatgacattaaacaaccttcta

SEQ ID NO: 634178 - DNA, 120 bp, Artificial Sequence
  ENSG00000180336_4 (sequence is synthesized)
attctcagatcagtataaagaacaggattcaaacagaaagaaatgactatggcagtgaaacagacttatatggacttgtgtctaacattttggaagaacaagataagtcacagccatatt

SEQ ID NO: 634179 - DNA, 120 bp, Artificial Sequence
  ENSG00000180336_5 (sequence is synthesized)
ttgctgaagggacctgctcctccaatttaaagtcagtttggccaatgaacacaagcagatttgcagatcaccatgacctcttaacagaaaccaaaaggccaatagatacagtcatctctc

SEQ ID NO: 634180 - DNA, 120 bp, Artificial Sequence
  ENSG00000180336_6 (sequence is synthesized)
agcaagctttttatagtgatgaatctgtgtcagcaatggaaaagcaatacctgcgtaacagtaatctcacaccacaacaaaaaatagatgaacttcatcatggatttactggtttagatc

SEQ ID NO: 634181 - DNA, 120 bp, Artificial Sequence
  ENSG00000180336_7 (sequence is synthesized)
ttgaagaacaatggatgtacccctcacgaagtgatcattctaactgtcacaatattcagacaaatgatacagctaagacaacattccaagaatatccacttatcaaaaactgttttacac

SEQ ID NO: 634182 - DNA, 120 bp, Artificial Sequence
  ENSG00000180336_8 (sequence is synthesized)
cccaaactggtctgtctgatatcatgaaagaatcaggagttgatatctaccattatggaagagacagaatatgtactaaaggtcttgaagcaccactacagcaaaaaagggcagagatgt

SEQ ID NO: 634183 - DNA, 120 bp, Artificial Sequence
  ENSG00000180336_9 (sequence is synthesized)
ttctttctcaatttaatagatacaatgaaaatgtagattattgtagatacccagagtatgttcatcctaataaggctaagcttaataaatgttcaaattttagtgtccaagatagcaaaa

SEQ ID NO: 634184 - DNA, 120 bp, Artificial Sequence
  ENSG00000180336_10 (sequence is synthesized)
aattagccaatggcacacctgaaacaccaactgtagaagcagacacctacacaaagttatttcaggttaagccagcgaatcagaaaaaaatggaggagacaatccctgatcagcagaatt

SEQ ID NO: 634185 - DNA, 120 bp, Artificial Sequence
  ENSG00000180336_11 (sequence is synthesized)
tcacatttccaaaaactacgccacatctgacagagaaacagtttgcaaaggaagcagtattcactgctgattttggcttaacatcagaatatggactaaaacctcacacagcttgtcccg

SEQ ID NO: 634186 - DNA, 120 bp, Artificial Sequence
  ENSG00000180336_12 (sequence is synthesized)
ctaatgattttgctaacgtcacagaaaagcaacagtttgctaaacctgatcccccacattctgagtattttaaatcagtgaatttattatcaaactcagcaacatcttcaggaggtatca

SEQ ID NO: 634187 - DNA, 120 bp, Artificial Sequence
  ENSG00000180336_13 (sequence is synthesized)
atttaaacagaccaacttggatgaatgttcaaacaaaaaataacactcctattccttatcgaaatcaaggtaacttgatgaaattaaatagtcatttaagtgcagcttcaaaaggttcta

SEQ ID NO: 634188 - DNA, 120 bp, Artificial Sequence
  ENSG00000180336_14 (sequence is synthesized)
accattcttcagatttcccccaactatcatccacaaacttaaccccaaatagcaatttatttcagaaatattgccaagaaaacccttcagcattttctagttttgattttagttacagtg

SEQ ID NO: 634189 - DNA, 120 bp, Artificial Sequence
  ENSG00000180336_15 (sequence is synthesized)
gtgcagaaagaatccaatctgtcaatcacatagaaggactaacaaagcctggagaagaaaatctcttcaaattggttacggataaaaaaataaagcagccaaatggattttgtgataact

SEQ ID NO: 634190 - DNA, 120 bp, Artificial Sequence
  ENSG00000180336_16 (sequence is synthesized)
attcagctcagaagtatgggataattgaaaatgtaaacaaacataattttcaagccaagccccagagtggacattatgatcctgaggaaggtccaaagcatttagatggcttatcacaaa

SEQ ID NO: 634191 - DNA, 120 bp, Artificial Sequence
  ENSG00000180336_17 (sequence is synthesized)
atacataccaagatctactggagtcacagggtcattctaatagccacagaacgagaggtggagacaatagccgtgtgaatcgcacacaagtgtcatgcttttctaataattatatgatgg

SEQ ID NO: 634192 - DNA, 120 bp, Artificial Sequence
  ENSG00000180336_18 (sequence is synthesized)
gagatttaaggcataatcagtgttttcaacaacttggttcaaatgggtttcccctaagatccacccacccatttggccattcagttgttccactgttggattcctatgacttactttctt

SEQ ID NO: 634193 - DNA, 120 bp, Artificial Sequence
  ENSG00000180336_19 (sequence is synthesized)
aattctttttctggtctcatgccaacttttggatttcaaagaccaattaaaacccgtagtggaccagccagtgaacttcatattcgtctagaagagtgctgtgaacaatggagagcatta

SEQ ID NO: 634194 - DNA, 120 bp, Artificial Sequence
  ENSG00000180336_20 (sequence is synthesized)
gaaaaagagagaaaaaagactgaattagcccttgccaagaattatcctggaaaaaaagtatccagtactaacaacactccagttccaaggctgacttccaacccatctagagttgatcgc

SEQ ID NO: 634195 - DNA, 120 bp, Artificial Sequence
  ENSG00000180336_21 (sequence is synthesized)
ttaattgtggatgaacttcgagaactagccagagttgtgactttactaggcaaaatggaacgtcttcggagttctcttcttcatgccagtatctctactgctcttgatagacacttggag

SEQ ID NO: 634196 - DNA, 120 bp, Artificial Sequence
  ENSG00000180336_22 (sequence is synthesized)
tctattcacattgtacagtcacgtagaaaggatgaaattgttaatgcttccaatcggcaaaggcaaggagttcctagatgccaagatgacagagatgtttttgcccttgcttctgcaatt

SEQ ID NO: 634197 - DNA, 120 bp, Artificial Sequence
  ENSG00000180336_23 (sequence is synthesized)
aaagagatgtgtgtggctactcggaaaacacgcactgccctgtggtgtgcactgcagatgaccttgccaaaaacagccagtacagctgatgtggtaaagcctttacaagatacagtaaac

SEQ ID NO: 634198 - DNA, 120 bp, Artificial Sequence
  ENSG00000180336_24 (sequence is synthesized)
tgtgaagataaagtccatgaaagcataaatagtagcaatccaatgaaccagagaggtgaaacaaacaaacattaaggaaatgccagcagaaagaagaataaaaagctgataaatatacca

SEQ ID NO: 634199 - DNA, 120 bp, Artificial Sequence
  ENSG00000180336_25 (sequence is synthesized)
agacatgctaaaaatgttttaatgaacttgtcaaactttcagtatgttttctttcagatttaaagttaataccagtaccttaatgaagtctaacttctatttaaaaatcttctatttgaa

SEQ ID NO: 634200 - DNA, 120 bp, Artificial Sequence
  ENSG00000180336_26 (sequence is synthesized)
gtgaatccgatatagttttaagtaaacgcaaaggtacagttgactactcagagttctgagtagtcagataacaagtttaagtaaattaaatatttcctaacagctaaaatgtgcttaaac

SEQ ID NO: 634201 - DNA, 120 bp, Artificial Sequence
  ENSG00000180336_27 (sequence is synthesized)
tcattctgccatgcaggtaaatgcaaatgtgaaattcttctaggagataaatttcatttaggtttgtcttagttaagtataattccaaataatgaatctaagtgactgtaacccaattac

SEQ ID NO: 634202 - DNA, 120 bp, Artificial Sequence
  ENSG00000180336_28 (sequence is synthesized)
ggctacagcctagtaaccaagacaagttttgattgtgatatcaaagtgttttccttacaaaactggataatacctgggaaacaaaggaaaatacggataaacccaatattcatgtacaaa

SEQ ID NO: 634203 - DNA, 120 bp, Artificial Sequence
  ENSG00000180336_29 (sequence is synthesized)
cttaatatttaaaatactatactaccatatttataaatttggaatcttaatgcctaggtatatggagggaaatgcatctgattctcctaaattaatgataaaagtgtcagtgtaaaaacc

SEQ ID NO: 634204 - DNA, 120 bp, Artificial Sequence
  ENSG00000180336_30 (sequence is synthesized)
tgtcagtgtaaaaaccatgcaagttactgaatataaaacctattcagatcatttgtgtatattctttaaattttaattatattatcaattgttaaatgtttccaattttaaagttattta

SEQ ID NO: 634205 - DNA, 120 bp, Artificial Sequence
  ENSG00000180336_31 (sequence is synthesized)
attccctttatctggatcttttagacttgatgcacagtaactgaaataatgactactgttttaatacccttagtttgctgccttttatgagggtgtcacgaagttctaaaatgtattttt

SEQ ID NO: 634206 - DNA, 120 bp, Artificial Sequence
  ENSG00000180336_32 (sequence is synthesized)
ttaaaggttaatctctaactagtttagcttgcaattggttagtgtatattttgtgtagttgtgttcattagtttgcttctaagttctaaaatgtattttttaaaggttaatctctaacta

SEQ ID NO: 634207 - DNA, 120 bp, Artificial Sequence
  ENSG00000180336_33 (sequence is synthesized)
gtttagcttgcaattggttagcctatattttgcgtagttgtgttcattagtttgcttctgtatttttttaaaactattgaaagcttaactttttctgtttctcatcacttagtatctttg

SEQ ID NO: 634208 - DNA, 120 bp, Artificial Sequence
  ENSG00000180336_34 (sequence is synthesized)
tatagaacttgagtaatttattcgttaatatgaaatgttggtattatgtgactcagaagatcttgggttttaacatttctagcatgagttaaactataatgtactgatgaaatttaattg

SEQ ID NO: 634209 - DNA, 120 bp, Artificial Sequence
  ENSG00000180336_35 (sequence is synthesized)
aaatatccttgactagaaacactgatgttttaaatgttagtgtttttcttagttttagaaattctggtattaaaaaaaaaaagagtgtaatcataccacataaattttctttagatgatg

SEQ ID NO: 634210 - DNA, 120 bp, Artificial Sequence
  ENSG00000180336_36 (sequence is synthesized)
tgcagaagaaactgattgagaatgcaagagtaactgtagggagaaacattttgatcactgatatgccttagaactacccaaatgaattacattgagggtagtcaaataaaatagatcatc

SEQ ID NO: 634211 - DNA, 120 bp, Artificial Sequence
  ENSG00000180336_37 (sequence is synthesized)
tcaccacagtcactgcatagaaagtggttaagtttaacataagacatgttggatgttataaaaacaaatactgtactgaatttagtctcaggaaaaaaataaattactttgttgaaaaca

SEQ ID NO: 634212 - DNA, 120 bp, Artificial Sequence
  ENSG00000180336_38 (sequence is synthesized)
gtgttgtggagaaataagaggtaagcatgcactgtaagttagatataggatttgaaatgaaggagaaatatttatgtggaaaagacatttccacataaaaatatttatgtagaaaagaaa

SEQ ID NO: 634213 - DNA, 120 bp, Artificial Sequence
  ENSG00000180336_39 (sequence is synthesized)
atattcttgagttctagtctcttctttatttgaaatgatggtgtagattcagtccacatattttatagataaagatggtaaggtaggataagtctggaaagagtaatcaatatattgtat

SEQ ID NO: 634214 - DNA, 86 bp, Artificial Sequence
  ENSG00000180336_40 (sequence is synthesized)
ttcgagaactagccagagtaagctgtaaaaatagataacagtggatggattttttgttaaattttttttaagtttcccactttggg

SEQ ID NO: 634215 - DNA, 86 bp, Artificial Sequence
  ENSG00000180336_41 (sequence is synthesized)
atctcaataaataaataaataaaactctcatcaagttttagagctttgaagggtttttaaatcacatttacatctaactctctgaa

SEQ ID NO: 634216 - DNA, 120 bp, Artificial Sequence
  ENSG00000180336_42 (sequence is synthesized)
tagagctttgaagggtttttaaatcacatttacatctaactctctgaaatatatttttttcatgtttggtcctagaactataatatttaggaaaggggctgggtgcagtggctcacacct

SEQ ID NO: 634217 - DNA, 90 bp, Artificial Sequence
  ENSG00000180336_43 (sequence is synthesized)
ggagatcctgtctctactaaaaattaaaaattagctggacatggtgtcacatgcttatgctactcaggaggctgaggtgggaagatagct

SEQ ID NO: 634218 - DNA, 120 bp, Artificial Sequence
  ENSG00000180336_44 (sequence is synthesized)
atgcttatgctactcaggaggctgaggtgggaagatagcttgagcctgggatgtcagggctacagtgagccataaccacaccattgcattccaacctggggaacagagcaagatcttgtc

SEQ ID NO: 634219 - DNA, 120 bp, Artificial Sequence
  ENSG00000180336_45 (sequence is synthesized)
aaaaaagaaaaaaaaagaaaaaggaacgggaaaatagtcccactcaatcattttaaaagtaattttcgtaatttaaatggttcctcttgaagctcaaattggcagtggagctaatcctca

SEQ ID NO: 634220 - DNA, 120 bp, Artificial Sequence
  ENSG00000180336_46 (sequence is synthesized)
agctaatcctcaactgaaagaattttttaaaaagcaaaaatcattttgagtattatttatggagaaagtctcatttctttgtcacatttgttttccagcttgatgagcaagctgtgctta

SEQ ID NO: 634221 - DNA, 89 bp, Artificial Sequence
  ENSG00000180336_47 (sequence is synthesized)
gtcacatttgttttccagcttgatgagcaagctgtgcttacataagatggtaacttaatagggaattaaggcgggtctcactttgtcac

SEQ ID NO: 634222 - DNA, 120 bp, Artificial Sequence
  ENSG00000180336_48 (sequence is synthesized)
ccttgaccttctgggttcaagagatcctcctgcctaagcccccaaatagctgggactacagatgcacgctaccacacatatctaatttttgtattttttatagagacagggtttcgccat

SEQ ID NO: 634223 - DNA, 120 bp, Artificial Sequence
  ENSG00000180336_49 (sequence is synthesized)
cacctgcctcagcctaccaaagtgctgggtgtgagccaccaccagtcaacaaaatacttttgttttggcgaagtaggatatgacttcaagtcaaatgttgtaaagaatcctcgttaagtc

SEQ ID NO: 634224 - DNA, 120 bp, Artificial Sequence
  ENSG00000180336_50 (sequence is synthesized)
tgacttcaagtcaaatgttgtaaagaatcctcgttaagtcattttgtaatttaatgattattcctattctttataatttcagaattttctaagcaacttagggtaggtaaacttttcctt

SEQ ID NO: 634225 - DNA, 120 bp, Artificial Sequence
  ENSG00000180336_51 (sequence is synthesized)
ttttgaccttcctctcttaaaaacttagttttccaaataaaatttgataaagattcttcctgggaaaaaaaaatgcagcaaaacggattacctcttttattgaataaaaccattttagga

SEQ ID NO: 634226 - DNA, 120 bp, Artificial Sequence
  ENSG00000180336_52 (sequence is synthesized)
attagaaaaatcaacatgggtcaaatttgtaaatctgtacaatggaatttatccatggtacattcagagcctaacatatgaggtacagccagatgttaataaaaacttcaatcttttatt

SEQ ID NO: 634227 - DNA, 120 bp, Artificial Sequence
  ENSG00000180336_53 (sequence is synthesized)
acttaactgtgacatacatagcagagtcccagaagaaagaactgactactaacaaattgaaacaagtacccttcaggggaccgtggatataacctgactccttcagtgacaaaaatcaag

SEQ ID NO: 634228 - DNA, 120 bp, Artificial Sequence
  ENSG00000180336_54 (sequence is synthesized)
aatctggatccagcttgtcctgttccttcttcctttgggattcatcccgaagtgagtctcgctccagttttcgggcattaaggacatcttccacattggtgtttcggaacagaactacag

SEQ ID NO: 634229 - DNA, 120 bp, Artificial Sequence
  ENSG00000180336_55 (sequence is synthesized)
aaacagctccaaataatgatggactgatcaagaagctggtaccaagaagtctcaaagttatttcaacagcttcatggagtgtttagaaacttcccagctgtaaataaaaactaccttaaa

SEQ ID NO: 634230 - DNA, 120 bp, Artificial Sequence
  ENSG00000180336_56 (sequence is synthesized)
gccaatcttgccagaagaggctctggaactcaaatgggttactgccagaagaatctgggacagctgcactagtgttatatttcaaccatgtacccaatctatgaactgcttccaccaaat

SEQ ID NO: 634231 - DNA, 120 bp, Artificial Sequence
  ENSG00000180336_57 (sequence is synthesized)
agtggcacaatcacggctcactgcagccacagcctcctaggctcaagtgatcctcccacttcagacttctgagtagctgggactacagctctgatctctctcataccctccttcccacca

SEQ ID NO: 634232 - DNA, 120 bp, Artificial Sequence
  ENSG00000180336_58 (sequence is synthesized)
gcttaccttttatggactcctacatccatataagaatcaaaagggcacttcctgcaggcttctgtcatgggacagccctgggaactgccttgtaataggcacagacctcccaagagcatt

SEQ ID NO: 634233 - DNA, 120 bp, Artificial Sequence
  ENSG00000180336_59 (sequence is synthesized)
ttaatacccccagtgaacactgtaaacggatggaaatggaattggtcgtcagatatttatgataacattcccattctgacatttcaatgccttcggaagaaccctcctcggctcactcac

SEQ ID NO: 634234 - DNA, 120 bp, Artificial Sequence
  ENSG00000180336_60 (sequence is synthesized)
aagcatcggagagggccttgtccccaagaatacgagaaagcccttcctctctgtgtacctgcagctttcaggcttcccacacctggttggggagcaacctccttcccccgccgcccagat

SEQ ID NO: 634235 - DNA, 120 bp, Artificial Sequence
  ENSG00000180336_61 (sequence is synthesized)
atcagaggagtatacctctcccaggatacccaagatgtaggctccataaacggctcggtccactcccagtgcctccaaccgtccgtccagccaggagccaaagccgccgcctccgccatc

SEQ ID NO: 634236 - DNA, 120 bp, Artificial Sequence
  ENSG00000180336_62 (sequence is synthesized)
gccttcgccaggggctatcgcggccacttcgctgggcgccgccatcttggggtcagggtcctgcaagcccctagggcgcctaccgcagtgcctgacgggccgcgccgcaggtccaccgcg

SEQ ID NO: 634237 - DNA, 120 bp, Artificial Sequence
  ENSG00000180336_63 (sequence is synthesized)
catgcctgaagaggaagcccaggcccgtaagtgcaaagagcgcagccgtgtcggccggcttgagagttttgtgctttctagatgaagcgcgtcttcgcatacgtgcggtcgcgtgatctc

SEQ ID NO: 634238 - DNA, 120 bp, Artificial Sequence
  ENSG00000180336_64 (sequence is synthesized)
acaagatgcttggcatgtgagtattcttaacagactcattctacagttcgggaagttgagagaggtgcagtaatttggccaaagtcacgcggctaataactacccaggactggagctcag

SEQ ID NO: 634239 - DNA, 120 bp, Artificial Sequence
  ENSG00000180336_65 (sequence is synthesized)
cgtggatgccatcgcttcctccacccgaccgagctgccttccccgcgctttcgggggatgctggccgcccactcccacacagctgtctggcaagaacctcctgacagcctggaataccct

SEQ ID NO: 634240 - DNA, 120 bp, Artificial Sequence
  ENSG00000180336_66 (sequence is synthesized)
cgtcgtcgctaccgacggctaccaccttcacctgtacaagcccttccctgtcaaagtaaaggttgcagaaaaccttccctgattccatggtaggcactcagtaaataaacaggcaacctc

SEQ ID NO: 634241 - DNA, 120 bp, Artificial Sequence
  ENSG00000180340_0 (sequence is synthesized)
agtccgaccgcggcaagcaagcgggcaggcgcaccgccccctcccccgcccggcctccccaactctgcggccgcgagtaaagtttgcaaagaggcgcgggaggcggcagccgcagcgagg

SEQ ID NO: 634242 - DNA, 80 bp, Artificial Sequence
  ENSG00000180340_1 (sequence is synthesized)
cagcgaggaggcggcggggaagaagcgcagtctccgggttgggggcgggggcggggggggcgccaaggagccgggtgggg

SEQ ID NO: 634243 - DNA, 120 bp, Artificial Sequence
  ENSG00000180340_2 (sequence is synthesized)
gccgctgctgctgctgcccgccgccgggccggcccagttccacggggagaagggcatctccatcccggaccacggcttctgccagcccatctccatcccgctgtgcacggacatcgccta

SEQ ID NO: 634244 - DNA, 120 bp, Artificial Sequence
  ENSG00000180340_3 (sequence is synthesized)
caaccagaccatcatgcccaaccttctgggccacacgaaccaggaggacgcaggcctagaggtgcaccagttctatccgctggtgaaggtgcagtgctcgcccgaactgcgcttcttcct

SEQ ID NO: 634245 - DNA, 120 bp, Artificial Sequence
  ENSG00000180340_4 (sequence is synthesized)
gtgctccatgtacgcacccgtgtgcaccgtgctggaacaggccatcccgccgtgccgctctatctgtgagcgcgcgcgccagggctgcgaagccctcatgaacaagttcggttttcagtg

SEQ ID NO: 634246 - DNA, 120 bp, Artificial Sequence
  ENSG00000180340_5 (sequence is synthesized)
gcccgagcgcctgcgctgcgagcacttcccgcgccacggcgccgagcagatctgcgtcggccagaaccactccgaggacggagctcccgcgctactcaccaccgcgccgccgccgggact

SEQ ID NO: 634247 - DNA, 120 bp, Artificial Sequence
  ENSG00000180340_6 (sequence is synthesized)
gcagccgggtgccgggggcaccccgggtggcccgggcggcggcggcgctcccccgcgctacgccacgctggagcaccccttccactgcccgcgcgtcctcaaggtgccatcctatctcag

SEQ ID NO: 634248 - DNA, 120 bp, Artificial Sequence
  ENSG00000180340_7 (sequence is synthesized)
ctacaagtttctgggcgagcgtgattgtgctgcgccctgcgaacctgcgcggcccgatggttccatgttcttctcacaggaggagacgcgtttcgcgcgcctctggatcctcacctggtc

SEQ ID NO: 634249 - DNA, 120 bp, Artificial Sequence
  ENSG00000180340_8 (sequence is synthesized)
ggtgctgtgctgcgcttccaccttcttcactgtcaccacgtacttggtagacatgcagcgcttccgctacccagagcggcctatcatttttctgtcgggctgctacaccatggtgtcggt

SEQ ID NO: 634250 - DNA, 120 bp, Artificial Sequence
  ENSG00000180340_9 (sequence is synthesized)
ggcctacatcgcgggcttcgtgctccaggagcgcgtggtgtgcaacgagcgcttctccgaggacggttaccgcacggtggtgcagggcaccaagaaggagggctgcaccatcctcttcat

SEQ ID NO: 634251 - DNA, 120 bp, Artificial Sequence
  ENSG00000180340_10 (sequence is synthesized)
gatgctctacttcttcagcatggccagctccatctggtgggtcatcctgtcgctcacctggttcctggcagccggcatgaagtggggccacgaggccatcgaggccaactctcagtactt

SEQ ID NO: 634252 - DNA, 120 bp, Artificial Sequence
  ENSG00000180340_11 (sequence is synthesized)
ccacctggccgcctgggccgtgccggccgtcaagaccatcaccatcctggccatgggccagatcgacggcgacctgctgagcggcgtgtgcttcgtaggcctcaacagcctggacccgct

SEQ ID NO: 634253 - DNA, 120 bp, Artificial Sequence
  ENSG00000180340_12 (sequence is synthesized)
gcggggcttcgtgctagcgccgctcttcgtgtacctgttcatcggcacgtccttcctcctggccggcttcgtgtcgctcttccgcatccgcaccatcatgaagcacgacggcaccaagac

SEQ ID NO: 634254 - DNA, 120 bp, Artificial Sequence
  ENSG00000180340_13 (sequence is synthesized)
cgaaaagctggagcggctcatggtgcgcatcggcgtcttctccgtgctctacacagtgcccgccaccatcgtcatcgcttgctacttctacgagcaggccttccgcgagcactgggagcg

SEQ ID NO: 634255 - DNA, 120 bp, Artificial Sequence
  ENSG00000180340_14 (sequence is synthesized)
ctcgtgggtgagccagcactgcaagagcctggccatcccgtgcccggcgcactacacgccgcgcatgtcgcccgacttcacggtctacatgatcaaatacctcatgacgctcatcgtggg

SEQ ID NO: 634256 - DNA, 120 bp, Artificial Sequence
  ENSG00000180340_15 (sequence is synthesized)
acactcgcctcaccaacagccgacacggtgagaccaccgtgtgagggacgcccccaggccggaaccgcgcggcgctttcctccgcccggggtggggcccctacagactccgtattttatt

SEQ ID NO: 634257 - DNA, 120 bp, Artificial Sequence
  ENSG00000180340_16 (sequence is synthesized)
tttttaaataaaaaacgatcgaaaccatttcacttttaggttgctttttaaaagagaactctctgcccaacacccccacaaggtttgtaattaaaactgtaaatagtctttgtaaattta

SEQ ID NO: 634258 - DNA, 120 bp, Artificial Sequence
  ENSG00000180340_17 (sequence is synthesized)
attatatatattttctatttaaaagaaaaaaggagaaaaaaaaacaggggtgtgggcgccaggactgaagaatgaggtgtgtgtgtgttggggagtgtagttggggggagggttctcttt

SEQ ID NO: 634259 - DNA, 120 bp, Artificial Sequence
  ENSG00000180340_18 (sequence is synthesized)
cttaagtgcccttcaaaacccgccccacttttggagttttttggtgatatggcagggctgggcctgatgggagaggcacccagcctgagcgctgtttttgttggctttgagtcgttagga

SEQ ID NO: 634260 - DNA, 120 bp, Artificial Sequence
  ENSG00000180340_19 (sequence is synthesized)
gtttgttccattcaactaatataaaagccaaatttgtgagcctcctctctgacgctgggcctgtggaagccgttggatatttttgaacaggacttggattcgttttgtttccttccccct

SEQ ID NO: 634261 - DNA, 120 bp, Artificial Sequence
  ENSG00000180340_20 (sequence is synthesized)
tttctttccctactcatttgtcctgtcttcttcactcactcttggaaaagtcccaacagagatgaagacgtggaaaaaaaaatcggggtcggggtgtgctggtggggagagggcagagat

SEQ ID NO: 634262 - DNA, 120 bp, Artificial Sequence
  ENSG00000180340_21 (sequence is synthesized)
ccggtgaggaatggcttccaccccctggcccattcccctgcaggctggaagatctttctcctgtctggcttctcttcttttcaattcgctgcaccaagtgcttccagtggcccaaaaatg

SEQ ID NO: 634263 - DNA, 120 bp, Artificial Sequence
  ENSG00000180340_22 (sequence is synthesized)
ctttttgaagtgtgttttgaaacagcccccaccaacatacaccccaccaggagtactgatcctgcctcccttcatgtctaggggaagcattcgcctttgagcacttgtttgcaaatctgg

SEQ ID NO: 634264 - DNA, 120 bp, Artificial Sequence
  ENSG00000180340_23 (sequence is synthesized)
ggagtttgagacctcctagcatctcttcccttctttccctgcagtctattcactcccgcagccaaaaatctctggcgttcaggttagcagtttctgggttggtttgtgtgggtttttgtt

SEQ ID NO: 634265 - DNA, 120 bp, Artificial Sequence
  ENSG00000180340_24 (sequence is synthesized)
gttgtttggggcttatttttttcaaaaagtgataaagacgggtgggttggagggaggggactgatgggctggtgggctttttagttttcctttgagaaaaagactggtttatttaaaatt

SEQ ID NO: 634266 - DNA, 120 bp, Artificial Sequence
  ENSG00000180340_25 (sequence is synthesized)
tgtccagaaaaaaatgaaaaaaaaaaaaaaggtggtatctttgctttagaagaagtctctggataggccctttgtggctgtgggggtgggttgagtgtttacattacattctatatcaca

SEQ ID NO: 634267 - DNA, 120 bp, Artificial Sequence
  ENSG00000180340_26 (sequence is synthesized)
gtttacattacattctatatcacaagattgataggatgtttaaagcagatgtttcttatcttcccctgagcccctacaaataaagtcaagacttttctttttttgagacggagtcttgct

SEQ ID NO: 634268 - DNA, 63 bp, Artificial Sequence
  ENSG00000180340_27 (sequence is synthesized)
cgatcttggctcactgcaacctccactgctccttgctaatttttgtatttttagtagacacag

SEQ ID NO: 634269 - DNA, 67 bp, Artificial Sequence
  ENSG00000180340_28 (sequence is synthesized)
tgacctcgttgcctggcctgtcaagacttctcttaagttaacttcctgagaagtgatgtctaaaagt

SEQ ID NO: 634270 - DNA, 120 bp, Artificial Sequence
  ENSG00000180340_29 (sequence is synthesized)
ttctcttaagttaacttcctgagaagtgatgtctaaaagtatctttgctggtgtgagaactccagtttccaacacatattatttccctcaactatttggaatattttagaattttaattc

SEQ ID NO: 634271 - DNA, 120 bp, Artificial Sequence
  ENSG00000180340_30 (sequence is synthesized)
caaaggattagtttgaatacaagtatgccacataactcagttttcgccatcttccatttcttaacagtgtaaattaaaagctaataatcataataataaagtgcatttaattatctttga

SEQ ID NO: 634272 - DNA, 120 bp, Artificial Sequence
  ENSG00000180346_0 (sequence is synthesized)
gattcacgtagaccttgtcaggaaattggtcactatccatctaggccctagaagtgagaggaggaatcttacgaactcattttctagttgctttgtattcaaatcttagttgttaattat

SEQ ID NO: 634273 - DNA, 120 bp, Artificial Sequence
  ENSG00000180346_1 (sequence is synthesized)
cttgttctagtaatcacctaaaatattagacacttaaaatgttggggaaacgtaagcgtgtggtgttgacaattaaggacaagcttgacattattaagaaacttgaggaaggcatctctt

SEQ ID NO: 634274 - DNA, 120 bp, Artificial Sequence
  ENSG00000180346_2 (sequence is synthesized)
tcaaaaaactttccgtggtgtacggaattggtgaatccacagttcgtgatattaaaaagaacaaagaaaggattataaactatgcaaacagttcagatcctaccagtggagtatccaaac

SEQ ID NO: 634275 - DNA, 120 bp, Artificial Sequence
  ENSG00000180346_3 (sequence is synthesized)
gtaaatctatgaagtcatcaacatacgaggagcttgatagagttatgatagagtggtttaaccaacagaaaacagatgggattccagtgtccggaacgatttgtgcaaaacaagccaagt

SEQ ID NO: 634276 - DNA, 120 bp, Artificial Sequence
  ENSG00000180346_4 (sequence is synthesized)
tcttttttgatgctttgggaatggaaggtgattttaatgcatcgtcaggctggctaactcgatttaagcagcgccatggtattccaaaggctgctggtaaaggaacaaaattaaaaggag

SEQ ID NO: 634277 - DNA, 120 bp, Artificial Sequence
  ENSG00000180346_5 (sequence is synthesized)
atgaaactgctgccagagaattttgtggtagctttcaggaatttgttgaaaaagagaatctacaaccagagcaaatttatggtgctgatcaaactggattgttttggaaatgtctaccat

SEQ ID NO: 634278 - DNA, 120 bp, Artificial Sequence
  ENSG00000180346_6 (sequence is synthesized)
caaggacattaactcttgaaactgaccaaagtacttctgggtgtaggtcaagcagagagagaatcatcattatgtgttgcgcaaatgccacaggtttacacaaacttaatctttgtgttg

SEQ ID NO: 634279 - DNA, 120 bp, Artificial Sequence
  ENSG00000180346_7 (sequence is synthesized)
tggggaaggccaaaaagccccgagcattcaaaggcactgacctttcaaaccttcctgtgacatattacagtcaaaaaggtgcatggatagaacagtctgttttcagacagtggtttgaaa

SEQ ID NO: 634280 - DNA, 120 bp, Artificial Sequence
  ENSG00000180346_8 (sequence is synthesized)
acttttagaaaaagcagtgcttcttttagatttccccccagcacgtccaaatgaagaaatgttgagttcagatgatggcagaataattgtgaagtatttgccaccaaatgtcacaagtct

SEQ ID NO: 634281 - DNA, 120 bp, Artificial Sequence
  ENSG00000180346_9 (sequence is synthesized)
gattcaaccaatgagccagggagttctagccactgtaaaaagatactatcgagcaggacttctccagaaatacatggatgaaggaaatgacccaaaaatattttggaagaacttgacagt

SEQ ID NO: 634282 - DNA, 120 bp, Artificial Sequence
  ENSG00000180346_10 (sequence is synthesized)
gttggatgcaatttatgaagtgtcaagagcttggaacatggtaaaatcaagtaccataaccaaagcatggaaaaaacttttccctggcaatgaagagaattcaggtatgaacattgatga

SEQ ID NO: 634283 - DNA, 120 bp, Artificial Sequence
  ENSG00000180346_11 (sequence is synthesized)
aggagccattttagcagctaatttagcaacagttttacagaacacagaagaatgtgaacatgttgacattgagaatattgatcagtggttcgactctcggagcagtgactcaagctgtca

SEQ ID NO: 634284 - DNA, 120 bp, Artificial Sequence
  ENSG00000180346_12 (sequence is synthesized)
ggtgctgactgacagtgaaagtgctgaggaccagaccaaggctgctgagcaaaagccttccagtaagagtagaaaaacagaactgaatccagagaagcatattagccataaagcggcact

SEQ ID NO: 634285 - DNA, 120 bp, Artificial Sequence
  ENSG00000180346_13 (sequence is synthesized)
tgaatggactgaaaatttactggattatcttgaacaacaagatgacatgcttctgtctgataaattggtattaaggaggcttcggaccataataagaaaaaaacagaagatccaaaataa

SEQ ID NO: 634286 - DNA, 120 bp, Artificial Sequence
  ENSG00000180346_14 (sequence is synthesized)
caaaaatcattaataaggctcttaagtatttcagtgtatctgcatctttgtgactatctgcagtgaaactttgcttgtttgaagtcctgtggattccaaagccaaatacattttataaat

SEQ ID NO: 634287 - DNA, 120 bp, Artificial Sequence
  ENSG00000180346_15 (sequence is synthesized)
gattttggaattagatgtcagtttggattacttaaattacaactctttaatgttgactctagtcattgggcattgacgtgtaacttgtctttctactgtttctaatatctattaattaga

SEQ ID NO: 634288 - DNA, 120 bp, Artificial Sequence
  ENSG00000180346_16 (sequence is synthesized)
tcataaggtacctgaggccagggatcttgtgtctgttgtgcctgaatttggcgtgtctaataaaggcccatgcacactataggcactcaataaaacttacatttttatgatttttctttg

SEQ ID NO: 634289 - DNA, 120 bp, Artificial Sequence
  ENSG00000180346_17 (sequence is synthesized)
acaacgttctgcgggggcgcgcgcgtgctctctaatcccccgccttccggctccggcggcgacgctcgtccctctccgctcgtccctcgccgctgccgggccaccagtgccagcctgcct

SEQ ID NO: 634290 - DNA, 120 bp, Artificial Sequence
  ENSG00000180346_18 (sequence is synthesized)
caggagactccatttgcgcttagtgtggtctgggcgccgcgcaggcggtcccagggcgatgcccggggccggcggactggcgttccctgtgccaagcggccgcccgctggctggctggct

SEQ ID NO: 634291 - DNA, 120 bp, Artificial Sequence
  ENSG00000180346_19 (sequence is synthesized)
gcagcagtgacatcctggtcgccggcgtccaggcggaatccgggctccctccgcgggaggaaagacgtcccgcgctctgaagctcgcccagcggggagaggccctcgctaacacggcttc

SEQ ID NO: 634292 - DNA, 120 bp, Artificial Sequence
  ENSG00000180346_20 (sequence is synthesized)
tccctgacctcttaatttcaggaggtttcggagcctccgagtatctctacagcccccacaggaactgcttctgttggtccatcgaggatcgtctttcaccaggattattgtaacatcatc

SEQ ID NO: 634293 - DNA, 120 bp, Artificial Sequence
  ENSG00000180346_21 (sequence is synthesized)
ttcaccgagcctgccaccccatagcctctaccttgggtcctcatttccaccgatgcagtttttttgatgctttctttagtaatgtgacatcacatgtccactatcctcctttccagctgc

SEQ ID NO: 634294 - DNA, 120 bp, Artificial Sequence
  ENSG00000180346_22 (sequence is synthesized)
caaatctagtaggtttaagtcgcttttaaagtagagttttctgcctgttccactttcaccttatttgcactgttcacttctgtccgggtcatcttctcttgcgtatgatttccacaagca

SEQ ID NO: 634295 - DNA, 120 bp, Artificial Sequence
  ENSG00000180346_23 (sequence is synthesized)
ctcacttgcgcaacctatagcagagtccgtgcctagagagacagcattccatacaatccactgcttgacaaagaccacatagtcagagggtgagttttcccattgtattttcctgtatgt

SEQ ID NO: 634296 - DNA, 120 bp, Artificial Sequence
  ENSG00000180346_24 (sequence is synthesized)
caagtttgcaagtcctctcttgacttaaactgtttactccctagcacatttcctaaaatacttccacctgagatttagtggctattctggcaaagaacattacctgcaaggatggcaaga

SEQ ID NO: 634297 - DNA, 120 bp, Artificial Sequence
  ENSG00000180346_25 (sequence is synthesized)
attgagtatgcaatagtactgttttagaagccttaccagtacagtttctagcctctagtgtgattgcacttcatgaaagaccctgaaccctgaggaggaagaaagatagaagataagagt

SEQ ID NO: 634298 - DNA, 120 bp, Artificial Sequence
  ENSG00000180347_0 (sequence is synthesized)
tgacttccaggaccgtaagtttgcagaattactctcctatgatggcacagaaatcacaaggatctgacaaccttcaggaaggccaggaaaagagcaagagagagatcctgaagtgcacca

SEQ ID NO: 634299 - DNA, 120 bp, Artificial Sequence
  ENSG00000180347_1 (sequence is synthesized)
aaagcgcgtgggctccgctggatgagtggctgccccctgaccctgaggaggaaagccagagtctcaccatccccatgctggaagattccaagcaagaaagtattcagcagtggctggact

SEQ ID NO: 634300 - DNA, 120 bp, Artificial Sequence
  ENSG00000180347_2 (sequence is synthesized)
ctggattctttgtctctgcaaatgaaaactttcaacaagtcattgaccgcactgtttctttgtatgaacaagggatggttcaaatgactgtgaaagactacatgagatctttgcatcagt

SEQ ID NO: 634301 - DNA, 120 bp, Artificial Sequence
  ENSG00000180347_3 (sequence is synthesized)
tttcagaaactcccatcctatccagagggaccagtttcaactcttgctattctactgcaagtgtaccacaaagcattcctgaatggctggaattttgggagatagatccagtggagattc

SEQ ID NO: 634302 - DNA, 120 bp, Artificial Sequence
  ENSG00000180347_4 (sequence is synthesized)
tcttggatctggggtttggtgctgatgagccagacatctgcatgcaaatcccagccagattccttggttgtggctcagcagccagaggaatcaacatccgtgtttttcttgaagctcaaa

SEQ ID NO: 634303 - DNA, 120 bp, Artificial Sequence
  ENSG00000180347_5 (sequence is synthesized)
agcagcgaatggacattgagaaccccaacttgtacggtcgtttccgacagctggaaatcctggaccatgtgaccaatgccttctcatctctgctgagtgatgtcagcatcctgccaaaca

SEQ ID NO: 634304 - DNA, 120 bp, Artificial Sequence
  ENSG00000180347_6 (sequence is synthesized)
gagctgaagagaaagctggaggagagagtgtgcaaagaacctcagtgagtgccgccaaagagcatcgaagaagaatgggtaaactcttaaggagagcttccaaacagaacatcaggcggg

SEQ ID NO: 634305 - DNA, 120 bp, Artificial Sequence
  ENSG00000180347_7 (sequence is synthesized)
attgtaacccagaggtatcagagtccttcaaggtgaaggatgaagtttttgttccctttacaaaaccatgggattgtggagcagagctagcagcaacctcaatcaaccacaagcaaaatc

SEQ ID NO: 634306 - DNA, 120 bp, Artificial Sequence
  ENSG00000180347_8 (sequence is synthesized)
atttgtctctgtcagtagaacatcagtctctccaagcctgtgatgatttgctaccttatcctcctcatggtcttctgagcaagcagtggccttgctcatctatgccggccaagcaggctc

SEQ ID NO: 634307 - DNA, 120 bp, Artificial Sequence
  ENSG00000180347_9 (sequence is synthesized)
ctccttcctgtgtgtctgaggggtcagtcaagggcagaactcagaaggagaacttatttcagactaacaagctcaagagcttgtctcatcttgcaggcaaaggaccagactcatttgaaa

SEQ ID NO: 634308 - DNA, 120 bp, Artificial Sequence
  ENSG00000180347_10 (sequence is synthesized)
tggaagaggtccaaagctttgaagaagagactggtaatcctcttgacatgacttcaggaactgtaggtgccagggtggacagagcaaatagctgccagtctgacagcagcgggttcctgg

SEQ ID NO: 634309 - DNA, 120 bp, Artificial Sequence
  ENSG00000180347_11 (sequence is synthesized)
aggagccgctggaaccgctgcccctccagatgccttccttgccaaacagccagagtcctgctgagaatggaggtagaaagccaagagatcagagccacagcttagtatcatcccaggact

SEQ ID NO: 634310 - DNA, 120 bp, Artificial Sequence
  ENSG00000180347_12 (sequence is synthesized)
gtcagctagagtcggatgggccagattccaaaagtagggcgagcatgtctttttcaagccaagaagcgaatgccttggaacaaagggcctcagtatctgtgatggaggaagagtttctgc

SEQ ID NO: 634311 - DNA, 120 bp, Artificial Sequence
  ENSG00000180347_13 (sequence is synthesized)
tatatcccagacatggcctgtgccaagaccaccacgaggggagaatgcccaaggaaagacagccatctgtggcagcttctgccaatgccccatgctgagtatgaggtcaccagacccaca

SEQ ID NO: 634312 - DNA, 120 bp, Artificial Sequence
  ENSG00000180347_14 (sequence is synthesized)
gccacttccaaatatgatcatcctctggggtttatggtaacccacgtcacagaaatgcaggacagttttgtgaggcctgagggagctggcaaagtgcaaagccaccacaatgagtctcaa

SEQ ID NO: 634313 - DNA, 120 bp, Artificial Sequence
  ENSG00000180347_15 (sequence is synthesized)
aggtcacctggaaatgatcatactcaagacaagttccttcatgttgactctgaggccccacgagaagaggaaagcagtggattctgtcctcacaccaaccacagcttactcgtaccagaa

SEQ ID NO: 634314 - DNA, 120 bp, Artificial Sequence
  ENSG00000180347_16 (sequence is synthesized)
agctcatcacagtgtatccccaagcacagtgaaatcacaccttatgcaactgaccttgctcaaacatctgaaaagctcattccccacctccataaactgcctggagatcctgcccaggtg

SEQ ID NO: 634315 - DNA, 120 bp, Artificial Sequence
  ENSG00000180347_17 (sequence is synthesized)
aagtcaaggtctggtactttgggtcagatactacctgggacagaagctgagatggaaaaccttcctctaaatactggcagctccaggtctgtaatgacccagatgtcctccagcctggtg

SEQ ID NO: 634316 - DNA, 120 bp, Artificial Sequence
  ENSG00000180347_18 (sequence is synthesized)
tcggctgctcagagggctgtggccttggggactggtcccagaggaacatctttagaatgcactgtgtgtgatcctgttaccgcaacagaaacaagactggggacaaaagcaagacagtta

SEQ ID NO: 634317 - DNA, 120 bp, Artificial Sequence
  ENSG00000180347_19 (sequence is synthesized)
aatgatgcttccattcagacttcagctctaagcaacaagaccttgacacatgggccccagcccctcaccaaatccgtctctctagactcaggcttctctagtatctgcccaatgggcacc

SEQ ID NO: 634318 - DNA, 120 bp, Artificial Sequence
  ENSG00000180347_20 (sequence is synthesized)
tgccatgctatacctgcccactgctgcatctgctgtcatcaccaccctcactgccacggggagaggcaaagccctggccctgaaccctcagtctgtaggcactgcctgtgttcactaact

SEQ ID NO: 634319 - DNA, 120 bp, Artificial Sequence
  ENSG00000180347_21 (sequence is synthesized)
ggtcaccaggaagcccagttcatgacgactttgaaagcccttcaggacactacagtgagggagctatgttcctgcacagtccatgagatggaagccatgaagacgatatgccaaagtttc

SEQ ID NO: 634320 - DNA, 120 bp, Artificial Sequence
  ENSG00000180347_22 (sequence is synthesized)
cgggagtatttagaagaaattgaacagcaccttatgggacagcaggccctcttttccagggacatgtcagaggaggaaagggaggaggccgagcaactgcaaacgttacgtgaggccctg

SEQ ID NO: 634321 - DNA, 120 bp, Artificial Sequence
  ENSG00000180347_23 (sequence is synthesized)
aggcagcaggtggcagagttggaatttcagttaggagaccgggctcagcaaatcagagaagggattttactgcagctggaggttctcacagcagagccacctgaacactattcaaatctg

SEQ ID NO: 634322 - DNA, 120 bp, Artificial Sequence
  ENSG00000180347_24 (sequence is synthesized)
catcaatataactggatagaagaaagcaatgggcagacttcatgttctaaaatccacccaggcatggccccgaggactgtgtttcctcccgatgatggccaggaggctccctgttcaggt

SEQ ID NO: 634323 - DNA, 120 bp, Artificial Sequence
  ENSG00000180347_25 (sequence is synthesized)
gggacccagttggctgccttcactccacccaccttggagaacagcaccaggatgtctccttcatcatcagcttgggcaaagttaggtccaacccctttgtcaaattgtcctgttggagaa

SEQ ID NO: 634324 - DNA, 120 bp, Artificial Sequence
  ENSG00000180347_26 (sequence is synthesized)
aaggatgcagatgtcttcctctagatcagagcaggtttgttaaccttcatacaaaatataaaggcccagaacagatgtagcaaggaaatttcaattttccccaaggagaagggtctgcca

SEQ ID NO: 634325 - DNA, 120 bp, Artificial Sequence
  ENSG00000180347_27 (sequence is synthesized)
atcctcccagaaacccagccggcttcacctctcaccaacagtggctgcgggactttccagcacctagcctgggcattcccacagcccagagggagctcgtcccagacaaccaagaggaaa

SEQ ID NO: 634326 - DNA, 120 bp, Artificial Sequence
  ENSG00000180347_28 (sequence is synthesized)
agaagggaaacaagaaagagatggagacccatcattgtggccaacgaccccacgaagagggaatagcggtccacgcacgggacccagcctccgatcaagcccagcaggcgccgggtgcgc

SEQ ID NO: 634327 - DNA, 120 bp, Artificial Sequence
  ENSG00000180347_29 (sequence is synthesized)
ctgtgctgggaggcagagcccacgcccacccggaaccgcgccggccagcgaggtccgtgcgcagccccggctgccgcctgcgcttctccctccacacctcaccgttagcagagggagccg

SEQ ID NO: 634328 - DNA, 120 bp, Artificial Sequence
  ENSG00000180347_30 (sequence is synthesized)
gctccggcctcagccagccccagagacaggcccccacagcacagcggcgggctgaagggctcctcgagcgtggccagagcagacgccgaggctaaggaggtgccgagagacagcgagggc

SEQ ID NO: 634329 - DNA, 120 bp, Artificial Sequence
  ENSG00000180347_31 (sequence is synthesized)
tgctagcacattgtcacctctcaatactggaactcagaataagaggtctccactgttctgagttatgggagaaagatgggtgtatggtagacagaatagtgcctccccacaacaaagatg

SEQ ID NO: 634330 - DNA, 120 bp, Artificial Sequence
  ENSG00000180347_32 (sequence is synthesized)
tcaacatgttactgtgtgtgttaaaagggactttgtaggtgtgagtaagttgaagatcttgagaagaaaagattatcctgggttttttgggtggggccaatgtcataaaaaggtccagat

SEQ ID NO: 634331 - DNA, 120 bp, Artificial Sequence
  ENSG00000180347_33 (sequence is synthesized)
aagaaagaggcagaagagtcagggtcagaggaggagccatcatgataggagcagagaagcagagtcaggagagttgatgctacactgctaactttgaagatgaagaagccacgagctatg

SEQ ID NO: 634332 - DNA, 120 bp, Artificial Sequence
  ENSG00000180347_34 (sequence is synthesized)
cccaagaggagtttagaatactctaatactcattcagtatagaataactgagcacctagtatgtgcctggcacagagtatgcaacagtgactaaatagtatacggtctctgccctgctag

SEQ ID NO: 634333 - DNA, 120 bp, Artificial Sequence
  ENSG00000180347_35 (sequence is synthesized)
aacttacagtgtagtgggggagatagaattgcaaacaaaaagtatctgagacagacctcagtcaatatagaagtttattttgccaaggttaaggatacacacccagaagacaggtctgtg

SEQ ID NO: 634334 - DNA, 120 bp, Artificial Sequence
  ENSG00000180347_36 (sequence is synthesized)
cctttctccaaagatgattttgaggccttcaacatttagtggggaaagggtgctaatggggaaagaggtgtgggtacataggaggcaaacagttgcatttttttgagtctgatcagcttt

SEQ ID NO: 634335 - DNA, 120 bp, Artificial Sequence
  ENSG00000180347_37 (sequence is synthesized)
tcagcttttctcatgagagaaggggtagaggaactgtcacttatgcattcacctagctcagtggatctgcacttttacagaaggtaaaataaacatagggcagaggaagcaatcagatat

SEQ ID NO: 634336 - DNA, 120 bp, Artificial Sequence
  ENSG00000180347_38 (sequence is synthesized)
ctcgggggagcagagggatggctttgagttctgttctttgtcctgtacctattaagagaagctatcaatatactttgtcaggataaaattcaacagaactgttttagactaaagatttta

SEQ ID NO: 634337 - DNA, 120 bp, Artificial Sequence
  ENSG00000180347_39 (sequence is synthesized)
gggaccacaaggaatttcccagtgggcaaattgtgagggaggtatttagcttttaaaaaaatctttgtagctatctcatttagaaataaaatgggaggcagattgcctgatgcagctcct

SEQ ID NO: 634338 - DNA, 120 bp, Artificial Sequence
  ENSG00000180347_40 (sequence is synthesized)
gttgggcttttgacctccccttctccatgtagactccgagctctcctgcagtttcttccttgctccttccctgtaacgcctacggaatgaagaggaacacctggctctaggatgtccctc

SEQ ID NO: 634339 - DNA, 120 bp, Artificial Sequence
  ENSG00000180347_41 (sequence is synthesized)
acctggcagccatctgctttaccagtctcatttcctgctcatccctcagatgaatctccaattctattcccctaaaccacctcctgtgttcctgcttcctctcctttgctgaaacaaatg

SEQ ID NO: 634340 - DNA, 120 bp, Artificial Sequence
  ENSG00000180347_42 (sequence is synthesized)
aagtatctcaccagtaagtcctagggcagaccccatctcctacacaggctttccttgatgatctgtggcagaagtgatccttattttttgaaactcctatatcactttgcttttttgtta

SEQ ID NO: 634341 - DNA, 120 bp, Artificial Sequence
  ENSG00000180347_43 (sequence is synthesized)
aaacactgaaaacctcctgtcttgtgttaccattatctgtgtaggtcatatcttctctagtaaacttaaagctatttgaggactgtgtagtacctactaccctgtgtttaagagagacta

SEQ ID NO: 634342 - DNA, 120 bp, Artificial Sequence
  ENSG00000180347_44 (sequence is synthesized)
tctggaggaaagtacagactcctttctttatcatgtgtgacctcgggcacttgctctctttaccctagtttcttcctctgtaaaatagggagaagaaaaacaacatagagttgttggaca

SEQ ID NO: 634343 - DNA, 120 bp, Artificial Sequence
  ENSG00000180347_45 (sequence is synthesized)
gaataaataccatgaatcctgtgcagtgtttaatccaatgtccatcacgtagtaagtgttcaatgcatgttggctattattacaagtgcacataccaagaactcaataaatgctaactgt

SEQ ID NO: 634344 - DNA, 120 bp, Artificial Sequence
  ENSG00000180347_46 (sequence is synthesized)
atagttctgcagtcacaagggctttgtagtcagtcttagctgctggaacattcaaggagacaaaaaggcacagaagatctccacacatactttgatgccaactacagcaagttgcaagac

SEQ ID NO: 634345 - DNA, 120 bp, Artificial Sequence
  ENSG00000180347_47 (sequence is synthesized)
ttctgaagacacaagactctggtctgttgtaattgtttttctttgttgagaaaataatcagtttccagagtataacacatgtcgaacaaaatagaacatttgtaaagaggttagagtatc

SEQ ID NO: 634346 - DNA, 120 bp, Artificial Sequence
  ENSG00000180347_48 (sequence is synthesized)
aaagtggtgcccctttgagaagaaaaagttttagagtgttttcatgtggaatggtgggttgcatacgtaatttcaaattgtaatttaaaacaacaaattgttcatgatgtgcgagaattg

SEQ ID NO: 634347 - DNA, 120 bp, Artificial Sequence
  ENSG00000180347_49 (sequence is synthesized)
taggttattaaaagccttgttaaattgtttttcttgaaaattgagagaacaggaacagaagccaaaatatggacggcacctttctctagcccaaactcagcctctaattgcctgatctta

SEQ ID NO: 634348 - DNA, 120 bp, Artificial Sequence
  ENSG00000180347_50 (sequence is synthesized)
gtttccttcaggaactttcagatggctcaggagtggagcttttgtggcagttcctgacaggataaggacaagaagcaacacacagaagagaaggaaaaagaaagaaaactgaccaatatg

SEQ ID NO: 634349 - DNA, 120 bp, Artificial Sequence
  ENSG00000180347_51 (sequence is synthesized)
agatggctcaggagtggagcttttgtggcaggtgggtagaggctgctggagggggctttcatgatcatctgctttgagggataaacattgcttgtcccctcctccaactaaggaagttag

SEQ ID NO: 634350 - DNA, 120 bp, Artificial Sequence
  ENSG00000180347_52 (sequence is synthesized)
tagaagattccaagcaagaaagtattcagcagtggctggactctggattctttgtctctgcaaatgaaaactttcaacaagtcattgaccgcactggtaagacaagagaagcagttatgc

SEQ ID NO: 634351 - DNA, 120 bp, Artificial Sequence
  ENSG00000180347_53 (sequence is synthesized)
tttgggaagctgagtaggagatatattcaaatatctacgtgaataaatcttcttaaaatgagcattatcagaggcttctagaaatgatcagccctcaaaaactatccagctcaatctctt

SEQ ID NO: 634352 - DNA, 120 bp, Artificial Sequence
  ENSG00000180347_54 (sequence is synthesized)
ccgaacccagggctcttgccatatcatcaatggctcagagtatagcataaactcactgggttctatgaagacatttgcaaggatgtagttatgaaaatgaaattgtttaattttccccat

SEQ ID NO: 634353 - DNA, 120 bp, Artificial Sequence
  ENSG00000180347_55 (sequence is synthesized)
cctgtattatacttttatttctgaatctagattttttctattctttggtctcaaaattgcacttacattctctctttctaataatgcacttgttctcaagaagaataaatgtctgaattc

SEQ ID NO: 634354 - DNA, 120 bp, Artificial Sequence
  ENSG00000180347_56 (sequence is synthesized)
attctccacacactcttcctttcaatccagaagttgttactagtaactcctgccattcctaatgacatttttaccactttctttcttgtagagaagtgggtagagagaatcactttgtgt

SEQ ID NO: 634355 - DNA, 120 bp, Artificial Sequence
  ENSG00000180353_0 (sequence is synthesized)
actccgaagtggcagcagccagagagggagtcggtgtggacgcgaggagccgggcgcttagaacagaggcttgcacaggtggagatgtggaagtctgtagtgggccatgatgtgtctgtt

SEQ ID NO: 634356 - DNA, 120 bp, Artificial Sequence
  ENSG00000180353_1 (sequence is synthesized)
tccgtggagacccagggtgatgattgggacacagatcctgactttgtgaatgacatctctgaaaaggagcaacgatggggagccaagaccatcgaggggtctggacgcacagaacacatc

SEQ ID NO: 634357 - DNA, 120 bp, Artificial Sequence
  ENSG00000180353_2 (sequence is synthesized)
aacatccaccagctgaggaacaaagtatcagaggagcatgatgttctcaggaagaaagagatggagtcagggcccaaagcatcccatggctatggaggtcggtttggagtagaaagagac

SEQ ID NO: 634358 - DNA, 120 bp, Artificial Sequence
  ENSG00000180353_3 (sequence is synthesized)
cgaatggacaagagtgcagtgggccatgagtatgttgccgaggtggagaagcactcttctcagacggatgctgccaaaggctttgggggcaagtacggagttgagagggacagggcagac

SEQ ID NO: 634359 - DNA, 120 bp, Artificial Sequence
  ENSG00000180353_4 (sequence is synthesized)
aagtcagcagtcggctttgattataaaggagaagtggagaagcacacatctcagaaagattactctcgtggctttggtggccggtacggggtggagaaggataaatgggacaaagcagct

SEQ ID NO: 634360 - DNA, 120 bp, Artificial Sequence
  ENSG00000180353_5 (sequence is synthesized)
ctgggatatgactacaagggagagacggagaaacacgagtcccagagagattatgccaagggctttggtggccagtatggaatccagaaggaccgagtggataagagcgctgtcggcttc

SEQ ID NO: 634361 - DNA, 120 bp, Artificial Sequence
  ENSG00000180353_6 (sequence is synthesized)
aatgaaatggaggccccgaccacagcttataagaagacgacgcccatagaagccgcttctagtggtacccgtgggctgaaggcgaaatttgagtccatggctgaggagaagaggaagcga

SEQ ID NO: 634362 - DNA, 120 bp, Artificial Sequence
  ENSG00000180353_7 (sequence is synthesized)
gaggaagaggagaaggcacagcaggtggccaggaggcaacaggagcgaaaggctgtgacaaagaggagccctgaggctccacagccagtgatagctatggaagagccagcagtaccggcc

SEQ ID NO: 634363 - DNA, 120 bp, Artificial Sequence
  ENSG00000180353_8 (sequence is synthesized)
gtgagaaccagcagggaacacccagtgcccttgctgcccattaggcagactctcccggaggacaatgaggagcccccagctctgccccctaggactctggaaggcctccaggtggaggaa

SEQ ID NO: 634364 - DNA, 120 bp, Artificial Sequence
  ENSG00000180353_9 (sequence is synthesized)
gagccagtgtacgaagcagagcctgagcctgagcccgagcctgagcccgagcctgagaatgactatgaggacgttgaggagatggacaggcatgagcaggaggatgaaccagagggggac

SEQ ID NO: 634365 - DNA, 120 bp, Artificial Sequence
  ENSG00000180353_10 (sequence is synthesized)
tatgaggaggtgctcgagcctgaagattcttctttttcttctgctctggctggatcatcaggctgcccggctggggctggggctggggctgtggctctggggatctcagctgtggctgta

SEQ ID NO: 634366 - DNA, 120 bp, Artificial Sequence
  ENSG00000180353_11 (sequence is synthesized)
tatgattaccaaggagagggaagtgatgagctttcctttgatccggacgacgtaatcactgacattgagatggtggacgagggctggtggcggggacgttgccatggccactttggactc

SEQ ID NO: 634367 - DNA, 120 bp, Artificial Sequence
  ENSG00000180353_12 (sequence is synthesized)
ttccctgcaaattatgtcaagcttctggagtgactagagctcactgtctactgcaactgtgatttcccatgtccaaagtggctctgcctccaccccctccctattcctgctgcaaatgtc

SEQ ID NO: 634368 - DNA, 120 bp, Artificial Sequence
  ENSG00000180353_13 (sequence is synthesized)
taaccagatgaggttctggacagacttccctctcctgcttcattaagggcttggggcagagacagcatggggaaggaggtccccttccccaagagtcctctctatcctggatgagctcat

SEQ ID NO: 634369 - DNA, 120 bp, Artificial Sequence
  ENSG00000180353_14 (sequence is synthesized)
gaacatttctcttgtgttcctgactccttcccaatgaacacctctctgccaccccaagctctgctctcctcctctgtgagctctgggcttcccagtttgtttacccgggaaagtacgtct

SEQ ID NO: 634370 - DNA, 120 bp, Artificial Sequence
  ENSG00000180353_15 (sequence is synthesized)
agattgtgtggtttgcctcattgtgctatttgcccactttccttccctgaagaaatatctgaaccttctttctgttcagtcctaaaattcgaaataaagtgagactatggttcacctgta

SEQ ID NO: 634371 - DNA, 120 bp, Artificial Sequence
  ENSG00000180353_16 (sequence is synthesized)
ggtgaggagggcatctgggccactctgtgatctttgaggatgcttggaaaagggccttctaggactgagacagccctcatactgggactaattggtaggacaattggctgtcacctgtgg

SEQ ID NO: 634372 - DNA, 120 bp, Artificial Sequence
  ENSG00000180353_17 (sequence is synthesized)
ggcatgcacgatacctggtatcagggatgaaaagagacaggtgtgggtgagtttgacagtgtgattgacaggccatggcaggctacactgaaggtgagaagcaggtgaacctgggtctcc

SEQ ID NO: 634373 - DNA, 120 bp, Artificial Sequence
  ENSG00000180353_18 (sequence is synthesized)
aagactctcaaactgtgtgtttgaatgaataattcctcaagccactggtttttattatactcatatgcatgaagatagaacagagaatcatctaagctcttcttttggcttaacatcaaa

SEQ ID NO: 634374 - DNA, 120 bp, Artificial Sequence
  ENSG00000180353_19 (sequence is synthesized)
accttataaatactcatgccgtttaggaaaacagattcatcagtttaaatattattgccatagcagcagataatcaagttaaacaactaattagggttactatttacagaatttagcatc

SEQ ID NO: 634375 - DNA, 120 bp, Artificial Sequence
  ENSG00000180353_20 (sequence is synthesized)
aatctatgaagtccagatatctttaaagactcctttgtacaaaacaaaacaaaatgttgttttaaagagaaaaaaaagtaccgtatgattacagcatcatatcgttgacaggagagtaag

SEQ ID NO: 634376 - DNA, 120 bp, Artificial Sequence
  ENSG00000180353_21 (sequence is synthesized)
attgataactcatcgatgtttttagttccacgccttattaggtcggattctttgaactcattttttatggtgcagaatggtgtctcctgccctgcagctgcacacagagagaggacagct

SEQ ID NO: 634377 - DNA, 120 bp, Artificial Sequence
  ENSG00000180353_22 (sequence is synthesized)
aaatctttactgagctataaccataggatgtctgcctcagtggccctgtcctcttctcgtgccctgacattttatagcaagtggaaataaagaatggtgtaatgccaagagtatagaaat

SEQ ID NO: 634378 - DNA, 120 bp, Artificial Sequence
  ENSG00000180353_23 (sequence is synthesized)
agaattctggagctctagggactgattccagctctgctgtaaaaaggcttatgatgctgaggagagtaataatattttaccatcctatcttgatttccagcgctgactggagattatagt

SEQ ID NO: 634379 - DNA, 120 bp, Artificial Sequence
  ENSG00000180353_24 (sequence is synthesized)
aagggggttatgggaagagcccaaagaaaactcggagacttgggggaaggtgagggaggaaaaggatagggtagttcatgtctatgtattattgtgtttgttttttttctagagtctgtt

SEQ ID NO: 634380 - DNA, 120 bp, Artificial Sequence
  ENSG00000180353_25 (sequence is synthesized)
cctgtgtgtacctgtgtgtcattgcatatttccattttatgtctctcctcttaccctcctcaaccctattatctatcttttatacctaacaactctgctatttccccaagtgggtctatt

SEQ ID NO: 634381 - DNA, 120 bp, Artificial Sequence
  ENSG00000180353_26 (sequence is synthesized)
ggattaactgcctcccttcctttagtaaggcatgagagattcatagaggaagtggaccaaatactaaggtcctctctatctatctacctggcaatcatctatctcctatctatctcttca

SEQ ID NO: 634382 - DNA, 120 bp, Artificial Sequence
  ENSG00000180353_27 (sequence is synthesized)
agcccaaagaaaactcggagacttgggggaagattttaaaaagtgtcagtggatgaccacattgcacaagcaacatactgtgaaagcctggcacaagtttctacaactggatgacaatac

SEQ ID NO: 634383 - DNA, 87 bp, Artificial Sequence
  ENSG00000180353_28 (sequence is synthesized)
tgaaagcctggcacaagtttctacaactggatgacaataccacattgtttaatcagaaataaatggtttcaaactttggaaggccga

SEQ ID NO: 634384 - DNA, 120 bp, Artificial Sequence
  ENSG00000180353_29 (sequence is synthesized)
tcattttttatggtgcagaatggtgtctcctgccctgcagctgcacacagagagaggacagctccttcacagttagctgagattttttctttgtttttaccaacagttgttaattaggtg

SEQ ID NO: 634385 - DNA, 120 bp, Artificial Sequence
  ENSG00000180353_30 (sequence is synthesized)
gacatgcatccttaaagctaaggattggaagctaaggcagctaagttctagaaaattaattgtttgcatcatggggggtaaaaccatgaaaaacaaaatcaggaaagtttaaaacatact

SEQ ID NO: 634386 - DNA, 120 bp, Artificial Sequence
  ENSG00000180353_31 (sequence is synthesized)
gcaaagctaagggaagatgtagaaggcaatagtgaaatatggagcatgcagtgttctagaatcaggatggaattccctgttccatcttggcaccactcttgcctgcctttgcttaatcac

SEQ ID NO: 634387 - DNA, 120 bp, Artificial Sequence
  ENSG00000180353_32 (sequence is synthesized)
cgattcttacatcttttgctcacaagccacaaatggaatcacccagtcagtgtgtcatgtaaatcaagaaacaatacatgttaattagttcttaatatgcaaaaacccagacttgcttag

SEQ ID NO: 634388 - DNA, 120 bp, Artificial Sequence
  ENSG00000180353_33 (sequence is synthesized)
atacccatagttcctgagccagatggagaacaaagctccaaaactctgcggtaatgttgggtatctgggcaacatatccagtcccagagccagctaggatccagactctcctggttgcag

SEQ ID NO: 634389 - DNA, 120 bp, Artificial Sequence
  ENSG00000180353_34 (sequence is synthesized)
ttatcccaccaaaatccacatatttgtgtttccattattgagtaatgaaagagaagaggcacagcattatcaactgggaatagggtaatgtctcttcatgagcagagtgctttatacttt

SEQ ID NO: 634390 - DNA, 120 bp, Artificial Sequence
  ENSG00000180353_35 (sequence is synthesized)
acaaggcacttttctaggtatcacatttcacttttgtgaggattcgttaggaagaaaagcgctaagttagtgaatgaaactaagtagacactttaccttgtcccatttagttctcatgac

SEQ ID NO: 634391 - DNA, 120 bp, Artificial Sequence
  ENSG00000180353_36 (sequence is synthesized)
atcccagatgaagagggatcatttctctcattttacagtcgaggtagataaggcaggcatgcctctcctgattttatattgaaagagactggggcttagtaatataaaggaacgtgctta

SEQ ID NO: 634392 - DNA, 120 bp, Artificial Sequence
  ENSG00000180353_37 (sequence is synthesized)
aacttcaacaactataaataggggatgtagggtttgaacctaaaactgtctgtgtccagggcctatgttcattgctctgtagtatcctgtgtccataccagcctgtttctacattaaaca

SEQ ID NO: 634393 - DNA, 120 bp, Artificial Sequence
  ENSG00000180353_38 (sequence is synthesized)
cctatactcagcctgaagcccctacaaactacctctggggctggctgggagtaaggggaggttaggaagaggaaaacctgtcagctctgactctaaccaattctgtctcctcttctctgt

SEQ ID NO: 634394 - DNA, 80 bp, Artificial Sequence
  ENSG00000180354_0 (sequence is synthesized)
actccgcaccgcatgtaaacagtcccagccggcccagcccggccccggaggagcccgcgcaggccgagccgagcgccgcg

SEQ ID NO: 634395 - DNA, 120 bp, Artificial Sequence
  ENSG00000180354_1 (sequence is synthesized)
ggcggcggcgggaggcgggcgcggggccgcgatggatttccagcagctggccgacgttgcggagaaatggtgctccaacacgcccttcgagctcatcgccaccgaggagaccgaacgcag

SEQ ID NO: 634396 - DNA, 120 bp, Artificial Sequence
  ENSG00000180354_2 (sequence is synthesized)
gatggatttctacgccgaccccggcgtctccttctatgtgctgtgtccggacaacggctgcggcgacaattttcacgtgtggagtgagagcgaggactgcctgcctttcttgcagctagc

SEQ ID NO: 634397 - DNA, 120 bp, Artificial Sequence
  ENSG00000180354_3 (sequence is synthesized)
acaggattacatctcctcctgcggcaagaagacgctccacgaagtcctggaaaaagtcttcaagtctttcagacctttactggggcttccggatgcagatgacgatgcgtttgaagagta

SEQ ID NO: 634398 - DNA, 120 bp, Artificial Sequence
  ENSG00000180354_4 (sequence is synthesized)
cagtgctgacgtggaagaagaggagccagaggcggaccacccccagatgggggtcagccagcagtaaatctgggggctcccctgagaaggagagtgagccccacagtaacctaggtgggg

SEQ ID NO: 634399 - DNA, 120 bp, Artificial Sequence
  ENSG00000180354_5 (sequence is synthesized)
tcactgcccctcctgggttagcattttgcattagcacttcgaaataggacatctggctcccagcatccaaattaaaatgaaatacctttttaacgaccacaaaatatctgtgatgagctt

SEQ ID NO: 634400 - DNA, 120 bp, Artificial Sequence
  ENSG00000180354_6 (sequence is synthesized)
tgctcagaagtgacctgaatttcactcccgcttcagtggggtttctatggagttgtcttggtagcctttgccattttgaatttagagtccattttgtggctgactattctcttaagttta

SEQ ID NO: 634401 - DNA, 120 bp, Artificial Sequence
  ENSG00000180354_7 (sequence is synthesized)
tgttggagaattaacattcgctgactcgaatgtagagaactctgaatgtattaaggataggttttgagtcctcacaggtgaccttactgagggaaagcatggcagagaagaaatgcagtc

SEQ ID NO: 634402 - DNA, 120 bp, Artificial Sequence
  ENSG00000180354_8 (sequence is synthesized)
tgcactttttatgtactttttaagtgtccgtaagtgaaaggttttgcttataaagcatgaattttaatatctagtcattaaactgcacaagtgcaaatacaagggcaggaaaggataatc

SEQ ID NO: 634403 - DNA, 120 bp, Artificial Sequence
  ENSG00000180354_9 (sequence is synthesized)
acttagctttggactaagagggtaagagaggcccagaagcctttaagtgttttgccattactgagttacctgggtatgtagcgactggttcgtggttaggtgtaaatgttacttgcttgt

SEQ ID NO: 634404 - DNA, 120 bp, Artificial Sequence
  ENSG00000180354_10 (sequence is synthesized)
tcgactgtttcaaaacatgctaattccaaagccacttttgaagtctatagtggaaaatatagatggggtgaaagatataatgtattgatttttaaagctgtttataagccgtcccacgta

SEQ ID NO: 634405 - DNA, 120 bp, Artificial Sequence
  ENSG00000180354_11 (sequence is synthesized)
taaaatgaaacattttaccttctctctttctaatgagatggccgcttgttaaatcatgaaaacatccagaattcaagtgccgcttaaactttgaagccatagataaatttgttagaaaag

SEQ ID NO: 634406 - DNA, 120 bp, Artificial Sequence
  ENSG00000180354_12 (sequence is synthesized)
tagaaaagtaaaccaggattaaaagtttttaaaaatatggtagaatccttctttactttttaagtcttttatttaaaaaaaaaaagtcaaaaaaaggattccattgtgtaatttatttaa

SEQ ID NO: 634407 - DNA, 120 bp, Artificial Sequence
  ENSG00000180354_13 (sequence is synthesized)
tcacatgtttcgagggacttaattgtggtgtatttgtaaagggacacgaaggtaggaatcttttaatcgtgggttagcttggttaacagggaacgttttaataatcaagatactcagaca

SEQ ID NO: 634408 - DNA, 120 bp, Artificial Sequence
  ENSG00000180354_14 (sequence is synthesized)
actcacagaaacaacttctgtaataactggaaatactgctgttatcgtttagccaacaattacttactggggacatcctttgtaatgctaacatggaattattcctggacccttctgcat

SEQ ID NO: 634409 - DNA, 120 bp, Artificial Sequence
  ENSG00000180354_15 (sequence is synthesized)
ccctggttttagttaacctaggatgcggaatgcctcctttacaacactagattaaacctagcatctggggtgggtacgtttaaacagtcacacatgtgcctgttaggttgtgaaagtttt

SEQ ID NO: 634410 - DNA, 120 bp, Artificial Sequence
  ENSG00000180354_16 (sequence is synthesized)
gaattaaaaacaagcagtagcagcagaggccacagaacttatgggagtcttgtatatcttccaggcatgtcggtgtaaacctgattgtctcgacattttctgtttaattgattggtgctg

SEQ ID NO: 634411 - DNA, 120 bp, Artificial Sequence
  ENSG00000180354_17 (sequence is synthesized)
tgaggagttcggctgctcgtggtaaaacagcgtactccagttttaagtcatcgggtaaaataataggacagtgatttccatctgtgcttcagtacccactttgtgttcttttcttgaaaa

SEQ ID NO: 634412 - DNA, 120 bp, Artificial Sequence
  ENSG00000180354_18 (sequence is synthesized)
gtcatactaaaggttaatttcaagtaaaatgaatttccttccaagtagcctattagtaaaacacaacttagtgtttcatccattggggtgagcatatactgccctttgcagccctgcctg

SEQ ID NO: 634413 - DNA, 120 bp, Artificial Sequence
  ENSG00000180354_19 (sequence is synthesized)
tgttctgattggctccattcatgagcaaaggtgattgtgagctgtatattacacaggtgtcgcccaggtttcgtaacctccactttaatgcagtaagccgcaagaatgacttctgcaagt

SEQ ID NO: 634414 - DNA, 120 bp, Artificial Sequence
  ENSG00000180354_20 (sequence is synthesized)
gaaatgaggaagcttcactagcttgctccattggaaggtaaactgaaattttatacgttgaagcttaaaatctaaatttatgtatgtttggaaatggaatggacattaacataaaatgta

SEQ ID NO: 634415 - DNA, 120 bp, Artificial Sequence
  ENSG00000180354_21 (sequence is synthesized)
ttttatcaaaaaagtgtttagactttgaccaaatacatgttggtattatcatgttaatgttctctgtttataaaaattgagtggagatagatagactcggccattctgtgggctgatgag

SEQ ID NO: 634416 - DNA, 120 bp, Artificial Sequence
  ENSG00000180354_22 (sequence is synthesized)
aattctgggctttgttttgcaccaggggtaggaaacagagaacatgtctgtatgttacttaatctccatagcaaaatcccaaacagcattagcagatcgaattgtttcttctaagacttc

SEQ ID NO: 634417 - DNA, 120 bp, Artificial Sequence
  ENSG00000180354_23 (sequence is synthesized)
ctttttctgaatgtgtgcacatcccttctcgtgctcacacacttgcccacacactcacttcttcctgcgctgtggctgctctaagcagggctgtgcatggtgcaaagctgcagtcagtga

SEQ ID NO: 634418 - DNA, 120 bp, Artificial Sequence
  ENSG00000180354_24 (sequence is synthesized)
cctggcagcctgtggtttctgttatggaaatggttccatggtgaaacacatccctgacccttcacagacttacacatttactcaccaggaggtggcagcggtgtgggaggaggagtgttg

SEQ ID NO: 634419 - DNA, 120 bp, Artificial Sequence
  ENSG00000180354_25 (sequence is synthesized)
accttggacgcaggagagacacctgggttctagttcaagtcggccaaggactgtgtgaccttgacaagtctaactggtctgtgaacaaggggcatttgcccttccagctgtaaacactgc

SEQ ID NO: 634420 - DNA, 120 bp, Artificial Sequence
  ENSG00000180354_26 (sequence is synthesized)
ccttctgtgcctgccttatgtgtgtgtgtgagtaaggagcaacagtcaaggaaacttttagggattcgagaagaaaatacatgtgggatcttgccaaggtgctgcctttaggatgctgac

SEQ ID NO: 634421 - DNA, 120 bp, Artificial Sequence
  ENSG00000180354_27 (sequence is synthesized)
ccctgcactaccttagaacatgttgatctgtgagtgcccaagcccctgagggctcgatctcatggggcagatgaaattctcttccttagaggaaagggaaaggtgaggccccagaggact

SEQ ID NO: 634422 - DNA, 120 bp, Artificial Sequence
  ENSG00000180354_28 (sequence is synthesized)
tatctcagctgtacatgctctgcctgtggagacatggcttttctttgtgctgtggcagactggggctttggaagtggtgtatgtttaacttacctgagagtgagagatgtgtaggaagaa

SEQ ID NO: 634423 - DNA, 120 bp, Artificial Sequence
  ENSG00000180354_29 (sequence is synthesized)
tagctggaagaaagtgaaagatgagtgccagtacttttggcctgttatccagtagagagaaagtgacagtgaaagtaacgtgagagagaaagagtgtgtgtgtatatgtgagagagagaa

SEQ ID NO: 634424 - DNA, 120 bp, Artificial Sequence
  ENSG00000180354_30 (sequence is synthesized)
agaaagagaaaggaatgcttgattgcttgttgttcactgggccagctctgaaatccaaaatcatgccttgataacattacaaaaccgtgatcctgggtttgagtgaatcctagagacatt

SEQ ID NO: 634425 - DNA, 120 bp, Artificial Sequence
  ENSG00000180354_31 (sequence is synthesized)
gttcttatggccgcctggtttccgcagcctgatcaccatatcgagcagacgtcaaggaatcagagtgaagtacggagccagggagggaggtgaggccccgtgtagtgcctgtcaccactg

SEQ ID NO: 634426 - DNA, 120 bp, Artificial Sequence
  ENSG00000180354_32 (sequence is synthesized)
tggattcacctgcactcaggtgtccactcctgtctcccaggcccaaagcagcacatggtgcaatggaaaagtctcttatgtagggatcctccttgtgtcctggtgccagaattagatttc

SEQ ID NO: 634427 - DNA, 120 bp, Artificial Sequence
  ENSG00000180354_33 (sequence is synthesized)
cagtgtacttcaacgaaaacctctctcctttatagttgctgtcatctttcatgtataaacagaaaccgtctctagcacaatatatttctgaatattgtttctgtttcataagagcacaat

SEQ ID NO: 634428 - DNA, 120 bp, Artificial Sequence
  ENSG00000180354_34 (sequence is synthesized)
gtacatggacctaggggagctgtggtcccaagtgtcattggaatttatattttaggaataggctttgcatgttaaaattcacaagttgggaaactggtatgaacagatctgatttcttac

SEQ ID NO: 634429 - DNA, 120 bp, Artificial Sequence
  ENSG00000180354_35 (sequence is synthesized)
agagaggcatgaaggaataggcaggacttaacttggggtgggaggagatgaataagggagaatgggagagttggggtctgacagttaccacctgagccccaggaaaactgttttcatttt

SEQ ID NO: 634430 - DNA, 120 bp, Artificial Sequence
  ENSG00000180354_36 (sequence is synthesized)
cacggctgtctcactgggggcctgctttcctcaaaggaactgactgtatgttgagaggcaatgccttgtgttggcatggctttgccactttaaaagtgccccccagccaaggagaccaac

SEQ ID NO: 634431 - DNA, 120 bp, Artificial Sequence
  ENSG00000180354_37 (sequence is synthesized)
aggaaccctgctcatctggtagggctctttccttcagtaaaaccagctgccagcctgagaagcctgtctttcccaaatgcaggcagatctgagaggggctccaggcacccggcaggtaaa

SEQ ID NO: 634432 - DNA, 120 bp, Artificial Sequence
  ENSG00000180354_38 (sequence is synthesized)
tcacaaagcaaacttgggtgtccttggcagcggggaggaagcaggagtgccccctcaggccagagggcagggccaacctcctcactgtgcttcaaggttgtagaaagagcacaattaatg

SEQ ID NO: 634433 - DNA, 120 bp, Artificial Sequence
  ENSG00000180354_39 (sequence is synthesized)
cttaagcgatcacagacccctctcccctgcagtgggtgttagctccaaagagatgccattgctgatcacccagtcttcggagaagcctaaaatttctttgaattaaaaactgatcctttt

SEQ ID NO: 634434 - DNA, 120 bp, Artificial Sequence
  ENSG00000180354_40 (sequence is synthesized)
tcataaagacccagtcacttctcccagtttagtgataacaggtatgacacaagaagctgaagtcttttagattttatagagagtaattctgaaacctgccagaatgctggtagcctgtgg

SEQ ID NO: 634435 - DNA, 120 bp, Artificial Sequence
  ENSG00000180354_41 (sequence is synthesized)
tgtccatggcaatgggtgtccatggtaaaatatctatagcttctgctcactgggcaaatataaaagacaacatattatttaacataatatgttgtcttttatatttttatttaaatctgg

SEQ ID NO: 634436 - DNA, 120 bp, Artificial Sequence
  ENSG00000180354_42 (sequence is synthesized)
attacgaaaatatagtacccatgagcatttcatgttagaaaccccatttaaagcactataaggctgaataggcacaagcgattaaaagtagatgccaggccacataaaaataaatgtttt

SEQ ID NO: 634437 - DNA, 120 bp, Artificial Sequence
  ENSG00000180354_43 (sequence is synthesized)
aatttacttagagctgtattcaagttgtttgataccagacagaaagctgacagtctgttctttgtaaactgcctttccctgtttttctgttttgttttgtttctcaagtttcatttttta

SEQ ID NO: 634438 - DNA, 120 bp, Artificial Sequence
  ENSG00000180354_44 (sequence is synthesized)
ctaagccccttctgacacctaggcagataaagataagagtagtgcgcagtacaaatgtcagctctgaagaggaggaagtaaatcttcaatgctagggcagatcttcactatccgtgatcc

SEQ ID NO: 634439 - DNA, 120 bp, Artificial Sequence
  ENSG00000180354_45 (sequence is synthesized)
atcttcactatccgtgatccagtcttaatttgagcatgagagcaaaatttagtcatctacacaagaagcaaaagcaaggaatagttgttgggtttttgttttttggttgttgtttttttt

SEQ ID NO: 634440 - DNA, 120 bp, Artificial Sequence
  ENSG00000180354_46 (sequence is synthesized)
tgccggtagggtatgtgtgctttctttgccttcctatttcctttcaaagaaatctcttgtaaattacaaaactgtgaattgggttgccaaaaactgttgcccttcgttagatgcttcaaa

SEQ ID NO: 634441 - DNA, 120 bp, Artificial Sequence
  ENSG00000180354_47 (sequence is synthesized)
cagtgtaaatcctatactgcaccctgtccacctctgctccctcctccctcccctgagagtgaggacctcatccgaccatgtaattaccattcgcttgctattaaagagcctttcaaactc

SEQ ID NO: 634442 - DNA, 120 bp, Artificial Sequence
  ENSG00000180354_48 (sequence is synthesized)
aggattttgaaggcaaaggctctggtttctccttccccatgtctgaaaaccgcccttagcctgcacaaggtgaacagtggaaatcattggtgaggaatggccacccactgccctctttac

SEQ ID NO: 634443 - DNA, 120 bp, Artificial Sequence
  ENSG00000180354_49 (sequence is synthesized)
gcaagaatggctcatggttctggatttcactggggagaagcccacacagccttcctgctgggaccgcccaggccatacccaaagaaatgactccaaagacagtaagtgggccaggaagac

SEQ ID NO: 634444 - DNA, 120 bp, Artificial Sequence
  ENSG00000180354_50 (sequence is synthesized)
aaaaggctgttctcttgccatgaatatgtgtatccaaccatcgttcagaagtaagaagtattatattatttgtatcaggcctttctcttgaggccacccagattttaaatattttcccat

SEQ ID NO: 634445 - DNA, 120 bp, Artificial Sequence
  ENSG00000180354_51 (sequence is synthesized)
gggtgggcagatgattccttgggtagaatggaactttctccaagttctggaggctctaatggacaagatgccaacctcgggagttttcctagccggacctcttgaatctgtcccaggcca

SEQ ID NO: 634446 - DNA, 120 bp, Artificial Sequence
  ENSG00000180357_0 (sequence is synthesized)
gcaatgatgttgtccactgggcatgtactgaccaatgtggcaggtctgagaacatagctgaagctgaaaataggaaagctgggggcaaggaagagccttgaatcttgaggtgggacgttg

SEQ ID NO: 634447 - DNA, 120 bp, Artificial Sequence
  ENSG00000180357_1 (sequence is synthesized)
actctaagatgtccttgagcagtggagcctccggagggaaaggagtggatgcaaacccggttgagacatacgacagtggggatgaatgggacattggagtagggaatctcatcattgacc

SEQ ID NO: 634448 - DNA, 120 bp, Artificial Sequence
  ENSG00000180357_2 (sequence is synthesized)
tggacgccgatctggaaaaggaccagcagaaactggaaatgtcaggctcaaaggaggtggggataccggctcccaatgctgtggccacactaccagacaacatcaagtttgtgaccccag

SEQ ID NO: 634449 - DNA, 120 bp, Artificial Sequence
  ENSG00000180357_3 (sequence is synthesized)
tgccaggtcctcaagggaaggaaggcaaatcaaaatccaaaaggagtaagagtggcaaagacactagcaaacccactccagggacttccctgttcactccaagtgagggggcagctagca

SEQ ID NO: 634450 - DNA, 120 bp, Artificial Sequence
  ENSG00000180357_4 (sequence is synthesized)
agaaagaggtgcaggggcgctcaggagatggtgccaatgctggaggcctggttgctgctattgctcccaagggctcagagaaggcggctaaggcatcccgcagtgtagccggttccaaaa

SEQ ID NO: 634451 - DNA, 120 bp, Artificial Sequence
  ENSG00000180357_5 (sequence is synthesized)
aggagaaggagaacagctcatctaagagcaagaaggagagaagcgaaggagtggggacttgttcagaaaaggatcctggggtcctccagccagttcccttgggaggacggggtggtcagt

SEQ ID NO: 634452 - DNA, 120 bp, Artificial Sequence
  ENSG00000180357_6 (sequence is synthesized)
atgatggaagtgcaggggtggatacaggagctgtggagccacttgggagtatagctattgagcctggggcagcgctcaatcctttgggaactaaaccggagccagaggaaggggagaatg

SEQ ID NO: 634453 - DNA, 120 bp, Artificial Sequence
  ENSG00000180357_7 (sequence is synthesized)
agtgtcgcctgctaaagaaagtcaagtctgaaaagatggagtcccctgtttccacaccagcagtgctgccaatacaccttttggtgccagtggtcaacaatgacatctcatctccctgtg

SEQ ID NO: 634454 - DNA, 120 bp, Artificial Sequence
  ENSG00000180357_8 (sequence is synthesized)
agcagatcatggttcgtacccgatcagttggggtcaacacatgtgatgtggctctggccacagagcctgagtgcttgggcccctgtgaacctggaactagcgtcaaccttgaaggcatcg

SEQ ID NO: 634455 - DNA, 120 bp, Artificial Sequence
  ENSG00000180357_9 (sequence is synthesized)
tgtggcaggaaacagaagatgggatgttggtggtaaatgtaacgtggaggaacaagacatatgtaggtacactccttgactgcacacgacatgattgggcacccccaaggttctgtgact

SEQ ID NO: 634456 - DNA, 120 bp, Artificial Sequence
  ENSG00000180357_10 (sequence is synthesized)
ccccgaccagtgacctggaaatgcgcaatggccggggtagaggcaaacgcatgcgtcccaacagtaatacacctgtcaatgagacagccacagcctctgacagcaaagggaccagtaaca

SEQ ID NO: 634457 - DNA, 120 bp, Artificial Sequence
  ENSG00000180357_11 (sequence is synthesized)
gcagcaaaacccgggcaggagccaatagcaaaggccgtcggggcagccagaattcttcagagcaccgcccacctgccagcagcacttctgaggatgtcaaggccagcccttcctcagcta

SEQ ID NO: 634458 - DNA, 120 bp, Artificial Sequence
  ENSG00000180357_12 (sequence is synthesized)
ataagcggaaaaacaaacccctttcagacatggagctgaattctagctcagaggactccaaagggagcaagcgtgtccgtactaattccatgggctcagccactggcccccttcctggga

SEQ ID NO: 634459 - DNA, 120 bp, Artificial Sequence
  ENSG00000180357_13 (sequence is synthesized)
caaaggtagaacccactgttctggacagaaactgcccctcccccgtcctaattgactgtccccacccaaactgcaacaagaagtacaagcacatcaatggacttaagtaccaccaagctc

SEQ ID NO: 634460 - DNA, 120 bp, Artificial Sequence
  ENSG00000180357_14 (sequence is synthesized)
atgcccatacagatgatgacagcaagccggaagcggatggggacagtgagtacggagaggaacctattctccatgcagatcttgggagctgcaacggtgcatctgtctcacaaaaaggtt

SEQ ID NO: 634461 - DNA, 120 bp, Artificial Sequence
  ENSG00000180357_15 (sequence is synthesized)
ccttgtcccctgcccgctcagctacccccaaagttcgacttgtagagccccatagcccttctccttcaagcaaattcagcacaaaaggcctctgtaagaaaaagttgagtggggaagggg

SEQ ID NO: 634462 - DNA, 120 bp, Artificial Sequence
  ENSG00000180357_16 (sequence is synthesized)
acacagaccttggggccttatccaatgatggctctgatgatggaccctcagtgatggatgaaacaagcaatgatgcctttgattctttagaaaggaagtgtatggaaaaagaaaaatgta

SEQ ID NO: 634463 - DNA, 120 bp, Artificial Sequence
  ENSG00000180357_17 (sequence is synthesized)
aaaaaccctctagtttaaaacctgaaaagattccttccaagagcctaaagtcagcccgtcccattgcccctgccatccccccacagcaaatctacaccttccagacagccaccttcacag

SEQ ID NO: 634464 - DNA, 120 bp, Artificial Sequence
  ENSG00000180357_18 (sequence is synthesized)
cagcgagcccaggctcttcctcaggcttgaccgccacagtggcacaagccatgcccaacagtccccaactcaagcccattcagcccaagcccactgttatgggagaacctttcacagtca

SEQ ID NO: 634465 - DNA, 120 bp, Artificial Sequence
  ENSG00000180357_19 (sequence is synthesized)
accctgccttgactccagccaaggacaagaaaaagaaagacaaaaaaaagaaggaatcttcaaaggaacttgaaagtcctctgacccctgggaaggtgtgtcgagcagaggaaggcaaaa

SEQ ID NO: 634466 - DNA, 120 bp, Artificial Sequence
  ENSG00000180357_20 (sequence is synthesized)
gcccattcagggaatcttcaggagatgggatgaaaatggaggggctcctaaatggctcatcagacccccaccaaagccgactggctagcatcaaggctgaagccgacaagatctacagtt

SEQ ID NO: 634467 - DNA, 120 bp, Artificial Sequence
  ENSG00000180357_21 (sequence is synthesized)
tcacggacaatgcccccagcccttccattggaggcagtagccgccttgaaaacactacccctactcagcccctgactcccttacatgtggtgacccagaatggagctgaagccagctcag

SEQ ID NO: 634468 - DNA, 120 bp, Artificial Sequence
  ENSG00000180357_22 (sequence is synthesized)
tcaaaaccaacagccctgcatactctgacatctctgatgctggggaggatggggagggcaaggtagacagtgtcaaatcaaaggacgccgaacagttggttaaagaaggggctaagaaaa

SEQ ID NO: 634469 - DNA, 120 bp, Artificial Sequence
  ENSG00000180357_23 (sequence is synthesized)
ctctttttccccctcagcctcagagcaaagactcaccatattaccaaggctttgagagttactattctccaagttatgcacagtccagccctggggctctgaaccccagcagccaggcag

SEQ ID NO: 634470 - DNA, 120 bp, Artificial Sequence
  ENSG00000180357_24 (sequence is synthesized)
gagtggagagccaggccctgaagacaaaaagggatgaggaacctgagagcatagaagggaaagtgaagaacgatatctgtgaagaaaagaagcccgagctgagcagttccagtcagcagc

SEQ ID NO: 634471 - DNA, 120 bp, Artificial Sequence
  ENSG00000180357_25 (sequence is synthesized)
cctcggtcatccagcagcgtcccaatatgtacatgcagtccctgtactacaaccagtatgcctatgtacccccctatggctacagcgaccagagttaccacacccaccttctgagcacta

SEQ ID NO: 634472 - DNA, 120 bp, Artificial Sequence
  ENSG00000180357_26 (sequence is synthesized)
acacggcttaccggcagcagtacgaagaacagcagaaacgccagagcttagagcagcagcagcggggagtggacaagaaggcagagatgggcctgaaggagcgggaggcagcactcaagg

SEQ ID NO: 634473 - DNA, 120 bp, Artificial Sequence
  ENSG00000180357_27 (sequence is synthesized)
aagagtggaagcaaaagccgtcaattccaccaactctcaccaaggcccccagcctgacagacctggtgaaatcaggacctggcaaggccaaggagccaggggctgacccagccaaatcag

SEQ ID NO: 634474 - DNA, 120 bp, Artificial Sequence
  ENSG00000180357_28 (sequence is synthesized)
tcatcattcccaagttagatgactcttcaaaactcccgggccaggcccctgaaggccttaaagtgaagctgagtgatgccagccacctaagcaaggaggcctctgaggccaagacaggtg

SEQ ID NO: 634475 - DNA, 120 bp, Artificial Sequence
  ENSG00000180357_29 (sequence is synthesized)
ctgagtgtggtcgacaggcagagatggatccaatactctggtaccgacaggaggcagagccccggatgtggacatatgtttatcctgccaagtactcagacatcaagtcagaggatgagc

SEQ ID NO: 634476 - DNA, 120 bp, Artificial Sequence
  ENSG00000180357_30 (sequence is synthesized)
ggtggaaggaggagcgggaccgcaaattgaaggaggaaaggagtcggagtaaggactctgtccccaaggaagatgggaaggaaagcacaagtagtgactgcaagctgcccacgtcagagg

SEQ ID NO: 634477 - DNA, 120 bp, Artificial Sequence
  ENSG00000180357_31 (sequence is synthesized)
agtctcgccttgggagcaaggagccccggccaagtgtccatgtgcctgtgtcctccccacttacccagcaccagtcctacatcccctacatgcacggctattcctacagtcagtcctacg

SEQ ID NO: 634478 - DNA, 120 bp, Artificial Sequence
  ENSG00000180357_32 (sequence is synthesized)
accccaaccaccccagctaccggagcatgcctgctgtgatgatgcagaactacccaggttcctacctgccttccagctactctttttccccatatggcagcaaggtctcaggtggtgaag

SEQ ID NO: 634479 - DNA, 120 bp, Artificial Sequence
  ENSG00000180357_33 (sequence is synthesized)
atgctgacaaggcacgagccagccccagtgtgacttgtaaatccagctcagagtccaaagccctggacatcttgcagcagcatgccagtcactacaagagcaagtctcccacgataagtg

SEQ ID NO: 634480 - DNA, 120 bp, Artificial Sequence
  ENSG00000180357_34 (sequence is synthesized)
ataaaacttctcaggagagagatcgaggaggctgtggggtggttgggggtggtggcagctgtagcagcgtcgggggagcaagtgggggtgaacggagtgttgaccggccccgcacctctc

SEQ ID NO: 634481 - DNA, 120 bp, Artificial Sequence
  ENSG00000180357_35 (sequence is synthesized)
cttcccagcgcctgatgtccacacaccaccaccaccaccacttggggtactcattgctcccagcacagtacaacttaccctatgcagcagggctttcttctacagccattgttgccagcc

SEQ ID NO: 634482 - DNA, 120 bp, Artificial Sequence
  ENSG00000180357_36 (sequence is synthesized)
gtgctgaaggtgccgtttagacatcagttaaatggtgttgatcatcctgtttgccgtttccaccatgactgaaggcagacccttggctatctcacctccaccagacctccggactacctg

SEQ ID NO: 634483 - DNA, 120 bp, Artificial Sequence
  ENSG00000180357_37 (sequence is synthesized)
accctacctcttcctcaggagctggagagctggtacttagcaaaaatatttattctctcagccacagttatgactattgtggcctctgtggagatgaaggcacgggaagcaaccagggga

SEQ ID NO: 634484 - DNA, 120 bp, Artificial Sequence
  ENSG00000180357_38 (sequence is synthesized)
acatggcctcagcccagagaagccactgctctgttccccaagcccttggtctgctgctggagcagtaccagcccccccgcccaccagggagggacccccacccccaagcactgggtaagg

SEQ ID NO: 634485 - DNA, 120 bp, Artificial Sequence
  ENSG00000180357_39 (sequence is synthesized)
tctgaagacagcacagcagccatacccctcaccatcattaccaccatcaccagattctgcatctccctagtgctttgcaccctgggaattggcagcatgtggaggaactagaatctcagg

SEQ ID NO: 634486 - DNA, 120 bp, Artificial Sequence
  ENSG00000180357_40 (sequence is synthesized)
aaagaaattgggggttgttttctacataattgtgaaaacaaggtcttcaaatgtggagacttctccccatttacatgagcacatataaacgctcacaacctagcctggaaaggaagacca

SEQ ID NO: 634487 - DNA, 120 bp, Artificial Sequence
  ENSG00000180357_41 (sequence is synthesized)
aggcatctgccccaacatggccttgagctgcctgtgaggcagggggcaggggttccaacaccagcacagggctccccagggacactgggagcaagctggtgctggagcatgaatgacgtc

SEQ ID NO: 634488 - DNA, 120 bp, Artificial Sequence
  ENSG00000180357_42 (sequence is synthesized)
tgtgaagtagaacctgcgtccccactaagtcctgctgcttcttattccccaactccttgcccttttcccttccctcctaaccccttggtgcctttcccagggggatccccacactggtct

SEQ ID NO: 634489 - DNA, 120 bp, Artificial Sequence
  ENSG00000180357_43 (sequence is synthesized)
tgcctcttcttttccactgcttggctcttaagcctcaggcagataaactagtattccccccagcttggggaaccttggagtctgccaggtcaccttagggcaaggcccagaaggcagccc

SEQ ID NO: 634490 - DNA, 120 bp, Artificial Sequence
  ENSG00000180357_44 (sequence is synthesized)
ctgggagcacccagcagttcttggagatgtcctgtcatctagccatctgatatcttcctcatttgaggccacagatatatacagcccaattcctctgtctacaagtacatgattttatat

SEQ ID NO: 634491 - DNA, 120 bp, Artificial Sequence
  ENSG00000180357_45 (sequence is synthesized)
agctcagtctataacctccatgtgggccaatataagctgtgtttcttggtaacacatattttgtttgaggggccactggccatgggaggttatttgttccttagaccctggaataacaca

SEQ ID NO: 634492 - DNA, 120 bp, Artificial Sequence
  ENSG00000180357_46 (sequence is synthesized)
tccaagccattacttattagagtctcagaatgtactcagtggagctgtgctttgaggcagccaacatttctctgctctccttagaaatgcagtctcccaatggaagctttatactctttg

SEQ ID NO: 634493 - DNA, 120 bp, Artificial Sequence
  ENSG00000180357_47 (sequence is synthesized)
tactgggaaagtgaggatgatttggtagctttattggggtcatgtcttccccaaggtgtggggagcttagcttacttggcttttgaggtatcatccctctgttctcccctcctatctttc

SEQ ID NO: 634494 - DNA, 120 bp, Artificial Sequence
  ENSG00000180357_48 (sequence is synthesized)
catgaccctctggattgagagagagagataaagactgacagacaccagtgtaggctggaaaagggagtgtgtgaccagagtgccaaaagtgactaggagcaggaacttggctccgactca

SEQ ID NO: 634495 - DNA, 120 bp, Artificial Sequence
  ENSG00000180357_49 (sequence is synthesized)
gtttggaaaatgggaaataggggacagtaagcacaatgcccagtagtagttgatttccaaggaccctggaaccctacacttgagaggcttagggtcaccatctgctcaagaggatcccct

SEQ ID NO: 634496 - DNA, 120 bp, Artificial Sequence
  ENSG00000180357_50 (sequence is synthesized)
ctgatctacaggccttttccctaggtttctgcctcctcgtttttgttcaagttgggttctgagtcctccccaaaaaccattgttttagacctcttggcagggccccaaaacagcctccct

SEQ ID NO: 634497 - DNA, 120 bp, Artificial Sequence
  ENSG00000180357_51 (sequence is synthesized)
catacccatcattccctctgccttctgctgccctcatgggcagtgctctgagcagtgacctccctttcctccgtggaagtagctagtgcagacaccgtcatcccaccccacctgagtcac

SEQ ID NO: 634498 - DNA, 120 bp, Artificial Sequence
  ENSG00000180357_52 (sequence is synthesized)
cccaaccaagagggtgactgaatttcagcctgattatgccctcctggggctcctgtgaggtggagccaaggttccctctctgttcctgtttgtttttaaatattgttgtgtgttttgtat

SEQ ID NO: 634499 - DNA, 120 bp, Artificial Sequence
  ENSG00000180357_53 (sequence is synthesized)
ctgtggcactggcctgcagcatactctgtatatattgtaaagaaaccgttaggagtaattttcttttgcattgggcaggcatggccctgcattcctgccctttccactcattctgtaaca

SEQ ID NO: 634500 - DNA, 120 bp, Artificial Sequence
  ENSG00000180357_54 (sequence is synthesized)
cagaggacgaacttctgtattagctgggcagccttgggttctccagaagagaacaggtttttcttttcctttttaatttttcttcttaaacatttggctctttgatcctcatatccaagt

SEQ ID NO: 634501 - DNA, 120 bp, Artificial Sequence
  ENSG00000180357_55 (sequence is synthesized)
ctcccctgaagagtaggagctgctcagaagagcaggtgaaagccaccatggcagatcctgatgcctgccgggcctagtcttccctctgaaataacatgaagcagcagctgtggagattct

SEQ ID NO: 634502 - DNA, 120 bp, Artificial Sequence
  ENSG00000180357_56 (sequence is synthesized)
tgacaagtgctgagtgaaagatttgctgcccacctctacatggggaggagaaacacaggtgggagctacctgtggcatccatgacctagtcagagggatgagatgctcagcaggggtccc

SEQ ID NO: 634503 - DNA, 120 bp, Artificial Sequence
  ENSG00000180357_57 (sequence is synthesized)
catcctatcccaccccacaaacaaaggctggaaaaatttgctaccaagggccaagaccaccagaccaagcctgtttatgagccacccctgcccaggccctcacagacattgctcacgggg

SEQ ID NO: 634504 - DNA, 120 bp, Artificial Sequence
  ENSG00000180357_58 (sequence is synthesized)
cttcccatagaggagaagctaaagagggagggggcctcatccccagatagatcaggcaaggcttggagagctgctctttaggatccacatcaactacttcctcattttaaggtatggcag

SEQ ID NO: 634505 - DNA, 120 bp, Artificial Sequence
  ENSG00000180357_59 (sequence is synthesized)
ttcccttcatccccttttcctgccttgtacatgtacatgtatgaaatttccttctcttaccgaactctctccacacatcacaaggtcaaagaaccacacgcttagaagggtaagagggca

SEQ ID NO: 634506 - DNA, 120 bp, Artificial Sequence
  ENSG00000180357_60 (sequence is synthesized)
ccctatgaaatgaaatggtgatttcttgagtctcttttttccacgtttaaggggccatggcaggacttagagttgcgagttaagactgcagagggctagagaattatttcatacaggctt

SEQ ID NO: 634507 - DNA, 120 bp, Artificial Sequence
  ENSG00000180357_61 (sequence is synthesized)
tgaggccacccatgtcacttatcccgtataccctctcaccatccccttgtctactctgatgcccccaagatgcaactgggcagctagttggccccataattctgggcctttgttgtttgt

SEQ ID NO: 634508 - DNA, 120 bp, Artificial Sequence
  ENSG00000180357_62 (sequence is synthesized)
tttaattacttgggcatcccaggaagctttccagtgatctcctaccatgggcccccctcctgggatcaagcccctcccaggccctgtccccagcccctcctgccccagcccacccgcttg

SEQ ID NO: 634509 - DNA, 120 bp, Artificial Sequence
  ENSG00000180357_63 (sequence is synthesized)
ccttggtgctcagccctcccattgggagcaggttggggcgagctggaggcccgggctggaggggcagtgttgctgttcatagattttgttccattggcgttgctctgttgaatttaattt

SEQ ID NO: 634510 - DNA, 120 bp, Artificial Sequence
  ENSG00000180357_64 (sequence is synthesized)
cagtcttcctgattcttcccttctgtaaagtgtacattaccaagttccttgtttttttatatatatatataaatatatatatatacaaactgtactctttttgcctttgtacattcaggc

SEQ ID NO: 634511 - DNA, 120 bp, Artificial Sequence
  ENSG00000180357_65 (sequence is synthesized)
aagaagagaaaataaatctttttaagagacaatcacaaatctgtgagggctgctggttatttctcctggagtttgctgctgagctgcctcttccttcctcccaattttcctgttctccct

SEQ ID NO: 634512 - DNA, 120 bp, Artificial Sequence
  ENSG00000180357_66 (sequence is synthesized)
cagctctcctgatcttcctggccctgctccatatgcatcctcagcttcactttccctggctgatggcaagctgttgaatccagtgtccagactacctgccttgtaacccttttctgccca

SEQ ID NO: 634513 - DNA, 120 bp, Artificial Sequence
  ENSG00000180357_67 (sequence is synthesized)
gcattgttttctggcttggccactggcttagcccaggagctttactctgtgccctggcctcccctctcttcacctttagatttccattcaccgaagtggctttggacccctgggtactct

SEQ ID NO: 634514 - DNA, 120 bp, Artificial Sequence
  ENSG00000180357_68 (sequence is synthesized)
gggacctgtttcctggaggccctggcttgggacactcacctgtgaaactatgcagctgggagctctctgcctaagagtttgcactatttaaacctgcctgggagttaggacggatggttt

SEQ ID NO: 634515 - DNA, 120 bp, Artificial Sequence
  ENSG00000180357_69 (sequence is synthesized)
taggaatgaccggaaaactacccctaaaactcccccgacattccagcctctagaatgctctgatccagagctcagtggatgattcccagctggtggactcctgtggctaccccatcagaa

SEQ ID NO: 634516 - DNA, 120 bp, Artificial Sequence
  ENSG00000180357_70 (sequence is synthesized)
caagggctaagggtttatgggtcaagagtatttgatcagaattttaaagggtggtatactctgaaacacagcccaaccaaaccattgtttggccgctttctcttttcctctaccttcctc

SEQ ID NO: 634517 - DNA, 120 bp, Artificial Sequence
  ENSG00000180357_71 (sequence is synthesized)
atccccacttttttccctttctctctacttcctcttcttaattggctttggaattgaaatatatttttaaattatttgttgtatttattgaataaagtttttaatgtccctgttcttaaa

SEQ ID NO: 634518 - DNA, 120 bp, Artificial Sequence
  ENSG00000180357_72 (sequence is synthesized)
agtctgaaaaggtaagaggtggccagatatggctgcccactgactgccagtcagaactgccctggactaactgccaaatactatgtgtactctgtgggaggctcattagtgtgtgggtaa

SEQ ID NO: 634519 - DNA, 120 bp, Artificial Sequence
  ENSG00000180357_73 (sequence is synthesized)
tgaccaattacaaggtcagagcagctggtaatgataatgtggttttcttccaaattagaggattcccctacagactcatttacagcaggcctggacattgtggaacaggatatttgttgt

SEQ ID NO: 634520 - DNA, 120 bp, Artificial Sequence
  ENSG00000180357_74 (sequence is synthesized)
tgggggcagctactttgtagaatgaactttctgtagtctgagttgagaccttcccaccttgtctttgcccacctcagacacttgttggtagagattggcatcagacctttatttgtttcc

SEQ ID NO: 634521 - DNA, 120 bp, Artificial Sequence
  ENSG00000180357_75 (sequence is synthesized)
cagcttgactggcatttcatcatcagactcataatagttgataaacaatacgcctttggtgataatgtagattgagtacggttcttgatgggataaatggtgctgttgggtctctggtag

SEQ ID NO: 634522 - DNA, 120 bp, Artificial Sequence
  ENSG00000180357_76 (sequence is synthesized)
aacaaagggctaaatttcatggcatatctacgaagtgttctattgccggctaccaaagagcgaaggggcacattttgagggcaagaggtactcattgtactttgaggtacttagatctta

SEQ ID NO: 634523 - DNA, 120 bp, Artificial Sequence
  ENSG00000180357_77 (sequence is synthesized)
tgagttattgttgtggttatgacagtttggcctaggaagagattggccattaaaggtgtagcttcatgccaggtatctcccacaactattaggaatcaaagtctcctcgtggtttaatag

SEQ ID NO: 634524 - DNA, 120 bp, Artificial Sequence
  ENSG00000180357_78 (sequence is synthesized)
ctgccaacagtgtaatgataccttgccttctgcttgacttggaaggacaggtgcctgcagccccaggaggggttagaactgagtccctcctctgggaagatgatcttagttcatgcttta

SEQ ID NO: 634525 - DNA, 120 bp, Artificial Sequence
  ENSG00000180357_79 (sequence is synthesized)
ggaaatggaacttgcagggctggaggagaatgggtgtgagtctagggtcagctcaggcagcattaaacttcagcagcttattcctgcaaaacagtggccttgtggtgagctgttcattgg

SEQ ID NO: 634526 - DNA, 120 bp, Artificial Sequence
  ENSG00000180357_80 (sequence is synthesized)
ctgctcatcctgtgctttcagctgatcccagcagatgcagtataaattgatttctctgtaattagatcagctgcagcagggaatacctatttccatatgtaagtgttaataaataaaggc

SEQ ID NO: 634527 - DNA, 120 bp, Artificial Sequence
  ENSG00000180357_81 (sequence is synthesized)
tggatgtgtatgtttgggtggtggtgccctcttagtgcctgtattccagtggtagctcatgctttctttgctgtcggtattttggtctttgcctctggcacatctgtagctcttagcaac

SEQ ID NO: 634528 - DNA, 120 bp, Artificial Sequence
  ENSG00000180357_82 (sequence is synthesized)
atctgggcttctccagtagcaggtctgtgagtttcttccactaataatacagtggctcattcccttttaccagtggcagctgccagagaggctgcctgtgtttaggtggcagatgctata

SEQ ID NO: 634529 - DNA, 120 bp, Artificial Sequence
  ENSG00000180357_83 (sequence is synthesized)
gtccacttcagcagagtcaggttccagctggttactagcttggctcatcctgtgctggctgtgatttgctattttctctcgggtacagatggataatactgttttaaagaggcttaggag

SEQ ID NO: 634530 - DNA, 120 bp, Artificial Sequence
  ENSG00000180357_84 (sequence is synthesized)
tactagcagttgttgcttctgttccaggcccattagactgttccctacatctggcttcaagaaactcttgccatatatccatattcataatcattattcttcctgtgctaaaaagtactt

SEQ ID NO: 634531 - DNA, 120 bp, Artificial Sequence
  ENSG00000180357_85 (sequence is synthesized)
ctgaggatgaccttcattctcctatctaaattttagagtacttatgttgcaaccttctaagcccagtgatagtctgtggatgaaaggattaatattgcttagctttatgttggatttaag

SEQ ID NO: 634532 - DNA, 120 bp, Artificial Sequence
  ENSG00000180357_86 (sequence is synthesized)
tgtaaatgtccatgattgtctctaacagagaagcaaatggaacccattttctcacatagaggtgcagggactgattgggtggctgcccttcagattataattgggctgaaagatgcagta

SEQ ID NO: 634533 - DNA, 120 bp, Artificial Sequence
  ENSG00000180357_87 (sequence is synthesized)
tgttcagctaagaatacatcctggtgccagggagttttgtcccttaataatgttgctttgccatataagctttgcctcccagggagactctgagaatggggcagcagaatgagaaagaaa

SEQ ID NO: 634534 - DNA, 120 bp, Artificial Sequence
  ENSG00000180357_88 (sequence is synthesized)
agggaaagagactgtgcttcagtttttgaaagatagagaaaattgctggcaattacttttagaagcagaaaatttgctatacagtttcatgtaaccataagcaagaacctgctttctcaa

SEQ ID NO: 634535 - DNA, 120 bp, Artificial Sequence
  ENSG00000180357_89 (sequence is synthesized)
ttccttcccctgttccctcaacccttttggacagtctggtcctgagggtgcctttccatattacctttggctattgaaataaataattatttaaataaatgtttggaagttgctaggaga

SEQ ID NO: 634536 - DNA, 120 bp, Artificial Sequence
  ENSG00000180357_90 (sequence is synthesized)
ttaaaacatgctgtgcagggagagaacatttctggactgggaggagcagaagaggcaagttaaaggaaaggaagttaggaaccatgcagaggagcggtttttgagaaacaacaatctccg

SEQ ID NO: 634537 - DNA, 120 bp, Artificial Sequence
  ENSG00000180357_91 (sequence is synthesized)
gtttggggcataataggtgctcagtgagtatttgatgattagtactataatttataagcaaagtctttgaaaacttctttaaaattttctctctgagaaatgggcttgcctgtggtttgg

SEQ ID NO: 634538 - DNA, 120 bp, Artificial Sequence
  ENSG00000180357_92 (sequence is synthesized)
gacgtttctatgtagggataacaaacagaaccaaaatagcaaaacagatgttttgatataatctaagaattgcatcctctcaactgggaactgtcatgaagaggaagaactcataaaatt

SEQ ID NO: 634539 - DNA, 120 bp, Artificial Sequence
  ENSG00000180357_93 (sequence is synthesized)
tgggaagtttcttgactgaattctgtggtgcagagtagcagtgttgactactagccaatgaggaagatttgaatattgaaattactggctgggcctggtgattcatgcctgtaatcccag

SEQ ID NO: 634540 - DNA, 120 bp, Artificial Sequence
  ENSG00000180357_94 (sequence is synthesized)
atcccagctactggggaggctgaggtggaaggatagcttgagcctgcgaggtggaggttgcattgagctgagacggcaccactggactccagcctaggcaatagagccagaccttgtctc

SEQ ID NO: 634541 - DNA, 120 bp, Artificial Sequence
  ENSG00000180357_95 (sequence is synthesized)
aagtgctgggattacaggcacgagccatcatgccccgccatcagttcaattaaatctagatatcacattcttcctatccttttttattatacatgtcatgatatgggatgttggtggtaa

SEQ ID NO: 634542 - DNA, 120 bp, Artificial Sequence
  ENSG00000180357_96 (sequence is synthesized)
ggaggagcagaagaggcaagttaaaggaaaggaagttaggaaccatgcagaggagcggtttttgagaaacaacaatctccggtttggggcataataggtgctcaatggagtcccctgttt

SEQ ID NO: 634543 - DNA, 120 bp, Artificial Sequence
  ENSG00000180370_0 (sequence is synthesized)
gtcttcctcccccagggttgtggccacgcgcagcggcggcggttgttccgcttcccctccggcccgggccgtcgccattgccgaaggctccctcccctcccctccctggcgtgcgcagga

SEQ ID NO: 634544 - DNA, 120 bp, Artificial Sequence
  ENSG00000180370_1 (sequence is synthesized)
gcgcaggactccgccgccgctgggcctagcggtagcagcggctgctccagcgcggcgtctcttcccgccccgcttccccttccctcccctcccctccccgcaccgcgcgctagcccgggg

SEQ ID NO: 634545 - DNA, 120 bp, Artificial Sequence
  ENSG00000180370_2 (sequence is synthesized)
cagcccgccgggagctctgaccgaggcgcctcgctggggcggggaccttgccttgcccggggccatttcataattctgaatcatgtctgataacggagaactggaagataagcctccagc

SEQ ID NO: 634546 - DNA, 120 bp, Artificial Sequence
  ENSG00000180370_3 (sequence is synthesized)
acctcctgtgcgaatgagcagcaccatctttagcactggaggcaaagaccctttgtcagccaatcacagtttgaaacctttgccctctgttccagaagagaaaaagcccaggcataaaat

SEQ ID NO: 634547 - DNA, 120 bp, Artificial Sequence
  ENSG00000180370_4 (sequence is synthesized)
catctccatattctcaggcacagagaaaggaagtaaaaagaaagaaaaggaacggccagaaatttctcctccatctgattttgagcacaccatccatgttggctttgatgctgttactgg

SEQ ID NO: 634548 - DNA, 120 bp, Artificial Sequence
  ENSG00000180370_5 (sequence is synthesized)
agaattcactggcatgccagaacagtgggctcgattactacagacctccaatatcaccaaactagagcaaaagaagaatcctcaggctgtgctggatgtcctaaagttctacgactccaa

SEQ ID NO: 634549 - DNA, 120 bp, Artificial Sequence
  ENSG00000180370_6 (sequence is synthesized)
cacagtgaagcagaaatatctgagctttactcctcctgagaaagatggctttccttctggaacaccagcactgaatgccaagggaacagaagcacccgcagtagtgacagaggaggagga

SEQ ID NO: 634550 - DNA, 120 bp, Artificial Sequence
  ENSG00000180370_7 (sequence is synthesized)
tgatgatgaagagactgctcctcccgttattgccccgcgaccggatcatacgaaatcaatttacacacggtctgtaattgaccctgttcctgcaccagttggtgattcacatgttgatgg

SEQ ID NO: 634551 - DNA, 120 bp, Artificial Sequence
  ENSG00000180370_8 (sequence is synthesized)
tgctgccaagtctttagacaaacagaaaaagaagactaagatgacagatgaagagattatggagaaattaagaactatcgtgagcataggtgaccctaagaaaaaatatacaagatatga

SEQ ID NO: 634552 - DNA, 120 bp, Artificial Sequence
  ENSG00000180370_9 (sequence is synthesized)
aaaaattggacaaggggcttctggtacagttttcactgctactgacgttgcactgggacaggaggttgctatcaaacaaattaatttacagaaacagccaaagaaggaactgatcattaa

SEQ ID NO: 634553 - DNA, 120 bp, Artificial Sequence
  ENSG00000180370_10 (sequence is synthesized)
cgagattctggtgatgaaagaattgaaaaatcccaacatcgttaactttttggacagttacctggtaggagatgaattgtttgtggtcatggaataccttgctggggggtcactcactga

SEQ ID NO: 634554 - DNA, 120 bp, Artificial Sequence
  ENSG00000180370_11 (sequence is synthesized)
tgtggtaacagaaacgtgcatggatgaagcacagattgctgctgtatgcagagagtgtttacaggcattggagtttttacatgctaatcaagtgatccacagagacatcaaaagtgacaa

SEQ ID NO: 634555 - DNA, 120 bp, Artificial Sequence
  ENSG00000180370_12 (sequence is synthesized)
tgtacttttgggaatggaaggatctgttaagctcactgactttggtttctgtgcccagatcacccctgagcagagcaaacgcagtaccatggtcggaacgccatactggatggcaccaga

SEQ ID NO: 634556 - DNA, 120 bp, Artificial Sequence
  ENSG00000180370_13 (sequence is synthesized)
ggtggttacacggaaagcttatggccctaaagtcgacatatggtctctgggtatcatggctattgagatggtagaaggagagcctccatacctcaatgaaaatcccttgagggccttgta

SEQ ID NO: 634557 - DNA, 120 bp, Artificial Sequence
  ENSG00000180370_14 (sequence is synthesized)
cctaatagcaactaatggaaccccagaacttcagaatccagagaaactttccccaatatttcgggatttcttaaatcgatgtttggaaatggatgtggaaaaaaggggttcagccaaaga

SEQ ID NO: 634558 - DNA, 120 bp, Artificial Sequence
  ENSG00000180370_15 (sequence is synthesized)
attattacagcatcctttcctgaaactggccaaaccgttatctagcttgacaccactgatcatggcagctaaagaagcaatgaagagtaaccgttaacatcactgctgtggcctcatact

SEQ ID NO: 634559 - DNA, 120 bp, Artificial Sequence
  ENSG00000180370_16 (sequence is synthesized)
cttttttccattttctacaagaagccttttagtatatgaaaattattactctttttggggtttaaagaaatggtctgcataacctgaatgaaagaagcaaatgactattctctgaagaca

SEQ ID NO: 634560 - DNA, 120 bp, Artificial Sequence
  ENSG00000180370_17 (sequence is synthesized)
accaagagaaaattgcaaaaagacaagtatgacttttatatgaaccccttctttagggtccagaaggaattgtggactgaatcactagccttaggtctttcagcaaacagcctatcaggg

SEQ ID NO: 634561 - DNA, 120 bp, Artificial Sequence
  ENSG00000180370_18 (sequence is synthesized)
ccatttatcatgtgtgagatttgcattttactttgctgactttgttgtaatagatcccattcattgtcccctttggggtatttccaatacttgaatggcagattggagtttttcagagta

SEQ ID NO: 634562 - DNA, 120 bp, Artificial Sequence
  ENSG00000180370_19 (sequence is synthesized)
tgtgtttcatctgctagtctttctctccttcatagcttttcttttcctggacttgctccttttgagttgcttttgcgtttctcatgcctaggcaagtgtaatagaaattatgtagctcct

SEQ ID NO: 634563 - DNA, 120 bp, Artificial Sequence
  ENSG00000180370_20 (sequence is synthesized)
tatgttggcaaaggagctctatatagtttcactttgtataaaagttaggaccagctgttgttacatgtaatattttagttcagaacttgacctgaaggaagggaagaaaagtatgtgatt

SEQ ID NO: 634564 - DNA, 120 bp, Artificial Sequence
  ENSG00000180370_21 (sequence is synthesized)
tttaccttttttaacaaatgtgaaaaagtcagttttagaaatttcgtggtagtaagttcggcatttgttacatgtatagagagaagactaataatctctatttataactaaatcattgag

SEQ ID NO: 634565 - DNA, 120 bp, Artificial Sequence
  ENSG00000180370_22 (sequence is synthesized)
atagaaaaagattcccattgactgtagacttcttcccattttgtcttcccttctgcctgtttccccttcaggcttggctctaggaaccaaagtgatttgttgttgttccaacctgggctt

SEQ ID NO: 634566 - DNA, 120 bp, Artificial Sequence
  ENSG00000180370_23 (sequence is synthesized)
tgtgactttggttagtgccactaccttcttccctcctttcccccttcaatttggaaataaatttctgtatatgttgcaattttaggtttaggtttgttctttttctttttcattaatcct

SEQ ID NO: 634567 - DNA, 120 bp, Artificial Sequence
  ENSG00000180370_24 (sequence is synthesized)
ctctcacctcacagataccccctcccatggcaaataatataataaccagtgaattttcaggaatttaaaaattagcttttttccacttaaaggagaaaaatatttgggactagcagcaga

SEQ ID NO: 634568 - DNA, 120 bp, Artificial Sequence
  ENSG00000180370_25 (sequence is synthesized)
cttggtgagctctgatacagtgagaagagattatactcatgaaagagaatgttagtgttacagagaagcagccgatagcaaatcgactgtagagacttggcggcggtggcattgccccag

SEQ ID NO: 634569 - DNA, 120 bp, Artificial Sequence
  ENSG00000180370_26 (sequence is synthesized)
gtcgtcagcagtgtggtattatctatgagaacttgagcgacagagtatttcttgatgaatttatagatcatttgagatgttgagttactttagtttagttttgttttgttttttcaaata

SEQ ID NO: 634570 - DNA, 120 bp, Artificial Sequence
  ENSG00000180370_27 (sequence is synthesized)
agtagagactattgtaaaaaacgagaaaggaaaatgaaatgtgcgtgttgatagcaataatttgtttcttttaaagattctaaaaggtctgagacctgtagcattaattatttgagtgcc

SEQ ID NO: 634571 - DNA, 120 bp, Artificial Sequence
  ENSG00000180370_28 (sequence is synthesized)
ctcccttctcccctcccctcccttttctcttctcttttttcctctcctcttcttctcctttattcattgttttgcttttggagtgggtgttgttcaagtatctgtggtttggttctggca

SEQ ID NO: 634572 - DNA, 120 bp, Artificial Sequence
  ENSG00000180370_29 (sequence is synthesized)
ttttgttcccaccatccccttcccccattaacttcccccctgcttgccatcctgcagtagtataaatcatgaataaaaaataattttgctgttgtagtatacattggagaaactggcagg

SEQ ID NO: 634573 - DNA, 120 bp, Artificial Sequence
  ENSG00000180370_30 (sequence is synthesized)
ttttatttccattattttatttccactatatctatgataagatgcaattataaggagagaagtgactgttttttattgataaggcaagattttcagaaaaatgagtaaaataattaatga

SEQ ID NO: 634574 - DNA, 120 bp, Artificial Sequence
  ENSG00000180370_31 (sequence is synthesized)
aacatatttagagcacttaatggtctctgttttcaatataattcttgatttcatttttctctggaatatattggccttctacagctattactgaattatagaaactggtttatttctggc

SEQ ID NO: 634575 - DNA, 120 bp, Artificial Sequence
  ENSG00000180370_32 (sequence is synthesized)
agaaagctgcagtgccacctgagttccaaattttaccattctttgtaaacagttggatggattatgataaagaagatgctaccaatgaaatagaaaaccaacgagatgagaagactgtga

SEQ ID NO: 634576 - DNA, 120 bp, Artificial Sequence
  ENSG00000180370_33 (sequence is synthesized)
tcctcatgtactcagaggcacttccctcctaagtcaaagaccatcctcactgactatgtgccaacgcctcgtttcaggcttgtgactcaacaaagggcttttccattgatagaagcagtt

SEQ ID NO: 634577 - DNA, 120 bp, Artificial Sequence
  ENSG00000180370_34 (sequence is synthesized)
tgggatttgtagttgcgacttcttcgatagttacctgcacgtccattgctggcaactgacttgtcattaaaacctggctctttggttaagggagctacgctgtggtttattcttaagtta

SEQ ID NO: 634578 - DNA, 120 bp, Artificial Sequence
  ENSG00000180370_35 (sequence is synthesized)
cgtggataaactaacctctaacagaaatatactttggttaattttgaaatgtgtcatttttaaacaatcttaaaagtaatacagaattgtgatttattaattttaaaacattcagaactt

SEQ ID NO: 634579 - DNA, 120 bp, Artificial Sequence
  ENSG00000180370_36 (sequence is synthesized)
gtgatttattaattttaaaacattcagaacttgttgaaagaaaaattatatctgaatcaagattcatgttttttatttttattttttttgatacagagtctcactctgtcactcaggctg

SEQ ID NO: 634580 - DNA, 120 bp, Artificial Sequence
  ENSG00000180370_37 (sequence is synthesized)
ccttttatatttaccctttttgtcatcactttagaatgaaaattcccatttaaatctgaaagttaccttaatagtcctcttgtgttattaggacagtattattatagtacttatttattt

SEQ ID NO: 634581 - DNA, 120 bp, Artificial Sequence
  ENSG00000180370_38 (sequence is synthesized)
tattttagatttaaagttatcttctctttttcttttttcttctgctgcttttagggacaattaaaactgggaaactatgaaacatggaacattttatcctacctgaaagtaaacgagtaa

SEQ ID NO: 634582 - DNA, 120 bp, Artificial Sequence
  ENSG00000180370_39 (sequence is synthesized)
ttgtgaagcataagacactgaggctaatacaactctgtcttcatgtgttgactgcctggcacatagtattcattctcttccctttaacatagaagtgtccagctgcgtacagtctagtaa

SEQ ID NO: 634583 - DNA, 120 bp, Artificial Sequence
  ENSG00000180370_40 (sequence is synthesized)
ccagcaactgtaaacgaacctgtgcctctaacaagcgattctaaaccacctatgagtatttcttttagggctcacttaaatacatgtttgtatatactgtattctagccagaataatttt

SEQ ID NO: 634584 - DNA, 120 bp, Artificial Sequence
  ENSG00000180370_41 (sequence is synthesized)
agatctgatcaggtagtagctaaaattagaaaaaaacaaaatagatgcttaaagaatttgcatccatttttgagtctaaatcttttaaaatatactgagatccacatctagtgaaatgtc

SEQ ID NO: 634585 - DNA, 120 bp, Artificial Sequence
  ENSG00000180370_42 (sequence is synthesized)
agtgtcaaaatattatagattatagctaaaatccagattaatactcatttggggttttttatagtggaacttcatagtaatacaaaaagcagattgtcttcctgtctccgctgctcccac

SEQ ID NO: 634586 - DNA, 120 bp, Artificial Sequence
  ENSG00000180370_43 (sequence is synthesized)
agtaggtattgaaactggtaaaatcagttttttgatagtgtgtgtatataagaaaaaatagatacacacattcttttttctcagtcaacacattgattgaacactctggcaaagatgctg

SEQ ID NO: 634587 - DNA, 120 bp, Artificial Sequence
  ENSG00000180370_44 (sequence is synthesized)
tggtggatgaggttggagttcgaaagaagaagcaagcgctggcctggccttgaaagaaccgaagtctttcccattcacttctctagaaagctgccaagacagaggcagaaagaaatggat

SEQ ID NO: 634588 - DNA, 120 bp, Artificial Sequence
  ENSG00000180370_45 (sequence is synthesized)
gatagttctgtcaagcacacttctgttctcttagaacttagaagtgtttctaagagaacagaagtaataagagaaacagttacgtgtggaattcaacatctttggttggaacgcattggc

SEQ ID NO: 634589 - DNA, 120 bp, Artificial Sequence
  ENSG00000180370_46 (sequence is synthesized)
tttttttttcttgttttgatagaaatggaattaagcaaaagtagtttttgtcttttctgttgtcttcaaattttatgccttttatttttaatttaatcccgttcaattatttaattgtta

SEQ ID NO: 634590 - DNA, 120 bp, Artificial Sequence
  ENSG00000180370_47 (sequence is synthesized)
tacattgacattaactgctgtattttgactttgttcaataattttgttctttcagggctagaaataaactttttaaaaaaagtgtgcatttttccctttcctaaacttttattctttctt

SEQ ID NO: 634591 - DNA, 120 bp, Artificial Sequence
  ENSG00000180370_48 (sequence is synthesized)
ttgatcagcgtaaaagaatattttaatgtcttttgatagcataaaagaatatttaaatgtcttaataggttttcaaagaacatttagtatttttagtgataaatgttttaaaccttttaa

SEQ ID NO: 634592 - DNA, 120 bp, Artificial Sequence
  ENSG00000180370_49 (sequence is synthesized)
tacattttacatcattgttaaattgttcacggctcttaaaacatttggcccagatggattttaacttacactttacattgtgacttaaagtataaagaataaattgtttccttatagcaa

SEQ ID NO: 634593 - DNA, 120 bp, Artificial Sequence
  ENSG00000180376_0 (sequence is synthesized)
aaccgacgtacacaaggggcttgagcgttctgtggagagagtgcgagagatggtttaaagcttgaaactgaattactggatggaaaaaccaagctaatattgtctccatatgaacataaa

SEQ ID NO: 634594 - DNA, 120 bp, Artificial Sequence
  ENSG00000180376_1 (sequence is synthesized)
tcaaaaatttctgtgaagatgggaaataaggccaagattgcaaaatgtcctttaagaacaaaaactgggcacattctaaaatcaacacaagatacttgtattgggagtgaaaaacttttg

SEQ ID NO: 634595 - DNA, 120 bp, Artificial Sequence
  ENSG00000180376_2 (sequence is synthesized)
caaaagaagccagttggttcagaaacatcacaggcaaaaggtgaaaaaaatggaatgactttttcatccactaaggatttatgtaaacaatgtatagataaagactgtcttcatatccag

SEQ ID NO: 634596 - DNA, 120 bp, Artificial Sequence
  ENSG00000180376_3 (sequence is synthesized)
aaagagatttcacctgcaacccctaatatgcagaagactagaaacaccgtaaatacatctctagtaggtaaacagaagcctcacaaaaaacacatcacagctgaaaacatgaagagcagt

SEQ ID NO: 634597 - DNA, 120 bp, Artificial Sequence
  ENSG00000180376_4 (sequence is synthesized)
ttggtgtgtctaacacaagaccaactacaacagattttgatgactgtaaaccaaggaaatagatctctttccctgactgagaatggaaaggaggcaaaaagtcaatatagtctatattta

SEQ ID NO: 634598 - DNA, 120 bp, Artificial Sequence
  ENSG00000180376_5 (sequence is synthesized)
aacagtatttctaatcagccaaaggatgagaacattatgggattattcaaaaaaactgaaatggtttcatctgtcccagctgaaaataaatctgtcttaaatgaacatcaggagacatct

SEQ ID NO: 634599 - DNA, 120 bp, Artificial Sequence
  ENSG00000180376_6 (sequence is synthesized)
aaacagtgtgagcaaaaaattgccatagagaatgaatggaaaccagctgatatattcagtactctgggggaaagggaatgtgatagaagttcgttggaagcaaaaaaagcccagtggagg

SEQ ID NO: 634600 - DNA, 120 bp, Artificial Sequence
  ENSG00000180376_7 (sequence is synthesized)
aaagagctagatgaacaggttgctttaaagaagaaagaaaaagaagtttctgaaaaatggaatgatccttggaaaaaatctgaaagtgataaaataatatgggaaaaacatcaaattctt

SEQ ID NO: 634601 - DNA, 120 bp, Artificial Sequence
  ENSG00000180376_8 (sequence is synthesized)
gaccaatctagggaaacagtactgctggagcaccctttcagtgctgtgaaacaagaactgcaaagaaaatggattgaagagttgaataagcaaatagaagatgaccgtcaaagaaaaata

SEQ ID NO: 634602 - DNA, 120 bp, Artificial Sequence
  ENSG00000180376_9 (sequence is synthesized)
gaggaaaaaattatatattcaaagggtgaggaacatgacagatgggcaatgcactttgattcattaaagagttatcctggttctcaatctcagctgttctctcagtcaacacacaaacaa

SEQ ID NO: 634603 - DNA, 120 bp, Artificial Sequence
  ENSG00000180376_10 (sequence is synthesized)
cctgagtacttctgtgtctctcctgacactcaggagctggctgatgtcagcagtgtttgtacacctacaaccggaagccaggttgaaccttcagaggaggagcatatagcaaaacctatt

SEQ ID NO: 634604 - DNA, 120 bp, Artificial Sequence
  ENSG00000180376_11 (sequence is synthesized)
aaggatgtggttatggcaaacagtaagaaaacaaactttctccgttctatgactgctctcttggacccagctcagattgaggaacgagacagacgacgacaaaaacaattagagcatcag

SEQ ID NO: 634605 - DNA, 120 bp, Artificial Sequence
  ENSG00000180376_12 (sequence is synthesized)
aagcgcaggaagaaacaactggaggaagagcaaagaaagaaggaagaacaagaagaggagcttcgcttagcacaggaacgtgaagagatgcagaaacagtatgaagaagacatacttaag

SEQ ID NO: 634606 - DNA, 120 bp, Artificial Sequence
  ENSG00000180376_13 (sequence is synthesized)
caaaaacaaaaggaagaaatcatgactctcaagacaaatgagctattccagacaatgcagcgagcacaggaactggcacagagactaaaacaagaacaaagaatccgagaattggcgcaa

SEQ ID NO: 634607 - DNA, 120 bp, Artificial Sequence
  ENSG00000180376_14 (sequence is synthesized)
aagggacatgacacttctagactgattaaaaatcttggtgttgatacaatacaaatggaatataatgcatctaacatttcaaattcaagacatgattctgatgaaatcagtggtaaaatg

SEQ ID NO: 634608 - DNA, 120 bp, Artificial Sequence
  ENSG00000180376_15 (sequence is synthesized)
aatacatatatgaattctacgacttctaagaaggatactggtgtgcaaacagatgacttaaatataggaatattcaccaatgcagaatcacattgtggatcattaatggagagggacatc

SEQ ID NO: 634609 - DNA, 120 bp, Artificial Sequence
  ENSG00000180376_16 (sequence is synthesized)
acaaattgttcatctcctgagatttcggcagaacttattggacagtttagcaccaagaaaaacaagcaagaactaactcaggataaaggagccagcttagaaaaagaaaacaatcggtgt

SEQ ID NO: 634610 - DNA, 120 bp, Artificial Sequence
  ENSG00000180376_17 (sequence is synthesized)
aatgaccagtgtaatcagttcacaagaatagagaaacaaacaaaacacatgaagaaatatcctaaaaggcctgattggaatataaataagccacctaaaaggtatattccagcatcagaa

SEQ ID NO: 634611 - DNA, 120 bp, Artificial Sequence
  ENSG00000180376_18 (sequence is synthesized)
aagtaccctaaacagcttcaaaagcagagagaagaaaaaaaagtaaggaggcagatggaattgcttcatttggtagaaaaaaataatcctgggcacctctctcaaaacagaggcatttca

SEQ ID NO: 634612 - DNA, 120 bp, Artificial Sequence
  ENSG00000180376_19 (sequence is synthesized)
ccagaaatttttcattcatctcatcaagaaacggagtcaaagttgaggtggcatctagtcaaaaaggaagaagagcctctgaatattcattcattcagcaaggaaaggtctccatcatca

SEQ ID NO: 634613 - DNA, 120 bp, Artificial Sequence
  ENSG00000180376_20 (sequence is synthesized)
ccagttccagtagtgaaaaacagaacccaacaaactcaaaatacattacatttaccactaaaaaacagtagctatgagagagagaatttgatctcaggaagtaatcaaacagaattatca

SEQ ID NO: 634614 - DNA, 120 bp, Artificial Sequence
  ENSG00000180376_21 (sequence is synthesized)
tctgggatttctgaatcatcccattttattccgtatgttcgaacaaatgagatctattaccttgatcccgatgcaccattgtctgggccttcaacccaggaccctcagtaccaaaattca

SEQ ID NO: 634615 - DNA, 120 bp, Artificial Sequence
  ENSG00000180376_22 (sequence is synthesized)
caagactgtggccaaaaacgacagctatttgattctgactgtgtcagggatccacttcttaatcctaacatggtgaaaaatagggatcgacagcaagcaatccttaagggactttcagaa

SEQ ID NO: 634616 - DNA, 120 bp, Artificial Sequence
  ENSG00000180376_23 (sequence is synthesized)
ctgagacagggccttctccagaagcaaaaggagttggaaagtagtctcctgcctttagctgaaaatcaagaagagagttttggttcttcattttaaatgtagaaaatcaaatccttcaca

SEQ ID NO: 634617 - DNA, 120 bp, Artificial Sequence
  ENSG00000180376_24 (sequence is synthesized)
tttgatttgtgtcttccaaattataaaatgtgctcactggctcaactgtatttttcaaatagcctagatttacttatttttttaaatgctcattaaaaacttgtatactatgtagtaaaa

SEQ ID NO: 634618 - DNA, 120 bp, Artificial Sequence
  ENSG00000180376_25 (sequence is synthesized)
gagcggcggcggcaaccgacgtacacaaggggcttgagcgttctgtggagagagtgcgaggtcaggccatgaacttgggagatggtttaaagcttgaaactgaattactggatggaaaaa

SEQ ID NO: 634619 - DNA, 120 bp, Artificial Sequence
  ENSG00000180376_26 (sequence is synthesized)
aagtcctaagtgtcagtactttggatatttaaaccttttagtatttgacctctaacctattttccttgaaggagagaatctaagtcctccttatttttagttatcagttaatttttactt

SEQ ID NO: 634620 - DNA, 120 bp, Artificial Sequence
  ENSG00000180376_27 (sequence is synthesized)
gagtgtattatgcttcatttgctatcccttcctccttgtgaacatttacattttagcaaatgtattctgaaaataatgtagtaacctgaagggatgattctcctaaagagatgattctgg

SEQ ID NO: 634621 - DNA, 120 bp, Artificial Sequence
  ENSG00000180376_28 (sequence is synthesized)
tggtagaaatttttggcactatggcctaattaggtaaatttcttatagaaacccttcaagttaaattttgtgcatggctgtctgttctgcttcatgtagagctgacttgcctacattgaa

SEQ ID NO: 634622 - DNA, 120 bp, Artificial Sequence
  ENSG00000180376_29 (sequence is synthesized)
tacttttgttgtctgttgataattttacattaacaaaaggaatgaaatctgaattgcatttgcccacaatcccaaaagcacattgactgaaaaggcaataaggttgtcttggtagaactc

SEQ ID NO: 634623 - DNA, 120 bp, Artificial Sequence
  ENSG00000180376_30 (sequence is synthesized)
gagatggtttaaagcttgaaactgaattactggatggaaaaaccaagctaatattgtctccatatgaacataaatcaaaaatttctgtgaagagagaatgaatggaaaccagctgatata

SEQ ID NO: 634624 - DNA, 120 bp, Artificial Sequence
  ENSG00000180376_31 (sequence is synthesized)
gcagttagaattaagttcaatttaaaagttcaaaaattaacaaaacttgaggttttcagtaagagttacaaaataaagggataacagctttgttgaaacatgtcatgtaccacaaaattt

SEQ ID NO: 634625 - DNA, 120 bp, Artificial Sequence
  ENSG00000180376_32 (sequence is synthesized)
atcctacagtttagtcttttttggtattcagtggtgcaaccattaccacaatcaattctaaaacattttgatcactctagaaacactgtacccattacttgccactttctatttctcttt

SEQ ID NO: 634626 - DNA, 120 bp, Artificial Sequence
  ENSG00000180376_33 (sequence is synthesized)
tctcctccagttaacattctgtctctgaatatttttgcctgttgtggacatttcacgtaactggaattagaccacataacggtcttctctggcttctttctctcttagcatgttttaagg

SEQ ID NO: 634627 - DNA, 120 bp, Artificial Sequence
  ENSG00000180376_34 (sequence is synthesized)
ttcatccatgttgtagcatgtgtcagtacttcattcctgtttgtcactgaataaatattacatttataataccacatttttattcatgagttgatgaacatttgggttatctccactttt

SEQ ID NO: 634628 - DNA, 120 bp, Artificial Sequence
  ENSG00000180376_35 (sequence is synthesized)
tggctatgaatatgctgctgtgaacattcatatatagatttttgtggatgtacatttttagttcgagagaagagtagaattgctgagtcatgagtaacaggtactgtatgtttagcattt

SEQ ID NO: 634629 - DNA, 120 bp, Artificial Sequence
  ENSG00000180376_36 (sequence is synthesized)
tgaggaaccaccaaactcttctccaaagcagtggtaccattttacattcccaccatcagtgcatgtgggttctgattctctatatccttgccagcccttgttattctactggttgtgaag

SEQ ID NO: 634630 - DNA, 120 bp, Artificial Sequence
  ENSG00000180376_37 (sequence is synthesized)
tggtatctcaggtggttttggtttgcatttcccccccagtgactgatgatgttgagcatcttttcatgattatcagttcatagaaatggaaattagagtggtggctgccagtggttggga

SEQ ID NO: 634631 - DNA, 120 bp, Artificial Sequence
  ENSG00000180376_38 (sequence is synthesized)
gtatgtggttgttctttaatgagtatagaggttcggttttgttgaaaattaatgaaagaaaaaagtcttagagggcaataattgtttaatgttttggggaaaattatttaatattgaaaa

SEQ ID NO: 634632 - DNA, 120 bp, Artificial Sequence
  ENSG00000180376_39 (sequence is synthesized)
cgtcaaggtcaatatagtctatatttaaacagtatttctaatcagccaaaggatgagaacattatgggattattcaaaaaaactgaaatggtttcatctgtcccagctgaaaataaatct

SEQ ID NO: 634633 - DNA, 120 bp, Artificial Sequence
  ENSG00000180376_40 (sequence is synthesized)
gtacaagcatggtaccagcatctcctcggcttctggtgaggcctcaggaagcttttactcacggtggaaggcaaagggggagcaggcattttacatggcaagagagatgccaggctcttt

SEQ ID NO: 634634 - DNA, 120 bp, Artificial Sequence
  ENSG00000180376_41 (sequence is synthesized)
tacacaaccagctctcatgtgaactgacagagggagaactcaagcatcatcccaaggggatggcaccaagccattcatgagggattcatctcctgtgacccaaacacctccccttaggcc

SEQ ID NO: 634635 - DNA, 120 bp, Artificial Sequence
  ENSG00000180376_42 (sequence is synthesized)
caacatgagatttgaaggggacaaatatccaaactgtatcatcaaggtaaaagaagaatgaagagattaaacttatgttagcagtatcagaaggtttggcggtcttgatgtgtgtttata

SEQ ID NO: 634636 - DNA, 120 bp, Artificial Sequence
  ENSG00000180376_43 (sequence is synthesized)
tcacaatttcatctttaaatattttctttcagcacattccacatcaaaatgcaataccaaatgtctgaaataatatggaactacttggaaatgaccagaatattttgtgctttaatcatt

SEQ ID NO: 634637 - DNA, 120 bp, Artificial Sequence
  ENSG00000180376_44 (sequence is synthesized)
tccgcctgccttggcctcccgaagtgctgtgattacagttgtgagccaccacacctggccttatgctttaattattttaaaaatcagtttactgtttttttaacttgtctcagtaaagtg

SEQ ID NO: 634638 - DNA, 120 bp, Artificial Sequence
  ENSG00000180376_45 (sequence is synthesized)
agtgcctctatttaagtcatgcttccagtaacattcttggaatttaaatttatacaacattgaattttgtatttaaagaactactgttgattggggggttagttttgactatatctctca

SEQ ID NO: 634639 - DNA, 120 bp, Artificial Sequence
  ENSG00000180376_46 (sequence is synthesized)
gacacaggcttttatgttttttacttgtcagcaattaagaaataatagctaacattcattgaatatttactttgtgccaagccctatattgagataggcactattattatccccatttta

SEQ ID NO: 634640 - DNA, 120 bp, Artificial Sequence
  ENSG00000180376_47 (sequence is synthesized)
ctattattatccccattttatagaagaaaccaaggcttagaaagcttaccagcagttggccaactgcggtgggctcatgcctgtaatcctaccacgttgggaggccgaggcaggtggatc

SEQ ID NO: 634641 - DNA, 85 bp, Artificial Sequence
  ENSG00000180376_48 (sequence is synthesized)
ggcaggtggatcacaaggtcaggaaatagagaccatcctagccaacatggtgaaaccacatctcctgcctgtagccccagctact

SEQ ID NO: 634642 - DNA, 120 bp, Artificial Sequence
  ENSG00000180376_49 (sequence is synthesized)
ggagtacccgaaatatcactcaataaataggtgaagatgatcagaacaattccacaaactacatataaaaattgtttctctttctctatcatatagttatataccatgtatgctccccaa

SEQ ID NO: 634643 - DNA, 120 bp, Artificial Sequence
  ENSG00000180376_50 (sequence is synthesized)
tcacagactacagattgtatgttattcctacccctttccctattaaaaattgcaactaactgctgttatttgaaacacattcacaaatacagtggcctttatcaagttcctagatgaaaa

SEQ ID NO: 634644 - DNA, 120 bp, Artificial Sequence
  ENSG00000180376_51 (sequence is synthesized)
attgtgtggtcatcttcagaatatggttttgcttttcctttacttgcatgtgaaatagttactctgaatacttagagctatttaaaagcttattacttaatatttatggagtcagttgtg

SEQ ID NO: 634645 - DNA, 120 bp, Artificial Sequence
  ENSG00000180376_52 (sequence is synthesized)
aaaatttctgtgaagtgtcttaaagtctttgcttgtctgtggatagaacccagtttggatgatgtaccactttatccttcaactctaagcccttgatggctttacttgcaggtttaatta

SEQ ID NO: 634646 - DNA, 120 bp, Artificial Sequence
  ENSG00000180376_53 (sequence is synthesized)
gttgaggtggcatctagtcaaaaaggtaaagctcttccatcttagatgatgtgttgacgtttctggattcaaaacacagtttctcatacgtatgctttggtaaggctgttctgatctgtt

SEQ ID NO: 634647 - DNA, 120 bp, Artificial Sequence
  ENSG00000180376_54 (sequence is synthesized)
tcagtttacattagggatcagcaaactatatcccatgggcaaatccaggctgctgcctgtttttggaaagttttatacgaacatagtcaactcattcttttatgaattgtctgtggctga

SEQ ID NO: 634648 - DNA, 120 bp, Artificial Sequence
  ENSG00000180376_55 (sequence is synthesized)
cttcacacaccagactagcaacagaaacaatatggcccacaaagctgaaaaggtttccttatgcttatcgagtcctttacacttacacaacttctgtagatggatgctgtgtattcaaat

SEQ ID NO: 634649 - DNA, 120 bp, Artificial Sequence
  ENSG00000180376_56 (sequence is synthesized)
acccctttaaaacccttgtttatagtccacatagacagaggtttgggagattaggaactcccaaggattagttttgactctggaaaaaactatatctattccattgctcagtcagtacct

SEQ ID NO: 634650 - DNA, 120 bp, Artificial Sequence
  ENSG00000180376_57 (sequence is synthesized)
gttattcaaatattaccctcagactatttcaacaagtagccctaaaaatatttgtggggacatgtgaagatgctatatattcctttctgcatttatctatccatattttaggaagaagag

SEQ ID NO: 634651 - DNA, 120 bp, Artificial Sequence
  ENSG00000180376_58 (sequence is synthesized)
cctctgaatattcattcattcagcaaggaaaggtaagtatgcatcagattaattccgcagctacttaatgctttctatgtgggacaaaaaagggattcaagatctggacagcatcatatg

SEQ ID NO: 634652 - DNA, 120 bp, Artificial Sequence
  ENSG00000180376_59 (sequence is synthesized)
gtatatgtagagaacaatcagaaagggtgtggcttccaggtgagggttagaggtttaagggatagtgtggcactttagcaggagcttgaaggcccaagttggactgggcctaggcaggaa

SEQ ID NO: 634653 - DNA, 120 bp, Artificial Sequence
  ENSG00000180376_60 (sequence is synthesized)
tctagacttaactaagtgattttgatattccaggtatgtcattagcagaataggcattctgctttgggaggagggatggctgggggctgtgaatgggaagaaatgactgataaggacaat

SEQ ID NO: 634654 - DNA, 120 bp, Artificial Sequence
  ENSG00000180376_61 (sequence is synthesized)
gagaaattcagtcagttaatgagagatttagaaccattagaatttttattctttgtgcatgaaccagctggtttagttgtctcagaatggggctctaaaaacaagtttcattcaaatggt

SEQ ID NO: 634655 - DNA, 120 bp, Artificial Sequence
  ENSG00000180376_62 (sequence is synthesized)
gagtacattattgtatggtgaattatctaaggagaaacagtaggctcagattaaccaagccagcactgttcctcaggatctaggaattaaatttctcccttgtgctacagtacacatacc

SEQ ID NO: 634656 - DNA, 120 bp, Artificial Sequence
  ENSG00000180376_63 (sequence is synthesized)
atagctagtgctagtaaaaacataaatgaataccattctcttccccggttttatggaacaatattatagagttcaggcttctatgcatacattcccaaaggtgttacaggtacatttaga

SEQ ID NO: 634657 - DNA, 64 bp, Artificial Sequence
  ENSG00000180376_64 (sequence is synthesized)
ctatgcatacattcccaaaggtgttacaggtacatttagaataaagtgaaatgggccagacctg

SEQ ID NO: 634658 - DNA, 69 bp, Artificial Sequence
  ENSG00000180376_65 (sequence is synthesized)
caagaccagcctggccaacttggtgaaccccgtctctactaaaaatacagaaactagctgggcactgca

SEQ ID NO: 634659 - DNA, 120 bp, Artificial Sequence
  ENSG00000180376_66 (sequence is synthesized)
tgggcaacagagcgagacttcatctcataaataaagtgaaatgtgattaaagagatatacttaatctaaatacacaattttttactattttttttttaaataggtctccatcatcaccag

SEQ ID NO: 634660 - DNA, 120 bp, Artificial Sequence
  ENSG00000180376_67 (sequence is synthesized)
gtgaaggctgatttgttatagaagccacatttgtgaagacattttattgtcattttaaccaactcagaacatctgaagatcccctttataggcctataataaacagaattactggtcttg

SEQ ID NO: 634661 - DNA, 120 bp, Artificial Sequence
  ENSG00000180376_68 (sequence is synthesized)
cagaactttatttataatatttttagaagatgattttaaataattcctttttatctttgtttggagacaaggactcattctgttgcacaggctagagtgcagtggtgccatcacagctca

SEQ ID NO: 634662 - DNA, 120 bp, Artificial Sequence
  ENSG00000180376_69 (sequence is synthesized)
aagaaatcgatgtagtaccagtgcctaacacctagtaggcgctccttaagtaggggtgaataaataaaaagggctggtgcatggtcttcatcactcgcaagtttgatattttgagaagat

SEQ ID NO: 634663 - DNA, 120 bp, Artificial Sequence
  ENSG00000180376_70 (sequence is synthesized)
gagaagccaccaaactcagacctaactacacatcgttcagcaaatgttattatgttttagaatctggggatatggaaataaataagatagtgtgtcccttaaggagattacagtgcagtg

SEQ ID NO: 634664 - DNA, 120 bp, Artificial Sequence
  ENSG00000180376_71 (sequence is synthesized)
gttgttgatgaagatttgcaagtattaagagttagtttcttatggttatattacctaaatagcaaaatggaaaaaagtttagaggactgatttatcacagatcatataaagataattggt

SEQ ID NO: 634665 - DNA, 120 bp, Artificial Sequence
  ENSG00000180383_0 (sequence is synthesized)
gcctgccaaacttactgcacaaggcaagaaacttacatgcacctgtgcccggatgcgtccctgtgctgtctctcctatgcattgaaacctccaccggtccccaagcatgaatatgagtag

SEQ ID NO: 634666 - DNA, 120 bp, Artificial Sequence
  ENSG00000180383_1 (sequence is synthesized)
ttgcttccctgcaaagaggctggccaagctggtcttccccactccaggatctccaagtagcaccacacggtagagagcctcccaggagccttcagagtcgctggattcagaagaccaatc

SEQ ID NO: 634667 - DNA, 120 bp, Artificial Sequence
  ENSG00000180383_2 (sequence is synthesized)
atctggggcagcagcctccccaggagccccgtggccatgacacagctgcttctgttccttgtggctctcctggttctgggtcatgtgccatcaggtaacaacatcgtgtgcatgtgtgtg

SEQ ID NO: 634668 - DNA, 120 bp, Artificial Sequence
  ENSG00000180383_3 (sequence is synthesized)
ggccccaccactgacttggtgggcaacttagagcaagttgctaaatcagcctgtacctcagtttcctaatctataaaatgggattctctcaataaatattcatttatgttatgatggttg

SEQ ID NO: 634669 - DNA, 120 bp, Artificial Sequence
  ENSG00000180383_4 (sequence is synthesized)
tgaaataataacagtgaaagacatgtagcagtgaaagaaaagaaggtccttgctttcatgcagctgacactttagttggtggagatagaaaataagtggataaacatatgttgggtggtg

SEQ ID NO: 634670 - DNA, 120 bp, Artificial Sequence
  ENSG00000180386_0 (sequence is synthesized)
tcacctctgaacagaagtccaccctccacccctgacaccatgacccactgttgctccccttgctgtcagcctacctgctgcaggaccacctgctggaagcccaccactgtgaccacctgc

SEQ ID NO: 634671 - DNA, 120 bp, Artificial Sequence
  ENSG00000180386_1 (sequence is synthesized)
agcagcacaccctgctgccagccctcctgctgtgtgtccagctgctgccagccttgctgccacccaacttgctgtcaaaacacctgctgcaggaccacctgctgccagcccacctgtgtg

SEQ ID NO: 634672 - DNA, 120 bp, Artificial Sequence
  ENSG00000180386_2 (sequence is synthesized)
accagctgctgccagccttcctgctgcagcacaccctgctgccagcccatctgctgtgggtccagctgctgtggccaaaccagctgtgggtccagctgctgccagcccagctcctgtgca

SEQ ID NO: 634673 - DNA, 120 bp, Artificial Sequence
  ENSG00000180386_3 (sequence is synthesized)
cccatctactgcaggagaacctgctaccaccccacgagtgtctacctgcctggttgcctaaaccagagctgtggctccagctgctgccagccgtgctgccgcccagcctgctgtgagact

SEQ ID NO: 634674 - DNA, 120 bp, Artificial Sequence
  ENSG00000180386_4 (sequence is synthesized)
agaggaccatcatccccatacagtaaccctctggcaaaagatttaccttctgggggacaaatttactttcaaactgtgatgaaaaccaacaaagtgaacttagggtgaactttgctcacc

SEQ ID NO: 634675 - DNA, 120 bp, Artificial Sequence
  ENSG00000180386_5 (sequence is synthesized)
ctaatttttatgacttctctgcatgtttaacattttgtgaatcagcttgagtgagggtagagtacttcatcctgattcttttttccttacaccttgtggatcatgtgccaccttcatgta

SEQ ID NO: 634676 - DNA, 120 bp, Artificial Sequence
  ENSG00000180386_6 (sequence is synthesized)
ttttcaatttggagtcatggtctcagcttgactctaaagtcaagagcttcattccctttctctaagaaacttaggttttgcaactgatcaataatcttcacaatcatgttttcattttca

SEQ ID NO: 634677 - DNA, 120 bp, Artificial Sequence
  ENSG00000180386_7 (sequence is synthesized)
gtgtcctcctcgtggttcttttatccttattcctttcatgatcattttgggttatctccctagaaacagggactcttacctatatgtttcttaataaactcaaagctgtccttcatctca

SEQ ID NO: 634678 - DNA, 120 bp, Artificial Sequence
  ENSG00000180398_0 (sequence is synthesized)
aggtcggggggggggggggggcggggcgaagccgaggaagagcgttttggggacgggggctggtgaggctcacgttggagggcttcgcgtctgcttcggagaccgtaaggatattgatga

SEQ ID NO: 634679 - DNA, 120 bp, Artificial Sequence
  ENSG00000180398_1 (sequence is synthesized)
tcgcgtctgcttcggagaccgtaaggatattgatgaccatgagatccctgctcagaacccccttcctgtgtggcctgctctgggccttttgtgccccaggcgccagggctgaggagcctg

SEQ ID NO: 634680 - DNA, 120 bp, Artificial Sequence
  ENSG00000180398_2 (sequence is synthesized)
cagccagcttctcccaacccggcagcatgggcctggataagaacacagtgcacgaccaagagcatatcatggagcatctagaaggtgtcatcaacaaaccagaggcggagatgtcgccac

SEQ ID NO: 634681 - DNA, 120 bp, Artificial Sequence
  ENSG00000180398_3 (sequence is synthesized)
aagaattgcagctccattacttcaaaatgcatgattatgatggcaataatttgcttgatggcttagaactctccacagccatcactcatgtccataaggaggaagggagtgaacaggcac

SEQ ID NO: 634682 - DNA, 120 bp, Artificial Sequence
  ENSG00000180398_4 (sequence is synthesized)
cactaatgagtgaagatgaactgattaacataatagatggtgttttgagagatgatgacaagaacaatgatggatacattgactatgctgaatttgcaaaatcactgcagtagatgttat

SEQ ID NO: 634683 - DNA, 120 bp, Artificial Sequence
  ENSG00000180398_5 (sequence is synthesized)
ttggccatctcctggttatatacaaatgtgacccgtgataatgtgattgaacactttagtaatgcaaaataactcatttccaactactgctgcagcattttggtaaaaacctgtagcgat

SEQ ID NO: 634684 - DNA, 120 bp, Artificial Sequence
  ENSG00000180398_6 (sequence is synthesized)
tcgttacactggggtgagaagagataagagaaatgaaagagaagagaaatgggacatctaatagtccctaagtgctattaaataccttattggacaagggcttgcttcaagcatctgtat

SEQ ID NO: 634685 - DNA, 90 bp, Artificial Sequence
  ENSG00000180398_7 (sequence is synthesized)
aataccttattggacaagggcttgcttcaagcatctgtattagtctgtattaatgctgctgataaagacgcttggacttacagttccaca

SEQ ID NO: 634686 - DNA, 85 bp, Artificial Sequence
  ENSG00000180398_8 (sequence is synthesized)
gcccccatgattcaattacctccccttgggtctctcccacaacacgtgggaattctggtagatacaatttcaagtttctacccct

SEQ ID NO: 634687 - DNA, 71 bp, Artificial Sequence
  ENSG00000180398_9 (sequence is synthesized)
ggcccctccaaatctcatgtcctcacttttcagcattaacgcaaaaatccacagtccaaagtctcatctga

SEQ ID NO: 634688 - DNA, 80 bp, Artificial Sequence
  ENSG00000180398_10 (sequence is synthesized)
aaagcaagctagttacttcctagataccaacaggggtacaggtattgattaaagacggctgggcccatgcaagtccgaaa

SEQ ID NO: 634689 - DNA, 85 bp, Artificial Sequence
  ENSG00000180398_11 (sequence is synthesized)
agaaattggccaaaataaaggggttacagggcccatgcaagtccgaaatccagcagggctgtcaaattttaaagttccagaataa

SEQ ID NO: 634690 - DNA, 89 bp, Artificial Sequence
  ENSG00000180398_12 (sequence is synthesized)
ttgggcagctctgcccctgtggctttgtggctgttgttcagtgcctgcggcttttccaggtgcacggtgcaagctgttggtggatctac

SEQ ID NO: 634691 - DNA, 120 bp, Artificial Sequence
  ENSG00000180398_13 (sequence is synthesized)
actgccctagcagaggttctctcccctgccgctgagagggcctctcccctgcagcaaacgtttgcctgggcattgaggcatttccatacatcttctgaaaactaggcggaggtttccaaa

SEQ ID NO: 634692 - DNA, 89 bp, Artificial Sequence
  ENSG00000180398_14 (sequence is synthesized)
aattcttgacttctgtgcacctgcaggcttaacagcacatagaagctgccaaggcttggggcttccactctgaagccacagcccgagct

SEQ ID NO: 634693 - DNA, 89 bp, Artificial Sequence
  ENSG00000180398_15 (sequence is synthesized)
ttgcatagtcaggctgcaaatttccaaacttttatgctttgcttcccttatttataagggaatgcctttaaaagcacccaagtcacctg

SEQ ID NO: 634694 - DNA, 65 bp, Artificial Sequence
  ENSG00000180398_16 (sequence is synthesized)
tcatctgaggccacctcagcctggactttgttgtccatattgctatcagcatttggggcaaagcc

SEQ ID NO: 634695 - DNA, 120 bp, Artificial Sequence
  ENSG00000180398_17 (sequence is synthesized)
acaagttcctcatcttcatctgaggccacctcagcctggactttgttgtccatattgctatcagcatttggggcaaagccattcaacaagtctgtaggaagttccaaactttcccacatt

SEQ ID NO: 634696 - DNA, 70 bp, Artificial Sequence
  ENSG00000180398_18 (sequence is synthesized)
aaaaagtggtttaattggacttacacttcttacattgtggcaagaaaaaatgaggaagaagcaaaagcag

SEQ ID NO: 634697 - DNA, 79 bp, Artificial Sequence
  ENSG00000180398_19 (sequence is synthesized)
ttcttacattgtggcaagtgatcagatctcatgagacttattcactgtcacgagaatagcacgggaaagactggccccc

SEQ ID NO: 634698 - DNA, 120 bp, Artificial Sequence
  ENSG00000180398_20 (sequence is synthesized)
ctgggagatacaattcaagttgagatttgtggggggacacaaccaaaccatatcagcatcctttcaagaatattagataattggagctgagtactcaggaacttgactgtagtagaatac

SEQ ID NO: 634699 - DNA, 120 bp, Artificial Sequence
  ENSG00000180398_21 (sequence is synthesized)
gactgtagtagaatactgctagtttcttaattttaattcacatcacctgaaaagtaaaacaacaggctttgccaagtggatgcttttcagtaacagtgaagtggagtgaataccaaatgt

SEQ ID NO: 634700 - DNA, 120 bp, Artificial Sequence
  ENSG00000180398_22 (sequence is synthesized)
ttgccctggtggttcctatctcttcaggcaaacatggtcagtattctgtaaagttcccctggcctaaatgattacttgctctgggcaagtggatatttattaggctatttcaaagccaca

SEQ ID NO: 634701 - DNA, 120 bp, Artificial Sequence
  ENSG00000180398_23 (sequence is synthesized)
gcataagaatgtcagcctagccacagagtctgagattctgagttcagcctagccacagagtctaagattctgtatcctctgacattttggaaatgatacactactggcttaagtgatgac

SEQ ID NO: 634702 - DNA, 120 bp, Artificial Sequence
  ENSG00000180398_24 (sequence is synthesized)
tctttcagattttcagtattttatacaactactgccacatccttatactttattgcttttctgtcttcttcaacctgggagagaccctgaatttgagtgtgttctctaatcaatagtggt

SEQ ID NO: 634703 - DNA, 120 bp, Artificial Sequence
  ENSG00000180398_25 (sequence is synthesized)
ttagctttcttttctatttcactcgtttctagggttttttatttgcagtttaggaactattaggaatgtcaggactttatcagcaggggtaaaactaccacctggcctagcctaagtagg

SEQ ID NO: 634704 - DNA, 120 bp, Artificial Sequence
  ENSG00000180398_26 (sequence is synthesized)
aagtgaaaagataattcaccaaacaatgattaatcagatagaagttctagtcaagagggatattgttgaagttacctcttttagcctagatacatggattcttttcaaatcaggaaagat

SEQ ID NO: 634705 - DNA, 120 bp, Artificial Sequence
  ENSG00000180398_27 (sequence is synthesized)
tagaaaaggaacccaaaaaaccctttaacagtgtgaatctttatagtatttgaaaatgagaagaagcagcagattgtaatttggtttattggatgtgatggacgttctgtaatagaaaac

SEQ ID NO: 634706 - DNA, 120 bp, Artificial Sequence
  ENSG00000180398_28 (sequence is synthesized)
ctgaaacgatgattgaatgggaaaaagagactacaaaatttgtcgtaggatgtatacagacttattttctttattacagtattataagaaaacatatgtatttgtaaaaatggtttcctg

SEQ ID NO: 634707 - DNA, 120 bp, Artificial Sequence
  ENSG00000180398_29 (sequence is synthesized)
tgtcaagtatttgtgcagtcagagctgacttgtaaactattcttgtaatagctcattattttgaaagatttatatatgatgaattctggatatatgaccaataaaactgatgaagcaaaa

SEQ ID NO: 634708 - DNA, 120 bp, Artificial Sequence
  ENSG00000180398_30 (sequence is synthesized)
acgggggctggtgaggctcacgttggagggcttcgcgtctgcttcggagaccgtaaggctgtcatcagctgtggacgggagccttctgaagggaagcacttgggagcctgcaggacgaat

SEQ ID NO: 634709 - DNA, 120 bp, Artificial Sequence
  ENSG00000180398_31 (sequence is synthesized)
tactcaccggtgtccggaaaggtgaacgctgcgctcgggctgcctcgcctgttacctccgccgccgggcatgctcagcgtctgcagctgccggaccagctccggcatgcggtcccagtgg

SEQ ID NO: 634710 - DNA, 120 bp, Artificial Sequence
  ENSG00000180398_32 (sequence is synthesized)
ggatccgccatcctacgtcgcccgtggaactacgttcctgagggcttccggcgttgcctagcaactgccgggcccctagggcgtccagcggcccaactggagtggagccgagtgtcgccc

SEQ ID NO: 634711 - DNA, 120 bp, Artificial Sequence
  ENSG00000180398_33 (sequence is synthesized)
ggggcgaagccgaggaagagcgttttggggacgggggctggtgaggctcacgttggagggcttcgcgtctgcttcggagaccgtaaggagatgggggtctgactgtgttgtctaggctga

SEQ ID NO: 634712 - DNA, 120 bp, Artificial Sequence
  ENSG00000180398_34 (sequence is synthesized)
caattaaagaagaatgagccataatgaaacaaataagcaaaagcctattttgaagggccttcttttaactggcaaatgtaatttctaaactggattatgataaattgactcaataataca

SEQ ID NO: 634713 - DNA, 120 bp, Artificial Sequence
  ENSG00000180398_35 (sequence is synthesized)
gctcttaagactagcacggtgggctggcaggcgcccgctgtcggccgaggactgtctgggcgcgcttcctggaggaggcggtgcgtttcgcgcgctcgctgccggcgagccagcctcttc

SEQ ID NO: 634714 - DNA, 88 bp, Artificial Sequence
  ENSG00000180398_36 (sequence is synthesized)
cagccatggctggagtggctgggacacaagacaccaagtccctaggctgcacacacatgtcaggggctgccgttggggattaacatta

SEQ ID NO: 634715 - DNA, 120 bp, Artificial Sequence
  ENSG00000180398_37 (sequence is synthesized)
cttccctttgttaatttggtccccagtcttgttgacttgtgttgtccttatgtgccaagagtgctgcttctccactgggcatgatggctcgcatctgtaatcccagcactttgggaggcc

SEQ ID NO: 634716 - DNA, 120 bp, Artificial Sequence
  ENSG00000180398_38 (sequence is synthesized)
aaagtggaaggatcacttgagccaggagttcaagaccagccttggcaatatagtgagaccctgtctctacaaaacaaacaaaacaaaaattaaaaaattagccaggcctggtagtgcatg

SEQ ID NO: 634717 - DNA, 120 bp, Artificial Sequence
  ENSG00000180398_39 (sequence is synthesized)
agtaaggtaaatgagagccagaggagagagggtcctgactctcagagagggaggaaaagagaaaaatggaaaaggagaacaacctgtgatcgtatgttcaggtcaaatgagtgtgagagg

SEQ ID NO: 634718 - DNA, 120 bp, Artificial Sequence
  ENSG00000180398_40 (sequence is synthesized)
ctacagactgaggtcggatgagagagcaattggtcttggctggaagaatcctgaggtgacatttgaacctgtcctggaaggaagttggagatggacagatggaaccagtaggagcggagg

SEQ ID NO: 634719 - DNA, 120 bp, Artificial Sequence
  ENSG00000180398_41 (sequence is synthesized)
tagcaactgccgggcccctagggcgtccagcggcccaactggagtggagccgagtgtcgcccttgggaaagcaggcatatcatggagcatctagaaggtgtcatcaacaaaccagaggcg

SEQ ID NO: 634720 - DNA, 74 bp, Artificial Sequence
  ENSG00000180398_42 (sequence is synthesized)
acttccctgattcagcgatgagccaggtcagctcagcagagatcagtaagagatgggggtctgactgtgttgtc

SEQ ID NO: 634721 - DNA, 120 bp, Artificial Sequence
  ENSG00000180398_43 (sequence is synthesized)
gggggcggggcgaagccgaggaagagcgttttggggacgggggctggtgaggctcacgttggagggcttcgcgtctgcttcggagaccgtaagggcatatcatggagcatctagaaggtg

SEQ ID NO: 634722 - DNA, 120 bp, Artificial Sequence
  ENSG00000180398_44 (sequence is synthesized)
cccggcagcatgggcctggataagaacacagtgcacgaccaagagtacgtattcagcccgggctgtggtccagtggcctccccatcatctgcagctgagccagcggcaagggcatgctca

SEQ ID NO: 634723 - DNA, 120 bp, Artificial Sequence
  ENSG00000180398_45 (sequence is synthesized)
gtcctcctttccttcttcctgtttctatggctccttgacattcttcaaggatgattcttattccttattgccacctataagtcaggtattcttttttcatcattgtatcacaggtggaag

SEQ ID NO: 634724 - DNA, 120 bp, Artificial Sequence
  ENSG00000180398_46 (sequence is synthesized)
atctttaggcccaaatggggcacattacttgtctgaatccggtctctcctttttttcaccacagacagacacacacacatacaaatagacacacaggtacacatacacagtcatagtagc

SEQ ID NO: 634725 - DNA, 120 bp, Artificial Sequence
  ENSG00000180423_0 (sequence is synthesized)
gttgcgcgccgtggcggcctctgtgcagtcgccggttccggaggagggcccaacccggctgggtgggtgggaagtgtggctggtaacctggcagccgcggagagagagaagattataaat

SEQ ID NO: 634726 - DNA, 120 bp, Artificial Sequence
  ENSG00000180423_1 (sequence is synthesized)
ggcagagccatttaactgtggttagctgttggattctgatactttcttaaaaatacgttcttgcaccaacatcttcattgggaacagttcagaaaaagcaaagaggagagccaacattca

SEQ ID NO: 634727 - DNA, 120 bp, Artificial Sequence
  ENSG00000180423_2 (sequence is synthesized)
catttaccatggctataccaataacagtgcttgactgtgacctcttgctatatggccgtggtcaccggacattggaccgttttaagctggatgatgtgactgatgaatacttgatgtcca

SEQ ID NO: 634728 - DNA, 120 bp, Artificial Sequence
  ENSG00000180423_3 (sequence is synthesized)
tgtatgggtttccacggcagttcatttattacttggtggagctcttgggggcgaatctttctaggcctactcagcgatccagggctattagcccagagacacaggtccttgcagcattgg

SEQ ID NO: 634729 - DNA, 120 bp, Artificial Sequence
  ENSG00000180423_4 (sequence is synthesized)
gtttttatacctcaggttccttccagactcggatgggagatgccattggaatcagtcaggcgtctatgagtcgttgtgttgccaatgtcactgaagcacttgtggaaagggcctcacagt

SEQ ID NO: 634730 - DNA, 120 bp, Artificial Sequence
  ENSG00000180423_5 (sequence is synthesized)
tcattcgctttccagctgatgaagcctccattcaggctctgaaggatgaattctatgggttggcagggatgccaggggtgatgggggtggttgactgtatccatgtggccatcaaggcac

SEQ ID NO: 634731 - DNA, 120 bp, Artificial Sequence
  ENSG00000180423_6 (sequence is synthesized)
caaatgctgaagacctctcctatgtgaaccgaaaaggcctgcattctttaaactgcctgatggtgtgtgacattagagggacactaatgaccgtggagacaaactggcccggcagcctac

SEQ ID NO: 634732 - DNA, 120 bp, Artificial Sequence
  ENSG00000180423_7 (sequence is synthesized)
aggactgtgctgtgctgcagcagtcttccctcagtagtcagtttgaagcgggtatgcacaaagatagctggcttctgggtgacagttccttctttcttcgaacctggctcatgaccccac

SEQ ID NO: 634733 - DNA, 120 bp, Artificial Sequence
  ENSG00000180423_8 (sequence is synthesized)
tctgcaactcacagtgtgattgagaagactttccgaaccctctgctcccgattccgctgcctggatggatccaagggggcactgcagtactcaccagagaaatccagccatatcatcttg

SEQ ID NO: 634734 - DNA, 120 bp, Artificial Sequence
  ENSG00000180423_9 (sequence is synthesized)
gcctgttgtgtcctccacaacatctccctggagcatgggatggatgtttggtcctctccaatgacaggacccatggaacagcccccggaagaggagtatgagcacatggagtccctggac

SEQ ID NO: 634735 - DNA, 120 bp, Artificial Sequence
  ENSG00000180423_10 (sequence is synthesized)
ttagaggctgaccgtattcgtcaggagctaatgctcactcattttagctaatgtagaaggtggagaggagggatacttcccaggagttgtgacagactttcctcctcatcaccttttaca

SEQ ID NO: 634736 - DNA, 120 bp, Artificial Sequence
  ENSG00000180423_11 (sequence is synthesized)
cagttccatcatctagcatgactgagtatacagatacttgtcataaactgacatttaatatgtgtgttttggtaaggttggggctatgccagaatatcttgattcatttgcatatgcatt

SEQ ID NO: 634737 - DNA, 120 bp, Artificial Sequence
  ENSG00000180423_12 (sequence is synthesized)
aattaaactgaaaccaagacagcggctccctactatccagtgaactctaggttgagtaccactaatttgaaagctcagtggttgcaaacatttatgactgtgcctacaaagtcatagtaa

SEQ ID NO: 634738 - DNA, 120 bp, Artificial Sequence
  ENSG00000180423_13 (sequence is synthesized)
ttttttttttttttttttgccccttcttttcttgttagactggtttgaacaccccagcatctgtcctgtatttgtcaggtgaaaccagaagtctttggataatgaaacccgtgaccaatt

SEQ ID NO: 634739 - DNA, 120 bp, Artificial Sequence
  ENSG00000180423_14 (sequence is synthesized)
cttacccaaggtggttatgacatatgtcagctgcttcttggcctatatagttagaagccgacctcttttaccttgtgaataattatgtcatcacctccattattcttttggtgttctcaa

SEQ ID NO: 634740 - DNA, 120 bp, Artificial Sequence
  ENSG00000180423_15 (sequence is synthesized)
cccccgcaaaagttagtacctgcgaagctgcggcacaaagagtggttccgggctctcattacggaggccgggacctgggaccgaccagccgcgcctcctggctgagggttccgcgctccg

SEQ ID NO: 634741 - DNA, 120 bp, Artificial Sequence
  ENSG00000180423_16 (sequence is synthesized)
gagctgcagtgaccgtacacgtcgccgatagacacctaaggcttcagaagggtcctggctcgcaggccccagacgttttgctcctaagactccgcgagttgtcgcacccacgtcgactgg

SEQ ID NO: 634742 - DNA, 120 bp, Artificial Sequence
  ENSG00000180424_0 (sequence is synthesized)
actctccttctcccattagctcagccgtggcatcggacttgcagcttcattttgggctgccttagccatgaagctccttttgctgactttgactgtgctgctgctcttatcccagctgac

SEQ ID NO: 634743 - DNA, 120 bp, Artificial Sequence
  ENSG00000180424_1 (sequence is synthesized)
caagtaccagccaaaagaaaggtggtggccattttaactgctttgaagcctgaagccatgaaaatgcagatgaagctcccagtggattcccacactctatcaataaacacctctggctga

SEQ ID NO: 634744 - DNA, 120 bp, Artificial Sequence
  ENSG00000180425_0 (sequence is synthesized)
gacacaggctggactgatctggggagccgcgaagggcctgccttcacaaagggacgtaacgcaagtactgcgggcagtgtttgaatatggccctgaacaatgtgtccctgtcctccggtg

SEQ ID NO: 634745 - DNA, 120 bp, Artificial Sequence
  ENSG00000180425_1 (sequence is synthesized)
atcagaggagcagggtggcctaccgctcttcccatggcgacctcagaccgcgggcgtcagcgttggcgatggtctccggagacggcttcctcgtttccaggcctgaagcgattcatctag

SEQ ID NO: 634746 - DNA, 120 bp, Artificial Sequence
  ENSG00000180425_2 (sequence is synthesized)
tggtggcggccggagcccaagggaaccagatggccggggccggagccgccaagccagattctcaccttacccaatccctgccgttgaacccgatctcctaagaagtgtgctgcaacagcg

SEQ ID NO: 634747 - DNA, 120 bp, Artificial Sequence
  ENSG00000180425_3 (sequence is synthesized)
tttgattgcattaggagttactacctggaccctgaagctatctgagtctgcaacccctgatttaagatggtgttcaacatgcagccattcaaatatttttgaaattttagtaatatgaac

SEQ ID NO: 634748 - DNA, 120 bp, Artificial Sequence
  ENSG00000180425_4 (sequence is synthesized)
taaaatcctttcttggtgtagcagcaatcgtgttgttttatttttagatggatgtattttcatttaatacgtgggagttatatgaatatgtcctagcactaagggaagtgtaacagttga

SEQ ID NO: 634749 - DNA, 120 bp, Artificial Sequence
  ENSG00000180425_5 (sequence is synthesized)
ttgatttaggtggttttatgcagccagaacgattggatcaggaaaggtgtggaagggatattcttaggtcgtcacaaagctgagctgatgggagcaccctccccagaggtcaacaatcca

SEQ ID NO: 634750 - DNA, 120 bp, Artificial Sequence
  ENSG00000180425_6 (sequence is synthesized)
ttcgttaactcagacacttaacctttacctttacttctgttggcgaaaaagaagtgctcctttttattacactgatttatccttccatcttttccttggcatttaccatcttccatctcc

SEQ ID NO: 634751 - DNA, 120 bp, Artificial Sequence
  ENSG00000180425_7 (sequence is synthesized)
agaacaaaacctaaaccttacagttctttcaaattattaaatcaatttattattcctttctttggcaaaggttccaaatttttactttatatttgtaattttactatttgcattcagtcc

SEQ ID NO: 634752 - DNA, 120 bp, Artificial Sequence
  ENSG00000180425_8 (sequence is synthesized)
cagcgcattaatctgaatctgctgtcctaaaatacactggtgaaaacattacttgtacaatctcctatcagaaaactgttcatctactcactgtagtgccctccttgaaatgtgtgtttg

SEQ ID NO: 634753 - DNA, 120 bp, Artificial Sequence
  ENSG00000180425_9 (sequence is synthesized)
ttcattcaactaacaatatttggggatccctgtagtaaacactgtatgaattttacacagtctggccatcaagaaagatcacggagtatattctagatggggaggctactaagtgaatag

SEQ ID NO: 634754 - DNA, 120 bp, Artificial Sequence
  ENSG00000180425_10 (sequence is synthesized)
gaatcaccacgctgggctgtttattaggtacagtaataaacataagtactggttgcagtgactttttttttttttttttcatcataatactgcactatcctggttcttctcttacctggc

SEQ ID NO: 634755 - DNA, 120 bp, Artificial Sequence
  ENSG00000180425_11 (sequence is synthesized)
tgatcactccttatttgctgttatttttgttctcttaaccatacatttcccaatgtttaaagggtggtattttgagaaagttaatgggttttgtaagtgccagctctttatataagcagg

SEQ ID NO: 634756 - DNA, 120 bp, Artificial Sequence
  ENSG00000180425_12 (sequence is synthesized)
tagactagctttttcccagcagacgcttgtctgtttagacttccttaaaataattatcttcaaataaagcaaaatctccatacaccacatagtattgaattgttataactacgtgttaag

SEQ ID NO: 634757 - DNA, 120 bp, Artificial Sequence
  ENSG00000180425_13 (sequence is synthesized)
aagaatgttgagtaaacaagatagcttccataagagggtgattaatatagtgagaattctagaaaccagatcataggaagaatgattgaaagaatagtaatagctaccttttattgagtg

SEQ ID NO: 634758 - DNA, 120 bp, Artificial Sequence
  ENSG00000180425_14 (sequence is synthesized)
ctatgtgcaagtcagtgtgctaggacttctattgtttatagagatatttattgagaacttactctgtacctgctactgcctgcggtaagcacttagaataaagtggtgaacatgataaaa

SEQ ID NO: 634759 - DNA, 120 bp, Artificial Sequence
  ENSG00000180432_0 (sequence is synthesized)
aaagctctctggcacccagggaacagtgtgcgtgtcgagagcttaatccgcaggagcatagccatggttctctggggtccagtgctgggagctctgctggtggtcattgctggatacctg

SEQ ID NO: 634760 - DNA, 120 bp, Artificial Sequence
  ENSG00000180432_1 (sequence is synthesized)
tgcctgccagggatgctccgacaacgcaggccatgggagccccctctggacaagggtaccgtgccctggcttggccatgccatggctttccggaagaatatgtttgaatttctgaagcgc

SEQ ID NO: 634761 - DNA, 120 bp, Artificial Sequence
  ENSG00000180432_2 (sequence is synthesized)
atgaggaccaagcatggggatgtgttcacagtgcagctagggggccagtacttcaccttcgtcatggaccccctctcctttggctccatcctcaaggacacacagagaaaactagacttt

SEQ ID NO: 634762 - DNA, 120 bp, Artificial Sequence
  ENSG00000180432_3 (sequence is synthesized)
gggcaatatgcaaaaaaactggtgctgaaggtatttggataccgttcagtgcaaggggaccatgagatgatacactcagccagcaccaagcatctgaggggggatggcttgaaggatctt

SEQ ID NO: 634763 - DNA, 120 bp, Artificial Sequence
  ENSG00000180432_4 (sequence is synthesized)
aatgagaccatgctggacagcctgtcctttgtaatgctgacgtccaaaggctggagtctggatgccagttgctggcatgaggacagcctctttcgcttctgctattacatcttgttcaca

SEQ ID NO: 634764 - DNA, 120 bp, Artificial Sequence
  ENSG00000180432_5 (sequence is synthesized)
gctggctacctgagcttgttcggctacacgaaggacaaggagcaggacctgctacaggcaggagagttattcatggagttccgcaagtttgaccttcttttcccaaggtttgtctactcc

SEQ ID NO: 634765 - DNA, 120 bp, Artificial Sequence
  ENSG00000180432_6 (sequence is synthesized)
ctgctgtggccccgggagtggctagaagtgggccgactccagcgtctctttcacaagatgctctccgtgagccacagccaggagaaggagggcatcagcaactggctgggcaacatgctt

SEQ ID NO: 634766 - DNA, 120 bp, Artificial Sequence
  ENSG00000180432_7 (sequence is synthesized)
cagtttctgagggagcagggggtaccctcagctatgcaggacaagttcaacttcatgatgctctgggcctcccaggggaacacggggcctacctctttctgggccctcttgtacctcctg

SEQ ID NO: 634767 - DNA, 120 bp, Artificial Sequence
  ENSG00000180432_8 (sequence is synthesized)
aagcacccagaagctattcgggctgtgagggaggaagctacccaggtcctgggtgaggccaggctggagaccaagcagtcctttgccttcaaactcggtgccctgcaacacaccccagtt

SEQ ID NO: 634768 - DNA, 120 bp, Artificial Sequence
  ENSG00000180432_9 (sequence is synthesized)
ctagacagcgtggtggaggagacgctgcggctgagggctgcacccaccctcctcaggttggttcatgaagactataccctgaagatgtccagtgggcaggagtatctgttccgccatgga

SEQ ID NO: 634769 - DNA, 120 bp, Artificial Sequence
  ENSG00000180432_10 (sequence is synthesized)
gacatcctggccctctttccctacctctcagtgcacatggaccctgacatccaccctgagcccaccgtcttcaagtacgatcgcttcctcaaccctaatggcagccggaaagtggacttc

SEQ ID NO: 634770 - DNA, 120 bp, Artificial Sequence
  ENSG00000180432_11 (sequence is synthesized)
ttcaagacaggcaagaagatccaccactacaccatgccctggggttcgggcgtttccatctgccctgggaggttctttgcactcagtgaggtgaagctctttatcctgcttatggtcaca

SEQ ID NO: 634771 - DNA, 120 bp, Artificial Sequence
  ENSG00000180432_12 (sequence is synthesized)
cactttgacttagagttggtggaccctgacacaccactaccccatgttgacccgcagcgctggggttttggcaccatgcagcccagccacgatgtgcgcttccgctaccgcctgcatcct

SEQ ID NO: 634772 - DNA, 120 bp, Artificial Sequence
  ENSG00000180432_13 (sequence is synthesized)
acagagtgagcttggccaagccagctgcaaacctggccagaggagttctattgcatctctcacctgttctcacccctctgcagccccaagaccccactggccacccctccctctggtcct

SEQ ID NO: 634773 - DNA, 120 bp, Artificial Sequence
  ENSG00000180432_14 (sequence is synthesized)
gtggcaccccctacctctgttctgcctgtcctcgctctctccccgcctagtcatctgacaggcttatcattctctttaaaataccatctctcagagtgggttctgccgaaccctcctctc

SEQ ID NO: 634774 - DNA, 120 bp, Artificial Sequence
  ENSG00000180432_15 (sequence is synthesized)
ggttccccccagacacgagtaacatggcatcttgcaaacatcagcctccactctcccagcttgctttagttttttcagcaacacttatcccacatcctatggaattcaggttctagaaca

SEQ ID NO: 634775 - DNA, 120 bp, Artificial Sequence
  ENSG00000180432_16 (sequence is synthesized)
acacttatcccacatcctatggaattcaggttctagaacagtgtcatccaacataaatatgaagcaagctacatgagtagtggggttttttggttttgtttgtttgttttgagacagagt

SEQ ID NO: 634776 - DNA, 79 bp, Artificial Sequence
  ENSG00000180432_17 (sequence is synthesized)
accaccttgcccagctaatttagtttcctggtaaacacatttttaaaaagtaaaatgaaacaattcatttttataatat

SEQ ID NO: 634777 - DNA, 120 bp, Artificial Sequence
  ENSG00000180432_18 (sequence is synthesized)
aagtaaaatgaaacaattcatttttataatatactttacttaatccaatatatccaaaatattggcatttcaacgtgatcactattaaaaattttaacgtaatagtttttaccttccctt

SEQ ID NO: 634778 - DNA, 120 bp, Artificial Sequence
  ENSG00000180432_19 (sequence is synthesized)
cttccctttttcatcctgtcttcaaagtctggtatgtactgtacttttgcagttcttcccagttcagactagccacattccaagtgcttaattgccgtgtgtggcaggtggctgccctat

SEQ ID NO: 634779 - DNA, 68 bp, Artificial Sequence
  ENSG00000180432_20 (sequence is synthesized)
caagtgcttaattgccgtgtgtggcaggtggctgccctattggatagcacaggtctagagaaatgata

SEQ ID NO: 634780 - DNA, 89 bp, Artificial Sequence
  ENSG00000180432_21 (sequence is synthesized)
ccgggttcaagtaattctcctgcctcaggcttctgagtagctgggattataggtgcgcaccaccacacccggctagtttctttggccgg

SEQ ID NO: 634781 - DNA, 120 bp, Artificial Sequence
  ENSG00000180432_22 (sequence is synthesized)
tacaggcatgagccactgtgcccagtcaggatgtctttaatgtaggaatcattcaagatccctcctcagtgcccatgtctcccccacctcagggtgctgtcaaccctcccttggtttcca

SEQ ID NO: 634782 - DNA, 120 bp, Artificial Sequence
  ENSG00000180432_23 (sequence is synthesized)
ctgtcaaccctcccttggtttccatgatcattgctgaactcagagctttcttctatccccagacccacatgggagtctcccagcacctctgactcagcttggccaatgcagaacttggca

SEQ ID NO: 634783 - DNA, 120 bp, Artificial Sequence
  ENSG00000180432_24 (sequence is synthesized)
tctgaacccctgcctcttccctgaaccactcctcctcctgatttccctgctctctctgctcagaacactaccattcaccccatctcccagagacactctccctcctcctctttcaccttc

SEQ ID NO: 634784 - DNA, 120 bp, Artificial Sequence
  ENSG00000180432_25 (sequence is synthesized)
atacaagcaggcccccgtcctatcagtacacccccctgtgatgcctctgaaatatgtaccctcctcccctctcctactgtcattcttatacctgtgatctctgcgtttctcttctacact

SEQ ID NO: 634785 - DNA, 120 bp, Artificial Sequence
  ENSG00000180432_26 (sequence is synthesized)
gctgccagaggcctttttgccaaaagcactgctgattgtcactcttttactttcctggttcccctttgacttcacacacttgacgtttacattttgtcacagttggtcccccttgccttc

SEQ ID NO: 634786 - DNA, 120 bp, Artificial Sequence
  ENSG00000180432_27 (sequence is synthesized)
acatacctgatgtttaaattttgtcacggttagtctccaaacttctcaactttgccagctttctccaatgaaaccatcagtagagacattgctgttcctgcccatcccagtgccagctac

SEQ ID NO: 634787 - DNA, 120 bp, Artificial Sequence
  ENSG00000180432_28 (sequence is synthesized)
tccttcctggaagccttcctggatttcacgcatcccatcctctggccagaaatggcctccgaactgtgcagctcctgcagcaccatttgtatcatagcatatctgttatgtgtcgttgct

SEQ ID NO: 634788 - DNA, 120 bp, Artificial Sequence
  ENSG00000180432_29 (sequence is synthesized)
ttctgtgtcttggtttctgcctgctgcccacttccctagactggagcctactggggcatggtattttattcatttctgacctccaattccctaagtggagattaaatgttagaaacctga

SEQ ID NO: 634789 - DNA, 120 bp, Artificial Sequence
  ENSG00000180432_30 (sequence is synthesized)
tgcactcagtgaggcagacttcgaaagaaatgttgactcgggtcctcagttgacccaaagtatctatgataccatgatctcatggctgatggaactattcagtgctgctgaaacagaacc

SEQ ID NO: 634790 - DNA, 120 bp, Artificial Sequence
  ENSG00000180432_31 (sequence is synthesized)
tctcctgagggagccctggagtcctcccactctgtgagcttctgccccacccttgggctcctatccgatggcatctggaccagatgctgtggaaaccacacatgacctgcccccacccca

SEQ ID NO: 634791 - DNA, 120 bp, Artificial Sequence
  ENSG00000180432_32 (sequence is synthesized)
ggagctcagcctgagtggctttatctaaggcccaactctgttcctgatcaaccttaggaactttacccagtgcctttttctgctggtcttcctgtcctctcctctgcaccaggggcctcc

SEQ ID NO: 634792 - DNA, 120 bp, Artificial Sequence
  ENSG00000180432_33 (sequence is synthesized)
tggccttcaactcctcccttttctgggcagcagtaaggacactcctagcacatggctggtgctgggagcctgtgagctgctgcagaaggaggatgtgaggagtatactcgggtcttatca

SEQ ID NO: 634793 - DNA, 120 bp, Artificial Sequence
  ENSG00000180433_0 (sequence is synthesized)
cagatgattttggcatggaggtaaagcttaagagatatttctaactggtttcttcaggattccagaatcagcttgagtaactcattacagaaaggaatgaagcaatattcagtgggtaat

SEQ ID NO: 634794 - DNA, 120 bp, Artificial Sequence
  ENSG00000180433_1 (sequence is synthesized)
caacattccaattataggagtctcttgtttccttttctgtgttcacagatgacacagttgacggccagtgggaatcagacaatggtgactgagttcctcttctctatgttcccgcatgcg

SEQ ID NO: 634795 - DNA, 120 bp, Artificial Sequence
  ENSG00000180433_2 (sequence is synthesized)
cacagaggtggcctcttattctttattcccttgcttctcatctacggatttatcctaactggaaacctaataatgttcattgtcatccaggtgggcatggccctgcacacccctttgtat

SEQ ID NO: 634796 - DNA, 120 bp, Artificial Sequence
  ENSG00000180433_3 (sequence is synthesized)
ttctttatcagtgtcctctccttcctggagatctgctataccacaaccaccatccccaagatgctgtcctgcctaatcagtgagcagaagagcatttccgtggctggctgcctcctgcag

SEQ ID NO: 634797 - DNA, 120 bp, Artificial Sequence
  ENSG00000180433_4 (sequence is synthesized)
ttacccaaccatcatgattcccaaactttgtatccagctgacagttggatcctgcttttgtggcttcctccttgtgcttcctgagattgcatggatttccaccttgcctttctgtggctc

SEQ ID NO: 634798 - DNA, 120 bp, Artificial Sequence
  ENSG00000180433_5 (sequence is synthesized)
caaccagatccaccagatattctgtgatttcacacctgtgctgagcttggcctgcacagatacattcctagtggtcattgtggatgccatccatgcagcggaaattgtagcctccttcct

SEQ ID NO: 634799 - DNA, 120 bp, Artificial Sequence
  ENSG00000180433_6 (sequence is synthesized)
ggtcattgctctatcctacatccggattattatagtgattctgggaatgcactcagctgaaggtcatcacaaggccttttccacctgtgctgctcaccttgctgtgttcttgctattttt

SEQ ID NO: 634800 - DNA, 120 bp, Artificial Sequence
  ENSG00000180433_7 (sequence is synthesized)
tggcagtgtggctgtcatgtatttgagattctcagccacctactcagtgttttgggacacagcaattgctgtcacttttgttatccttgctccctttttcaaccccatcatctatagcct

SEQ ID NO: 634801 - DNA, 120 bp, Artificial Sequence
  ENSG00000180433_8 (sequence is synthesized)
gaaaaacaaggacatgaaagaggctattggaaggcttttccactatcagaagagggctggttgggctgggaaatagatacagatcctggagactctaaaaagcctcttggaagagcaaaa

SEQ ID NO: 634802 - DNA, 120 bp, Artificial Sequence
  ENSG00000180440_0 (sequence is synthesized)
actcccgctgcgcctgctgtccgccgtgcgcccagactgcgcgccgcgccgctgcgcccaacattcccgaggacggcttcgcgggcgcgtatcgtccagaccggagcaccgccccaccgc

SEQ ID NO: 634803 - DNA, 120 bp, Artificial Sequence
  ENSG00000180440_1 (sequence is synthesized)
tagcgcaggagacctgccggggaagtcgcgtgtcctgacctgcagtctcaatgcacatctgatacctgctgcctttgagaaacaagttttgttgtgctgatttaacagcctgtgaattct

SEQ ID NO: 634804 - DNA, 120 bp, Artificial Sequence
  ENSG00000180440_2 (sequence is synthesized)
gcaaacacgatcgtgaaaaaatgccaatctgtcctgtgtaagccctgtgtgaagttttgactttaatctaccagatcactccttcaccctccataaagatgtctgaacctgacacttcct

SEQ ID NO: 634805 - DNA, 120 bp, Artificial Sequence
  ENSG00000180440_3 (sequence is synthesized)
caggattttcgggaagtgtggagaatggaacttttcttgagctgtttcccacatccctgtccacgtcagtggacccatcctcaggccacctgtcaaacgtctacatctatgtgtccatat

SEQ ID NO: 634806 - DNA, 120 bp, Artificial Sequence
  ENSG00000180440_4 (sequence is synthesized)
tcctcagccttttagcgtttctgcttctgcttttaatcattgccctccagaggctcaaaaatatcatctcctccagttcctcctacccagagtatccaagcgacgctggaagttctttca

SEQ ID NO: 634807 - DNA, 120 bp, Artificial Sequence
  ENSG00000180440_5 (sequence is synthesized)
ccaatttggaagtctgcagcatttcctctcagaggtccactttttcaaacctttcatcctgaggaaaatggaagagtccttgagtgtggcagcagttttgacatccccttacggaagtgt

SEQ ID NO: 634808 - DNA, 120 bp, Artificial Sequence
  ENSG00000180440_6 (sequence is synthesized)
cccgtgaggcattgcctcatgaaagaaatgatccttttggtgtagacctgcttctccttctcctttttctctgatttcttttctgttcatgatgcttttcatttggggatggagacaccg

SEQ ID NO: 634809 - DNA, 120 bp, Artificial Sequence
  ENSG00000180440_7 (sequence is synthesized)
atgttggtggaaatgtgtgcaaaccccaaggtgcagaatttcacacaaatggcttgatgaatctagactgggcttcttcaggtaagtcagttcattctactttgttggacgccgtaggct

SEQ ID NO: 634810 - DNA, 120 bp, Artificial Sequence
  ENSG00000180440_8 (sequence is synthesized)
catctgaggtggcctctccgtggatgctggacatggactcgcacttcatttcttttacaaagccgtgaaatcaactgagcctgcagaaactggcaaaatcaagtctgacctatgtagaag

SEQ ID NO: 634811 - DNA, 120 bp, Artificial Sequence
  ENSG00000180440_9 (sequence is synthesized)
ttattttccatatttaaaagataaagtggagacaccaaacttaaaaaggaagagagtcaatttagatttaatgtatgacatttctaaaactgagggtaaatatatgctaaatattttctt

SEQ ID NO: 634812 - DNA, 120 bp, Artificial Sequence
  ENSG00000180440_10 (sequence is synthesized)
taacttcactttaacaagtaaaaatcacacttattgatgaatgtaagtcatttgggaaagttttggaagagtttacattttaatagcaagacaaacatgtattatgatggagcttgtgat

SEQ ID NO: 634813 - DNA, 120 bp, Artificial Sequence
  ENSG00000180440_11 (sequence is synthesized)
gtatttctgcctcctggagttttattttgtttttctgcttatgttttagtcataatgccacaaagttgtggaatttttgtgattaattgctgttactagtactaagagaagcaccagaag

SEQ ID NO: 634814 - DNA, 120 bp, Artificial Sequence
  ENSG00000180440_12 (sequence is synthesized)
ctgtcgtgtaagttcctttattcggtttcatagtctttataattttagtgcagaattatattaagcctccaagatgtctgatatttgttcactcacattaggttgtaaaacttagaaact

SEQ ID NO: 634815 - DNA, 120 bp, Artificial Sequence
  ENSG00000180440_13 (sequence is synthesized)
aaattgcaaatatatgtgttattatatactccacgaatgttgcgtctctgataattagttgttgtatgttaacataatactctacattaggatttcaggatgtgagtttgtattaaaaat

SEQ ID NO: 634816 - DNA, 120 bp, Artificial Sequence
  ENSG00000180440_14 (sequence is synthesized)
tgtaggcactcaagttgtgtagctgctgggagctttagggatcctaggagctgccgtgctgcaggcagcagagtatgtctgaactcggcgggcgggtggcaggggctgtctgtgaaatta

SEQ ID NO: 634817 - DNA, 120 bp, Artificial Sequence
  ENSG00000180440_15 (sequence is synthesized)
ggcacacatgtgagctcagacatggaatgtggaggaactcaagctgcccctaaaaacaaaacaatcaaactgcagctccttaagagtaagaattttaatttaattttgaaaataaatggc

SEQ ID NO: 634818 - DNA, 120 bp, Artificial Sequence
  ENSG00000180440_16 (sequence is synthesized)
ccacagggtaaacactgaacttattcaacctacaggaggccactgcatcaacacgccacggtcttcccatggcaactgaatcattccttgttcaaaacatttaatcatcttaagcagtgg

SEQ ID NO: 634819 - DNA, 120 bp, Artificial Sequence
  ENSG00000180440_17 (sequence is synthesized)
ggcttcaacacaccgtttggttagattgtgcagtcagcactctccagtgattagaatgggggaaagaatccactatttgtacagggtttatctttatcatactaaaatgctgagtgagtg

SEQ ID NO: 634820 - DNA, 120 bp, Artificial Sequence
  ENSG00000180440_18 (sequence is synthesized)
gaggtctgggaatgaaaatcagaagtcttcttcttcttttaattcataagcctcacttaaatcagaacacatttaactatttatatatcaaaaacgtccccaaacaccataagaccagca

SEQ ID NO: 634821 - DNA, 120 bp, Artificial Sequence
  ENSG00000180440_19 (sequence is synthesized)
cagagttgctgccctaaaatgtataattagtgaaaaatttacctctgcttccatttaaagcatggcagtgggttgggtgtcattatgtagtataaaaactggactagataaactgctatt

SEQ ID NO: 634822 - DNA, 120 bp, Artificial Sequence
  ENSG00000180440_20 (sequence is synthesized)
tagcattctctgaatatatgtatatatacatatatatacgcacacacacacacacacataaatatatatatatatatatatatataaactcacatactcccaattaaaagtcgtgtgaaa

SEQ ID NO: 634823 - DNA, 120 bp, Artificial Sequence
  ENSG00000180440_21 (sequence is synthesized)
agtcgtgtgaaagctacacaggattacagaggcatctatattatcacttttgctctttgactaatcctatgctgtttttgttatagagagaaacaaggacatggatgaagtgattttttt

SEQ ID NO: 634824 - DNA, 120 bp, Artificial Sequence
  ENSG00000180440_22 (sequence is synthesized)
ttaaataaaaggacaaatttgccacacaacagaacaatctgagtatgatctgtcctcagggtatctttatatcctttccatgtgaaagagatataaagaattctgacagcaaaactactt

SEQ ID NO: 634825 - DNA, 120 bp, Artificial Sequence
  ENSG00000180440_23 (sequence is synthesized)
taaaaatcaaatcaaatcaaatccacaagcacactcccattcctcccctgccgcaatggttcttgctctcaatgtttagtagagaaattaagagccacattcaaagatggaaaataagat

SEQ ID NO: 634826 - DNA, 120 bp, Artificial Sequence
  ENSG00000180440_24 (sequence is synthesized)
ttgtcattagaagcttgccaaggtaacagattgtacaacttgagatgaattcatgttgtttaagaagttcagaaaggttggaagatgggtttataaataaagaagtggagtccattgaaa

SEQ ID NO: 634827 - DNA, 120 bp, Artificial Sequence
  ENSG00000180447_0 (sequence is synthesized)
agccgggctcagcggatccgctccccgggctcttggtcacccgagaagctgccgccgagtgaagccagggagccgctctccggcagcgccgactttcttgttctccccgcgcttcccgga

SEQ ID NO: 634828 - DNA, 120 bp, Artificial Sequence
  ENSG00000180447_1 (sequence is synthesized)
ctttcttgttctccccgcgcttcccggaaagagctccccggagctctgcggaggccggggttgccgcgggcggagggggaggggacgcggggcggccgggccgcgggaaggcgggcagcg

SEQ ID NO: 634829 - DNA, 120 bp, Artificial Sequence
  ENSG00000180447_2 (sequence is synthesized)
atgcgagagaccgcggcggcggtggcggcggcgaggcactgagcccaggaggaaggagccgccgcggccgcagcgcgagcagccggcacggggacagccggccgcacaacggatctgcag

SEQ ID NO: 634830 - DNA, 80 bp, Artificial Sequence
  ENSG00000180447_3 (sequence is synthesized)
acggatctgcaggcgcggagcaaaatgcacccgccgcgccgcgcggtcctgcagccccgccacggccccgcggcccgcac

SEQ ID NO: 634831 - DNA, 120 bp, Artificial Sequence
  ENSG00000180447_4 (sequence is synthesized)
ggctctcgggtgggagagcgggaccagatctcgacagctgttcatttccaggaagccaccgcagccagagcgaaaggggaccttctgccaccagcggggcatcagccagcggcgcgcatg

SEQ ID NO: 634832 - DNA, 120 bp, Artificial Sequence
  ENSG00000180447_5 (sequence is synthesized)
gatttatgaagacactcatgcaagaagtgggcaggacttggacaaacttttccaccggctccgcgtccgccgctccccgcgcctcgtctcctttcccctcctctcccggcggccgccgct

SEQ ID NO: 634833 - DNA, 80 bp, Artificial Sequence
  ENSG00000180447_6 (sequence is synthesized)
gcccgcggggggacagtgccgggcgcctggctgtgcctgatggcgctgctgcagctgctgggctcggcgccgcggggatc

SEQ ID NO: 634834 - DNA, 120 bp, Artificial Sequence
  ENSG00000180447_7 (sequence is synthesized)
ggggctggcgcacggccgccgcctcatctgctggcaggcgctgctgcagtgccagggggagccggagtgcagctacgcctacaaccagtacgccgaggcgtgcgcgccggtgctggcgca

SEQ ID NO: 634835 - DNA, 120 bp, Artificial Sequence
  ENSG00000180447_8 (sequence is synthesized)
gcacggcgggggcgacgcgcccggggccgccgccgccgctttcccggcctcggccgcctctttctcgtcgcgctggcgctgcccgagtcactgcatctcggccctcattcagctcaacca

SEQ ID NO: 634836 - DNA, 120 bp, Artificial Sequence
  ENSG00000180447_9 (sequence is synthesized)
cacgcgccgcgggcccgccctggaggactgtgactgcgcgcaggacgagaactgcaagtccaccaagcgcgccattgagccgtgcctgccccggacgagcggcggcggcgcgggcggccc

SEQ ID NO: 634837 - DNA, 120 bp, Artificial Sequence
  ENSG00000180447_10 (sequence is synthesized)
cggcgcgggcggggtcatgggctgcaccgaggcccggcggcgctgcgaccgcgacagccgctgcaacctggcgctgagccgctacctgacctactgcggcaaagtcttcaacgggctgcg

SEQ ID NO: 634838 - DNA, 120 bp, Artificial Sequence
  ENSG00000180447_11 (sequence is synthesized)
ctgcacggacgaatgccgcaccgtcattgaggacatgctggctatgcccaaggcggcgctgctcaacgactgcgtgtgcgacggcctcgagcggcccatctgcgagtcggtcaaggagaa

SEQ ID NO: 634839 - DNA, 120 bp, Artificial Sequence
  ENSG00000180447_12 (sequence is synthesized)
catggcccgcctgtgcttcggcgccgagctgggcaacggccccggcagcagcggctcggacgggggcctggacgactactacgatgaggactacgatgacgagcagcgcaccgggggcgc

SEQ ID NO: 634840 - DNA, 80 bp, Artificial Sequence
  ENSG00000180447_13 (sequence is synthesized)
gacgacggcgtcccgcacccaccgcgcccgggcagcggcgctgctgcatcgggcggccgcggggacctgccctatgggcc

SEQ ID NO: 634841 - DNA, 120 bp, Artificial Sequence
  ENSG00000180447_14 (sequence is synthesized)
cggggcgcctggaccccactcgcctccatcttgctgctgctgcttgggccgctcttttagccctcgcgccccccgccgttggctgcgggagagcccgcgtcccactcccgtgctcgcctc

SEQ ID NO: 634842 - DNA, 120 bp, Artificial Sequence
  ENSG00000180447_15 (sequence is synthesized)
gaccccgcgccgggcacctgtggcttgggacagatagaagggatggttggggatacttcccaaaactttttccaagtcaacttggtgtagccggttccccggccacgactctgggcactt

SEQ ID NO: 634843 - DNA, 120 bp, Artificial Sequence
  ENSG00000180447_16 (sequence is synthesized)
cccctgaagctcctctccggagcttgacttcttggacctcctcccccgccccaattccaagctccagaaactcccaactcgtctgccgtccagaaagctagctgcagtgttcaggacgtc

SEQ ID NO: 634844 - DNA, 120 bp, Artificial Sequence
  ENSG00000180447_17 (sequence is synthesized)
cgggaggaagcaagcatgtgggggacagaacagtagtcctggactcgaaagggaaggtgctgaccagtggggccttagcaatttgaagggttgggaaggaggaattatatttgcaaaggg

SEQ ID NO: 634845 - DNA, 120 bp, Artificial Sequence
  ENSG00000180447_18 (sequence is synthesized)
gctgtctattagcatatttcctttgagggggcaaaaaaaagtgccagtatcgacttttacagattgtggccagtgaggatattataatcctatgtaaacagaaaagtcccacttaccgat

SEQ ID NO: 634846 - DNA, 120 bp, Artificial Sequence
  ENSG00000180447_19 (sequence is synthesized)
tcattctttcactgtttgtatctgcgcccagaattctcagtgacgtgggggtgagggtgggtggcgattgccttagagggaacccctaaattggttttggataagtttgagcccttgacc

SEQ ID NO: 634847 - DNA, 120 bp, Artificial Sequence
  ENSG00000180447_20 (sequence is synthesized)
ttaatttcattgctaccactctgatctcttagcacatttcttaggattaagggtccaaaaatgctgatctaaggggttgccatggtgttgaacaatgcaactttttatttaaaaaagctc

SEQ ID NO: 634848 - DNA, 120 bp, Artificial Sequence
  ENSG00000180447_21 (sequence is synthesized)
tgcactgccatgtatgaaagtctctttatgatgtttgtttttttgtcatttttgttctttacatcaagaaattttatgtttaaatatgcggagaatgtatattgcctctgctcctatcag

SEQ ID NO: 634849 - DNA, 120 bp, Artificial Sequence
  ENSG00000180447_22 (sequence is synthesized)
ggttgctaaaccctggtacatcgtatataaaatgtattaaaactggggtttgttaccagttgctgtactttgtatatagaatttttataaattgtatgcttcagaaataatttattttta

SEQ ID NO: 634850 - DNA, 120 bp, Artificial Sequence
  ENSG00000180447_23 (sequence is synthesized)
aaaagaaattaaaagttttaaactcacatccatattacacctttcccccctgaaatgtatagaatccatttgtcatcaggaatcaaaacccacagtccattgtgaagtgtgctatattta

SEQ ID NO: 634851 - DNA, 120 bp, Artificial Sequence
  ENSG00000180447_24 (sequence is synthesized)
gaacagtcttaaaatgtacagtgtattttatagaattgaagttaacattcttattttcaagagaatttatggacgttgtagaaatgtacaaatgcatttccaaactgccttaaacgttgt

SEQ ID NO: 634852 - DNA, 120 bp, Artificial Sequence
  ENSG00000180447_25 (sequence is synthesized)
aacgttgtatttttatagacatgttttttaaaaatcctaagtttttaaataactatggatttgtgtattttttttggttatttgttttattaaaacatgtacatcagtaaagagttttaa

SEQ ID NO: 634853 - DNA, 120 bp, Artificial Sequence
  ENSG00000180448_0 (sequence is synthesized)
cactccgcagagccgcaggctgaggccgggaagggtcgggggcgaggccgcgtcgccgcctccccgaagccttttcctgttggggggagggcccgccagtgacggccgggcctgtcacgt

SEQ ID NO: 634854 - DNA, 120 bp, Artificial Sequence
  ENSG00000180448_1 (sequence is synthesized)
ctgacagctggggagggggtggccggcgacaatgtggtcccgaagcggccagcgccgggagctgcagcgctgagacccccagcccgccccctcgggctcccggccggggccccatcatgt

SEQ ID NO: 634855 - DNA, 120 bp, Artificial Sequence
  ENSG00000180448_2 (sequence is synthesized)
atgttctccaggaagaaacgagagctcatgaaaaccccttccatctcgaaaaagaaccgcgcgggaagccccagcccgcagccctcgggggagctgcccaggaaggatggggctgacgcg

SEQ ID NO: 634856 - DNA, 120 bp, Artificial Sequence
  ENSG00000180448_3 (sequence is synthesized)
gtgttccccggaccaagcctggagccgcccgctgggtcctccggcgtcaaggccacagggaccctcaagcggcccaccagcctgagccgccacgccagcgcggctggcttccccctgtcg

SEQ ID NO: 634857 - DNA, 120 bp, Artificial Sequence
  ENSG00000180448_4 (sequence is synthesized)
ggtgctgcctcctggacactgggccggagccaccggagcccactgacagccgccagcccgggcgagctgcccaccgagggtgccggcccggacgtcgtcgaggacatctcccatctgctg

SEQ ID NO: 634858 - DNA, 120 bp, Artificial Sequence
  ENSG00000180448_5 (sequence is synthesized)
gcggacgtggcccgcttcgctgagggccttgagaaacttaaggagtgtgtgttgcgtgacgacctccttgaggcccgccgcccgcgggcccacgagtgcctgggtgaggctctgcgtgtc

SEQ ID NO: 634859 - DNA, 120 bp, Artificial Sequence
  ENSG00000180448_6 (sequence is synthesized)
atgcatcagatcatctccaagtacccgctgctgaacaccgtggagacgctcaccgcagccggcaccctcattgccaaggtcaaagccttccattatgagagcaacaatgatctggagaaa

SEQ ID NO: 634860 - DNA, 120 bp, Artificial Sequence
  ENSG00000180448_7 (sequence is synthesized)
caggagttcgagaaggccctggagacgattgctgtggccttcagtagcacagtgtccgagttcctcatgggtgaagtggacagcagcaccctcctagcagtgcctcctggggactcgagc

SEQ ID NO: 634861 - DNA, 120 bp, Artificial Sequence
  ENSG00000180448_8 (sequence is synthesized)
cagtccatggaaagcctgtatggaccgggcagtgagggcacgcctcccagcctggaagactgtgacgccggctgcctgcccgccgaggaggtggacgtgctgctacagcgctgtgagggg

SEQ ID NO: 634862 - DNA, 120 bp, Artificial Sequence
  ENSG00000180448_9 (sequence is synthesized)
ggcgtggatgccgcactgctgtatgccaagaacatggccaagtacatgaaggacctcatcagctacctggagaagcggacgacgctggagatggagtttgccaagggcctgcagaagatc

SEQ ID NO: 634863 - DNA, 120 bp, Artificial Sequence
  ENSG00000180448_10 (sequence is synthesized)
gctcacaactgcagacagagcgtcatgcaggagccccacatgccgctcctgtccatctactcgctggccctggagcaggacctggagttcggccacagcatggtgcaggcggtgggcacc

SEQ ID NO: 634864 - DNA, 120 bp, Artificial Sequence
  ENSG00000180448_11 (sequence is synthesized)
ttgcagacccagaccttcatgcagcccctgaccctgcggcggcttgaacacgagaagcgcaggaaggagatcaaggaggcctggcaccgtgcccagaggaagctgcaagaggcggagtcc

SEQ ID NO: 634865 - DNA, 120 bp, Artificial Sequence
  ENSG00000180448_12 (sequence is synthesized)
aacctgcgcaaggccaagcagggttacgtgcagcgctgcgaggaccacgacaaggctcgcttcctcgtggccaaggcggaggaggagcaggctggcagcgcgccgggagcaggcagcacg

SEQ ID NO: 634866 - DNA, 120 bp, Artificial Sequence
  ENSG00000180448_13 (sequence is synthesized)
gccaccaagaccctggacaagcggcggcggctggaggaggaggccaagaacaaggcggaggaagctatggccacctaccgcacctgcgtggccgacgcgaagacgcagaagcaggagctg

SEQ ID NO: 634867 - DNA, 120 bp, Artificial Sequence
  ENSG00000180448_14 (sequence is synthesized)
gaggataccaaggtgacggcgctgcggcagatccaggaggtcatccggcagagcgaccaaaccatcaagtcggccacgatctcctactaccagatgatgcatatgcagacggcgccgctg

SEQ ID NO: 634868 - DNA, 120 bp, Artificial Sequence
  ENSG00000180448_15 (sequence is synthesized)
cccgtgcacttccagatgctgtgtgagagcagcaagctgtatgacccaggccagcagtacgcctcccacgtgcgccagctgcagcgggaccaggagcccgatgtgcactacgactttgag

SEQ ID NO: 634869 - DNA, 120 bp, Artificial Sequence
  ENSG00000180448_16 (sequence is synthesized)
ccccacgtctccgccaacgcctggtcccccgtcatgcgtgcccggaagagcagcttcaacgtgagtgatgtggcgcggccggaggctgccgggagccccccagaagaaggcgggtgcact

SEQ ID NO: 634870 - DNA, 120 bp, Artificial Sequence
  ENSG00000180448_17 (sequence is synthesized)
cagactcggacagtgggctggaccccggccctggcgcaggggactttaagaagttcgagcggacgtcatccagtggtaccatgtcgtccacggaggagctggtggacccagacggtggag

SEQ ID NO: 634871 - DNA, 120 bp, Artificial Sequence
  ENSG00000180448_18 (sequence is synthesized)
ccggggcttcagcctttgagcaggctgacctcaacggcatgacccccgagctgccggtggccgtgcccagtggaccgttccgccacgaggggctgtccaaggcggcccgtactcaccggc

SEQ ID NO: 634872 - DNA, 120 bp, Artificial Sequence
  ENSG00000180448_19 (sequence is synthesized)
tccggaagctccgcacgcccgccaagtgccgcgagtgcaacagctacgtctacttccagggtgctgagtgtgaagagtgctgcctggcctgccacaagaaatgtctggagacgctggcca

SEQ ID NO: 634873 - DNA, 120 bp, Artificial Sequence
  ENSG00000180448_20 (sequence is synthesized)
tacagtgcgggcacaagaagctgcaaggccgcctgcagctgttcggccaggacttcagccacgcggcccgcagcgcccccgacggcgtgcccttcatcgtcaagaagtgcgtctgcgaga

SEQ ID NO: 634874 - DNA, 120 bp, Artificial Sequence
  ENSG00000180448_21 (sequence is synthesized)
tcgagcggcgggcgctgcgcaccaagggcatctaccgggtcaatggggtaaagacacgcgtggagaagctgtgccaggccttcgagaacggcaaggagctggtcgagctgtcgcaggcct

SEQ ID NO: 634875 - DNA, 120 bp, Artificial Sequence
  ENSG00000180448_22 (sequence is synthesized)
cgccccacgacatcagcaacgtcctcaagctctacctgcgtcagcttcccgagccgctcatctccttccgcctctaccacgagctcgtagggctggccaaggacagcctgaaggcagagg

SEQ ID NO: 634876 - DNA, 120 bp, Artificial Sequence
  ENSG00000180448_23 (sequence is synthesized)
gaggccgaggccaaggcggcgtcccggggccggcaggacggctcggagagcgaggcagtggcggtggccctggcaggtcggctgcgggagctcctgcgggacctgccgcctgagaaccgg

SEQ ID NO: 634877 - DNA, 120 bp, Artificial Sequence
  ENSG00000180448_24 (sequence is synthesized)
cgctgcagtacctgctgcgtcacctacgcaggatcgtggaggtggagcaggacaacaagatgacccccgggaacctgggcatcgtgttcgggcccacgctgcttcggccacggcccaccg

SEQ ID NO: 634878 - DNA, 120 bp, Artificial Sequence
  ENSG00000180448_25 (sequence is synthesized)
aggccaccgtgtccctctcctccctggtggattatccccatcaggcccgcgtcatcgagactctcatcgtccactacggcctggtcttcgaggaggagccggaggagacccccgggggcc

SEQ ID NO: 634879 - DNA, 120 bp, Artificial Sequence
  ENSG00000180448_26 (sequence is synthesized)
aggacgagtcatccaaccagcgagctgaggtagtcgtccaggtgccgtacctggaggcgggcgaggcggtggtctacccgctgcaggaggcggcggcggacgggtgcagagaatcccgag

SEQ ID NO: 634880 - DNA, 120 bp, Artificial Sequence
  ENSG00000180448_27 (sequence is synthesized)
ttgtgtccaacgattcggactcggacctagaggaggcctccgagctgctgtcctcatcggaggccagtgccctgggccacctcagcttcctggagcagcagcagagcgaggccagcctag

SEQ ID NO: 634881 - DNA, 120 bp, Artificial Sequence
  ENSG00000180448_28 (sequence is synthesized)
aggtggcttctggcagccacagcggcagtgaggagcagctggaggccacagcccgggaggacggggacggggacgaggacggcccggcccagcagctctcaggattcaacaccaaccagt

SEQ ID NO: 634882 - DNA, 120 bp, Artificial Sequence
  ENSG00000180448_29 (sequence is synthesized)
ccaacaacgtgctgcaggccccactgccccccatgaggctccgtggcgggcggatgacactgggctcctgcagggaaaggcagccggaattcgtgtgagctggggtggggctgggaccac

SEQ ID NO: 634883 - DNA, 120 bp, Artificial Sequence
  ENSG00000180448_30 (sequence is synthesized)
aggtggcttctctcttgcctgctcctgtccctccagcacgtcccctgcaccacggcatagcttaggtgcgccgtcctggggtcgctgccgagagcgcctggacttcgacgtcccaccagc

SEQ ID NO: 634884 - DNA, 120 bp, Artificial Sequence
  ENSG00000180448_31 (sequence is synthesized)
gggcgcctcctcccagaggcttccaggagcacgagggccttgcggcacaggactgtgccctgtgctgtcccctgcaccccggctcagctgagctggggaacactgctgtcgtgtgaagtc

SEQ ID NO: 634885 - DNA, 120 bp, Artificial Sequence
  ENSG00000180448_32 (sequence is synthesized)
acagtggccttgttggtgcccacagggctgtgtggatggaggaagctgtccctgcccagtgcatcccccaggtcatcacggggacgcaggaggcaggccctgccctgccctctcctcaca

SEQ ID NO: 634886 - DNA, 120 bp, Artificial Sequence
  ENSG00000180448_33 (sequence is synthesized)
ggtctgttgcagggactccagaaaccattctgggagccgtggatgggggcggagctggggtttggtgcagtttccagggtgcagtacagcagggcctgaatactggccctggactccctt

SEQ ID NO: 634887 - DNA, 120 bp, Artificial Sequence
  ENSG00000180448_34 (sequence is synthesized)
ttccagaacaccaggtgtggccacctggggctcaggtacacagtggggtctctcggaagccaccgtgtggttctttcacaggcacgtttattttgctgaaataaaaagtttttaatcggg

SEQ ID NO: 634888 - DNA, 120 bp, Artificial Sequence
  ENSG00000180448_35 (sequence is synthesized)
aagcttacaggagcccggtgtcccggagcacaggccagggccgggccagaagcccatccgacatccagctgaccctcaccctctgaccccagccctcagcgccatgagtcgggggcaaag

SEQ ID NO: 634889 - DNA, 120 bp, Artificial Sequence
  ENSG00000180448_36 (sequence is synthesized)
agttctcaagggtctgctgggctgggtttgcacttggacctgggcctggagagccagacttggagcaaggggctgtggccttcatgtcctgtgccccagagatctgcccctcccacccga

SEQ ID NO: 634890 - DNA, 120 bp, Artificial Sequence
  ENSG00000180448_37 (sequence is synthesized)
cggagacccccatcggtcagctgccaggccccacgcgctcgcggtctccgcgccccgacggctgcgccatgtgtatctgcgggacggcgcacccggtgctggacgagggccccgtgcgct

SEQ ID NO: 634891 - DNA, 120 bp, Artificial Sequence
  ENSG00000180448_38 (sequence is synthesized)
gagtggagcccgggtgagacccggagctgacgccgggccgcagggggacagggacccgccctgtgctcggggctcatgctggggcggcggctgggggctcgtgccagctacagcccctac

SEQ ID NO: 634892 - DNA, 120 bp, Artificial Sequence
  ENSG00000180448_39 (sequence is synthesized)
tgccaaggaccacaggggtgagtgtccggcggggcccaggggcggacgctggctccctgcgacccaccctggcccttcaccagagacgcctctttctccagccgggcgaggacaccaggt

SEQ ID NO: 634893 - DNA, 120 bp, Artificial Sequence
  ENSG00000180448_40 (sequence is synthesized)
agtagcacgtgagcacgggagcctgtggggcagggcaagggagcgtggggggcccgggtgtctctcgatggtgacctcgctggccctgcagagtgtccgagttcctcatgggtgaagtgg

SEQ ID NO: 634894 - DNA, 120 bp, Artificial Sequence
  ENSG00000180448_41 (sequence is synthesized)
agtgggaccagcacttcgcaggtggttgggaaggggtcagactatgctgagtggagccggagctcgttagggtacctgcagggcggggcgcgcgtggccagagcgagaaagggagtggag

SEQ ID NO: 634895 - DNA, 120 bp, Artificial Sequence
  ENSG00000180448_42 (sequence is synthesized)
aaccaggtgtcctcagcatattctgccgatggtggggtccacaccacactttggggacccctgtgcaggcagcccaggaccaggtggacgtggggacccagacggacgtggggacccaga

SEQ ID NO: 634896 - DNA, 62 bp, Artificial Sequence
  ENSG00000180448_43 (sequence is synthesized)
gtagctgggattacaagcgtgcaccacaatgcccggctaattgttttaaattttgggtagat

SEQ ID NO: 634897 - DNA, 79 bp, Artificial Sequence
  ENSG00000180448_44 (sequence is synthesized)
tcctcctgtttttccgctgccgattgttgtgcagggtcctctgcatgcccagctgggccatggggccttgctgagagag

SEQ ID NO: 634898 - DNA, 120 bp, Artificial Sequence
  ENSG00000180448_45 (sequence is synthesized)
tctgcatgcccagctgggccatggggccttgctgagagagatgggggtggggaggaaaggaggagctggggagactgagtcccatccgaggatagggttggaactggcctcctggctccc

SEQ ID NO: 634899 - DNA, 120 bp, Artificial Sequence
  ENSG00000180448_46 (sequence is synthesized)
gggggtccgtgcgccggccgcgcgcggagtgccgggtgcccggctggaaggtcccgagaaggggcgtggccggggcctcccagcggcttcccggagctcctggagccccaatcccattcc

SEQ ID NO: 634900 - DNA, 120 bp, Artificial Sequence
  ENSG00000180448_47 (sequence is synthesized)
ccactgtccagcttgtgtttgcagaagctgccgtgtgggggctgtgagcgccccggggaggtggggtggagccgctgggggctgcgctgagctgggcgccccggggctgggctcactcac

SEQ ID NO: 634901 - DNA, 120 bp, Artificial Sequence
  ENSG00000180475_0 (sequence is synthesized)
cagccaagaagagctcagcgcgtcctattcttttgcataagacatgcctgtggggaaacttgtcttcaaccagtctgagcccactgagtttgtgttccgtgcgttcaccacagccactga

SEQ ID NO: 634902 - DNA, 120 bp, Artificial Sequence
  ENSG00000180475_1 (sequence is synthesized)
attccaggttcttctcttccttctcttcctcctcctctacttgatgatcctctgtggcaacacagccatcatctgggtggtgtgcacacacagcaccctccgcaccccgatgtatttctt

SEQ ID NO: 634903 - DNA, 120 bp, Artificial Sequence
  ENSG00000180475_2 (sequence is synthesized)
cctgtccaacctgtctttcctggaactctgctacaccaccgtggtagtacccttgatgctttccaacattttgggggcccagaagcccatttcgttggctggatgtggggcccaaatgtt

SEQ ID NO: 634904 - DNA, 120 bp, Artificial Sequence
  ENSG00000180475_3 (sequence is synthesized)
cttctttgtcaccctcggcagcacggactgtttcctcttggcgatcatggcctatgaccgctatgtggctatctgccacccgctgcactacaccctcatcatgacccgcgagctgtgcac

SEQ ID NO: 634905 - DNA, 120 bp, Artificial Sequence
  ENSG00000180475_4 (sequence is synthesized)
tttgcggccaccaccaggaaatcaaccacttcctctgcgatgtgcctcccgtcctgcgcctggcctgcgctgacatccgcgtgcaccaggctgtcctctatgtcgtgagcatcctcgtgc

SEQ ID NO: 634906 - DNA, 120 bp, Artificial Sequence
  ENSG00000180475_5 (sequence is synthesized)
tgaccatccccttcctgctcatctgcgtctcctacgtgttcatcacctgtgccatcctgagcatccgttctgccgagggccgccgccgggccttctccacctgctccttccacctcaccg

SEQ ID NO: 634907 - DNA, 120 bp, Artificial Sequence
  ENSG00000180475_6 (sequence is synthesized)
tggtcctgctgcagtatggctgctgcagcctcgtgtacctgcgtcctcggtccagcacctcagaggatgaggacagccaaatcgcgttggtctacacctttgtcacccccttactcaacc

SEQ ID NO: 634908 - DNA, 120 bp, Artificial Sequence
  ENSG00000180475_7 (sequence is synthesized)
ctttgctttacagccttaggaacaaggatgtcaaaggtgctctgaggagtgccattatccgtaaagcagcctctgacgccaactgaaggcttaggggcactgggctgggtgtctgtctgt

SEQ ID NO: 634909 - DNA, 120 bp, Artificial Sequence
  ENSG00000180479_0 (sequence is synthesized)
acacttacgctgttatgtcttgacgcacggagcttgtctgcgccggccagcactggcttctctggactttgcacacctccaggagaagaacccagaaaattgatcagttctaaaaaacca

SEQ ID NO: 634910 - DNA, 120 bp, Artificial Sequence
  ENSG00000180479_1 (sequence is synthesized)
tgccccacttgttggtgactttcagggatgtggccattgacttctctcaggaggaatgggaatgcctggaccctgctcagagggacttgtacagggatgtgatgttggagaactacagca

SEQ ID NO: 634911 - DNA, 120 bp, Artificial Sequence
  ENSG00000180479_2 (sequence is synthesized)
acctgatctcattggacttggaatccagttgtgtgaccaaaaagttatctccagaaaaggaaatttatgaaatggaatcactccagtgggagaatatggggaaacgtatcaaccatcacc

SEQ ID NO: 634912 - DNA, 120 bp, Artificial Sequence
  ENSG00000180479_3 (sequence is synthesized)
ttcaatacaatggtcttggagacaatatggagtgcaaaggcaacttagagggtcaagaagcaagtcaggaagggctttacatgtgtgtcaaaattacctgtgaagaaaaggccactgaaa

SEQ ID NO: 634913 - DNA, 120 bp, Artificial Sequence
  ENSG00000180479_4 (sequence is synthesized)
gtcattcaacctcttctacttttcatcggataattcctaccaaggaaaaattgtacaaatgtaaggaatgcagacaaggtttcagctacctgtcatgccttattcaacatgaggaaaatc

SEQ ID NO: 634914 - DNA, 120 bp, Artificial Sequence
  ENSG00000180479_5 (sequence is synthesized)
ataatatagaaaaatgctctgaagttaagaaacacaggaatacctttagcaaaaagccaagctatattcaacatcagagaattcagactggtgagaaaccttatgagtgtatggaatgtg

SEQ ID NO: 634915 - DNA, 120 bp, Artificial Sequence
  ENSG00000180479_6 (sequence is synthesized)
gaaaggcctttggtcgtacttctgatctcattcaacatcagaaaattcatactaatgaaaaaccttatcagtgtaacgcatgtgggaaagcttttattcgtggttcacagctcactgaac

SEQ ID NO: 634916 - DNA, 120 bp, Artificial Sequence
  ENSG00000180479_7 (sequence is synthesized)
atcagagagttcatacaggagagaaaccatatgaatgtaagaaatgtggaaaagcctttagttattgttcacaatatactcttcatcagagaattcatagtggtgaaaaaccctatgaat

SEQ ID NO: 634917 - DNA, 120 bp, Artificial Sequence
  ENSG00000180479_8 (sequence is synthesized)
gtaaggattgtgggaaggcctttattcttggctctcaacttacttaccatcagagaattcatagtggtgagaaaccttatgagtgtaaggaatgtggaaaggcctttattcttggttcac

SEQ ID NO: 634918 - DNA, 120 bp, Artificial Sequence
  ENSG00000180479_9 (sequence is synthesized)
accttacataccatcagagagttcatactggtgaaaagccttacatatgtaaagaatgtgggaaagcctttttatgtgcctcccaactgaatgaacatcagagaattcatacaggagaga

SEQ ID NO: 634919 - DNA, 120 bp, Artificial Sequence
  ENSG00000180479_10 (sequence is synthesized)
aaccctatgaatgtaaagaatgcgggaagaccttttttcgtggctcacaacttacttaccacctgagagttcattcaggtgagagaccttataaatgcaaagaatgtgggaaagccttta

SEQ ID NO: 634920 - DNA, 120 bp, Artificial Sequence
  ENSG00000180479_11 (sequence is synthesized)
tttctaattctaatcttattcaacatcaaagaattcataccggagagaagccctacaaatgtaaggaatgtggaaaggcctttatttgtggcaaacaacttagtgaacatcagagaattc

SEQ ID NO: 634921 - DNA, 120 bp, Artificial Sequence
  ENSG00000180479_12 (sequence is synthesized)
atacaggtgagaaaccctttgaatgtaaggaatgtggaaaggcctttattcgtgttgcatatcttactcaacatgagaaaattcatggtgagaaacattatgaatgtaaggaatgtggga

SEQ ID NO: 634922 - DNA, 120 bp, Artificial Sequence
  ENSG00000180479_13 (sequence is synthesized)
agacctttgtacgtgctacacaacttacatatcatcaaagaattcatacaggtgaaaagccctacaaatgtaaggaatgtgacaaggcctttatttatggctcacaacttagtgaacatc

SEQ ID NO: 634923 - DNA, 120 bp, Artificial Sequence
  ENSG00000180479_14 (sequence is synthesized)
agagaattcacagaggtgaaaaaccttatgaatgtaaacagtgtgggaaggcttttattcgtggctcacaccttactgaacatctgagaactcatactggagagaaaccctatgaatgta

SEQ ID NO: 634924 - DNA, 120 bp, Artificial Sequence
  ENSG00000180479_15 (sequence is synthesized)
aggaatgtgggagggcctttagtcgtggctcagaacttactctgcatcaaaggatccatactggtgagaaaccctatacatgtgtccagtgtggtaaagactttagatgtccttcacaac

SEQ ID NO: 634925 - DNA, 120 bp, Artificial Sequence
  ENSG00000180479_16 (sequence is synthesized)
ttactcaacatacaaggcttcataattgagaaagccttgaatgtgattaaatttaagaaaatcttcatctatttcatatctataatgaatgtagaacatcttgcttctgctcagaatctg

SEQ ID NO: 634926 - DNA, 120 bp, Artificial Sequence
  ENSG00000180479_17 (sequence is synthesized)
cagaataatttcagaaaccccttaaataattccttaacatctctataaacgctagaatataatgctgaattatatcctttattaagcatcatctccatttcaccatatcctaactgaaat

SEQ ID NO: 634927 - DNA, 120 bp, Artificial Sequence
  ENSG00000180479_18 (sequence is synthesized)
aaatcctatatatttcttgtgtgttcttttctatttgtaaaatactgtaattgtattacaatgactaaattataattaaatacatataattccctttcgatagcatctgatatttgttgt

SEQ ID NO: 634928 - DNA, 120 bp, Artificial Sequence
  ENSG00000180479_19 (sequence is synthesized)
atgattgccattatcatcattacatactgttagagaactcaaatggtgggaatattttatgattacagtaaaaagatgcaaccattctcttatcatgtagcccctttagaacaacagata

SEQ ID NO: 634929 - DNA, 120 bp, Artificial Sequence
  ENSG00000180479_20 (sequence is synthesized)
ctttattttagacaaaacctttaaagtatagtaaaggtatgaaggacttctgagcatcagataatccacaccaggaagaaacttccaaaaattgctttagggctgttgttttttgttgtt

SEQ ID NO: 634930 - DNA, 120 bp, Artificial Sequence
  ENSG00000180479_21 (sequence is synthesized)
ttgttttttaagaaagtgaaagattatttttctacaacaaattccaaaagcaaaagtttttggcccacattttctgattgttactttaagggaaaaagaatttcttaacaaaatgatggc

SEQ ID NO: 634931 - DNA, 120 bp, Artificial Sequence
  ENSG00000180479_22 (sequence is synthesized)
caaggtagttccatatatatacatatattccacatgtgtgtatgtggaatatattccacatgtgtgtatgtggaatatattccacatgtgtatatattccacgtgtatgtattccacatg

SEQ ID NO: 634932 - DNA, 120 bp, Artificial Sequence
  ENSG00000180479_23 (sequence is synthesized)
tatatattccacatatgtatacattccacgtgtgtatatagtccccatatgtatacattccacgtgtgtatatattccacatatgtatacattccatgtatgtatgcatatatgtattcc

SEQ ID NO: 634933 - DNA, 120 bp, Artificial Sequence
  ENSG00000180479_24 (sequence is synthesized)
atgtatatattccacatatgtattccatatatatattccatatgtatatgtgtgtgtgtataaaatatatatttgccttaaatggaaatataaacaaaatttaccaactacagtttttcc

SEQ ID NO: 634934 - DNA, 120 bp, Artificial Sequence
  ENSG00000180479_25 (sequence is synthesized)
aacaaaatttaccaactacagtttttcctcatttgaatctaacccatttctgatatactgaatggtaaatttttagagacccagatctcggaggctacattccattttttggtctttttg

SEQ ID NO: 634935 - DNA, 84 bp, Artificial Sequence
  ENSG00000180479_26 (sequence is synthesized)
ccagatctcggaggctacattccattttttggtctttttgtcttttttttctttttttttgagacagggtcttgctctccttgt

SEQ ID NO: 634936 - DNA, 120 bp, Artificial Sequence
  ENSG00000180479_27 (sequence is synthesized)
agcctgccaagtagctgtcaccatagctgttcatcaccatgcctagctcatttaaaaaaaaatttttttagagatggggtctcactatgtttcctcatctggtcttaaacttctaggctc

SEQ ID NO: 634937 - DNA, 120 bp, Artificial Sequence
  ENSG00000180479_28 (sequence is synthesized)
aagcatctacctgcctcagcctccagaagtgctgggattacaaatgtgagccaccacatctggccccattattttatttttggtttgtattatttttatttggccccattattttaaata

SEQ ID NO: 634938 - DNA, 120 bp, Artificial Sequence
  ENSG00000180479_29 (sequence is synthesized)
ggaaaaacagtatgttttcagtccattaaaaaatcctaaccaaatttaatttgaattcaacttaatttaagccacctaaatgacctctatcagggatttctgaataatgtaaaacactca

SEQ ID NO: 634939 - DNA, 120 bp, Artificial Sequence
  ENSG00000180479_30 (sequence is synthesized)
aaagccagttaacagttaattaccagatatgtttgtgcatgcagtgattttgaaaaatataatacatgaattatgctttccttctatgctttaaggaacagatactatagtgacaataaa

SEQ ID NO: 634940 - DNA, 120 bp, Artificial Sequence
  ENSG00000180479_31 (sequence is synthesized)
tgtaatacattagtacataatggacgcaaatgacagataaaaacagctttaaataatttgaacttgttaattagaatgttgttgaatgagggctgatggtcagaaattaatgatggtgag

SEQ ID NO: 634941 - DNA, 120 bp, Artificial Sequence
  ENSG00000180479_32 (sequence is synthesized)
aagaggttaatggtgttcagtgagtgaaggtgagttagaataatatattggagcagcaatcaatcaatgcctacagttcttctatgattccaagcatctggtgcacagaactcaagacct

SEQ ID NO: 634942 - DNA, 120 bp, Artificial Sequence
  ENSG00000180479_33 (sequence is synthesized)
caaaattgagttactgtatacaaagctgttcatagaaaaacaaatgttaccaagaaatacttaccttttctatatgcagtgttatctcttgtcttctaatacattatcttttttggtttc

SEQ ID NO: 634943 - DNA, 120 bp, Artificial Sequence
  ENSG00000180479_34 (sequence is synthesized)
gagcttgtctgcgccggccagcgcttggcccctcccgggccgcagtactcctcgtgtgacacggacatcattaagccagctgagaatcgtgcggttacagctgctgcagtttctttgcag

SEQ ID NO: 634944 - DNA, 120 bp, Artificial Sequence
  ENSG00000180479_35 (sequence is synthesized)
ggccaggtgagtgggcggcctcaccgggaaccgctcgcagcttttgggttgcttcatcgaaaaagtagttcttgtatggtgctgggaataccggtgtcctggctggggctcggtgctgac

SEQ ID NO: 634945 - DNA, 120 bp, Artificial Sequence
  ENSG00000180479_36 (sequence is synthesized)
aggaacgggacggtgctctggctaattacttatggaagtcggccttgcgcttgcggaggggtgtcggcaccgtcactttggttctggcagtggcgggggtgtggtgctgctagttgtgtt

SEQ ID NO: 634946 - DNA, 120 bp, Artificial Sequence
  ENSG00000180479_37 (sequence is synthesized)
cctccgcaccgaatttatgagtgtgcccctggagcccctgccgcggacaaaatcggcaccataactttgggatagggaggctagaaggaggcgggtgttactagtagtgttcctccgccc

SEQ ID NO: 634947 - DNA, 120 bp, Artificial Sequence
  ENSG00000180479_38 (sequence is synthesized)
tggacgtgtgcgtgtgcgcttgtgcggccgcggggtgggctcacctgccgcctgttaatgctcctagcgcttggcccctcccgggccgcagtactcctcgtgtgacacggacatcattaa

SEQ ID NO: 634948 - DNA, 120 bp, Artificial Sequence
  ENSG00000180479_39 (sequence is synthesized)
gccagctgagaatcgtgcggttacagctgctgcagtttctttgcagagtaagaggctctttttgaagtttccctgatggtgaggctttacccctggaagtgtcttaggaagaagaccact

SEQ ID NO: 634949 - DNA, 120 bp, Artificial Sequence
  ENSG00000180479_40 (sequence is synthesized)
cccaaaagcaggaagtgtcaaccttgcagcaggatttggacactccaggagccaaactggatgtggaagctccaaaggtgcagaaaaaggactccaaaatgttgacttttacctctgtcc

SEQ ID NO: 634950 - DNA, 120 bp, Artificial Sequence
  ENSG00000180479_41 (sequence is synthesized)
tgggaatcaccctgacactagctgtcgagatacttaccagtttttctgccctgattggacatgtgtaactttagccacctactctgggggatcaaccagatcttcattccataactcgtg

SEQ ID NO: 634951 - DNA, 120 bp, Artificial Sequence
  ENSG00000180479_42 (sequence is synthesized)
cttctcgtcctaaattatgtactagaaaaaattgtaatcctcttactataactgtccatgaccctaattcaactcagtagtattatggcatgtcatgggaattaagattttatatcccag

SEQ ID NO: 634952 - DNA, 120 bp, Artificial Sequence
  ENSG00000180479_43 (sequence is synthesized)
gatttgatgttgggactatgttcaccatccaaaaaatcctggtctcatggagcccacccaagccaatcgggcctttaactgatctaggtgaccctatgttccagaaaccccctaacaaag

SEQ ID NO: 634953 - DNA, 120 bp, Artificial Sequence
  ENSG00000180479_44 (sequence is synthesized)
ccattcttagtcataaaagatacactccaaaagttcgagaaaatctagataggcgccaacaggaacgagaaaacaacatcccctggtatcaaagcatgttcaactggaacccctggctaa

SEQ ID NO: 634954 - DNA, 120 bp, Artificial Sequence
  ENSG00000180479_45 (sequence is synthesized)
ctactttaatcactgggttagctggacctctcctcatcatactattaagtttaatttttgggccttgtatataaaattggtttcttaattttgtaaaagaatgcatagcttctgtcaaac

SEQ ID NO: 634955 - DNA, 120 bp, Artificial Sequence
  ENSG00000180479_46 (sequence is synthesized)
cttctgtcaaacttatgtatcttaatactcaatataacccccttgttataattgaggaatcaacgatttgattccccaaaaacacaagtggggaatgtaatgcccaaccttgtttttact

SEQ ID NO: 634956 - DNA, 72 bp, Artificial Sequence
  ENSG00000180479_47 (sequence is synthesized)
gcaattcccaggaattcatctgattgataacgcccaaagcccccggtctatcaccttgtaatagtcttaaag

SEQ ID NO: 634957 - DNA, 65 bp, Artificial Sequence
  ENSG00000180479_48 (sequence is synthesized)
ccgagagaattttgagcgttagccgtctctcggtcgccagctaataaatggactcttaattcgtc

SEQ ID NO: 634958 - DNA, 120 bp, Artificial Sequence
  ENSG00000180481_0 (sequence is synthesized)
ggtggaccatggaggccgcaaggcccttcgcccgggagtggagggcccagtccctacccctggcagtagggggcgttttgaagctgcggctctgtgagctgtggctactgctactgggtt

SEQ ID NO: 634959 - DNA, 120 bp, Artificial Sequence
  ENSG00000180481_1 (sequence is synthesized)
ctagtttgaacgccagatttttgccagacgaggaggacgtagactttatcaacgagtacgtgaacctccacaatgagctgcggggcgacgtcattccccgagggtctaacttgcgcttca

SEQ ID NO: 634960 - DNA, 120 bp, Artificial Sequence
  ENSG00000180481_2 (sequence is synthesized)
tgacttgggatgtagctttatcacggactgctagagcatggggaaaaaaatgtttgtttacgcataatatttatttacaagatgtacaaatggtccatcctaaattttatggtattggtg

SEQ ID NO: 634961 - DNA, 120 bp, Artificial Sequence
  ENSG00000180481_3 (sequence is synthesized)
aaaatatgtgggtcggccctgaaaatgaatttactgcaagtattgctatcagaagttggcatgcagagaagaaaatgtacaattttgaaaatggcagttgctctggagactgttctaatt

SEQ ID NO: 634962 - DNA, 120 bp, Artificial Sequence
  ENSG00000180481_4 (sequence is synthesized)
atattcagcttgtttgggaccactcttacaaagttggttgtgctgttactccatgttcaaaaattggacatattatacatgcagcaattttcatatgcaactatgcgccaggaggaacac

SEQ ID NO: 634963 - DNA, 120 bp, Artificial Sequence
  ENSG00000180481_5 (sequence is synthesized)
tgacgagaagaccttatgaaccaggaatattttgtactcgatgtggcagacgtgacaaatgcacagattttctatgcagtaagataaagaaaataaacatgaaaaaaatgcataatggat

SEQ ID NO: 634964 - DNA, 120 bp, Artificial Sequence
  ENSG00000180481_6 (sequence is synthesized)
tggacaagaaaaataagcgattgaacactagttttttatggtcatgttaatattattcctttgatcagaatgctactattatgttatcaaaggatggttgacacagtatcatctttagat

SEQ ID NO: 634965 - DNA, 120 bp, Artificial Sequence
  ENSG00000180481_7 (sequence is synthesized)
ccctgaggacataccagagtgtcagaaagaaagaatgagaactaacagttatacccttaaaaagcttcacagtttatgcccaaacagcagcctgtttgataataactgctttaaaggata

SEQ ID NO: 634966 - DNA, 120 bp, Artificial Sequence
  ENSG00000180481_8 (sequence is synthesized)
gtatattccaaaatatttatgaagtagcatatatttaatacccttttcttttagtttttcctccaaaaagctgaaatctccaaatatttcaaaagtaaaaagtagaaaatatgtttgatt

SEQ ID NO: 634967 - DNA, 120 bp, Artificial Sequence
  ENSG00000180481_9 (sequence is synthesized)
acatttttcttttagtttttccaaacatgagagaatatactccaaaagtataactgtagctaaaatatacaatgcttagaggaatatggtaggagataaatttggataataagtaaatag

SEQ ID NO: 634968 - DNA, 85 bp, Artificial Sequence
  ENSG00000180481_10 (sequence is synthesized)
gtaggagataaatttggataataagtaaatagcatattatgttgttttttaattattatactttaagttctggggtaccacatgc

SEQ ID NO: 634969 - DNA, 89 bp, Artificial Sequence
  ENSG00000180481_11 (sequence is synthesized)
atgccatggtggtttgctgcacccatgaacccatcatctacattagatatttctcctaagctattcctcccctagccctgttctccctg

SEQ ID NO: 634970 - DNA, 120 bp, Artificial Sequence
  ENSG00000180481_12 (sequence is synthesized)
cacatattaccgattttggtatccaaaatgggaaatgccccggccagttgtgtgtgatccactgtgcacattcattttattattgagaatattatgttttatcctgtgtgtcataactgt

SEQ ID NO: 634971 - DNA, 120 bp, Artificial Sequence
  ENSG00000180481_13 (sequence is synthesized)
tttgatagtacagtctcagtttccaaatatcttgttggaacaacaaatgatatttacccctgaggaatctgaagcagggaatgaagaggaggaaaaagaggaagagaagaaagagaaaga

SEQ ID NO: 634972 - DNA, 120 bp, Artificial Sequence
  ENSG00000180481_14 (sequence is synthesized)
ggaaatggaaatggaaataatggaaatggaggaggaaaaagaagagagagaggaggaggaggaggaaacacaaaaagaaaagatggaggaagaggaaaaataagagtagaaagaggagga

SEQ ID NO: 634973 - DNA, 120 bp, Artificial Sequence
  ENSG00000180481_15 (sequence is synthesized)
aaaaagacagaaaaaaaaaaaaagtaaaacactgagttttaacaagaaagaaaatatgcaaaccaccattggaatgttttttattcccttctctcctatacttattcaatcaatttaaat

SEQ ID NO: 634974 - DNA, 120 bp, Artificial Sequence
  ENSG00000180481_16 (sequence is synthesized)
ggtgggctctttgacactaagaacagataaagacatgacaggaaaaacactgaaaaacatttgaccagtctaattaatcttaagatttcaccatgttattctaataaagtagggaatttt

SEQ ID NO: 634975 - DNA, 120 bp, Artificial Sequence
  ENSG00000180481_17 (sequence is synthesized)
cattttctaaacatgtttccatctctgtgttttaaatagtaaggtgcttaagatcattccaagttcataacaaccattgaataaaatttgtatttttttgtttttactgttactgtcata

SEQ ID NO: 634976 - DNA, 120 bp, Artificial Sequence
  ENSG00000180481_18 (sequence is synthesized)
gtttttattggtggtagtggtattttcatgtgatattaaggtatctaatattattatttgtctttgtggtttttggaatagtttaagtggtacctgtacatcctgctaggatgcaaactt

SEQ ID NO: 634977 - DNA, 120 bp, Artificial Sequence
  ENSG00000180481_19 (sequence is synthesized)
attatttataattaatgttcaatatttcattaaagacttgctgtaattttctgccaccaagggctaataaatgccataattttaattagttgtggtagaggaatctgggtgcttccaaat

SEQ ID NO: 634978 - DNA, 120 bp, Artificial Sequence
  ENSG00000180481_20 (sequence is synthesized)
ctgggtgcttccaaatttatatgataaaataaataaattttttaaaaactattaacttgttattcaataggtatagtaaaagttaacagattaataagataactgcttaccactagtaat

SEQ ID NO: 634979 - DNA, 120 bp, Artificial Sequence
  ENSG00000180481_21 (sequence is synthesized)
aataaaaatacctagcataggagatttctttatctataaaataaatggatagcactagatgaccactaagacctcttccatcaatgaatattcatggatcaactttgtaaaggaatcaat

SEQ ID NO: 634980 - DNA, 120 bp, Artificial Sequence
  ENSG00000180481_22 (sequence is synthesized)
agtagttgtgaagtacactaagcaaacacctgagggaaaaacttgattcccatgaaaatattcctgaactcagcaccttatatggcaaaataataaataccttttattactcaattttaa

SEQ ID NO: 634981 - DNA, 120 bp, Artificial Sequence
  ENSG00000180481_23 (sequence is synthesized)
aataggcaaaaagcaatgtataatatttttccaattgccattccatactcagctgtcttattgttgcacacttattagaactcaatgtgactgagatgtgaaaggttgatataattctat

SEQ ID NO: 634982 - DNA, 120 bp, Artificial Sequence
  ENSG00000180481_24 (sequence is synthesized)
ttatgacagggacttagggaacttattctaattgagaatcagaggcttaataaacctgaaggtttaagtgaaagaaatgacattgaaagaatcactgcatatctgatgttttcaaataaa

SEQ ID NO: 634983 - DNA, 120 bp, Artificial Sequence
  ENSG00000180481_25 (sequence is synthesized)
acaatctctgttttctggttttgatagaatattgtgttctaaagctatatttctcaatgtgtggttccactgagggaaagaaaaaaaaaaaaacctagcatagccaaatacctcaaatgg

SEQ ID NO: 634984 - DNA, 120 bp, Artificial Sequence
  ENSG00000180481_26 (sequence is synthesized)
tataaatgctatgtgtatttactctgttgttctttagttgtatcaatattctgttaaaaacctgttcgaagtagggcaagatgagaattatattaaaaagccctgagctatcctcttgga

SEQ ID NO: 634985 - DNA, 120 bp, Artificial Sequence
  ENSG00000180483_0 (sequence is synthesized)
gcccacagccctgctgataaaagcaaagctcatctctgccgtgctgcagggaaccctatttccttcccctgcagctcagccacctcctcctctcaggtctgccagccatgaaacttcttt

SEQ ID NO: 634986 - DNA, 120 bp, Artificial Sequence
  ENSG00000180483_1 (sequence is synthesized)
gaatttgtagggcctcttgcaaaaagaacgaacagccctacctctattgcagaaattgtcagtcctgctgcctccagtcctacatgaggataagcatttctggcaaagaggaaaataccg

SEQ ID NO: 634987 - DNA, 120 bp, Artificial Sequence
  ENSG00000180483_2 (sequence is synthesized)
actggtcttatgagaagcagtggccaagactaccttgagtgctggtgattaccattctcaagctctctgggcacagagacctgctgtcaacccccctcattaaaattcatgtgcctgcta

SEQ ID NO: 634988 - DNA, 120 bp, Artificial Sequence
  ENSG00000180483_3 (sequence is synthesized)
atgaaacttctttacctgtttcttgccatccttctggccatagaagaaccagtgatatcagtagagtgttggatggatggacactgccggttgttgtgcaaagatggtgaagacagcatc

SEQ ID NO: 634989 - DNA, 120 bp, Artificial Sequence
  ENSG00000180483_4 (sequence is synthesized)
tggaccactcctcagatgtccacaacagctccaaaaatgaagacaaatataactaatagatagaaatgactttgtttcaggttgcttagggtccacatttcattaaaactcacaaatttg

SEQ ID NO: 634990 - DNA, 120 bp, Artificial Sequence
  ENSG00000180483_5 (sequence is synthesized)
acctgtttcttgccatccttctggccatagaagaaccagtgatatcagctctggtgaggacagtgggatgctgcctggatactgccaggcaaacgccacatccttcgatgcatgggtaac

SEQ ID NO: 634991 - DNA, 120 bp, Artificial Sequence
  ENSG00000180488_0 (sequence is synthesized)
gggaggaagcggagagttgagcggccacgcagttggggcagaggcctcggggcaggggtggcgcggactccatcgctggcgttagctctcggagtgccaggtggagcggcggaaagccag

SEQ ID NO: 634992 - DNA, 120 bp, Artificial Sequence
  ENSG00000180488_1 (sequence is synthesized)
agggtctacggccgtgccaccctgaacacccccgacctcgtctcatctcagaagctaagcagggtcgggcctgaagaggagccatgtcagaagaaacagtaagtgaatcacagttttcct

SEQ ID NO: 634993 - DNA, 120 bp, Artificial Sequence
  ENSG00000180488_2 (sequence is synthesized)
tgaagacagcagcgctaagagtgtttgatcttcctctgacttggtactattctctctcccagatcaaattttctccggtggctaaaaagttgtttgtggtaactgcagtgagtgctatat

SEQ ID NO: 634994 - DNA, 120 bp, Artificial Sequence
  ENSG00000180488_3 (sequence is synthesized)
ctgtaatttttctggctcatcactttaaaagaaaacgtggaaagaagaaaggaaaaatattaccatgggaaccagagcacctcatacttgaatacactaaaagagcagcatcagacaaag

SEQ ID NO: 634995 - DNA, 120 bp, Artificial Sequence
  ENSG00000180488_4 (sequence is synthesized)
gttcaagttgttccagtagcagacagaatttgacattatctttaagttctaccaaagacaaaggatctcaagtttgtaactatgctaatggaggacttttcagtaaatattcaggttctg

SEQ ID NO: 634996 - DNA, 120 bp, Artificial Sequence
  ENSG00000180488_5 (sequence is synthesized)
cacagagtttggcctctgtccagagtgtcaattcttgtcatagctgcgcttgtggcaattctaattcctgggacaaagcagatgaagatgatattaaacttgttaatattcctgtgacta

SEQ ID NO: 634997 - DNA, 120 bp, Artificial Sequence
  ENSG00000180488_6 (sequence is synthesized)
ctccagagaacttatacttaatgggtatggaattgtttgaagaggcattgcgtcgatgggaacaagctctgacctttcgcaatagacaggctgaagatgaagcctgtggttccattaaac

SEQ ID NO: 634998 - DNA, 120 bp, Artificial Sequence
  ENSG00000180488_7 (sequence is synthesized)
tgggtgcaggagatgccattgctgaagaaaatgtagatgatattattagtactgaatttatccataaactcgaagctctgctgcaaagagcctatcgtctccaagaggagtttgaagcta

SEQ ID NO: 634999 - DNA, 120 bp, Artificial Sequence
  ENSG00000180488_8 (sequence is synthesized)
cccttggggcatctgatcctaattcccttgctgatgatattgataaagatacagatatcaccatgaagggtaatgtggaagactttggcctgcgagacaccttgagcatcgcatccacgg

SEQ ID NO: 635000 - DNA, 120 bp, Artificial Sequence
  ENSG00000180488_9 (sequence is synthesized)
attcctttgcttccgcagcagagcttgcagaacacagagaagtacggcatacctacagcctggagtccctttgtcactgcccattttacgaggaagccatgcatttagttgaagaaggaa

SEQ ID NO: 635001 - DNA, 120 bp, Artificial Sequence
  ENSG00000180488_10 (sequence is synthesized)
aaatttactccagagtactgagaactgaaatgttggagtgcctaggagacagtgattttcttgccaaacttcactgtattcgacaggcttttcaggtaattctttcagaatcagctaaca

SEQ ID NO: 635002 - DNA, 120 bp, Artificial Sequence
  ENSG00000180488_11 (sequence is synthesized)
ggatattcctcgctgagagcggaaggaaaattttatcagctttaattgtgaaagcacgaaagaatccaaagaagtttgaagatgtttttgatgaaatgatctattttttagagcagaccg

SEQ ID NO: 635003 - DNA, 120 bp, Artificial Sequence
  ENSG00000180488_12 (sequence is synthesized)
atcactggggtagtactgaaatggaacttgctgctagaggggtgaaaaatctaaatttttatgatgttgttctggattttatattaatggactcctttgaagatttggaaaacccaccca

SEQ ID NO: 635004 - DNA, 120 bp, Artificial Sequence
  ENSG00000180488_13 (sequence is synthesized)
catccatacagaatgtagtaaataatcgatggctaaactcatccttcaaagaaacagctgtggcttcaagttgttggtcggtgctgaaacagaaaagacaacagatgaagatcccagatg

SEQ ID NO: 635005 - DNA, 120 bp, Artificial Sequence
  ENSG00000180488_14 (sequence is synthesized)
gattttttgcccatttttatgccatttgtgaacacatcagtcctgtcctagcctggggctttttgggtcctagaaattctctgtatgatttatgttgcttttttaagaatcaagttcttt

SEQ ID NO: 635006 - DNA, 120 bp, Artificial Sequence
  ENSG00000180488_15 (sequence is synthesized)
tatttctcaaagacatttttgactttgagaaggtgcgctattcaagtacagagactttagctgaagacctcatgcagttactcattcgccgcactgagcttttaatggcctatcttgaag

SEQ ID NO: 635007 - DNA, 120 bp, Artificial Sequence
  ENSG00000180488_16 (sequence is synthesized)
cagatgccctgaggcatacaagtagttgtctaagcagtcatggtcatgttatgtccactgggctactggaagccaaagtacaataagtaccataagaatcatacaatttgagtgtgctat

SEQ ID NO: 635008 - DNA, 120 bp, Artificial Sequence
  ENSG00000180488_17 (sequence is synthesized)
gaaatattttaaggtaactattgattttgtaacatatattacaaagttaacagaattgatgcatgtggattcagggaggaaaaaaaaatctactaaaaaatgagcaactgtactgtattt

SEQ ID NO: 635009 - DNA, 120 bp, Artificial Sequence
  ENSG00000180488_18 (sequence is synthesized)
atacagaagttctgtcattgaattcctgtgtagtgtagtcatagtggctttttgcattcattaggtaataattgaagtcatgaaatgtatattttacagaaatatcgcttgaattgaagc

SEQ ID NO: 635010 - DNA, 120 bp, Artificial Sequence
  ENSG00000180488_19 (sequence is synthesized)
caatatttgggagttaattggtttgtcttcttgaagctgtcattctcaaaagctctgtttttatgctttgcacctttaaaatgtacactttagccaaggtctttgtggcccacacatgca

SEQ ID NO: 635011 - DNA, 120 bp, Artificial Sequence
  ENSG00000180488_20 (sequence is synthesized)
tgcaagaatatattacttctaatgtcaatatatttaactttgcctagaaacatatttttaattataaagttattcatttgtttaatcaagtttaggcagtaatgatgtttaatatgtact

SEQ ID NO: 635012 - DNA, 120 bp, Artificial Sequence
  ENSG00000180488_21 (sequence is synthesized)
acattattgcttgtgcatttgcttatgtatttgaatcaaagaaattgtaatcactgaatattgttatagaacatttaaatgggccacttgcagtggctcatgcctgtaatacattgggag

SEQ ID NO: 635013 - DNA, 120 bp, Artificial Sequence
  ENSG00000180488_22 (sequence is synthesized)
tagcctggacaacataaggagatgcctgtctctacaaaaacataaaaataaattagctggtatcaagcagagttccatggaaatattaaaatttttttaaaaaataaaaataggctgggt

SEQ ID NO: 635014 - DNA, 60 bp, Artificial Sequence
  ENSG00000180488_23 (sequence is synthesized)
taaattaattaaattaaattaattagttgggtgtggtggcatgtgtctgtggtcccagct

SEQ ID NO: 635015 - DNA, 73 bp, Artificial Sequence
  ENSG00000180488_24 (sequence is synthesized)
ctgtcacctatctcagaagtgaataaataaaacaaatacagcatttaaatgaattgacattgagaaatttaca

SEQ ID NO: 635016 - DNA, 120 bp, Artificial Sequence
  ENSG00000180488_25 (sequence is synthesized)
taaatgaattgacattgagaaatttacaatttacaaatttatattaactgtagtttccaaaatatgttactgttggtcctgtaagttacaaagagactgaagaactttctttttatacat

SEQ ID NO: 635017 - DNA, 120 bp, Artificial Sequence
  ENSG00000180488_26 (sequence is synthesized)
tagagcattttcccctggaatgagtattgattaaaaagataacatttattaattaataaaggcaatttaaaatttagtgttatttgaagactgtcaacatctgaaggtatgaaacttggt

SEQ ID NO: 635018 - DNA, 120 bp, Artificial Sequence
  ENSG00000180488_27 (sequence is synthesized)
acagtgaaataatttctcctttctccttccttttagttattcccacagaaaactcagcccagtgggaatttgtcatattatgcccatgttttaaaaatattcatagtttgaatcttattg

SEQ ID NO: 635019 - DNA, 120 bp, Artificial Sequence
  ENSG00000180488_28 (sequence is synthesized)
acattttaaagaagagttttttcctccctggaatgtaaaacaaaaatattttttaatgatgtggaagtatatatttcatgttcattatgataaatctacaaacaaatgaattgtttttat

SEQ ID NO: 635020 - DNA, 120 bp, Artificial Sequence
  ENSG00000180488_29 (sequence is synthesized)
gggtggagttcttctataagagtatattaaatgctttcagagttgtattaattttgtttctaaataatataccacttatttggagtgactaactcagtatgtaagtagatgagatttgtt

SEQ ID NO: 635021 - DNA, 120 bp, Artificial Sequence
  ENSG00000180488_30 (sequence is synthesized)
gattttgcccctaaaacgggctttagtcattttaggagtgagttgcacaaaaggacctaaaatgcattgttttttgccttcttttaagagatggggtctcgctctattgcccaggctgga

SEQ ID NO: 635022 - DNA, 120 bp, Artificial Sequence
  ENSG00000180488_31 (sequence is synthesized)
gtgcagtgtgctatcatacatagctcactgcagtctccaactcctcataccagaggcatgtgtcaccatgtcttactcctaaaatgcatttttaaaaagcgaatttttagattaaagtgc

SEQ ID NO: 635023 - DNA, 120 bp, Artificial Sequence
  ENSG00000180488_32 (sequence is synthesized)
ctagtttctgattaataaatagaagatgaaaaaagtgggcgggaaaagcataatcttttaagatttgtaattttctgtatgtgccacatttatgtaaattaactataaaatatggaattc

SEQ ID NO: 635024 - DNA, 120 bp, Artificial Sequence
  ENSG00000180488_33 (sequence is synthesized)
aggatcatgctgttttgcatgtactttataggttatatagcatgaaacatacaaattatcactgttctttagtatatagctccttgccttttcttacatagatgcttaatttaacaatta

SEQ ID NO: 635025 - DNA, 120 bp, Artificial Sequence
  ENSG00000180488_34 (sequence is synthesized)
cctatttatagttcttattattgacgggaatatgattagaagtaccaaaactaaaaattccattatgtactgtttactttttatttaatattacatgtttttaccttgttgcggtatctt

SEQ ID NO: 635026 - DNA, 120 bp, Artificial Sequence
  ENSG00000180488_35 (sequence is synthesized)
tggccttcacacacacatgtgtgcgtgcacgtgcatttcattaccatgtagacaagacagttattgcttatagtaatttacccatttgagggctaagtgttttaagctgtggttttataa

SEQ ID NO: 635027 - DNA, 120 bp, Artificial Sequence
  ENSG00000180488_36 (sequence is synthesized)
gcaaagctgtaagtaaatgtaatttattttagaaagatattatttgaaatcaattttgaagaattgcactatttgataatgctgctactacatgagataactctggggaattaattttat

SEQ ID NO: 635028 - DNA, 120 bp, Artificial Sequence
  ENSG00000180488_37 (sequence is synthesized)
gagataagatgaatggctttctagaaggtgttgctttttgttttttctttttcttttttacatttcatcttagaaaaagttgcttatattcagcaggttggtttgtcaaattcagtgttt

SEQ ID NO: 635029 - DNA, 120 bp, Artificial Sequence
  ENSG00000180488_38 (sequence is synthesized)
gagtttgtttctggtcagttcagtagctgctactttagcaagatgtggcctttcacaaaagaggtaagagtgaccaaatagaattttaggacaataagtataggaaatatctctttatcg

SEQ ID NO: 635030 - DNA, 120 bp, Artificial Sequence
  ENSG00000180488_39 (sequence is synthesized)
atcgtaagataagaaacttgaactttttaaaggaaatgtcctcttgaaaagaacatttctgactgcatgcagaagggtacttaagacatatataacaggccaggagcagtggctcacgcc

SEQ ID NO: 635031 - DNA, 120 bp, Artificial Sequence
  ENSG00000180488_40 (sequence is synthesized)
cgccagagggaggcctgcaaaggaagcgcggaattgggatgggctcgccactgctctgagccagaggaagggtctggacggccgagctggagggacccccttttctggtgttcttggcaa

SEQ ID NO: 635032 - DNA, 120 bp, Artificial Sequence
  ENSG00000180488_41 (sequence is synthesized)
agaaaaaggaagacagcagaggagagctccgcgaggggctgctgtggggtcgggggagagcgcgctggagattagaagaggagccatgtcagaagaaacagtaagtgaatcacagttttc

SEQ ID NO: 635033 - DNA, 120 bp, Artificial Sequence
  ENSG00000180488_42 (sequence is synthesized)
ggaaggactccgccttctccatgtcagactgctgctcagcgccaggcatcagctgggaagctggcgtgggcaggccagctgtacctggcctggagctccagattagaagaggagccatgt

SEQ ID NO: 635034 - DNA, 120 bp, Artificial Sequence
  ENSG00000180488_43 (sequence is synthesized)
aggtccaagtaaagaaaaaattatttttacatgttctgtcagtattgaaaaaacatgttttatattaaggtcctgaggttaagccttgtttgaatccaaatttatagtaggcttgatctt

SEQ ID NO: 635035 - DNA, 120 bp, Artificial Sequence
  ENSG00000180488_44 (sequence is synthesized)
gaatgtagtttaacaattgtctcccctgtttattacatagaactgaaatgttggagtgcctaggagacagtgattttcttgccaaacttcactgtattcgacaggcttttcaggtatttt

SEQ ID NO: 635036 - DNA, 120 bp, Artificial Sequence
  ENSG00000180488_45 (sequence is synthesized)
tttaacattaagtgacttcacccagccactcatccccaccctcatgctgtagagtccagtgcaaataaacaggacagctctgtgctcttgattatccctattcctaatgacaaatataaa

SEQ ID NO: 635037 - DNA, 120 bp, Artificial Sequence
  ENSG00000180488_46 (sequence is synthesized)
gtccactaaacttatttttcctccctgctacttgccttcatttgtttccatatttcattatcctctcccatggcttcccaggcccacgacactttgtcaaaacaggatattttgatactt

SEQ ID NO: 635038 - DNA, 120 bp, Artificial Sequence
  ENSG00000180488_47 (sequence is synthesized)
caggagtgtaaaaatggctgcttaaaataaaaacactctttcttattaattagtgtgtatttgagatttaatttcagtcaattataaaattgattttctaaaaagaaaataacaagaata

SEQ ID NO: 635039 - DNA, 120 bp, Artificial Sequence
  ENSG00000180488_48 (sequence is synthesized)
tatttgttttcttatgttttggggctataggaaatttatttgagactgtaatatgattttgaacagaatttaaattcaaatttaactccctttaatctttttttgactataggtttcaag

SEQ ID NO: 635040 - DNA, 120 bp, Artificial Sequence
  ENSG00000180488_49 (sequence is synthesized)
agttctttttattttagtaaattaggactttctctgtgagctgcctgttgaaatagcaccacatgcaatgcattaactgttttaggattatttgtgctattaagttgaatgtccattcac

SEQ ID NO: 635041 - DNA, 120 bp, Artificial Sequence
  ENSG00000180488_50 (sequence is synthesized)
attcattataggtctcttttttctttggggatgaatattttttcaggtaattctttcagaatcagctaacaggatattcctcgctgagagcggaaggaaaattttatcagctttaattgt

SEQ ID NO: 635042 - DNA, 120 bp, Artificial Sequence
  ENSG00000180488_51 (sequence is synthesized)
gaaagcacgaaaggtaaacttgttctgttggcaagatttttaccatttacaaaagttgtttttaccctttgaactgaagattaagacattaaatttttgatagaagaaaaatttttgtgg

SEQ ID NO: 635043 - DNA, 120 bp, Artificial Sequence
  ENSG00000180488_52 (sequence is synthesized)
aaccaagttgtttctcataaattatttccagtttgccataaactctgtaaatgtcatggtgagaattatcattagatctgctgctataaccatcactgttattattactaatgcctcctc

SEQ ID NO: 635044 - DNA, 120 bp, Artificial Sequence
  ENSG00000180488_53 (sequence is synthesized)
ttttattacctcaatcctgttcaggaagagggttacaggaaatagcgtaggtctcagaaatctggaatacaaattgaactgcctcatcttcatgtagttgaatgaggcagaagcaatgac

SEQ ID NO: 635045 - DNA, 120 bp, Artificial Sequence
  ENSG00000180488_54 (sequence is synthesized)
aagaacttcattcagactgtaaggaaccaccttactttatgcaaggtttgtccagatgatgataaaacaaaacaagccttccttgagccatttgcacacctagttttcagactcaatccc

SEQ ID NO: 635046 - DNA, 120 bp, Artificial Sequence
  ENSG00000180488_55 (sequence is synthesized)
tttgaactttaattctttcatttatataatagaattgtatttatattacctcatttcagagggtttttaggatgattaaataaatgataaatgggaagcaacttaaagaataaagtgtta

SEQ ID NO: 635047 - DNA, 120 bp, Artificial Sequence
  ENSG00000180488_56 (sequence is synthesized)
agtagtgtaaagctaagtatatgtaaggtgatactattaatacatgcaattcccaatgtaagtcttgtgttgctttcttggccttctcatgacagataaactcagtgatttgaactaggg

SEQ ID NO: 635048 - DNA, 120 bp, Artificial Sequence
  ENSG00000180488_57 (sequence is synthesized)
ttcctccaaaagaagcagaactgcaacaaaagcctcacataatgtctgctataaccaaattttcattttaattactgaccaaaataggcatacatatttgagtaataaatagtttgcttg

SEQ ID NO: 635049 - DNA, 120 bp, Artificial Sequence
  ENSG00000180488_58 (sequence is synthesized)
tgacattttactgacattctttatcttggcttctgcaaaatgttgcaatagcaaagtagtaaaccagataaatttggcatacctttaaaatgtattttagttcagttacctagtagaatt

SEQ ID NO: 635050 - DNA, 120 bp, Artificial Sequence
  ENSG00000180488_59 (sequence is synthesized)
aagatctaccagacttatttgaagagtaactttctttgtagcttgttataaagttgagtttagggttaaaatgtgttttcttcttcagaatccaaagaagtttgaagatgtttttgatga

SEQ ID NO: 635051 - DNA, 120 bp, Artificial Sequence
  ENSG00000180488_60 (sequence is synthesized)
aatgatctattttttagagcagaccgatcactggggtagtactgaaatggaacttgctgctagaggggtaaattcaaattttttgtgatatttatttttcttagttatttgcatgtaatt

SEQ ID NO: 635052 - DNA, 120 bp, Artificial Sequence
  ENSG00000180488_61 (sequence is synthesized)
ttatatgagttgagactactgtttcattgtccttgttaaataaagccaattgtatggttgtgggacatctttttttctgacgaagtcataaaccacactccttgtacgttggggcagtag

SEQ ID NO: 635053 - DNA, 120 bp, Artificial Sequence
  ENSG00000180488_62 (sequence is synthesized)
ttgtaaattgttttctaagaagccttttttgctgttgttggctccttgcttccttccctcctgtcctccttcccttgttccctctcttccttctctccaaaagtcattggcaggccccta

SEQ ID NO: 635054 - DNA, 120 bp, Artificial Sequence
  ENSG00000180488_63 (sequence is synthesized)
gcaggacaggaatggtggcccatgcaaggacagctttgggtagtacaacagcagcagctcagtagggctggggaattggctgtatacacaagactgaacaaataagtatactgagaaaaa

SEQ ID NO: 635055 - DNA, 120 bp, Artificial Sequence
  ENSG00000180488_64 (sequence is synthesized)
tcagagccagcttttccctgtgagagaagggaggtataaaatgctgggattggaattggagctgtcagtgtgagttcacagtttataatatatatgtagatacagatatagaaataaata

SEQ ID NO: 635056 - DNA, 88 bp, Artificial Sequence
  ENSG00000180488_65 (sequence is synthesized)
actgaaaatacaaaaattagctgggtatagtggctcacgcctgtaatcccaactactcgggaggccaaggaggcagtgagccaagatc

SEQ ID NO: 635057 - DNA, 88 bp, Artificial Sequence
  ENSG00000180488_66 (sequence is synthesized)
gctgggattacaggcgcttgccaccatgtccggctaatttgtatatttttggcatctcaaactcccagcttcaagtcatccacctgcc

SEQ ID NO: 635058 - DNA, 120 bp, Artificial Sequence
  ENSG00000180488_67 (sequence is synthesized)
gcgcccaacctataactttctatatccatagatacctatatgtctcacctcttaggaactatttcctatacctgaaatgccaaattccctctgtacttaaataaatcttacccatcattg

SEQ ID NO: 635059 - DNA, 120 bp, Artificial Sequence
  ENSG00000180488_68 (sequence is synthesized)
aaaaagaagacaagttttccatactgtcacagtaagctccaaagaactttgtctttctcataaagtaatattctttatttgcatccatttactatgattccgttaatttgttgaattaaa

SEQ ID NO: 635060 - DNA, 120 bp, Artificial Sequence
  ENSG00000180488_69 (sequence is synthesized)
tgcctttataaaaatatttacaaatgttttcttgccttaaaatgtaacattttctacttaaatttaatttccaagagagtgattatttgcattacaaaggaattcttaataattcctgta

SEQ ID NO: 635061 - DNA, 70 bp, Artificial Sequence
  ENSG00000180488_70 (sequence is synthesized)
taacggtttccatttgccttaaaattgggttaaatagcaaaagcaatgtctttaaaaatgattagtttag

SEQ ID NO: 635062 - DNA, 120 bp, Artificial Sequence
  ENSG00000180488_71 (sequence is synthesized)
taaatagcaaaagcaatgtctttaaaaatgattagtttagagccttttagggtaaaccctgtttaaacacttaatcatggaattgcccttgccaccatgagctctaccatccacttccat

SEQ ID NO: 635063 - DNA, 120 bp, Artificial Sequence
  ENSG00000180488_72 (sequence is synthesized)
atgtaaattataagagggacttcaattaagtcactcctgagaaaatatccttttttctagaagaaagaagataaattttgaggcaatttacatttggtatttcttttaatttcatttttt

SEQ ID NO: 635064 - DNA, 120 bp, Artificial Sequence
  ENSG00000180488_73 (sequence is synthesized)
agcctaggaaataggaatgccaaagtaacatttaatgtacttctctataacttttcataatcagaaattttaaattatgtttatataacccatttacttttattttaatgtgaatatata

SEQ ID NO: 635065 - DNA, 120 bp, Artificial Sequence
  ENSG00000180488_74 (sequence is synthesized)
aatttcaaaatgattataggaattaagctgaattctaatttttttgcttagatttagaaatatgtatgtgaaatttaagaatttatataatctgtgattagtggaaataagaacatccct

SEQ ID NO: 635066 - DNA, 120 bp, Artificial Sequence
  ENSG00000180488_75 (sequence is synthesized)
actttgttcctaatgagtatattatgttattgttttgtttagtttgtgaacaaccatgtattagctttacttagctgatgtcagtaaatgtttctgtctcctaaatgtaaggactgtact

SEQ ID NO: 635067 - DNA, 120 bp, Artificial Sequence
  ENSG00000180488_76 (sequence is synthesized)
cattaatttgtgtaaaagtaaaacactacagtagcagaaaaaattgcactggctctttagccaaaataagcactgtaacatggatgtattactattactgccaaataaaaaagtgatggt

SEQ ID NO: 635068 - DNA, 120 bp, Artificial Sequence
  ENSG00000180509_0 (sequence is synthesized)
cagctggcttttttcaaaccttagcaaccaccaaacagacaagcccttcggcctgtcctggagggcgttgaatggcatggcctggagctcaaccaggagaaccgtgctcaggaggaagag

SEQ ID NO: 635069 - DNA, 120 bp, Artificial Sequence
  ENSG00000180509_1 (sequence is synthesized)
accagaaggataactcaaaaagttctgagaagttcctaagaccacctgaagagaaggagcctgctgccaatggtgtggacaccgcagtgtgcttgaggagacttcagaaacgagaactgg

SEQ ID NO: 635070 - DNA, 120 bp, Artificial Sequence
  ENSG00000180509_2 (sequence is synthesized)
aaaaatccctctgctttctctggccagtttcacacaatcatcaggtgagccgaggatccattggaggaaggcattatctgtatccagaggaaatagccaaggatattcagaggtgtgcct

SEQ ID NO: 635071 - DNA, 120 bp, Artificial Sequence
  ENSG00000180509_3 (sequence is synthesized)
gggaagtttgagctgcagcagtggaaccttaatgcccaggatgatcctgtctaacaccacagcggtgacgccctttctgaccaagctgtggcaggagacagttcagcagggtggcaacat

SEQ ID NO: 635072 - DNA, 120 bp, Artificial Sequence
  ENSG00000180509_4 (sequence is synthesized)
gtcgggcctggcccgcaggtccccccgcagcagtgacggcaagctggaggccctctacgtcctcatggtactgggattcttcggcttcttcaccctgggcatcatgctgagctacatccg

SEQ ID NO: 635073 - DNA, 120 bp, Artificial Sequence
  ENSG00000180509_5 (sequence is synthesized)
ctccaagaagctggagcactcgaacgacccattcaacgtctacatcgagtccgatgcctggcaagagaaggacaaggcctatgtccaggcccgggtcctggagagctacaggtcgtgcta

SEQ ID NO: 635074 - DNA, 120 bp, Artificial Sequence
  ENSG00000180509_6 (sequence is synthesized)
tgtcgttgaaaaccatctggccatagaacaacccaacacacaccttcctgagacgaagccttccccatgaaccccaccactggctaaaactggacacatcctgcctggcaacctgatttt

SEQ ID NO: 635075 - DNA, 120 bp, Artificial Sequence
  ENSG00000180509_7 (sequence is synthesized)
ctaatcacattcctctcatactctttattgtgatggataccactggatttctttttggctgttgtaaggggtgaggggtggattaatgacactgtttcactgtttctctaaaatcacgtt

SEQ ID NO: 635076 - DNA, 120 bp, Artificial Sequence
  ENSG00000180509_8 (sequence is synthesized)
cttttgtgatagactgtcagtggttcccccatatctgtccctgccttgctaaatttagcagaatccctgaggacatggcctctgagaatagcagctgcatttcccagactcccttgcagc

SEQ ID NO: 635077 - DNA, 120 bp, Artificial Sequence
  ENSG00000180509_9 (sequence is synthesized)
tagcaaggttgtgtgactaagccctggccagtaggcatggaagtgaagactgtaatgtccaagtaatccttggaaagaaaagaacgtgcccttaactaactttgtcctgcttcccagtgg

SEQ ID NO: 635078 - DNA, 120 bp, Artificial Sequence
  ENSG00000180509_10 (sequence is synthesized)
ctggatgtggaggaggtggagagcagttatgagactgggaaagaacggggcactcaaagagccacacacatctgggcctgggcgacgtggatcctccttaccacccaccaggccagattt

SEQ ID NO: 635079 - DNA, 120 bp, Artificial Sequence
  ENSG00000180509_11 (sequence is synthesized)
acaggagagagaaatccactccactcttccttaagccactgttattctgatctctgttaaggtcgcagaatcaatgcccttactgatacacctaccttataggactgaacctaaaggcat

SEQ ID NO: 635080 - DNA, 120 bp, Artificial Sequence
  ENSG00000180509_12 (sequence is synthesized)
gacatttccatacttgtcacaagcacacactgattctgcccttgtcacttctgtgctcactcttgtggctctatcctcctcctgcccttccgccttccactcctcccttgcacccatcct

SEQ ID NO: 635081 - DNA, 120 bp, Artificial Sequence
  ENSG00000180509_13 (sequence is synthesized)
gaaaaaaatgcccccttcagaatgcataccaaggggaaggtgctcggtcactgtgggagcagggaaaggtgcccccactccccgagagccaggggaaggagtggctctgggcagagaggg

SEQ ID NO: 635082 - DNA, 120 bp, Artificial Sequence
  ENSG00000180509_14 (sequence is synthesized)
acacatagcactggggtggcaggtccttttgaggtgatgggccggttttgtgagatgaattgtatcccccaaaaagacaggtaccttcaatgtgacctaattgggaaatagagtctttgc

SEQ ID NO: 635083 - DNA, 120 bp, Artificial Sequence
  ENSG00000180509_15 (sequence is synthesized)
agatgatctagttgagatgaggtcattggggtgggccctcacccaatatgactggagtccttatcggaagagggaaattcagacacagatgcatagggaggacaccatgccgtgacagag

SEQ ID NO: 635084 - DNA, 120 bp, Artificial Sequence
  ENSG00000180509_16 (sequence is synthesized)
gcagagggtgcagtgacacagccacaaaccaaggaaggccgaggatggatgcgcatccccatcccaagaagtcgggaagaagccaggaaggctcctctcccacaggtttcagaggaagca

SEQ ID NO: 635085 - DNA, 120 bp, Artificial Sequence
  ENSG00000180509_17 (sequence is synthesized)
cagccctgcttgaattcaaacttttggcctccagaactgtgagtcagtacctgttgttgaagccacccagcttaggatactctggcagcctactgccatacagtattgggatactatagt

SEQ ID NO: 635086 - DNA, 120 bp, Artificial Sequence
  ENSG00000180509_18 (sequence is synthesized)
gagcccatgcagcacctctcacccacccagagatggagctgctctgccttccagcggggcacccggagggctgccccagcagatagagagggcctccgttctgccacctgccttgaaagg

SEQ ID NO: 635087 - DNA, 120 bp, Artificial Sequence
  ENSG00000180509_19 (sequence is synthesized)
gtctccagctgccatatgtagcattggagtcctctgcaatgcgacatcctgaaagctcagctgcctgggcattcctgaagagtatggaatatttaaatgaaacatatttttttaaaacct

SEQ ID NO: 635088 - DNA, 120 bp, Artificial Sequence
  ENSG00000180509_20 (sequence is synthesized)
gcgcataagataaaagcagcccgtgtgcatcttgggccatcctcaaatggacagacttggtcttgtgaggttccagtccttgtttcacataataaacactggcatggctcagcccctgag

SEQ ID NO: 635089 - DNA, 120 bp, Artificial Sequence
  ENSG00000180509_21 (sequence is synthesized)
ttaccacagtccttgagatgagtggttctttgggttacaaagtcctctgaaagtctagtgagagctgtgatctttgccccacccgaataatgcatatggacaccacaccttgcctgccgt

SEQ ID NO: 635090 - DNA, 120 bp, Artificial Sequence
  ENSG00000180509_22 (sequence is synthesized)
gtccaggattcatgaccagtagcagcccagctatgcctgccacgtctcacggcccctgtgtaagccagacccttcttaggcagttgcatattcccagactgaggcagggcaggtttgcag

SEQ ID NO: 635091 - DNA, 120 bp, Artificial Sequence
  ENSG00000180509_23 (sequence is synthesized)
agagagacccagagtgcacgtgacccgcagtgtgatccctggcacgcactgactttgatattccaggcacacggactggctatttatcaccacttctttttccccactaagattcctgtg

SEQ ID NO: 635092 - DNA, 120 bp, Artificial Sequence
  ENSG00000180509_24 (sequence is synthesized)
ccttttaaggcagagggagatccctatggcgttagtcttcccaggccttaaagggcccttgtcttcactcacaaacctcttatctcttcttctccttcctctacattttaaagggggaga

SEQ ID NO: 635093 - DNA, 120 bp, Artificial Sequence
  ENSG00000180509_25 (sequence is synthesized)
gggaaaagtaaccgggagacaaattgagccacatattttcagacacttgttaccatattttaaaatctggcttcacatacacagagtctttgctatgcaccatgtactgttctaagcttc

SEQ ID NO: 635094 - DNA, 120 bp, Artificial Sequence
  ENSG00000180509_26 (sequence is synthesized)
ttaaaaatagaatctcaattattattttgcaggcaatactctatgcattcattagctaggacaacaatgcatttgcagtagtgagatttcgctaaaaaattaaagccatttactatgatc

SEQ ID NO: 635095 - DNA, 120 bp, Artificial Sequence
  ENSG00000180509_27 (sequence is synthesized)
gcatttgacacttgactgggatacactaccggatcctccgagggtgatggttctcaagaaggcagaagcaatggtgaccaatagacctccttaaaggctgagccgctgggcaccttccta

SEQ ID NO: 635096 - DNA, 120 bp, Artificial Sequence
  ENSG00000180509_28 (sequence is synthesized)
atttgcaggtgtctcgctcagcgcagctgcccagagccctgtgtcctgagtgatttccagtagattagcagctctgggtctaagcttttaagaaaaaaaaaaaattgcactacccttcag

SEQ ID NO: 635097 - DNA, 120 bp, Artificial Sequence
  ENSG00000180509_29 (sequence is synthesized)
taggggcagcattcacatctcacacccaggcagaagcagaaacggccaggaatccaccccactttctgggcctgacaaggccacagtttgagaacgttcagcacaggccaagcatcagat

SEQ ID NO: 635098 - DNA, 120 bp, Artificial Sequence
  ENSG00000180509_30 (sequence is synthesized)
ggattttgaacatctctggctcctaccatttctgcctccaccatccctttactcactgtgcaagctacaaaagctgaggggacaggaacaaggatgatttctgatggcatatttagaggt

SEQ ID NO: 635099 - DNA, 120 bp, Artificial Sequence
  ENSG00000180509_31 (sequence is synthesized)
gggagaggcgctcatccattgacaggtgccaggctgtcctgggcctggcaaaccctggccttgtacacccactctccacacgtctgcccccaccctcccaggggcagggccgggcttccc

SEQ ID NO: 635100 - DNA, 120 bp, Artificial Sequence
  ENSG00000180509_32 (sequence is synthesized)
tgcagagacacagggcaaagagggagagagaaggcctcaggccagggcatggcctagtgcctcccagcgccaggtcctgacagcctgagagagctggaatcaaggaaggtgatcctgggc

SEQ ID NO: 635101 - DNA, 120 bp, Artificial Sequence
  ENSG00000180509_33 (sequence is synthesized)
cccagacagacgtcagtgagcttcagcctctggtggctgcacaccagccagggcagcagcgccccctcctgcctgtgttcagctgtgtgggctgcaagaggactaaggagagtttcaagg

SEQ ID NO: 635102 - DNA, 120 bp, Artificial Sequence
  ENSG00000180509_34 (sequence is synthesized)
aggcaggcagtgggggaggaagtgtcccaggtagaggctgaagctttaaggaggatgggaggggaggcttcacccggaaggagcttttggagcaagggcctgaaggaaattggggagaga

SEQ ID NO: 635103 - DNA, 120 bp, Artificial Sequence
  ENSG00000180509_35 (sequence is synthesized)
cctgagtatctttggtaactgggaagagagcattccaagcaaagggaaaagaagagaggctgtcagacaagtgtgcacccaccatgtctgggcacatcgagaaggaccctgtggctggag

SEQ ID NO: 635104 - DNA, 120 bp, Artificial Sequence
  ENSG00000180509_36 (sequence is synthesized)
gggaggaaggaggggagaatggaaagtgagaccagaggtgacctgaccagggccttcggagccccggtgaggggctcagcgggtgggtgtcatgggtgtgaagaggtaggtccctcatca

SEQ ID NO: 635105 - DNA, 120 bp, Artificial Sequence
  ENSG00000180509_37 (sequence is synthesized)
ccagtcagcaaagcgttccctgggctcagctgaagtcctgctggagtgtgtgccccctggactggaggggatgggattggtgggaataaagttgtgagtttggagttgtggtgagcagag

SEQ ID NO: 635106 - DNA, 120 bp, Artificial Sequence
  ENSG00000180509_38 (sequence is synthesized)
cacgaagtgagcccccagcactgccacttccgcgtgaggggtgaactggccctgcactctctccccttgagtgtgggcaggacaaccctctctgcctacaacggctcagcactcgtacta

SEQ ID NO: 635107 - DNA, 120 bp, Artificial Sequence
  ENSG00000180509_39 (sequence is synthesized)
ctgtgggacagtgcttctgtgattacgttcctttataggaaaaattgattttgcagatgtaggtaagatctggactcgtttgactttgagtttatcaagaaggatgattgacagacacag

SEQ ID NO: 635108 - DNA, 120 bp, Artificial Sequence
  ENSG00000180509_40 (sequence is synthesized)
aggatgattgacagacacagtggctacttgagagtggagggtgggaggagaaagaggatcagaaaaaaataactactgggtactaggtttagtacctgggtgacgaaataatctgtacaa

SEQ ID NO: 635109 - DNA, 74 bp, Artificial Sequence
  ENSG00000180509_41 (sequence is synthesized)
caaacccccatgacacaagtttaccccaataatgaacctgcacatgtactcctgaacctaaaataaaagttgaa

SEQ ID NO: 635110 - DNA, 120 bp, Artificial Sequence
  ENSG00000180525_0 (sequence is synthesized)
atggagtcctcccgttgggacaaggaccccccaggagagagaagaccccagcagagtcaacactggagggccagggaccatggtgcccggggctgtggaccacgccagcccacagccact

SEQ ID NO: 635111 - DNA, 120 bp, Artificial Sequence
  ENSG00000180525_1 (sequence is synthesized)
gcaagccccagaccggggctgtggataacgccagcccacggcagccacacgccccagaccaacacgagaagaacgcaggccgacaacatcttcatctatgaatcctggctgatccaccat

SEQ ID NO: 635112 - DNA, 120 bp, Artificial Sequence
  ENSG00000180525_2 (sequence is synthesized)
tccccctgggattcgtgggcctcacgggggaagctgagggtgtgtccatgcaggaccccgaggctacacagctctggctgtttctcttccaaagccggcactgccctctctccatctctc

SEQ ID NO: 635113 - DNA, 120 bp, Artificial Sequence
  ENSG00000180525_3 (sequence is synthesized)
ccggtgccagggctcaggccccagcccccgtttctgcagaagcccctttccatcctagcccctgccacccctcctgctcttgtctctcccacacctcccaaactctctcctggccagctc

SEQ ID NO: 635114 - DNA, 120 bp, Artificial Sequence
  ENSG00000180525_4 (sequence is synthesized)
tcgccacactcagtcaatgtccactgggggcctcaggggcacctccacctgcccaggtctgggaccaccgtcctccacgcatatctacagaccctgtcctcacctgcatcacaccaatga

SEQ ID NO: 635115 - DNA, 120 bp, Artificial Sequence
  ENSG00000180525_5 (sequence is synthesized)
atggagtcctcccgttgggacaaggaccccccaggagagagaagaccccagcagagtcaacactggaggtcctgcggggtgggtggtgctggggaggccacacggggagggctgttccct

SEQ ID NO: 635116 - DNA, 120 bp, Artificial Sequence
  ENSG00000180525_6 (sequence is synthesized)
cacagcataccgcacatcaaaggcacgattctctccgaagccctcagtggcttcctagtatctgacagaagaaccaaaactgtggcaggcctgcgatggctgtggttgaggaaagaggcc

SEQ ID NO: 635117 - DNA, 120 bp, Artificial Sequence
  ENSG00000180525_7 (sequence is synthesized)
acacccacagccagcagaaccacactcagcagcagcctagccccacgtggaagaggcgtgaacactctcgggagaggtggatgtacgctaatggttctcagctccgacctctgtgattaa

SEQ ID NO: 635118 - DNA, 120 bp, Artificial Sequence
  ENSG00000180525_8 (sequence is synthesized)
gctacgcaaagacagcaggagccgtgcctcgaaaaggctgagatgtctgagaaataaagttgtacgcggatttacgcctgggcaggttgaaatgcgtgtgccatgacagatccggaagct

SEQ ID NO: 635119 - DNA, 120 bp, Artificial Sequence
  ENSG00000180525_9 (sequence is synthesized)
tgtctactcgaaggtccacatccagcacctaccgggaaagcgagaagaaagcaaagggcatcactccctacccacgaaagactcacaacatccctggaaaagcaacgaggcgaacggctg

SEQ ID NO: 635120 - DNA, 120 bp, Artificial Sequence
  ENSG00000180525_10 (sequence is synthesized)
gtctgcgttcagagctggtgaggagcagggagaagaatccagagcgtccccgcctccctccctcaccgccctcccgcactgatgtgaacacgggagtaacaccgcgcgtggggaatccac

SEQ ID NO: 635121 - DNA, 120 bp, Artificial Sequence
  ENSG00000180525_11 (sequence is synthesized)
tggcacccagagcccggcccgcggcagcagaatcacccaagactgagatcctgtggcctgagtcggggccggggaaaccaagcctgcaggactccgggagcagccggtttctgcacacag

SEQ ID NO: 635122 - DNA, 120 bp, Artificial Sequence
  ENSG00000180525_12 (sequence is synthesized)
gtaacatagaactgggggtaagcaaagccacgaggtcggcccgtggcctgtctgcccgtggcctgtctgcccgtggcctgtctgcccgtggcctgtctgcgcacagctattaaaagttca

SEQ ID NO: 635123 - DNA, 120 bp, Artificial Sequence
  ENSG00000180525_13 (sequence is synthesized)
ataaacgtggtggcagcagctgaactggctaccacaggacgcagctggggtctggacgtgggcctgggggctggtggaaggcacgtgtgttgaggcgtgtactcagggcctgcctacttc

SEQ ID NO: 635124 - DNA, 120 bp, Artificial Sequence
  ENSG00000180525_14 (sequence is synthesized)
cccaggcctacggggacagatgtagctccccaggaaataccacaggcagaccccggccggcaagctgccccaagaagcagtgcgcctcccaaaatcagaagcagctaagctgacccccac

SEQ ID NO: 635125 - DNA, 120 bp, Artificial Sequence
  ENSG00000180525_15 (sequence is synthesized)
ctcatgtgaaagagccaggcaccagggagagggcacccacccagtctcctaatcataacagacattcacagcaacaccacgaaaaagaaactactgctctgacctggaaaaatgaaattt

SEQ ID NO: 635126 - DNA, 120 bp, Artificial Sequence
  ENSG00000180525_16 (sequence is synthesized)
aaaacagaaaacacacaggttgtaactaaaaggcagacggaccaggtgcggtggttcatgcctgtaatcccaacaccttggaaggccgaggcaggcggatgacatgaggtcaggagttca

SEQ ID NO: 635127 - DNA, 74 bp, Artificial Sequence
  ENSG00000180525_17 (sequence is synthesized)
ataatacaaaaactgggaggaggcgcaggatgacgacgagagagagacgagagaggcagatggcccacggcagg

SEQ ID NO: 635128 - DNA, 120 bp, Artificial Sequence
  ENSG00000180525_18 (sequence is synthesized)
gacgagagagagacgagagaggcagatggcccacggcaggctgagcacaggacctggctgaggcctcctggggaggggcagaggcaaacatgctgctgcttctaggctactcgggaggac

SEQ ID NO: 635129 - DNA, 120 bp, Artificial Sequence
  ENSG00000180525_19 (sequence is synthesized)
gcacgctcagaaggggctgcacggcaggacttgctgaggagcagtcacgtggatgcccccgcctctcacaacgcacacactgacaacatgcaactcacatacaacacaacatgcatgtac

SEQ ID NO: 635130 - DNA, 120 bp, Artificial Sequence
  ENSG00000180525_20 (sequence is synthesized)
aatgtactcatacaacatatacaacactgacaacacacaacacacacaacacatgcaacctatacaacacatacccaatatatgctactcacaacacaatatgcatttataacacactca

SEQ ID NO: 635131 - DNA, 120 bp, Artificial Sequence
  ENSG00000180525_21 (sequence is synthesized)
tacaacacatacccaatgcatgcaactcacaacacaacacgtacgtacaacacatacacacatacagcacacgtaacacatacaacacaacacacatgtacaatgcactcatacagcaca

SEQ ID NO: 635132 - DNA, 120 bp, Artificial Sequence
  ENSG00000180525_22 (sequence is synthesized)
catacaacatacatgcaactcacaacatacacatacaacacactcatacagcacatgtacaacacatgcaactcacattcaacacgacatacacgtaccacacacaacacacgcaactca

SEQ ID NO: 635133 - DNA, 120 bp, Artificial Sequence
  ENSG00000180525_23 (sequence is synthesized)
caacacaacatgcatgtacaacactcatacaacacaacactcatacaacatacagacaacacatgcaactcacaacacaacatacacatacaacacactcatacaacacacacaacacat

SEQ ID NO: 635134 - DNA, 120 bp, Artificial Sequence
  ENSG00000180525_24 (sequence is synthesized)
gcaactcacgcacaacacaacatgcacaacacaacatacaacatatacaacacaacactcatacaacatatatgtgtattgcatacacataatacatgcaactcacaacacaacatacac

SEQ ID NO: 635135 - DNA, 120 bp, Artificial Sequence
  ENSG00000180525_25 (sequence is synthesized)
atacaacacactcatacaacacatgcaactcacaacacaatatgcacgtacaacacactcatacaacatacaacatataacacatacaacatacaacacatgcaactcaacacaaataca

SEQ ID NO: 635136 - DNA, 120 bp, Artificial Sequence
  ENSG00000180525_26 (sequence is synthesized)
tgtacaaggcactcacacaacacacaacactgatacaacatacaacacatggaactcacaaacacgtacagcacactcatacaacatacaacccatacaacatacaatacatgcaactca

SEQ ID NO: 635137 - DNA, 120 bp, Artificial Sequence
  ENSG00000180525_27 (sequence is synthesized)
tacaacatacacatacaacactcatacaacacacattcatacaacacaacactcatacaacatacaaaacatacaactcacaaatacatgtacaacacactcatacaacacataacactc

SEQ ID NO: 635138 - DNA, 120 bp, Artificial Sequence
  ENSG00000180525_28 (sequence is synthesized)
aaacatacaatgaatgcaactcaacacaacatgcacatacaacacacatacaacccatgccactcacatacaacacaacacgctcatacaacacattcatacaacacatactgtacagat

SEQ ID NO: 635139 - DNA, 120 bp, Artificial Sequence
  ENSG00000180525_29 (sequence is synthesized)
tctaagtatgaaatagaaaacagcacatgcacagtttctaaagtatgacaaaagcttttttcaagaaggtcatccaacatccaaactggtaacatgtcctcattttcagctgctgttcag

SEQ ID NO: 635140 - DNA, 120 bp, Artificial Sequence
  ENSG00000180525_30 (sequence is synthesized)
attcaagcatgtttatcatctgctccatgaattacaataatatagcataaacccttttttcattttacacccactttggtgtggggtgctccaaaacaggggccaggagcctcagtcatc

SEQ ID NO: 635141 - DNA, 120 bp, Artificial Sequence
  ENSG00000180525_31 (sequence is synthesized)
cctcggaacaaaacacaactcacactcagaggccaggaagggaactcggggggcgacacacactctctcatctgcagagctctgcttcaattactttacatgtaaccgcggctggaacgg

SEQ ID NO: 635142 - DNA, 120 bp, Artificial Sequence
  ENSG00000180525_32 (sequence is synthesized)
ggttggtgacggtacagacacggcaaactgaggagaaattggcaggtggagaaagatcagccagaatccaaggaaaaatgctgagcattttccacaaatagttcacacaacggacaatag

SEQ ID NO: 635143 - DNA, 120 bp, Artificial Sequence
  ENSG00000180525_33 (sequence is synthesized)
ttgggctactgaaagtttattgagaggggtcttgctccaaagaaaaagttctttcccaaggttatcaaagactcacagcagaccccggcccccaacacaccatctgcagagggcctgtta

SEQ ID NO: 635144 - DNA, 120 bp, Artificial Sequence
  ENSG00000180525_34 (sequence is synthesized)
gtcaaaaagaagacaagacagaagcaagggggtgcggggggaggagagcaagaggggaccgagaactcggaaccaagtgatgggcagacactgaatgcctgactccagggttatcgcctc

SEQ ID NO: 635145 - DNA, 120 bp, Artificial Sequence
  ENSG00000180525_35 (sequence is synthesized)
agaaaacaagtccgtttaagcccgtggtaacagtgttagcgctttcactgaacctgcactcaacactggagaacctccctgcattatgaagatgagccgaaaaataacattaattcacaa

SEQ ID NO: 635146 - DNA, 120 bp, Artificial Sequence
  ENSG00000180525_36 (sequence is synthesized)
cagatggtgaccgtgacccagtgataccactctccagtgggcagcctggtctgcagagggggagatccctggggcagccctacctcagcatgggtgagtttctgttgcaattctatgtcc

SEQ ID NO: 635147 - DNA, 120 bp, Artificial Sequence
  ENSG00000180525_37 (sequence is synthesized)
agtgtaaataaactgtggaaaactgggagatggtacaagaaagcaaggatgccaactaaatgaatagaaagatctacaagggaaggctgagatcagctgaaataggattgggaaagtaaa

SEQ ID NO: 635148 - DNA, 120 bp, Artificial Sequence
  ENSG00000180525_38 (sequence is synthesized)
ggcctggctggaacttcgtaatggcttttgaggctcgggaacagggacagtagctgccctgtccatcccaggagagaacagacggacatggctggaaagcacttccctgactaaaagtgt

SEQ ID NO: 635149 - DNA, 120 bp, Artificial Sequence
  ENSG00000180525_39 (sequence is synthesized)
ctttaaaaagggagatctcagaatctccttccctggaatgctttaacccttcatggaacacagcagaaattccacagccctgcatcccaggaagcagggacaggacagcagcttccagca

SEQ ID NO: 635150 - DNA, 120 bp, Artificial Sequence
  ENSG00000180525_40 (sequence is synthesized)
cacgtctcacgccaccacttaaggcagcggctctcaagcaggggcgattctactgggaggagggatgctgatggcaccagagggtgggaagcagggatctgacgcttagcaccgcaggtg

SEQ ID NO: 635151 - DNA, 120 bp, Artificial Sequence
  ENSG00000180525_41 (sequence is synthesized)
ccaaggacggcctcctccccacaagggctccgggaggccacaccagagggtgggaggcaggggtgacgctcagcactgcaggcaccgaggacagcctcctcccaggaggaaaaaacaaag

SEQ ID NO: 635152 - DNA, 120 bp, Artificial Sequence
  ENSG00000180525_42 (sequence is synthesized)
acgggaaaaaacaaaggctccccacaagggctccagggggccacaccagagggtgggaggcaggggtgacactcagcaccgcaggcaccgaggacggcctcccacaaaggctcctctggg

SEQ ID NO: 635153 - DNA, 120 bp, Artificial Sequence
  ENSG00000180525_43 (sequence is synthesized)
ccagagcatccgtagtgccaaggggaaaagcccggacacaaaggatccagtgttttcaacgttgctcagggtatctccacacagaaactcccatctgccttttgtgcaaactctggggtc

SEQ ID NO: 635154 - DNA, 120 bp, Artificial Sequence
  ENSG00000180525_44 (sequence is synthesized)
ttgcaatcgataaacgttcacaagacacaacacgtgaacctaacaattctcttttgctccaggagagagaaaagaaggaatggtttggggagattcaccgaaattctgtgagttcttgac

SEQ ID NO: 635155 - DNA, 120 bp, Artificial Sequence
  ENSG00000180525_45 (sequence is synthesized)
taaaaatcaccaagtccgctgtgttctgttatcagcagtcctgggtaggcccagacccacctcacccccagcgggacccaggaaaggctttaaacctcaaacgtcccttttcgtaacact

SEQ ID NO: 635156 - DNA, 120 bp, Artificial Sequence
  ENSG00000180525_46 (sequence is synthesized)
ggctgtttcatgtggttaataaatcatccaataaaatgacacacataagcccagttatacactcgacacattaacactattgatcattgttatatgtccgggttaatcaacattacaatg

SEQ ID NO: 635157 - DNA, 120 bp, Artificial Sequence
  ENSG00000180525_47 (sequence is synthesized)
ttacaatgctacagagaaatcattggtactaagagttgtaaggatgattttttaaaatttatgtatctcaattttttatactgttactttttacattttaaaaaatgtatattctgaaat

SEQ ID NO: 635158 - DNA, 120 bp, Artificial Sequence
  ENSG00000180525_48 (sequence is synthesized)
ttaatgtatcaagcattttaaaatgaaccaaatatatatctacaaatatatagggaatttttaaataaatatcagggtagaaggaattaaaactcctaacttaatactaaatagacggga

SEQ ID NO: 635159 - DNA, 120 bp, Artificial Sequence
  ENSG00000180525_49 (sequence is synthesized)
aaatagacgggaaaaaacaaagtagagagttctcacagactcctgaaggaatatatagtaataaagctcaaaaagtacattaaaacctttataacgatgttttaattaccaactaacaag

SEQ ID NO: 635160 - DNA, 120 bp, Artificial Sequence
  ENSG00000180525_50 (sequence is synthesized)
aaaatatctactgaatcgcgactagcagatacccaggtctgttcagcacctgtactctcccctaggtctgctgaggaacagatcaattctgttggagttgaccttgaaatttaaaaaaac

SEQ ID NO: 635161 - DNA, 120 bp, Artificial Sequence
  ENSG00000180525_51 (sequence is synthesized)
aaaacaaaacaaaacaaaaacagctttaaagatttaaatttcctgaataaaacagaaaataaaaataacacttctgcacctgtgagttctcttgaccctaatttattttttgctttggat

SEQ ID NO: 635162 - DNA, 120 bp, Artificial Sequence
  ENSG00000180525_52 (sequence is synthesized)
ggttcataaaatatacatatataccttaaccgtgctttatattatatactagtgattgttaattcattattaacctcactctacagctaaattctaacactaatcatggtggcatcatta

SEQ ID NO: 635163 - DNA, 120 bp, Artificial Sequence
  ENSG00000180525_53 (sequence is synthesized)
ggacattgttctaggtggtgcttttttaactgaaaagaaaaacgggggataggtaataaataattatgtaatctaaagaaaaagttttaattgtgtgagtccagtaacgcgatcatctag

SEQ ID NO: 635164 - DNA, 120 bp, Artificial Sequence
  ENSG00000180525_54 (sequence is synthesized)
catggaaaatattttcagtagttccaggaaacttcacataagaaacactaaataaattctaagttcagtatatgagttagagacatttccaaaaggaaagcacacacagttggttgggag

SEQ ID NO: 635165 - DNA, 120 bp, Artificial Sequence
  ENSG00000180525_55 (sequence is synthesized)
cgcctggattttctctagcaaaagactcgtggaatccatgctttcgccgccacgtgacgaggcacacgcggactgggacatcgtcctccaccctccagaaccaaacgctacgcgaaacca

SEQ ID NO: 635166 - DNA, 120 bp, Artificial Sequence
  ENSG00000180525_56 (sequence is synthesized)
cagcgccagattcccacactggaaaatccctgagcaaagactcacgtgactcctcctcagccgctttcccaaaacaaaacacatcaatcaaacgaacccgatgaaatatacgagatcgaa

SEQ ID NO: 635167 - DNA, 120 bp, Artificial Sequence
  ENSG00000180525_57 (sequence is synthesized)
aggaaaacaagagccaggcttatctcttacaggaacactccataaatcttacactgaattcactcatccttccacacaatctgctgataagaggtaaataatcaagtggaaatcactcaa

SEQ ID NO: 635168 - DNA, 120 bp, Artificial Sequence
  ENSG00000180525_58 (sequence is synthesized)
atggggtgctctaacttctcagcgctggccgtcaccaacgcaggccggcagcaccctggaaaggcccaggtcccgcagctctccctccacgcgtggctacggtggaggaacgaagagcag

SEQ ID NO: 635169 - DNA, 120 bp, Artificial Sequence
  ENSG00000180525_59 (sequence is synthesized)
ctgtgagttcgtgggaaagaagggctatctggaataatacgagtccgggtgacatatgtaattgtgagtttttgttttctccgaactggccttattattattaattattccttcagcacc

SEQ ID NO: 635170 - DNA, 120 bp, Artificial Sequence
  ENSG00000180525_60 (sequence is synthesized)
aacacatcaaaacggaaaaggaaatgtaagcagtgtttgccgtccaaagttcacatcaacaattccttattaggaaggcaattctgagcctttcctcctgcatctgggagctgccagcaa

SEQ ID NO: 635171 - DNA, 120 bp, Artificial Sequence
  ENSG00000180525_61 (sequence is synthesized)
cgtgggttccggtcaccagtcggcctcccccaccaacgtggactccttacaagcagagccaccaacgtggacacgatcccatcaggaaccacctacttttgcatccccagcactgtgctc

SEQ ID NO: 635172 - DNA, 120 bp, Artificial Sequence
  ENSG00000180525_62 (sequence is synthesized)
aggtcccagggaggccccagcaaactgtggaacaaccaaactcgtgactgaatgaacaagtatgttaagtcgttaagtaaaaatagcagaagacttagtagaatgtatgagtaacaatta

SEQ ID NO: 635173 - DNA, 120 bp, Artificial Sequence
  ENSG00000180525_63 (sequence is synthesized)
agtatttcccccaaaaggtgcatcttttataaaacaagaacgcaaggctctgaggccaactttgaacatttatttgagtgaattcacgtcccccaaattttccgtatcccaaaatctgga

SEQ ID NO: 635174 - DNA, 120 bp, Artificial Sequence
  ENSG00000180525_64 (sequence is synthesized)
cttttgctaaatggtgcccttagcacaggagtctctccaaggaagtggcctgagctgagagggggcctggcatcgcccacccaggtcatcagtcatcatcagcagcagctgcggcatgag

SEQ ID NO: 635175 - DNA, 120 bp, Artificial Sequence
  ENSG00000180525_65 (sequence is synthesized)
agagatggtgtggggcgaaaccaatggggaaactacaaaagaaaccacctgctactgcaaacggcctcgctgtactcagggagtcggttccaggaccccatggacaccaaatccaggcac

SEQ ID NO: 635176 - DNA, 120 bp, Artificial Sequence
  ENSG00000180525_66 (sequence is synthesized)
actcacgccccacaagtggacctgccgaacctgcgtgtacagagtcggccctccgacacacgtttcacatggcaggaacactgtattttctccctgagtttggttgaaaaaattcacata

SEQ ID NO: 635177 - DNA, 120 bp, Artificial Sequence
  ENSG00000180525_67 (sequence is synthesized)
taagttgacccacaaagctcaagcttgtgtggtacaagagtcaactgtatgcaattgacactgattcctaccaacgatatccaaatcttagcatgagcagcacgataaacagaatgagca

SEQ ID NO: 635178 - DNA, 120 bp, Artificial Sequence
  ENSG00000180525_68 (sequence is synthesized)
aaattcaaaaactaaagcagcgtttttcctgcaagtgggcgcactgcgtatcccctgcgggaaagaccacgctggctgctgaccaaactccactggcatcttcctccatcctgagggcat

SEQ ID NO: 635179 - DNA, 120 bp, Artificial Sequence
  ENSG00000180525_69 (sequence is synthesized)
cttcctcggcatcttcctccatcgacagcagcctgggctcacctcccagcccgaggctgagaactgagttccagtcccggggtggggtggcgggggggcgcactgtgcaccctcccagct

SEQ ID NO: 635180 - DNA, 120 bp, Artificial Sequence
  ENSG00000180525_70 (sequence is synthesized)
ctcctccaccccttccctcaggctggcccaagaatagcctggacaatcacctgctggggacaccgggctgcccctcctccgcccacagcctcaggccacctgtctcatccgtgaccgaga

SEQ ID NO: 635181 - DNA, 120 bp, Artificial Sequence
  ENSG00000180525_71 (sequence is synthesized)
aacggagctgcagtgggaggcgggacatgctgggatctacccatggccaggccaagctgcgccaatcactcaagcttcactttgatcacttgctctaccaaataaaacagaacaaaataa

SEQ ID NO: 635182 - DNA, 80 bp, Artificial Sequence
  ENSG00000180530_0 (sequence is synthesized)
agacattgcagcagagccccgaactcgggaggcggcggcggaggaggcggcggcgaggcgcagggacgacccggccccac

SEQ ID NO: 635183 - DNA, 120 bp, Artificial Sequence
  ENSG00000180530_1 (sequence is synthesized)
ctggtcggagggaagagctcgccggggcgccgggccaggacggggcggcaggcgccttcgcggaccgagcctgacggagccggaggctgggagccgcggcggcctggggaagtgtttgga

SEQ ID NO: 635184 - DNA, 120 bp, Artificial Sequence
  ENSG00000180530_2 (sequence is synthesized)
gccgcggcggcctggggaagtgtttggattgtgagctatttcagaactgttctcaggactcattattttaacatttgggagaaacacagccagaagatgcacacttgactgaaggaggac

SEQ ID NO: 635185 - DNA, 120 bp, Artificial Sequence
  ENSG00000180530_3 (sequence is synthesized)
agggaatctgaagactccggatgacatcagagctacttttcaacagccttctcaattttctttctcagaaagcagaggctcagagcttggagacagacgaacactgatatttgcatttaa

SEQ ID NO: 635186 - DNA, 120 bp, Artificial Sequence
  ENSG00000180530_4 (sequence is synthesized)
tggggaacaaaagatgaagaaggaaaaggaatatattcactaaggattctatctgcttactgctacagacctatgtgttaaggaattcttctcctcctccttgcgtagaagttgatcagc

SEQ ID NO: 635187 - DNA, 120 bp, Artificial Sequence
  ENSG00000180530_5 (sequence is synthesized)
actgtggtcagactgcatttatcttgtcattgccagaagaaatcttggacagaatgtaacagtacgtctctctctgattgcgatggaaggtgataaactgatactcctttattaaagtta

SEQ ID NO: 635188 - DNA, 120 bp, Artificial Sequence
  ENSG00000180530_6 (sequence is synthesized)
catcgcactcaccacagaaaaccattctttaaagtgaatagaaaccaagcccttgtgaacacttctattgaacatgactcatggagaagagcttggctctgatgtgcaccaggattctat

SEQ ID NO: 635189 - DNA, 120 bp, Artificial Sequence
  ENSG00000180530_7 (sequence is synthesized)
tgttttaacttacctagaaggattactaatgcatcaggcagcagggggatcaggtactgccgttgacaaaaagtctgctgggcataatgaagaggatcagaactttaacatttctggcag

SEQ ID NO: 635190 - DNA, 120 bp, Artificial Sequence
  ENSG00000180530_8 (sequence is synthesized)
tgcatttcccacctgtcaaagtaatggtccagttctcaatacacatacatatcaggggtctggcatgctgcacctcaaaaaagccagactgttgcagtcttctgaggactggaatgcagc

SEQ ID NO: 635191 - DNA, 120 bp, Artificial Sequence
  ENSG00000180530_9 (sequence is synthesized)
aaagcggaagaggctgtctgattctatcatgaatttaaacgtaaagaaggaagctttgctagctggcatggttgacagtgtgcctaaaggcaaacaggatagcacattactggcctcttt

SEQ ID NO: 635192 - DNA, 120 bp, Artificial Sequence
  ENSG00000180530_10 (sequence is synthesized)
gcttcagtcattcagctctaggctgcagactgttgctctgtcacaacaaatcaggcagagcctcaaggagcaaggatatgccctcagtcatgattctttaaaagtggagaaggatttaag

SEQ ID NO: 635193 - DNA, 120 bp, Artificial Sequence
  ENSG00000180530_11 (sequence is synthesized)
gtgctatggtgttgcatcaagtcacttaaaaactttgttgaagaaaagtaaagttaaagatcaaaagcctgatacgaatcttcctgatgtgactaaaaacctcatcagagataggtttgc

SEQ ID NO: 635194 - DNA, 120 bp, Artificial Sequence
  ENSG00000180530_12 (sequence is synthesized)
agagtctcctcatcatgttggacaaagtggaacaaaggtcatgagtgaaccgttgtcatgtgctgcaagattacaggctgttgcaagcatggtggaaaaaagggctagtcctgccacctc

SEQ ID NO: 635195 - DNA, 120 bp, Artificial Sequence
  ENSG00000180530_13 (sequence is synthesized)
acctaaacctagtgttgcttgtagccagttagcattacttctgtcaagcgaagcccatttgcagcagtattctcgagaacacgctttaaaaacgcaaaatgcaaatcaagcagcaagtga

SEQ ID NO: 635196 - DNA, 120 bp, Artificial Sequence
  ENSG00000180530_14 (sequence is synthesized)
aagacttgctgctatggccagattgcaagaaaatggccagaaggatgttggcagttaccagctcccaaaaggaatgtcaagccatcttaatggtcaggcaagaacatcatcaagcaaact

SEQ ID NO: 635197 - DNA, 120 bp, Artificial Sequence
  ENSG00000180530_15 (sequence is synthesized)
gatggctagcaaaagtagtgctacagtgtttcaaaatccaatgggtatcattccttcttcccctaaaaatgcaggttataagaactcactggaaagaaacaatataaaacaagctgctaa

SEQ ID NO: 635198 - DNA, 120 bp, Artificial Sequence
  ENSG00000180530_16 (sequence is synthesized)
caatagtttgcttttacatcttcttaaaagccagactatacctaagccaatgaatggacacagtcacagtgagagaggaagcatttttgaggaaagtagtacacctacaactattgatga

SEQ ID NO: 635199 - DNA, 120 bp, Artificial Sequence
  ENSG00000180530_17 (sequence is synthesized)
atattcagataacaatcctagttttacagatgacagcagtggtgatgaaagttcttattccaactgtgttcccatagacttgtcttgcaaacaccgaactgaaaaatcagaatctgacca

SEQ ID NO: 635200 - DNA, 120 bp, Artificial Sequence
  ENSG00000180530_18 (sequence is synthesized)
acctgtttccctggataacttcactcaatccttgctaaacacttgggatccaaaagtcccagatgtagatatcaaagaagatcaagatacctcaaagaattctaagctaaactcacacca

SEQ ID NO: 635201 - DNA, 120 bp, Artificial Sequence
  ENSG00000180530_19 (sequence is synthesized)
gaaagtaacacttcttcaattgctacttggccataagaatgaagaaaatgtagaaaaaaacaccagccctcagggagtacacaatgatgtgagcaagttcaatacacaaaattatgcaag

SEQ ID NO: 635202 - DNA, 120 bp, Artificial Sequence
  ENSG00000180530_20 (sequence is synthesized)
gacttctgtgatagaaagccccagtacaaatcggactactccagtgagcactccacctttacttacatcaagcaaagcagggtctcccatcaatctctctcaacactctctggtcatcaa

SEQ ID NO: 635203 - DNA, 120 bp, Artificial Sequence
  ENSG00000180530_21 (sequence is synthesized)
atggaattccccaccatatgtctgcagtactcagtctgaaaagctaacaaatactgcatctaaccactcaatggaccttacaaaaagcaaagacccaccaggagagaaaccagcccaaaa

SEQ ID NO: 635204 - DNA, 120 bp, Artificial Sequence
  ENSG00000180530_22 (sequence is synthesized)
tgaaggtgcacagaactctgcaacgtttagtgccagtaagctgttacaaaatttagcacaatgtggaatgcagtcatccatgtcagtggaagagcagagacccagcaaacagctgttaac

SEQ ID NO: 635205 - DNA, 120 bp, Artificial Sequence
  ENSG00000180530_23 (sequence is synthesized)
tggaaacacagataaaccgataggtatgattgatagattaaatagccctttgctctcaaataaaacaaatgcagttgaagaaaataaagcatttagtagtcaaccaacaggtcctgaacc

SEQ ID NO: 635206 - DNA, 120 bp, Artificial Sequence
  ENSG00000180530_24 (sequence is synthesized)
agggctttctggttctgaaatagaaaatctgcttgaaagacgtactgtcctccagttgctcctggggaaccccaacaaagggaagagtgaaaaaaaagagaaaactcccttaagagatga

SEQ ID NO: 635207 - DNA, 120 bp, Artificial Sequence
  ENSG00000180530_25 (sequence is synthesized)
aagtactcaggaacactcagagagagctttaagtgaacaaatactgatggtgaaaataaaatctgagccttgtgatgacttacaaattcctaacacaaatgtgcacttgagccatgatgc

SEQ ID NO: 635208 - DNA, 120 bp, Artificial Sequence
  ENSG00000180530_26 (sequence is synthesized)
taagagtgccccattcttgggtatggctcctgctgtgcagagaagcgcacctgccttaccagtgtccgaagactttaaatcggagcctgtttcacctcaggatttttctttctccaagaa

SEQ ID NO: 635209 - DNA, 120 bp, Artificial Sequence
  ENSG00000180530_27 (sequence is synthesized)
tggtctgctaagtcgattgctaagacaaaatcaagatagttacctggcagatgattcagacaggagtcacagaaataatgaaatggcacttctagaatcaaagaatctttgcatggtccc

SEQ ID NO: 635210 - DNA, 120 bp, Artificial Sequence
  ENSG00000180530_28 (sequence is synthesized)
taagaaaaggaagctttatactgagccattagaaaatccatttaaaaagatgaaaaacaacattgttgatgctgcaaacaatcacagtgccccagaagtactgtatgggtccttgcttaa

SEQ ID NO: 635211 - DNA, 120 bp, Artificial Sequence
  ENSG00000180530_29 (sequence is synthesized)
ccaggaagagctgaaatttagcagaaatgatcttgaatttaaatatcctgctggtcatggctcagccagcgaaagtgaacacaggagttgggccagagagagcaaaagctttaatgttct

SEQ ID NO: 635212 - DNA, 120 bp, Artificial Sequence
  ENSG00000180530_30 (sequence is synthesized)
gaaacagctgcttctctcagaaaactgtgtgcgagatttgtccccgcacagaagtaactctgtggctgacagtaaaaagaaaggacacaaaaataatgtgaccaacagcaaacctgaatt

SEQ ID NO: 635213 - DNA, 120 bp, Artificial Sequence
  ENSG00000180530_31 (sequence is synthesized)
tagcatttcttctttaaatggactgatgtacagttccactcagcccagcagttgcatggataacaggacattttcatacccaggtgtagtaaaaactcctgtgagtcctactttccctga

SEQ ID NO: 635214 - DNA, 120 bp, Artificial Sequence
  ENSG00000180530_32 (sequence is synthesized)
gacccattaagtgggttatcactgatgcggagaagaatgagtatgaaaaagactctccaagattgaccaaaaccaacccaatactatattacatgcttcaaaaaggaggcaattctgtta

SEQ ID NO: 635215 - DNA, 120 bp, Artificial Sequence
  ENSG00000180530_33 (sequence is synthesized)
ccagtcgagaaacacaagacaaggacatttggagggaggcttcatctgctgaaagtgtctcacaggtcacagccaaagaagagttacttcctactgcagaaacgaaagcttctttcttta

SEQ ID NO: 635216 - DNA, 120 bp, Artificial Sequence
  ENSG00000180530_34 (sequence is synthesized)
atttaagaagcccttacaatagccatatgggaaataatgcttctcgcccacacagcgcaaatggagaagtttatggacttctgggaagcgtgctaacgataaagaaagaatcagaataaa

SEQ ID NO: 635217 - DNA, 120 bp, Artificial Sequence
  ENSG00000180530_35 (sequence is synthesized)
atgtacctgccatccagttttggatctttttaaaactaatgagtatgaacttgagatctgtataaataagagcatgatttgaaaaaaagcatggtataattgaaacttttttcattttga

SEQ ID NO: 635218 - DNA, 120 bp, Artificial Sequence
  ENSG00000180530_36 (sequence is synthesized)
aaagtattggttactggtgatgttgaaatatgcatactaatttttgcttaacattagatgtcatgaggaaactactgaactagcaattggttgtttaacacttctgtatgcatcagataa

SEQ ID NO: 635219 - DNA, 120 bp, Artificial Sequence
  ENSG00000180530_37 (sequence is synthesized)
caactgtgagtagcctatgaatgaaattcttttataaatattaggcataaattaaaatgtaaaactccattcatagtggattaatgcattttgctgcctttattagggtactttattttg

SEQ ID NO: 635220 - DNA, 120 bp, Artificial Sequence
  ENSG00000180530_38 (sequence is synthesized)
cttttcagaagtcagcctacataacacatttttaaagtctaaactgttaaacaactctttaaaggataattatccaataaaaaaaaacctagtgctgattcacagcttattatccaattc

SEQ ID NO: 635221 - DNA, 120 bp, Artificial Sequence
  ENSG00000180530_39 (sequence is synthesized)
aaaaataaattagaaaaatatatgcttacatttttcacttttgctaaaaagaaaaaaaaaaggtgtttatttttaactcttggaagaggttttgtggttcccaatgtgtctgtcccaccc

SEQ ID NO: 635222 - DNA, 120 bp, Artificial Sequence
  ENSG00000180530_40 (sequence is synthesized)
tgatccttttcaatatatatttctttaaaccttgtgctacttagtaaaaattgattacaattgagggaagtttgatagatcctttaaaaaaaaggcagatttccattttttgtattttaa

SEQ ID NO: 635223 - DNA, 120 bp, Artificial Sequence
  ENSG00000180530_41 (sequence is synthesized)
ctactttactaaattaatactcctccttttacagaattagaaaagttaacatttatctttaggtggtttcctgaaaagttgaatatttaagaaattgtttttaacagaagcaaaatggct

SEQ ID NO: 635224 - DNA, 120 bp, Artificial Sequence
  ENSG00000180530_42 (sequence is synthesized)
tttctttggacagttttcaccatctcttgtaaaagttaattctcaccattcctgtggtacctgcgagtgttatgaccaggattccttaaacctgaactcagaccacttgcattagaacca

SEQ ID NO: 635225 - DNA, 120 bp, Artificial Sequence
  ENSG00000180530_43 (sequence is synthesized)
tctggagcacttgttttaaaatgcagattcataggcagcatctcagatctacagaacaagaatctctgctaagtggacctggaatcttccatctgcatcttaacatgctctctaggtgtt

SEQ ID NO: 635226 - DNA, 120 bp, Artificial Sequence
  ENSG00000180530_44 (sequence is synthesized)
tcttgtgtttgagaaccatgacttatgactttcctcagaacatgagactgtaaaacaaaaacaaaaaactatgtgatgcctctattttccccaatacagtcacacatcagctcaaaattt

SEQ ID NO: 635227 - DNA, 120 bp, Artificial Sequence
  ENSG00000180530_45 (sequence is synthesized)
gcaatattgtagttcatatattaccgttatgtctttggaaatcgggttcagaacactttttatgacaaaaattgggtggaggggataactttcatatctggctcaacatctcaggaaaat

SEQ ID NO: 635228 - DNA, 120 bp, Artificial Sequence
  ENSG00000180530_46 (sequence is synthesized)
ctgtgattatttgtgtgttctaatgagtaacatctacttagttagccttagggatggaaaaacagggccacttaccaaactcaggtgattccaggatggtttggaaacttctcctgaatg

SEQ ID NO: 635229 - DNA, 120 bp, Artificial Sequence
  ENSG00000180530_47 (sequence is synthesized)
catccttaacctttattaaaaccattgtcctaagaacaatgccaacaaagcttacaacatttagtttaaacccaagaagggcactaaactcagattgactaaataaaaagtacaaagggc

SEQ ID NO: 635230 - DNA, 120 bp, Artificial Sequence
  ENSG00000180530_48 (sequence is synthesized)
acatatacgtgacagaattgtacacaatcactccattggatcttttactttaaagtagtgatgaaaagtacatgttgatactgtcttagaagaaattaatatattagtgaagccacatgg

SEQ ID NO: 635231 - DNA, 120 bp, Artificial Sequence
  ENSG00000180530_49 (sequence is synthesized)
ggtttcagttgcgaaacaggtctgtttttatgttcagtttgtacaatccacaattcattcaccagatattttgttcttaattgtgaaccaggttagcaaatgacctatcaaaaattattc

SEQ ID NO: 635232 - DNA, 120 bp, Artificial Sequence
  ENSG00000180530_50 (sequence is synthesized)
tataatcactactagttaggatattgatttaaaattgttctacttgaagtggtttctaagatttttatattaaaaataggtgtgatttcctaatatgatctaaaaccctaaatggttatt

SEQ ID NO: 635233 - DNA, 120 bp, Artificial Sequence
  ENSG00000180530_51 (sequence is synthesized)
tttcctcagaatgatttgtaaatagctactggaaatattatacagtaataggagtgggtattatgcaacatcatggagaagtgaaggcataggcttattctgacataaaattccactggc

SEQ ID NO: 635234 - DNA, 120 bp, Artificial Sequence
  ENSG00000180530_52 (sequence is synthesized)
cagttgaatatattctattccatgtccatactatgacaatcttattgtcaacactatataaataagcttttaaacaagtcatttttcttgatcgttgtggaaggtttggagccttagagg

SEQ ID NO: 635235 - DNA, 120 bp, Artificial Sequence
  ENSG00000180530_53 (sequence is synthesized)
tatgtcagaaaaaatatgttggtattctcccttgggtagggggaaatgacctttttacaagagagtgaaatttaggtcagggaaaagaccaagggccagcattgctacttttgtgtgtgt

SEQ ID NO: 635236 - DNA, 120 bp, Artificial Sequence
  ENSG00000180530_54 (sequence is synthesized)
gtgtgtgggttttgttttgtttttttggttggctggttgttttcgttgttgttaacaaaggaatgagaatatgtaatacttaaataaacatgaccacgaagaatgctgttctgatttact

SEQ ID NO: 635237 - DNA, 120 bp, Artificial Sequence
  ENSG00000180530_55 (sequence is synthesized)
agagaatgttcccaatttgaatttagggtgattttaaagaacagtgagaaagggcatacatccacagattcactttgtttatgcatatgtagatacaaggatgcacatatacacattttc

SEQ ID NO: 635238 - DNA, 120 bp, Artificial Sequence
  ENSG00000180530_56 (sequence is synthesized)
aaggactattttagatatctagacaatttcttctaataaagtcatttgtgaaagggtactacagcttattgacatcagtaaggtagcattcattacctgtttattctctgctgcatctta

SEQ ID NO: 635239 - DNA, 80 bp, Artificial Sequence
  ENSG00000180530_57 (sequence is synthesized)
agcattcattacctgtttattctctgctgcatcttacagaagagtaaactggtgagagtatatattttatatatatatat

SEQ ID NO: 635240 - DNA, 120 bp, Artificial Sequence
  ENSG00000180530_58 (sequence is synthesized)
gatgtaaatagtgatttccttaatgaaaaatacatattttgtattgttctaatgcaacagaaaagccttttaatctctttggttcctgtatattccatgtataagtgtaaatataatcag

SEQ ID NO: 635241 - DNA, 120 bp, Artificial Sequence
  ENSG00000180530_59 (sequence is synthesized)
acaggtttaaaagttgtgcatgtatgtatacagttgcaagtctggacaaatgtatagaataaaccttttatttaagttgtgattacctgctgcatgaaaagtgcatgggggaccctgtgc

SEQ ID NO: 635242 - DNA, 120 bp, Artificial Sequence
  ENSG00000180530_60 (sequence is synthesized)
atctgtgcatttggcaaaatgtcttaacaaatcagatcagatgttcatcctaacatgacagtattccatttctggacatgacgtctgtggtttaagctttgtgaaagaatgtgctttgat

SEQ ID NO: 635243 - DNA, 120 bp, Artificial Sequence
  ENSG00000180530_61 (sequence is synthesized)
tcgaagggtcttaaagaatttttttaatcgtcaaccacttttaaacataaagaattcacacaactactttcatgaattttttaatcccattgcaaacattattccaagagtatcccagta

SEQ ID NO: 635244 - DNA, 120 bp, Artificial Sequence
  ENSG00000180530_62 (sequence is synthesized)
ttagcaatactggaatataggcacattaccattcatagtaagaattctggtgtttacacaaccaaatttgatgcgatctgctcagtaatataatttgccatttttattagaaatttaatt

SEQ ID NO: 635245 - DNA, 120 bp, Artificial Sequence
  ENSG00000180530_63 (sequence is synthesized)
tcttcatgtgatgtcatgaaactgtacatactgcagtgtgaatttttttgttttgttttttaatcttttagtgtttacttcctgcagtgaatttgaataaatgagaaaaaatgcattgtc

SEQ ID NO: 635246 - DNA, 120 bp, Artificial Sequence
  ENSG00000180530_64 (sequence is synthesized)
gctgaagaagtagcagccctgctccttttcccttgtcttgttgggtcagatccttcccggggatgatgcagattggctgacagactccgctggagacttcgcagtgacaaagcagccgag

SEQ ID NO: 635247 - DNA, 120 bp, Artificial Sequence
  ENSG00000180530_65 (sequence is synthesized)
gctgaaaaaactgagcctcggaacagttaagtaaatccaccaaagtgacccactactgaatagcagagtcaggaatccagagactgttcttttcaccacaatgctttgtggccttcctaa

SEQ ID NO: 635248 - DNA, 120 bp, Artificial Sequence
  ENSG00000180530_66 (sequence is synthesized)
taaaagcaagagactgacactggcagagacaagattttagagtgggaaaagtaatccagaattctcagagtgctgcataaattttgctttacgaaaagttttcaaatccacatttgttac

SEQ ID NO: 635249 - DNA, 120 bp, Artificial Sequence
  ENSG00000180530_67 (sequence is synthesized)
agagcagtcccacagagcccaggtcctgttaataagaagaggcatgttacatgatacgcacaaagaaactgaaaaaactgagcctcggaacagttaagtaaatccaccaaagtgacccac

SEQ ID NO: 635250 - DNA, 120 bp, Artificial Sequence
  ENSG00000180530_68 (sequence is synthesized)
ttgtggttatctcagcagaagacataccgccctcctccttgtattggtcgggacctgggcattagggagtcaaggcaaaggagaaagaaaagagattttacattagtattctatgaaagc

SEQ ID NO: 635251 - DNA, 120 bp, Artificial Sequence
  ENSG00000180532_0 (sequence is synthesized)
ccttgtaattcataaatctctgaaaacttaaaagtttgagcaaaagtttgtcatgtttctatgagtaatttataataaaacttgatcagaatttgtgagactaacgtttgtctttatatt

SEQ ID NO: 635252 - DNA, 120 bp, Artificial Sequence
  ENSG00000180532_1 (sequence is synthesized)
gcctcctgagtagctgggattacaggaccagtgatggtatagaacactgtattagagacatggagctggggctggatgaagattccatcagtaattcaatcaacagacaagtgttatcca

SEQ ID NO: 635253 - DNA, 120 bp, Artificial Sequence
  ENSG00000180532_2 (sequence is synthesized)
tccaatcacgtctttaaatcaatcactgacatggagctggggctggatgaagattccatcagtaattcaatcaacagacaagtgttatccaatcacgtctttaaatcaatcactgatccc

SEQ ID NO: 635254 - DNA, 120 bp, Artificial Sequence
  ENSG00000180532_3 (sequence is synthesized)
agcccctataaaagggagcagccttaggaggcacatcagataaacccagtgtggaaagctagtcacacatcagctcagtgttcggcccgggattacccagtcaaccaaggagcttgcagt

SEQ ID NO: 635255 - DNA, 120 bp, Artificial Sequence
  ENSG00000180532_4 (sequence is synthesized)
tttaaagaatccaccaactgttgaaacaaatccctagagacacaaggcaagagactgaatcatcaaagtaaagtctctctgagaattattgctaagaatggctttagatctaagaaccat

SEQ ID NO: 635256 - DNA, 120 bp, Artificial Sequence
  ENSG00000180532_5 (sequence is synthesized)
atttcagtgtgaaccatccgagaataatcttggatcagaaaattcagcgtttcaacaaagccaaggacctgctgttcagagagaagaagggatttctgagttctcaagaatggtgctcaa

SEQ ID NO: 635257 - DNA, 120 bp, Artificial Sequence
  ENSG00000180532_6 (sequence is synthesized)
ttcatttcaagacagcaataattcatatgcaaggcaggaattgcaaagactttataggatctttcactcatggctgcaaccagaaaagcacagcaaggatgaaattatttctctattagt

SEQ ID NO: 635258 - DNA, 120 bp, Artificial Sequence
  ENSG00000180532_7 (sequence is synthesized)
cctggagcagtttatgattggtggccactgcaatgacaaagccagtgtgaaagagaaatggaaatcaagtggcaaaaacttggagagattcatagaagacctgactgatgacagcataaa

SEQ ID NO: 635259 - DNA, 120 bp, Artificial Sequence
  ENSG00000180532_8 (sequence is synthesized)
tcacaaaacaagtgaatgcccaaaccacaagagaagcaaacatggggacaccctcccagacttcccaagatacttccttagaaacaggacaaggatatgaagatgaacaagatggctgga

SEQ ID NO: 635260 - DNA, 120 bp, Artificial Sequence
  ENSG00000180532_9 (sequence is synthesized)
acagttcttcgaaaactactcgagtaaatgaaaatattactaatcaaggcaatcaaatagtttccctaatcatcatccaggaagagaacggtcctaggcctgaagagggaggtgtttctt

SEQ ID NO: 635261 - DNA, 120 bp, Artificial Sequence
  ENSG00000180532_10 (sequence is synthesized)
ctgacaacccatacaactcaaaaagagcagagctagtcactgctagatctcaggaagggtccataaatggaatcactttccaaggtgtccctatggtgatgggagcagggtgtatctctc

SEQ ID NO: 635262 - DNA, 120 bp, Artificial Sequence
  ENSG00000180532_11 (sequence is synthesized)
aaccagagcagtcctcccctgagtctgcccttacccaccagagcaatgagggaaattccacatgtgaggtacatcagaaaggatcccatggagtccaaaaatcatacaaatgtgaagaat

SEQ ID NO: 635263 - DNA, 120 bp, Artificial Sequence
  ENSG00000180532_12 (sequence is synthesized)
gccccaaggtctttaagtatctctgtcacttattagctcaccagagaagacacaggaatgagaggccatttgtttgtcccgagtgtcaaaaaggcttcttccagatatcagacctacggg

SEQ ID NO: 635264 - DNA, 120 bp, Artificial Sequence
  ENSG00000180532_13 (sequence is synthesized)
tgcatcagataattcacacaggaaagaagcctttcacatgcagcatgtgtaaaaagtccttcagccacaaaaccaacctgcggtctcatgagagaatccacacaggagaaaagccttata

SEQ ID NO: 635265 - DNA, 120 bp, Artificial Sequence
  ENSG00000180532_14 (sequence is synthesized)
catgtcccttttgtaagacaagctaccgccagtcatccacataccaccgccatatgaggactcatgagaaaattaccctgccaagtgttccctccacaccagaagcttcctaagctgctg

SEQ ID NO: 635266 - DNA, 120 bp, Artificial Sequence
  ENSG00000180532_15 (sequence is synthesized)
gtctgataatgtgtataaatatgtatgcaagtatgtatattcctatagtatttatctacttaggatataagatataatctcctgattatgctttcaatttattgtcttgcttcattaaaa

SEQ ID NO: 635267 - DNA, 120 bp, Artificial Sequence
  ENSG00000180532_16 (sequence is synthesized)
tgtaaggctaaggagagcatggaatttgtcagttttgttcactaaagtattccaagtggttgggaaagtggaacatttccaagaaccaataaatttctgttgaataaatgaatgaatcca

SEQ ID NO: 635268 - DNA, 120 bp, Artificial Sequence
  ENSG00000180535_0 (sequence is synthesized)
agctccaagggcctcaccttcctgccgccacctcctaggacagccagtccagggccatgaagaccaagaaccggcccccacggcgccgggccccggtgcaggacacagaggccacccccg

SEQ ID NO: 635269 - DNA, 80 bp, Artificial Sequence
  ENSG00000180535_1 (sequence is synthesized)
cacccccggggaggggacgcccgacgggtccctgccgaacccggggccagagccggccaagggtctgcggagccggccgg

SEQ ID NO: 635270 - DNA, 120 bp, Artificial Sequence
  ENSG00000180535_2 (sequence is synthesized)
cctgcgtgaagtcatcccccacgtgcgcgcggacaagaagctctccaagatcgagacgctcacgctggccaagaactacatcaaatcgctgacggccaccatcctgaccatgtccagcag

SEQ ID NO: 635271 - DNA, 120 bp, Artificial Sequence
  ENSG00000180535_3 (sequence is synthesized)
ccgcctcccaggcctggaggggccgggccccaagctctaccagcactaccagcagcagcagcaggtggctgggggtgcgttgggggccacggaggcccagccccagggccacctgcagag

SEQ ID NO: 635272 - DNA, 120 bp, Artificial Sequence
  ENSG00000180535_4 (sequence is synthesized)
gtactccacgcagatccacagcttccgagagggcacctagcgcccagtcctgggtgggggtggcggtggccgcagctgcctggcctgctcctcccagccccagtccctccaagccacgag

SEQ ID NO: 635273 - DNA, 120 bp, Artificial Sequence
  ENSG00000180537_0 (sequence is synthesized)
gggaacctccctcccctcccaggcgccgccgcagccggagcggctcccgggccctgggccgccgccggccaggaagaaatacttgtgttggctgcatttccagggatgctaccagagctc

SEQ ID NO: 635274 - DNA, 120 bp, Artificial Sequence
  ENSG00000180537_1 (sequence is synthesized)
aaggctgtcacctggtcttgcccagaagagccgttcttagaggcaggacttgatgaaggctttcctgctgatggaataggtttgctagagctggccttggaattagaacccttcatgtgg

SEQ ID NO: 635275 - DNA, 120 bp, Artificial Sequence
  ENSG00000180537_2 (sequence is synthesized)
cctttataaatatgcgtttgagacagagttatatgcagaagttgaaaatgcctggaagatttctggtttctttcactacttatcctgcctttttgcatcgctgccagatttggatgatat

SEQ ID NO: 635276 - DNA, 120 bp, Artificial Sequence
  ENSG00000180537_3 (sequence is synthesized)
gatattcagaggggcaccttaatcaaagccattcttcaacaagacccacctggcataagattgcacacataattcaagatggccagtcaacctcctgaagacactgcggagtctcaggcc

SEQ ID NO: 635277 - DNA, 120 bp, Artificial Sequence
  ENSG00000180537_4 (sequence is synthesized)
tctgatgagctggagtgcaaaatctgttacaatcgatacaatctgaaacagaggaaacccaaagtgctggagtgttgtcatagggtttgtgccaaatgcctctacaagatcatagacttt

SEQ ID NO: 635278 - DNA, 120 bp, Artificial Sequence
  ENSG00000180537_5 (sequence is synthesized)
ggggactccccacaaggtgtcattgtctgtcctttctgcaggtttgagacgtgcctgccagatgatgaagttagtagcctgcccgatgacaacaacatccttgtaaacttgacttgtgga

SEQ ID NO: 635279 - DNA, 120 bp, Artificial Sequence
  ENSG00000180537_6 (sequence is synthesized)
ggcaaagggaagaagtgcctgccagagaaccctactgagctgctgctcacccccaagaggctggcctctctggtcagtccttctcacacgtcctccaactgcctggtcataaccatcatg

SEQ ID NO: 635280 - DNA, 120 bp, Artificial Sequence
  ENSG00000180537_7 (sequence is synthesized)
gaggtgcagagagagagctccccgtccctgagctccactcctgtggtagaattttataggcctgcgagtttcgactctgtcaccactgtgtcacacaactggactgtgtggaactgcacg

SEQ ID NO: 635281 - DNA, 120 bp, Artificial Sequence
  ENSG00000180537_8 (sequence is synthesized)
tccctgctgtttcagacatccatccgggtgttagtgtggttgctaggtttgctctacttcagctccttacccttaggaatctacttactggtgtctaagaaagtcacccttggggtcgtc

SEQ ID NO: 635282 - DNA, 120 bp, Artificial Sequence
  ENSG00000180537_9 (sequence is synthesized)
tttgtcagcctggtcccttcgagcctcgttattcttatggtgtatggtttttgccagtgtgtttgtcatgaatttctagactgtatggcacctccttcttaactgatatgcaaaataaga

SEQ ID NO: 635283 - DNA, 120 bp, Artificial Sequence
  ENSG00000180537_10 (sequence is synthesized)
aattggacacacattgccctgtttgagtgtgaagttagataatttataatttattttcttttatgttctttatgattagtatccatgacattaacaaaacccttggccacatgttgactt

SEQ ID NO: 635284 - DNA, 120 bp, Artificial Sequence
  ENSG00000180537_11 (sequence is synthesized)
gattggttttcctgtaggctggaagtaaaaatgttcatttctacttaggggttagcaaaattgtataagctcacacttcatggagcactgacagcagtgagtcttcccagagaaaggaca

SEQ ID NO: 635285 - DNA, 120 bp, Artificial Sequence
  ENSG00000180537_12 (sequence is synthesized)
gggtttctctcagcactgccagacagacggcaggggtgtggtgtgttatactatagggagagcatggatccctcctttcgtattcatggatgttctatgatggcagttggacacaagagg

SEQ ID NO: 635286 - DNA, 120 bp, Artificial Sequence
  ENSG00000180537_13 (sequence is synthesized)
aaagttgctctgagacacaaagtgtgtactcctttcccaccccatacccctggtattggaacaccctagaattgtcttcaggtgttttctctcttaagtcactctctgtggtcggcgatc

SEQ ID NO: 635287 - DNA, 120 bp, Artificial Sequence
  ENSG00000180537_14 (sequence is synthesized)
ccattgagatacttgtttcctctgcccattctcccttgccaagaggaaactcggttccattcccttgggtagtttcaactgaataccagttttgccacattactaaggagaatgaaaagc

SEQ ID NO: 635288 - DNA, 120 bp, Artificial Sequence
  ENSG00000180537_15 (sequence is synthesized)
atggcagaatgtggccatttgtccttgagacacactctttcctccatgtctgttttcctctctcctcagtcttatctgagaagaatggaggagaaggaacttctcatacagcggttatta

SEQ ID NO: 635289 - DNA, 120 bp, Artificial Sequence
  ENSG00000180537_16 (sequence is synthesized)
ttgatgaaaaccttcatttgagtctttccttataacatcttagttttggtttttttaaaccacattgcccaatcagcctcaccccttgtcctgaaaaggttccatttaaattagttgcta

SEQ ID NO: 635290 - DNA, 120 bp, Artificial Sequence
  ENSG00000180537_17 (sequence is synthesized)
taaattcatcaatactttttttccctattatatttttggttctattaggatttacttaactgaatcttataacaattcgaggtgaactgtggcaatgaaaaccagaaacagttaatgaga

SEQ ID NO: 635291 - DNA, 120 bp, Artificial Sequence
  ENSG00000180537_18 (sequence is synthesized)
tgcttcagctcacagtttgaagtgctgagaacctaagtattttgctgtacggtactgagctgtaccaaaatatgatggtttaggtttatgtgcaagactttgtgttgtagtctagacaaa

SEQ ID NO: 635292 - DNA, 120 bp, Artificial Sequence
  ENSG00000180537_19 (sequence is synthesized)
ggggtgggcaagagacatgcaaagctgaagccctgcttgaaaagacccttcaaggaagtaaaatggcaggggcagagtgcagcttaacatgttgctatccctgttgtttttgagttggtt

SEQ ID NO: 635293 - DNA, 120 bp, Artificial Sequence
  ENSG00000180537_20 (sequence is synthesized)
ttggaatggattcaagttcttacacaatttattttgaatacaagcataatctaggtgatttgagttaatgaacttcttttcatgatgtagggaaagttgaatgtatatatttctaagaag

SEQ ID NO: 635294 - DNA, 120 bp, Artificial Sequence
  ENSG00000180537_21 (sequence is synthesized)
aatttgtttagcagattacaagttggcaaaatagactgttcacagaaactaggcaaaaatttaaaaaaacattctagtctctaaaacccattactaatgattaacattaaaatatttgta

SEQ ID NO: 635295 - DNA, 120 bp, Artificial Sequence
  ENSG00000180537_22 (sequence is synthesized)
actcttagaaagggggcattactaagacgactttaacttgttatgaaatctttgttgtgtgatgcaggtacagtgcgcccattccaactggaatagcagtttgattttaattgtaaaact

SEQ ID NO: 635296 - DNA, 120 bp, Artificial Sequence
  ENSG00000180537_23 (sequence is synthesized)
aaacttcgggaatatgtatgcccaaagtaagtaggatgagaatagtatacatgggatatggtccaatgaatttaagccccaagatacagctaaatacatttatgatttcataaaatctag

SEQ ID NO: 635297 - DNA, 120 bp, Artificial Sequence
  ENSG00000180537_24 (sequence is synthesized)
tttagatagcattgtgatgcaatttccagaaatccatttgtgtttagagtaaataccatgtttagaagatgttttgtggtttggatttatatatttgtaaggtttttttaaaaaaatgtt

SEQ ID NO: 635298 - DNA, 120 bp, Artificial Sequence
  ENSG00000180537_25 (sequence is synthesized)
cgttttgtttgaaatgtaacattgagtaaattggtgagttatataatgagatttctagaaagctctggacatgggtacgatgtgttttgcttctctgtataatgtctacagtgataaact

SEQ ID NO: 635299 - DNA, 120 bp, Artificial Sequence
  ENSG00000180537_26 (sequence is synthesized)
tgtgtctccgtgtattgtggcagtctttttttctagttaatttggctttagagagcaatctttgtatgacaccagaaaactcttcatgctattgaatgataaaaagataatgctttaata

SEQ ID NO: 635300 - DNA, 120 bp, Artificial Sequence
  ENSG00000180537_27 (sequence is synthesized)
ttttattcactgtgatactattttgtttgtctattaaattgttattatttccaaatttagaagtttgatttctctgacttatggttaaaattcagttatgactttgcacctctgttagct

SEQ ID NO: 635301 - DNA, 120 bp, Artificial Sequence
  ENSG00000180537_28 (sequence is synthesized)
ttagataacggcaaacatgaacattcagaaacgttggttcagctaatgcctttatcatgcccgtgaagacttcagaactttccaacaaaggggacctaacccatcacacttttaaaaggc

SEQ ID NO: 635302 - DNA, 64 bp, Artificial Sequence
  ENSG00000180537_29 (sequence is synthesized)
tccaacaaaggggacctaacccatcacacttttaaaaggccttcataaaagcaggggagaaaaa

SEQ ID NO: 635303 - DNA, 120 bp, Artificial Sequence
  ENSG00000180537_30 (sequence is synthesized)
gtctccctccgggcaccacgggggccgccgtcctggcaccaacttgaggggctgtgcggcggagggcggctgcggagcgcccgcgcgggctgcacctgctcagggagctgcccctctgtt

SEQ ID NO: 635304 - DNA, 120 bp, Artificial Sequence
  ENSG00000180537_31 (sequence is synthesized)
gtgcatgctgcggcagttgcaacaggagaaccgagtaccagttgctcaacactttatcactttgcattgctctttctcctcccttaagtgaatttccattttgagggtacagctccacag

SEQ ID NO: 635305 - DNA, 120 bp, Artificial Sequence
  ENSG00000180537_32 (sequence is synthesized)
gacgcagggtcggcggctcagcgccgtagagacaaagccgcccgcccgccagcccgctagctcctcgcgcgagctcctcctccacgggaacctccctcccctcccaggcgccgccgcagc

SEQ ID NO: 635306 - DNA, 120 bp, Artificial Sequence
  ENSG00000180537_33 (sequence is synthesized)
cggagcggctcccgggccctgggccgccgccggccagactgcctgcaagggatggtcatactcctggctgcacttccagagtcttgaagaagaaagcagatgtggatacctaaatatagg

SEQ ID NO: 635307 - DNA, 120 bp, Artificial Sequence
  ENSG00000180543_0 (sequence is synthesized)
agagacccgctcggtcccgaccgagagctggcgtcaggagccgcagggtcacagcgtgtctttgaagctgcctccgccgccaccatgagcggccgaagtcggggtcgaaagtcctcccgc

SEQ ID NO: 635308 - DNA, 120 bp, Artificial Sequence
  ENSG00000180543_1 (sequence is synthesized)
gccaaaaaccggggcaaaggccgcgccaaagcccgagtccgccctgctccggacgacgccccgcgcgacccggacccttcacagtaccagagtctcggggaagacacccaggcggcacag

SEQ ID NO: 635309 - DNA, 120 bp, Artificial Sequence
  ENSG00000180543_2 (sequence is synthesized)
aagacacccaggcggcacaggtgcaggctggcgcggggtggggtggcctggaagccgctgcgtccgcgcagctcctccggctcggggaggaggccgcctgccggctccccctggactgtg

SEQ ID NO: 635310 - DNA, 120 bp, Artificial Sequence
  ENSG00000180543_3 (sequence is synthesized)
gctgcgggggaccacgggcaggccgcggccaggcccggcccggggaaggccgcatctctctcggagcgcctggccgcagacactgtcttcgtgggaacagcgggaaccgtgggaaggccg

SEQ ID NO: 635311 - DNA, 120 bp, Artificial Sequence
  ENSG00000180543_4 (sequence is synthesized)
aaaaatgccccccgcgttggaaaccggcgtggccctgccgggaagaaggccccagaaacctgtagcaccgcggggagggggcctcaggtcatagctggtgggaggcagaagaaaggggcg

SEQ ID NO: 635312 - DNA, 120 bp, Artificial Sequence
  ENSG00000180543_5 (sequence is synthesized)
gcaggggagaatacctcggtgtcagctggggaggaaaagaaggaagagagggatgcagggtcggggcccccagcgacggaaggcagcatggatacgctggagaacgtgcagctgaagctg

SEQ ID NO: 635313 - DNA, 120 bp, Artificial Sequence
  ENSG00000180543_6 (sequence is synthesized)
gagaacatgaacgcccaggcggacagggcctaccttcggctctccaggaagtttgggcagttgcgactgcagcacttggagcgcaggaaccacctcatccaaaatatcccgggcttctgg

SEQ ID NO: 635314 - DNA, 120 bp, Artificial Sequence
  ENSG00000180543_7 (sequence is synthesized)
gggcaagcatttcagaaccatccccagctagcatcctttctgaatagccaagagaaagaggtactgagctacttaaacagcttggaagtggaagagctcggccttgccagattgggctac

SEQ ID NO: 635315 - DNA, 120 bp, Artificial Sequence
  ENSG00000180543_8 (sequence is synthesized)
aaaatcaagttctacttcgatcgcaacccgtatttccaaaataaggtgctcatcaaggaatatgggtgtggtccttctggccaggtggtgtctcgttctactccaatccagtggctccca

SEQ ID NO: 635316 - DNA, 120 bp, Artificial Sequence
  ENSG00000180543_9 (sequence is synthesized)
gggcatgatctccagtccctaagccagggaaacccagaaaacaaccgtagtttctttgggtggttttcaaaccacagctccattgagtctgacaagattgtggagataatcaacgaagaa

SEQ ID NO: 635317 - DNA, 120 bp, Artificial Sequence
  ENSG00000180543_10 (sequence is synthesized)
ttgtggcccaatcccttgcagttctaccttttgagtgaaggggctcgtgtagagaaaggaaaggaaaaagaaggcaggcaaggtccaggaaagcagccaatggagactactcagcctggg

SEQ ID NO: 635318 - DNA, 120 bp, Artificial Sequence
  ENSG00000180543_11 (sequence is synthesized)
gtgagccaatccaactgatcctgcacaagtctccctgctacctcctgctgggctgctcctggttgactacatatttggctctctgccttctcttcatgttggcctctgtgtactatagac

SEQ ID NO: 635319 - DNA, 120 bp, Artificial Sequence
  ENSG00000180543_12 (sequence is synthesized)
cctttggactttagttacaagaatatggcatttatgatcatgttcttttgcctcccatagcctcttgcttttctacgttagtgtcacatgttatgtgatcgcacccggactgttcatatg

SEQ ID NO: 635320 - DNA, 120 bp, Artificial Sequence
  ENSG00000180543_13 (sequence is synthesized)
ttaagcacacatactttagatgtgtgctccctgttatctacattgcctggaccttgttcttggctctggcctttcctacttgtctttaacatggacactcatgagtcatcctccaggacg

SEQ ID NO: 635321 - DNA, 120 bp, Artificial Sequence
  ENSG00000180543_14 (sequence is synthesized)
accagtgcatcctcaagctctgctccttcagggccagtgacttgctgggcttcgtgttcatgctggccatgcatgtcatctatgcaagcgtttccattgccactgcagaatgaagccagt

SEQ ID NO: 635322 - DNA, 120 bp, Artificial Sequence
  ENSG00000180543_15 (sequence is synthesized)
gcacatggtattagtcatcagccagaacttcctgttctgtgggtctggggtcaccagctgagatgtcacctgctttatttctggctttggcctgtggtctgtgatacccatcctgcttga

SEQ ID NO: 635323 - DNA, 120 bp, Artificial Sequence
  ENSG00000180543_16 (sequence is synthesized)
tgttctgcagaatggcacttgactgctgggcatgcatgaagttaagggcaagaaacagtatgccatgtgttctgtaccatcatgtgtctcttcttgcttctgggcccttctactggtgaa

SEQ ID NO: 635324 - DNA, 120 bp, Artificial Sequence
  ENSG00000180543_17 (sequence is synthesized)
ctttcatcaagatctgcgccatgccgtgtcactatcaagccattaagttttgtctgggttgctgtcagccccagttggcttcctggtcaacaaggacctcaagaactgcctgtggaccga

SEQ ID NO: 635325 - DNA, 120 bp, Artificial Sequence
  ENSG00000180543_18 (sequence is synthesized)
gccccctaccagtgcatgagacacacacctaccctccccagctttccaggaaccctactggctgccagactgatgggcgggctggtatgtgtggacatgtgttcactgtcattatgctgt

SEQ ID NO: 635326 - DNA, 120 bp, Artificial Sequence
  ENSG00000180543_19 (sequence is synthesized)
ggctccaggtgagggtgaggactgggcctatatagaatccagataccattgtcaacttcccttattcccgtctaagatgtgagcagagtgccatagtaggggttctgggaagaggtattt

SEQ ID NO: 635327 - DNA, 120 bp, Artificial Sequence
  ENSG00000180543_20 (sequence is synthesized)
ctgatttgtgggcctctgcttgcttgacttcaggtcacttatacttcttattttgcttgcctgccttcatccctcatttcctccctctcattcttctttcctccctccctttcctggtag

SEQ ID NO: 635328 - DNA, 120 bp, Artificial Sequence
  ENSG00000180543_21 (sequence is synthesized)
cctcctttcctccccttctgccttccccttccttctttccttattcttttttattttgtttaaatagtaccacagagaaaacaactgaaaaaccacatttttctacatacagctggggag

SEQ ID NO: 635329 - DNA, 120 bp, Artificial Sequence
  ENSG00000180543_22 (sequence is synthesized)
gtagctgagaacttggcactgcgcacacatactaggttgaaagagagttgaggaaaccagaaggccaagtggatctgctggcaaaccctgaacctgtctcctgcgcttgctctacagttc

SEQ ID NO: 635330 - DNA, 120 bp, Artificial Sequence
  ENSG00000180543_23 (sequence is synthesized)
tgaagttgaaaatccttttcatgcctagcatctgcttgagttataaaccccaaggcagccatgtcatagactagtgtttactcttgttttgactttgttttaatgcttcctaagacccaa

SEQ ID NO: 635331 - DNA, 120 bp, Artificial Sequence
  ENSG00000180543_24 (sequence is synthesized)
gtgcctcctgctgtttcctcctttgtggtagcctctggccatctggacctcaatccccagctttcccactttcagcagtcctttgctctctttgcttctacctcaaatagccccaggagt

SEQ ID NO: 635332 - DNA, 120 bp, Artificial Sequence
  ENSG00000180543_25 (sequence is synthesized)
gggctttagtctccaatatggagcatctcaagcttctcctgggggatggggattgggatgggcagaatctgttttggatctccgggttatttccagtgggtgtaaaagcagagctgggcc

SEQ ID NO: 635333 - DNA, 120 bp, Artificial Sequence
  ENSG00000180543_26 (sequence is synthesized)
tttccctctcttatccctgagggtgggtaagaaggactgtatctacacctgttcttccctaccttctcttttgttagggaggcctcattctaagttcctcaagagagtccttggcttaaa

SEQ ID NO: 635334 - DNA, 120 bp, Artificial Sequence
  ENSG00000180543_27 (sequence is synthesized)
gctgtagcaagggtgtgctaggtgggggatttggagcaaaaccgtcgagtaggcatgatactggtatggagtgggcctgcaaaatcagacagaaatggcttgagaagccgcagggggagc

SEQ ID NO: 635335 - DNA, 120 bp, Artificial Sequence
  ENSG00000180543_28 (sequence is synthesized)
atgcctgtctctcagtgatagagtatgggagggacctccctagcttggaaaatgagaattgaaggggttatgaacaaataggatgcctagttgaggatgttcccaaagttttgtccaatc

SEQ ID NO: 635336 - DNA, 120 bp, Artificial Sequence
  ENSG00000180543_29 (sequence is synthesized)
ttatcattagtagattttataagccacagagacaaaccagaaacggaataatgttactttggatgctttatttttttgttctaggtgtggctttgtacatgcagaagaatgctatatgct

SEQ ID NO: 635337 - DNA, 120 bp, Artificial Sequence
  ENSG00000180543_30 (sequence is synthesized)
gcagaagaatgctatatgctgcacattttgcctttaaagtcttacgactttccccattttagtctaatgggaagatacagatgtgcaagtctgcttttttgttttttgttattatttttt

SEQ ID NO: 635338 - DNA, 120 bp, Artificial Sequence
  ENSG00000180543_31 (sequence is synthesized)
gacattttcagacatgcacagaagtggagaggatggtccttggaccccatgtgtccatcacctagctgcatcacttatcagctatggtcaacctggtttcatctgtatctctctcttttc

SEQ ID NO: 635339 - DNA, 120 bp, Artificial Sequence
  ENSG00000180543_32 (sequence is synthesized)
acctgtattgtttattgaaaatccaagacactatgccaatgcaaccgtgactactttgggagattggtagtctcttttgatggtgatagtgatggggtgcactatcataatcacatcagg

SEQ ID NO: 635340 - DNA, 120 bp, Artificial Sequence
  ENSG00000180543_33 (sequence is synthesized)
tctgctttttgcttttaatgttaactaatgaagttccagagatgggccttagaaatgtgttttaagaattaacaaggagtctcaaaaagaaatgagagggatgcttcctttcccttgcat

SEQ ID NO: 635341 - DNA, 120 bp, Artificial Sequence
  ENSG00000180543_34 (sequence is synthesized)
ctacaaaacaagagagagactgttctgttgtaaaactctttcaaaaattctgatatggtaaggtacttgagacccttcaccagaatgtcaatctttttttctgtgtaacatggaaacttg

SEQ ID NO: 635342 - DNA, 120 bp, Artificial Sequence
  ENSG00000180543_35 (sequence is synthesized)
tgtgaccattagcattgttatcagcttgtactggtctcataactctggttttggaagaataatttggaaattgttgctgtgttctgtgaaaataacctccccaaaataattagtaactgg

SEQ ID NO: 635343 - DNA, 120 bp, Artificial Sequence
  ENSG00000180543_36 (sequence is synthesized)
ttgttctacttggtaatttgacaccctgttaataacgcaattatttctgtgttcttaaacagtataaatagttgtaagtttgcatgcatgatggaaaaataaaaacctgtatctctgtta

SEQ ID NO: 635344 - DNA, 120 bp, Artificial Sequence
  ENSG00000180549_0 (sequence is synthesized)
ccaggctccaggccctggcttagagggagcggggagtctggacttcaggctggatcccttcctcttcctggagcgggtgctggcccccaacccgcttgcgtcagggacaaaaggactcct

SEQ ID NO: 635345 - DNA, 120 bp, Artificial Sequence
  ENSG00000180549_1 (sequence is synthesized)
tccctttccagcctggaaagcccctctgctgcaggctggaggaagggaccctgggcccagcctatagtcagcggtgtctatgggcatggatctggacggggaaaaggacaaagcagcctc

SEQ ID NO: 635346 - DNA, 120 bp, Artificial Sequence
  ENSG00000180549_2 (sequence is synthesized)
catccacagttcattccgggaccaggcccttgcaggcacgcgctgggctcctgtgggaagacactaagggccccaggacagacctcctctccgggcatctgggttcctagatggcagagg

SEQ ID NO: 635347 - DNA, 120 bp, Artificial Sequence
  ENSG00000180549_3 (sequence is synthesized)
tggcagagtggggtgggatggcccaattgggagctttagcttccggcaaagagctgagcacagtacatcttcaatgtgtaagattctcctgggagaccagggcccagctggtggtgagct

SEQ ID NO: 635348 - DNA, 120 bp, Artificial Sequence
  ENSG00000180549_4 (sequence is synthesized)
gggggaagtgggtgatactgccgtgggaggagccacctggccctctggggaagtgcactcgctgtctgcagcgcccaggcctgggtagctgggtgggggctggggggccatctgtgctca

SEQ ID NO: 635349 - DNA, 120 bp, Artificial Sequence
  ENSG00000180549_5 (sequence is synthesized)
gggtgcctgcacctgggccttctctgccctgggccaagcctgcccgagcctctctgtcctctgcctgcccagctggacatctctgggcctctctggagaccagtggggtgggctgtgggg

SEQ ID NO: 635350 - DNA, 120 bp, Artificial Sequence
  ENSG00000180549_6 (sequence is synthesized)
gcgtcatattgccctggcttggcatccctcttgtggctgtacccctcccagcagccccaggactagcaagtccccgagatgggggtggggacagtggttgatgccaaaggttgtgggggc

SEQ ID NO: 635351 - DNA, 120 bp, Artificial Sequence
  ENSG00000180549_7 (sequence is synthesized)
aggggcggggcaggagcaggaaggtcccctgagttccctcaccttgggcagagataaaaggagcacagttccaggcggggctgagctagggcgtagctgtgatttcaggggcacctctgg

SEQ ID NO: 635352 - DNA, 120 bp, Artificial Sequence
  ENSG00000180549_8 (sequence is synthesized)
cggctgccgtgatttgagaatctcgggtctcttggctgactgatcctgggagactgtggatgaataatgctgggcacggccccacccggaggctgcgaggcttgggggtcctggccgggg

SEQ ID NO: 635353 - DNA, 120 bp, Artificial Sequence
  ENSG00000180549_9 (sequence is synthesized)
tggctctgctcgctgccctctggctcctgtggctgctggggtcagcccctcggggtaccccggcaccccagcccacgatcaccatccttgtctggcactggcccttcactgaccagcccc

SEQ ID NO: 635354 - DNA, 120 bp, Artificial Sequence
  ENSG00000180549_10 (sequence is synthesized)
aagcctgctggccagcgccgacgccgtggtcttccaccaccgcgagctgcagacccggcggtcccacctgcccctggcccagcggccgcgagggcagccctgggtgtgggcctccatgga

SEQ ID NO: 635355 - DNA, 120 bp, Artificial Sequence
  ENSG00000180549_11 (sequence is synthesized)
gtctcctagccacacccacggcctcagccacctccgaggcatcttcaactgggtgctgagctaccggcgcgactcggacatctttgtgccctatggccgcctggagccccactgggggcc

SEQ ID NO: 635356 - DNA, 120 bp, Artificial Sequence
  ENSG00000180549_12 (sequence is synthesized)
ctcgccaccgctgccagccaagagcagggtggccgcctgggtggtcagcaacttccaggagcggcagctgcgtgccaggctgtaccggcagctggcgcctcatctgcgggtggatgtctt

SEQ ID NO: 635357 - DNA, 120 bp, Artificial Sequence
  ENSG00000180549_13 (sequence is synthesized)
tggccgtgccaatggacggccactgtgcgccagctgcctggtgcccaccgtggcccagtaccgcttctacctgtcctttgagaactctcagcaccgcgactacattacggagaaattctg

SEQ ID NO: 635358 - DNA, 120 bp, Artificial Sequence
  ENSG00000180549_14 (sequence is synthesized)
gcgcaacgcactggtggctggcactgtgccagtggtgctggggcccccacgggccacctatgaggccttcgtgccggctgacgccttcgtgcatgtggatgactttggctcagcccgaga

SEQ ID NO: 635359 - DNA, 120 bp, Artificial Sequence
  ENSG00000180549_15 (sequence is synthesized)
gctggcggctttcctcactggcatgaatgagagccgataccaacgcttctttgcctggcgtgacaggctccgcgtgcgactgttcaccgactggcgggaacgtttctgtgccatctgtga

SEQ ID NO: 635360 - DNA, 120 bp, Artificial Sequence
  ENSG00000180549_16 (sequence is synthesized)
ccgctacccacacctaccccgcagccaagtctatgaggaccttgagggttggtttcaggcctgagatccgctggccgggggaggtgggtgtgggtggaagggctgggtgtcgaaatcaaa

SEQ ID NO: 635361 - DNA, 120 bp, Artificial Sequence
  ENSG00000180549_17 (sequence is synthesized)
ccaccaggcatccggcccttaccggcaagcagcgggctaacgggaggctgggcacagaggtcaggaagcaggggtggggggtgcaggtgggcactggagcatgcagaggaggtgagagtg

SEQ ID NO: 635362 - DNA, 120 bp, Artificial Sequence
  ENSG00000180549_18 (sequence is synthesized)
ggagggaggtaacgggtgcctgctgcggcagacgggaggggaaaggctgccgaggaccctccccaccctgaacaaatcttgggtgggtgaaggcctggctggaagagggtgaaaggcagg

SEQ ID NO: 635363 - DNA, 120 bp, Artificial Sequence
  ENSG00000180549_19 (sequence is synthesized)
gcccttggggctggggggcaccccagcctgaagtttgtgggggccaaacctgggaccccgagcttcctcggtagcagaggccctgtggtccccgagacacaggcacgggtccctgccacg

SEQ ID NO: 635364 - DNA, 120 bp, Artificial Sequence
  ENSG00000180549_20 (sequence is synthesized)
tccatagttctgaggtccctgtgtgtaggctggggcggggcccaggagaccacggggagcaaaccagcttgttctgggctcagggagggagggcggtggacaataaacatctgagcagtg

SEQ ID NO: 635365 - DNA, 120 bp, Artificial Sequence
  ENSG00000180573_0 (sequence is synthesized)
aaagcggccatgttttacatatttcttgattttgtttgttttctcgtgagcttaggccgctggttttggtgatttttgtctgattgcaatgtctggacgtggtaagcaaggaggcaaagc

SEQ ID NO: 635366 - DNA, 120 bp, Artificial Sequence
  ENSG00000180573_1 (sequence is synthesized)
tcgcgccaaagcgaaatcccgctcttctcgcgctggtctccagttcccggtgggccgagtgcaccgcctgctccgtaaaggcaactacgcagagcgggttggggcaggcgcgccggtgta

SEQ ID NO: 635367 - DNA, 120 bp, Artificial Sequence
  ENSG00000180573_2 (sequence is synthesized)
cctggcggcggtgttagagtacctgaccgccgagatcctggagctggccggcaacgcggctcgcgacaacaagaagactcgcatcatcccgcgccacttgcagctggccatccgcaacga

SEQ ID NO: 635368 - DNA, 120 bp, Artificial Sequence
  ENSG00000180573_3 (sequence is synthesized)
cgaggagctcaacaaactgctaggccgggtgaccattgctcagggcggcgtccttcctaacatccaggccgtgcttctgcctaagaagaccgagagtcaccacaaggccaagggcaagtg

SEQ ID NO: 635369 - DNA, 120 bp, Artificial Sequence
  ENSG00000180573_4 (sequence is synthesized)
atttgacaggtatctgagctcccggaaacgctatcaaacccaaaggctcttttcagagcccccctaccgtttcaaaggaagagctaacctcactgcttgtaggtagaaggaaaaaaggca

SEQ ID NO: 635370 - DNA, 120 bp, Artificial Sequence
  ENSG00000180573_5 (sequence is synthesized)
ctaaggttgcaaaagcttctcatttcagagagatgccaggatcctaagtgcctgccaaacttaccaattctaaggaataagtggatggatggcattactgattcctacattactgattga

SEQ ID NO: 635371 - DNA, 120 bp, Artificial Sequence
  ENSG00000180573_6 (sequence is synthesized)
aagttcttctgaatacaaaatgtgtttaattttttaaataagtattacattcacagggttcaaactatttgaagtaaagagattatatataaagaatccatccctcaacttacccaggtg

SEQ ID NO: 635372 - DNA, 120 bp, Artificial Sequence
  ENSG00000180573_7 (sequence is synthesized)
gtcacttttctttttcttgtgtatctgcccagtattcattcctgctgatatcagtcaataatgaatgatacgtgttttcttcacttttttcattcttgtcaggtagcagactgtgtagac

SEQ ID NO: 635373 - DNA, 120 bp, Artificial Sequence
  ENSG00000180573_8 (sequence is synthesized)
ttttctgcacttgcccttttcataacaatctatcttggagaactttccctatgagaacatacagagcttcctgtacacagttgcatgtactgcattatgcaaatgcattatattttatgt

SEQ ID NO: 635374 - DNA, 120 bp, Artificial Sequence
  ENSG00000180573_9 (sequence is synthesized)
aacctgtccactgttggtaggcacttgagttgttttagtcttttgctatcaaacagttctgggatgattaaccctgatttactgcaaaattgaaattgctctgctattctgctggaatgg

SEQ ID NO: 635375 - DNA, 120 bp, Artificial Sequence
  ENSG00000180573_10 (sequence is synthesized)
tggtaagtgaactgaaaattccagtcactcttgggctagactcaacgttcttaaaaactatgtggccatcaccaaattagttattttgaaccttaatttcttcacctctaaaatggaggt

SEQ ID NO: 635376 - DNA, 120 bp, Artificial Sequence
  ENSG00000180573_11 (sequence is synthesized)
aatacttaccttaagtggctatgagaatgaagatcatgtgtatgaattgttggtgctctaaagaacagcacaaataaaattattttcaaatttaattttaattgaactatgtgtaatttc

SEQ ID NO: 635377 - DNA, 120 bp, Artificial Sequence
  ENSG00000180573_12 (sequence is synthesized)
ttaattttgaaataattttatttgtaatgtgcataatcttatttaatgtataatgtatacattgtaatagaaacagatttcccaaattccagcctggcatgaggtaataaaaggtaatgc

SEQ ID NO: 635378 - DNA, 120 bp, Artificial Sequence
  ENSG00000180574_0 (sequence is synthesized)
ctcttttggcaacatggcgggcggagaagctggggtgactctggggcagccgcacctttcgcgtcaggatctcaccaccttggatgttaccaagttgacgccactttcacacgaagttat

SEQ ID NO: 635379 - DNA, 120 bp, Artificial Sequence
  ENSG00000180574_1 (sequence is synthesized)
cagcagacaagccacaattaatataggtacaattggtcatgtagctcatgggaaatccacagtcgtcaaagctatttctggagttcacaccgtcaggttcaaaaatgaactagaaagaaa

SEQ ID NO: 635380 - DNA, 120 bp, Artificial Sequence
  ENSG00000180574_2 (sequence is synthesized)
tattacaatcaagcttggatatgctaatgctaagatttatcaacttgatgacccaagttgccctcggccagaatgttatcgatcttgtgggagcagtatgcctgatgagtttcctacaga

SEQ ID NO: 635381 - DNA, 120 bp, Artificial Sequence
  ENSG00000180574_3 (sequence is synthesized)
cattccaggaaccaaagggaacttcagattagtcagacatgtttcctttgttgactgtcctggccacgatattttgatggctactatgctgaacggtgcagcagtgatggatgcagctct

SEQ ID NO: 635382 - DNA, 120 bp, Artificial Sequence
  ENSG00000180574_4 (sequence is synthesized)
tctgttgatagctggtaatgaatcttgccctcagcctcagacatctgaacacctggctgctatagagatcatgaaactgaagcatattttgattctacaaaataaaattgatttggtaaa

SEQ ID NO: 635383 - DNA, 120 bp, Artificial Sequence
  ENSG00000180574_5 (sequence is synthesized)
agaaaggcaggctaaagaacaatacgagcagatccttgcgtttgtccaaggtacagtagcagagggagctcccattattccaatttcggctcagctgaaatacaatattgaagttgtttg

SEQ ID NO: 635384 - DNA, 120 bp, Artificial Sequence
  ENSG00000180574_6 (sequence is synthesized)
tacttcagagccccggcttattgttattagatcttttgatgtcaacaaacctggctgtgaagttgatgaccttaagggaggtgtagctggtggtagtatcctaaaaggagtattaaaggt

SEQ ID NO: 635385 - DNA, 120 bp, Artificial Sequence
  ENSG00000180574_7 (sequence is synthesized)
gggccaggagacagaagtaagacctggtattgtttccaaagatagtgaaggaaaactcatgtgtaaatcaatcttttccaaaattgtttcactttttgcggagcataatgatctgcaata

SEQ ID NO: 635386 - DNA, 120 bp, Artificial Sequence
  ENSG00000180574_8 (sequence is synthesized)
tgctgctccaggcggtcttattggagttggaacaaaaattgaccccactttgtgccgggctgacagaatggtggggcaaatacttggtgcagtcggagctttacctgagatattcacaga

SEQ ID NO: 635387 - DNA, 120 bp, Artificial Sequence
  ENSG00000180574_9 (sequence is synthesized)
attggaaatttcctatttcctgcttagacggcttctaggtgtacgcactgaaggagacaagaaagcagcaaaggttcaaaagctgtctaagaatgaagtgctcatggtgaacataggatc

SEQ ID NO: 635388 - DNA, 120 bp, Artificial Sequence
  ENSG00000180574_10 (sequence is synthesized)
cctgtcgacaggagggagagttagtgctgtcaaggccgatttgggcaaaattgttttgaccaatccagtgtgcacagaggtaggagaaaaaattgcccttagccgaagagttgaaaaaca

SEQ ID NO: 635389 - DNA, 120 bp, Artificial Sequence
  ENSG00000180574_11 (sequence is synthesized)
ctggcgtttaattggttggggtcagataagaagaggagtgacaatcaagccaacagtagatgatgactgaagaataccggttaaataatacattcggatggagctggaagttgcaatttc

SEQ ID NO: 635390 - DNA, 120 bp, Artificial Sequence
  ENSG00000180574_12 (sequence is synthesized)
tctttaacaaccaaggggtttattttcaaagcgatattggggaattgatttcacagtttgttaccttagtaggtaacggtaaggttattctctctttttttttttggttatgaaaactta

SEQ ID NO: 635391 - DNA, 120 bp, Artificial Sequence
  ENSG00000180574_13 (sequence is synthesized)
acccgcctcgcatgggcccagggggcgggggtttgggtggctgccctcagtattgcctgcacaaatatctaccaagtctgcgacgaatagctccagcaactttgcaccgtgttttccagt

SEQ ID NO: 635392 - DNA, 120 bp, Artificial Sequence
  ENSG00000180574_14 (sequence is synthesized)
aagcctaccgacaggcactgtgcagattcaagcagagagaagtccaagcactgaggccgctgctgcaccggccatcctgagaccctagtcgaccttccggcctccgcatccccgccccgc

SEQ ID NO: 635393 - DNA, 120 bp, Artificial Sequence
  ENSG00000180574_15 (sequence is synthesized)
taccaatgagacacagaggaagtctgcagcaaacttctaggaaatcatttctttctttaaagaaaaaagacaaaagaaaacatgatcccctttctgctctggagattctttgcaggctgt

SEQ ID NO: 635394 - DNA, 120 bp, Artificial Sequence
  ENSG00000180574_16 (sequence is synthesized)
gatgcccggaattgtgacaaccatatcacaattatgggaagaacttaggttcctgaaaatcttattgcaacatgtttacagccagccctacacctggacttcatgtttattatttatatc

SEQ ID NO: 635395 - DNA, 120 bp, Artificial Sequence
  ENSG00000180574_17 (sequence is synthesized)
agtccaagttcttgaaatgatgctgctttcatctgaaatacacaaacaaataaaattatatttatatacacataaacatgtatatacatacatgtatatatttttatagagtattagaat

SEQ ID NO: 635396 - DNA, 120 bp, Artificial Sequence
  ENSG00000180592_0 (sequence is synthesized)
tttgctttaacaacaagtgggggtggttgaatttactcctccctctcctctctcctccccttcctcttgctgcggttcttgacactactacaaaccaggactataaacataaacatgtgt

SEQ ID NO: 635397 - DNA, 120 bp, Artificial Sequence
  ENSG00000180592_1 (sequence is synthesized)
cactgtaacagggcaggttcccagtagctgcagcagtgaaagacagtgattggctccagtgctcccagaaggatttgggctgaagccaggggaacagaaccagaagaggattccctttcc

SEQ ID NO: 635398 - DNA, 120 bp, Artificial Sequence
  ENSG00000180592_2 (sequence is synthesized)
agagaccatcaggctcctcatgtcttgtctctcctctctcccctcgtggtggctcaggatttcagtatggctgagcagcccatagagtcagctgacatggtcaacaaatttatcaaagaa

SEQ ID NO: 635399 - DNA, 120 bp, Artificial Sequence
  ENSG00000180592_3 (sequence is synthesized)
accccctggcttttgaagaatagtactttatacatctggatctgcacatcaggcaaagctcagaaatatccgtttattcttttaatcacgcggatgtgtctatttttggaggaacaagga

SEQ ID NO: 635400 - DNA, 120 bp, Artificial Sequence
  ENSG00000180592_4 (sequence is synthesized)
aacacataaatgcctgggttgcatttatgttgtagttgcaaacactgaacagttaagaagattttgccgaattttgcaaagcagccaaggagccgccttgggatcgtggtaatgcgactg

SEQ ID NO: 635401 - DNA, 120 bp, Artificial Sequence
  ENSG00000180592_5 (sequence is synthesized)
ggaggacccttgctctcatttggcaatattttggatatccttgaaaacgacaccaaaatttgccttaatttgactaagaagaggttaaaccacattgattttcatccaaagtgattttgt

SEQ ID NO: 635402 - DNA, 120 bp, Artificial Sequence
  ENSG00000180592_6 (sequence is synthesized)
taaagcagatgcttgactttgatggaaaaactgggagttgtggaagatttacctaaactaccaaccaaaagcatcacaaaccactgaaacagtctgcatcgtacatcagcactttctttt

SEQ ID NO: 635403 - DNA, 120 bp, Artificial Sequence
  ENSG00000180592_7 (sequence is synthesized)
cattgttattacgtaaaacctctggaagcaccttgggcgtttgacagtttcttttctttgctgcagaaggaagcaatctgctccctggaattctgacctgtggtgaacaggaccctggca

SEQ ID NO: 635404 - DNA, 120 bp, Artificial Sequence
  ENSG00000180592_8 (sequence is synthesized)
aaggctttgctggggactcttggacgatcccgcctccaatccagtacggttaattgtggaaaagtgtacacatttctggcttatctatgctttgttatgggtctgacgtgaaactacctc

SEQ ID NO: 635405 - DNA, 120 bp, Artificial Sequence
  ENSG00000180592_9 (sequence is synthesized)
ctccccaccccaccccccagcagagaaccgaaatccagttgaattgttacagtgtttcggagctggagccttgaactgcttccttggtcaaataactttgtttctggttgtaaaaaggca

SEQ ID NO: 635406 - DNA, 120 bp, Artificial Sequence
  ENSG00000180592_10 (sequence is synthesized)
tttcaggaaaaaaaaaaaaaaaaaaggaaaatcgagagaaattccaaacgtaagtccgcactggggtggttcacggggcgggtttaactttggagctcccagccggtctccttccccact

SEQ ID NO: 635407 - DNA, 120 bp, Artificial Sequence
  ENSG00000180592_11 (sequence is synthesized)
cctgtaagggaaataccaggctattctgcacattttcccttaagctccattttccaaaaggaaaagggggtggggtatctctctttcggcttgataatgttttttaaatgcttttctttg

SEQ ID NO: 635408 - DNA, 120 bp, Artificial Sequence
  ENSG00000180592_12 (sequence is synthesized)
aaatgataatagctgtatcggtaaaatgcaaataaacgaaaaaaataggcagtatttctttaaaggcgaatatacggtgcggtttttttttttttctcccttaagcgtacacacactgct

SEQ ID NO: 635409 - DNA, 120 bp, Artificial Sequence
  ENSG00000180592_13 (sequence is synthesized)
tctgatgaagtctgtgagtcaggctgtttctgagctccgatagtttaatggaaagatttatataccgactgtattatttactttgggaggggaggtggcagtataagggtatgctaatta

SEQ ID NO: 635410 - DNA, 120 bp, Artificial Sequence
  ENSG00000180592_14 (sequence is synthesized)
gtgggagattttggggggaaggggtggaatatcaatttttattgcatcacctgtcaggagtgtccaatcagcgctggctttaggggaattaattgatgaaggtgtctccggacgagctca

SEQ ID NO: 635411 - DNA, 120 bp, Artificial Sequence
  ENSG00000180592_15 (sequence is synthesized)
cttcactctgtcattttatttgtagctaaagcagcggcgggaatagcagctgcatttcttttctctttctcccttcacattccattatcatagtgctccaatggagaaggaaggaataga

SEQ ID NO: 635412 - DNA, 120 bp, Artificial Sequence
  ENSG00000180592_16 (sequence is synthesized)
ggggcccaggtactgatctgcatcggggactcagaccaacacactggcagatcagaaaccggatggttttttccctcttttttaaaaaaacgaaaacaacaacaacaaaaaagcaagaat

SEQ ID NO: 635413 - DNA, 120 bp, Artificial Sequence
  ENSG00000180592_17 (sequence is synthesized)
caagtcagtgtaatttcatggggtttccccccccccaataatttcgcctagagtttggcacttccttcgccgggaataacagtctttgttattttattagcaggatgccttgagacacac

SEQ ID NO: 635414 - DNA, 120 bp, Artificial Sequence
  ENSG00000180592_18 (sequence is synthesized)
gcagcatctggctgaggattaacatacatacatgtgtatgtatgcgtcacgtatatatttactgcaaatggtggggatcatttagtgcccgagatgggagacctgaagtcaggttttgaa

SEQ ID NO: 635415 - DNA, 120 bp, Artificial Sequence
  ENSG00000180592_19 (sequence is synthesized)
gaggtggatggcgtgaggctcggctacctcatcattaaagggaagcaaatgtttgccctctcccaagtcttcacagatctgctgaaaaacatcccgaggacgaccgtgcacaagcgcatg

SEQ ID NO: 635416 - DNA, 120 bp, Artificial Sequence
  ENSG00000180592_20 (sequence is synthesized)
gatcatctgaaagtgaagaagcaccactgcgatctggaggagttgcggaaactcaaggcaattaacagcatcgccttccacgccgccaaatgcacgctcatctcccgggaagacgtggaa

SEQ ID NO: 635417 - DNA, 120 bp, Artificial Sequence
  ENSG00000180592_21 (sequence is synthesized)
gcgctctacacctcctgcaaaaccgagcgcgtcctcaagaccaagcgcaggcgggtcggccgggccctggccacaaaggcgccgccgccagagcgcgccgctgccgccagcccccgcccg

SEQ ID NO: 635418 - DNA, 120 bp, Artificial Sequence
  ENSG00000180592_22 (sequence is synthesized)
ggattttggaaggacaagcaccaactttggcggggcctgagcggagccgcgcggcccctgccaatcagcgcgcagtcccagcgcccgggcgccgccgccgcgcgccccgccgcccatcta

SEQ ID NO: 635419 - DNA, 120 bp, Artificial Sequence
  ENSG00000180592_23 (sequence is synthesized)
cctcagatttttagcaaataccccggctcgcactacccggagatcgtgcgctcgccgtgcaaaccccctctaaactatgaaactgccccgctccagggaaactacgtcgccttcccctcg

SEQ ID NO: 635420 - DNA, 120 bp, Artificial Sequence
  ENSG00000180592_24 (sequence is synthesized)
actacgtcgccttcccctcggaccctgcttattttcggagcctgctgtgcagcaaacacccggcagccgccgccgccgccgccgccgccgctgctgccgccgccgccgccgccgccgccg

SEQ ID NO: 635421 - DNA, 120 bp, Artificial Sequence
  ENSG00000180592_25 (sequence is synthesized)
ctattaccaggtatcggcggccgggccccagcccaaggcagcggcgggcgccggaggcccggggagcctgagctaccgctgcaagcgcaagcgcggcggcgccaaggactgcctgctcgc

SEQ ID NO: 635422 - DNA, 120 bp, Artificial Sequence
  ENSG00000180592_26 (sequence is synthesized)
cggcgcctgctgctgttgcccaggtcctacaaagccaaggcggcggcggcggcggcggcggcggcagcggcggcggcggccgccgcgggggccacttgcctggagaggtttcatctggtc

SEQ ID NO: 635423 - DNA, 120 bp, Artificial Sequence
  ENSG00000180592_27 (sequence is synthesized)
ccatcaccaccaccaccaccaccaccgggcccagccgccgcagcagagtcaccacccccctcaccaccaccggccgcagccccatctgggcagctttcccgagagctgcagcagcgactc

SEQ ID NO: 635424 - DNA, 120 bp, Artificial Sequence
  ENSG00000180592_28 (sequence is synthesized)
cccatctgggcagctttcccgagagctgcagcagcgactccgagtccagctcctactcggaccacgcggccaacgactcggattttggctccagtttgtccagctccagcaattctgtgt

SEQ ID NO: 635425 - DNA, 120 bp, Artificial Sequence
  ENSG00000180592_29 (sequence is synthesized)
ggaggaggaggaggaagaggaggaggaggggggcagcggggcctcggattccagtgaagtcagctcggaggaggaggactcgtccaccgagtcggactccagctccggctccagccaagt

SEQ ID NO: 635426 - DNA, 120 bp, Artificial Sequence
  ENSG00000180592_30 (sequence is synthesized)
cggactccagctccggctccagccaagtgtcagtgcagagcatccgattcaggcgcaccagcttctgcaagcctcccagcgtgcaggcgcaggccaacttcttgtaccatctggcctccg

SEQ ID NO: 635427 - DNA, 120 bp, Artificial Sequence
  ENSG00000180592_31 (sequence is synthesized)
ccgccgctgcaaccaaacccgctgctttcgaggatgccggcagacttcccgacctcaagagtagtgtcaaagcggagtcgccggcggagtggaatctgcagagctgggcccccaaagcat

SEQ ID NO: 635428 - DNA, 120 bp, Artificial Sequence
  ENSG00000180592_32 (sequence is synthesized)
ctccggtgtactgcccggccagcctggggagttgtttcgctgagataaggaacgatagggtatctgagattacattcccacactctgaaatttccaatgctgtaaagagaactgacctga

SEQ ID NO: 635429 - DNA, 120 bp, Artificial Sequence
  ENSG00000180592_33 (sequence is synthesized)
caattaactgcctggcagagggggcctcttcacctagcccaaagacaaacaatgcatttccacaacaaagaatactccgagaggctaggaaatgcctacaaacaactcctactacacact

SEQ ID NO: 635430 - DNA, 120 bp, Artificial Sequence
  ENSG00000180592_34 (sequence is synthesized)
gtgcagataacaacacaatagctgctaggttcttaaataatgattcttcaggagcagaagcaaattcagaaaaatattccaaaatccttcattgtcctgaatttgctacggatttgccct

SEQ ID NO: 635431 - DNA, 120 bp, Artificial Sequence
  ENSG00000180592_35 (sequence is synthesized)
cttcgcagactgatcctgaagtgaacgctgcaggagcagcagcaactaaagccgagaatccctgcactgacacaggcgacaagacattgccatttctgcacaatattaaaatcaaagtag

SEQ ID NO: 635432 - DNA, 120 bp, Artificial Sequence
  ENSG00000180592_36 (sequence is synthesized)
aagacagtagtgctaatgaagaatatgaacctcacctttttacaaataagctaaagtgcgagtgcaatgatacaaagggtgagttttacagtgtgactgagagtaaagaggaggacgcct

SEQ ID NO: 635433 - DNA, 120 bp, Artificial Sequence
  ENSG00000180592_37 (sequence is synthesized)
tgttaaccacagccaaggaaggttttgcatgccctgaaaaagaaactccttccttaaatccactggctcaaagtcagggcctttcatgcactttaggttctccaaaacctgaggatgggg

SEQ ID NO: 635434 - DNA, 120 bp, Artificial Sequence
  ENSG00000180592_38 (sequence is synthesized)
aatataaatttggtgccagggtgagaaaaaattaccggacactagtactgggaaagcgacctgtccttcagacacctccagtcaaaccaaatttgaaatcagctagaagccctcgtccta

SEQ ID NO: 635435 - DNA, 120 bp, Artificial Sequence
  ENSG00000180592_39 (sequence is synthesized)
caggtaaaactgagacaaatgaaggaacactggatgattttacagttataaacagacgcaaaaaggtagccagcaatgtagcatcagcagtgaaaaggccatttcatttcatggcaaatt

SEQ ID NO: 635436 - DNA, 120 bp, Artificial Sequence
  ENSG00000180592_40 (sequence is synthesized)
ttccttgtccaccatcactcattattgggagagatggggatttgtggccggcgtattccttaaacaccactaaggattctcaaactcctcacaaggcccatcctatatggaaatggcagc

SEQ ID NO: 635437 - DNA, 120 bp, Artificial Sequence
  ENSG00000180592_41 (sequence is synthesized)
tgggcggttctgcaatacctcttccacctagtcacaaattcaggaaatttaattcataaaaatgttttggaagatattttcttgaaccatattaccttccttttgttgtaaactgcacag

SEQ ID NO: 635438 - DNA, 120 bp, Artificial Sequence
  ENSG00000180592_42 (sequence is synthesized)
gatggtttgtacaagtccattaatgtgttacaccccctttggagtcctggtttatcgcattttgaagacagaaatcggattactttttttccgttgcgggtttttttttttttttctgga

SEQ ID NO: 635439 - DNA, 120 bp, Artificial Sequence
  ENSG00000180592_43 (sequence is synthesized)
gtagggtgggggcggggtgggagaagggttggtttacattccacagactacttcaggctaaagactcaagtaaaactcagttattacggtagagctggaacactttactgtttcgatgct

SEQ ID NO: 635440 - DNA, 120 bp, Artificial Sequence
  ENSG00000180592_44 (sequence is synthesized)
aataatgcacccggtacctcaattcaactgctacaaataaatgtcaaaaggttgaataataaatattacaatgagccattaagtttatgcactagatttcagagctgaaagtgtaactgt

SEQ ID NO: 635441 - DNA, 120 bp, Artificial Sequence
  ENSG00000180592_45 (sequence is synthesized)
taattcagtgaaagtttgttaggttacatggttacacagtgaggtgaggtgaggtagcaagaagtttctgtgagcccaaaatgttattttctggagctcttgtttgtggggtatcttttt

SEQ ID NO: 635442 - DNA, 120 bp, Artificial Sequence
  ENSG00000180592_46 (sequence is synthesized)
cttttgactccccttattccctctccaagagtagttgcacttaactttttttttttttttttagtggaaagattggggtgtgagtcctgattaaatgctagtaaaagctgcctcatacat

SEQ ID NO: 635443 - DNA, 120 bp, Artificial Sequence
  ENSG00000180592_47 (sequence is synthesized)
actgagtaaaataaatacggaattgtattttttttgtaaagggtgtgattttacttttaaagccactcctttgcaacaggaaaagtctgttttgtgttctcacccaaaggttttaaataa

SEQ ID NO: 635444 - DNA, 120 bp, Artificial Sequence
  ENSG00000180592_48 (sequence is synthesized)
ttctcacccaaaggttttaaataaggtgactcttactattgtcctgcttatcttgtggtctgaacatgactcttcaaactcccaaaacaattgaaatatttctttttttttttttttttt

SEQ ID NO: 635445 - DNA, 120 bp, Artificial Sequence
  ENSG00000180592_49 (sequence is synthesized)
gtgtgatccaccatgcccgggctgaaatatttctcgtaatagcagaatatttcatggccgaactcttgatagtgacaaatcagtaaatacaaccaagaaaaagaaaatgaggggtcagag

SEQ ID NO: 635446 - DNA, 120 bp, Artificial Sequence
  ENSG00000180592_50 (sequence is synthesized)
ttgcaataccccaaatgaaaaataacagttttttcagggctttttggtaccagaactcaggcacttggattttatgaccttatactttttctgcatctctctaaaacttgtgttttcaga

SEQ ID NO: 635447 - DNA, 120 bp, Artificial Sequence
  ENSG00000180592_51 (sequence is synthesized)
ccatcctgtgtatagagcaggagagtttctactgcaagtgacaatcagaggtgactatctatatttgcacttaaaatcaaagtagttcaacatgcaaatgctagggtctagccctgggta

SEQ ID NO: 635448 - DNA, 120 bp, Artificial Sequence
  ENSG00000180592_52 (sequence is synthesized)
agggccatgctggtgtactgtgttgtgatgatggaagcagtaaatcaaaattatggaaatttgcactgttgaaaagcatgctttagctttattttcaattaaaaacactgtttaaaattc

SEQ ID NO: 635449 - DNA, 120 bp, Artificial Sequence
  ENSG00000180596_0 (sequence is synthesized)
tttaagatgcctgagccagccaagtctgctcccgccccgaagaagggctccaagaaggcagtgaccaaagcgcagaagaaagatggcaagaagcgcaagcgcagccgcaaggagagttac

SEQ ID NO: 635450 - DNA, 120 bp, Artificial Sequence
  ENSG00000180596_1 (sequence is synthesized)
tctgtgtacgtgtacaaggtgctgaaacaggtccatcccgacactggcatctcttccaaggccatgggcatcatgaattctttcgttaacgacatatttgagcgcatcgcgggcgaggct

SEQ ID NO: 635451 - DNA, 120 bp, Artificial Sequence
  ENSG00000180596_2 (sequence is synthesized)
cgtgcgcctgctgcttcccggagagctggccaagcacgccgtgtcggagggcaccaaggccgtcaccaagtacaccagctccaagtaaacattccaaggggagacaacagcttttagaca

SEQ ID NO: 635452 - DNA, 120 bp, Artificial Sequence
  ENSG00000180596_3 (sequence is synthesized)
tatcttttccaacagtcgtcactgctggacactgtttcatcttgcaaataaaccaatgaaaatgagtgatcctagaagaagataaatggaggtattttgaacaatcaaagaaggacaaat

SEQ ID NO: 635453 - DNA, 120 bp, Artificial Sequence
  ENSG00000180596_4 (sequence is synthesized)
gaacacctggctgagaaaaattagctcttttttctatgcataaaactattaaaatattcttcatagaaatttatgacacaggaaacataaagacaaaattaaaataactcctagtatctc

SEQ ID NO: 635454 - DNA, 120 bp, Artificial Sequence
  ENSG00000180596_5 (sequence is synthesized)
agccacccagatacccactaaaagagctgtggccagacgccaaattttatttggcggcggaggggtattagaatataggaactggagaggggtggggacaagtgttgcagcttagagagg

SEQ ID NO: 635455 - DNA, 120 bp, Artificial Sequence
  ENSG00000180611_0 (sequence is synthesized)
actcggcgcgttttgcatgaagatggcggctcccaccgccaacaaggcagcctccctgggctgtaacaacaagcctgcgttcccggagctggatttcaggtcgggagctcgggtggagga

SEQ ID NO: 635456 - DNA, 120 bp, Artificial Sequence
  ENSG00000180611_1 (sequence is synthesized)
attgaacaaactcatccaagaatttacgaagcacgaccagcgggaatacgacgaccagagagcgctggagattcacacagccaaggatttcatcttttccatgctgggaatggtgcaaaa

SEQ ID NO: 635457 - DNA, 120 bp, Artificial Sequence
  ENSG00000180611_2 (sequence is synthesized)
gctggaccaaaagcttccagtggctaatgaatacctgttgctctctggaggtgtccgggaaggcgtggtggacctggacttagatgagcttaatgtctatgcccggggtactgactatga

SEQ ID NO: 635458 - DNA, 120 bp, Artificial Sequence
  ENSG00000180611_3 (sequence is synthesized)
tatggactttaccctcttggtgccagccctcaagctgcatgaccgtaatcagcctgtgacactcgacatgcgccactcagccttgtgccactcttggctgagccttcggctctttgatga

SEQ ID NO: 635459 - DNA, 120 bp, Artificial Sequence
  ENSG00000180611_4 (sequence is synthesized)
ggggacaatcagtaaatggaaagactgctgcaccattgtagatcacatcaatggtgccaccaactacttcttctcacctaccaaagtggctgactggttctatgactctatcagcattgt

SEQ ID NO: 635460 - DNA, 120 bp, Artificial Sequence
  ENSG00000180611_5 (sequence is synthesized)
cctatcagaaatacagaagaaaccccagcgagggatgccaaaggtagaaaaggtggaaaaaaatgggaccatcatctccatcattctgggtgtagggagtagtcgcatgttgtatgatat

SEQ ID NO: 635461 - DNA, 120 bp, Artificial Sequence
  ENSG00000180611_6 (sequence is synthesized)
tgtccctgtggtatctttcaaaggttggcctgcagtggcccagagctggctcatggagaaccacttttgggatgggaagattactgaggaagaggtcatcagtgggttttacttggtgcc

SEQ ID NO: 635462 - DNA, 120 bp, Artificial Sequence
  ENSG00000180611_7 (sequence is synthesized)
tgcttgctcctacaagggtaagaaggacaatgaatggcggctgtcctttgccaggagcgaggtgcagttgaagaagtgcatctccagcagcctcatgcaggcctatcaggcctgcaaagc

SEQ ID NO: 635463 - DNA, 120 bp, Artificial Sequence
  ENSG00000180611_8 (sequence is synthesized)
catcatcattaaactgctgtcccggcccaaggctattagcccctatcacctgcggagcatgatgctctgggcctgcgacagacttcctgccaactacttggctcaagaagactatgcagc

SEQ ID NO: 635464 - DNA, 120 bp, Artificial Sequence
  ENSG00000180611_9 (sequence is synthesized)
ccactttttgctgggcctcatcgatgacctgcaacactgtctggtcaacaagatgtgccccaattatttcatccctcagtgcaacatgctggaacatctgtctgaggagacagtcatgct

SEQ ID NO: 635465 - DNA, 120 bp, Artificial Sequence
  ENSG00000180611_10 (sequence is synthesized)
tcacgcccggaagctgtcctctgtgcgctcagacccggcagagcacttgcgcaccgccattgagcatgtcaaggcagccaaccggctgacactggagctccagaggcgaggtagcaccac

SEQ ID NO: 635466 - DNA, 120 bp, Artificial Sequence
  ENSG00000180611_11 (sequence is synthesized)
cagcatcccctctccacagtctgacggaggggaccccaaccagcctgatgaccgtttggcaaaaaaactgcagcagctagtgactgagaacccgggaaagtcaatctctgtctttatcaa

SEQ ID NO: 635467 - DNA, 120 bp, Artificial Sequence
  ENSG00000180611_12 (sequence is synthesized)
cttttttttttcctgattcttaaactctgataatgtgtcgtgtggtttgtgatgctatctttctgttttttacatatccagcctagattggatttgttaagaacaaattttaagtttcct

SEQ ID NO: 635468 - DNA, 120 bp, Artificial Sequence
  ENSG00000180611_13 (sequence is synthesized)
ggttctgcaggatggtgcaggctctgaaacagtatattactatttcatattctgcctctgatttcgttgtttactttttgtagttattgtcatgctctttagtttgttggagtttttttt

SEQ ID NO: 635469 - DNA, 120 bp, Artificial Sequence
  ENSG00000180611_14 (sequence is synthesized)
ctttttaaggagatcttaagccatagatgaaaatgcccatgaatcctcttgcttttttctgtttcatacttggtgcaaatttgttcatgggtatggggaaacaaatctctttctgatgct

SEQ ID NO: 635470 - DNA, 120 bp, Artificial Sequence
  ENSG00000180611_15 (sequence is synthesized)
taacgattctatcctattatttttattattttgtttttgtcttttttcttatgagctttcaccactactgatatttgagaatcatatgaacctgggaactacttggcatgttagctggat

SEQ ID NO: 635471 - DNA, 120 bp, Artificial Sequence
  ENSG00000180611_16 (sequence is synthesized)
ttatttattttggccagtgaccagagtagtttccccccttttccaccaaacaatgtaaactttgaaagtgataatactacaaattgtgttttggagcaacttcattgaatgtaattgtcc

SEQ ID NO: 635472 - DNA, 120 bp, Artificial Sequence
  ENSG00000180611_17 (sequence is synthesized)
tcaaatcagagaacactgggtggtttgaagggtgtctttgacagttttccaagcagaattaaggtttccaaatgttaattttagcatatgtaattatttgaagccttatttaaatcctat

SEQ ID NO: 635473 - DNA, 120 bp, Artificial Sequence
  ENSG00000180611_18 (sequence is synthesized)
taaagaacataccattataattattatttgcactaatctttgccattgtcagaattgcaaagtgtgtttcaatataaattaacaaccactctcgaaattctatcattttttcattttgcc

SEQ ID NO: 635474 - DNA, 120 bp, Artificial Sequence
  ENSG00000180611_19 (sequence is synthesized)
catttctatcagtgaaatgattctttgcatttgcttagttctccttcagttgtggggtcctgctttgccctctttgatattcctggttcctgtcttactgagagaagttgttaaagcttt

SEQ ID NO: 635475 - DNA, 120 bp, Artificial Sequence
  ENSG00000180611_20 (sequence is synthesized)
atacatgttgaccccatctaaagctggggaaaatatacacttgatgaagtaggtgtctttgtatttatttcttttggggtcatagaggtaagcttttttgtaaaatctctactcttcctg

SEQ ID NO: 635476 - DNA, 120 bp, Artificial Sequence
  ENSG00000180611_21 (sequence is synthesized)
agagttttgagaaaaactggcaggaagaacttataatccccaaatagaagataccacgtctgttcaaaagcaggtattgctatagagcagcacccaggaaatatctgtgggtggcagcct

SEQ ID NO: 635477 - DNA, 120 bp, Artificial Sequence
  ENSG00000180611_22 (sequence is synthesized)
tggtatagaggtgtcctgtcttcatgagtgaagttacttgcctgattaggtgctggaaggtattggctccctgttttggtgtggactcatggcaagctggtgtttaagaggtcaggaggc

SEQ ID NO: 635478 - DNA, 120 bp, Artificial Sequence
  ENSG00000180611_23 (sequence is synthesized)
ctgctgatctttcaaaggacacccatgatgtctactcatagaaagggcaagtaacgtgttcattttggtcttgaatgtccaaactcaagggttggattttggccaattgaaatcagacat

SEQ ID NO: 635479 - DNA, 120 bp, Artificial Sequence
  ENSG00000180611_24 (sequence is synthesized)
atgcgatcttgggtttttgcatggaaattaatgtaatgcttataaatgaaaaatgaaaacatttcaaccatctaagtcaaacacaaaaataataaaaaaagaaacatactggccttgaaa

SEQ ID NO: 635480 - DNA, 120 bp, Artificial Sequence
  ENSG00000180613_0 (sequence is synthesized)
gggggacgtgaggaccagccctctccggggacccctttgttcccagcccagacgccaacacctctgcgtccccaagggcttgactgcccgtgtctgcgcggctcccagggcagagcttag

SEQ ID NO: 635481 - DNA, 120 bp, Artificial Sequence
  ENSG00000180613_1 (sequence is synthesized)
aacactagaggagaggggtcgccgcgaactgccggggcttccagccacccacccctctcgacatgtcgcgctccttctatgtcgactcgctcatcatcaaggacacctcacggcctgcgc

SEQ ID NO: 635482 - DNA, 120 bp, Artificial Sequence
  ENSG00000180613_2 (sequence is synthesized)
cctcgctgcctgaaccgcaccccgggccggatttcttcatcccgcttggcatgccgcccccattggtgatgtccgtgtccggccccggctgcccgtcccgcaagagcggcgcgttctgcg

SEQ ID NO: 635483 - DNA, 120 bp, Artificial Sequence
  ENSG00000180613_3 (sequence is synthesized)
tgtgccctctctgcgtcacttcgcacctgcactcctctcgggggtctgtgggcgccggcagcgggggcgcaggggccggggttaccggggccggaggcagtggggtggcaggggccgcag

SEQ ID NO: 635484 - DNA, 120 bp, Artificial Sequence
  ENSG00000180613_4 (sequence is synthesized)
gggcactgcctctgcttaagggccagttctcttcggctcctggggacgcgcagttttgcccgcgggtgaaccatgcgcatcatcaccaccacccgccgcagcaccaccatcaccatcatc

SEQ ID NO: 635485 - DNA, 120 bp, Artificial Sequence
  ENSG00000180613_5 (sequence is synthesized)
caccatcaccatcatcagccccagcagcctggctcggccgcggcggcggcagcagcagcagcggcggcggcggccgcggcggccttggggcacccgcagcaccacgcacctgtctgcacc

SEQ ID NO: 635486 - DNA, 120 bp, Artificial Sequence
  ENSG00000180613_6 (sequence is synthesized)
gagagagaattctcttccaacatgtacctgtctcgactccggaggattgaaatcgccacttacctgaacctgtcggagaagcaggtgaaaatctggtttcagaaccgccgagtgaagcac

SEQ ID NO: 635487 - DNA, 120 bp, Artificial Sequence
  ENSG00000180613_7 (sequence is synthesized)
aagaaggaggggaagggcacgcagaggaacagtcacgcgggctgcaagtgcgtcgggagccaggtgcactacgcgcgctccgaggatgaggactccctgtcgccggcctcagccaacgat

SEQ ID NO: 635488 - DNA, 120 bp, Artificial Sequence
  ENSG00000180613_8 (sequence is synthesized)
gacaaggagatttcccccttatgagggagggcctcctccctcacatcccccgctcctggcagaccaggcaacgccaaggcgtggggcacccaggggccagaatccttgctcattgcagtg

SEQ ID NO: 635489 - DNA, 120 bp, Artificial Sequence
  ENSG00000180613_9 (sequence is synthesized)
gtcccatctggagaagaaacgaacctggaagttctggaatggacaagccgggacctgacccttcgcgtctccttcttgacctgtttatctaggactccaacttgaagttacagatttttt

SEQ ID NO: 635490 - DNA, 120 bp, Artificial Sequence
  ENSG00000180613_10 (sequence is synthesized)
taaaaaatgtaaataacctataattcaactcattcttgtcgtataacagaggaaaaacagggttggtttaagtttaacactgtatggggtttttgaaagcacatgtcagttccccatccc

SEQ ID NO: 635491 - DNA, 120 bp, Artificial Sequence
  ENSG00000180613_11 (sequence is synthesized)
tactctctttcagaactcgataagaacacaggatttattgattattttctgttgtcgttttcaaacaaaaacacccaagttgaaaataatttagaaaattagaccttgtaggtcttgctt

SEQ ID NO: 635492 - DNA, 120 bp, Artificial Sequence
  ENSG00000180613_12 (sequence is synthesized)
tctgaaatttcgcctggggagaatttaaaatctaagtcgctggaagtccctttgtatgtgaataggtttatataaaatttatatttatatttatttaaataaatgaaacaaaaaccagaa

SEQ ID NO: 635493 - DNA, 120 bp, Artificial Sequence
  ENSG00000180613_13 (sequence is synthesized)
tcagcatgaaaagcttgacggtttcttagctgggaggcctcacagttctgcgccggacagtcctgaactaaccacctgaatgacctctgccaagtccaaaagctgtggacaggggaggct

SEQ ID NO: 635494 - DNA, 120 bp, Artificial Sequence
  ENSG00000180616_0 (sequence is synthesized)
agtcccagcggcgcagccacccatgcgcgcgcgctcgcaagaccaccagcgcccagagccccagtctgaggcttggcgccgggggtctgcgggcgaggggagctctctacgtgcgagggg

SEQ ID NO: 635495 - DNA, 120 bp, Artificial Sequence
  ENSG00000180616_1 (sequence is synthesized)
ctagcgggagccggcacaagagggtcgaggagccaggaaccccaaacgtccggcgccaggcgctagccaagctgctgcgcgccccggcgcccagctggctcggggacagccgctgggtgt

SEQ ID NO: 635496 - DNA, 120 bp, Artificial Sequence
  ENSG00000180616_2 (sequence is synthesized)
cggagaccggagctagcggattgcagcggaaaagcaaagatgtcacactggatccttggcctccagggtccattaaggtgagaataagatctctgggctggctggaactagcctaagact

SEQ ID NO: 635497 - DNA, 120 bp, Artificial Sequence
  ENSG00000180616_3 (sequence is synthesized)
gaaaagcagccatggacatggcggatgagccactcaatggaagccacacatggctatccattccatttgacctcaatggctctgtggtgtcaaccaacacctcaaaccagacagagccgt

SEQ ID NO: 635498 - DNA, 120 bp, Artificial Sequence
  ENSG00000180616_4 (sequence is synthesized)
actatgacctgacaagcaatgcagtcctcacattcatctattttgtggtctgcatcattgggttgtgtggcaacacacttgtcatttatgtcatcctccgctatgccaagatgaagacca

SEQ ID NO: 635499 - DNA, 120 bp, Artificial Sequence
  ENSG00000180616_5 (sequence is synthesized)
tcaccaacatttacatcctcaacctggccatcgcagatgagctcttcatgctgggtctgcctttcttggctatgcaggtggctctggtccactggccctttggcaaggccatttgccggg

SEQ ID NO: 635500 - DNA, 120 bp, Artificial Sequence
  ENSG00000180616_6 (sequence is synthesized)
tggtcatgactgtggatggcatcaatcagttcaccagcatcttctgcctgacagtcatgagcatcgaccgatacctggctgtggtccaccccatcaagtcggccaagtggaggagacccc

SEQ ID NO: 635501 - DNA, 120 bp, Artificial Sequence
  ENSG00000180616_7 (sequence is synthesized)
ggacggccaagatgatcaccatggctgtgtggggagtctctctgctggtcatcttgcccatcatgatatatgctgggctccggagcaaccagtgggggagaagcagctgcaccatcaact

SEQ ID NO: 635502 - DNA, 120 bp, Artificial Sequence
  ENSG00000180616_8 (sequence is synthesized)
ggccaggtgaatctggggcttggtacacagggttcatcatctacactttcattctggggttcctggtacccctcaccatcatctgtctttgctacctgttcattatcatcaaggtgaagt

SEQ ID NO: 635503 - DNA, 120 bp, Artificial Sequence
  ENSG00000180616_9 (sequence is synthesized)
cctctggaatccgagtgggctcctctaagaggaagaagtctgagaagaaggtcacccgaatggtgtccatcgtggtggctgtcttcatcttctgctggcttcccttctacatattcaacg

SEQ ID NO: 635504 - DNA, 120 bp, Artificial Sequence
  ENSG00000180616_10 (sequence is synthesized)
tttcttccgtctccatggccatcagccccaccccagcccttaaaggcatgtttgactttgtggtggtcctcacctatgctaacagctgtgccaaccctatcctatatgccttcttgtctg

SEQ ID NO: 635505 - DNA, 120 bp, Artificial Sequence
  ENSG00000180616_11 (sequence is synthesized)
acaacttcaagaagagcttccagaatgtcctctgcttggtcaaggtgagcggcacagatgatggggagcggagtgacagtaagcaggacaaatcccggctgaatgagaccacggagaccc

SEQ ID NO: 635506 - DNA, 120 bp, Artificial Sequence
  ENSG00000180616_12 (sequence is synthesized)
agaggaccctcctcaatggagacctccaaaccagtatctgaactgcttggggggtgggaaagaaccaagccatgctctgtctactggcaatgggctccctacccacactggcttcctgcc

SEQ ID NO: 635507 - DNA, 120 bp, Artificial Sequence
  ENSG00000180616_13 (sequence is synthesized)
tcccacccctcacacctggcttctagaatagaggattgctcagcatgagtccaattcagagaacggtgtttgagtcagcttgtctgattgaatgataatgtgctaaattgattacctccc

SEQ ID NO: 635508 - DNA, 120 bp, Artificial Sequence
  ENSG00000180616_14 (sequence is synthesized)
ccttaaagcgaacactgaaatgcaggtagacaattcaaagtctggagaagagggatcatgcctggatatgatctttagaaacaacaaaaatagaaaaaaataagtatctgtgtgtttgtg

SEQ ID NO: 635509 - DNA, 120 bp, Artificial Sequence
  ENSG00000180616_15 (sequence is synthesized)
tattgaaaactcaatatgtaatcttgtgtttttatatgtatacttgtatattcctatttattctctgtataggcattacctacgttcctgtgtttacatacacaagtagcaaattcgagt

SEQ ID NO: 635510 - DNA, 120 bp, Artificial Sequence
  ENSG00000180616_16 (sequence is synthesized)
atgcatagtgtagatggacatttgccacaacacactgcccgcagaaatggacttaccgtgaagccaataaagttcaagcttcagggatctctcttgcacgggccttgccaaggcccagga

SEQ ID NO: 635511 - DNA, 120 bp, Artificial Sequence
  ENSG00000180616_17 (sequence is synthesized)
gggacttgggcagtatgttcatgtggtcatatgtttttgtaaaaaattgtgaaagtaagatatgtttgtattgtttttcttaaagaggaacctcgtataagcttcaagcctcacaaacct

SEQ ID NO: 635512 - DNA, 120 bp, Artificial Sequence
  ENSG00000180616_18 (sequence is synthesized)
tctagcctctgcccttggggatttgcttcattaatttcaggcaagtgaggtcaatgtaagaagggaaagggagaagatatttgaagaaccagaatgtaaattcatgtgtttccacttctc

SEQ ID NO: 635513 - DNA, 120 bp, Artificial Sequence
  ENSG00000180616_19 (sequence is synthesized)
agatatagtcagagaattattcatttgcccaaaaggacttaagtggttgtggtcatccatcattgtatttatcaagacaaagccaactttgttataagattgcatttttttcttttcaaa

SEQ ID NO: 635514 - DNA, 120 bp, Artificial Sequence
  ENSG00000180616_20 (sequence is synthesized)
ttgctttagtttttcttagggagctatgagggggaaaaatcactaacatgaaaggcaaaaaatggactatgattcctgtggggaaacaatttcattctctccatcgtgaaaataagtgaa

SEQ ID NO: 635515 - DNA, 120 bp, Artificial Sequence
  ENSG00000180616_21 (sequence is synthesized)
taagagtgaagcaaaattacacctttatgagaaaccataaaattgtttttatttttcaggccagacatagcttcctaatgaaagaaaatggaaatgtaattcgacgactcctcaaagggg

SEQ ID NO: 635516 - DNA, 89 bp, Artificial Sequence
  ENSG00000180616_22 (sequence is synthesized)
aaagaaaatggaaatgtaattcgacgactcctcaaaggggactttagaggacttcatacaaagctgggcattaagaaaaccacaatgca

SEQ ID NO: 635517 - DNA, 120 bp, Artificial Sequence
  ENSG00000180616_23 (sequence is synthesized)
aaaaaaaaaggaaaaccacaatgcgtactaaagaccagaagacattgttcacaaaacaaaagcaccctcacctgccaatgaatatgcagcgtgcagggggtgtggtgtgagtgttggtgg

SEQ ID NO: 635518 - DNA, 120 bp, Artificial Sequence
  ENSG00000180616_24 (sequence is synthesized)
ggccccacctctcggagatactgctgtgctgccttcctcactgactgtatacatagtaactgtcatatctttaatgccatggactcactgagccgctctgcaaggactattgtagacagg

SEQ ID NO: 635519 - DNA, 120 bp, Artificial Sequence
  ENSG00000180616_25 (sequence is synthesized)
cacttcacaccataaagtggcatttttttcgttccccaaactgacatttacaagcgataagaaaagagacaatatccatttcattgactgatcattttctagagtatgaagaaatacaca

SEQ ID NO: 635520 - DNA, 120 bp, Artificial Sequence
  ENSG00000180616_26 (sequence is synthesized)
cctgggtgtctgcaaggatgtcatcatctttgggtttcatctgagagcatcactcagcatctcacacatagatgttaccatatttttaaatgagctttcctcatccggctccctaagcaa

SEQ ID NO: 635521 - DNA, 120 bp, Artificial Sequence
  ENSG00000180616_27 (sequence is synthesized)
gcgctgttggccggtgggagtgactaagtgctccacctgtgggtgtccttcttaatgtgctgcttttgttctgtataaattcacaccacctcactcccaaaagtacttcctgtggctcag

SEQ ID NO: 635522 - DNA, 120 bp, Artificial Sequence
  ENSG00000180616_28 (sequence is synthesized)
aaaaatatgttcaataagattttggatagataaatccatacaaaaataaaaagaggtatagttataaaacaagactacagaaaaagttgtggcagaaattgcatgcaggaaaatcccaca

SEQ ID NO: 635523 - DNA, 120 bp, Artificial Sequence
  ENSG00000180616_29 (sequence is synthesized)
ccattagtaaaagtaaggtcaactgtaagttcagctcagggcttcctagcagccatgtttagcgaagtgtgatttttttttttaaacaaaaacaagcaaagatttggaagaaaatgcttt

SEQ ID NO: 635524 - DNA, 120 bp, Artificial Sequence
  ENSG00000180616_30 (sequence is synthesized)
taactttacaattattataacataagatgttccagggtccttgaataaatgctgagttttagggaaatgattccaagggaccaagaattggtagaaataatttcaaggcagagaagacta

SEQ ID NO: 635525 - DNA, 120 bp, Artificial Sequence
  ENSG00000180616_31 (sequence is synthesized)
gcgaaacttcatctcaaaaaaaaaaaacaaagactaattctatagtacccatgaccctgcaaccagagaaactgcctgtagggaggccagagtccaaagcagccacctgtaacctgaaaa

SEQ ID NO: 635526 - DNA, 120 bp, Artificial Sequence
  ENSG00000180616_32 (sequence is synthesized)
ggccagagtccaaagcagccacctgtaacctgaaaatgaaacgcagacccaggcatctgtgggtcttcatcagcaggatgaccattctaaggctaaaagacaggcctttaaatctgatgc

SEQ ID NO: 635527 - DNA, 120 bp, Artificial Sequence
  ENSG00000180616_33 (sequence is synthesized)
tataattccatccaaatacacagttaggtttctaccatagggaaagctattctctactttttgaagtatctgtttcaaagataacttgctctctggttctcttttatctaaaagagagaa

SEQ ID NO: 635528 - DNA, 120 bp, Artificial Sequence
  ENSG00000180616_34 (sequence is synthesized)
tcaacatgctaatttaaaggttaacatcattttaattcaaaaattttagtctccattccatatttaatgatgaagacaaatctgctgggtgctgggagggaataaaaagtaatgcacccc

SEQ ID NO: 635529 - DNA, 120 bp, Artificial Sequence
  ENSG00000180616_35 (sequence is synthesized)
attgatttcagagtatctgatcacttgggttatgcaagctgctacttacccgccattagcatgggtagttaagtgctgattaaacctaagtggactcagtgaaaaagatattgggaaaaa

SEQ ID NO: 635530 - DNA, 120 bp, Artificial Sequence
  ENSG00000180616_36 (sequence is synthesized)
aaaataatatgatattgtggcctatgttgaatgatgttagcttgtgtttcagtaacagagttgggtaatactggacgtgtagatgaagctttagcagggctgggcacggtggctcatgcc

SEQ ID NO: 635531 - DNA, 120 bp, Artificial Sequence
  ENSG00000180616_37 (sequence is synthesized)
aaaaaaaaaaaggaagaagaaaaagaaacttaagtggggttcatacatagcatggcagagggacactggagaataaaatggcatgcagagaggaacacgcgggccagtggatgaggcttc

SEQ ID NO: 635532 - DNA, 120 bp, Artificial Sequence
  ENSG00000180616_38 (sequence is synthesized)
gggccagtggatgaggcttctagacctggcagtgaactggagtctatttgcttacacaaatttaaccttctctccatgatggaatacaagtgtttcttgccaaaactcgcagccccagct

SEQ ID NO: 635533 - DNA, 120 bp, Artificial Sequence
  ENSG00000180616_39 (sequence is synthesized)
gccctagatgaggagcaccgtgctggaaaagtgcacaggctgatcacagagacaggtaggaagcaatggactgttaaaatgcatgttccgggctggggatggtggctcacacctgtgatc

SEQ ID NO: 635534 - DNA, 120 bp, Artificial Sequence
  ENSG00000180616_40 (sequence is synthesized)
ctgtgatctcagcactttgggaggccgaggctggggaatcgcttgagcccaggattttgagactagcctaggcaatatggtgagaccctgcccttaaaaaaaaaaaagaaaagaaaagaa

SEQ ID NO: 635535 - DNA, 120 bp, Artificial Sequence
  ENSG00000180616_41 (sequence is synthesized)
aagattcatattcctgatcagctctgaatgtgactattcaatgaagacagtaaagttacagtgtaaggcacacatgacctttggccttgctaaagaagagtggctgaaggtctagcaaat

SEQ ID NO: 635536 - DNA, 120 bp, Artificial Sequence
  ENSG00000180616_42 (sequence is synthesized)
taatgcttgtcttaggttacctgttgatttaaaaacaacaacaacaaaaacccataaaaatagtaaaatataaaaacaaattagtgttttatagaccctggggaaaagaattttcagcaa

SEQ ID NO: 635537 - DNA, 120 bp, Artificial Sequence
  ENSG00000180616_43 (sequence is synthesized)
cctggggaaaagaattttcagcaaagtacaaaaatttaaagcattcctttctttaattttgtaattctttactgtagaacagctcaaaatatcagttctgttttaagtaacagaattgat

SEQ ID NO: 635538 - DNA, 120 bp, Artificial Sequence
  ENSG00000180616_44 (sequence is synthesized)
gattgtaaaattcttgctttaataaaaattctttaaacagtcaaaatagaaagaaagaaagaaaggtggcaagagaattatcaaaagtttccatagatggttgggaagatctgattagtg

SEQ ID NO: 635539 - DNA, 120 bp, Artificial Sequence
  ENSG00000180616_45 (sequence is synthesized)
tttccaaaatgcttatcattctaagaatcccaatagctggcaagccaagcagtggaacttatagtaacaacaatcaatcacttgtctcatcccacatttttgccaaattcaaaaacacca

SEQ ID NO: 635540 - DNA, 120 bp, Artificial Sequence
  ENSG00000180616_46 (sequence is synthesized)
aatttcccatcaaatgttctgtcagagtaaacctttacctaagtgcttgttttgcttttaatatgtgaatttctgggaacattcccatgggcagcctctaattttttttttttttttttg

SEQ ID NO: 635541 - DNA, 120 bp, Artificial Sequence
  ENSG00000180616_47 (sequence is synthesized)
caaagtgttgggattacaggcacgagccaccgcgctcagccaatttttcctcaactctctctttcctggacgggctgcgttggggggaggtgcagggaaagaacacctctttgcttagac

SEQ ID NO: 635542 - DNA, 120 bp, Artificial Sequence
  ENSG00000180616_48 (sequence is synthesized)
attggtgtcgacagtggggatactaagttcatctcctgatcctgctaggcctggaagcaggaaagaaatgtcctggttagagataaaattgttctatccttttagaaaagcctgttaagg

SEQ ID NO: 635543 - DNA, 120 bp, Artificial Sequence
  ENSG00000180616_49 (sequence is synthesized)
aatatgatgcaaagccaccttcgacgaaatctgaaatgataccccacagccttgtccaccccaattattcagtgacagggctccagttgcttaagccatagagaaggcccctttgcagtg

SEQ ID NO: 635544 - DNA, 120 bp, Artificial Sequence
  ENSG00000180616_50 (sequence is synthesized)
ggagtcactgaagacagaaagggaagcccaggatgaacccagtcctaagggctgctgggggccaccaaataagactgttttagccctggacacagagggagacacagtcatcccagatcc

SEQ ID NO: 635545 - DNA, 120 bp, Artificial Sequence
  ENSG00000180616_51 (sequence is synthesized)
ttacaaagaatacattgccaaggaccccgaaggaaatctgcttgtcttaagagaggaagacccacgaccagctctctgggactacctgtcaactcagcaggtgcagccagggagcagcca

SEQ ID NO: 635546 - DNA, 120 bp, Artificial Sequence
  ENSG00000180616_52 (sequence is synthesized)
tgcttcttctgccctcccagtaggctgggctatcagttcctgggaggggtcctgtccccatgtaaggggatatgtacattgctgagtacgctgatatctttttcatgggtatgatttttt

SEQ ID NO: 635547 - DNA, 82 bp, Artificial Sequence
  ENSG00000180616_53 (sequence is synthesized)
gctgagtacgctgatatctttttcatgggtatgattttttaacaagaaagctaaatggttctcgtgtaacataactgaactg

SEQ ID NO: 635548 - DNA, 73 bp, Artificial Sequence
  ENSG00000180616_54 (sequence is synthesized)
ttctcgtgatagctccttcgctctgcacttctccttgctgccatgcgaagaaggatgtgtttgcttccccttc

SEQ ID NO: 635549 - DNA, 120 bp, Artificial Sequence
  ENSG00000180616_55 (sequence is synthesized)
caggagtcagttgcttcaaaccaaagcccagttatcagccgttcggtctctaggccactgaggagcagaggggatgccttgagacgtgcaaaagacttggggccaggtggcctgtgttca

SEQ ID NO: 635550 - DNA, 120 bp, Artificial Sequence
  ENSG00000180616_56 (sequence is synthesized)
catcccagctccaccaattatgtgcaagagaatgggatgtcacactggatccttggcctccagggtccattaaggtgagaataagatctctgggctggctggaactagcctaagactgaa

SEQ ID NO: 635551 - DNA, 120 bp, Artificial Sequence
  ENSG00000180626_0 (sequence is synthesized)
ctcagctttggcagggaaaggtcttctgagttctttgttcctccctcttagactgcccagtataatgaagagatgatatttgtattttaggaattatagaatgatctacttatcatttca

SEQ ID NO: 635552 - DNA, 120 bp, Artificial Sequence
  ENSG00000180626_1 (sequence is synthesized)
gattctgaagacaggaataagatgaaggaatggaaatcaaagatggaaatttctgaagaaaagaagtcagcaagggctgcatccgaaaaactccaaagacaaatcacccaggaatgtgag

SEQ ID NO: 635553 - DNA, 120 bp, Artificial Sequence
  ENSG00000180626_2 (sequence is synthesized)
ttagttgaaaccagtaattctgaggacagattattgaagcactgggtaagccctttaaaggatgcaatgagacatctcccttcccaagagagcggtatcagggaaatgcatattatcccc

SEQ ID NO: 635554 - DNA, 120 bp, Artificial Sequence
  ENSG00000180626_3 (sequence is synthesized)
cagaaagccattgtgggagagattggccatggatgtaatgaaggagaaaaaatactttctgcaggagaaagctcccatagatatgaggttagtggccaaaacttcaaacagaagtcagga

SEQ ID NO: 635555 - DNA, 120 bp, Artificial Sequence
  ENSG00000180626_4 (sequence is synthesized)
ttaactgaacatcagaaaattcataatataaataagacctatgaatgtaaggaatgtgaaaaaaccttcaacaggagttcaaacctgatcatacatcagagaattcatacaggaaataag

SEQ ID NO: 635556 - DNA, 120 bp, Artificial Sequence
  ENSG00000180626_5 (sequence is synthesized)
ccatatgtgtgtaatgaatgtgggaaagactctaatcaaagttcaaatcttattatacatcagagaattcatacaggaaagaaaccttatatatgtcatgaatgtggaaaagacttcaat

SEQ ID NO: 635557 - DNA, 120 bp, Artificial Sequence
  ENSG00000180626_6 (sequence is synthesized)
cagagctccaatctggtgagacataagcaaattcacagtggtgggaatccctatgagtgcaaagagtgtgggaaggcttttaagggaagctcaaaccttgtcctgcaccagagaatccac

SEQ ID NO: 635558 - DNA, 120 bp, Artificial Sequence
  ENSG00000180626_7 (sequence is synthesized)
agtagggggaagccatatttatgcaataaatgtgggaaggctttcagtcaaagcacagatcttattatacatcacagaattcacactggagagaaaccctatgaatgttatgactgtgga

SEQ ID NO: 635559 - DNA, 120 bp, Artificial Sequence
  ENSG00000180626_8 (sequence is synthesized)
cagatgttcagtcaaagttcacaccttgtcccacatcagagaattcacactggagagaaacccctcaaatgtaatgaatgtgaaaaagccttcaggcagcattctcaccttactgaacac

SEQ ID NO: 635560 - DNA, 120 bp, Artificial Sequence
  ENSG00000180626_9 (sequence is synthesized)
cagagactccacagtggagagaaaccctatgaatgtcacagatgtgggaagaccttcagtgggcgcacagcttttcttaaacatcagagattgcatgctggagagaaaattgaagaatgt

SEQ ID NO: 635561 - DNA, 120 bp, Artificial Sequence
  ENSG00000180626_10 (sequence is synthesized)
gagaaaaccttcagcaaggatgaggagcttagggaagagcagagaattcaccaggaagagaaagcttattggtgtaatcagtgtggtaggaatttccagggcacctcagacctcatcaga

SEQ ID NO: 635562 - DNA, 120 bp, Artificial Sequence
  ENSG00000180626_11 (sequence is synthesized)
catcaggtaactcatacaggagagaaaccatatgaatgtaaagaatgtgggaaaactttcaatcagagctcagaccttctgagacatcatagaattcacagtggagaaaaaccttgtgta

SEQ ID NO: 635563 - DNA, 120 bp, Artificial Sequence
  ENSG00000180626_12 (sequence is synthesized)
tgtagcaaatgtgggaaatcttttaggggcagctcagatcttattagacaccatcgtgttcatactggagagaaaccctatgaatgtagtgaatgtgggaaagcctttagccagaggtca

SEQ ID NO: 635564 - DNA, 120 bp, Artificial Sequence
  ENSG00000180626_13 (sequence is synthesized)
caccttgttacacaccagaaaatccatactggagagaagccctatcagtgcactgaatgtgggaaagccttcaggcggcgttcactccttattcaacatcggagaattcatagtggtgag

SEQ ID NO: 635565 - DNA, 120 bp, Artificial Sequence
  ENSG00000180626_14 (sequence is synthesized)
aaaccctatgaatgtaaggaatgtgggaagctcttcatttggcgcacagctttcctcaaacatcagagcctgcatactggagagaaacttgaatgtgagaaaaccttcagccaggatgag

SEQ ID NO: 635566 - DNA, 120 bp, Artificial Sequence
  ENSG00000180626_15 (sequence is synthesized)
gagcttaggggagagcagaaaattcaccaggaagcgaaagcttattggtgtaatcagtgtggtagggctttccagggcagctcagacctcatcagacatcaggtaactcatacaagagag

SEQ ID NO: 635567 - DNA, 120 bp, Artificial Sequence
  ENSG00000180626_16 (sequence is synthesized)
aaaccatatgaatgcaaagaatgtgggaaaactttcaatcagagctcagaccttctgagacatcatagaattcacagtggagaaaaaccttatgtatgcaacaaatgtgggaaatctttt

SEQ ID NO: 635568 - DNA, 120 bp, Artificial Sequence
  ENSG00000180626_17 (sequence is synthesized)
aggggtagctcagatcttattaaacaccatcgtattcatactggagagaaaccctatgaatgtagtgaatgtgggaaagccttcagccagaggtcacaccttgctacacaccagaaaatc

SEQ ID NO: 635569 - DNA, 120 bp, Artificial Sequence
  ENSG00000180626_18 (sequence is synthesized)
aatccatactggagagaaaccctatcagtgcagtgaatgtgggaatgccttcaggcggcgttccctccttattcaacatcggagacttcatagtggtgagaaaccctatgaatgtaagga

SEQ ID NO: 635570 - DNA, 120 bp, Artificial Sequence
  ENSG00000180626_19 (sequence is synthesized)
gggaaactcttcatgtggcacacggctttcctcaaacatcagagactgcatgctggagagaaacttgaagaatgtgagaaaaccttcagcaaggatgaggagcttagaaaagagcagaga

SEQ ID NO: 635571 - DNA, 120 bp, Artificial Sequence
  ENSG00000180626_20 (sequence is synthesized)
agatctcatcagacatcaggtaactcatacaagagagaaaccatatgaatgtaaagaatgtgggaaaactcaatcagagctcagaccttctgagacatcatagaattcacagtggagaaa

SEQ ID NO: 635572 - DNA, 120 bp, Artificial Sequence
  ENSG00000180626_21 (sequence is synthesized)
aaccttacgtatgcaataaatgtggggaatcttttaggagcagctcagatcttattaaacaccatcgtgttcatactggagagaaacctcatgaatgtagtgaatgtgggaaagtcttta

SEQ ID NO: 635573 - DNA, 120 bp, Artificial Sequence
  ENSG00000180626_22 (sequence is synthesized)
gccagaggtcccaccttgtcacacaccagaaaatccacactggagagaagccctatcagtgcactgaatgtgaaaaagccttcaggcggcgttcactccttattcaacgtcggagaattc

SEQ ID NO: 635574 - DNA, 120 bp, Artificial Sequence
  ENSG00000180626_23 (sequence is synthesized)
gagaaaccctatgaatgtaaggaatgtgggaaactcttcatgtggcacacagctttcctcaaacatcagagactgcatgctggagagaaacttgaagaacgtgagaaaaccttcagcaag

SEQ ID NO: 635575 - DNA, 120 bp, Artificial Sequence
  ENSG00000180626_24 (sequence is synthesized)
tcagcaaggatgaggagcttaggggagagcagaaaattcaccaagaagagaaagcttattggtgtaatcagtgtggtagggctttccagggcagctcagacctcatcggacatcaggtaa

SEQ ID NO: 635576 - DNA, 120 bp, Artificial Sequence
  ENSG00000180626_25 (sequence is synthesized)
ctcatacaggagagaaaccatatgaatgtaaagaatgtgggaaaactttcaatcagagctcagaccttctgagacatcatagaattcacagtggagaaaaaccttatgtatgcaacaaat

SEQ ID NO: 635577 - DNA, 120 bp, Artificial Sequence
  ENSG00000180626_26 (sequence is synthesized)
gtgggaaatcttttaggggcagctcagatcttattagacaccatcgtgttcatactggagagaaaccctatgaatgccctgaatgttggaaggccttcagtcagaactcacaccttgtca

SEQ ID NO: 635578 - DNA, 120 bp, Artificial Sequence
  ENSG00000180626_27 (sequence is synthesized)
gtcatcaaagaattcataccagagagaaaccctttgaatgtagcaactgtggtaaggccttcagtgggtggacagcttttcttaagcaccagaaacttcacattggaaaggaatttgaag

SEQ ID NO: 635579 - DNA, 120 bp, Artificial Sequence
  ENSG00000180626_28 (sequence is synthesized)
actgtaagagtctacaaacaggacctattctaataggtagcagaaacctaatgaatgcagtaaaactaggaaaagtctgatggagaccacatcttattgcactacaaatgagttttatta

SEQ ID NO: 635580 - DNA, 120 bp, Artificial Sequence
  ENSG00000180626_29 (sequence is synthesized)
gaaaaaaaccatgggaaggtgggaaagcagagaaaatacctactggatttttcaaacgtaagtataatcaagtggaaaagccaaaagctcttggacataatcaccttttttttttctgtc

SEQ ID NO: 635581 - DNA, 120 bp, Artificial Sequence
  ENSG00000180626_30 (sequence is synthesized)
ataatcaccttttttttttctgtctcagaactgacactagaatatggtcccaacgatacaattttttaaattatttattttttaacatacaaagagatgaggtctcactatgttgcccag

SEQ ID NO: 635582 - DNA, 120 bp, Artificial Sequence
  ENSG00000180626_31 (sequence is synthesized)
agcactcctccctcctcagcctcccaaagggttgggattaccggcatgagccactgcaccagccccaggggtctaattacttgagaatgttttaagggatgtctatcattattaaaatca

SEQ ID NO: 635583 - DNA, 120 bp, Artificial Sequence
  ENSG00000180626_32 (sequence is synthesized)
ttataaatcactttggcaacaaccccaaaactaaattattcatggaaagagccatttcaatcttgacttcctagtcgagtgacaagtttaaatgtgggaaaaaaccctgtgaaagtaatg

SEQ ID NO: 635584 - DNA, 78 bp, Artificial Sequence
  ENSG00000180626_33 (sequence is synthesized)
gacaagtttaaatgtgggaaaaaaccctgtgaaagtaatgagtgtaggccaggtgcggtggctcgtacctgtaacgag

SEQ ID NO: 635585 - DNA, 73 bp, Artificial Sequence
  ENSG00000180626_34 (sequence is synthesized)
cagccaacatactaggcacgcctgtagtcccaggtacttgcgaggctagggcaggagaatcacttgaacctgg

SEQ ID NO: 635586 - DNA, 90 bp, Artificial Sequence
  ENSG00000180626_35 (sequence is synthesized)
agttctaactcttctgcttgtctttacaatgctgtacagtgagagctaatgtttataaggataaacaggatacttacagggatttgaagg

SEQ ID NO: 635587 - DNA, 120 bp, Artificial Sequence
  ENSG00000180626_36 (sequence is synthesized)
gtttataaggataaacaggatacttacagggatttgaaggtaatttaattcagtggtttccaactttttaatcaccaaggccttctttttactcccctatgtcctgtgtcttaaaagatt

SEQ ID NO: 635588 - DNA, 120 bp, Artificial Sequence
  ENSG00000180626_37 (sequence is synthesized)
atgtttaccaaactgcatttattaaagaattatattttgctacataaaggcatgtacaacacaaatcatgcttctgactggcaccatgtaggcagacctaggtactaaaattccagccca

SEQ ID NO: 635589 - DNA, 120 bp, Artificial Sequence
  ENSG00000180626_38 (sequence is synthesized)
aagcaaataatttaccattttcattagtctttttattccttttgtgggcaaacatatcgtctatgttaggctttttgaaatattaactatgacttgtaaactccagattaaaaactaacc

SEQ ID NO: 635590 - DNA, 120 bp, Artificial Sequence
  ENSG00000180626_39 (sequence is synthesized)
aattcatctttgatggagcttgaatcaaactaagggtattggacttttgaaagattgaaatttttgttacagtatggaatgtttttaactgaatgttgaaataaaagttatttaagaatt

SEQ ID NO: 635591 - DNA, 120 bp, Artificial Sequence
  ENSG00000180626_40 (sequence is synthesized)
accggaagttctcgcctggcccaggcgcggggtccaagatggtggcgctaggagccgcgacccagtgatagcggccgtggaggggcccccgaccgagcgggaggttgggggtagcctgga

SEQ ID NO: 635592 - DNA, 120 bp, Artificial Sequence
  ENSG00000180626_41 (sequence is synthesized)
agttctcgcctggcccaggcgcggggtccaagatggtggcgctaggagccgcgacccagtgatagcggccgtggaggggcccccgaccgagcgggaggttgggggtagcctggaggtgag

SEQ ID NO: 635593 - DNA, 120 bp, Artificial Sequence
  ENSG00000180626_42 (sequence is synthesized)
accccgctgcgttcacagagctggcggccgcggcgcctgcgtccaccggcaagcgaggagtggagcagagctcatatgcctatggggagaggcctgggggaccgcaggaggatgtaggcg

SEQ ID NO: 635594 - DNA, 120 bp, Artificial Sequence
  ENSG00000180626_43 (sequence is synthesized)
ccgggtgcgcatgactgggccttcttgctctcggtcggcttcttggtctcggcgtgccccattcccggccctgtcccgctactcttgcctgttccagttccctcctgtgggtaccgctaa

SEQ ID NO: 635595 - DNA, 120 bp, Artificial Sequence
  ENSG00000180628_0 (sequence is synthesized)
gtcgggcctgagccgagtggccccacagagccggcgcgctcccgcctgcagggggagagcagacggggcgcggggaccggccaggccgcggcgggtgctgtttctgtttcactttccttc

SEQ ID NO: 635596 - DNA, 120 bp, Artificial Sequence
  ENSG00000180628_1 (sequence is synthesized)
actctgaggccggcgcgctggcgggcgaggagcggcggcggtggcggccgctggacatgggaaagcggaaccaccaaaaggagtgatgatcaacgatctcatgataaatctggatgctag

SEQ ID NO: 635597 - DNA, 120 bp, Artificial Sequence
  ENSG00000180628_2 (sequence is synthesized)
ttctcatgcctcaggacatcctactgggaacgacacaccagctcctgggatcagactttcatctacttaggacccctctttgcccagactactaaagccagtcttcactagccacgaatg

SEQ ID NO: 635598 - DNA, 120 bp, Artificial Sequence
  ENSG00000180628_3 (sequence is synthesized)
gctacccaaaggaaacacttggtgaaagattttaatccttacattacctgctatatctgtaaagggtatctgatcaagccaacaacagtgacggaatgcctccatacattctgtaagact

SEQ ID NO: 635599 - DNA, 120 bp, Artificial Sequence
  ENSG00000180628_4 (sequence is synthesized)
tgtattgttcagcactttgaagatagcaatgattgcccaaggtgtggcaaccaagttcatgagacaaatccattagaaatgttgaggttggacaatacattagaggaaattatatttaag

SEQ ID NO: 635600 - DNA, 120 bp, Artificial Sequence
  ENSG00000180628_5 (sequence is synthesized)
ctggtccctggactacgagaacaagaacttgagcgtgaatctgaattttggaagaaaaataagcctcaagaaaatggacaagatgatacttcaaaagctgacaaaccgaaagtagatgaa

SEQ ID NO: 635601 - DNA, 120 bp, Artificial Sequence
  ENSG00000180628_6 (sequence is synthesized)
gaaggtgatgaaaatgaagatgataaagattatcacagaagtgacccacaaattgctatctgtctagattgtttacgaaataatgggcaatcaggggacaatgtagtaaagggtttaatg

SEQ ID NO: 635602 - DNA, 120 bp, Artificial Sequence
  ENSG00000180628_7 (sequence is synthesized)
aagaaattcattcgatgttctacacgtgtaactgtgggaactattaaaaaatttctaagtttaaaactaaaacttccaagttcttatgagttggatgtgctgtgcaatggtgaaattatg

SEQ ID NO: 635603 - DNA, 120 bp, Artificial Sequence
  ENSG00000180628_8 (sequence is synthesized)
gggaaggatcatactatggaattcatctacatgacaagatggcgactaagaggcgaaaactttcggtgtctgaactgctcagcttcgcaagtctgctctcaggatggccctttgtatcag

SEQ ID NO: 635604 - DNA, 120 bp, Artificial Sequence
  ENSG00000180628_9 (sequence is synthesized)
tcataccctatggtactgcagtatcgaccaagaattgatttcggttagaccaaggggcccagacctcactgagatgaatcctgcactatttgtttactcgtcaacagattgcacagttaa

SEQ ID NO: 635605 - DNA, 120 bp, Artificial Sequence
  ENSG00000180628_10 (sequence is synthesized)
cggtgtgtggactagaggaacacaaccagattttcagcatgcaaataaggccattgtctatctctaaattgtcagttgcattcatgttgtttctattaggagcaaaccaagtgccattct

SEQ ID NO: 635606 - DNA, 120 bp, Artificial Sequence
  ENSG00000180628_11 (sequence is synthesized)
gctactgaaccatctgcataaggtatttgtgttgtctcaaagtgtgcaagtcatggtaaaaatcagttagctgtgccgccatgattcacccttctgaatattttgcttgcctgttccaag

SEQ ID NO: 635607 - DNA, 120 bp, Artificial Sequence
  ENSG00000180628_12 (sequence is synthesized)
attgttctaatgtttaattacactagtaaaatggctcaatttttgtggtgttgcagttttcacatacttactcttttattcttgtttaaatagcgtactctacaagaaactaataattat

SEQ ID NO: 635608 - DNA, 120 bp, Artificial Sequence
  ENSG00000180628_13 (sequence is synthesized)
atcttgaaattattttgtatggaagtatatttagaaaagtggtttttgagccactgtcttgttcttgataagctttttgtgtgaaaaaaagttcattcttgagtgtgcaagtccttttgc

SEQ ID NO: 635609 - DNA, 120 bp, Artificial Sequence
  ENSG00000180628_14 (sequence is synthesized)
caagaattccaattattctgtaacattagagcacaatataattgtagacattctaagcatctgtccgtgtagtctaccaattgcacaaggaaggcatgttagccctccagattgaaaatg

SEQ ID NO: 635610 - DNA, 120 bp, Artificial Sequence
  ENSG00000180628_15 (sequence is synthesized)
tatgtgacctcttgaactgaagttagattcccaaccattcaaaatgttggcagctgatcacatttacttctgataaaagtaatgtgtaagtaaggttaatcttctttcataatgccttat

SEQ ID NO: 635611 - DNA, 120 bp, Artificial Sequence
  ENSG00000180628_16 (sequence is synthesized)
gacaagcaggtgctgcttcatgaaacgtcattgtatagcccatttcatgtatcattacattgttgctgttatttaatgagtgcattatttctctttttaagttggccttaggtatatgtc

SEQ ID NO: 635612 - DNA, 120 bp, Artificial Sequence
  ENSG00000180628_17 (sequence is synthesized)
attgtggcatgcagagggttatgacgattttaaatattaggatttttagagcacataacattagctattttatggatttcaaaagtctcaaaacagttgtagattaaaactgttagttac

SEQ ID NO: 635613 - DNA, 120 bp, Artificial Sequence
  ENSG00000180628_18 (sequence is synthesized)
ctttcacatttccaaactatgtgcataaaatagaataaatgcagtatagaactatgctaaccaaaattaataggttaagggtattttattttaaatcctgtagtaattggggaaatgaga

SEQ ID NO: 635614 - DNA, 120 bp, Artificial Sequence
  ENSG00000180628_19 (sequence is synthesized)
agattattattttatacatgagttcattaagatcagaaatacaaaatgtcctgtattttgcagttttgttaagtcttccattcgttttaggattagtctgcaagtcaaagaaagtcttgt

SEQ ID NO: 635615 - DNA, 120 bp, Artificial Sequence
  ENSG00000180628_20 (sequence is synthesized)
taccttaaattatatgaaaactgtcattttaaatcttttaatatttacagttttcaaaaaccttacttggaaattgctttgaaacaaacaagctaacctttgaaacttaggaaaaaatct

SEQ ID NO: 635616 - DNA, 120 bp, Artificial Sequence
  ENSG00000180628_21 (sequence is synthesized)
tgaaagttaggaaaaatatttgagaaatatgacgagcacaatctgtgtgttacacacatttagtttttatactgcatatgtggtaaatgtgtcacattttccagtaaaatgtatcagaaa

SEQ ID NO: 635617 - DNA, 120 bp, Artificial Sequence
  ENSG00000180628_22 (sequence is synthesized)
tcaatgccttctgaatttcaaaatgattcttagaaataagatattgtacaactctagcaaacatacaaagtacagctaaatcttaatatatttcactatgtaaaaggctgaaacttcata

SEQ ID NO: 635618 - DNA, 120 bp, Artificial Sequence
  ENSG00000180628_23 (sequence is synthesized)
attatctgttccttctatctttttttgagtcaaaaagtctattaaatttttctgttgttgttccaactttggtgaaaaaggttatggcaatactttaactttgttttgttacattgtttt

SEQ ID NO: 635619 - DNA, 120 bp, Artificial Sequence
  ENSG00000180628_24 (sequence is synthesized)
tgttcttggaatggctcacaagcagaatttaaaaggcagattttcattaactataaatggctgaaaaaactgaatttactatctagctacagaaattatttttctatggtgtgaaactgt

SEQ ID NO: 635620 - DNA, 120 bp, Artificial Sequence
  ENSG00000180628_25 (sequence is synthesized)
tcccagacatccctaagaacttttacaaattattataaatttgtcacacctaggtcagcgattaaaatagtgttttgcaaatggaattttaattaactcaaaatgaattaagagtgcatt

SEQ ID NO: 635621 - DNA, 120 bp, Artificial Sequence
  ENSG00000180628_26 (sequence is synthesized)
ttaaaaatcacaagtgagactttgatgttttggccccccagccaaaacttaatggtcataaatgaattttatctacaaaatctctttaaatttggctggttgccttgtcatatgtaattt

SEQ ID NO: 635622 - DNA, 120 bp, Artificial Sequence
  ENSG00000180628_27 (sequence is synthesized)
cactattttccaaggaaatatataggaagcaattatgaaactgagaatagttttatatagaattcttttatttactgataatgcattaacatttttattgaaatgcaatggaatatgtgc

SEQ ID NO: 635623 - DNA, 120 bp, Artificial Sequence
  ENSG00000180628_28 (sequence is synthesized)
caaaacacgtgaaaagcttacataaagaaaggcatcagttgtcgtttggagaaaggtacacatttttttgatggtcctaagtgatatggtattactactagaatcacagatttcttcaac

SEQ ID NO: 635624 - DNA, 120 bp, Artificial Sequence
  ENSG00000180628_29 (sequence is synthesized)
gtattccccgttaattatcccttaagtcagattgtagaatttgcaagaaactaggtatagaaaaaatgtacaggcaacttttgtggttagctttataaatttagggtgcttataaaatga

SEQ ID NO: 635625 - DNA, 120 bp, Artificial Sequence
  ENSG00000180628_30 (sequence is synthesized)
taaaatgaattctttaaataacctataggaatcatctgaatctgtaacatcagagactaaaactaaaagttttctttaatctgttgtttcttaagcaataaactgaaagacctttacttc

SEQ ID NO: 635626 - DNA, 120 bp, Artificial Sequence
  ENSG00000180628_31 (sequence is synthesized)
cataaaagattttgttatctcttttatctgccttagaaattataagtataaaagggtcaagggaacttagatataaagaatgactgtggtttataaacattactttaattgaagtaatca

SEQ ID NO: 635627 - DNA, 120 bp, Artificial Sequence
  ENSG00000180628_32 (sequence is synthesized)
catcagttaatagagaaatcaaaatatgtatggccttttctctagattagcaaaacagctttacaaagtatgaaaaaataaactaaaatgctcattgatgaggtaatactcagtctggag

SEQ ID NO: 635628 - DNA, 120 bp, Artificial Sequence
  ENSG00000180628_33 (sequence is synthesized)
tacaggtaacttgggtaatgccttttaactactcttagaggagtatattatttctttatacattaaacatctatcccatagtaatgtgccacattttataaacgtaatgactttgctcaa

SEQ ID NO: 635629 - DNA, 120 bp, Artificial Sequence
  ENSG00000180628_34 (sequence is synthesized)
ctacattacacactcaaatgtaatctaaatttaaactgattatttaaggaaaaaaagtgtgttatataatattgtgaactgtttagctttactgaaatatttaagagaaagtgcctcatt

SEQ ID NO: 635630 - DNA, 120 bp, Artificial Sequence
  ENSG00000180628_35 (sequence is synthesized)
actaaagtgcatttctgttttaaatttactgcataaagtttgagttatctgtacctgtctcttatgaatggtttcatatctaaataggctcttgtaagttaatttttttggaagattttc

SEQ ID NO: 635631 - DNA, 120 bp, Artificial Sequence
  ENSG00000180628_36 (sequence is synthesized)
ataagaatatagatatcaccaaagacattttacagtaaattaataaccatgttggagagacggttttaacagtttggaggttggaaatttttagattgcaatttaattttatatagttag

SEQ ID NO: 635632 - DNA, 120 bp, Artificial Sequence
  ENSG00000180628_37 (sequence is synthesized)
gcaataaccttgattaattgctaaaatatcaccaaagaaaggctttaaactgaattttcttggtgagatcagtcaaatgcaggcttttcttgcaataatcagaacacacttcctttcaaa

SEQ ID NO: 635633 - DNA, 120 bp, Artificial Sequence
  ENSG00000180628_38 (sequence is synthesized)
tatgttcattgtttttcagcatcatctaacagatcttagtaaatctaaatcctcaaagatgagaaagaggtaaacacaacaaatagccttcctctgcatgaaaagtgagagaaatacata

SEQ ID NO: 635634 - DNA, 120 bp, Artificial Sequence
  ENSG00000180628_39 (sequence is synthesized)
ctttgaaaagaaagttcagatttttaatttgagagggtttttatttcatggaggcagtgttaactaaaattaagcttagatttagctcctgtattattcataatatgagaaattttatta

SEQ ID NO: 635635 - DNA, 120 bp, Artificial Sequence
  ENSG00000180628_40 (sequence is synthesized)
aaggcagactttggtaaaagtgccaacacacttacttgtatagaaaagacttcattctatgggatttatataagtaagtgctttctctatattcaaaatatttcataaggacctgtggtt

SEQ ID NO: 635636 - DNA, 61 bp, Artificial Sequence
  ENSG00000180628_41 (sequence is synthesized)
ctttctctatattcaaaatatttcataaggacctgtggtttttttccccttaaaaagcaac

SEQ ID NO: 635637 - DNA, 120 bp, Artificial Sequence
  ENSG00000180628_42 (sequence is synthesized)
tgcactccagcctgggtgacacagcgagtctccatctccaaaaaaaattcaactcttggtcttgtttctcagcacttagtttattgttattagaatttagccatacagccaactttgaca

SEQ ID NO: 635638 - DNA, 120 bp, Artificial Sequence
  ENSG00000180628_43 (sequence is synthesized)
gaatttagccatacagccaactttgacaaaatgggtcacagaacaagcatgtacatcaagaggaagttccatatcccccttgtaccatttctccttgggaactcatgctatgggctacct

SEQ ID NO: 635639 - DNA, 120 bp, Artificial Sequence
  ENSG00000180628_44 (sequence is synthesized)
taaaggtaaaactcatcttatggagtctttctgataggtcactaggtaaaactccttggatagggtgaaaatggatgcacactctattacatactctggtttatcataaggaattttcca

SEQ ID NO: 635640 - DNA, 120 bp, Artificial Sequence
  ENSG00000180628_45 (sequence is synthesized)
gaaagctaagctttatactaataagatattggttggtagtaggaacttcaaaaatgaatgagtttgccataactttaattttctggattagaaacacaaaacttgaaatgcaattatcaa

SEQ ID NO: 635641 - DNA, 120 bp, Artificial Sequence
  ENSG00000180628_46 (sequence is synthesized)
tattttgtaatatatattcctacagtttgggtagaaataaggaacatgtctgctagatctggtttatgaaaaagtgaaaaatattaaatacaccagagactcaaaccctttcaaggcaca

SEQ ID NO: 635642 - DNA, 120 bp, Artificial Sequence
  ENSG00000180628_47 (sequence is synthesized)
caataactgttctggatttacctgacaaacctagttgagtagcattttgacagaaaatatcagactgaaagttcattcaaatgtacttaaatgtacaatacagtgttcaatagtttttat

SEQ ID NO: 635643 - DNA, 120 bp, Artificial Sequence
  ENSG00000180628_48 (sequence is synthesized)
tgcagtgatgtttttccaataatttaagtaattctcttcctagtataatacagttttcataaataatgtttacttgctttctttatattttcaaataaaattaaaatgctcgagcacttc

SEQ ID NO: 635644 - DNA, 120 bp, Artificial Sequence
  ENSG00000180628_49 (sequence is synthesized)
ctttcagaaagttataaaattaaaaataattattttaaatgctcattcaaatgtgtctgtatacttgctatgcccctttttctataattccaaactgagactgatttttcagagattttt

SEQ ID NO: 635645 - DNA, 120 bp, Artificial Sequence
  ENSG00000180628_50 (sequence is synthesized)
aactttaataattttaaatctagaatcaagtgaaacagatatgttaaatactgagtctagttttcttccatcttatggagcttcatggaataagaaactaatctagtgcaaatgaagatt

SEQ ID NO: 635646 - DNA, 120 bp, Artificial Sequence
  ENSG00000180628_51 (sequence is synthesized)
aaatatttctgggtgatggagagatagtcaacaaatttatttatccatcctctgcacatcagtccactggagcaggagttctacacattaaaaatgtaatgggatcagcctagcattgtt

SEQ ID NO: 635647 - DNA, 120 bp, Artificial Sequence
  ENSG00000180628_52 (sequence is synthesized)
tggtgttcttttgttgtattttttagaatgggggtgggggcctaagtgtccttatgaagctgtggtccacgacaggagcttgttgggggagtaccagggttctgctgctttcctgcatct

SEQ ID NO: 635648 - DNA, 120 bp, Artificial Sequence
  ENSG00000180628_53 (sequence is synthesized)
gagcaacacaacagagatcatcagttttaaatagagtagccctcacaatcaaaatatcatagaatatattgtaaagttatgttgctaattttcctttgaaatataaaatattttaagctt

SEQ ID NO: 635649 - DNA, 120 bp, Artificial Sequence
  ENSG00000180628_54 (sequence is synthesized)
tttgtcaaaagtggtaacatcttaatacaaataaaaacctttttgtggttgtaagatttagcttataaatcattcaaattgaagtgaaagaattaccaggtcattgttaatgacttagtc

SEQ ID NO: 635650 - DNA, 120 bp, Artificial Sequence
  ENSG00000180628_55 (sequence is synthesized)
tattaagaatatatgtatttttgtaaaggaaaagcacttgtagatatttaatcagtacaagatatgtcttttgcagaaataaaatgctgcttagagattctccttaaatattttttattt

SEQ ID NO: 635651 - DNA, 120 bp, Artificial Sequence
  ENSG00000180628_56 (sequence is synthesized)
ttgtgctcaaatgtattttctgttgatctatggaatgttctgtacaaagctgtataattgtactgttgggctagatactttttttttttaatctggacttagccaagtatatttcaccat

SEQ ID NO: 635652 - DNA, 120 bp, Artificial Sequence
  ENSG00000180628_57 (sequence is synthesized)
gttaaaatacagtatctttgttattaaaaattaaattgcataatttattattgtttgtcatctttaatattagtcactgtagattgcagccttcattaaaaatatctcctttaagtacta

SEQ ID NO: 635653 - DNA, 120 bp, Artificial Sequence
  ENSG00000180628_58 (sequence is synthesized)
cacaacgttcccgtttgcttatagttgtcaacgaccatgatctctggacccacactacagtaacaagtttgtcagtcattttcagataaggtgcaaatcaagggatggctttgtccccac

SEQ ID NO: 635654 - DNA, 120 bp, Artificial Sequence
  ENSG00000180628_59 (sequence is synthesized)
cccacgcgcgcgcgctcgcgcaccacgcgccccgcgcggcccgcccggatcgtggcctctcgagagcaagacatgggaaagcggaaccaccaaaaggagtgatgatcaacgatctcatga

SEQ ID NO: 635655 - DNA, 120 bp, Artificial Sequence
  ENSG00000180628_60 (sequence is synthesized)
tactggatgtccacttggatgtcctgaagccacctgaaactcagcatatctacgaatgatcaaatgggatgccagcactcagttatccaagcaagaaatatgctccatgcttgactcttt

SEQ ID NO: 635656 - DNA, 120 bp, Artificial Sequence
  ENSG00000180628_61 (sequence is synthesized)
aaactgggcaaagtcctgctggtctctctctttaatacttctcaaatctgtccctttagtttcatccctctgttactgttctcattcagattcttattacatctcaccaaagccactgca

SEQ ID NO: 635657 - DNA, 120 bp, Artificial Sequence
  ENSG00000180628_62 (sequence is synthesized)
gcacattcttaactgtgtccaagtggtaataattaaaaacagcttactgtctttatcattatcactcttaacccaccctaaaatttcctaaaggtatcccgttgacctcaggatacatta

SEQ ID NO: 635658 - DNA, 120 bp, Artificial Sequence
  ENSG00000180628_63 (sequence is synthesized)
aagctacttagtggtgactggtttctgcctaccacttcctcccctaccacctaacactcacacatacaaatacttggttcaactgtttgctctccttgaaatgaatgcctcctctgtgcc

SEQ ID NO: 635659 - DNA, 120 bp, Artificial Sequence
  ENSG00000180628_64 (sequence is synthesized)
cagctagcagttacccatcctttaaaactcatcccctctaagatgtgccctaccacctgcagatttgggttaagtgtctcaataaaatcttaaatgaataaatgcatggctaataagtta

SEQ ID NO: 635660 - DNA, 120 bp, Artificial Sequence
  ENSG00000180628_65 (sequence is synthesized)
gtcaacgaccatgatctctggacccacactacagtaacaagtttgtcagtcattttcagataaggtgcaaatcaagggatggctttgtccccacttcggcgcagggaaaatatgccagtc

SEQ ID NO: 635661 - DNA, 120 bp, Artificial Sequence
  ENSG00000180628_66 (sequence is synthesized)
attgttatgatgtaaacaaccgaaggggtggacggtgaggataagaagaaccgagataatatttggccagagctacgtgtagcacagggagccagggcggcagctgcacctgcgagcagc

SEQ ID NO: 635662 - DNA, 80 bp, Artificial Sequence
  ENSG00000180628_67 (sequence is synthesized)
ggggcgtggccgggcggcggggcgggcggtgccgccggttggaagtgggtggagttgcccttggaggcggcaccggacct

SEQ ID NO: 635663 - DNA, 120 bp, Artificial Sequence
  ENSG00000180638_0 (sequence is synthesized)
ctggccgtgcaggcgctcaggcgtgcagggtagccagtgccccggccaggaatggacagcctccaggacacagtggccctggaccatgggggctgctgccctgccctcagcaggctggtt

SEQ ID NO: 635664 - DNA, 120 bp, Artificial Sequence
  ENSG00000180638_1 (sequence is synthesized)
cccagaggctttgggactgagatgtggactctctttgccctttctggacccctgttcctgttccaggtgctgacttttatgatctacatcgtgagcactgtgttctgcgggcacctgggc

SEQ ID NO: 635665 - DNA, 120 bp, Artificial Sequence
  ENSG00000180638_2 (sequence is synthesized)
aaggtggagctggcatcggtgaccctcgcggtggcctttgtcaatgtctgcggagtttctgtaggagttggtttgtcttcggcatgtgacaccttgatgtctcagagcttcggcagcccc

SEQ ID NO: 635666 - DNA, 120 bp, Artificial Sequence
  ENSG00000180638_3 (sequence is synthesized)
aacaagaagcacgtgggcgtgatcctgcagcggggcgcgctggtcctgctcctctgctgcctcccttgctgggcgctcttcctcaacacccagcacatcctgctgctcttccggcaggac

SEQ ID NO: 635667 - DNA, 120 bp, Artificial Sequence
  ENSG00000180638_4 (sequence is synthesized)
ccggacgtgtccaggttgacccaggactatgtaatgattttcattccaggacttccggtgatttttctttacaatctgctggcaaaatatttgcaaaatcagggatggctgaaggggcag

SEQ ID NO: 635668 - DNA, 120 bp, Artificial Sequence
  ENSG00000180638_5 (sequence is synthesized)
gaggaggagtccccattccaaaccccgggtttgtccatcctccatccatctcactcacaccttagcagggccagttttcatttatttcagaagatcacctggccccaagtcctcagtggt

SEQ ID NO: 635669 - DNA, 120 bp, Artificial Sequence
  ENSG00000180638_6 (sequence is synthesized)
gtggtgggcaactgtgtcaacggtgtggccaactatgccctggtttctgtgctgaacctgggggtcaggggctccgcctatgccaacatcatctcccagtttgcacagaccgtcttcctc

SEQ ID NO: 635670 - DNA, 120 bp, Artificial Sequence
  ENSG00000180638_7 (sequence is synthesized)
cttctctacattgtgctgaagaagctgcacctggagacgtgggcaggttggtccagccagtgcctgcaggactggggccccttcttctccctggctgtccccagcatgctcatgatctgt

SEQ ID NO: 635671 - DNA, 120 bp, Artificial Sequence
  ENSG00000180638_8 (sequence is synthesized)
gttgagtggtgggcctatgagatcgggagcttcctcatggggctgctcagtgtggtggatctctctgcccaggctgtcatctacgaggtggccactgtgacctacatgattcccttgggg

SEQ ID NO: 635672 - DNA, 120 bp, Artificial Sequence
  ENSG00000180638_9 (sequence is synthesized)
tggcatttccctggtcctgggcaccctgataagcatcctgaaaaatcagctggggcatatttttaccaatgatgaagatgtcattgccctggtgagccaggtcttgccggtttatagtgt

SEQ ID NO: 635673 - DNA, 120 bp, Artificial Sequence
  ENSG00000180638_10 (sequence is synthesized)
ctttcacgtgtttgaggccatctgttgtgtctatggcggagttctgagaggaactgggaagcaggcctttggtgccgctgtgaatgccatcacatattacatcatcggcctaccactggg

SEQ ID NO: 635674 - DNA, 120 bp, Artificial Sequence
  ENSG00000180638_11 (sequence is synthesized)
catccttctgacctttgtggtcagaatgagaatcatgggcctctggctgggcatgctggcctgtgtcttcctggcaactgctgcctttgttgcttatactgcccggctggactggaagct

SEQ ID NO: 635675 - DNA, 120 bp, Artificial Sequence
  ENSG00000180638_12 (sequence is synthesized)
tgctgcagaggaggctaagaaacattcaggccggcagcagcagcagagagcagagagcactgcaaccagacctgggcctgagaaagcagtcctatcttcagtggctacaggcagttcccc

SEQ ID NO: 635676 - DNA, 120 bp, Artificial Sequence
  ENSG00000180638_13 (sequence is synthesized)
tggcattaccttgacaacgtattcaaggtctgagtgccacgtggacttcttcaggactccagaggaggcccacgccctttcagctcctaccagcagactatcagtgaaacagctggtcat

SEQ ID NO: 635677 - DNA, 120 bp, Artificial Sequence
  ENSG00000180638_14 (sequence is synthesized)
ccgccgtggggctgctctgggggcggcgtcagccacactgatggtggggctcacggtcaggatcctagccaccaggcactagcaaagaagcttggaaatagaaagccaggagtggctgtc

SEQ ID NO: 635678 - DNA, 120 bp, Artificial Sequence
  ENSG00000180638_15 (sequence is synthesized)
cccagtatgcaaacacaccacggtctgccctgcaaaaacaccaatggggtctagtgcaggtggacactttgaaccactcctcaaaaaaagaactttggctgattccttgtggtgacactc

SEQ ID NO: 635679 - DNA, 120 bp, Artificial Sequence
  ENSG00000180638_16 (sequence is synthesized)
agaggggtctgaacagacttgacaattctgttctggtcaagctggagttttcttctgtgacttggactgctctacagaagacatcagccaactgcacgagtcagagtccagggattgtca

SEQ ID NO: 635680 - DNA, 120 bp, Artificial Sequence
  ENSG00000180638_17 (sequence is synthesized)
ctattattaataatgtaaatggcttcaaatgggacactgcagataaaatcacaaaaaccactgttatattaaagattacacatttcctgggcacagcctgctgctcaagtctgtcataaa

SEQ ID NO: 635681 - DNA, 120 bp, Artificial Sequence
  ENSG00000180638_18 (sequence is synthesized)
agtgccctaggaggcagggctcatcccacaagttgccatggtagcccctcctcctgccccttactcatcagccaggctgtaccgacacgggctgcccaggcagggggtggctcgctggac

SEQ ID NO: 635682 - DNA, 120 bp, Artificial Sequence
  ENSG00000180638_19 (sequence is synthesized)
gacacagccatcgtcttgcttatgcagcccatgtcactcggattcccttggggctcagcatcggggtctgtgtccgagtggggatggctctgggggctgcggatactgtgcaggccaagc

SEQ ID NO: 635683 - DNA, 120 bp, Artificial Sequence
  ENSG00000180638_20 (sequence is synthesized)
tgtgcagctccgctcaaagtatctcaggttccggggcagaatcctggaaaacccaactcggagctgagtctgcaggtggctgcagggcggtgctgctgagtctgcagttaccaccacaaa

SEQ ID NO: 635684 - DNA, 120 bp, Artificial Sequence
  ENSG00000180638_21 (sequence is synthesized)
aggagggcctgaaggcattgccaggagactatggaggactcacggagctctgacacccctcacctggaggaggtggcttccccccaccccccactctgcctgcaccacctttgcctgggg

SEQ ID NO: 635685 - DNA, 120 bp, Artificial Sequence
  ENSG00000180638_22 (sequence is synthesized)
cggccaatgcatggcagtggagtcagtaatcgcccttgctcctccccagggtcaaacccactggggtctggggattgaaattctgagaggagtgtaggaggagagtgtcttcccgaagaa

SEQ ID NO: 635686 - DNA, 120 bp, Artificial Sequence
  ENSG00000180638_23 (sequence is synthesized)
aatgtaggaatgcattggcttctatcacaaaaatcctgggaatgttcctgagaagggattttggagatgctcggcctaggactggccctcgggaagatgacccgacctttgtcctgtgca

SEQ ID NO: 635687 - DNA, 120 bp, Artificial Sequence
  ENSG00000180638_24 (sequence is synthesized)
gctgagtgctgaacactggtcagctctggataaagcctgatgtcaccgagctgatggcggggcgtctgcactgaacaccttccagcttggtgggggcacgggaaccagctgtcctcatta

SEQ ID NO: 635688 - DNA, 120 bp, Artificial Sequence
  ENSG00000180638_25 (sequence is synthesized)
aaagtgacctggagtgagatggattcttctgcctatacctccacgtgtgggctccctgaacacccccatcgccatgggctcccaagaagtattgcttctggctgcagggctcactgcaat

SEQ ID NO: 635689 - DNA, 120 bp, Artificial Sequence
  ENSG00000180638_26 (sequence is synthesized)
gctgcgacaggaggtgacaggccaaggccagcaggtgactgctctccccagaggccctgtcagctggaagcagctggtttcacataacagagaccccaggcccaggtcccctggatgcag

SEQ ID NO: 635690 - DNA, 120 bp, Artificial Sequence
  ENSG00000180638_27 (sequence is synthesized)
ccccaggcttctccaccgggttcccgggtgggcccgtcttgggtggctggtcagggatgggaagacacagcccacgtggctggacagctgccttcacaggtggaacctgagggccggaga

SEQ ID NO: 635691 - DNA, 120 bp, Artificial Sequence
  ENSG00000180638_28 (sequence is synthesized)
catgaggctgctgagcagagcctctgccaccgctgcctgctgggcagcatttcctgaccctggctcagcccagatgcaggggcctctcttcaggcctcacctgacaagctcttgtttcct

SEQ ID NO: 635692 - DNA, 120 bp, Artificial Sequence
  ENSG00000180638_29 (sequence is synthesized)
cctgtgtgtggcgccagtttgtcaatgtctgcggagtttctgtaggagttggtttgtcttcggcatgtgacaccttgatgtctcaggtgggtggcctcctggagctgggcaggaagccag

SEQ ID NO: 635693 - DNA, 120 bp, Artificial Sequence
  ENSG00000180638_30 (sequence is synthesized)
gcaagggcagagccaattccacaggtgccatggagatggcaggtgggaggggcgcagccaggtgatctgggagcaatgggccctggggtcagctgcccctgccctacctccaaggaccac

SEQ ID NO: 635694 - DNA, 120 bp, Artificial Sequence
  ENSG00000180638_31 (sequence is synthesized)
aggctgtcagggaaacagaccctcccctttgaaagagtctgggccaggagaaaggggtggagatggtggagacagttctctgatctcttgcccccagaggaggtcaccaagtagagaaag

SEQ ID NO: 635695 - DNA, 120 bp, Artificial Sequence
  ENSG00000180638_32 (sequence is synthesized)
ggaagaggtaggctgaccatgagaactggccaaaggtgagaaggacgtggagaaggtgttggaggagggaagtcagacatactagcaatagcctggcctgcagggctgtagctttcacct

SEQ ID NO: 635696 - DNA, 120 bp, Artificial Sequence
  ENSG00000180638_33 (sequence is synthesized)
gtacttcctcctgtttggtgtcatcatcacaatcacgatggtgataaaatgtcttctttcctctaggcaggtggtaaaggtactatttggtgcacaggttggagagtgctgtgataagaa

SEQ ID NO: 635697 - DNA, 120 bp, Artificial Sequence
  ENSG00000180638_34 (sequence is synthesized)
ccatcagaacaagggcaggaatgtgacctcccaggtgatcctgggaggatccagtggagcgtttcagaattctgtgtcaaaaaagaaggctgcgtgttgactggggtggggctgtgcctg

SEQ ID NO: 635698 - DNA, 120 bp, Artificial Sequence
  ENSG00000180638_35 (sequence is synthesized)
tgtttggggccgcccatgggtgtagcaaaccctttttttttttttgtatttgtcctgcctcctctccttcagggtctgctccttcctcctcgcggctctgggggctgcatctcggaatcc

SEQ ID NO: 635699 - DNA, 120 bp, Artificial Sequence
  ENSG00000180638_36 (sequence is synthesized)
tgccggccactcctccgctgcaggggtggacatgggaaccaagtggggcctttgggatgtcttcagccctcccacagccactggccagcctgcctgctgtcttcctgcccccctcgctca

SEQ ID NO: 635700 - DNA, 120 bp, Artificial Sequence
  ENSG00000180638_37 (sequence is synthesized)
ctcctccttctcctgggctgaaccacacccaaaagcttgatccaggactgggctaggtgaccggtgcaatccttagatgcctctcttggttcccactgccctgctggtcttgaggcaggt

SEQ ID NO: 635701 - DNA, 120 bp, Artificial Sequence
  ENSG00000180638_38 (sequence is synthesized)
cgtgcatagtgagctgctttcccaagcactgccacccctggctctcagatatgctgctgaaaggggtgacgggcagtggggggcttgggactccgccgaggtgtcctagctcccatccct

SEQ ID NO: 635702 - DNA, 120 bp, Artificial Sequence
  ENSG00000180638_39 (sequence is synthesized)
atccccaggcccaggcccaggcccctccagcatgaaaggctagggaccgcactgccatggggtttgccaggcccctgtctcttgggaagccacccctcccagggaaaagcagggctgagg

SEQ ID NO: 635703 - DNA, 120 bp, Artificial Sequence
  ENSG00000180638_40 (sequence is synthesized)
gctgttcaggctctgccaccacctgctctgtgacttcgggcaggccaccaattcttctgaaaaacgggagtcactgtgggcaccatcacgcccgggtacaggacgcccagtggctcagct

SEQ ID NO: 635704 - DNA, 120 bp, Artificial Sequence
  ENSG00000180638_41 (sequence is synthesized)
gccccagccaggctgccctgtcctggcctcagcacacctcccacagccactgcaggcagccctggaccttctcctgctgaggccttactgccaatccctctgggagaccagacacaacag

SEQ ID NO: 635705 - DNA, 120 bp, Artificial Sequence
  ENSG00000180638_42 (sequence is synthesized)
ctggacccctggtaaggaggaggagctggggggcaggtagggagtggaggaagctgagaggctgagggtgtctgccttgcaggcaggatccagaaatgtgctcacattttccccagaaac

SEQ ID NO: 635706 - DNA, 120 bp, Artificial Sequence
  ENSG00000180638_43 (sequence is synthesized)
tgcccatgttgactgccaggtccagagtctggggacagcaggatggctcctgaaagctgtctctggacaatccccagtggcagtggggcctgactttgctcagcagcaggcagcccccac

SEQ ID NO: 635707 - DNA, 120 bp, Artificial Sequence
  ENSG00000180638_44 (sequence is synthesized)
acagaaggggtgggtgtgcctcagctggaaacccacaaaagcctgagttggaagatggctccaggacaaatgggacccagagatgcatgaagcctgcagcaccttcgcagggggaagaag

SEQ ID NO: 635708 - DNA, 120 bp, Artificial Sequence
  ENSG00000180638_45 (sequence is synthesized)
gggccggctacccatttcatttccaaaggggaaattgttttaaatacatttattttttctgatcatgaagaggaataggctgggcgtgctgcctcacgcctgttatctcagcactttggg

SEQ ID NO: 635709 - DNA, 87 bp, Artificial Sequence
  ENSG00000180638_46 (sequence is synthesized)
tgggcgtgctgcctcacgcctgttatctcagcactttgggaggccgagcagggacggccaacatggagaaccccccgactctactaa

SEQ ID NO: 635710 - DNA, 62 bp, Artificial Sequence
  ENSG00000180638_47 (sequence is synthesized)
agagaggcagagaatcgcttgaacccgggacgggtaggttgcagtgagccgagatcgcgcca

SEQ ID NO: 635711 - DNA, 120 bp, Artificial Sequence
  ENSG00000180638_48 (sequence is synthesized)
acactgccctattccagtgggaggggggcctggggctttccccttctctccaccatctgtgaaccagctcttgaaaggggtcacttccaacccacctgccatatcctgacctcccgcaca

SEQ ID NO: 635712 - DNA, 120 bp, Artificial Sequence
  ENSG00000180638_49 (sequence is synthesized)
ggggcaggctgtcacctgaagctatctctgtctcccgaaggaccctccccgggcctctcgtgcccaccaggtccagaccctgctcagcttacgccaggactcacacacaggtgcccacaa

SEQ ID NO: 635713 - DNA, 120 bp, Artificial Sequence
  ENSG00000180638_50 (sequence is synthesized)
cctgacgaccaagggtgatatttcactcacagatgttggaattttaaaaattaattagtatcattttaaaattgggagatttcacatcacaatcttatttttggattttctttaaaaatg

SEQ ID NO: 635714 - DNA, 120 bp, Artificial Sequence
  ENSG00000180638_51 (sequence is synthesized)
cacattccaggctgggcgcagtggctcacgtgtgtaatcccagtactttgggaggctgagggcggatcacaaagccaggagttcaagaccaacctgggcaatatggtgaaaccccatctc

SEQ ID NO: 635715 - DNA, 120 bp, Artificial Sequence
  ENSG00000180644_0 (sequence is synthesized)
tggctggtgcaaggagccacagtgggctgcctggggggctgatgccaccattccaggagcctcggtgaagagaggatatccatctgtgtagccgcttctctatacgggattccagctcca

SEQ ID NO: 635716 - DNA, 120 bp, Artificial Sequence
  ENSG00000180644_1 (sequence is synthesized)
tggcagcccgtctgctcctcctgggcatccttctcctgctgctgcccctgcccgtccctgccccgtgccacacagccgcacgctcagagtgcaagcgcagccacaagttcgtgcctggtg

SEQ ID NO: 635717 - DNA, 120 bp, Artificial Sequence
  ENSG00000180644_2 (sequence is synthesized)
catggctggccggggagggtgtggacgtgaccagcctccgccgctcgggctccttcccagtggacacacaaaggttcctgcggcccgacggcacctgcaccctctgtgaaaatgccctac

SEQ ID NO: 635718 - DNA, 120 bp, Artificial Sequence
  ENSG00000180644_3 (sequence is synthesized)
aggagggcaccctccagcgcctgcctctggcgctcaccaactggcgggcccagggctctggctgccagcgccatgtaaccagggccaaagtcagctccactgaagctgtggcccgggatg

SEQ ID NO: 635719 - DNA, 120 bp, Artificial Sequence
  ENSG00000180644_4 (sequence is synthesized)
cggctcgtagcatccgcaacgactggaaggtcgggctggacgtgactcctaagcccaccagcaatgtgcatgtgtctgtggccggctcacactcacaggcagccaactttgcagcccaga

SEQ ID NO: 635720 - DNA, 120 bp, Artificial Sequence
  ENSG00000180644_5 (sequence is synthesized)
agacccaccaggaccagtacagcttcagcactgacacggtggagtgccgcttctacagtttccatgtggtacacactcccccgctgcaccctgacttcaagagggccctcggggacctgc

SEQ ID NO: 635721 - DNA, 120 bp, Artificial Sequence
  ENSG00000180644_6 (sequence is synthesized)
cccaccacttcaacgcctccacccagcccgcctacctcaggcttatctccaactacggcacccacttcatccgggctgtggagctgggtggccgcatatcggccctcactgccctgcgca

SEQ ID NO: 635722 - DNA, 120 bp, Artificial Sequence
  ENSG00000180644_7 (sequence is synthesized)
cctgcgagctggccctggaagggctcacggacaacgaggtggaggactgcctgactgtcgaggcccaggtcaacataggcatccacggcagcatctctgccgaagccaaggcctgtgagg

SEQ ID NO: 635723 - DNA, 120 bp, Artificial Sequence
  ENSG00000180644_8 (sequence is synthesized)
agaagaagaagaagcacaagatgacggcctccttccaccaaacctaccgggagcgccactcggaagtggttggcggccatcacacctccattaacgacctgctgttcgggatccaggccg

SEQ ID NO: 635724 - DNA, 120 bp, Artificial Sequence
  ENSG00000180644_9 (sequence is synthesized)
ggcccgagcagtactcagcctgggtaaactcgctgcccggcagccctggcctggtggactacaccctggaacccctgcacgtgctgctggacagccaggacccgcggcgggaggcactga

SEQ ID NO: 635725 - DNA, 120 bp, Artificial Sequence
  ENSG00000180644_10 (sequence is synthesized)
ccatgccagtgtgtgtgccatggctcagcggtcaccacccaggactgctgccctcggcagaggggcctggcccagctggaggtgaccttcatccaagcatggggcctgtggggggactgg

SEQ ID NO: 635726 - DNA, 120 bp, Artificial Sequence
  ENSG00000180644_11 (sequence is synthesized)
ttcactgccacggatgcctatgtgaagctcttctttggtggccaggagctgaggacgagcaccgtgtgggacaataacaaccccatctggtcagtgcggctggattttggggatgtgctc

SEQ ID NO: 635727 - DNA, 120 bp, Artificial Sequence
  ENSG00000180644_12 (sequence is synthesized)
ctggccacaggggggcccctgaggttgcaggtctgggatcaggactctggcagggacgatgacctccttggcacctgtgatcaggctcccaagtctggttcccatgaggtgagatgcaac

SEQ ID NO: 635728 - DNA, 120 bp, Artificial Sequence
  ENSG00000180644_13 (sequence is synthesized)
ctgaatcatggccacctaaaattccgctatcatgccaggtgcttgccccacctgggaggaggcacctgcctggactatgtcccccaaatgcttctgggggagcctccaggaaaccggagt

SEQ ID NO: 635729 - DNA, 120 bp, Artificial Sequence
  ENSG00000180644_14 (sequence is synthesized)
ggggccgtgtggtgagaacagtgagcttggaaaggaccagtatgcttggactgaaggggttctcacagtgggagccagggctgtcttcgtattcccattagaccaagcttgtccaacccg

SEQ ID NO: 635730 - DNA, 120 bp, Artificial Sequence
  ENSG00000180644_15 (sequence is synthesized)
gaccaagcttgtccaacccgaggcccgcatgcggcccaggatggctttgaatgcggcccaacgcaaattcgcaaactttcttaaaacattatgagtttctttttgctatttttttttttt

SEQ ID NO: 635731 - DNA, 120 bp, Artificial Sequence
  ENSG00000180644_16 (sequence is synthesized)
ttagtgctagtggattttacatgtggcccaacacaattcttcttccaacgtggcccagagaagccaaaagattggatacgcatcagacagatggaaaagggagattcagactgtttttca

SEQ ID NO: 635732 - DNA, 120 bp, Artificial Sequence
  ENSG00000180644_17 (sequence is synthesized)
gggaggtggctgggtttacacgctaatcccgattcaccctgtccaaactgcctaagccctccgccattctcaagccctgcagtcacagctacacagatcacagcttcagccaggagctgg

SEQ ID NO: 635733 - DNA, 120 bp, Artificial Sequence
  ENSG00000180644_18 (sequence is synthesized)
gcagaaggccaagaggctgttcccaccaggctgctcagggctggtcttttaggacccttcccttgagccctctatggtgtggcaaagccttcattgccttaactggagccccatcagctc

SEQ ID NO: 635734 - DNA, 120 bp, Artificial Sequence
  ENSG00000180644_19 (sequence is synthesized)
cagctgctctgtcttctttgcccacaatgctttgcccctgagacaaatggaggcctgtcctgacctgtctcaccatgtacatagcttgataaagggccaataaatatgatgttatggtga

SEQ ID NO: 635735 - DNA, 120 bp, Artificial Sequence
  ENSG00000180644_20 (sequence is synthesized)
acagtgggctgcctggggggctgatgccaccattccaggagcctcggtgaagagaggatatccatctgtgtagccgcttctctatacgggattccagagcccaagtgccccctgtctctg

SEQ ID NO: 635736 - DNA, 120 bp, Artificial Sequence
  ENSG00000180658_0 (sequence is synthesized)
atgggagacaatataacatccatcagagagttcctcctactgggatttcccgttggcccaaggattcagatgctcctctttgggctcttctccctgttctacgtcttcaccctgctgggg

SEQ ID NO: 635737 - DNA, 120 bp, Artificial Sequence
  ENSG00000180658_1 (sequence is synthesized)
aacgggaccatactggggctcatctcactggactccagactgcacgcccccatgtacttcttcctctcacacctggcggtcgtcgacatcgcctacgcctgcaacacggtgccccggatg

SEQ ID NO: 635738 - DNA, 120 bp, Artificial Sequence
  ENSG00000180658_2 (sequence is synthesized)
ctggtgaacctcctgcatccagccaagcccatctcctttgcgggccgcatgatgcagacctttctgttttccacttttgctgtcacagaatgtctcctcctggtggtgatgtcctatgat

SEQ ID NO: 635739 - DNA, 120 bp, Artificial Sequence
  ENSG00000180658_3 (sequence is synthesized)
ctgtacgtggccatctgccaccccctccgatatttggccatcatgacctggagagtctgcatcaccctcgcggtgacttcctggaccactggagtccttttatccttgattcatcttgtg

SEQ ID NO: 635740 - DNA, 120 bp, Artificial Sequence
  ENSG00000180658_4 (sequence is synthesized)
ttacttctacctttacccttctgtaggccccagaaaatttatcactttttttgtgaaatcttggctgttctcaaacttgcctgtgcagatacccacatcaatgagaacatggtcttggcc

SEQ ID NO: 635741 - DNA, 120 bp, Artificial Sequence
  ENSG00000180658_5 (sequence is synthesized)
ggagcaatttctgggctggtgggacccttgtccacaattgtagtttcatatatgtgcatcctctgtgctatccttcagatccaatcaagggaagttcagaggaaagccttccgcacctgc

SEQ ID NO: 635742 - DNA, 120 bp, Artificial Sequence
  ENSG00000180658_6 (sequence is synthesized)
ttctcccacctctgtgtgattggactcgtttatggcacagccattatcatgtatgttggacccagatatgggaaccccaaggagcagaagaaatatctcctgctgtttcacagcctcttt

SEQ ID NO: 635743 - DNA, 120 bp, Artificial Sequence
  ENSG00000180658_7 (sequence is synthesized)
gaaagggctttatgaaaaggattatggcattgtgactgacagtgacctaggaagttacatcattgagcggttcttaacccatctctgcactggtgggacctctgccctcaatggacatga

SEQ ID NO: 635744 - DNA, 120 bp, Artificial Sequence
  ENSG00000180658_8 (sequence is synthesized)
gaattatctgagacatttatttaaaatggagctatctcctgccctacctttaaatgactgatttcagcagatgtgggatgaaattctagaaattgatctcttcaagttgtgctgcagcca

SEQ ID NO: 635745 - DNA, 120 bp, Artificial Sequence
  ENSG00000180658_9 (sequence is synthesized)
ctccacaccaggacaataccccttacaatatcctcattagcttttgatccagtcccatacctcccataatgttttcctcaaaacactggtcccttcagaggactttaaaaataagttcta

SEQ ID NO: 635746 - DNA, 120 bp, Artificial Sequence
  ENSG00000180658_10 (sequence is synthesized)
tagtcaaataagtttgagacttacttcacatcagatgcctctgtctagggatcacaattcatattagcatagtgaatgctgtaaatatttctctaggaaagaataattctataccagctt

SEQ ID NO: 635747 - DNA, 120 bp, Artificial Sequence
  ENSG00000180658_11 (sequence is synthesized)
taagccagtgttttctaaacttatgtgagcacataaaatttcctttgtaatacttagtaacagtttcctggaacaggagatcttgatattaattgactcattgtgaatacttcctacagc

SEQ ID NO: 635748 - DNA, 120 bp, Artificial Sequence
  ENSG00000180658_12 (sequence is synthesized)
ccccttctagggcagaatgatttcttttttccttgcaaagtgagcctctaaagagatgtagttctgagcattatgcctcgatcagtctgtaaaaatccgggttctgtttggatacagacc

SEQ ID NO: 635749 - DNA, 120 bp, Artificial Sequence
  ENSG00000180658_13 (sequence is synthesized)
gtgagggaccctgtctctactgttcaatggtagatcatctaaagaaaataaatgcaatcctgtccttcatcatggatcggcattcctgctatagaagcttcaggagatgacctcattcaa

SEQ ID NO: 635750 - DNA, 120 bp, Artificial Sequence
  ENSG00000180660_0 (sequence is synthesized)
agacaaaccaacagcagcttcttctgacatatacacacgcacactcaccccggacacacactcagcacacttttcctccatttgattaacagtgctgcacacacaatgattacgggaaag

SEQ ID NO: 635751 - DNA, 120 bp, Artificial Sequence
  ENSG00000180660_1 (sequence is synthesized)
cgcaaataaatacggaaaggggtgcttattttgactactggaagagctttgctgggtctcagcgcaacttttgttttttattcctgagaaggtgatctctccatgcggttctctcacaca

SEQ ID NO: 635752 - DNA, 120 bp, Artificial Sequence
  ENSG00000180660_2 (sequence is synthesized)
aggattctttaaaagaggaagagagacaagcagaggggggaggacagtctttcactttaagaacggctgggctcaaagataaaaggaagggaaaagcagcagcagcagcagcagcagcag

SEQ ID NO: 635753 - DNA, 120 bp, Artificial Sequence
  ENSG00000180660_3 (sequence is synthesized)
gcagcagcagcagcagcagcagcagggaaaccaacgctgcagcacttccgaaaggcatttttgatccatttctgagtgttgcggcccgtttctccaccgaagttggctccagctctagca

SEQ ID NO: 635754 - DNA, 120 bp, Artificial Sequence
  ENSG00000180660_4 (sequence is synthesized)
ctctagcagccgcattggatcccacagcttactgcgagactccggtgtacaatccggatctctgccccaacatgattgcggcccaggccaagctggtctaccatctgaataaatactaca

SEQ ID NO: 635755 - DNA, 120 bp, Artificial Sequence
  ENSG00000180660_5 (sequence is synthesized)
acgaaaaatgccaagccaggaaagctgccattgccaaaactatccgggaagtctgcaaagtagtttccgacgtactgaaggaagtggaagtgcaggagccgcggttcatcagctctctca

SEQ ID NO: 635756 - DNA, 120 bp, Artificial Sequence
  ENSG00000180660_6 (sequence is synthesized)
acgagatggacaatcgctacgagggcctcgaggtcatctcccccaccgaatttgaagtggtgctttatctcaaccaaatgggggtgttcaacttcgtggacgatggctcactgcccggct

SEQ ID NO: 635757 - DNA, 120 bp, Artificial Sequence
  ENSG00000180660_7 (sequence is synthesized)
gcgcggtgctgaagttgagcgacgggcgcaagaggagcatgtccctctgggtggaattcattaccgcctccggctacctctcggcgcgcaaaatccggtccaggtttcagacgctggtgg

SEQ ID NO: 635758 - DNA, 120 bp, Artificial Sequence
  ENSG00000180660_8 (sequence is synthesized)
ctcaagcggtagacaaatgtagctaccgggatgtggtaaagatggtggcagacaccagcgaagtgaaactgagaatccgagataggtacgtggtgcagatcacgccggcctttaaatgca

SEQ ID NO: 635759 - DNA, 120 bp, Artificial Sequence
  ENSG00000180660_9 (sequence is synthesized)
ccgggatctggccgaggagtgctgcccactggccacttccccacatcccctggccgggacccaaccgggtggcggaggtcaaggcggaaggtttcaatctcttgtccaaggagtgccact

SEQ ID NO: 635760 - DNA, 120 bp, Artificial Sequence
  ENSG00000180660_10 (sequence is synthesized)
ccttggccggcaagcagagctcggcggagagcgacgcctgggtgctgcagttcgcggaggcagagaacagactgcagatggggggctgcagaaagaagtgcctctccatcctcaaaacct

SEQ ID NO: 635761 - DNA, 120 bp, Artificial Sequence
  ENSG00000180660_11 (sequence is synthesized)
taagggatcgtcaccttgaactgccgggccagcccttgaacaattaccatatgaagactctggtttcctacgagtgtgaaaagcatccccgagagtcggactgggacgagtcttgcctgg

SEQ ID NO: 635762 - DNA, 120 bp, Artificial Sequence
  ENSG00000180660_12 (sequence is synthesized)
tgctgcaacttatctcctgcctgcagtgccggcggtgtccccactactttctaccgaacttagatctgtttcaaggcaaacctcactcagctctggaaaacgctgccaaacaaacgtggc

SEQ ID NO: 635763 - DNA, 120 bp, Artificial Sequence
  ENSG00000180660_13 (sequence is synthesized)
gactggcaagagagatcctgaccaacccgaaaagtttggaaaaactttagaggatgatttaatcaagagccgaaattattacccttctcaaagtccttattaagtgtaaacttctgttca

SEQ ID NO: 635764 - DNA, 120 bp, Artificial Sequence
  ENSG00000180660_14 (sequence is synthesized)
attcctaatattccactccgcagtgcaaacaatctcttcctttaaaaaggaataataatacaatatttaaacatcatctcacccacccccacaaggggagaaaaagtaggggaagcggat

SEQ ID NO: 635765 - DNA, 120 bp, Artificial Sequence
  ENSG00000180660_15 (sequence is synthesized)
ggagaaaaacccaaagccactagtattagaagacttctttccacacgatttcctatctcccttgaaaagtacaccgtaacactccgtaaacagcccagctgtaacgccagaccgagacga

SEQ ID NO: 635766 - DNA, 120 bp, Artificial Sequence
  ENSG00000180660_16 (sequence is synthesized)
acactctgcctaactatcaaaggattatagcaatcctggtgatttaggtgcatctgtctgtgagtaaacacgatttggatatgccatctgaaagaaactgtaatgtatattttgatttgt

SEQ ID NO: 635767 - DNA, 120 bp, Artificial Sequence
  ENSG00000180660_17 (sequence is synthesized)
aacaaatattgtgatctcacattgtctttgaaagtgtggatgttggtgttttgtgatttggtgaacagaacttaaattgccattctggatacttccagacattttccactaacaaagata

SEQ ID NO: 635768 - DNA, 120 bp, Artificial Sequence
  ENSG00000180660_18 (sequence is synthesized)
tcatttaaaggtagatttcttcctggtacttttatctgtctttgaaagtgtctgaactttaaaaagtttacattttgtttcaaatattgcttgttctatttctaacattccataaatata

SEQ ID NO: 635769 - DNA, 120 bp, Artificial Sequence
  ENSG00000180660_19 (sequence is synthesized)
cttgaaatgttatttaaatatattcaaagaaatttgaattcagcttatataataacgcttgaatatctgaattatatatttgaaaaatgcacttgaaatacactggataattacttttgt

SEQ ID NO: 635770 - DNA, 120 bp, Artificial Sequence
  ENSG00000180660_20 (sequence is synthesized)
gatttagattttaatttgttgctggtttttatttaattagatggtaataaatgaagtaaaataaaagttgttgtgtctcactttaaattgtttcctatcacaagatgtaatgatgcattt

SEQ ID NO: 635771 - DNA, 120 bp, Artificial Sequence
  ENSG00000180660_21 (sequence is synthesized)
tgaaaatcaaacccacttgaatatcttaaatattttgagaaatatgctaatgaaatccttaaaaataaaacattggagaaaagctctttctgtataggtccataagataacaatctactc

SEQ ID NO: 635772 - DNA, 120 bp, Artificial Sequence
  ENSG00000180660_22 (sequence is synthesized)
tcagtctctaacttacttgtaagacaattcctttctacaacagaaacaatttaaatctacctttgaaagcttgctcttcttgtagcatttttgataatataagaaaaaaagtctatcatg

SEQ ID NO: 635773 - DNA, 120 bp, Artificial Sequence
  ENSG00000180660_23 (sequence is synthesized)
acagtagagatgactgagttaaaaatctgactaattcagaggaaatgaacttaacaaagtcataatgaaacttcgaaaattatgtatgaaaactaataaaacgatcctttctgaccaata

SEQ ID NO: 635774 - DNA, 120 bp, Artificial Sequence
  ENSG00000180667_0 (sequence is synthesized)
ccgcaccgaagcgtcgcgataactgcaaccacccgcaacttctcgcgatgtttggccccgctaaaggtcgccattttggagtccacccggcgcctggtttccccggcggcgtctcccaac

SEQ ID NO: 635775 - DNA, 120 bp, Artificial Sequence
  ENSG00000180667_1 (sequence is synthesized)
aggctgccgggaccaaagctggccccgcgggtgcctggcctgtgggcagccggaccgacacgatgtggcggctccgctgcaaggccaaggacggcacccatgttttgcaggggctgtcca

SEQ ID NO: 635776 - DNA, 120 bp, Artificial Sequence
  ENSG00000180667_2 (sequence is synthesized)
gccggacccgggtgcgggaactccagggccaaattgccgccatcaccgggatcgcccccggcggtcagcgaatcctcgtcggataccctcccgagtgcctggatctcagcaatggggata

SEQ ID NO: 635777 - DNA, 120 bp, Artificial Sequence
  ENSG00000180667_3 (sequence is synthesized)
ccattctggaagacttgcccatccaatctggtgacatgctgatcattgaagaagaccaaaccaggcccagaagttcacctgcatttactaaacgtggtgcttctagttacgtcagggaaa

SEQ ID NO: 635778 - DNA, 120 bp, Artificial Sequence
  ENSG00000180667_4 (sequence is synthesized)
ctttgcctgtgcttaccagaaccgtggtcccagcagacaactcttgcctctttactagtgtgtactatgtcgtcgaaggaggagtcttgaatccagcttgtgcccctgagatgagacgcc

SEQ ID NO: 635779 - DNA, 120 bp, Artificial Sequence
  ENSG00000180667_5 (sequence is synthesized)
tcatagcacaaattgtagcaagcgatccagacttctatagtgaggcaatactgggaaaaacaaatcaagagtactgtgactggatcaaaagggatgacacttggggaggagcaatagaga

SEQ ID NO: 635780 - DNA, 120 bp, Artificial Sequence
  ENSG00000180667_6 (sequence is synthesized)
tatcgattttgtccaagttttaccaatgtgaaatatgtgtagtggatacacagacagtaagaattgatcgttttggggaagatgcaggatataccaaaagggttctgcttatttatgatg

SEQ ID NO: 635781 - DNA, 120 bp, Artificial Sequence
  ENSG00000180667_7 (sequence is synthesized)
gcatccactatgatccacttcagcgtaacttccctgatccagatacacctcctctgaccattttctcctctaatgatgatattgttcttgtacaagcactggaattagcagatgaagcta

SEQ ID NO: 635782 - DNA, 120 bp, Artificial Sequence
  ENSG00000180667_8 (sequence is synthesized)
gaagaaggagacagtttactgatgtcaaccgcttcaccctgagatgcatggtatgtcagaaaggattaactggacaagcagaagcaagggaacatgccaaggagacaggccataccaact

SEQ ID NO: 635783 - DNA, 120 bp, Artificial Sequence
  ENSG00000180667_9 (sequence is synthesized)
ttggagaagtgtgacctatgcatgaatgagggttgaagcctactacctcacacatccagaaggctctgggttttccaataagctatggtaaccctaaagaacaaaggatacaatgcttga

SEQ ID NO: 635784 - DNA, 120 bp, Artificial Sequence
  ENSG00000180667_10 (sequence is synthesized)
accatccttttaacttaaaaccactaagacactgaaattccttgttaagattaaaattagtgtgcaagtttacagatgtgtgtctacagtggtaaactgtacatacatgcctctttctgc

SEQ ID NO: 635785 - DNA, 120 bp, Artificial Sequence
  ENSG00000180667_11 (sequence is synthesized)
tggagtgacagaataggtgatccttgccacctactgacactgacctgaaggttgagattgagtattataaactagcacccagcagctttaacttgtagaagaaagcatcacattttgggt

SEQ ID NO: 635786 - DNA, 120 bp, Artificial Sequence
  ENSG00000180667_12 (sequence is synthesized)
aatgtggaaggcctcctgtgagtccactgggcatacgattgagattgagtattataaactagcacccagcagctttaacttgtagaagaaagcatcacattttgggtaatgtggaaggcc

SEQ ID NO: 635787 - DNA, 120 bp, Artificial Sequence
  ENSG00000180667_13 (sequence is synthesized)
tcctgtgagtccactggacatttaccacagtgtctccagtaactgagtctttttaaaaactctgaatgagttaagtttctaaattatgaattgattcatcaaatgaagatactcagaatt

SEQ ID NO: 635788 - DNA, 120 bp, Artificial Sequence
  ENSG00000180667_14 (sequence is synthesized)
gtccaaactgattttatattgcaatttggtagacattataaatgtgtgcttaaccactgataagtacatcacaagcaatttttacagggatgagtctcatccttgagaatgttatcacaa

SEQ ID NO: 635789 - DNA, 120 bp, Artificial Sequence
  ENSG00000180667_15 (sequence is synthesized)
aacaggaactgattgtgccctgtttaagatctctagcatataaaacgtagaatgtatgagggaataggtgcctgagcagcttcctgaagctttaaaagaccgttggcctcgtgttttaat

SEQ ID NO: 635790 - DNA, 120 bp, Artificial Sequence
  ENSG00000180667_16 (sequence is synthesized)
gcaattcatgtattggtctttgtcacattggataacattttaaagttaagcagggtacttttttaattgaaattccttgaaattcgagtcctcagttttttcttcatttgcgtaaagttt

SEQ ID NO: 635791 - DNA, 120 bp, Artificial Sequence
  ENSG00000180667_17 (sequence is synthesized)
atcggggggaatttaattttctcagctttttgttaagagcacttcctccaaaaaatttttttcaagtaataatgctctgctttgggttggtttttgtaagattttttgcacacctaaaga

SEQ ID NO: 635792 - DNA, 120 bp, Artificial Sequence
  ENSG00000180667_18 (sequence is synthesized)
gtgtttgcttttgtgctagccttatccctccactaaagttattttaaataatttcacatttctgcaaattagcactttgcttatctgcaatcttttactttgatttttgaagttttaaag

SEQ ID NO: 635793 - DNA, 120 bp, Artificial Sequence
  ENSG00000180667_19 (sequence is synthesized)
caattggagtaatactgttgaatgaactagtttcacttccaaaatagaaaaaattgtaaatccttgccttatgcagctttctcagaattctgcttcttcctagtactagatgtgtagcca

SEQ ID NO: 635794 - DNA, 120 bp, Artificial Sequence
  ENSG00000180667_20 (sequence is synthesized)
tttgcttagtggactaatccgcaaggcacaccctctaaaacttagcttcactacaagatcttccagataaaagttttctacctcttttcttaattattctgatcagggatgctaaattat

SEQ ID NO: 635795 - DNA, 120 bp, Artificial Sequence
  ENSG00000180667_21 (sequence is synthesized)
aatttgttatgtattatctcacataatgtgaagaggcttaatgtgaagttttgttattttggtctcttttttattaagtatctcacttagaaattcagtggtatactttaaagcacttgg

SEQ ID NO: 635796 - DNA, 120 bp, Artificial Sequence
  ENSG00000180667_22 (sequence is synthesized)
atctttttcagcatatctgcctagcaaatgttttaaaattgacatttatttttagcactttcacttggtgaaggtggccatataaaattaaggaacatttgaacaatataagagaaaaga

SEQ ID NO: 635797 - DNA, 120 bp, Artificial Sequence
  ENSG00000180667_23 (sequence is synthesized)
acttttaaggaacaattcacaaagtttgtttgaaattgtcagatgacatttcttgagtaccttttgtgtgcatagttattttagacaatataagctgttatggtcagcataacttaaaag

SEQ ID NO: 635798 - DNA, 120 bp, Artificial Sequence
  ENSG00000180667_24 (sequence is synthesized)
tgtttagttttctattttactgagccttaaaaatagcactgatgagcttatgatacttaatgtttggcaatcataatgtgttcaaattaatgggattgaaaatctctccacacctgactc

SEQ ID NO: 635799 - DNA, 120 bp, Artificial Sequence
  ENSG00000180667_25 (sequence is synthesized)
tcatctgatctggatggttttggttttgtatcttttttacttctcccagaaaatactaaatttaaaactgtaaattaagaatataccactagataacaattatcaaattgagctttatgc

SEQ ID NO: 635800 - DNA, 120 bp, Artificial Sequence
  ENSG00000180667_26 (sequence is synthesized)
ctttctttgctacttcaggacacagagttgacatttgcttactacagctttagatctagaagtttattcgtgcaacaaatatttattgagtaatttatactgtgccaggcatgttttgat

SEQ ID NO: 635801 - DNA, 120 bp, Artificial Sequence
  ENSG00000180667_27 (sequence is synthesized)
atgtttctgtcatatgttttgatatgttccaacataagtttctgtcactttatattcagtatatattttctacagtgggtaaatttaacaaatggaaaggaatagaacactgatatttta

SEQ ID NO: 635802 - DNA, 120 bp, Artificial Sequence
  ENSG00000180667_28 (sequence is synthesized)
cagaattaaaccccttcattgtaagggctttgtttacatattaagtgtcaagtatttattcaggggatcttatttcattgtattttatctgttatctaggttgtccatttaccggttgga

SEQ ID NO: 635803 - DNA, 120 bp, Artificial Sequence
  ENSG00000180667_29 (sequence is synthesized)
cactgatactctgtcaaattcctttcaaaaatgactctttagtctgctgaaatttagcactagtactttagtgttctgatcctggaaaattcaaggtgaagctttatttgtggaccatct

SEQ ID NO: 635804 - DNA, 120 bp, Artificial Sequence
  ENSG00000180667_30 (sequence is synthesized)
gatttaattattgaggattaaaaacctaaacctttgctcattctaaactcaagcttttaagcctcacagaatttacaggggtttgctttttgtttgtttgttttttcattttttactgtg

SEQ ID NO: 635805 - DNA, 120 bp, Artificial Sequence
  ENSG00000180667_31 (sequence is synthesized)
cttattaaactcttggaattagttattaaagggagtaaattctcatcttgggaattttgaaaatctatggacttacaactttcaggaggattaaatgtcttaagttttgtactagagcag

SEQ ID NO: 635806 - DNA, 120 bp, Artificial Sequence
  ENSG00000180667_32 (sequence is synthesized)
aatgaaatctttcctattcattgagtttttgcctgccatagaggaatttttttaaaaattaaaatgacagtttatattagtggcaaagtgaataaagacctcactttcccaccccaccct

SEQ ID NO: 635807 - DNA, 120 bp, Artificial Sequence
  ENSG00000180667_33 (sequence is synthesized)
tcttcctttctcttacttttctttggattaaaggtcaggtgtagtactatgaagattcactcctgaataaagtgatttcagaagctaaaatttaacatacctggaaattttgtgatgtgt

SEQ ID NO: 635808 - DNA, 120 bp, Artificial Sequence
  ENSG00000180667_34 (sequence is synthesized)
tagccaagtgaagacattagtgtgttccatcttttgctaatggttcatggttgatttcttcattgtttcccatgaaattagcatagtcaagtggtacccttgacgcttgactgctggtca

SEQ ID NO: 635809 - DNA, 120 bp, Artificial Sequence
  ENSG00000180667_35 (sequence is synthesized)
gtttgaccctgtttttaacaactaatgtagtcatgccgcttgattattccatgaagtcccagcaaaataataatgaggaattaactaacattatgttatctatctaatttgtctgtgtcc

SEQ ID NO: 635810 - DNA, 120 bp, Artificial Sequence
  ENSG00000180667_36 (sequence is synthesized)
ctaaatgcccatgcctaacttgcttctctagtttattccttctgtggagggattaaaacgtgggtgttgcaagttgccctaagctaaacatagttttcttacatctttttgggaaaaaaa

SEQ ID NO: 635811 - DNA, 120 bp, Artificial Sequence
  ENSG00000180667_37 (sequence is synthesized)
atggaatgggaagtatgcaagattaagcaagagtgatttttttttttttttgacaaatcaggtggccttcctaaacatactaagaattatgttctttcatgtgtggagacacatttgttt

SEQ ID NO: 635812 - DNA, 120 bp, Artificial Sequence
  ENSG00000180667_38 (sequence is synthesized)
gcagcactttaaaaaatatatatggaataaaagtttacatgttggccctctagggatctaattaaggacattaaagtacaattcttgagctactaaccatcagctcttcttaatcaaaga

SEQ ID NO: 635813 - DNA, 120 bp, Artificial Sequence
  ENSG00000180667_39 (sequence is synthesized)
ttgccatcagtgtagagtgtatctattggcacaacattctggtgttttgataacagtagaactcaatttcagtaactattaggagcatggtctgtgccctagcattaaaaatgttactta

SEQ ID NO: 635814 - DNA, 120 bp, Artificial Sequence
  ENSG00000180667_40 (sequence is synthesized)
ttattatgtgaatatcttgtattattatacaatgcagtattcaaatttgtccttgtagtgcagagatgactgataatttctaaaagattcgatccttaaaacttgtttccaagcagactt

SEQ ID NO: 635815 - DNA, 120 bp, Artificial Sequence
  ENSG00000180667_41 (sequence is synthesized)
ataaggaagctgatttttgagtcagaggccttaaacgtgtcatatacaagtggcatcattttaagtccaaagtgaaacacttgatttgaataagctagtttataaactaaagctgttttc

SEQ ID NO: 635816 - DNA, 120 bp, Artificial Sequence
  ENSG00000180667_42 (sequence is synthesized)
ttatgttacagtatttcagcacatttcattccacataaaaagaatattaagtgtccctggttgtgggagagtgtttatttttctcaaaattatctagcattttgcttacagtgctttgaa

SEQ ID NO: 635817 - DNA, 120 bp, Artificial Sequence
  ENSG00000180667_43 (sequence is synthesized)
tgtttgacttaaaattattattgatgttgaattgtagggtgctgatttaggtcttgattcatacacatttaaaggaggttggtaaccccctcatggtagagtgaagggagaaaagggcca

SEQ ID NO: 635818 - DNA, 120 bp, Artificial Sequence
  ENSG00000180667_44 (sequence is synthesized)
agaagacaaagtaccactgataaagaagagattgtcaaatagatgcattcctagtcatgaattacccttttccaaacatttttaaagcaatgcctttgtgtcaactcaacccttcttccc

SEQ ID NO: 635819 - DNA, 120 bp, Artificial Sequence
  ENSG00000180667_45 (sequence is synthesized)
catttcttgtcatagaatgtagcatggccataggtgaaaaagcttatcattaaagtatgaaaccatgaattataagcattttgccatgatgcccttttatacatatgtttttaaaagtac

SEQ ID NO: 635820 - DNA, 120 bp, Artificial Sequence
  ENSG00000180667_46 (sequence is synthesized)
taaccaacatataggagtttaggaatggtgaagatataatttgattaagttgtaggtaaacagaaaggatcatcttaggctcagaatttctaatatgattacatgagtctactttataaa

SEQ ID NO: 635821 - DNA, 120 bp, Artificial Sequence
  ENSG00000180667_47 (sequence is synthesized)
ctggtataggctatgtaattagcccgtaagttacttaaaggaccaggggacctaatttttgtcagttttccagtcacattggtgccattcaggactccagctgtttacaggaaatatgta

SEQ ID NO: 635822 - DNA, 120 bp, Artificial Sequence
  ENSG00000180667_48 (sequence is synthesized)
cttagcagaatagtatttttccttgaaaaaaatttgaattcagcctaaatacagaatgaatatgaatagtttgtgaaaagggttagagaacaacaatattcctatagtttctgtattaat

SEQ ID NO: 635823 - DNA, 120 bp, Artificial Sequence
  ENSG00000180667_49 (sequence is synthesized)
gcagtagagacagaggttcctaacgcaaaaagaaaaccacaagtaaagaccgtcaaattagagctttagaatatgacttgaaaaagtagggatgggcaaaacagcataagaaaatatttt

SEQ ID NO: 635824 - DNA, 120 bp, Artificial Sequence
  ENSG00000180667_50 (sequence is synthesized)
ttcttaatgcagatggacagtgttttcttgttttaaaaatgttttgcctatttgccagcattttttgaagtaatacactgctgctacctggaagatgtctaacttcattttctacaactc

SEQ ID NO: 635825 - DNA, 120 bp, Artificial Sequence
  ENSG00000180667_51 (sequence is synthesized)
ttatgtgattttgccattgtcattaagatgcattgattttatttatgaggtgtatgactttaaatatctaaatgctgtattaagtgacttgtttcaaaggaataaatgaagtgaaaacgt

SEQ ID NO: 635826 - DNA, 120 bp, Artificial Sequence
  ENSG00000180667_52 (sequence is synthesized)
agactattcggtaggcgtcttgagagcgggtgtgccgggtgacgagaaaatgctgcaaagattaacgctctcattcctgaatcccagcagaacctcattagatccataaatgggaacgct

SEQ ID NO: 635827 - DNA, 120 bp, Artificial Sequence
  ENSG00000180667_53 (sequence is synthesized)
gtatcatccgttgcagtcgtcttgaagaaccaaggaggaaaattgcaccagcaaaaaaaaattgagtcatgaaagatgtgaaaagatggaaacattacatataatttattcagaagcaaa

SEQ ID NO: 635828 - DNA, 120 bp, Artificial Sequence
  ENSG00000180694_0 (sequence is synthesized)
actccccgcctggccgtcgctcctccgctgactccgcgcccttctacgggccgtctcccaccctctgagcggacgcagggagtcgatgccgggcgaaccgggcgccatgaagggcagctg

SEQ ID NO: 635829 - DNA, 80 bp, Artificial Sequence
  ENSG00000180694_1 (sequence is synthesized)
cgctgggccgaggcatgcggagcccgggcgggatcctgctccaggcgctgccccggctgctgcagcacgccgccctcccg

SEQ ID NO: 635830 - DNA, 120 bp, Artificial Sequence
  ENSG00000180694_2 (sequence is synthesized)
cctatctggagcgccacggtccgcccgaggcttcggagctgccggagccgggcggggccttggcgggcggccccgggagtggcggcggcggcgtggtggtcggcgtggctgaggtgagaa

SEQ ID NO: 635831 - DNA, 120 bp, Artificial Sequence
  ENSG00000180694_3 (sequence is synthesized)
cggcgtggctgaggtgagaaactggcgctgctgctgcctcggcagcacctgttggtgccggagcctcgtgctggtctgcgtgttggccgccctgtgcttcgcttccctggccctggtccg

SEQ ID NO: 635832 - DNA, 120 bp, Artificial Sequence
  ENSG00000180694_4 (sequence is synthesized)
ccgctaccttcaccacctcctgctgtgggtggagagccttgactcgctgctgggggtcctgctcttcgtcgtgggcttcatcgtggtctctttcccctgcggctggggctacatcgtgct

SEQ ID NO: 635833 - DNA, 120 bp, Artificial Sequence
  ENSG00000180694_5 (sequence is synthesized)
caacgtggccgctggctacctgtacggcttcgtgctgggcatgggtctgatgatggtgggcgtcctcatcggcaccttcatcgcccatgtggtctgcaagcggctcctcaccgcctgggt

SEQ ID NO: 635834 - DNA, 120 bp, Artificial Sequence
  ENSG00000180694_6 (sequence is synthesized)
ggccgccaggatccagagcagcgagaagctgagcgcggttattcgcgtagtggagggaggaagcggcctgaaagtggtggcgctggccagactgacacccataccttttgggcttcagaa

SEQ ID NO: 635835 - DNA, 120 bp, Artificial Sequence
  ENSG00000180694_7 (sequence is synthesized)
tgcagtgttttcgattactgatctctcattacccaactatctgatggcatcttcggttggactgcttcctacccagcttctgaattcttacttgggtaccaccctgcggacaatggaaga

SEQ ID NO: 635836 - DNA, 120 bp, Artificial Sequence
  ENSG00000180694_8 (sequence is synthesized)
tgtcattgcagaacagagtgttagtggatattttgttttttgtttacagattattataagtataggcctcatgttttatgtagttcatcgagctcaagtggaattgaatgcagctattgt

SEQ ID NO: 635837 - DNA, 120 bp, Artificial Sequence
  ENSG00000180694_9 (sequence is synthesized)
agcttgtgaaatggaactgaaatcttctctggttaaaggcaatcaaccaaataccagtggctcttcattctacaacaagaggaccctaacattttctggaggtggaatcaatgttgtatg

SEQ ID NO: 635838 - DNA, 120 bp, Artificial Sequence
  ENSG00000180694_10 (sequence is synthesized)
attctaatgagatacgtgattgtcaagagcctagtgtgctatctaaggtctagcagtcacttcactagtgggcagagacaagttctaattgtattacagcacaaacaaaactgactagtt

SEQ ID NO: 635839 - DNA, 120 bp, Artificial Sequence
  ENSG00000180694_11 (sequence is synthesized)
tttaaattgcacaattttttttttttaaagcaagaatcattttctgggtatgtaagtgtaaatgtagatgcaaatttggctgcacctctttatcatgcctgtattggcctataggtctgc

SEQ ID NO: 635840 - DNA, 120 bp, Artificial Sequence
  ENSG00000180694_12 (sequence is synthesized)
actttagtgttttttaattgttttatttctgtgtatttacgaacagagaaataacccaaatattatttctgcttagtgtctttatttataaagcccatgagtagtttgtatgcatctttc

SEQ ID NO: 635841 - DNA, 120 bp, Artificial Sequence
  ENSG00000180694_13 (sequence is synthesized)
ctacttgtaaagatgagtaaaagtatgcagttttaaatttataatattattggatgttctttgctttggtagtctttccagaaaggataaacagtggtttttgttttgttttgttttatt

SEQ ID NO: 635842 - DNA, 120 bp, Artificial Sequence
  ENSG00000180694_14 (sequence is synthesized)
gtttaagtgggaccacttagcttcccgtttccttactagttaaagaacagacattaattttcagttgaatgtatttttgcaggcatcatattgttacagggccatttacacctattcaca

SEQ ID NO: 635843 - DNA, 120 bp, Artificial Sequence
  ENSG00000180694_15 (sequence is synthesized)
aagcttaaatcctaccttgtgggactgaagtgctcttaatataactgtttattttcactgtgtaatatgcaaagcaaaagggaaattatttggtggatggtagctcaaaattggaactct

SEQ ID NO: 635844 - DNA, 120 bp, Artificial Sequence
  ENSG00000180694_16 (sequence is synthesized)
tgttctaattcagttacattggctttaccctccttagatttttcatcaaagggctgtcccattgcaatcttactaaaacattttgttaaaataaactcttttcctttttatattaataat

SEQ ID NO: 635845 - DNA, 120 bp, Artificial Sequence
  ENSG00000180694_17 (sequence is synthesized)
taggcttttaaataaagatgttattcctttaaaatggtgggcttaccatcattgaagatgtcactcaggtggccttgtttgatcaaaacgccttttttaaaaaccaagctttaaaaacat

SEQ ID NO: 635846 - DNA, 120 bp, Artificial Sequence
  ENSG00000180694_18 (sequence is synthesized)
gtttataatttcatgaagtacatatatattgttcccatagtcttcagctttaaaactataaatatgcccaaattttgttatttgccctactttaagtaggtttattgtgtttgttttttc

SEQ ID NO: 635847 - DNA, 120 bp, Artificial Sequence
  ENSG00000180694_19 (sequence is synthesized)
tgtctcaattctttctcttgtagcatgaatcaaatgtatttattaatagcacttatgactatagaatataatttggcatatgattcatattacatatgtattcgttttatttttaaaata

SEQ ID NO: 635848 - DNA, 120 bp, Artificial Sequence
  ENSG00000180694_20 (sequence is synthesized)
ttacaaatgaggttatagatattaatgcaaattttctggtaggtatctctttttttgctatgatgattccaacttatcagagacctcccatttgccttttcattacggtgaaagctttgc

SEQ ID NO: 635849 - DNA, 120 bp, Artificial Sequence
  ENSG00000180694_21 (sequence is synthesized)
cctcatctactaaagtacaaaggaattctttggaagcagattattctagtcttatgctagagatgaatttgatcattttaatgtgtgatctttttgctctatcaggtataattgttttcc

SEQ ID NO: 635850 - DNA, 120 bp, Artificial Sequence
  ENSG00000180694_22 (sequence is synthesized)
tttcctttataatgggtaagttttctcacctttgagtaacagtaaagttcatttatatgtccatacctagaagaccagtgcaaatactttgagagcacctgggtctacaggacataattg

SEQ ID NO: 635851 - DNA, 120 bp, Artificial Sequence
  ENSG00000180694_23 (sequence is synthesized)
gcatctaaatcctcatttcttgctattagtaggaaaacagatatagtattgtaatacccttattctttttgaatcctaattactcatttcggttttttttctctcttttgaatctagttg

SEQ ID NO: 635852 - DNA, 120 bp, Artificial Sequence
  ENSG00000180694_24 (sequence is synthesized)
ctggttttcgtttaatgattttagtttaacaatcccaaccaacaatacatttgatttatttttttctgtctaacctgacaacctttttcttgtgcttcttgtttgttggttagtttttgt

SEQ ID NO: 635853 - DNA, 120 bp, Artificial Sequence
  ENSG00000180694_25 (sequence is synthesized)
gaaaggaatcattgtttaagatcactgttttcatacttgttttacacttcacgtattttgaagtacatttatttactaagcatttgtgacttgaataatttcaccaaatgaatacatttt

SEQ ID NO: 635854 - DNA, 120 bp, Artificial Sequence
  ENSG00000180694_26 (sequence is synthesized)
ggtagtttgtaatgagttcttctaattgttacactttgcttggtacttaacaataaatatgtaaaggtaaaagaaataattttctgtattctgccaatcttaattttatataataaatca

SEQ ID NO: 635855 - DNA, 120 bp, Artificial Sequence
  ENSG00000180694_27 (sequence is synthesized)
tccatttttttcttaaaatagtatggattgactgtttctaaaataccaatctgtggctgtggtttttcttttcttcagcatttccagcatccaagtaaacaatagtcccttatagtcctg

SEQ ID NO: 635856 - DNA, 120 bp, Artificial Sequence
  ENSG00000180694_28 (sequence is synthesized)
ctacttgatgggtaaatttggttgctgggtttttaagttgcactcacaataaatcgtgcaaagcattgtcatgccttatttactccatttttaatcctgcatcccagatttatggcagca

SEQ ID NO: 635857 - DNA, 120 bp, Artificial Sequence
  ENSG00000180694_29 (sequence is synthesized)
acacatatctacaggatacttttatgttgtccaaatattgctgtcagtcatatgtacttataaaatgtctccactcatgtatatttatagaaatgaaatgtcaaatttctcagactgtta

SEQ ID NO: 635858 - DNA, 120 bp, Artificial Sequence
  ENSG00000180694_30 (sequence is synthesized)
aagtgcagtataaagttgcttaatgcacacttaaaaatgatatataatttctgaatcctatgaaatatgtgttcttttttaattctttgggagttttcttaagttttacatgttttttgg

SEQ ID NO: 635859 - DNA, 120 bp, Artificial Sequence
  ENSG00000180694_31 (sequence is synthesized)
tttattgttaatgattttgtttactctttgccaaattttgtcatgtaggttattttacaatagcacctttaaaaaaaatgtatatgctaatttactaagcatattcatgtccatttttat

SEQ ID NO: 635860 - DNA, 120 bp, Artificial Sequence
  ENSG00000180694_32 (sequence is synthesized)
ttgatcatctgatttgtgaaataacttgaaatttgtactgtttggtttgtgaaaataatattaccaaatctctgtcattagaatgtgtactttatgttcagaagtgactgtgggtttatt

SEQ ID NO: 635861 - DNA, 120 bp, Artificial Sequence
  ENSG00000180694_33 (sequence is synthesized)
cagagccagccattctctcccttgatgcactttgtaaccagctacacatgcttttaggtggcttttccctgatagggtcaagtatatgactataaaacatttttcttgtgaagctattaa

SEQ ID NO: 635862 - DNA, 120 bp, Artificial Sequence
  ENSG00000180694_34 (sequence is synthesized)
gttcattagttactcttatttccccttgttgtaactaagtggtgcaggtataagcatatccccagcattcctgtgtgtgtgaatgtgcactgctgatttggactgttcttgagaaaggtg

SEQ ID NO: 635863 - DNA, 120 bp, Artificial Sequence
  ENSG00000180694_35 (sequence is synthesized)
ctgtgacatatgtcaatatttgttagctctggggatatctttagaatgcttgagaaagttgctaggtgtgtgccacattggtgcaggtaaatccatgctgttcacagccaagcagcattt

SEQ ID NO: 635864 - DNA, 120 bp, Artificial Sequence
  ENSG00000180694_36 (sequence is synthesized)
gcagagaaaaggagagttttacatagaccccaggaaaaacagtactaacctggttgatggccttggtggtggaattttgtttcagccagaggctactcattatatcagaatgatgttcag

SEQ ID NO: 635865 - DNA, 120 bp, Artificial Sequence
  ENSG00000180694_37 (sequence is synthesized)
tataacactatctgatttttagattggtcgatttctgttgtaatcaagtatttaggatgtaatctttttaaagtcattgctttaatctgaaaagccattagaagggagaggaatcactgt

SEQ ID NO: 635866 - DNA, 120 bp, Artificial Sequence
  ENSG00000180694_38 (sequence is synthesized)
tccacaggatatttaaaactcaggagttcaaataacctcacatattgaacataaactgttaacttattccacaactaaattctaacctgatacttatgaattgcaaagtgattgctgcaa

SEQ ID NO: 635867 - DNA, 120 bp, Artificial Sequence
  ENSG00000180694_39 (sequence is synthesized)
actttttctaaggtggctgaagatttaaaatagatcattctaaagggaaatcagtaaaatgtcttgataattggtatccaaatcacttgtgtgcctgagaaaataaaaggtaatatttta

SEQ ID NO: 635868 - DNA, 120 bp, Artificial Sequence
  ENSG00000180694_40 (sequence is synthesized)
aattcatgaaagctgagcaaattaaagatgagtctttaaagataacacaaaaagttcccagccaagatggacgaataggaacaactctggtctgcagttcccagtgagaccaatgcagaa

SEQ ID NO: 635869 - DNA, 120 bp, Artificial Sequence
  ENSG00000180694_41 (sequence is synthesized)
ggaggaggatgaagctcagaaagttcagttgacctgagaaaagtcacacagacagtgactagcaaaactgcaagcggactaatacttacctgattcgaagtctcctgatggttttgctat

SEQ ID NO: 635870 - DNA, 63 bp, Artificial Sequence
  ENSG00000180694_42 (sequence is synthesized)
gaaagagaagatgttggctttcctcttttctatctgcaagacccctgcctagacatatctgtg

SEQ ID NO: 635871 - DNA, 120 bp, Artificial Sequence
  ENSG00000180694_43 (sequence is synthesized)
gatctctcttgcttttccccacatatacaaccagaaaacatgcattgaaaataacaattgaatgaaatccctttataaaatgtttaattggccaaccaggtgaccaaatgtacctgaagc

SEQ ID NO: 635872 - DNA, 120 bp, Artificial Sequence
  ENSG00000180694_44 (sequence is synthesized)
atgtcatccccgcacgtagcaacgcgcggaggggagcgggctctgcccccggcacggccatcggccacggctggagatagcctggggacccctaccagccccacgacggccccaagtgca

SEQ ID NO: 635873 - DNA, 120 bp, Artificial Sequence
  ENSG00000180694_45 (sequence is synthesized)
ggatggaggagggcgtccggacagagagaagggacgaatggcagggcgtttgtcctgagcagccaaagcgcaagctatctcagctcagttcagaacccttgctggagaggtggtgcagtc

SEQ ID NO: 635874 - DNA, 120 bp, Artificial Sequence
  ENSG00000180697_0 (sequence is synthesized)
actgcctgtccggggaccctggggctgctgttcctgtggtaatgtggcagctgggaccatggccagcttcagtctgcctggcgtcacataagccagcccacagggtcctgcagcttgtcc

SEQ ID NO: 635875 - DNA, 120 bp, Artificial Sequence
  ENSG00000180697_1 (sequence is synthesized)
tttctggctggaagctctgggcatagcctgggactgggtctttccagagagggctgtagccagggccctgccagcctcgggggccacagcggctctcacaccagcatcttgctggatagg

SEQ ID NO: 635876 - DNA, 120 bp, Artificial Sequence
  ENSG00000180697_2 (sequence is synthesized)
agcagttccaggactctctgatcacacctgatcatcgtcactgccagaattcaaggtagctgcctgccatggctgagaggtgtgcctcagcttaacccactcagtgatggactccagtgc

SEQ ID NO: 635877 - DNA, 120 bp, Artificial Sequence
  ENSG00000180697_3 (sequence is synthesized)
cctgcagccctgggaggtcacaaacgactcgaacacggtgcagctgcccctgcagaagaggttggtgccaacgaggtccatcccagtccgagggctcggggctccagattttacatcacc

SEQ ID NO: 635878 - DNA, 120 bp, Artificial Sequence
  ENSG00000180697_4 (sequence is synthesized)
gtctggctcctgcccggcaccactaccagcaccatcaccacctccactgtgcaacctttgggaactcaagttgctgagtcgccgcttccccagacaactcgccttcctgctgtccacccg

SEQ ID NO: 635879 - DNA, 120 bp, Artificial Sequence
  ENSG00000180697_5 (sequence is synthesized)
gcacactgaggctgcctgcccccagaccagcaaggcggcagggctgtccaggggcctctcctagagactgggctctgtgtgtggccttcttattggccaccttctccttggcaggctctg

SEQ ID NO: 635880 - DNA, 120 bp, Artificial Sequence
  ENSG00000180697_6 (sequence is synthesized)
ggcagtagccacagagactttagtaaagggatcagccttcatggccatcatagaccgggagtggtttgtggtccccccaaaaagctacaccaagctaataaactgcgagttcccacccca

SEQ ID NO: 635881 - DNA, 120 bp, Artificial Sequence
  ENSG00000180697_7 (sequence is synthesized)
tgtgaggattaaaaagagcatgaatgtcacttctaggactttatcccaaatgtacactcacacaggcaagtgggccccatttcactgacccatgaggaaataccagcccagggaaggaga

SEQ ID NO: 635882 - DNA, 120 bp, Artificial Sequence
  ENSG00000180697_8 (sequence is synthesized)
gcagagagagctgctcaaggccatgcgattgctgcacacaggacacccgcacacgtcatgttgcaaggcctcctctgccaatcaagataccgggtgaaacaccacactagaaacctacag

SEQ ID NO: 635883 - DNA, 120 bp, Artificial Sequence
  ENSG00000180697_9 (sequence is synthesized)
gccagcttgcctcttctcacggtactttctggaggtcctctgaactcgggacactccagcagtacctgaagatggacagcagcatggggagcatctaccaatttggctccagcagccact

SEQ ID NO: 635884 - DNA, 120 bp, Artificial Sequence
  ENSG00000180697_10 (sequence is synthesized)
tcccctccctttgcccacccaccagaggaggatgcctgccaggccttcagcccatgtgattccgataggctcccctacgcctccaccacctgctgggataggcatgtggcctaggcctgt

SEQ ID NO: 635885 - DNA, 120 bp, Artificial Sequence
  ENSG00000180697_11 (sequence is synthesized)
ccaatcacagcctcccagcccttcctgccacctgactggctcagagacgggcacttgagacccagaccgggccaatggatgcctccttgggactttggctggaatcagtggcaaaggaac

SEQ ID NO: 635886 - DNA, 120 bp, Artificial Sequence
  ENSG00000180697_12 (sequence is synthesized)
cctctctagctttgggttggagttgctgaactggtgcagctgagagtgaggctatggcagagaaaagctaaaccacagctggaggtgtgatctgaaccccaagatctatgcctgtccgag

SEQ ID NO: 635887 - DNA, 120 bp, Artificial Sequence
  ENSG00000180697_13 (sequence is synthesized)
gcagaggcacctggccttttcagtcacaggcacagacccactccctcccagctgaagggagtctgaattgggttgggtttgtcctcgccgaggctaccactgtgtgccattgggtggccc

SEQ ID NO: 635888 - DNA, 120 bp, Artificial Sequence
  ENSG00000180697_14 (sequence is synthesized)
acagtcttagcttccttgcctgcctaggggtgagcaggggctgggatgggatgcagaggcccacctggctccaagaggaacacctgtgactccaaacactgggacagatgctcagccctg

SEQ ID NO: 635889 - DNA, 120 bp, Artificial Sequence
  ENSG00000180697_15 (sequence is synthesized)
cagccgcgggagtggaataggggaagggggctggtgccaacactgctcccgccggtgtctcagaggcagaagacatagagctgagatcttgggttttcatattaaaaatgtaagctcctc

SEQ ID NO: 635890 - DNA, 120 bp, Artificial Sequence
  ENSG00000180708_0 (sequence is synthesized)
atggagcgggtcaatgagactgtggtgagagaggtcatcttcctcggcttctcatccctggccaggctgcagcagctgctctttgttatcttcctgctcctctacctgttcactctgggc

SEQ ID NO: 635891 - DNA, 120 bp, Artificial Sequence
  ENSG00000180708_1 (sequence is synthesized)
accaatgcaatcatcatttccaccattgtcctggacagggcccttcatatccccatgtacttcttccttgccatcctctcttgctctgagatttgctacaccttcatcattgtacccaag

SEQ ID NO: 635892 - DNA, 120 bp, Artificial Sequence
  ENSG00000180708_2 (sequence is synthesized)
atgctggttgacctgctgtcccagaagaagaccatttctttcctgggctgtgccatccaaatgttttccttcctcttccttggctgctctcactcctttctgctggcagtcatgggttat

SEQ ID NO: 635893 - DNA, 120 bp, Artificial Sequence
  ENSG00000180708_3 (sequence is synthesized)
actgttgcacagatcatcacatccttggtatttcacctgcctttttattcctccaatcaactacatcacttcttctgtgacattgctcctgtcctcaagctggcatctcaccataaccac

SEQ ID NO: 635894 - DNA, 120 bp, Artificial Sequence
  ENSG00000180708_4 (sequence is synthesized)
tttagtcagattgtcatcttcatgctctgtacattggtcctggctatccccttattgttgatcttggtgtcctatgttcacatcctctctgccatacttcagtttccttccacactgggt

SEQ ID NO: 635895 - DNA, 120 bp, Artificial Sequence
  ENSG00000180708_5 (sequence is synthesized)
aggtgcaaagctttttctacctgtgtatctcacctcattattgtcactgtccactatggctgtgcctcctttatctacttaaggcctcagtccaactactcctcaagccaggatgctcta

SEQ ID NO: 635896 - DNA, 120 bp, Artificial Sequence
  ENSG00000180708_6 (sequence is synthesized)
atatcagtatcctacactattataactccattgttcaacccaatgatttatagcttgagaaataaagagttcaaatcagctctttgtaaaattgtgagaagaacaatttccctgttgtaa

SEQ ID NO: 635897 - DNA, 120 bp, Artificial Sequence
  ENSG00000180708_7 (sequence is synthesized)
tttgactttggtctgggtctaagaccatagaccatcatcacatctctacctctgagtaaatatcagtagcctgtgacccattttgacctttttccattctacacgtcaacttgaattctg

SEQ ID NO: 635898 - DNA, 120 bp, Artificial Sequence
  ENSG00000180708_8 (sequence is synthesized)
tctcttgtagcctctatgtccctggcttctcttagggagaggcagagaaaaatggaagcactccatgaataacagacatccatcttgcttggactaagcatctacaaccttgagaaactg

SEQ ID NO: 635899 - DNA, 120 bp, Artificial Sequence
  ENSG00000180708_9 (sequence is synthesized)
ggcaatggacaggaaatgaaaataaacatctatcctctggcaggacttatgttttcacatttcagggatttcttttggtgctgactcctcttctctccctaattgtctcctgatgatgta

SEQ ID NO: 635900 - DNA, 87 bp, Artificial Sequence
  ENSG00000180708_10 (sequence is synthesized)
gagaagaacaatttccctgttgtaaaattaatcttgattctggccaggtgcagtttctcacgactgtaatcccagcattttggactt

SEQ ID NO: 635901 - DNA, 82 bp, Artificial Sequence
  ENSG00000180708_11 (sequence is synthesized)
tgaaatcctatctctaccaaaaaatatacaaattaaccggatgctgtggtgggctcctgtaatctcagctactcaggagcgt

SEQ ID NO: 635902 - DNA, 120 bp, Artificial Sequence
  ENSG00000180708_12 (sequence is synthesized)
gtctcaaaaaaaaaaaaaaaaaaaaatcttgattctgctctttccaaaccgtaaaccacaagttatacaggaaaaaattcccagaacacaaatgatcaagcaattgagcattatgttcag

SEQ ID NO: 635903 - DNA, 120 bp, Artificial Sequence
  ENSG00000180708_13 (sequence is synthesized)
cattatgttcaggaacatagatcatttcccgtcatctccaaatataaaatttagaaaaacacaactgcttgccacactcacatgaattattgcctattgaaggttttttttcaattgatt

SEQ ID NO: 635904 - DNA, 120 bp, Artificial Sequence
  ENSG00000180708_14 (sequence is synthesized)
aaaaaataacagatggctattatggggaagcatatgtatgttcagaattttaggctgtagtaaatactgtcacccaatctcagccaggctgaaaactaaccctgcaaaatgtggcacaac

SEQ ID NO: 635905 - DNA, 120 bp, Artificial Sequence
  ENSG00000180708_15 (sequence is synthesized)
cctaactctctgttctagggactcaggaagcttctatctctaggatttttctagatgttttctggacctcagtcttccaaaatcatcagatcacaattgttaaatgagatacttgttaag

SEQ ID NO: 635906 - DNA, 120 bp, Artificial Sequence
  ENSG00000180708_16 (sequence is synthesized)
cgtcattacaatgtttgatgcataagatatatccaaataatgttcaagttagaaaattatgaaaagttatccatttccatgcttctagtgtattaatgaaatacgatcatttctaatttt

SEQ ID NO: 635907 - DNA, 120 bp, Artificial Sequence
  ENSG00000180708_17 (sequence is synthesized)
gtatgcagaggcatacatctaaatttggtcagcataccctgaagatattcacaggggaatggattaatgacaagacctaaaatcaccctaaatgaccaggcaaggcaagctaaagattaa

SEQ ID NO: 635908 - DNA, 120 bp, Artificial Sequence
  ENSG00000180708_18 (sequence is synthesized)
gtcaatttcactaaatattcaccaagtggaaagctttgcatatggaacaatcaatctgttctccatgcaactcaagagtttgcatgtacatttgagaccagaacttgaatttgatgtttt

SEQ ID NO: 635909 - DNA, 120 bp, Artificial Sequence
  ENSG00000180708_19 (sequence is synthesized)
cattctctgtcctttctgcaggagtgatagcaaaaaggaagtttcacaatagtgatgatttctcacattataactcttttcaagatccacctgtcaataaaagtctcctgattgattaat

SEQ ID NO: 635910 - DNA, 120 bp, Artificial Sequence
  ENSG00000180708_20 (sequence is synthesized)
tttgtttctaagttttttccttttcttccaccagtctgttcatcaatgacatataccttttaggggttgaagcgggagggaaggaagtggaatgttttgttcacaggccctgtttattgt

SEQ ID NO: 635911 - DNA, 120 bp, Artificial Sequence
  ENSG00000180708_21 (sequence is synthesized)
aggacatctgccaagaatgtaagtcaattgcatttcttccatttctttgaagcttgaaacttgctgctgatgggggttgaaaatcagagattgatgcaaaattaatttcagtggccccca

SEQ ID NO: 635912 - DNA, 120 bp, Artificial Sequence
  ENSG00000180708_22 (sequence is synthesized)
agttgtcttttccttggccatattgcccaccccaggcctctagcatatcaagttgattcatgaaaagtaaatgagctaagtttaatgtgttaattatttatagctgcattgtgtgctaca

SEQ ID NO: 635913 - DNA, 120 bp, Artificial Sequence
  ENSG00000180708_23 (sequence is synthesized)
gtttaacaatgttacttcatctaaactttagagcacactgggaagtatatattataatcgacattttgtagatgagaaaaatgacactcagacaaataaaatgacttgcctactaatgag

SEQ ID NO: 635914 - DNA, 120 bp, Artificial Sequence
  ENSG00000180720_0 (sequence is synthesized)
tttctctccccttcctccccagacacggcctacccacccctggcaaccaacatggccaacttcacacctgtcaatggcagctcgggcaatcagtccgtgcgcctggtcacgtcatcatcc

SEQ ID NO: 635915 - DNA, 120 bp, Artificial Sequence
  ENSG00000180720_1 (sequence is synthesized)
cacaatcgctatgagacggtggaaatggtcttcattgccacagtgacaggctccctgagcctggtgactgtcgtgggcaacatcctggtgatgctgtccatcaaggtcaacaggcagctg

SEQ ID NO: 635916 - DNA, 120 bp, Artificial Sequence
  ENSG00000180720_2 (sequence is synthesized)
cagacagtcaacaactacttcctcttcagcctggcgtgtgctgatctcatcataggcgccttctccatgaacctctacaccgtgtacatcatcaagggctactggcccctgggcgccgtg

SEQ ID NO: 635917 - DNA, 120 bp, Artificial Sequence
  ENSG00000180720_3 (sequence is synthesized)
gtctgcgacctgtggctggccctggactacgtggtgagcaacgcctccgtcatgaaccttctcatcatcagctttgaccgctacttctgcgtcaccaagcctctcacctaccctgcccgg

SEQ ID NO: 635918 - DNA, 120 bp, Artificial Sequence
  ENSG00000180720_4 (sequence is synthesized)
cgcaccaccaagatggcaggcctcatgattgctgctgcctgggtactgtccttcgtgctctgggcgcctgccatcttgttctggcagtttgtggtgggtaagcggacggtgcccgacaac

SEQ ID NO: 635919 - DNA, 120 bp, Artificial Sequence
  ENSG00000180720_5 (sequence is synthesized)
cagtgcttcatccagttcctgtccaacccagcagtgacctttggcacagccattgctgccttctacctgcctgtggtcatcatgacggtgctgtacatccacatctccctggccagtcgc

SEQ ID NO: 635920 - DNA, 120 bp, Artificial Sequence
  ENSG00000180720_6 (sequence is synthesized)
cccactaatgaagcagagcgtcaagaagcccccgcccggggaggccgcccgggaggagctgcgcaatggcaagctggaggaggcccccccgccagcgctgccaccgccaccgcgccccgt

SEQ ID NO: 635921 - DNA, 120 bp, Artificial Sequence
  ENSG00000180720_7 (sequence is synthesized)
ggctgataaggacacttccaatgagtccagctcaggcagtgccacccagaacaccaaggaacgcccagccacagagctgtccaccacagaggccaccacgcccgccatgcccgcccctcc

SEQ ID NO: 635922 - DNA, 120 bp, Artificial Sequence
  ENSG00000180720_8 (sequence is synthesized)
cctgcagccgcgggccctcaacccagcctccagatggtccaagatccagattgtgacgaagcagacaggcaatgagtgtgtgacagccattgagattgtgcctgccacgccggctggcat

SEQ ID NO: 635923 - DNA, 120 bp, Artificial Sequence
  ENSG00000180720_9 (sequence is synthesized)
gcgccctgcggccaacgtggcccgcaagttcgccagcatcgctcgcaaccaggtgcgcaagaagcggcagatggcggcccgggagcgcaaagtgacacgaacgatctttgccattctgct

SEQ ID NO: 635924 - DNA, 120 bp, Artificial Sequence
  ENSG00000180720_10 (sequence is synthesized)
agccttcatcctcacctggacgccctacaacgtcatggtcctggtgaacaccttctgccagagctgcatccctgacacggtgtggtccattggctactggctctgctacgtcaacagcac

SEQ ID NO: 635925 - DNA, 120 bp, Artificial Sequence
  ENSG00000180720_11 (sequence is synthesized)
catcaaccctgcctgctatgctctgtgcaacgccacctttaaaaagaccttccggcacctgctgctgtgccagtatcggaacatcggcactgccaggtaggcaggcaggagtgccctagg

SEQ ID NO: 635926 - DNA, 120 bp, Artificial Sequence
  ENSG00000180730_0 (sequence is synthesized)
ctcggagaccgtcctgcgctctctggagacgcgctgtccgcgcccagggtggtgccatgtggggcgctcgccgctcgtccgtctcctcatcctggaacgccgcttcgctcctgcagctgc

SEQ ID NO: 635927 - DNA, 120 bp, Artificial Sequence
  ENSG00000180730_1 (sequence is synthesized)
tgctggctgcgctgctggcggcgggggcgagggccagcggcgagtactgccacggctggctggacgcgcagggcgtctggcgcatcggcttccagtgtcccgagcgcttcgacggcggcg

SEQ ID NO: 635928 - DNA, 120 bp, Artificial Sequence
  ENSG00000180730_2 (sequence is synthesized)
acgccaccatctgctgcggcagctgcgcgttgcgctactgctgctccagcgccgaggcgcgcctggaccagggcggctgcgacaatgaccgccagcagggcgctggcgagcctggccggg

SEQ ID NO: 635929 - DNA, 120 bp, Artificial Sequence
  ENSG00000180730_3 (sequence is synthesized)
cggacaaagacggccccgacggctcggcagtgcccatctacgtgccgttcctcattgttggctccgtgtttgtcgcctttatcatcttggggtccctggtggcagcctgttgctgcagat

SEQ ID NO: 635930 - DNA, 120 bp, Artificial Sequence
  ENSG00000180730_4 (sequence is synthesized)
gtctccggcctaagcaggatccccagcagagccgagccccagggggtaaccgcttgatggagaccatccccatgatccccagtgccagcacctcccgggggtcgtcctcacgccagtcca

SEQ ID NO: 635931 - DNA, 120 bp, Artificial Sequence
  ENSG00000180730_5 (sequence is synthesized)
gcacagctgccagttccagctccagcgccaactcaggggcccgggcgcccccaacaaggtcacagaccaactgttgcttgccggaagggaccatgaacaacgtgtatgtcaacatgccca

SEQ ID NO: 635932 - DNA, 120 bp, Artificial Sequence
  ENSG00000180730_6 (sequence is synthesized)
cgaatttctctgtgctgaactgtcagcaggccacccagattgtgccacatcaagggcagtatctgcatcccccatacgtggggtacacggtgcagcacgactctgtgcccatgacagctg

SEQ ID NO: 635933 - DNA, 120 bp, Artificial Sequence
  ENSG00000180730_7 (sequence is synthesized)
tgccacctttcatggacggcctgcagcctggctacaggcagattcagtcccccttccctcacaccaacagtgaacagaagatgtacccagcggtgactgtataaccgagagtcactggtg

SEQ ID NO: 635934 - DNA, 120 bp, Artificial Sequence
  ENSG00000180730_8 (sequence is synthesized)
ggttcctttactgaagggagacgaaggcaggggtggattctcgaggtggaagtccgcacatgtcggtggtatttatggcacgattcctttggatggcttcatttgcccccagactgtatg

SEQ ID NO: 635935 - DNA, 120 bp, Artificial Sequence
  ENSG00000180730_9 (sequence is synthesized)
aaaacatctccgaattagcatttctggatatgtttcatccagggtatcattgatttatgatggaaaaccggcctcagctggagatgactgtgatgttgctgatgggtgtataacaaatgc

SEQ ID NO: 635936 - DNA, 120 bp, Artificial Sequence
  ENSG00000180730_10 (sequence is synthesized)
ttgagtccgaagtgcccttgagatatggttgacgaaagaattttataaactgataaattaaggatttttattatgttgttattattatttcttttttgttgttgactgcacaggatcaaa

SEQ ID NO: 635937 - DNA, 120 bp, Artificial Sequence
  ENSG00000180730_11 (sequence is synthesized)
gcgatctcggctcactgcaacttcagcctcctggattcaggcaacactcctgcctcagcctcccacgtggctgggattacaggtgcctgcccccatggctaattttttgtattttttgta

SEQ ID NO: 635938 - DNA, 120 bp, Artificial Sequence
  ENSG00000180730_12 (sequence is synthesized)
cctttttttttttctaatgcatccaaggttaaggggaagacgcaaataacaggactattctaaaaggaaacctgtttgaactctgtgagatcagtcatcagtctcagtattccacaggca

SEQ ID NO: 635939 - DNA, 120 bp, Artificial Sequence
  ENSG00000180730_13 (sequence is synthesized)
caccttaatttcattgtaaaaagatatatatattttgtctatttttgtgcttttgggggcctattttgtgcttttttaccttatgtagagatcttattacaaagtgattttctacattaa

SEQ ID NO: 635940 - DNA, 120 bp, Artificial Sequence
  ENSG00000180730_14 (sequence is synthesized)
aaagagactgaaataaattgtatagttacttaactaatgaagacatttcagaactctgggatgattttaatcttgaagtagtaggtggtatagtcataaaaccattcatccccttcttga

SEQ ID NO: 635941 - DNA, 120 bp, Artificial Sequence
  ENSG00000180730_15 (sequence is synthesized)
ttgtatcttaattttctggctttaaggtgacatctgagaggtaatgcattcttttttatattgaaatcataaactatcacccgctgcttctctgagttacttttaattttgccttgtggt

SEQ ID NO: 635942 - DNA, 120 bp, Artificial Sequence
  ENSG00000180730_16 (sequence is synthesized)
tatggtttggcgtttccttctgtttggttttcagagccccatgtctatatagtcctgagtgcaagtaattactatacttgtaaatgaagatcagtatttctgcctagatctgataaaaaa

SEQ ID NO: 635943 - DNA, 120 bp, Artificial Sequence
  ENSG00000180730_17 (sequence is synthesized)
attttcttgtcttagttataaaaattcaaagaaatgtgttacaaagatacttagtatagctcctcagccataacctgagacttgggatgaaatttaaaccagatacgatttactttgcag

SEQ ID NO: 635944 - DNA, 120 bp, Artificial Sequence
  ENSG00000180730_18 (sequence is synthesized)
atcataaggctttttatactcttgttatcaaaatggcttatttttcaggcactaaggattgttaagagaaaagcttttcaacgaaggattgcctttcttctcccacactgttcttgattt

SEQ ID NO: 635945 - DNA, 120 bp, Artificial Sequence
  ENSG00000180730_19 (sequence is synthesized)
cctctctctttcaggcctcaacaggcactgtattcattgccaatgttccaaattatcaaattcaagtgaatttatttgtgtgttctttacttatataaaaaaagataactttaaggatgt

SEQ ID NO: 635946 - DNA, 120 bp, Artificial Sequence
  ENSG00000180730_20 (sequence is synthesized)
gcaagtacatttccaactgctagcacaaccagtattttgtaattaaacaaatcgctgtatggtatggtcttctacacatttatgtctatagatatctatcgatcatctttctattctgtt

SEQ ID NO: 635947 - DNA, 120 bp, Artificial Sequence
  ENSG00000180730_21 (sequence is synthesized)
tcatgactgaataatgtaaaaccagtgttggcaattggtatcatcaatgatactcattttttaataaccaaaggcaggggaaaatcattttacttattaataaatattttatgatgtgaa

SEQ ID NO: 635948 - DNA, 120 bp, Artificial Sequence
  ENSG00000180739_0 (sequence is synthesized)
actcggttcaaggcagcgcgactgcgggtggcgcacgaccagggcgcagaccttggggcgcgcggcccatggagtcggggctgctgcggccggcgccggtgagcgaggtcatcgtcctgc

SEQ ID NO: 635949 - DNA, 120 bp, Artificial Sequence
  ENSG00000180739_1 (sequence is synthesized)
attacaactacaccggcaagctccgcggtgcgcgctaccagccgggtgccggcctgcgcgccgacgccgtggtgtgcctggcggtgtgcgccttcatcgtgctagagaatctagccgtgt

SEQ ID NO: 635950 - DNA, 120 bp, Artificial Sequence
  ENSG00000180739_2 (sequence is synthesized)
tgttggtgctcggacgccacccgcgcttccacgctcccatgttcctgctcctgggcagcctcacgttgtcggatctgctggcaggcgccgcctacgccgccaacatcctactgtcggggc

SEQ ID NO: 635951 - DNA, 120 bp, Artificial Sequence
  ENSG00000180739_3 (sequence is synthesized)
cgctcacgctgaaactgtcccccgcgctctggttcgcacgggagggaggcgtcttcgtggcactcactgcgtccgtgctgagcctcctggccatcgcgctggagcgcagcctcaccatgg

SEQ ID NO: 635952 - DNA, 120 bp, Artificial Sequence
  ENSG00000180739_4 (sequence is synthesized)
cgcgcagggggcccgcgcccgtctccagtcgggggcgcacgctggcgatggcagccgcggcctggggcgtgtcgctgctcctcgggctcctgccagcgctgggctggaattgcctgggtc

SEQ ID NO: 635953 - DNA, 120 bp, Artificial Sequence
  ENSG00000180739_5 (sequence is synthesized)
gcctggacgcttgctccactgtcttgccgctctacgccaaggcctacgtgctcttctgcgtgctcgccttcgtgggcatcctggccgctatctgtgcactctacgcgcgcatctactgcc

SEQ ID NO: 635954 - DNA, 120 bp, Artificial Sequence
  ENSG00000180739_6 (sequence is synthesized)
aggtacgcgccaacgcgcggcgcctgccggcacggcccgggactgcggggaccacctcgacccgggcgcgtcgcaagccgcgctcgctggccttgctgcgcacgctcagcgtggtgctcc

SEQ ID NO: 635955 - DNA, 120 bp, Artificial Sequence
  ENSG00000180739_7 (sequence is synthesized)
tggcctttgtggcatgttggggccccctcttcctgctgctgttgctcgacgtggcgtgcccggcgcgcacctgtcctgtactcctgcaggccgatcccttcctgggactggccatggcca

SEQ ID NO: 635956 - DNA, 120 bp, Artificial Sequence
  ENSG00000180739_8 (sequence is synthesized)
actcacttctgaaccccatcatctacacgctcaccaaccgcgacctgcgccacgcgctcctgcgcctggtctgctgcggacgccactcctgcggcagagacccgagtggctcccagcagt

SEQ ID NO: 635957 - DNA, 120 bp, Artificial Sequence
  ENSG00000180739_9 (sequence is synthesized)
tgggagcttcagcggctcggagcgctcatcgccccagcgcgacgggctggacaccagcggctccacaggcagccccggtgcacccacagccgcccggactctggtatcagaaccggctgc

SEQ ID NO: 635958 - DNA, 120 bp, Artificial Sequence
  ENSG00000180739_10 (sequence is synthesized)
agactgacaccctcggcccacgactgtcttcccaagttttacagacttgttctttttacataaaggaatttgtaggaaatgcagccaaaggtgcagtcggaaaagatgcaggggaaatgt

SEQ ID NO: 635959 - DNA, 120 bp, Artificial Sequence
  ENSG00000180739_11 (sequence is synthesized)
atttatgcagcgacaccccacaatgtgaacaaacagacaaaaaatctgtgccctcgtggaattgacgttctgcttgggaacacagaaaagaactcggtgatgaaataatggagatgattc

SEQ ID NO: 635960 - DNA, 120 bp, Artificial Sequence
  ENSG00000180739_12 (sequence is synthesized)
cagtgacaaacgacagagatggtgatggtggtcagggaagacctctctgcagaggtagtgacttgtgatgtgagctgagacctctgtcctgggaagaccaaaagaaaagcatttcaggat

SEQ ID NO: 635961 - DNA, 120 bp, Artificial Sequence
  ENSG00000180739_13 (sequence is synthesized)
gagggaatggcatgcgcaaaggccctgaggctgaaatgtgcccatgtgttctaagaaatgcagcgatgctggtgtgcctggagcagggacggagggggagaatgggaggagacaaggagc

SEQ ID NO: 635962 - DNA, 120 bp, Artificial Sequence
  ENSG00000180739_14 (sequence is synthesized)
tgaaggagtagttcccgaaggaccttgtgggtgatatagaggacttcgcttttgctctgagtgaggtgggagccatagaagcttctaagcagaagagggacttgccctaattcaggtgat

SEQ ID NO: 635963 - DNA, 120 bp, Artificial Sequence
  ENSG00000180739_15 (sequence is synthesized)
cacaggtgtcttgtggcctccatgggaggttgaaaaccagagaaggtgaaggggggctgcactgagccacaggaacaatgatggagattccagctaagcccagaccccgtggattctaga

SEQ ID NO: 635964 - DNA, 120 bp, Artificial Sequence
  ENSG00000180739_16 (sequence is synthesized)
tagattttagaggcagcagacagaattactgaggaattgagtgtaagagtggaataaagttatcaaggacaatgccaagggtggggcacccccaaatttgactctgggagactcagccaa

SEQ ID NO: 635965 - DNA, 80 bp, Artificial Sequence
  ENSG00000180739_17 (sequence is synthesized)
gtggggcacccccaaatttgactctgggagactcagccaaatcctatctggtaataaaatttcttttttattgggatctt

SEQ ID NO: 635966 - DNA, 78 bp, Artificial Sequence
  ENSG00000180739_18 (sequence is synthesized)
tctgtcacccaggctggagtgcaatgggcacaattatagctcactgcagcctggaactcctgggatcaagcctggagt

SEQ ID NO: 635967 - DNA, 120 bp, Artificial Sequence
  ENSG00000180739_19 (sequence is synthesized)
ggctaaggtggcccccactgaagactcctgctaagcaacccactgaagacccctccgaatcatcgacggggcgtccttggggtgcagcccaggaagctcagttcacagccttggggcgcg

SEQ ID NO: 635968 - DNA, 120 bp, Artificial Sequence
  ENSG00000180739_20 (sequence is synthesized)
actgcgggtggcgcacgaccagggcgcagagtgagtggactgcactggacctttgggggcgctgggctgggcctgacccggagggggtcgccctggcggccactttcccggtctaaaaag

SEQ ID NO: 635969 - DNA, 120 bp, Artificial Sequence
  ENSG00000180739_21 (sequence is synthesized)
gcgcaccactccttgcagggagttctccgaacttttcctggaggcctctggggagggggaagctgggggctccccagctgggtgcaggacctgggatacggggtgaaggtggctggaatc

SEQ ID NO: 635970 - DNA, 120 bp, Artificial Sequence
  ENSG00000180745_0 (sequence is synthesized)
cattagcataacccttcctcaggaagagtgagattttatatttgacaataaagtgttagactccatttctaaataccagacttcaaaagataaggttcaaaagtgttataagaagatatt

SEQ ID NO: 635971 - DNA, 120 bp, Artificial Sequence
  ENSG00000180745_1 (sequence is synthesized)
cctttttttgtcctagagaacttattttcctgtgaaaatgcctaccacaaagaagacattgatgttcttatcaagctttttcaccagccttgggtccttcattgtaatttgctctattct

SEQ ID NO: 635972 - DNA, 120 bp, Artificial Sequence
  ENSG00000180745_2 (sequence is synthesized)
tgggacacaagcatggatcaccagtacaattgctgttagagactctgcttcaaatgggagcattttcatcacttacggactttttcgtggggagagtagtgaagaattgagtcacggact

SEQ ID NO: 635973 - DNA, 120 bp, Artificial Sequence
  ENSG00000180745_3 (sequence is synthesized)
tgcagaaccaaagaaaaagtttgcagttttagagatactgaataattcttcccaaaaaactctgcattcggtgactatcctgttcctggtcctgagtttgatcacgtcgctgctgagctc

SEQ ID NO: 635974 - DNA, 120 bp, Artificial Sequence
  ENSG00000180745_4 (sequence is synthesized)
cacctggaacgggctcggtgcatccttcgtttttgtgaccatgatactgtttgtggcgaacacgcagtccaaccaactctccgaagagttgttccaaatgctttacccggcaaccaccag

SEQ ID NO: 635975 - DNA, 120 bp, Artificial Sequence
  ENSG00000180745_5 (sequence is synthesized)
taaaggaacgacccacagttacggatactcgttctggctcatactgctcgtcattcttctaaatatagtcactgtaaccatcatcattttctaccagaaggccagataccagcggaagca

SEQ ID NO: 635976 - DNA, 120 bp, Artificial Sequence
  ENSG00000180745_6 (sequence is synthesized)
ggagcagagaaagccaatggaatatgctccaagggacggaattttattctgaattctctttcatctcattttggcgttgcatctattgtacatcagccctgagtagtaactggttagctt

SEQ ID NO: 635977 - DNA, 120 bp, Artificial Sequence
  ENSG00000180745_7 (sequence is synthesized)
ctctggacaattcagcatggtaacgtgactgtcatctgtgacagcatttgtgtttcatgacactgtgttcttcattgatgctgtactcctgaaaatttttcccacaaggttggggaaatg

SEQ ID NO: 635978 - DNA, 120 bp, Artificial Sequence
  ENSG00000180745_8 (sequence is synthesized)
aatgggaaatgtcgctggtctgtgtggtattcaaagcagtagtatcatgatgagcgtaacgacccttctgacctggtctcacgatctgaaataataaaaggctgtgtcatgtttcttttc

SEQ ID NO: 635979 - DNA, 120 bp, Artificial Sequence
  ENSG00000180758_0 (sequence is synthesized)
gcccggcttctgtcctcgcggcgctccggctcctggccccccacgccatgcagccgtccccgccgcccaccgagctggtgccgtcggagcgcgccgtggtgctgctgtcgtgcgcactct

SEQ ID NO: 635980 - DNA, 120 bp, Artificial Sequence
  ENSG00000180758_1 (sequence is synthesized)
gccgtggtgctgctgtcgtgcgcactctccgcgctcggctcgggcctgctggtggccacgcacgccctgtggcccgacctgcgcagccgggcacggcgcctgctgctcttcctgtcgctg

SEQ ID NO: 635981 - DNA, 120 bp, Artificial Sequence
  ENSG00000180758_2 (sequence is synthesized)
gccgacctgctctcggccgcctcctacttctacggagtgctgcagaacttcgcgggcccgtcgtgggactgcgtgctgcagggcgcgctgtccaccttcgccaacaccagctccttcttc

SEQ ID NO: 635982 - DNA, 120 bp, Artificial Sequence
  ENSG00000180758_3 (sequence is synthesized)
tggaccgtggccattgcgctctacttgtacctcagcatcgtccgcgccgcgcgcgggcctcgcacagatcgcctgctttgggccttccatgtcgtcagctggggggtcccgttggtcatc

SEQ ID NO: 635983 - DNA, 120 bp, Artificial Sequence
  ENSG00000180758_4 (sequence is synthesized)
actgtggcagccgtcgccctgaagaagattggctatgacgcctcggacgtgtctgtgggctggtgctggatcgacctggaggccaaggaccatgtcctgtggatgctgctgacggggaag

SEQ ID NO: 635984 - DNA, 120 bp, Artificial Sequence
  ENSG00000180758_5 (sequence is synthesized)
ctgtgggagatgctggcatatgtgctgctgcctctgctgtacctcctggtccggaagcacatcaacagagcgcacacggcactctctgagtaccggcccatcctctcccaggagcaccgc

SEQ ID NO: 635985 - DNA, 120 bp, Artificial Sequence
  ENSG00000180758_6 (sequence is synthesized)
ctgctgcgccactcctccatggcggacaagaagctggtgctcatcccgctcatcttcatcggcctcagggtctggagcaccgtgcggttcgtgctgaccctctgtggctccccggccgtg

SEQ ID NO: 635986 - DNA, 120 bp, Artificial Sequence
  ENSG00000180758_7 (sequence is synthesized)
cagacgccggtgctggtggttctgcatggtatcgggaacacgtttcagggaggtgccaactgcatcatgttcgtcctctgcacccgcgccgtccgaactcggctcttctctctctgttgc

SEQ ID NO: 635987 - DNA, 120 bp, Artificial Sequence
  ENSG00000180758_8 (sequence is synthesized)
tgctgctgctcttctcagcctcccaccaagagcccggctggcactcccaaggctcccgcgccttccaagccaggagaatctcaggaatcccaagggaccccaggggaacttccaagcacc

SEQ ID NO: 635988 - DNA, 120 bp, Artificial Sequence
  ENSG00000180758_9 (sequence is synthesized)
tgagcttttgtcctttctagttctgtgcataggtgctgccttcctgggggtaggcacttctgtgagtccctgctgcaggggcagaagtgcatgtctgctgcaccagaagcccccgctatt

SEQ ID NO: 635989 - DNA, 120 bp, Artificial Sequence
  ENSG00000180758_10 (sequence is synthesized)
gatgctctcggctccattgggagagcagctgccaactcagcttcttctacctcctagatcctcaggcagcaagttccaccggtaccagcgtcctggcccacgggtgggcgttcatctgca

SEQ ID NO: 635990 - DNA, 120 bp, Artificial Sequence
  ENSG00000180758_11 (sequence is synthesized)
taagggtagcagtgagattcgggaagccggtggcccacagctgtggccacagtgcccccacccagtggaccttgatgtcctgaggaccacacagcactgtttacaatctgagggacccac

SEQ ID NO: 635991 - DNA, 120 bp, Artificial Sequence
  ENSG00000180758_12 (sequence is synthesized)
atctgtgcacctatcctctgtgtgattaaataagctgtcaggggccctcagagatgtgtccccatccacacatcatggagcagattcccggctggtcagggtgttaagattctctggaga

SEQ ID NO: 635992 - DNA, 120 bp, Artificial Sequence
  ENSG00000180758_13 (sequence is synthesized)
acccggctttccttggagactttgctcaacagaggaaccagttgccattcaccaggttgaaggttcccctgaggttgcatggtgaccaccaggggcaagcacagcccggcgcagctgctc

SEQ ID NO: 635993 - DNA, 120 bp, Artificial Sequence
  ENSG00000180758_14 (sequence is synthesized)
agggacagcagtctccccgggcctcctggcctctccctccatgggctgctaacccttgccgtagcttgggtttgagtgtcaagcacaggccagaatccacactcctgtccccacctgtca

SEQ ID NO: 635994 - DNA, 120 bp, Artificial Sequence
  ENSG00000180758_15 (sequence is synthesized)
atcacttcagacacaggttccctccttccaattccaaagctggaacaagggcaggaagaggcgtctcagggaacccccgaagaccccactgtctctccagctcctttcttagaatcctcc

SEQ ID NO: 635995 - DNA, 120 bp, Artificial Sequence
  ENSG00000180758_16 (sequence is synthesized)
tcttcttggggagaccaaaggggatgagtagggaggggttctggcttatttacttcttagtttagttttttgtaagtaaagtggccggagagatgagtaatccaaatacgattcctcagg

SEQ ID NO: 635996 - DNA, 120 bp, Artificial Sequence
  ENSG00000180758_17 (sequence is synthesized)
ggcaacaagagtgaaactcggtctcaaacaaacaaatacgatttcttcctaaaggtgaaggttttaagcttcagagtcagtttttttttttttttttttttaaaaaaggagcctcattct

SEQ ID NO: 635997 - DNA, 120 bp, Artificial Sequence
  ENSG00000180758_18 (sequence is synthesized)
aaaggagcctcattctgtcgcccggagctgatgtggtggtgcgtgcctgtagtccctactactcaggaggctgagacgggaggatcccttgagcccagggatttgaggcttcattgaact

SEQ ID NO: 635998 - DNA, 120 bp, Artificial Sequence
  ENSG00000180758_19 (sequence is synthesized)
aggaccctgtctcaaaaaaagaaaaaaacaaaggattcaaaaggattcagctgttttgtattcagctgaggtaagtggcggcatggagcatggagcgattatttacatttaaaagaaaag

SEQ ID NO: 635999 - DNA, 120 bp, Artificial Sequence
  ENSG00000180758_20 (sequence is synthesized)
aattgaaagtaagcacctgtatctctatttttattctgtgggtcttccacaaacgctttcgtcttatttcagaaaacagcttctgtgttcagtcacaggagccatcggcaaagaatggaa

SEQ ID NO: 636000 - DNA, 120 bp, Artificial Sequence
  ENSG00000180758_21 (sequence is synthesized)
gtggaaatgctacctccagggtcttggtgagagaaagtacagctttacctgataggtgatttcccttggaatccatcagaactcgacaaagcatgattttctgagcctagtaaaatggtt

SEQ ID NO: 636001 - DNA, 120 bp, Artificial Sequence
  ENSG00000180758_22 (sequence is synthesized)
ctgaatcaaaaccgaagtcacgctgtgctgccgatccctgtttgactctcaaaaccaaaatctgtatcaggaaaggaataatcatttagcagactgagtccaaaatgctcatttttggtt

SEQ ID NO: 636002 - DNA, 120 bp, Artificial Sequence
  ENSG00000180758_23 (sequence is synthesized)
atccacccacctcagcctcccaaaatgcttcgattgcaggcatgagccactgtgcctgtccaagaaaacagatttcttgatggaaattagtgagacagacatccccttaggattgaaaga

SEQ ID NO: 636003 - DNA, 120 bp, Artificial Sequence
  ENSG00000180758_24 (sequence is synthesized)
aattagtgagacagacatccccttaggattgaaagagagctctgggctgctccagggaaagccacttggcagaaatagcctctgtaagtgaattctggattcccctgaagacgttacagc

SEQ ID NO: 636004 - DNA, 120 bp, Artificial Sequence
  ENSG00000180758_25 (sequence is synthesized)
aaatctctgggtatgtctctggtaaagaccctcacttgagcttctagaagggagcgaaaattcaggaatttgcttgctgcaaaagagaacatgattaacaggtaaaagagaaaagacaat

SEQ ID NO: 636005 - DNA, 120 bp, Artificial Sequence
  ENSG00000180758_26 (sequence is synthesized)
ataggccacagaggaatagtgttaggatcaaccctgctcagcaggggcctctggagccctccctgctgtacccaagccagagctgagacatggctccccagatggactggctgtggtcag

SEQ ID NO: 636006 - DNA, 120 bp, Artificial Sequence
  ENSG00000180758_27 (sequence is synthesized)
gaaaggcctgtagagggagctgagggctcagaaaatacctgctccgggtgcctgggctcaagttctcattccatttctttgatgccactggccactgtatctgcttttgtaaaaacctcc

SEQ ID NO: 636007 - DNA, 120 bp, Artificial Sequence
  ENSG00000180758_28 (sequence is synthesized)
aaaaagttatacatcaggtatctctagtcagcttcctccgctgcccacctcttgccacagatgagtgatcactgtgaatggtggtgaccaggtgggcagggcaggggcttgtctaagtgc

SEQ ID NO: 636008 - DNA, 120 bp, Artificial Sequence
  ENSG00000180758_29 (sequence is synthesized)
cttagcccaggcccctggcccatcgacctcgaaaacagcaatatcgcctccttcttagatccagttaccaagtcagtctagctgggtgggtagtgctcagacagaaaggctggatgggaa

SEQ ID NO: 636009 - DNA, 65 bp, Artificial Sequence
  ENSG00000180758_30 (sequence is synthesized)
gctgggtgggtagtgctcagacagaaaggctggatgggaaggaagtcacatcctaaaagtccagg

SEQ ID NO: 636010 - DNA, 65 bp, Artificial Sequence
  ENSG00000180758_31 (sequence is synthesized)
aacatggtgaaaccctgtttctactaaatatacaaaaaaaaaaaaaatagttggatgtggtttcg

SEQ ID NO: 636011 - DNA, 70 bp, Artificial Sequence
  ENSG00000180758_32 (sequence is synthesized)
caagtccaggaggggctgttacttctttttagtttatttatttttgtgaggcagggttttgctgtctgga

SEQ ID NO: 636012 - DNA, 120 bp, Artificial Sequence
  ENSG00000180758_33 (sequence is synthesized)
aaaaataaaacaagtccaggaggggctgttacttctttttagtttatttatttttgtgaggcagggttttgctgtctggagcatcatacccagtctggagtgcagtgatgcaatcatggc

SEQ ID NO: 636013 - DNA, 85 bp, Artificial Sequence
  ENSG00000180758_34 (sequence is synthesized)
aattttgactcagatctcaagcgaggggctgttacatctgatcagggcaaaaggggctgtgctccttggacactttgcacagccc

SEQ ID NO: 636014 - DNA, 120 bp, Artificial Sequence
  ENSG00000180758_35 (sequence is synthesized)
ggcaaaaggggctgtgctccttggacactttgcacagccccagtgggcttctttctcctctgttagtgtggttaatgttcatctgcctgcatccctgagtcacccaagtgtaacctcagc

SEQ ID NO: 636015 - DNA, 120 bp, Artificial Sequence
  ENSG00000180758_36 (sequence is synthesized)
cataacacgtactgcagccggaacggtgtccgcagctcagcgtccctctcccatgcactttctgaactttggtcttttaaccaggtttaccagccgctttctgcctctttgtgcttttga

SEQ ID NO: 636016 - DNA, 120 bp, Artificial Sequence
  ENSG00000180758_37 (sequence is synthesized)
gggttttttggtttgtttgttctgttttgtttttaaataaagatgattatttggcccaggctgagggtgcaaacagaactcttcacgtgtccacgacaagaaaaatagtttttacaaact

SEQ ID NO: 636017 - DNA, 120 bp, Artificial Sequence
  ENSG00000180758_38 (sequence is synthesized)
tctagttgtggcatcaaaagtgtgagtttttgcacctgcaaaattgtaatgcaagccctgactgggtggaagctgaagtcttgctgttttaaattaaataaataaattatttttctccta

SEQ ID NO: 636018 - DNA, 120 bp, Artificial Sequence
  ENSG00000180758_39 (sequence is synthesized)
catcaacagagcggtaggcgctgcccttagagctcagggccctctgcatggccgctgtgcccaggtgcaaggcctggcattgagtttggccccccgaggggacaggttgcgtctctgggg

SEQ ID NO: 636019 - DNA, 120 bp, Artificial Sequence
  ENSG00000180758_40 (sequence is synthesized)
agcacatcaacagagcgggtatcgggaacacgtttcagggaggtgccaactgcatcatgttcgtcctctgcacccgcgccgtccgaactcggctcttctctctctgttgctgctgctgct

SEQ ID NO: 636020 - DNA, 120 bp, Artificial Sequence
  ENSG00000180767_0 (sequence is synthesized)
gggctggggtccagctgccgtgctcccctgccctgcgccgcgccgcgcgtcttggtaggcgctgcgctgccggggccgggtcctgggccagtgcaactccgcccccagccgtatccagcg

SEQ ID NO: 636021 - DNA, 120 bp, Artificial Sequence
  ENSG00000180767_1 (sequence is synthesized)
tcctgggccagtgcaactccgcccccagccgtatccagcggactgtcctccgccgcgcgcccggcacagcatggggaggcgctgctgccggcggcgcgtgctggcggccgcctgtctggg

SEQ ID NO: 636022 - DNA, 120 bp, Artificial Sequence
  ENSG00000180767_2 (sequence is synthesized)
gctcctatgcgccgcgccccgctccctgcgcccggcatttggaaacagagccctgggctccagctggcttggtggggagaagagaagccccctgcagaagctctatgacctggatcagga

SEQ ID NO: 636023 - DNA, 120 bp, Artificial Sequence
  ENSG00000180767_3 (sequence is synthesized)
cccgcgctcgaccctggcgaaggtgcaccggcagcggcgcgacctgctgaacagcgcctgtagccgccactcacgccggcagcgcctgctacagccggaggacctgcggcacgtgctggt

SEQ ID NO: 636024 - DNA, 120 bp, Artificial Sequence
  ENSG00000180767_4 (sequence is synthesized)
ggacgacgcgcatggcctgctctactgctacgtgcccaaggtggcctgcaccaactggaagcgcgtgctgctggcgctgagcggccaagcccgcggcgacccgcgcgccatctccgcgca

SEQ ID NO: 636025 - DNA, 120 bp, Artificial Sequence
  ENSG00000180767_5 (sequence is synthesized)
agaggcgcacgcgcctggccgcctgccctcactggccgacttcagccccgccgagatcaaccggcgcctgcgcgcctacttggccttcctgttcgtgcgggagcccttcgagcgcctggc

SEQ ID NO: 636026 - DNA, 120 bp, Artificial Sequence
  ENSG00000180767_6 (sequence is synthesized)
atcggcttaccgcaacaagctcgcgcgcccctacagcgccgccttccagaggcgctacggtgcacgcatcgttcagcgcctgcggccgcgcgcgctccccgacgcccgggcccgcggcca

SEQ ID NO: 636027 - DNA, 120 bp, Artificial Sequence
  ENSG00000180767_7 (sequence is synthesized)
ctacgacgtcgtgggcaagttcgagacgctggcggaggacgcggccttcgtgctgggcctggcgggcgcatccgacctgagcttccctgggccgccgcggccccggggagccgccgcctc

SEQ ID NO: 636028 - DNA, 120 bp, Artificial Sequence
  ENSG00000180767_8 (sequence is synthesized)
ccgcgacctggcagcgcgcctcttccgggacatcagccccttctaccagcggcgcctcttcgacctctacaagatggacttcctgcttttcaactactccgccccctcctacctgcggct

SEQ ID NO: 636029 - DNA, 120 bp, Artificial Sequence
  ENSG00000180767_9 (sequence is synthesized)
gctctagcggtcctggaggtcctgtggccacgcggggcaagtgcctttccgacaagacccccggggaatgcaggtgctgccggccccaggacccctcttcaagagccactgcgtgcactc

SEQ ID NO: 636030 - DNA, 120 bp, Artificial Sequence
  ENSG00000180767_10 (sequence is synthesized)
acctggccgccgggccagcgggcgcagggcacacctggccaggcttgggggcagcccatctcaggtggccctgcacgcgtgtgcctgcctcggcctgtcgcctgaggcctgcttcctcca

SEQ ID NO: 636031 - DNA, 120 bp, Artificial Sequence
  ENSG00000180767_11 (sequence is synthesized)
cttgctccagctgacaggcacctctccaggccccgtagatgggcaaggacttgataaccagggttttaggcttttaaaggccattttgggggtcagccctgcccctgaacctgttcatgg

SEQ ID NO: 636032 - DNA, 120 bp, Artificial Sequence
  ENSG00000180767_12 (sequence is synthesized)
tgcatcagaacataatgctgacaccggtgtcagtgtggcccgagcctgtgtcctccccacctcgcccaccctggcaaggacagctgcggccaaggacgaaagccctcccttggctggcct

SEQ ID NO: 636033 - DNA, 120 bp, Artificial Sequence
  ENSG00000180767_13 (sequence is synthesized)
cacgatggggccgtcccgggagccaggtgggagctgccttccactgccatcgggtctcctctcctctcccacgcggctggccctacccaggcgccaccttcggtctcagtctggcaagac

SEQ ID NO: 636034 - DNA, 120 bp, Artificial Sequence
  ENSG00000180767_14 (sequence is synthesized)
gctgggtcttcaggctccatgccaacagagcccctggtgcaatgcggtcacaggttttatgggactttggtgagctgggcggtcatggttttgaaataaatgtattttgttactttctga

SEQ ID NO: 636035 - DNA, 120 bp, Artificial Sequence
  ENSG00000180772_0 (sequence is synthesized)
gctattacgtcccagcgtctgagagaacgagtaagcacagaattcaaagcattctgcagcctgaattttgaaggagtgtgtttaggcactaagcaagctgatttatgataactgctttaa

SEQ ID NO: 636036 - DNA, 120 bp, Artificial Sequence
  ENSG00000180772_1 (sequence is synthesized)
acttcaacaaccaaaggcataagaactaggagctgctgacatttcaatatgaagggcaactccacccttgccactactagcaaaaacattaccagcggtcttcacttcgggcttgtgaac

SEQ ID NO: 636037 - DNA, 120 bp, Artificial Sequence
  ENSG00000180772_2 (sequence is synthesized)
atctctggcaacaatgagtctaccttgaactgttcacagaaaccatcagataagcatttagatgcaattcctattctttactacattatatttgtaattggatttctggtcaatattgtc

SEQ ID NO: 636038 - DNA, 120 bp, Artificial Sequence
  ENSG00000180772_3 (sequence is synthesized)
gtggttacactgttttgttgtcaaaagggtcctaaaaaggtttctagcatatacatcttcaacctcgctgtggctgatttactccttttggctactcttcctctatgggcaacctattat

SEQ ID NO: 636039 - DNA, 120 bp, Artificial Sequence
  ENSG00000180772_4 (sequence is synthesized)
tcttatagatatgactggctctttggacctgtgatgtgcaaagtttttggttcttttcttaccctgaacatgtttgcaagcattttttttatcacctgcatgagtgttgataggtaccaa

SEQ ID NO: 636040 - DNA, 120 bp, Artificial Sequence
  ENSG00000180772_5 (sequence is synthesized)
tctgtcatctacccctttctgtctcaaagaagaaatccctggcaagcatcttatatagttccccttgtttggtgtatggcctgtttgtcctcattgccaacattttattttcgagacgtc

SEQ ID NO: 636041 - DNA, 120 bp, Artificial Sequence
  ENSG00000180772_6 (sequence is synthesized)
agaaccattgaatacttaggagtgaatgcttgcattatggctttcccacctgagaaatatgcccaatggtcagctgggattgccttaatgaaaaatatccttggttttattatcccttta

SEQ ID NO: 636042 - DNA, 120 bp, Artificial Sequence
  ENSG00000180772_7 (sequence is synthesized)
atattcatagcaacatgctattttggaattagaaaacacttactgaagacgaatagctatgggaagaacaggataacccgtgaccaagtcctgaagatggcagctgctgttgttctggcc

SEQ ID NO: 636043 - DNA, 120 bp, Artificial Sequence
  ENSG00000180772_8 (sequence is synthesized)
ttcatcatttgctggcttcccttccatgttctgaccttcctggatgctctggcctggatgggtgtcattaatagctgcgaagttatagcagtcattgacctggcacttccttttgccatc

SEQ ID NO: 636044 - DNA, 120 bp, Artificial Sequence
  ENSG00000180772_9 (sequence is synthesized)
ctcttgggattcaccaacagctgcgttaatccgtttctgtattgttttgttggaaaccggttccaacagaagctccgcagtgtgtttagggttccaattacttggctccaagggaaaaga

SEQ ID NO: 636045 - DNA, 120 bp, Artificial Sequence
  ENSG00000180772_10 (sequence is synthesized)
gagagtatgtcttgccggaaaagcagttctcttagagaaatggagacctttgtgtcttaaacgtgagagcaaaatgcatgtaatcaacatggctacttgctttgaggctcaccagaatta

SEQ ID NO: 636046 - DNA, 120 bp, Artificial Sequence
  ENSG00000180772_11 (sequence is synthesized)
ttgcccattgtttttctgatatgtttgtacaagattgtcattagtgagacatatttacaacctagaagtaactggtgatatatctcaaattgtaattaataatagattgtgaataatgat

SEQ ID NO: 636047 - DNA, 120 bp, Artificial Sequence
  ENSG00000180772_12 (sequence is synthesized)
ttggggattcagatttctctttgaaacatgcttgtgtttcttagtggggttttatatccatttttatcaggatttcctcttgaaccagaaccagtctttcaactcattgcatcatttaca

SEQ ID NO: 636048 - DNA, 120 bp, Artificial Sequence
  ENSG00000180772_13 (sequence is synthesized)
agacaacattgtaagagagatgagcacttctaagttgagtatattataatagattagtactggattattcaggctttaggcatatgcttctttaaaaaagctataaattatattcctctt

SEQ ID NO: 636049 - DNA, 120 bp, Artificial Sequence
  ENSG00000180772_14 (sequence is synthesized)
gcatttcacttgagtggaggtttatagttaatctataactacatattgaatagggctaggaatatagattaaatcatactcctatgctttagcttatttttacagttatagaaagcaaga

SEQ ID NO: 636050 - DNA, 120 bp, Artificial Sequence
  ENSG00000180772_15 (sequence is synthesized)
tgtactataacatagaattgcaatctataatatttgtgtgttcactaaactctgaataagcactttttaaaaaactttctactcattttaatgattgtttaaaggtttctattttctctg

SEQ ID NO: 636051 - DNA, 120 bp, Artificial Sequence
  ENSG00000180772_16 (sequence is synthesized)
atacttttttgaaatcagtaaacactgtgtattgttgtaaaatgtaaaggtcacttttcacatccttgactttttagatgtgctgctttgatatataggacattgatttgatttttatta

SEQ ID NO: 636052 - DNA, 120 bp, Artificial Sequence
  ENSG00000180772_17 (sequence is synthesized)
ttaatgctttggttctgggttgtttcctaaaatatctgggtggcttaaaaaaaactctttaacttgtaataaacccttaactggcataggaaatggtatccagaatggaattttgctaca

SEQ ID NO: 636053 - DNA, 120 bp, Artificial Sequence
  ENSG00000180772_18 (sequence is synthesized)
tggggtctgggtgggggcaaagagacccagtcaattacatgtttggtaccaagaaaggaacctgtcagggcagtacaatgtgactttgaaaatatataccgtgggggtagttttacccta

SEQ ID NO: 636054 - DNA, 120 bp, Artificial Sequence
  ENSG00000180772_19 (sequence is synthesized)
tatctataaacactgtttgttccagaatctgtatgattctatggagctattttaaaccaattgcaggtctagatacctccttctcagcactattaaagctcctaagttagaggagtgcct

SEQ ID NO: 636055 - DNA, 120 bp, Artificial Sequence
  ENSG00000180772_20 (sequence is synthesized)
aaaactgagttacctaaagtttacttacattaaagtatgaatattaattttagaaatttgagactttattctgtaccagccctgtataataacaggttatctaggaccttcctctgaggt

SEQ ID NO: 636056 - DNA, 120 bp, Artificial Sequence
  ENSG00000180772_21 (sequence is synthesized)
aggtctaaatactgatctctgaggcggaactaacgttttggggactcagcatctctgccaggttccaggattatagacagaagagtcctgtcataccactttctggaaaagtcctaattt

SEQ ID NO: 636057 - DNA, 120 bp, Artificial Sequence
  ENSG00000180772_22 (sequence is synthesized)
catgtaatccttttattttcaataaaaacaaatagctaaatgtataaccaactatgatgttatgttttcaataattttgtaaaacagctcatataaataaaatttttaattggaagaaca

SEQ ID NO: 636058 - DNA, 120 bp, Artificial Sequence
  ENSG00000180773_0 (sequence is synthesized)
gaggcgggcaccaggcgcgggtccctccgggcaggggaggtaggcctgggcctgacgccggccacgcagcggcgggagagtgagcactcgggcggcggcgtcctggagacccgcgagaga

SEQ ID NO: 636059 - DNA, 120 bp, Artificial Sequence
  ENSG00000180773_1 (sequence is synthesized)
tgagcactcgggcggcggcgtcctggagacccgcgagagatggaagcggcggcgacgccggcggctgccggggcggcgaggcgcgaggagctagatatggatgtaatgaggcccttgata

SEQ ID NO: 636060 - DNA, 120 bp, Artificial Sequence
  ENSG00000180773_2 (sequence is synthesized)
aatgagcagaattttgatgggacatcagatgaagaacatgagcaagagcttctgcctgttcagaagcattaccaacttgatgatcaagagggcatttcatttgtacaaactcttatgcac

SEQ ID NO: 636061 - DNA, 120 bp, Artificial Sequence
  ENSG00000180773_3 (sequence is synthesized)
cttcttaaaggaaatattggaactggccttttaggacttccattggcaataaaaaatgcaggcatagtgcttggaccaatcagccttgtgtttataggaattatttctgttcactgtatg

SEQ ID NO: 636062 - DNA, 120 bp, Artificial Sequence
  ENSG00000180773_4 (sequence is synthesized)
cacatattggtacgttgcagtcactttctatgtctgaggtttaaaaagtcaacattaggttatagtgacactgtgagctttgctatggaagtgagtccttggagttgtcttcagaagcaa

SEQ ID NO: 636063 - DNA, 120 bp, Artificial Sequence
  ENSG00000180773_5 (sequence is synthesized)
gcagcatgggggcggagtgtggttgacttttttctggtgataacacagctgggattctgtagtgtttatattgtcttcttagctgaaaatgtgaaacaagttcatgaaggattcctggag

SEQ ID NO: 636064 - DNA, 120 bp, Artificial Sequence
  ENSG00000180773_6 (sequence is synthesized)
agtaaagtgtttatttcaaatagtaccaattcatcaaacccttgtgagagaagaagtgttgacctaaggatatatatgctttgctttcttccatttataattcttttggtcttcattcgt

SEQ ID NO: 636065 - DNA, 120 bp, Artificial Sequence
  ENSG00000180773_7 (sequence is synthesized)
gaactaaagaatctatttgtactttcattccttgccaacgtttccatggctgtcagtcttgtgataatttaccagtatgttgtcaggaacatgccagatccccacaaccttccaatagtg

SEQ ID NO: 636066 - DNA, 120 bp, Artificial Sequence
  ENSG00000180773_8 (sequence is synthesized)
gctggttggaagaaatacccactcttttttggtactgctgtatttgcttttgaaggcataggagtggtccttccactggaaaaccaaatgaaagaatcaaagcgtttccctcaagcgttg

SEQ ID NO: 636067 - DNA, 120 bp, Artificial Sequence
  ENSG00000180773_9 (sequence is synthesized)
aatattggcatggggattgttacaactttgtatgtaacattagctactttaggatatatgtgtttccatgatgaaatcaaaggcagcataactttaaatcttccccaagatgtatggtta

SEQ ID NO: 636068 - DNA, 120 bp, Artificial Sequence
  ENSG00000180773_10 (sequence is synthesized)
tatcaatcagtgaaaattctatattcctttggcatttttgtgacatattcaattcagttctatgttccagcagagatcattatccctgggatcacatccaaatttcatactaaatggaag

SEQ ID NO: 636069 - DNA, 120 bp, Artificial Sequence
  ENSG00000180773_11 (sequence is synthesized)
caaatctgtgaatttgggataagatccttcttggttagtattacttgtgccggagcaattcttattcctcgtttagacattgtgatttccttcgttggagctgtgagcagcagcacattg

SEQ ID NO: 636070 - DNA, 120 bp, Artificial Sequence
  ENSG00000180773_12 (sequence is synthesized)
gccctaatcctgccacctttggttgaaattcttacattttcgaaggaacattataatatatggatggtcctgaaaaatatttctatagcattcactggagttgttggcttcttattaggt

SEQ ID NO: 636071 - DNA, 120 bp, Artificial Sequence
  ENSG00000180773_13 (sequence is synthesized)
acatatataactgttgaagaaattatttatcctactcccaaagttgtagctggcactccacagagtccttttctaaatttgaattcaacatgcttaacatctggtttgaaatagtaaaag

SEQ ID NO: 636072 - DNA, 120 bp, Artificial Sequence
  ENSG00000180773_14 (sequence is synthesized)
cagaatcatgagtcttctatttttgtcccatttctgaaaattatcaagataactagtaaaatacattgctatatacataaaaatggtaacaaactctgttttctttggcacgatattaat

SEQ ID NO: 636073 - DNA, 120 bp, Artificial Sequence
  ENSG00000180773_15 (sequence is synthesized)
attttggaagtaatcataactctttaccagtagtggtaaacctatgaaaaatccttgcttttaagtgttagcaatagttcaaaaaattaagttctgaaaattgaaaaaattaaaatgtaa

SEQ ID NO: 636074 - DNA, 120 bp, Artificial Sequence
  ENSG00000180773_16 (sequence is synthesized)
aaaaattaaagaataaaaatacttctattattcttttatctcagtaagaaataccttaaccaagttatctctcttttatgctactcttttgccactcacttgagaacagaataggatttc

SEQ ID NO: 636075 - DNA, 120 bp, Artificial Sequence
  ENSG00000180773_17 (sequence is synthesized)
aacaataagagaataaaataagaacatgtataacaaaaagctctctccagatcatccctgtgaatgccaaagtaaactttatgtacagtgtaaaaaaaaaaaatctcagttatgttttta

SEQ ID NO: 636076 - DNA, 120 bp, Artificial Sequence
  ENSG00000180773_18 (sequence is synthesized)
ttagccaaattctaatgattggctcctggaagtatagaaaactcccattaacataatataagcatcagaaaattgcaaacactagaattaattttacactctaatggtagttgatcttca

SEQ ID NO: 636077 - DNA, 120 bp, Artificial Sequence
  ENSG00000180773_19 (sequence is synthesized)
tagtcaagaggcactgttcaagatcatgacttagtgtttcaatgaaatttgaaaagggactttaaaacttatccagtgcaactcccttgtttttcgtcagaggaaaaggaggcctagaaa

SEQ ID NO: 636078 - DNA, 120 bp, Artificial Sequence
  ENSG00000180773_20 (sequence is synthesized)
ggttaagtaacttggtcgagaccactcagccttgagatcaagaaaacctaatcttctgactcccaggccaggatgttttatttctcacatcatgtccaagaaaaagaataaattatgttc

SEQ ID NO: 636079 - DNA, 120 bp, Artificial Sequence
  ENSG00000180773_21 (sequence is synthesized)
agcttaattttagtgttgaatctatttgattatattttaatactttgaaaatgaatgtgtgatttttaatagtatatgtgacctgagcagaaaatcagggaactccaagaagcctacact

SEQ ID NO: 636080 - DNA, 120 bp, Artificial Sequence
  ENSG00000180773_22 (sequence is synthesized)
gtggccatataaacctcagcaagagaaagaagctatgttcttttaaaacagaatagagaccgcttgctggtgaaactcctggctagtaagatgtgtgtctagctatactatttgtggctt

SEQ ID NO: 636081 - DNA, 120 bp, Artificial Sequence
  ENSG00000180773_23 (sequence is synthesized)
gagcttttttaattattaccttcctttcctgagttttgtaggcaccacattcctgaatggcagaaaatagacacctcagaaaacggaggatttgtggactctttccagccctgtggcttt

SEQ ID NO: 636082 - DNA, 120 bp, Artificial Sequence
  ENSG00000180773_24 (sequence is synthesized)
tcttatcacagccttttatttattatgagcagaataaaagaatcagctaggtgtggtggtctgtgcttataatcccagctactctggaggataagttgggaggatcacttgagaggccag

SEQ ID NO: 636083 - DNA, 89 bp, Artificial Sequence
  ENSG00000180773_25 (sequence is synthesized)
caggagctcgactctataaaacataaaaatttaaaaaaaaattagcctgatgtggcgtgtacctgtagtcccagctactgaggaggctg

SEQ ID NO: 636084 - DNA, 120 bp, Artificial Sequence
  ENSG00000180773_26 (sequence is synthesized)
gtaagctatgactgtgccactgcacaccagcctgagttacagagggagatcccaactcttaaaaactaaaacaacaataaatatatacaagaatcataacataaagggattcatgcttag

SEQ ID NO: 636085 - DNA, 120 bp, Artificial Sequence
  ENSG00000180773_27 (sequence is synthesized)
aaaaaatccataaactcccttctaaatattgagacactccaggcttctttcagacaaataacttctaattattccatatttttcaagttattaaccaagataaagaatctctcagttagt

SEQ ID NO: 636086 - DNA, 120 bp, Artificial Sequence
  ENSG00000180773_28 (sequence is synthesized)
ggggaaaatgaaaattattaagaatagaattgtcttctgactttaaaaacaatttagactttaaaacatgaactgtttactcaggctggtgatactctagtttgttagtataccatactt

SEQ ID NO: 636087 - DNA, 120 bp, Artificial Sequence
  ENSG00000180773_29 (sequence is synthesized)
gaagatatcatcaagatcactatagttgtatatattctctatttttatatgtaaatgttaacttagttcaagtattttttgcttgtatcgttaactgatcatcaaatacaatcctaaaga

SEQ ID NO: 636088 - DNA, 120 bp, Artificial Sequence
  ENSG00000180773_30 (sequence is synthesized)
tatatcagaagctttattttggtacaaagtcataagaatcaaaacttttttaaccattcacattaggtatcaacagtaattgtttgagatacttttatatcaattctgttacactgagcc

SEQ ID NO: 636089 - DNA, 120 bp, Artificial Sequence
  ENSG00000180773_31 (sequence is synthesized)
tttagtcatactaagagaatgcagaagaagttataggaaaacgaatcttcactgaaactagtattatataatcttgaattagatgtttaaaaaactttatagcttgatataaaatgagtt

SEQ ID NO: 636090 - DNA, 120 bp, Artificial Sequence
  ENSG00000180773_32 (sequence is synthesized)
gaaaattattatttaataggaagcagcattagatttttgtcacctgttttcagataatatttctagtctatgtatgttatttaatttttacactttggcccattgtttattttccttaag

SEQ ID NO: 636091 - DNA, 120 bp, Artificial Sequence
  ENSG00000180773_33 (sequence is synthesized)
gaattcatcaaatgcaatgaaatttgaataaaattgatcatagcaataaataatttttaaattcagcacaaactcatcttgagtatattatcaatcaggcttcctttagcaataagaatg

SEQ ID NO: 636092 - DNA, 120 bp, Artificial Sequence
  ENSG00000180773_34 (sequence is synthesized)
gtgaatcaacatccagtactaaattcaataaatgatgaatactttaaatacaagaaaaagttgaattgcagaaaagaagaggggctaaaaaggaagaaagttttaattctcaacaagaaa

SEQ ID NO: 636093 - DNA, 120 bp, Artificial Sequence
  ENSG00000180773_35 (sequence is synthesized)
cactatttagatggaaagcttaaatgtattcttattaagggtatttgatgatgcattttatttgcaaaaataaccagtgggtaattttttctctgaaaatttagctttaataagtcgtaa

SEQ ID NO: 636094 - DNA, 120 bp, Artificial Sequence
  ENSG00000180773_36 (sequence is synthesized)
aatttcctaaagattttggagacgatatttcgattataccagctcttgcttttattttgggagcctggagaaatgagagtgattgcacctgtcaaattttgtatctcatcacttttggat

SEQ ID NO: 636095 - DNA, 120 bp, Artificial Sequence
  ENSG00000180773_37 (sequence is synthesized)
catcacactgtgactaaaatgacttcagcattttgttggccaccacagtgaagaactattccctgaaagttaatcagttgcctgagagacttttctgctactgaggggaaagaaaggaaa

SEQ ID NO: 636096 - DNA, 120 bp, Artificial Sequence
  ENSG00000180773_38 (sequence is synthesized)
gctttatttacctctaatgagctccgttccaagtcagttaatcactgttcccttacacccaagagtttcatcagtatcagagtcaacttgtcaaaacactggttctcagacgtttttttc

SEQ ID NO: 636097 - DNA, 120 bp, Artificial Sequence
  ENSG00000180773_39 (sequence is synthesized)
agagggacttcttttccccacatggccagatttctttacaattaagaaaataagagctacagcgtattcttggttaaaaaccagtttagatgatgttaccaaatgaaaacaagtctgtat

SEQ ID NO: 636098 - DNA, 120 bp, Artificial Sequence
  ENSG00000180773_40 (sequence is synthesized)
tagcaaatgccacattatatttagtcgtattctcactaaattctccgttattaaaatgatttctgcatcttgcctggaaaatgcacttacatatttacaagcgttgtatgtcaatgtgca

SEQ ID NO: 636099 - DNA, 120 bp, Artificial Sequence
  ENSG00000180773_41 (sequence is synthesized)
tgttttgaatttcctaacagtgtctaatcttagtagtttcatagtagttatgtaaaatctctttaactgcaaaatactataaaatattacttgaaatattaaagtattagtgccatttct

SEQ ID NO: 636100 - DNA, 120 bp, Artificial Sequence
  ENSG00000180773_42 (sequence is synthesized)
agctgtggcaaggcacaagtcttactatagcttacttatgtcttctcatagatttcagtacagcatctgagtagtggatctgtttactgacagtatacacaaactaggtcttgacctcac

SEQ ID NO: 636101 - DNA, 120 bp, Artificial Sequence
  ENSG00000180773_43 (sequence is synthesized)
ttctttcttcatttaaaaggagaagatttgaaatagagctagtgtaaataataaataaaattatttaaatagcatcagtggctcaataccatctgttgaggaataaaataatttggttaa

SEQ ID NO: 636102 - DNA, 120 bp, Artificial Sequence
  ENSG00000180773_44 (sequence is synthesized)
catacagaacatcgataatatacaataatgactttttaaaaaatgagtctgatctttttggctcacctagcttcccttaataagaaaatttgagaaacttggatctgaaaagtgtagttg

SEQ ID NO: 636103 - DNA, 120 bp, Artificial Sequence
  ENSG00000180773_45 (sequence is synthesized)
tacttcctaacattaaattcctggctgtaatagttaatactttggcagcattatggttagtcttgtttatgccattggcacttactaggctaaactttctgaaactgattggttttgacc

SEQ ID NO: 636104 - DNA, 120 bp, Artificial Sequence
  ENSG00000180773_46 (sequence is synthesized)
tatgagataaggaaacatgcctaagaaatggctagaaatgctatttattgccctatgataagtgaaatagcaaatcactcttgattcttaaaatttcatattaaaattagctagttccta

SEQ ID NO: 636105 - DNA, 120 bp, Artificial Sequence
  ENSG00000180773_47 (sequence is synthesized)
catgcatgcgtgcacaagtatatgcagacacacacacaaatcagtaatctatgtgaactagatactaatactaaattactatttaaattgggtccagaaagatgctgttttgaaaagaac

SEQ ID NO: 636106 - DNA, 120 bp, Artificial Sequence
  ENSG00000180773_48 (sequence is synthesized)
actaaaaatatttcattagcgttttcttgataacaaataggaaaatatatgtttacaccctgaataaattcagctgtgggtggatttttgtttttcaaaatgattttgttagtttgaatg

SEQ ID NO: 636107 - DNA, 120 bp, Artificial Sequence
  ENSG00000180773_49 (sequence is synthesized)
aaacctaaatataacattcaagtcaattcttttaacatttttctttataacagaatatgaaaaacgctgtcttaaagtgttgtaacttttctgaattttcaataaaatattttgcttgca

SEQ ID NO: 636108 - DNA, 120 bp, Artificial Sequence
  ENSG00000180773_50 (sequence is synthesized)
ttttttcccaatgatgctttaaggaagttatcattgttctgcttttcaaatgctgcagccccattcggaatctccagatgaatcctcattttactccttgttatcccagagtttcgaaca

SEQ ID NO: 636109 - DNA, 120 bp, Artificial Sequence
  ENSG00000180773_51 (sequence is synthesized)
ggtcgtgctgaccagaatgaacaggagatacctgtagcttgctcacttggcaaagtttgtttgttttttgctgctttcctcccatcttgtttcttggcgacagggcgtgtttgtttacgg

SEQ ID NO: 636110 - DNA, 120 bp, Artificial Sequence
  ENSG00000180773_52 (sequence is synthesized)
ccactgccactacactagtctgtaatccctttacctgaagtatatgcaataacatcaactgatttcattgtccatagtctggggattcttaacccagtttccataaaataatctattgat

SEQ ID NO: 636111 - DNA, 120 bp, Artificial Sequence
  ENSG00000180773_53 (sequence is synthesized)
gggattcagggattcttcaaatcccttaaaatagtttgcaagatttagtatttctgtatgtatgtatgtgttttgctgttgagcagttgtatagctttcatcttgcaaaggtgtcaaaga

SEQ ID NO: 636112 - DNA, 120 bp, Artificial Sequence
  ENSG00000180773_54 (sequence is synthesized)
cacaaaaaaggttgagaatccctgttctagtcactcctgatctaattaatcttatatattatttccaaggtaattgttgtaaaatcttcattagcaatttattaaaaattcttattatgg

SEQ ID NO: 636113 - DNA, 120 bp, Artificial Sequence
  ENSG00000180773_55 (sequence is synthesized)
atctgtgtttcatttccctcctctttgattttcaaaagttgtagtttctcttatagcactgagtgggaggaaacagacaggaagttcatataggctttccggagttcatgaccccttagc

SEQ ID NO: 636114 - DNA, 120 bp, Artificial Sequence
  ENSG00000180773_56 (sequence is synthesized)
taaacatgtaagagtcagttaagcagaaaaggaggtttccaaaatagaaggaacagcgtgagctgctgttgggagaagtgaaatagcatcctgcttgccttaaataatagtttagcattg

SEQ ID NO: 636115 - DNA, 120 bp, Artificial Sequence
  ENSG00000180773_57 (sequence is synthesized)
aatgagccaaacattgtaataccctttcattctaaacccagtatatggttttagacatgtatcaccagtatatcacacagttctatctatgcttcagatattctagatctctctattccc

SEQ ID NO: 636116 - DNA, 120 bp, Artificial Sequence
  ENSG00000180773_58 (sequence is synthesized)
caaattatcctagagctttcacacttcagttgctttgttcattctttttacttggccttgaattctgcttccaatcaggcaaagcagagaatgtaagatggtgagaagagtagggaccag

SEQ ID NO: 636117 - DNA, 120 bp, Artificial Sequence
  ENSG00000180773_59 (sequence is synthesized)
acttggggtatctggaagaagtggccatttagagccaatgtgtactttgtccggatggtgagatttggaataagcctgtgagtcaggaccaagcaatcaaagccagagtcaggacatata

SEQ ID NO: 636118 - DNA, 120 bp, Artificial Sequence
  ENSG00000180773_60 (sequence is synthesized)
gaaggaaacctgttttgggcagcagcagagctataaggtagaaagccagtgtcaggaaccaggtatcttagagaactgaaagagcaataaaaatagagtggagaatgaatttctgctagg

SEQ ID NO: 636119 - DNA, 120 bp, Artificial Sequence
  ENSG00000180773_61 (sequence is synthesized)
caccagcagcagtggttgataacttgactatatggctctcagcttaggccttgagtgtgcttatgtatttcctgttgtggcaggagccatacctagtgttcacagcctgggacttgcagg

SEQ ID NO: 636120 - DNA, 120 bp, Artificial Sequence
  ENSG00000180773_62 (sequence is synthesized)
tggaagcaggtaatcaggagcattttgctcagatggaatgtatgggcatgagggaaacaattgcttttggcagtgaaatcctaacagcttggctacatttaacagaggatgctttaagtg

SEQ ID NO: 636121 - DNA, 120 bp, Artificial Sequence
  ENSG00000180773_63 (sequence is synthesized)
tttgttgaaacaattattcaattttataacacatttgctgttgtgaagctcaaaattatatgatttttcttacattttttaattatttagaataagtaaagatgtaactggtcttctttt

SEQ ID NO: 636122 - DNA, 120 bp, Artificial Sequence
  ENSG00000180773_64 (sequence is synthesized)
cataataattttttattgttcaatttcttgaaagctatataagatgtaatttcttaaaatgaaagctacataagatgtatttttcaatatttttaaaacaattttattcacccagctggg

SEQ ID NO: 636123 - DNA, 120 bp, Artificial Sequence
  ENSG00000180773_65 (sequence is synthesized)
aagcttcattaatgtcaaggtttatataccttgacattatataccaaaagtagaatataatccttttaaaatgattgcatttttttgtaagaaagaaaacactcttccctgtgcatggga

SEQ ID NO: 636124 - DNA, 120 bp, Artificial Sequence
  ENSG00000180773_66 (sequence is synthesized)
attttaggtgggaaagtagaactcttaaatgagaaaaccgtgggaagatgtttctgctgaaagaggacatatgtgttaatcactgccccgaagttgcagcacactgaacccacagtgttt

SEQ ID NO: 636125 - DNA, 120 bp, Artificial Sequence
  ENSG00000180773_67 (sequence is synthesized)
tctctgctttgttacttaaaaaatgcaagatggttgggtttttcttttgaattttataaaatattaaaatgtttttttaaatacagcatattaattttattattctgcaaccctaaagag

SEQ ID NO: 636126 - DNA, 120 bp, Artificial Sequence
  ENSG00000180773_68 (sequence is synthesized)
tggattctgtaatgtttcttcctctaggtcctacaattctgttttctcttcatgtcattaacgtttaaaaagtcttctttttctgggcttaagaaagttactgaagtctttatcaagaca

SEQ ID NO: 636127 - DNA, 120 bp, Artificial Sequence
  ENSG00000180773_69 (sequence is synthesized)
tgcatgcgaagttttgacaggaggttatccataatgtagaaatctaaagatatttataaaactgaaaattgctgtgctgttttgaagcactgtatatcaaagagataagttaatttgccc

SEQ ID NO: 636128 - DNA, 120 bp, Artificial Sequence
  ENSG00000180773_70 (sequence is synthesized)
aaaagaataacaacaaccttacccagcaactgtatgtctcttatttaatgtaattttaaacaatagattgtatgtgtaatttagagaacttagcaagttgaaaccgtttagatgtctgct

SEQ ID NO: 636129 - DNA, 120 bp, Artificial Sequence
  ENSG00000180773_71 (sequence is synthesized)
tttagacttaagatggatgacatttctgcaactgatgacatacctccaaagattttcacccaagaactatacttaagtttaatgtgagtttttcttctatgtaaagatcaacgagggtat

SEQ ID NO: 636130 - DNA, 120 bp, Artificial Sequence
  ENSG00000180773_72 (sequence is synthesized)
gactcaggatttaagacatatagtaggctcagtttttaaaaagaaagttgagaaaactttagctctttgaggggctgagtctaaccttcagaatattggcttatcccaaagtgaaatctt

SEQ ID NO: 636131 - DNA, 120 bp, Artificial Sequence
  ENSG00000180773_73 (sequence is synthesized)
gctttccagtcttgtgaaaatgaattgttcttgtatcatctagaaatttagttagagatcaatttgccttttttacaaacaagcatttttagttagtaaggttctggcctaatttggtat

SEQ ID NO: 636132 - DNA, 120 bp, Artificial Sequence
  ENSG00000180773_74 (sequence is synthesized)
agtctccaccttcaatgagtttatagtctatttgggaaagaaatgcgtttaaatcacagagcagtgtataggaattactggagtgatgatgcgtaacaaatgctagggatcttgaaagaa

SEQ ID NO: 636133 - DNA, 120 bp, Artificial Sequence
  ENSG00000180773_75 (sequence is synthesized)
gggagatctgattaagtggaacaggaatgttaagagaagtgatgtctgaaatgatcaggaggtagtacatgcttctttatactgaaacaaagtcgtggaggtagaaatgcattgtaactt

SEQ ID NO: 636134 - DNA, 120 bp, Artificial Sequence
  ENSG00000180773_76 (sequence is synthesized)
ttgaaaaccttttttgacattttgtcatcgttaatagatttgagtaacttctcattctaataatagtttaatggttcagcaaagtaatatgcaattgatcagaaaagaagaatataaact

SEQ ID NO: 636135 - DNA, 120 bp, Artificial Sequence
  ENSG00000180776_0 (sequence is synthesized)
gtggggtgggggcggggcctggctgggcgccgggacgggaggagtcccggcggcgcctcggacttttgctcccacaagtcctgcctcggaggcgggggagctggaccagcagccgcctgg

SEQ ID NO: 636136 - DNA, 120 bp, Artificial Sequence
  ENSG00000180776_1 (sequence is synthesized)
agcgtccgagtcaccgtcgccggggctcccgcgctccccagaacggtgggacgcggggctcggcagccgccagcggaacatggcgccctggacgctgtggcgctgctgccagcgcgtcgt

SEQ ID NO: 636137 - DNA, 120 bp, Artificial Sequence
  ENSG00000180776_2 (sequence is synthesized)
gggctgggtgccggtgctcttcatcaccttcgtggtcgtctggtcctactacgcgtacgtggtggagctctgcgtgtttactatttttggaaatgaagaaaatggaaagaccgttgttta

SEQ ID NO: 636138 - DNA, 120 bp, Artificial Sequence
  ENSG00000180776_3 (sequence is synthesized)
ccttgtggctttccatctgttctttgttatgtttgtatggtcctattggatgacaattttcacatctcccgcttccccctccaaagagttctacttgtccaattctgaaaaggaacgtta

SEQ ID NO: 636139 - DNA, 120 bp, Artificial Sequence
  ENSG00000180776_4 (sequence is synthesized)
tgaaaaagaattcagccaagaaagacaacaagaaattttgagaagagcagcaagagctttacctatctataccacatcagcttcaaaaactatcagatattgtgaaaaatgtcagctgat

SEQ ID NO: 636140 - DNA, 120 bp, Artificial Sequence
  ENSG00000180776_5 (sequence is synthesized)
taaacctgatcgggcgcatcactgctcagcctgtgactcatgtattcttaagatggatcatcactgtccttgggtgaataactgtgtgggattttctaattacaaattcttcctgctgtt

SEQ ID NO: 636141 - DNA, 120 bp, Artificial Sequence
  ENSG00000180776_6 (sequence is synthesized)
tttattgtattccctattatattgccttttcgtggctgcaacagttttagagtactttataaaattttggacgaatgaactgacagatacacgtgcaaaattccacgtactttttctttt

SEQ ID NO: 636142 - DNA, 120 bp, Artificial Sequence
  ENSG00000180776_7 (sequence is synthesized)
aaatagaacaacaatagaatcattccgcgcacccacgttttcatacggacctgatggaaatggtttctctcttggatgcagtaaaaattggagacaagtctttggtgatgaaaagaaata

SEQ ID NO: 636143 - DNA, 120 bp, Artificial Sequence
  ENSG00000180776_8 (sequence is synthesized)
ttggctacttccaatattttcaagcttgggtgatggttgcagttttccaactcgccttgtggggatggatccagaacaagcttctgttacaaaccagaatgagtatgccagaagtagtgg

SEQ ID NO: 636144 - DNA, 120 bp, Artificial Sequence
  ENSG00000180776_9 (sequence is synthesized)
ctcaaatcaaccttttcctatcaaaccacttagtgaatcaaaaaaccgcttgttggacagtgaatctcagtggctggagaatggagctgaagaaggcatcgtcaaatcagggacaaataa

SEQ ID NO: 636145 - DNA, 120 bp, Artificial Sequence
  ENSG00000180776_10 (sequence is synthesized)
ccatgtaacagtggcaatagaaaattgagtaccacttgttcataactaaccatttgaataagagcaaggtgtatgaaaacattatagactggtattttcaattttcatttgcaagaaaat

SEQ ID NO: 636146 - DNA, 120 bp, Artificial Sequence
  ENSG00000180776_11 (sequence is synthesized)
gatcagtggaatgaaataactgaagtataacagaagatatattttttaaaacggaaagcctttgtacagttcctgggattcacagaagcactactccagagcagaatgatgccttaatct

SEQ ID NO: 636147 - DNA, 120 bp, Artificial Sequence
  ENSG00000180776_12 (sequence is synthesized)
taagtgtccatttgtgcagcattgacttagagctacaaaagtgacttaatgttattctggaaataatacttacctgttatgagttgctataatatgagctgtcatcacattttaacatgc

SEQ ID NO: 636148 - DNA, 120 bp, Artificial Sequence
  ENSG00000180776_13 (sequence is synthesized)
atatgtattttttgatacctgaattacattattagaataagtatccatatacattttcactccaaaaacacaagcttaaaaactttaaagtacatctagggcaaatggtggctgaaagtg

SEQ ID NO: 636149 - DNA, 120 bp, Artificial Sequence
  ENSG00000180776_14 (sequence is synthesized)
agtgaataatattcaaattactgttgcttgtactgtataaggaaaactgcttttttaaattgggtatttgctaatttataattactattttatacttttcaacatttttaataacttttt

SEQ ID NO: 636150 - DNA, 120 bp, Artificial Sequence
  ENSG00000180776_15 (sequence is synthesized)
gcattaatacaaccatgtagtagagcaagtgcccaaggtttaaagggaacttggcagtataagaaatattttgggttctctctgctattttatagctttttttgttgaactttcaggggt

SEQ ID NO: 636151 - DNA, 120 bp, Artificial Sequence
  ENSG00000180776_16 (sequence is synthesized)
atgtacatgggcagagaaacacaaaggtacatgtgctggagaatactggacacagtaggaagaagtataggtgtccagaagaaaatctaagaggaatattgtaatttgttaaaaaaaata

SEQ ID NO: 636152 - DNA, 120 bp, Artificial Sequence
  ENSG00000180776_17 (sequence is synthesized)
gttttgagttttaacagcagttagaataaagcatgctgttgacttcactttcaaatttcagtgtaggtaatgactaaaaattactttgaaactttttacagtaatactgtaatagcttaa

SEQ ID NO: 636153 - DNA, 120 bp, Artificial Sequence
  ENSG00000180776_18 (sequence is synthesized)
acagtgatttaaaatgcaatttaaactaggcaaaaaaaactttagagtaagttttcctcctggctgtcagttggaaattctaacctgagtggtcattttacattcccagtctcttgagaa

SEQ ID NO: 636154 - DNA, 120 bp, Artificial Sequence
  ENSG00000180776_19 (sequence is synthesized)
gtggattctactcttagacgcacagtctgaagtctgacttcctaacggcaacccctttatgactagacacatttctcctttttccttttaaaatctaagcgacaggaggtgttgcattaa

SEQ ID NO: 636155 - DNA, 120 bp, Artificial Sequence
  ENSG00000180776_20 (sequence is synthesized)
ctccaaggaaaagtacagaataaacaatgtagaaatgtcactcctcatttacaccttttagacagacagacacacacacacacacaccccccccaaaataattgattgcttccagtgagt

SEQ ID NO: 636156 - DNA, 120 bp, Artificial Sequence
  ENSG00000180776_21 (sequence is synthesized)
gggtggagatgaatctcagcagcatctgtgagtactacaggttggagcttcctgtctgtaaaatgggactgcaggggagggggtgttgtgaataagttggactggatgacttctaacatt

SEQ ID NO: 636157 - DNA, 120 bp, Artificial Sequence
  ENSG00000180776_22 (sequence is synthesized)
gaaactccatctcaaaaatatatatatatatcaattaccaactaaaaacataactccagtttggcagtttgcatattataaggagataaatgttaaaacatacttgactactttcagaaa

SEQ ID NO: 636158 - DNA, 120 bp, Artificial Sequence
  ENSG00000180776_23 (sequence is synthesized)
tgttctcctggtactttttgcatttctacattcagataaaaagatttgcatgcacctggctaacgccaagggaacttcatttttttcttcactattatgcactttcatggtatagtcttt

SEQ ID NO: 636159 - DNA, 120 bp, Artificial Sequence
  ENSG00000180776_24 (sequence is synthesized)
ctcagttcttttaatttttgttatttaacatctttaatagcacagcaaacatcttttcagaaattttcagttaaagcctttgaattacttatctttgatttaatttacagccagcatttt

SEQ ID NO: 636160 - DNA, 120 bp, Artificial Sequence
  ENSG00000180776_25 (sequence is synthesized)
gccacgttctaaataatatttagctcaactgattcatacgtattaatgaccattctagcaaaggcctacaagtggtgtgggaatcagggaaaggctgcctctttggtatctcaactggta

SEQ ID NO: 636161 - DNA, 120 bp, Artificial Sequence
  ENSG00000180776_26 (sequence is synthesized)
ttgattattgctatcaactatttggggagaaaaaatcaaaatgaagccctgtcaaattttagaagtactatctttggtccttcaaacactttgtgatgacaccttaagaaaaataaagtt

SEQ ID NO: 636162 - DNA, 120 bp, Artificial Sequence
  ENSG00000180776_27 (sequence is synthesized)
gaagttcaggtcttgccattgccattacagacaaattaggagacttggtttacctgggaacaaatttacttgaatattcagtacctgaaactatgccaaaccaaagagcagctgcagtac

SEQ ID NO: 636163 - DNA, 120 bp, Artificial Sequence
  ENSG00000180776_28 (sequence is synthesized)
attcgttattttaaatgaacaagtttacaaagtttattttcatctatacgtaaggatgatttttttaaaactttttacatattagtggttatgatccaatgtgtcatgagtgaatttaac

SEQ ID NO: 636164 - DNA, 120 bp, Artificial Sequence
  ENSG00000180776_29 (sequence is synthesized)
tgtaaggtggtttaaatcaaatatgcaatgtttacttgaattgtatttctattagcagattttgactatgtttacaggacggtttaaattaaggattatcaggcatgtgagatctttcag

SEQ ID NO: 636165 - DNA, 120 bp, Artificial Sequence
  ENSG00000180776_30 (sequence is synthesized)
ttatctttaaagtagatgtatattaagggcttagatttaggatctacatattctgggcattgaataggcagtaacttacaaataagttttgcttaccttttgttctagggactagcactg

SEQ ID NO: 636166 - DNA, 120 bp, Artificial Sequence
  ENSG00000180776_31 (sequence is synthesized)
ctatcaatggaaagtatttttaactaatctgttattaagaaagtcatatttttgcatttcagccaaaataaagaccgcctgtaataatctgttagaaacagataatacatgtctgaaatc

SEQ ID NO: 636167 - DNA, 120 bp, Artificial Sequence
  ENSG00000180776_32 (sequence is synthesized)
aatccatatgtttcatatgatctaaactgtattttccaatttaaattaaaaatgtaatatagattcagaaaggttcatatttttctaatgacttcattctatattattttgttaggttgc

SEQ ID NO: 636168 - DNA, 120 bp, Artificial Sequence
  ENSG00000180776_33 (sequence is synthesized)
agaagcaaggaattgtacttgtattaaaagatgaagaaagctattaggtatatttgtacatgactgcaaatgagtctatgcccgtttaaaagaaaagatggacactattttaaagtgagc

SEQ ID NO: 636169 - DNA, 120 bp, Artificial Sequence
  ENSG00000180776_34 (sequence is synthesized)
tttaatatgcttttatataaacaaatttgaagtacagtttagtttggttgtgtttacctaacaagtaccataagccttgtgtttgttcttatttgtataatcctagcctgtgacttaatg

SEQ ID NO: 636170 - DNA, 120 bp, Artificial Sequence
  ENSG00000180776_35 (sequence is synthesized)
ttgatgctttgctttgtcttttggctggcctaacctacattgacatgtacacagaacattttaaaactttttttttcaaaagtcataatgaattactttattaataaacaaagtcttgta

SEQ ID NO: 636171 - DNA, 83 bp, Artificial Sequence
  ENSG00000180776_36 (sequence is synthesized)
ccacagagttttgctctgtctcccaggcaggagtgcagtggcgggatcttggctcgctgcaacctctgccttccaggttcaat

SEQ ID NO: 636172 - DNA, 88 bp, Artificial Sequence
  ENSG00000180776_37 (sequence is synthesized)
atgccaccatgcccggctaattttcacatttttagaatcactaactcctgacctcaaataatccacccacctcagcttcccaaagtgc

SEQ ID NO: 636173 - DNA, 120 bp, Artificial Sequence
  ENSG00000180776_38 (sequence is synthesized)
cccggtaaattttttggagtaccttctgtatgctaaataataaactaggaatagctctgtcatttcctagtacagcataaattttatggttgctactgtaggtttataatttgtttataa

SEQ ID NO: 636174 - DNA, 120 bp, Artificial Sequence
  ENSG00000180776_39 (sequence is synthesized)
tttggcctaatttccatcagccatactaatattggattttaaaaggaggcaactttttttctttttgaaccaaaggaatgagttagctttgaaaacataatttgggatattatagtatgg

SEQ ID NO: 636175 - DNA, 120 bp, Artificial Sequence
  ENSG00000180776_40 (sequence is synthesized)
ggatattatagtatggattcttctacctttgtttcaactccttagtaatcttgattctagcaaactagaatgagatttaagagataccaattattgctgggtgtggtggctcatgcctgt

SEQ ID NO: 636176 - DNA, 120 bp, Artificial Sequence
  ENSG00000180777_0 (sequence is synthesized)
caagagcttggcgatacagaaatttctgctggtgttggggcgggtgcgggaactgaagacgggcgagtgcgagccgggggcgggtgctggggaagggtaagcgggaagcgagggcgaggg

SEQ ID NO: 636177 - DNA, 120 bp, Artificial Sequence
  ENSG00000180777_1 (sequence is synthesized)
gtaggggctggggaagggcgagcgggaggcgcgggctctctctagcagggggctgcagccatgaagaggctcttagctgccgctggcaagggcgtgcggggcccggagcccccgaacccc

SEQ ID NO: 636178 - DNA, 120 bp, Artificial Sequence
  ENSG00000180777_2 (sequence is synthesized)
ttcagcgaacgggtctacactgagaaggactacgggaccatctacttcggggatctagggaagatccatacagctgcctcccggggccaagtccagaagctggagaagatgacagtaggg

SEQ ID NO: 636179 - DNA, 120 bp, Artificial Sequence
  ENSG00000180777_3 (sequence is synthesized)
aagaagcccgtcaacctgaacaaaagagatatgaagaagaggactgctctacactgggcctgtgtcaatggccatgcagaagtagtaacatttctggtagacagaaagtgccagcttaat

SEQ ID NO: 636180 - DNA, 120 bp, Artificial Sequence
  ENSG00000180777_4 (sequence is synthesized)
gtccttgatggcgaagggaggacacctctgatgaaggctctacaatgcgagagggaggcttgtgcaaatattctcatagatgctggtgctgatctaaattatgtagatgtgtatggcaac

SEQ ID NO: 636181 - DNA, 120 bp, Artificial Sequence
  ENSG00000180777_5 (sequence is synthesized)
acggctctccattatgccgtttatagtgagaatttgttaatggtggcaacactgctgtcctatggtgcagtcatcgaggtgcaaaacaaggctagcctcacaccccttttactggccata

SEQ ID NO: 636182 - DNA, 120 bp, Artificial Sequence
  ENSG00000180777_6 (sequence is synthesized)
cagaaaagaagcaagcaaactgtggaatttttactaacaaaaaatgcaaatgcaaacgcatttaatgagtctaaatgcacagccctcatgcttgccatatgtgaaggctcatcagagata

SEQ ID NO: 636183 - DNA, 120 bp, Artificial Sequence
  ENSG00000180777_7 (sequence is synthesized)
gtcggcatgcttcttcagcaaaatgttgacgtctttgctgaagacatacatggaataactgcagaacgttatgctgctgcttgtggagttaattacattcatcaacaacttttggaacat

SEQ ID NO: 636184 - DNA, 120 bp, Artificial Sequence
  ENSG00000180777_8 (sequence is synthesized)
atacgaaaattacctaaaaatcctcaaaataccaatccagaaggaacatctacaggaacacctgatgaggctgcacccttggcggaaagaacacctgacacggctgaaagcttgctggaa

SEQ ID NO: 636185 - DNA, 120 bp, Artificial Sequence
  ENSG00000180777_9 (sequence is synthesized)
aaaacacctgacgaggctgcacgcttggtggagggaacgtctgccaaaattcaatgtctggggaaagcaacatctggaaagtttgaacagtcaacagaagaaacacctaggaaaattttg

SEQ ID NO: 636186 - DNA, 120 bp, Artificial Sequence
  ENSG00000180777_10 (sequence is synthesized)
aggcctacaaaagaaacatctgagaaattttcatggccagcaaaagaaagatctaggaagatcacatgggaggaaaaagaaacatctgtaaagactgaatgcgtggcaggagtaacacct

SEQ ID NO: 636187 - DNA, 120 bp, Artificial Sequence
  ENSG00000180777_11 (sequence is synthesized)
aataaaactgaagttttggaaaaaggaacatctaatatgattgcatgtcctacaaaagaaacatctacaaaagcaagtacaaatgtggatgtgagttctgtagagcctatattcagtctt

SEQ ID NO: 636188 - DNA, 120 bp, Artificial Sequence
  ENSG00000180777_12 (sequence is synthesized)
tttggcacacggactattgaaaattcacagtgtacaaaagttgaggaagactttaatcttgctaccaagattatctctaagagtgctgcacagaattatacgtgtttacctgatgctaca

SEQ ID NO: 636189 - DNA, 120 bp, Artificial Sequence
  ENSG00000180777_13 (sequence is synthesized)
tatcaaaaagatatcaaaacaataaatcacaaaatagaagatcagatgttcccatcagaatccaaacgagaggaagatgaagaatattcttgggattctgggagtctctttgagagttct

SEQ ID NO: 636190 - DNA, 120 bp, Artificial Sequence
  ENSG00000180777_14 (sequence is synthesized)
gcaaagactcaagtgtgtatacctgagtctatgtatcagaaagtaatggagataaatagagaagtagaagagcttcctgagaagccatctgccttcaagcctgccgttgaaatgcaaaag

SEQ ID NO: 636191 - DNA, 120 bp, Artificial Sequence
  ENSG00000180777_15 (sequence is synthesized)
actgttccaaataaagcctttgaattgaagaatgaacaaacattgagagcagctcagatgttcccatcagaatccaaacaaaaggacgatgaagaaaattcttgggattctgagagtccc

SEQ ID NO: 636192 - DNA, 120 bp, Artificial Sequence
  ENSG00000180777_16 (sequence is synthesized)
tgtgagacggtttcacagaaggatgtgtatttacccaaagctacacatcaaaaagaattcgataccttaagtggaaaattagaagagtctcctgttaaagatggtcttctgaagcctacc

SEQ ID NO: 636193 - DNA, 120 bp, Artificial Sequence
  ENSG00000180777_17 (sequence is synthesized)
tgtggaaggaaagtttctcttccaaataaagccttagaattaaaggacagagaaacattcaaagcagagtctcctgataaagatggtcttctgaagcctacctgtggaaggaaagtttct

SEQ ID NO: 636194 - DNA, 120 bp, Artificial Sequence
  ENSG00000180777_18 (sequence is synthesized)
cttccaaataaagccttagaattaaaggacagagaaacactcaaagcagagtctcctgataatgatggtcttctgaagcctacctgtggaaggaaagtttctcttccaaataaagcttta

SEQ ID NO: 636195 - DNA, 120 bp, Artificial Sequence
  ENSG00000180777_19 (sequence is synthesized)
caaaaggatgatgaagaaaattcttgggattttgagagtttccttgagactctcttacagaatgatgtgtgtttacccaaggctacacatcaaaaagaattcgataccttaagtggaaaa

SEQ ID NO: 636196 - DNA, 120 bp, Artificial Sequence
  ENSG00000180777_20 (sequence is synthesized)
ttagaagagtctcctgataaagatggtcttctgaagcctacctgtggaatgaaaatttctcttccaaataaagccttagaattgaaggacagagaaacattcaaagcagaggatgtgagt

SEQ ID NO: 636197 - DNA, 120 bp, Artificial Sequence
  ENSG00000180777_21 (sequence is synthesized)
tctgtagagtccacattcagtctttttggcaaaccgactactgaaaattcacagtctacaaaagttgaggaagactttaatcttactaccaaggagggagcaacaaagacagtaactgga

SEQ ID NO: 636198 - DNA, 120 bp, Artificial Sequence
  ENSG00000180777_22 (sequence is synthesized)
caacaggaacgtgatattggcattattgaacgagctccacaagatcaaacaaataagatgcccacatcagaattaggaagaaaagaagatacaaaatcaacttcagattctgagattatc

SEQ ID NO: 636199 - DNA, 120 bp, Artificial Sequence
  ENSG00000180777_23 (sequence is synthesized)
tctgtgagtgatacacagaattatgagtgtttacctgaggctacatatcaaaaagaaataaagacaacaaatggcaaaatagaagagtctcctgaaaagccttctcactttgagcctgcc

SEQ ID NO: 636200 - DNA, 120 bp, Artificial Sequence
  ENSG00000180777_24 (sequence is synthesized)
actgaaatgcaaaactctgttccaaataaaggcttagaatggaagaataaacaaacattgagagcagattcaactaccctatcaaaaatcttggatgcacttccttcttgtgaaagagga

SEQ ID NO: 636201 - DNA, 120 bp, Artificial Sequence
  ENSG00000180777_25 (sequence is synthesized)
agggaacttaaaaaagataactgtgaacaaattacagcaaaaatggaacaaacgaaaaataagttttgtgtactacaaaaggaactgtcagaagcgaaagaaataaaatcacagttagag

SEQ ID NO: 636202 - DNA, 120 bp, Artificial Sequence
  ENSG00000180777_26 (sequence is synthesized)
aaccaaaaagctaaatgggaacaagagctctgcagtgtgagattgactttaaatcaagaagaagagaagagaagaaatgtcgatatattaaaagaaaaaattagacccgaagagcaactt

SEQ ID NO: 636203 - DNA, 120 bp, Artificial Sequence
  ENSG00000180777_27 (sequence is synthesized)
aggaaaaagttagaagtgaaacaacaacttgaacagactctcagaatacaagatatagaattgaaaagtgtaacaagtaatttgaatcaggtttctcacactcatgaaagtgaaaatgat

SEQ ID NO: 636204 - DNA, 120 bp, Artificial Sequence
  ENSG00000180777_28 (sequence is synthesized)
ctctttcatgaaaattgcatgttgaaaaaggaaattgccatgctaaaactggaagtagccacactgaaacatcaacaccaggtgaaggaaaataaatactttgaggacattaagatttta

SEQ ID NO: 636205 - DNA, 120 bp, Artificial Sequence
  ENSG00000180777_29 (sequence is synthesized)
caagaaaagaatgctgaacttcaaatgaccctaaaactgaaacagaaaacagtaacaaaaagggcatctcagtatagagagcagcttaaagttctgacggcagagaacacgatgctgact

SEQ ID NO: 636206 - DNA, 120 bp, Artificial Sequence
  ENSG00000180777_30 (sequence is synthesized)
tctaaattgaaggaaaaacaagacaaagaaatactggagacagaaattgaatcacaccatcctagactggcttctgctttacaagaccatgatcaaagtgtcacatcaagaaaaaaccaa

SEQ ID NO: 636207 - DNA, 120 bp, Artificial Sequence
  ENSG00000180777_31 (sequence is synthesized)
gaacttgctttccacagtgcaggagatgctcctttgcaaggaataatgaatgttgatgtgagtaatacaatatataacaatgaggtgctccatcaaccactttatgaagctcaaaggaaa

SEQ ID NO: 636208 - DNA, 120 bp, Artificial Sequence
  ENSG00000180777_32 (sequence is synthesized)
tccaaaagcccaaaaattaatctcaattatgcaggagatgatctaagagaaaatgcattggtttcagaacatgcacaaagagaccgatgtgaaacacagtgtcaaatgaagaaagctgaa

SEQ ID NO: 636209 - DNA, 120 bp, Artificial Sequence
  ENSG00000180777_33 (sequence is synthesized)
cacatgtatcaaaatgaacaagataatgtggacaaacacactgaacagcaggagtctctggagcagaaattatttcaactagaaagcaaaaataggtggcttcgacagcaattagtttat

SEQ ID NO: 636210 - DNA, 120 bp, Artificial Sequence
  ENSG00000180777_34 (sequence is synthesized)
gcacataagaaagttaacaaaagcaaggtaacaattaatattcagtttcctgagatgaaaatgcaacgtcatctaaacgagaaaaatgaggaggtattcaattatggtaaccatttaaaa

SEQ ID NO: 636211 - DNA, 120 bp, Artificial Sequence
  ENSG00000180777_35 (sequence is synthesized)
gaacgtatagatcaatatgaaaaagagaaagcagaaagagaagtaagtatcaaaaaatataaatacttttcaaacttcctgaaagaaagtggccttggctaaatgctgaatctagttgaa

SEQ ID NO: 636212 - DNA, 120 bp, Artificial Sequence
  ENSG00000180777_36 (sequence is synthesized)
tatatatatatataaatagatgataaatgtacttactatatcagcttagaaacatgcctcatttccaccaaatgaaagtgaaagctaagagacgttttactttgagtaaaggtattgtgt

SEQ ID NO: 636213 - DNA, 120 bp, Artificial Sequence
  ENSG00000180777_37 (sequence is synthesized)
cactgatgaaattataagagtttaagttaaagatttttaatagattaacattaatgacattggcttatactgctgaaataaaggttttaatgtctctttgtggccacattttttgactac

SEQ ID NO: 636214 - DNA, 120 bp, Artificial Sequence
  ENSG00000180777_38 (sequence is synthesized)
ataaagatggtcttctgaagcctacctgtggaaggaaagtttctcttccaaataaagccttagaattaaaggacagagaaacactcaaagcagagtctcctgataaagatggtcttctga

SEQ ID NO: 636215 - DNA, 120 bp, Artificial Sequence
  ENSG00000180777_39 (sequence is synthesized)
agcctacctgtgtaaggaaagtttctcttccaaataaagccttagaattaaaggacagagaaacattaaaagcagctcagatgttcccatcagaatccaaacaaaaggatgatgaagaaa

SEQ ID NO: 636216 - DNA, 120 bp, Artificial Sequence
  ENSG00000180777_40 (sequence is synthesized)
attcttgggattttgagagtttccttgaggctctcttacagaatgatgggtgtttacccaaggctacacatcaaaaagaattcgataccttaagtggaaaattagaagatttcaggccgg

SEQ ID NO: 636217 - DNA, 90 bp, Artificial Sequence
  ENSG00000180777_41 (sequence is synthesized)
acctacactccagcctgggtgacagggccagactctgtgaaaaaaaaaaaaaaaaaagaatttatttattgtggcactattcacaacagc

SEQ ID NO: 636218 - DNA, 85 bp, Artificial Sequence
  ENSG00000180777_42 (sequence is synthesized)
cagcaaagacttggaaccaaaccaaatgtccaacaacgctagactggattaagaaagtatggcacatatacaccatggaacacta

SEQ ID NO: 636219 - DNA, 120 bp, Artificial Sequence
  ENSG00000180777_43 (sequence is synthesized)
tttgttctcagccatgtctgtcctgatatggctatccagatagacttatcttccaattcctctgactccgcaaatctttttttgtgtcctctggaattcatggccagtcagcagcataat

SEQ ID NO: 636220 - DNA, 120 bp, Artificial Sequence
  ENSG00000180777_44 (sequence is synthesized)
agaaagagaagtcattgtgagacaacttcaaaaaaaattggcggatcttaataaacagtgtgaggcttcactaaaggttacatcacattctcactctctgaggcatcaatagaggctaca

SEQ ID NO: 636221 - DNA, 120 bp, Artificial Sequence
  ENSG00000180777_45 (sequence is synthesized)
tcacattatcacattaatctcaaaggtgagatacaggatttaatgaggaaatgatttcaaatcaaaagtcaagtgtgtgttaaatgtaacatgccaacagtgagtctataactggttaaa

SEQ ID NO: 636222 - DNA, 120 bp, Artificial Sequence
  ENSG00000180785_0 (sequence is synthesized)
ggaggaagactggacaaagggggtcacacattccttccatacggttgagcctctacctgcctggtgctggtcacagttcagcttcttcatgatggtggatcccaatggcaatgaatccag

SEQ ID NO: 636223 - DNA, 120 bp, Artificial Sequence
  ENSG00000180785_1 (sequence is synthesized)
tgctacatacttcatcctaataggcctccctggtttagaagaggctcagttctggttggccttcccattgtgctccctctaccttattgctgtgctaggtaacttgacaatcatctacat

SEQ ID NO: 636224 - DNA, 120 bp, Artificial Sequence
  ENSG00000180785_2 (sequence is synthesized)
tgtgcggactgagcacagcctgcatgagcccatgtatatatttctttgcatgctttcaggcattgacatcctcatctccacctcatccatgcccaaaatgctggccatcttctggttcaa

SEQ ID NO: 636225 - DNA, 120 bp, Artificial Sequence
  ENSG00000180785_3 (sequence is synthesized)
ttccactaccatccagtttgatgcttgtctgctacagatgtttgccatccactccttatctggcatggaatccacagtgctgctggccatggcttttgaccgctatgtggccatctgtca

SEQ ID NO: 636226 - DNA, 120 bp, Artificial Sequence
  ENSG00000180785_4 (sequence is synthesized)
cccactgcgccatgccacagtacttacgttgcctcgtgtcaccaaaattggtgtggctgctgtggtgcggggggctgcactgatggcaccccttcctgtcttcatcaagcagctgccctt

SEQ ID NO: 636227 - DNA, 120 bp, Artificial Sequence
  ENSG00000180785_5 (sequence is synthesized)
ctgccgctccaatatcctttcccattcctactgcctacaccaagatgtcatgaagctggcctgtgatgatatccgggtcaatgtcgtctatggccttatcgtcatcatctccgccattgg

SEQ ID NO: 636228 - DNA, 120 bp, Artificial Sequence
  ENSG00000180785_6 (sequence is synthesized)
cctggactcacttctcatctccttctcatatctgcttattcttaagactgtgttgggcttgacacgtgaagcccaggccaaggcatttggcacttgcgtctctcatgtgtgtgctgtgtt

SEQ ID NO: 636229 - DNA, 120 bp, Artificial Sequence
  ENSG00000180785_7 (sequence is synthesized)
catattctatgtacctttcattggattgtccatggtgcatcgctttagcaagcggcgtgactctccgctgcccgtcatcttggccaatatctatctgctggttcctcctgtgctcaaccc

SEQ ID NO: 636230 - DNA, 120 bp, Artificial Sequence
  ENSG00000180785_8 (sequence is synthesized)
aattgtctatggagtgaagacaaaggagattcgacagcgcatccttcgacttttccatgtggccacacacgcttcagagccctaggtgtcagtgatcaaacttcttttccattcagagtc

SEQ ID NO: 636231 - DNA, 120 bp, Artificial Sequence
  ENSG00000180785_9 (sequence is synthesized)
ctctgattcagattttaatgttaacattttggaagacagtattcagaaaaaaaatttccttaataaaaatacaactcagatccttcaaatatgaaactggttggggaatctccatttttt

SEQ ID NO: 636232 - DNA, 120 bp, Artificial Sequence
  ENSG00000180785_10 (sequence is synthesized)
caatattattttcttctttgttttcttgctacatataattattaataccctgactaggttgtggttggagggttattacttttcattttaccatgcagtccaaatctaaactgcttctac

SEQ ID NO: 636233 - DNA, 120 bp, Artificial Sequence
  ENSG00000180785_11 (sequence is synthesized)
tgatggtttacagcattctgagataagaatggtacatctagagaacatttgccaaaggcctaagcacggcaaaggaaaataaacacagaatataataaaatgagataatctagcttaaaa

SEQ ID NO: 636234 - DNA, 120 bp, Artificial Sequence
  ENSG00000180785_12 (sequence is synthesized)
ctgtcttcaaaatgacttctacagagaagaaataatttttcctctggacactagcacttaaggggaagattggaagtaaagccttgaaaagagtacatttacctacgttaatgaaagttg

SEQ ID NO: 636235 - DNA, 120 bp, Artificial Sequence
  ENSG00000180785_13 (sequence is synthesized)
acacactgttctgagagttttcacagcatatggaccctgtttttcctatttaattttcttatcaaccctttaattaggcaaagatattattagtaccctcattgtagccatgggaaaatt

SEQ ID NO: 636236 - DNA, 120 bp, Artificial Sequence
  ENSG00000180785_14 (sequence is synthesized)
gatgttcagtggggatcagtgaattaaatggggtcatacaagtataaaaattaaaaaaaaaagacttcatgcccaatctcatatgatgtggaagaactgttagagagaccaacagggtag

SEQ ID NO: 636237 - DNA, 120 bp, Artificial Sequence
  ENSG00000180785_15 (sequence is synthesized)
tgggttagagatttccagagtcttacattttctagaggaggtatttaatttcttctcactcatccagtgttgtatttaggaatttcctggcaacagaactcatggctttaatcccactag

SEQ ID NO: 636238 - DNA, 120 bp, Artificial Sequence
  ENSG00000180785_16 (sequence is synthesized)
ctattgcttattgtcctggtccaattgccaattacctgtgtcttggaagaagtgatttctaggttcaccattatggaagattcttattcagaaagtctgcatagggcttatagcaagtta

SEQ ID NO: 636239 - DNA, 120 bp, Artificial Sequence
  ENSG00000180785_17 (sequence is synthesized)
tttatttttaaaagttccataggtgattctgataggcagtgaggttagggagccaccagttatgatgggaagtatggaatggcaggtcttgaagataacattggccttttgagtgtgact

SEQ ID NO: 636240 - DNA, 120 bp, Artificial Sequence
  ENSG00000180785_18 (sequence is synthesized)
cgtagctggaaagtgagggaatcttcaggaccatgctttatttggggctttgtgcagtatggaacagggactttgagaccaggaaagcaatctgacttaggcatgggaatcaggcatttt

SEQ ID NO: 636241 - DNA, 120 bp, Artificial Sequence
  ENSG00000180785_19 (sequence is synthesized)
tgcttctgaggggctattaccaagggttaataggtttcatcttcaacaggatatgacaacagtgttaaccaagaaactcaaattacaaatactaaaacatgtgatcatatatgtggtaag

SEQ ID NO: 636242 - DNA, 120 bp, Artificial Sequence
  ENSG00000180785_20 (sequence is synthesized)
tttcattttctttttcaatcctcaggttccctgatatggattcctataacatgctttcatccccttttgtaatggatatcatatttggaaatgcctatttaatacttgtatttgctgctg

SEQ ID NO: 636243 - DNA, 120 bp, Artificial Sequence
  ENSG00000180785_21 (sequence is synthesized)
gactgtaagcccatgagggcactgtttattattgaatgtcatctctgttcatcattgactgctctttgctcatcattgaatcccccagcaaagtgcctagaacataatagtgcttatgct

SEQ ID NO: 636244 - DNA, 120 bp, Artificial Sequence
  ENSG00000180785_22 (sequence is synthesized)
tgacaccggttatttttcatcaaacctgattccttctgtcctgaacacatagccaggcaattttccagccttctttgagttgggtattattaaattctggccattacttccaatgtgagt

SEQ ID NO: 636245 - DNA, 120 bp, Artificial Sequence
  ENSG00000180785_23 (sequence is synthesized)
ggaagtgacatgtgcaatttctatacctggctcataaaaccctcccatgtgcagcctttcatgttgacattaaatgtgacttgggaagctatgtgttacacagagtaaatcaccagaagc

SEQ ID NO: 636246 - DNA, 120 bp, Artificial Sequence
  ENSG00000180785_24 (sequence is synthesized)
ctggatttctgaaaaaactgtgcagagccaaacctctgtcatttgcaactcccacttgtatttgtacgaggcagttggataagtgaaaaataaagtactattgtgtcaagtctctgaaaa

SEQ ID NO: 636247 - DNA, 120 bp, Artificial Sequence
  ENSG00000180785_25 (sequence is synthesized)
aattccacgcttagcaaggacctaaacagtgtcccccaaatgagagaagggaggacagaaagaacacttcaggatggaaatgggctgacacttaaccgtggagtgtctctgcaaacttcc

SEQ ID NO: 636248 - DNA, 120 bp, Artificial Sequence
  ENSG00000180785_26 (sequence is synthesized)
tttgccattctcctgtttgagtttgataaacctgagaagagacttggataaagaccgtcacgaagactacactaatgagtttcttctagcttttttctactcactttccctatctatcct

SEQ ID NO: 636249 - DNA, 120 bp, Artificial Sequence
  ENSG00000180785_27 (sequence is synthesized)
tcacattgggagttggcatgaggatcccagcagcccatcaggggaggactctagagatccctttccccattgcctctcctccccatacccccaggcatatcctcccagggcacggaagct

SEQ ID NO: 636250 - DNA, 120 bp, Artificial Sequence
  ENSG00000180785_28 (sequence is synthesized)
gagaagcagtccagaaccacagtgggctagtgaggggtacctgctgatgtaccctttggacagcattctgccccaccctgcaggaagaagcagaaggagggagagggtgaggcagagaat

SEQ ID NO: 636251 - DNA, 120 bp, Artificial Sequence
  ENSG00000180787_0 (sequence is synthesized)
gatgcccgtcgccagtgacaccgggacaacagctgcgggctctgtgcgagcggcccagcagcgcggagcctcagcggagtgagcgagcgcggggcagtagcggcctgcgattgtgagatg

SEQ ID NO: 636252 - DNA, 120 bp, Artificial Sequence
  ENSG00000180787_1 (sequence is synthesized)
gggactgagaacaaggaggtgattcccaaggaagaaatttctgaagaatctgagccacatgggtcattattagaaaaatttccaaaagtggtttaccaaggtcatgagtttggagcagga

SEQ ID NO: 636253 - DNA, 120 bp, Artificial Sequence
  ENSG00000180787_2 (sequence is synthesized)
tgtgaagaagacatgttggagggacattcgagagagtccatggaagaggttatagagcagatgtctcctcaggagagagactttccatcagggttgatgatctttaagaaatcaccctca

SEQ ID NO: 636254 - DNA, 120 bp, Artificial Sequence
  ENSG00000180787_3 (sequence is synthesized)
agtgagaaagaccgggagaataatgagagtgagagaggctgcagtcccagcccaaatctggttacacatcagggagatacaacagagggagttagtgcatttgctacctctggccaaaac

SEQ ID NO: 636255 - DNA, 120 bp, Artificial Sequence
  ENSG00000180787_4 (sequence is synthesized)
ttcctagagattttagaatctaacaaaacacagagaagttctgtgggagaaaagcctcatacatgtaaagaatgtgggaaagcctttaatcagaactcacatctcatccagcatatgaga

SEQ ID NO: 636256 - DNA, 120 bp, Artificial Sequence
  ENSG00000180787_5 (sequence is synthesized)
gttcatagtggagaaaaaccctttgaatgtaaagaatgtggaaagacatttggaactaattcaagccttcgacggcacctgagaattcatgctggagaaaaaccctttgcttgtaatgaa

SEQ ID NO: 636257 - DNA, 120 bp, Artificial Sequence
  ENSG00000180787_6 (sequence is synthesized)
tgtggaaaggccttcattcagagttcacaccttattcaccatcatagaattcatactggagagagaccctataaatgtgaagaatgtggtaaagccttcagtcaaaattcagcccttatt

SEQ ID NO: 636258 - DNA, 120 bp, Artificial Sequence
  ENSG00000180787_7 (sequence is synthesized)
ctacaccagagaatccatactggagagaaaccatatgaatgtaatgaatgtgggaagacctttagggttagttcacagcttattcagcatcagagaattcatactgaagaaagataccat

SEQ ID NO: 636259 - DNA, 120 bp, Artificial Sequence
  ENSG00000180787_8 (sequence is synthesized)
gaatgcaatgagtgtggcaaagccttcaagcatagctcaggccttattagacaccagaaaattcatactggagaaaaaccatatctgtgtaatgaatgtgggaagggcttcgggcagagt

SEQ ID NO: 636260 - DNA, 120 bp, Artificial Sequence
  ENSG00000180787_9 (sequence is synthesized)
tctgagcttatccggcatcagagaattcatacaggggacaaaccctatgaatgtaatgaatgtgggaaaacttttggccagaactcagagattattagacatattagaattcatactggt

SEQ ID NO: 636261 - DNA, 120 bp, Artificial Sequence
  ENSG00000180787_10 (sequence is synthesized)
gagaagccctatgtatgtaaggaatgtgggaaggccttcagggggaactcagaacttcttagacatgagagaattcacactggagagaaaccctatgaatgctttgagtgtggaaaggct

SEQ ID NO: 636262 - DNA, 120 bp, Artificial Sequence
  ENSG00000180787_11 (sequence is synthesized)
ttcaggcggacctctcaccttattgtccaccagagaattcatactggagagaaaccccatcaatgtaatgagtgtgcaagaaccttttgggataattctgagctgcttctccaccagaaa

SEQ ID NO: 636263 - DNA, 120 bp, Artificial Sequence
  ENSG00000180787_12 (sequence is synthesized)
attcatattggagagaaaccttatgaatgtagcgagtgtgagaaaacatttagccagcattcccaacttatcatacatcagagaattcacactggagagaagccttatgagtgccaagaa

SEQ ID NO: 636264 - DNA, 120 bp, Artificial Sequence
  ENSG00000180787_13 (sequence is synthesized)
tgtcagaagacttttagtcggagctctcacctcctccgacatcaaagtgttcactgtatggagtaatctgcaaaataggaaagcttttagtggaaaagctaaagtccaacttattcattt

SEQ ID NO: 636265 - DNA, 120 bp, Artificial Sequence
  ENSG00000180787_14 (sequence is synthesized)
gttcataatatgcaaatatgcaccccaagtattcaaatccaatgaatggacagaacctcctctgtcctcccactgattttaaatagttggttgaagaagatgaggcactttttttttttt

SEQ ID NO: 636266 - DNA, 120 bp, Artificial Sequence
  ENSG00000180787_15 (sequence is synthesized)
ttttttaagcattggggtcttgctctgttgcccaggatgggatgcagtggcacagtcgtaactcactgcttccttgaactcctgggctcaaacagtcctcctgcctcagccttccaaata

SEQ ID NO: 636267 - DNA, 120 bp, Artificial Sequence
  ENSG00000180787_16 (sequence is synthesized)
gctaggactgcaggcactaatgaggcacttttatgaattattcattgagaggtttcagtgtgctaagttaaatcataaaagctctttcaggccttaatttcccctctgtccttccttccc

SEQ ID NO: 636268 - DNA, 120 bp, Artificial Sequence
  ENSG00000180787_17 (sequence is synthesized)
cttctcctcccccagtggatcacataacaaacattaagggtctgtaccagccatctttcctaaattactcttcagcaaaattgtgggaacaggattccaccacctcctaagaatgagagt

SEQ ID NO: 636269 - DNA, 120 bp, Artificial Sequence
  ENSG00000180787_18 (sequence is synthesized)
tgactcattgactgttaccccctgaaatattagaaagtcataatttagaagacacacctcattctcctgtccactgtttagcattggaataatttagtaagctgttattagcttcaaagt

SEQ ID NO: 636270 - DNA, 120 bp, Artificial Sequence
  ENSG00000180787_19 (sequence is synthesized)
cgtccagccctgctatgaagttactttagaagatggcagcattaatgaagaagcaggctcatttcacatctgtcaggcttccttattcatctgaagaggctgccatgatggaggaactga

SEQ ID NO: 636271 - DNA, 120 bp, Artificial Sequence
  ENSG00000180787_20 (sequence is synthesized)
ggggataaacaattgaggtcacactgctcggcatgggcagaagcagctcttcaggagctgtccacacttcaggggtgctcagactgactgctcctaagaattctgctgcatatattttta

SEQ ID NO: 636272 - DNA, 120 bp, Artificial Sequence
  ENSG00000180787_21 (sequence is synthesized)
gccccatctcctgccactgctgacagatattgtgacagtaagtagcagacaggactgtggcttcacctcctccgggcacctggctacagtgatgagtcagttcacctgatgacaaaccag

SEQ ID NO: 636273 - DNA, 120 bp, Artificial Sequence
  ENSG00000180787_22 (sequence is synthesized)
ggtctggccttgccaaagcacttaagttctcatgacctggaccgcactggaggccctggctaagtcaggatgtcgtagcctcttcttggttttgccccttggccttgaaattcttttttc

SEQ ID NO: 636274 - DNA, 90 bp, Artificial Sequence
  ENSG00000180787_23 (sequence is synthesized)
ttgctatgttgcccaggctggtcttgaatgcctgggctccagcaatctttttgcctcaacttcccaaagtattgattgaaattctttctt

SEQ ID NO: 636275 - DNA, 120 bp, Artificial Sequence
  ENSG00000180787_24 (sequence is synthesized)
agctaccatgcccggccttgaaattctttcttcgctatgtctgcatgttttttgtgttctgtatttatttcttctccaaggaaacagcctacattttccatgtgtccatgtttctgaggc

SEQ ID NO: 636276 - DNA, 120 bp, Artificial Sequence
  ENSG00000180787_25 (sequence is synthesized)
cgtgggtgacagtgggaattgcactaatgggggcccaacaggcctgggggctggtcttagcgctagaccttgaacaaggcacttcacctgctggtctccaattttctcctctgtaaaatg

SEQ ID NO: 636277 - DNA, 120 bp, Artificial Sequence
  ENSG00000180787_26 (sequence is synthesized)
aaagagttgaactaagtgatctcaaaagtttcaaccagcccgataattccttaattctttaaaaatttaactttatatatctttattattctttaacctcatctttgttacactaatatt

SEQ ID NO: 636278 - DNA, 120 bp, Artificial Sequence
  ENSG00000180787_27 (sequence is synthesized)
agtcactaatatttattgagtgtttactacctgacaggcagagtgccagtttacattttaattttcacatcatttctatgatgtgggtactcatttttttaaagctttatgaaggtataa

SEQ ID NO: 636279 - DNA, 120 bp, Artificial Sequence
  ENSG00000180787_28 (sequence is synthesized)
tttacgtactataaaattcacctgttttaagtgttcagttgaatgatttttaatttacatagtggtgcaaccatcaatgatgtgggtattcttaccccaatttaaaagataagaaggggc

SEQ ID NO: 636280 - DNA, 120 bp, Artificial Sequence
  ENSG00000180787_29 (sequence is synthesized)
agtgttaagtaattgacccatgattccacagctagtaagagcgacagccaagactccaaacctggttgatgctcttaaccactgtgctatgccgcaggtaggcagattcattactgcctt

SEQ ID NO: 636281 - DNA, 120 bp, Artificial Sequence
  ENSG00000180787_30 (sequence is synthesized)
atctgaaaccctttgcacagtttctattactgatttctatgtagatttgaatataacaaatttaaatcatgtccttggtaacagaactgatcacagccaaaaaaaattcaccaaatgggt

SEQ ID NO: 636282 - DNA, 120 bp, Artificial Sequence
  ENSG00000180787_31 (sequence is synthesized)
ttattctgtactccaatataggtgtcttcccaggtttatatccttggcttgagaaaagggttgtacaaatagatgattgcagagtttccacatccttccagatacctctgcctctagcag

SEQ ID NO: 636283 - DNA, 120 bp, Artificial Sequence
  ENSG00000180787_32 (sequence is synthesized)
tcacactcttagtaagggaagttgtttgatttacttcttcccttaggttgattacaagtgaagtgcgccgtcttattcctttttcattgctggagcacaaattgaattgtgcccagaccg

SEQ ID NO: 636284 - DNA, 120 bp, Artificial Sequence
  ENSG00000180787_33 (sequence is synthesized)
tatctttctcacatgaaacctggatctcacctatcccttccatgcctgattcccgtgtttgcatattttatttccacatttacctcttgtcagccctgacagagaatttggcaccccttc

SEQ ID NO: 636285 - DNA, 120 bp, Artificial Sequence
  ENSG00000180787_34 (sequence is synthesized)
aagcttctcctaaacaatctatgcacacaaacacccctgagcaatatggacttcactgaagatagtgtgtaagcaaaggagaagagttcacattgtgcatcctattagacattttgttct

SEQ ID NO: 636286 - DNA, 120 bp, Artificial Sequence
  ENSG00000180787_35 (sequence is synthesized)
cagaagtaccttactggccaaaccaatgaaggttttcctcttgtcctcccctctcaaggctcagtcacctcaacttctttttgcctactagatatccaatccatcacctcgcctcccctg

SEQ ID NO: 636287 - DNA, 120 bp, Artificial Sequence
  ENSG00000180787_36 (sequence is synthesized)
gccctagctcaattaccctcttaaacccattcctgctcagcaaaacttcctctagttcaccattcattcatttgaacattaggaggcaatttagtgacctgttgtacctgaccatgttct

SEQ ID NO: 636288 - DNA, 120 bp, Artificial Sequence
  ENSG00000180787_37 (sequence is synthesized)
taagggggaggtctcacgtctcattcccagaaaagtctaccatatatagatacatattccccgccccgccccagatttctggtgaatgaaatcacttgtatcttattaggtacatatacg

SEQ ID NO: 636289 - DNA, 120 bp, Artificial Sequence
  ENSG00000180787_38 (sequence is synthesized)
caaatccttaacctcaattctctgtcctcttcatgtcttacccagatatctcaggaagatttctcttttccttctgtttgcctccctcttcgacttacttgggagtcagcatctgaccac

SEQ ID NO: 636290 - DNA, 120 bp, Artificial Sequence
  ENSG00000180787_39 (sequence is synthesized)
agtcgtgactggtaatgatgatttgtgcaaatactatcaaggaaaggacatgaattgtcttaattttagacccattaaaaaaccgcacaggcctcaatcttaaaagtcctatctaaatac

SEQ ID NO: 636291 - DNA, 120 bp, Artificial Sequence
  ENSG00000180787_40 (sequence is synthesized)
ccagaaatacccttcagaatttttgaagctatgcccatgtacaaaattttcttccttccctaattttaatggtatactaacaccttaggtaaataaaatatttctttactattttattga

SEQ ID NO: 636292 - DNA, 120 bp, Artificial Sequence
  ENSG00000180801_0 (sequence is synthesized)
agtttgcagcgcctgcgccgggtgcgccaactacgcaaagaccaagcgggctccgcgcggaccggccgcggggctagggacccggctttggccttcaggctccctagcagcggggaaaag

SEQ ID NO: 636293 - DNA, 120 bp, Artificial Sequence
  ENSG00000180801_1 (sequence is synthesized)
gaattgctgcccggagtttctgcggaggtggagggagatcaggaaacggcttcttcctcacttcgccgcctggtgagtgtcggggagattggcaaacgcctaggaaaggactggggaaaa

SEQ ID NO: 636294 - DNA, 120 bp, Artificial Sequence
  ENSG00000180801_2 (sequence is synthesized)
tagccctgggaaagtggagaaggtgatcaggaggccggtccactacggcagtttatctgtctgatcagagccagacgcgacgcgtccacttcgcagttctttccaggtgtggggaccgca

SEQ ID NO: 636295 - DNA, 120 bp, Artificial Sequence
  ENSG00000180801_3 (sequence is synthesized)
ggacagacggccgatcccgccgccctccgtaccagcactcccaggagagtcagcctcgctccccaacgtcgagggcgctctggccacgaaaagttcctgtccactgtgattctcaattcc

SEQ ID NO: 636296 - DNA, 120 bp, Artificial Sequence
  ENSG00000180801_4 (sequence is synthesized)
ttgcttggtttttttctccagagaacttttgggtggagatattaacttttttcttttttttttccttggtggaagctgctctagggaggggggaggaggaggagaaagtgaaatgtgctg

SEQ ID NO: 636297 - DNA, 120 bp, Artificial Sequence
  ENSG00000180801_5 (sequence is synthesized)
gagaagagcgagccctccttgttcttccggagtcccatccattaagccatcacttctggaagattaaagttgtcggacatggtgacagctgagaggagaggaggatttcttgccaggtgg

SEQ ID NO: 636298 - DNA, 120 bp, Artificial Sequence
  ENSG00000180801_6 (sequence is synthesized)
agagtcttcaccgtctgttgggtgcatgtgtgcgcccgcagcggcgcggggcgcgtggttctccgcgtggagtctcacctgggacctgagtgaatggctcccaggggctgtgcggggcat

SEQ ID NO: 636299 - DNA, 120 bp, Artificial Sequence
  ENSG00000180801_7 (sequence is synthesized)
ccgcctccgccttctccacaggcctgtgtctgtcctggaaagatgctagcaatgggggcgctggcaggattctggatcctctgcctcctcacttatggttacctgtcctggggccaggcc

SEQ ID NO: 636300 - DNA, 120 bp, Artificial Sequence
  ENSG00000180801_8 (sequence is synthesized)
ttagaagaggaggaagaaggggccttactagctcaagctggagagaaactagagcccagcacaacttccacctcccagccccatctcattttcatcctagcggatgatcagggatttaga

SEQ ID NO: 636301 - DNA, 120 bp, Artificial Sequence
  ENSG00000180801_9 (sequence is synthesized)
gatgtgggttaccacggatctgagattaaaacacctactcttgacaagctcgctgccgaaggagttaaactggagaactactatgtccagcctatttgcacaccatccaggagtcagttt

SEQ ID NO: 636302 - DNA, 120 bp, Artificial Sequence
  ENSG00000180801_10 (sequence is synthesized)
attactggaaagtatcagatacacaccggacttcaacattctatcataagacctacccaacccaactgtttacctctggacaatgccaccctacctcagaaactgaaggaggttggatat

SEQ ID NO: 636303 - DNA, 120 bp, Artificial Sequence
  ENSG00000180801_11 (sequence is synthesized)
tcaacgcatatggtcggaaaatggcacttgggtttttacagaaaagaatgcatgcccaccagaagaggatttgataccttttttggttcccttttgggaagtggggattactatacacac

SEQ ID NO: 636304 - DNA, 120 bp, Artificial Sequence
  ENSG00000180801_12 (sequence is synthesized)
tacaaatgtgacagtcctgggatgtgtggctatgacttgtatgaaaacgacaatgctgcctgggactatgacaatggcatatactccacacagatgtacactcagagagtacagcaaatc

SEQ ID NO: 636305 - DNA, 120 bp, Artificial Sequence
  ENSG00000180801_13 (sequence is synthesized)
ttagcttcccataaccccacaaagcctatatttttatatattgcctatcaagctgttcattcaccactgcaagctcctggcaggtatttcgaacactaccgatccattatcaacataaac

SEQ ID NO: 636306 - DNA, 120 bp, Artificial Sequence
  ENSG00000180801_14 (sequence is synthesized)
aggaggagatatgctgccatgctttcctgcttagatgaagcaatcaacaacgtgacattggctctaaagacttatggtttctataacaacagcattatcatttactcttcagataatggt

SEQ ID NO: 636307 - DNA, 120 bp, Artificial Sequence
  ENSG00000180801_15 (sequence is synthesized)
ggccagcctacggcaggagggagtaactggcctctcagaggtagcaaaggaacatattgggaaggagggatccgggctgtaggctttgtgcatagcccacttctgaaaaacaagggaaca

SEQ ID NO: 636308 - DNA, 120 bp, Artificial Sequence
  ENSG00000180801_16 (sequence is synthesized)
gtgtgtaaggaacttgtgcacatcactgactggtaccccactctcatttcactggctgaaggacagattgatgaggacattcaactagatggctatgatatctgggagaccataagtgag

SEQ ID NO: 636309 - DNA, 120 bp, Artificial Sequence
  ENSG00000180801_17 (sequence is synthesized)
ggtcttcgctcaccccgagtagatattttgcataacattgaccccatatacaccaaggcaaaaaatggctcctgggcagcaggctatgggatctggaacactgcaatccagtcagccatc

SEQ ID NO: 636310 - DNA, 120 bp, Artificial Sequence
  ENSG00000180801_18 (sequence is synthesized)
agagtgcagcactggaaattgcttacaggaaatcctggctacagcgactgggtcccccctcagtctttcagcaacctgggaccgaaccggtggcacaatgaacggatcaccttgtcaact

SEQ ID NO: 636311 - DNA, 120 bp, Artificial Sequence
  ENSG00000180801_19 (sequence is synthesized)
agagggtggacctatctaacaggtatccaggaatcgtgaagaagctcctacggaggctctcacagttcaacaaaactgcagtgccggtcaggtatccccccaaagaccccagaagtaacc

SEQ ID NO: 636312 - DNA, 120 bp, Artificial Sequence
  ENSG00000180801_20 (sequence is synthesized)
ctaggctcaatggaggggtctggggaccatggtataaagaggaaaccaagaaaaagaagccaagcaaaaatcaggctgagaaaaagcaaaagaaaagcaaaaaaaagaagaagaaacagc

SEQ ID NO: 636313 - DNA, 120 bp, Artificial Sequence
  ENSG00000180801_21 (sequence is synthesized)
agaaagcagtctcaggttcaacttgccattcaggtgttacttgtggataagcacaaatatttcctgtttggttaaactttaatcagttcttatctttcatctgtttcctaggtaaaccag

SEQ ID NO: 636314 - DNA, 120 bp, Artificial Sequence
  ENSG00000180801_22 (sequence is synthesized)
caaatttggctcgataatatcgctggcctaagcgtcaggcttgttttcatgctgtgccactccagagacttctgccacctggccgccacactgaaaactgtcctgctcagtgccaaggtg

SEQ ID NO: 636315 - DNA, 120 bp, Artificial Sequence
  ENSG00000180801_23 (sequence is synthesized)
ctactcttgcaagccacacttagagagagtggagatgtttatttctcttgctcctttagaaaacgtggtgagtcctgagttccactgctgtgcttcagtcaactgaccaaacactgcttt

SEQ ID NO: 636316 - DNA, 120 bp, Artificial Sequence
  ENSG00000180801_24 (sequence is synthesized)
gaattataggaggagaacaataacctaccatccgcaagcatgctaatttgatggaagttacagggtataccatccgcaagcatgctaatttgatggaagttacagggtagcatgattaaa

SEQ ID NO: 636317 - DNA, 120 bp, Artificial Sequence
  ENSG00000180801_25 (sequence is synthesized)
actacctttgataaattacagtcaaagattgtgtcacctcaaaggccttgaagaatatattttcttggtgaatttttgtatgtctgtcatatgacacttgggttttttaattaattctat

SEQ ID NO: 636318 - DNA, 120 bp, Artificial Sequence
  ENSG00000180801_26 (sequence is synthesized)
tttatatatatatatatgtttcttttcctgtgaaaagctgtttttctcacatgtgaacagcttgcacctcattttaccatgcgtgagggaatggcaaataagaatgtttgagcacactgc

SEQ ID NO: 636319 - DNA, 120 bp, Artificial Sequence
  ENSG00000180801_27 (sequence is synthesized)
ccacaatgaatgtaactattttctaaacactttactagaagaacatttcagtataaaaaacctaatttatttttacagaaaaatattttgttgtttttataaaaagttatgcaaatgact

SEQ ID NO: 636320 - DNA, 120 bp, Artificial Sequence
  ENSG00000180801_28 (sequence is synthesized)
ttattttatttttatttcctgcataccattagaataattttatttcatttcttcaaattaccaagcactgtaatactataaattaatgtaatactgtgtgaattcagactataaaaaaca

SEQ ID NO: 636321 - DNA, 120 bp, Artificial Sequence
  ENSG00000180801_29 (sequence is synthesized)
tcattcagaaaactttataatcgtcattgttcaaccaagattttgaatgtaataagatgaatatattccttacaaattacttggaaattcaatgtttgtgcagagttgagacaactttat

SEQ ID NO: 636322 - DNA, 120 bp, Artificial Sequence
  ENSG00000180801_30 (sequence is synthesized)
tgtttctatcataaactatttatgtatcttaattattaaaatgatttactttatggcactagaaaatttactgtggcttttctgatctaacttctagctaaaattgtatcattggtccta

SEQ ID NO: 636323 - DNA, 120 bp, Artificial Sequence
  ENSG00000180801_31 (sequence is synthesized)
aaaaataaaaatctttactaataggcaattgaaggaatggtttgctaacaaccacagtaatataatatgattttacagatagatgcttccccttggctatgacatggagaaagattttcc

SEQ ID NO: 636324 - DNA, 120 bp, Artificial Sequence
  ENSG00000180801_32 (sequence is synthesized)
cataataataactaacatttatattaggttggtgcaaaactagttgcggtttttcccattaaaagtaataaacttactcttatacaaagtggacactgtggggagatacagagaaatgga

SEQ ID NO: 636325 - DNA, 120 bp, Artificial Sequence
  ENSG00000180801_33 (sequence is synthesized)
agatacggatcctgcctggagtaggtaaccttgcttggaaaccccacatgcaaacgtcatgaggagaattaaaggagtattatcagtaatgaagtttatcatgggtcatcaatgagcata

SEQ ID NO: 636326 - DNA, 120 bp, Artificial Sequence
  ENSG00000180801_34 (sequence is synthesized)
gattggtgtggatcctgtagaccctggtgttttctttgaagtgccctctcctaatgcagaggccttgaagcttacagtatacacttgaaaagtcacagatagctagaattatgatctttg

SEQ ID NO: 636327 - DNA, 120 bp, Artificial Sequence
  ENSG00000180801_35 (sequence is synthesized)
aagttataactgtgatctgaaaatgtgtgtggtggtatgacagcataccattaaatacatttacatcacagctcaaaggactgtgatataatccatttatatcacaactcaaaggactgt

SEQ ID NO: 636328 - DNA, 120 bp, Artificial Sequence
  ENSG00000180801_36 (sequence is synthesized)
gatataatccatttatatcacagctcacagtttctgaaaatgtataaaagaatctataatctagtactgaaattactaaattgggtaagatgatttaaatgattttaattttaacatttt

SEQ ID NO: 636329 - DNA, 120 bp, Artificial Sequence
  ENSG00000180801_37 (sequence is synthesized)
atttctagaatatatggctccattttattttatagtgtaaagttgtatttcctaaagtttgtgttttgtcgacagtatcttttaaatgagtcttaaaaataaaggcatattgttcatgtt

SEQ ID NO: 636330 - DNA, 120 bp, Artificial Sequence
  ENSG00000180801_38 (sequence is synthesized)
cacattcacgctgaaggcacaattttttatgcacctaaaaatgccgtttgatgtgcaaaggagtcctcttggtgtgaaatttcaatgtgtgcctgcatcattgtcttcatgcatggtgat

SEQ ID NO: 636331 - DNA, 120 bp, Artificial Sequence
  ENSG00000180801_39 (sequence is synthesized)
ttgcaagtcattaaaacatgggggctacatttaggatttcttttcattttaactttggagagcaagcacagcccctagtgtcgacagttcaagaaaagcataaagcaggcagatgaaaaa

SEQ ID NO: 636332 - DNA, 120 bp, Artificial Sequence
  ENSG00000180806_0 (sequence is synthesized)
aatcttatgtatgtaaaaccccgttacgatgtcggcgacggggcccatcagtaactattacgtggactcgctcatctctcacgacaatgaagacctcctagcgtccaggtttccggccac

SEQ ID NO: 636333 - DNA, 120 bp, Artificial Sequence
  ENSG00000180806_1 (sequence is synthesized)
cggggctcatcccgccgccgccagacccagcggtttggtgccggactgtagcgattttccgtcctgtagcttcgcgcccaagccggcagtgttcagcacgtcgtgggcgcccgtgccctc

SEQ ID NO: 636334 - DNA, 120 bp, Artificial Sequence
  ENSG00000180806_2 (sequence is synthesized)
tcagtcgtccgtggtatatcacccgtacggcccccagccccacctcggcgccgacacgcgctacatgcggacttggctcgagccgctgtccggcgccgtctccttccccagcttcccggc

SEQ ID NO: 636335 - DNA, 120 bp, Artificial Sequence
  ENSG00000180806_3 (sequence is synthesized)
cgggggccgtcactacgccctcaagccggacgcctaccccgggcgccgcgcggactgcggcccaggggagggccgcagctacccggactacatgtacggctcgcccggggagctgcgcga

SEQ ID NO: 636336 - DNA, 120 bp, Artificial Sequence
  ENSG00000180806_4 (sequence is synthesized)
ccgcgccccgcagacactgccctcgcccgaggcggacgcgctcgccggcagcaagcacaaagaggagaaggccgacctggaccccagcaaccccgtggccaactggattcacgcccgctc

SEQ ID NO: 636337 - DNA, 120 bp, Artificial Sequence
  ENSG00000180806_5 (sequence is synthesized)
cacgaggaagaagcgctgcccctacaccaagtaccagacgctggaactggagaaggagtttctcttcaatatgtatttaaccagggaccgtcggtatgaggtggcccgggttctcaatct

SEQ ID NO: 636338 - DNA, 120 bp, Artificial Sequence
  ENSG00000180806_6 (sequence is synthesized)
cgaaggatgaagatgaaaaagatgaataaagagaaaaccgacaaggagcagtcctaaaccctacccagcctgctgcctcagcacagccaagggaaaaacaaaaaccccacaaaatacccc

SEQ ID NO: 636339 - DNA, 120 bp, Artificial Sequence
  ENSG00000180806_7 (sequence is synthesized)
aacacaggcgggggagagacgaaaaagaaaaggaaagagcaagatagacaaaagccaatcagcttaaaaagaaaaacaaggaaggggaaaagaaaactcttgcgatttgggagggttcag

SEQ ID NO: 636340 - DNA, 120 bp, Artificial Sequence
  ENSG00000180806_8 (sequence is synthesized)
tgttgagatattggtgttttagagttagttctacccagcgaggaggaggcggggagagaaactgcgttctctttccccagcgcaaccgaaataaatgacacatacaaatgtgattttttt

SEQ ID NO: 636341 - DNA, 120 bp, Artificial Sequence
  ENSG00000180806_9 (sequence is synthesized)
cctcctttcttcagagaagccagtacttgaatcgctatatttctatttttttttccctgtatcgtatttggtccaggtcatccctccccgggcctggggcgctctgcgtgcagattttgt

SEQ ID NO: 636342 - DNA, 120 bp, Artificial Sequence
  ENSG00000180806_10 (sequence is synthesized)
acaaaaaaaaaaaagacacacacacatacatgataatgattcccagcccaggagctgaggggtgagggctggggaccatgccgcgggctaggtcgggcccgtgcaggccggcgccttggg

SEQ ID NO: 636343 - DNA, 120 bp, Artificial Sequence
  ENSG00000180806_11 (sequence is synthesized)
ctgtacatagtgttccctctcatccccagggttcgtccccagcgtccgtcctgtaacgtgcttctgtttgttatggtagaacagccctgtgttaatatattgaagtcacttaaccagaaa

SEQ ID NO: 636344 - DNA, 120 bp, Artificial Sequence
  ENSG00000180806_12 (sequence is synthesized)
gtatctatggccgtggggagcgaaggaccaggtaacgaaggcgcttccgaagcgggattggaccaaaccagagggacagagtcttctgggtctctctgcctgaggccctggagggagaga

SEQ ID NO: 636345 - DNA, 80 bp, Artificial Sequence
  ENSG00000180815_0 (sequence is synthesized)
atggagagcggcggtgggaatgctccggccggggccctcggggcggcgagcgagtcccctcagtgcccgccgccgccggg

SEQ ID NO: 636346 - DNA, 80 bp, Artificial Sequence
  ENSG00000180815_1 (sequence is synthesized)
gcggagggcgcggcaggcggcagcggcgagggcgagagtgggggcgggccgcggcgggctctgcgggcagtatacgtgcg

SEQ ID NO: 636347 - DNA, 120 bp, Artificial Sequence
  ENSG00000180815_2 (sequence is synthesized)
gctggggcgcggcagtgcctgctgcgggcctgcgaggccgagggcgctcacctcacctccgtgcccttcggggagctggacttcggggagacggccgtgctcgacgccttctacgacgca

SEQ ID NO: 636348 - DNA, 120 bp, Artificial Sequence
  ENSG00000180815_3 (sequence is synthesized)
gatgttgctgtggtagacatgagcgatgtctccagacagccttccctcttctaccatcttggagtccgagaaagctttgacatggccaataatgtgatcttgtaccatgacaccgatgcc

SEQ ID NO: 636349 - DNA, 120 bp, Artificial Sequence
  ENSG00000180815_4 (sequence is synthesized)
gacactgctctctctttgaaggacatggtaactcaaaaaaacacagcatccagtggaaattattatttcatcccatacatcgtgacaccgtgcgctgattatttttgctgcgagagtgat

SEQ ID NO: 636350 - DNA, 120 bp, Artificial Sequence
  ENSG00000180815_5 (sequence is synthesized)
gcccagagacgagcctccgagtacatgcagcccaactgggacaacatcctgggcccgctgtgcatgcctttggtggacaggttcattagcctccttaaggacatccacgtgacctcatgt

SEQ ID NO: 636351 - DNA, 120 bp, Artificial Sequence
  ENSG00000180815_6 (sequence is synthesized)
gtttattacaaagaaaccttgttaaatgacatccggaaagccagagagaaataccaaggtgaggaactggcgaaggagctagctcggatcaagctccgcatggataatactgaggttctg

SEQ ID NO: 636352 - DNA, 120 bp, Artificial Sequence
  ENSG00000180815_7 (sequence is synthesized)
acctcagacatcatcattaacttactcctgtcctaccgtgatatccaggactatgatgcgatggtgaagctggtggaaacactggagatgctgcctacgtgtgatttggccgatcagcat

SEQ ID NO: 636353 - DNA, 120 bp, Artificial Sequence
  ENSG00000180815_8 (sequence is synthesized)
aacattaaattccactatgcgtttgcactgaataggagaaacagcacaggtgaccgtgagaaggctctgcagatcatgctccaggttctgcagagctgtgatcacccgggccccgacatg

SEQ ID NO: 636354 - DNA, 120 bp, Artificial Sequence
  ENSG00000180815_9 (sequence is synthesized)
ttctgcctgtgtgggaggatctacaaggacatcttcttggattcagactgcaaagatgacaccagccgcgacagcgccattgagtggtatcgcaaagggtttgaactccagtcatccctc

SEQ ID NO: 636355 - DNA, 120 bp, Artificial Sequence
  ENSG00000180815_10 (sequence is synthesized)
tattcgggaattaatcttgcagttttgctgattgttgctggacaacaatttgaaacttccttggaactaaggaaaataggtgtccggctgaacagtttgttgggaagaaaagggagcttg

SEQ ID NO: 636356 - DNA, 120 bp, Artificial Sequence
  ENSG00000180815_11 (sequence is synthesized)
gagaaaatgaacaattactgggatgtgggtcagttcttcagcgtcagcatgctggcccatgatgtcgggaaagccgtccaggcagcagagaggttgttcaaactgaaacctccagtctgg

SEQ ID NO: 636357 - DNA, 120 bp, Artificial Sequence
  ENSG00000180815_12 (sequence is synthesized)
tacctgcgatcattagttcagaacttgttactaattcggcgcttcaagaaaaccattattgaacactcgcccaggcaagagcggctgaacttctggttagatataatttttgaggcaaca

SEQ ID NO: 636358 - DNA, 120 bp, Artificial Sequence
  ENSG00000180815_13 (sequence is synthesized)
aatgaagtcactaatggactcagatttccagttctggtcatagagccaaccaaagtgtaccagccttcttatgtttccataaacaatgaagccgaggagagaacagtttctttatggcat

SEQ ID NO: 636359 - DNA, 120 bp, Artificial Sequence
  ENSG00000180815_14 (sequence is synthesized)
gtctcacccacagaaatgaaacagatgcacgaatggaattttacagcctcttccataaagggaataagcctatcaaagtttgatgaaaggtgttgttttctttatgtccatgataattct

SEQ ID NO: 636360 - DNA, 120 bp, Artificial Sequence
  ENSG00000180815_15 (sequence is synthesized)
gatgactttcaaatctacttttccaccgaagagcagtgcagtagatttttctctttggtcaaagagatgataaccaatacagcaggcagtacggtggagctggagggagagaccgatgga

SEQ ID NO: 636361 - DNA, 120 bp, Artificial Sequence
  ENSG00000180815_16 (sequence is synthesized)
tggggaaaggcacgtatgggattgtgtatgctggccgagatctgagcaatcaagtgcgaatagccatcaaagaaatcccggagagagatagcaggtattctcagcctctgcacgaggaga

SEQ ID NO: 636362 - DNA, 120 bp, Artificial Sequence
  ENSG00000180815_17 (sequence is synthesized)
tagccctgcacaagtaccttaagcaccgcaatatcgttcagtacctgggctctgtttcagagaacggctacattaagatatttatggagcaggtgcctggaggaagcctttctgctcttc

SEQ ID NO: 636363 - DNA, 120 bp, Artificial Sequence
  ENSG00000180815_18 (sequence is synthesized)
tgcgatccaaatgggggccgatgaaggaaccgacaatcaagttttacaccaaacagatcctggagggccttaagtatcttcatgaaaaccagatcgtgcacagagacataaagggcgata

SEQ ID NO: 636364 - DNA, 120 bp, Artificial Sequence
  ENSG00000180815_19 (sequence is synthesized)
atgttctggtgaacacctacagcggagtggtgaaaatctccgattttggaacctcgaaacgtcttgcgggtgtgaacccctgcacagagacttttactggcaccctgcagtacatggcac

SEQ ID NO: 636365 - DNA, 120 bp, Artificial Sequence
  ENSG00000180815_20 (sequence is synthesized)
ctgagataattgaccaagggcctcgcggatatggtgccccagccgatatctggtccctgggctgcaccatcattgagatggccaccagcaagcctccgttccatgagcttggtgagccgc

SEQ ID NO: 636366 - DNA, 120 bp, Artificial Sequence
  ENSG00000180815_21 (sequence is synthesized)
aggcagccatgttcaaagtgggcatgtttaagatccaccctgagattccagaagccctttcagctgaagcccgagccttcattttatcctgtttcgagcctgacccccacaaacgtgcca

SEQ ID NO: 636367 - DNA, 120 bp, Artificial Sequence
  ENSG00000180815_22 (sequence is synthesized)
ccactgctgagctactgagagagggtttcttaaggcaggtgaacaagggcaagaagaaccgaattgccttcaagccctcagaaggtccccgcggtgtcgtcctggccctgcccacacagg

SEQ ID NO: 636368 - DNA, 120 bp, Artificial Sequence
  ENSG00000180815_23 (sequence is synthesized)
gagagcccatggccaccagcagcagcgagcacggctctgtctccccagactccgacgcccagcctgacgcactctttgagaggacccgggcgcccaggcaccaccttggccacctcctca

SEQ ID NO: 636369 - DNA, 120 bp, Artificial Sequence
  ENSG00000180815_24 (sequence is synthesized)
gtgttccagacgagagctcagccttggaagaccggggcttggcctcgtccccggaggacagggaccagggcctcttcctgctacgcaaggacagtgagcgccgtgccatcctgtacaaaa

SEQ ID NO: 636370 - DNA, 120 bp, Artificial Sequence
  ENSG00000180815_25 (sequence is synthesized)
tcctctgggaggagcagaaccaggtggcttccaacctgcaggagtgtgtggcccagagttccgaagagttgcatctctcagttggacacatcaagcaaatcattgggatcctgagggact

SEQ ID NO: 636371 - DNA, 120 bp, Artificial Sequence
  ENSG00000180815_26 (sequence is synthesized)
tcatccgctccccagagcaccgggtgatggcgaccacaatatcaaagctcaaggtggacctggactttgacagctcgtccatcagtcagattcacctggtgctgttcggatttcaggatg

SEQ ID NO: 636372 - DNA, 120 bp, Artificial Sequence
  ENSG00000180815_27 (sequence is synthesized)
ccgtaaataaaattttgaggaaccacttaattaggccccactggatgttcgcgatggacaacatcatccgccgagcggtgcaggccgcggtcaccattctcatcccagagctccgagccc

SEQ ID NO: 636373 - DNA, 120 bp, Artificial Sequence
  ENSG00000180815_28 (sequence is synthesized)
actttgagcctacctgtgagactgaaggggtagataaggacatggatgaagcggaagagggctatcccccagccaccggacctggccaggaggcccagccccaccagcagcacctgagcc

SEQ ID NO: 636374 - DNA, 120 bp, Artificial Sequence
  ENSG00000180815_29 (sequence is synthesized)
tccagctgggtgagctcagacaggagaccaacagacttttggaacacctagttgaaaaagagagagagtaccagaatcttctgcggcaaactctagaacagaaaactcaagaattgtatc

SEQ ID NO: 636375 - DNA, 120 bp, Artificial Sequence
  ENSG00000180815_30 (sequence is synthesized)
accttcagttaaaattaaaatcgaattgtattacagagaacccagcaggcccctacgggcagagaacagataaagagcttatagactggttgcggctgcaaggagctgatgcaaagacaa

SEQ ID NO: 636376 - DNA, 120 bp, Artificial Sequence
  ENSG00000180815_31 (sequence is synthesized)
ttgaaaagattgttgaagagggttatacactttcggatattcttaatgagatcactaaggaagatctaagataccttcgactacggggtggtctcctctgcagactctggagtgcggtct

SEQ ID NO: 636377 - DNA, 120 bp, Artificial Sequence
  ENSG00000180815_32 (sequence is synthesized)
cccagtacagaagggctcaggaggcctcagaaaccaaagacaaggcttgataccaatcagctaagctgtggcagagtgtcccaccacgctacatgttttgttaaagcttctgttagtgta

SEQ ID NO: 636378 - DNA, 120 bp, Artificial Sequence
  ENSG00000180815_33 (sequence is synthesized)
ctcctcctcccttcctccttttccttcctctctcttcctccttcccctgtccccctcaccttccctccctcacctctccttctgtgcttgcccccttccctccctccctccctcctccct

SEQ ID NO: 636379 - DNA, 120 bp, Artificial Sequence
  ENSG00000180815_34 (sequence is synthesized)
gtctcctgggaggctcctttaccccgcctccccctccttctgctctccctcctgctgtgggggttgacagaacactgcatgtctgtccttcctccggcaatttcatcttcttgagcacag

SEQ ID NO: 636380 - DNA, 120 bp, Artificial Sequence
  ENSG00000180815_35 (sequence is synthesized)
ttacatatttaaaaatgccattgttcaattaatagtttaagaacttgttttaaatactgtcctgagtttcttttgaaacctgttatttataaacatagaactgtgtgtattgtgaaaaca

SEQ ID NO: 636381 - DNA, 120 bp, Artificial Sequence
  ENSG00000180815_36 (sequence is synthesized)
atttataaacatagaactgtgtgtattgtgaaaacagtgagccttggttttgacctcccggaatattaggaaattcacttgtagtcccagctatgcaggaggctgaggtgggaggattgc

SEQ ID NO: 636382 - DNA, 120 bp, Artificial Sequence
  ENSG00000180815_37 (sequence is synthesized)
cactgcactccagcctgggcaacagagcccgaccctgtctcaaaaaaagtacacccttcagcacttgctggaatggtgaaacaaacaaggggtatttaacaaacatggaagctgggacac

SEQ ID NO: 636383 - DNA, 120 bp, Artificial Sequence
  ENSG00000180815_38 (sequence is synthesized)
tgggacactgcctcagaactggtatggtacttcaatttgagaaacacaaaactgatacgaatgtgccttgtagttaatgtttgatatgaacagaaaatagcttcatatttatactgaatg

SEQ ID NO: 636384 - DNA, 120 bp, Artificial Sequence
  ENSG00000180815_39 (sequence is synthesized)
tgtaagtagagaaaactaagttatgtggcctttgaaatgattacaaaattggaatgattacaaaagtcttattttaaaatggaactgtcctcttgcctgataataaatattgtatcttgt

SEQ ID NO: 636385 - DNA, 120 bp, Artificial Sequence
  ENSG00000180815_40 (sequence is synthesized)
ctttgtgtgggcacattttttttttcctcttggatacatacctaggaatggaattgccaagtcatatggtaaatataggctttttttttttttttttgagctggaatctcactctgtcgc

SEQ ID NO: 636386 - DNA, 70 bp, Artificial Sequence
  ENSG00000180815_41 (sequence is synthesized)
gcatgtctcacccacagaaatgaaacagatgcacgaatggaattttacagcctcttccataaagggaata

SEQ ID NO: 636387 - DNA, 120 bp, Artificial Sequence
  ENSG00000180817_0 (sequence is synthesized)
ccagtgctcgcagtgcgcaggcgtggggctctctccttgtcagtcggcgccgcgtgcgggctggtggctctgtggcagcggcggcggcaggactccggcactatgagcggcttcagcacc

SEQ ID NO: 636388 - DNA, 120 bp, Artificial Sequence
  ENSG00000180817_1 (sequence is synthesized)
gaggagcgcgccgcgcccttctccctggagtaccgagtcttcctcaaaaatgagaaaggacaatatatatctccatttcatgatattccaatttatgcagataaggatgtgtttcacatg

SEQ ID NO: 636389 - DNA, 120 bp, Artificial Sequence
  ENSG00000180817_2 (sequence is synthesized)
gtagttgaagtaccacgctggtctaatgcaaaaatggagattgctacaaaggaccctttaaaccctattaaacaagatgtgaaaaaaggaaaacttcgctatgttgcgaatttgttcccg

SEQ ID NO: 636390 - DNA, 120 bp, Artificial Sequence
  ENSG00000180817_3 (sequence is synthesized)
tataaaggatatatctggaactatggtgccatccctcagacttgggaagacccagggcacaatgataaacatactggctgttgtggtgacaatgacccaattgatgtgtgtgaaattgga

SEQ ID NO: 636391 - DNA, 120 bp, Artificial Sequence
  ENSG00000180817_4 (sequence is synthesized)
agcaaggtatgtgcaagaggtgaaataattggcgtgaaagttctaggcatattggctatgattgacgaaggggaaaccgactggaaagtcattgccattaatgtggatgatcctgatgca

SEQ ID NO: 636392 - DNA, 120 bp, Artificial Sequence
  ENSG00000180817_5 (sequence is synthesized)
tggaaaaccagaaaatgagtttgcgtttaatgcagaatttaaagataaggactttgccattgatattattaaaagcactcatgaccattggaaagcattagtgactaagaaaacgaatgg

SEQ ID NO: 636393 - DNA, 120 bp, Artificial Sequence
  ENSG00000180817_6 (sequence is synthesized)
aaaaggaatcagttgcatgaatacaactttgtctgagagccccttcaagtgtgatcctgatgctgccagagccattgtggatgctttaccaccaccctgtgaatctgcctgcacagtacc

SEQ ID NO: 636394 - DNA, 120 bp, Artificial Sequence
  ENSG00000180817_7 (sequence is synthesized)
aacagacgtggataagtggttccatcaccagaaaaactaatgagatttctctggaatacaagctgatattgctacatcgtgttcatctggatgtattagaagtaaaagtagtagcttttc

SEQ ID NO: 636395 - DNA, 120 bp, Artificial Sequence
  ENSG00000180817_8 (sequence is synthesized)
aaagctttaaatttgtagaactcatctaactaaagtaaattctgctgtgactaatccaatatactcagaatgttatccatctaaagcatttttcatatctcaactaagataacttttagc

SEQ ID NO: 636396 - DNA, 120 bp, Artificial Sequence
  ENSG00000180817_9 (sequence is synthesized)
acatgcttaaatatcaaagcagttgtcatttggaagtcacttgtgaatagatgtgcaaggggagcacatattggatgtatatgttaccatatgttaggaaataaaattattttgctgaaa

SEQ ID NO: 636397 - DNA, 120 bp, Artificial Sequence
  ENSG00000180817_10 (sequence is synthesized)
agccaattataatgtatgtaatagtgttgtgatcctctgacatagcctctgcctctggaccagggatagtacctcaagcctgtaatcccagtgctttgggaagccaaggcaggaggattg

SEQ ID NO: 636398 - DNA, 88 bp, Artificial Sequence
  ENSG00000180817_11 (sequence is synthesized)
tgagaccagcctgggcaacatgacgagaccccatttctacaaaaaatttaaaaattagctgggcgtgtgcaatatcaatgatgtcaaa

SEQ ID NO: 636399 - DNA, 90 bp, Artificial Sequence
  ENSG00000180817_12 (sequence is synthesized)
gaactgtggaggtcaaggctgcagtgagccttgttcgggccactgcattccagcgtgggtgacagagcgagaccttgtctctgaaaaaaa

SEQ ID NO: 636400 - DNA, 120 bp, Artificial Sequence
  ENSG00000180817_13 (sequence is synthesized)
cagcgtgggtgacagagcgagaccttgtctctgaaaaaaaaaaaaagataacctctgtctttttcagtatcttgtacacttctcataggaattatctacatttgccaaactggttgtttc

SEQ ID NO: 636401 - DNA, 120 bp, Artificial Sequence
  ENSG00000180817_14 (sequence is synthesized)
attatgtagccaccagctgtttgcccttacctaacagagattactattgtactgattgttctctgtacttagtgtcagagctattcagagatactagatgattttctttcaatgtatatg

SEQ ID NO: 636402 - DNA, 120 bp, Artificial Sequence
  ENSG00000180817_15 (sequence is synthesized)
tgtatggcttctcttctcaacaaggggcttcgctccaatgttatcttgaacttccgtgataagtcattccacagctctttcaaaataagtacttggaatttttgttgagtgtataattat

SEQ ID NO: 636403 - DNA, 120 bp, Artificial Sequence
  ENSG00000180817_16 (sequence is synthesized)
ttgtgcatcttgaaatctgcttattctcttctttctttttaaaaaaatcattctcactgtcatcttatgcttcttctcttcttagatatcaatgatgtcaaacggctgaaacctggctac

SEQ ID NO: 636404 - DNA, 120 bp, Artificial Sequence
  ENSG00000180817_17 (sequence is synthesized)
gtggatgctgtatgtaaaagtttccttaaaaaaaaaacaagcctggttgctaaaaactatgatgctaaatggggagaggaagtacttgtttcgacaaatacttgagtgccttttgtatgc

SEQ ID NO: 636405 - DNA, 120 bp, Artificial Sequence
  ENSG00000180817_18 (sequence is synthesized)
atgttactgtgtggagtcttgaaattagaaaccatgaacacatgcaagtggccatttgactgagggagaagctgagggagtgattctaatcaatcataagttggacagatagcatggtag

SEQ ID NO: 636406 - DNA, 120 bp, Artificial Sequence
  ENSG00000180817_19 (sequence is synthesized)
taagatttgtaaaaatcagaatggttccagaatgtaccaagtaacctgtgtgcctatgacccatcataagccatttccgcaaaagaatcaatgggaatttacttgacttggttctagcaa

SEQ ID NO: 636407 - DNA, 120 bp, Artificial Sequence
  ENSG00000180817_20 (sequence is synthesized)
ggactgaggaaggtatcaagttttaggtaccattgcaggaatgattcataatctaagaaaggctttcatgtgaggtagtaaaagcacccgtcaaagcaataattttgtttttgtactatt

SEQ ID NO: 636408 - DNA, 120 bp, Artificial Sequence
  ENSG00000180817_21 (sequence is synthesized)
tttaattatttggtttggattaaccaaaaaattgaacgagatcatcttaaattattttcatttataatattaaataaggaaaacaaaagaaaatgaggtctgacttttttactgccttgt

SEQ ID NO: 636409 - DNA, 120 bp, Artificial Sequence
  ENSG00000180817_22 (sequence is synthesized)
aaatggggtagaacaaggaaaaaaggacaatttaatgatgaaaccagtacatttagttttatctttatttatgtatgaatcccgacaaagttgagataaataagaaaaattataagggaa

SEQ ID NO: 636410 - DNA, 120 bp, Artificial Sequence
  ENSG00000180817_23 (sequence is synthesized)
aagccagtggttaactattataatttttcagtgagaacactgcccatattttataaatatgtgtgtatatataaaattgttatatatgcataaatcagtttttattatttcaaaaaacat

SEQ ID NO: 636411 - DNA, 60 bp, Artificial Sequence
  ENSG00000180817_24 (sequence is synthesized)
attattctgcatgtcataaaaagtcaagaggcttgaatttttttttttttttttgagaca

SEQ ID NO: 636412 - DNA, 120 bp, Artificial Sequence
  ENSG00000180817_25 (sequence is synthesized)
cctcccgaagtgttgggattatgggcatgagccactgcactgtccaagaggcttgaatttgttagcatctcagcagtagagcaaaccttctattgttcctatatattataaattacgttt

SEQ ID NO: 636413 - DNA, 120 bp, Artificial Sequence
  ENSG00000180817_26 (sequence is synthesized)
agatcctaaaatttgggatagtcttcagattctcttaaatttttgtcagtatacctttttagctttttaaaaaatgagattagactaatagattttaatattttatattttagttaccac

SEQ ID NO: 636414 - DNA, 120 bp, Artificial Sequence
  ENSG00000180817_27 (sequence is synthesized)
caccctgtgaatctgcctgcacagtaccaacagacggtaagatttctattccagtaaaatttcattaaacattacacagttatggaaaaattatgttacttttatttttagttgacaaat

SEQ ID NO: 636415 - DNA, 120 bp, Artificial Sequence
  ENSG00000180817_28 (sequence is synthesized)
gataattaaatatatttatgggtacagtgtgatgttttgatatatgtttacaatgtggaatgattaaatctggctaattacgaaatcattacctcacatacttaatcattatttgttgtg

SEQ ID NO: 636416 - DNA, 120 bp, Artificial Sequence
  ENSG00000180817_29 (sequence is synthesized)
tggtaaaaacatttgaaatctactcttagcaattttgaaatagatgttacagtcaccatcctgtgcaatagatcactaaagcttattccttttgtctaactaaaacttggtaccctttga

SEQ ID NO: 636417 - DNA, 120 bp, Artificial Sequence
  ENSG00000180817_30 (sequence is synthesized)
ccatcgcctgccctttccccatccttcagctcctggcaaccaccattctactctctacctctatgaatttaccttttttatattgcacatataaatgagatcatgtggtatttgtctttc

SEQ ID NO: 636418 - DNA, 90 bp, Artificial Sequence
  ENSG00000180817_31 (sequence is synthesized)
tattgcacatataaatgagatcatgtggtatttgtctttctgtacctggcttgttttttgttttttgacacagagtcacccaggcgggca

SEQ ID NO: 636419 - DNA, 120 bp, Artificial Sequence
  ENSG00000180817_32 (sequence is synthesized)
gtgattctcccatctcagcctcccaaatagctgggactgcagacatgtgccaccatacctgtctaatttttttataatttgtagagatagagtttcaccatgttgcccaagctggtctca

SEQ ID NO: 636420 - DNA, 120 bp, Artificial Sequence
  ENSG00000180817_33 (sequence is synthesized)
tggtctcaaaccaggtctcgaaccaggctggtcttgaacactaatcaggccgggtttcgccatgtcacccaggctggcgatccacctaccttgtcctcccaaagtgctaggattacaggc

SEQ ID NO: 636421 - DNA, 120 bp, Artificial Sequence
  ENSG00000180817_34 (sequence is synthesized)
ctgcacgcagccacgtacatatttttaacatacacaggaagagagggaagaagggtgagaagagaagcatttttagaattctgtagtgtacgtgggaaggaagatgagctgctacatacc

SEQ ID NO: 636422 - DNA, 120 bp, Artificial Sequence
  ENSG00000180817_35 (sequence is synthesized)
acctttagtgccacactgtatcacagtggtttccaaaccatgacccattgtgcccctctgagttccatggaggtgcccgctggacactggaggggaccctgagtgggctgatctccacat

SEQ ID NO: 636423 - DNA, 120 bp, Artificial Sequence
  ENSG00000180817_36 (sequence is synthesized)
tcccacctggccacaggctgcttcacccagaaaacagttctctcctccttagatgtcagaattctctgtaagatttttctggtaagaaaatgattctgccacttaaaaaaacaagtttga

SEQ ID NO: 636424 - DNA, 120 bp, Artificial Sequence
  ENSG00000180817_37 (sequence is synthesized)
gaagcgagtaccttactagtagccactaggggtgtcagtaatatggctcaactttgttacgacggatcagaaaaatgctcacctttaagaccgcaagcagagcctgtctggggaagcagg

SEQ ID NO: 636425 - DNA, 120 bp, Artificial Sequence
  ENSG00000180817_38 (sequence is synthesized)
gaggagtgtgtgagaatcaaagaaaatgagaaaggacaatatatatctccatttcatgatattccaatttatgcagataaggatgtgtttcacatggtagttgaagtaccacgctggtct

SEQ ID NO: 636426 - DNA, 120 bp, Artificial Sequence
  ENSG00000180817_39 (sequence is synthesized)
atatctccatttcatgatattccaatttatgcagataaggatgtgtttcacatggtagttgaagtaccacgctggtctaatgcaaaaatggaggtaatatttcaccttacatttgagtca

SEQ ID NO: 636427 - DNA, 120 bp, Artificial Sequence
  ENSG00000180817_40 (sequence is synthesized)
catctgaacgtcaaggtttttctctgtctggtcccagtctattttctagttgtatctcccattgcctactagtcttccctttgggctccagctaaactcaactgtttacaaatatgcccc

SEQ ID NO: 636428 - DNA, 120 bp, Artificial Sequence
  ENSG00000180817_41 (sequence is synthesized)
aaacttttcttcccaacatctttgcttccaatgttcccaaagcctagaattactttttctcctcttactctctgtaagcccttcactgacccctccttagtcaccccagccacagatact

SEQ ID NO: 636429 - DNA, 120 bp, Artificial Sequence
  ENSG00000180818_0 (sequence is synthesized)
ccccttctttttcctccctcccctccaaccgcgccccccctcccggatggggaaaaaaaaagatgtcagctcctccgctgtagtattgctccttaaaaacccctctctctgaaaatgaca

SEQ ID NO: 636430 - DNA, 120 bp, Artificial Sequence
  ENSG00000180818_1 (sequence is synthesized)
tgccctcgcaatgtaactccgaactcgtacgcggagcccttggctgcgcccggcggaggagagcgctatagccggagcgcaggcatgtatatgcagtctgggagtgacttcaattgcggg

SEQ ID NO: 636431 - DNA, 120 bp, Artificial Sequence
  ENSG00000180818_2 (sequence is synthesized)
gtgatgaggggctgcgggctcgcgccctcgctctccaagagggacgagggcagcagccccagcctcgccctcaacacctatccgtcctacctctcgcagctggactcctggggcgacccc

SEQ ID NO: 636432 - DNA, 120 bp, Artificial Sequence
  ENSG00000180818_3 (sequence is synthesized)
aaagccgcctatcgcctggaacaacctgttggcaggccgctgtcctcctgctcctacccacctagtgtcaaggaggagaatgtctgctgcatgtacagcgcagagaagcgggcgaaaagt

SEQ ID NO: 636433 - DNA, 120 bp, Artificial Sequence
  ENSG00000180818_4 (sequence is synthesized)
ggccccgaggcagctctctactcccaccccttgccggagtcctgccttggggagcacgaggtacccgtgcccagctactaccgcgccagcccgagctactccgcgctggacaagacgccc

SEQ ID NO: 636434 - DNA, 120 bp, Artificial Sequence
  ENSG00000180818_5 (sequence is synthesized)
cactgttctggggccaacgacttcgaagcccctttcgagcagcgggccagtctcaacccgcgcgccgaacatctggaatcgcctcagctggggggcaaagtgagtttccctgagaccccc

SEQ ID NO: 636435 - DNA, 120 bp, Artificial Sequence
  ENSG00000180818_6 (sequence is synthesized)
aagtccgacagccagacccccagccccaatgaaatcaagacggagcagagcctggcgggccctaaagggagcccctcggagagcgaaaaggagagggccaaagctgccgactccagccca

SEQ ID NO: 636436 - DNA, 120 bp, Artificial Sequence
  ENSG00000180818_7 (sequence is synthesized)
gacacctcggataacgaagcgaaagaggagataaaggcagaaaacaccacaggaaattggctgacagcaaagagcggaaggaagaagaggtgcccctatactaaacaccagacgctggaa

SEQ ID NO: 636437 - DNA, 120 bp, Artificial Sequence
  ENSG00000180818_8 (sequence is synthesized)
tagcaagaccattaaccttacagacagacaagtcaaaatctggtttcaaaatcgcagaatgaaactcaagaaaatgaaccgagagaatcggatccgggaactgacctccaattttaattt

SEQ ID NO: 636438 - DNA, 120 bp, Artificial Sequence
  ENSG00000180818_9 (sequence is synthesized)
cacctgagagcgcggcctctcctcctcccttcccgctccttcctctccccgcccctcctccctttgtgcctggtgatatatttttttttcctccctgagtataaatgcaatgcgactgca

SEQ ID NO: 636439 - DNA, 120 bp, Artificial Sequence
  ENSG00000180818_10 (sequence is synthesized)
aaaaaggcaaagacctcagactctccttccaagggacctgtggttcgtgctgcgaagatgcttccacttaaagcatgagaaatggggtgccgggatgtggggtgtggtgtgtgccctcat

SEQ ID NO: 636440 - DNA, 120 bp, Artificial Sequence
  ENSG00000180818_11 (sequence is synthesized)
agatgggggtgggagtgtggctggtgtgtgtgtcaagccctcactcacccacgcactcacacacagcattctgttctccatgcaaagttaagatcgaatccatccgcttgtaggggaaaa

SEQ ID NO: 636441 - DNA, 120 bp, Artificial Sequence
  ENSG00000180818_12 (sequence is synthesized)
aaaggaaaaaaattaaccagagagggtctgtaatctcgcagagcacaggcagaatcgttccttccttgctgcatttcctccttagactaatagacgttttggaaagttcggctagtgttc

SEQ ID NO: 636442 - DNA, 120 bp, Artificial Sequence
  ENSG00000180818_13 (sequence is synthesized)
gtgtgtttgtcgtagcacccagagcctccaccaaaccctctccatgtctttacctcccagtcgctctaagaatctgcttgaagtctcgtatttgtactgctttctgcttttctcccaccc

SEQ ID NO: 636443 - DNA, 120 bp, Artificial Sequence
  ENSG00000180818_14 (sequence is synthesized)
ctcctagcacccccacatcccccatctagtaacatctcagaaatttcatccagaggaacaaaaaaattaaaaatagaacatagcaaagcaaagacagaatgcccccccccccaaatattg

SEQ ID NO: 636444 - DNA, 120 bp, Artificial Sequence
  ENSG00000180818_15 (sequence is synthesized)
tcctgtccctgtctgggagttgtgttatttaaagatattctgtatgttgtatcttttgcatgtagcttccttaatggagaaaaaaaaacctaataaatttccagaatcataatcctcaaa

SEQ ID NO: 636445 - DNA, 120 bp, Artificial Sequence
  ENSG00000180818_16 (sequence is synthesized)
gggaaggctggggagatggggggagttctctttactgcgttttcccagttgaaaattgtttcctgcgaaacgcgatttgttgtttgtgggtctgatttgtgcgtgcggcttgggctcctg

SEQ ID NO: 636446 - DNA, 120 bp, Artificial Sequence
  ENSG00000180818_17 (sequence is synthesized)
cggcttttggctcggccgggggccttgggcagcgaggctggagccggaagaggtggaggtgaagggctgcccgccacgtccctccctcctccagatgcctggcttggatggcgttggaac

SEQ ID NO: 636447 - DNA, 120 bp, Artificial Sequence
  ENSG00000180822_0 (sequence is synthesized)
acccccgcccttccggggccgaaagcgaaagcgcgctcggtctctcggtgctcgctccatcgggtctggcggggctggcagcggcgaggacccgggtctggcgctgtgggccgggagccg

SEQ ID NO: 636448 - DNA, 120 bp, Artificial Sequence
  ENSG00000180822_1 (sequence is synthesized)
tggggcggcatggaggggctggttgtcgccgccggcggggacgtctccctgcacaacttcagcgcgaggctgtgggagcagctggtccacttccacgtcatgcggctgacggactcgctg

SEQ ID NO: 636449 - DNA, 120 bp, Artificial Sequence
  ENSG00000180822_2 (sequence is synthesized)
ttcctgtgggtgggggccacgccgcacctgcgcaacctcgccgtggccatgtgcagccgctacgactccatccccgtgtctacctccctccttggagacacttccgacacgacctctact

SEQ ID NO: 636450 - DNA, 120 bp, Artificial Sequence
  ENSG00000180822_3 (sequence is synthesized)
aggctttccccgaaaagttctagctgagtggcagaagtgagaatttgtaaacttatgtacaatgtacgtgtaaataaatggattgaatttcagtttgtcatcaggccgcgctcccgtttt

SEQ ID NO: 636451 - DNA, 120 bp, Artificial Sequence
  ENSG00000180822_4 (sequence is synthesized)
gtttttaaggggttaatcttttgagcttccttctcagcagtgtgtgggccaaaaggctcatactgacccacctggtgaaggagaggcaaagtgggcagtatatacttcctcatttggctg

SEQ ID NO: 636452 - DNA, 120 bp, Artificial Sequence
  ENSG00000180822_5 (sequence is synthesized)
tgagtgatagagggatgaaatgggatttttgttgggattgaagactgtaatctaagagtttcaatcagacatgactgtgacgtgcatcctcaattagaattaaagtgatgtataaatatg

SEQ ID NO: 636453 - DNA, 120 bp, Artificial Sequence
  ENSG00000180822_6 (sequence is synthesized)
ccatgtgcagccgctacgttccgtgtccccaccaccttcacgatgcagaccttcttgggcctccgggaaagctctttctccagctctgcaaagaaacagaccctgtgagccctgggcagg

SEQ ID NO: 636454 - DNA, 120 bp, Artificial Sequence
  ENSG00000180822_7 (sequence is synthesized)
ccgcccacagaggacaggacagcagctgcagtcacagccctggttccccagttcgggtaccacagaagggagagagaagctttttttttttttttttttttgccagtggatagggtctag

SEQ ID NO: 636455 - DNA, 120 bp, Artificial Sequence
  ENSG00000180822_8 (sequence is synthesized)
gtttccaggatagaaaggcactcataagaccccagctttgcagttcaggtttcgctcgggtgcctgagagggcaccaaggtgcaccgtcagcagaagtttccatcacaaacccttgtttt

SEQ ID NO: 636456 - DNA, 120 bp, Artificial Sequence
  ENSG00000180822_9 (sequence is synthesized)
ggaaccagtcagagtgcacacaaacggtctcgactcagttcacttttgtctgagtacagagctcagcgatgatattctaggttactgaggcactcattaggccctgggcaaatctaaaca

SEQ ID NO: 636457 - DNA, 120 bp, Artificial Sequence
  ENSG00000180822_10 (sequence is synthesized)
tgcagttcttttccgtacactctacatctgcctgtgtcacccccggctcggagactgggaaggccacatgcagatatgcttcttagccttgtggggtggaactatggctgtagctacttc

SEQ ID NO: 636458 - DNA, 120 bp, Artificial Sequence
  ENSG00000180822_11 (sequence is synthesized)
tgctgaaactgcccttaggacatcatatgcatctttgaaagccaaatacataagtgaacacatctgcgtgtatgtgtatacaccatacatgcacacattcatacgcatgcatatacgtgt

SEQ ID NO: 636459 - DNA, 120 bp, Artificial Sequence
  ENSG00000180822_12 (sequence is synthesized)
gcatgttttagttaacagaagtccttgggggctggacaatattttggctccaagggatgtgagcaactataaagtcatgagactgagtttcttgtgcggctccagcggctctgaaagccc

SEQ ID NO: 636460 - DNA, 120 bp, Artificial Sequence
  ENSG00000180822_13 (sequence is synthesized)
ctctgaagggagtccaccagcgcacagtgttacattcaccaggccaaggggtctgcagaggtgctggtgttgatctggcaatttacagggaagattcagaatggtgggggtgctggcctc

SEQ ID NO: 636461 - DNA, 120 bp, Artificial Sequence
  ENSG00000180822_14 (sequence is synthesized)
cagccttctgttgcctctctgccttcctagcctggcatgtcttcatggagtaatcccctactggggagctaaaaaagaaaagggagacttcccgaagcggaggggaaccaggactcttca

SEQ ID NO: 636462 - DNA, 120 bp, Artificial Sequence
  ENSG00000180822_15 (sequence is synthesized)
agactgtcaaggtcaccagaaacaagaaagactgagcagctgtcagaccaggagactagggagaggggaggacaagacgcagtcctgggcggcatcccgggtgggaggagtcgtcatgga

SEQ ID NO: 636463 - DNA, 120 bp, Artificial Sequence
  ENSG00000180822_16 (sequence is synthesized)
aagcacgatgatgggaggcaccaaataaaggctggggtttggtgaatggtagtgttccaatgtcactcttttagtttcgacaacagtaccacgacagtatcagacattcgcaatctggga

SEQ ID NO: 636464 - DNA, 120 bp, Artificial Sequence
  ENSG00000180822_17 (sequence is synthesized)
agtcgagtactgggaggtctgtcgttgcctctagagggatccttctgctccctcgggggctgtgtctccaggaccctggccctgtgcttccgagggccactctgaaccctggatggctca

SEQ ID NO: 636465 - DNA, 120 bp, Artificial Sequence
  ENSG00000180822_18 (sequence is synthesized)
agttcaaccctcctcttccacctccttcctgccatccagcggtaggagggtcacaaagctctttcattatagtttgaagaaaaaatgtgttgctaaaccgtagggatttgaataaagcaa

SEQ ID NO: 636466 - DNA, 120 bp, Artificial Sequence
  ENSG00000180822_19 (sequence is synthesized)
tgatgtttttattcaaacattgtttttgaactgagtgtcaccagccagggcacagaagggagaaggagaaacctttcacttgtctgagggagctcatgtctactgagtttccagaacttt

SEQ ID NO: 636467 - DNA, 120 bp, Artificial Sequence
  ENSG00000180822_20 (sequence is synthesized)
ctcccttgccatacttgggtgcaaagattgaggtctgtgtgtaagcccacagggccggcgtttcagctgctggtccacggaccctctcagctcccaaggtccattatttttcctcagcaa

SEQ ID NO: 636468 - DNA, 120 bp, Artificial Sequence
  ENSG00000180822_21 (sequence is synthesized)
aaatgggctactttgactacaggcacagtttctccatggttaaaataactaattttataaagagcttgaaaatatcatggttaacagaaaaccttggatccaatgatctgaatatctttg

SEQ ID NO: 636469 - DNA, 120 bp, Artificial Sequence
  ENSG00000180822_22 (sequence is synthesized)
ctattatagaactcatcagaaaccaactgtaatagctacgttttctcaccatggaagacttccgagaagaaaatttcaatgtccattagcaagtccatataagtttaaagttttaaaaag

SEQ ID NO: 636470 - DNA, 120 bp, Artificial Sequence
  ENSG00000180822_23 (sequence is synthesized)
tatataccccaaactgaactcctgatatgttattgtttactaagtatgatgttaaagaagcaataacaactgcattatgacctgagctttttaaataaaattaaacctagaacccagtct

SEQ ID NO: 636471 - DNA, 120 bp, Artificial Sequence
  ENSG00000180822_24 (sequence is synthesized)
cctgaggtatcctgcaactgcaagcactaaataagctcctgactcatctctcccctgtggctgatgcagaagctgatcctggagaaactaaaaccttctgcacagcaaaggaaacaatca

SEQ ID NO: 636472 - DNA, 120 bp, Artificial Sequence
  ENSG00000180822_25 (sequence is synthesized)
aaaaaagaaacaacctgatttttaaaatggacaataatctgaatagacatttcttaaaagacacaaatggccaacaaacatatattaaaaaaagctcaacatcactaatcatcagaaaac

SEQ ID NO: 636473 - DNA, 120 bp, Artificial Sequence
  ENSG00000180822_26 (sequence is synthesized)
acaaatcaaaaccacaatgaggtatcaactcacctcagttaggatggctattatcaaaaagacacacacacaaaaatgctggcaaggatgtggagaaagggaactcttatatgatgttgg

SEQ ID NO: 636474 - DNA, 120 bp, Artificial Sequence
  ENSG00000180822_27 (sequence is synthesized)
tgggaatgtaaactagtacatcaactatggagaacagtacagaggttcctcaaaaaactacaaacagaattacctcatgacccagcaatcccactactggtgtttatccaaaggaaagga

SEQ ID NO: 636475 - DNA, 84 bp, Artificial Sequence
  ENSG00000180822_28 (sequence is synthesized)
agacacagagccaggccgggtggaaaacaaaaagagaagaagtgattatgaaataataagacggaccgtgtgccccttgagcat

SEQ ID NO: 636476 - DNA, 62 bp, Artificial Sequence
  ENSG00000180822_29 (sequence is synthesized)
ggctggcattacaggcatgtaccaccatgctcgggtagttttgtatttttagtagagacggg

SEQ ID NO: 636477 - DNA, 120 bp, Artificial Sequence
  ENSG00000180822_30 (sequence is synthesized)
gaaatcagagaaggaggaggatgaagtgctgatggacaaatgtttgccaaatcctttgtttccaacataccctgactgatgaggggtcatgtaggcatgacattcgaccaaaattctgcc

SEQ ID NO: 636478 - DNA, 120 bp, Artificial Sequence
  ENSG00000180822_31 (sequence is synthesized)
agaaagcaaaagaaaaaatcttgcagcagaaagtggagagattcttaacgacctctaccgagagaaatgcatggttctgaaaaagaagctgattcaggactggtataaataggaaaagaa

SEQ ID NO: 636479 - DNA, 120 bp, Artificial Sequence
  ENSG00000180822_32 (sequence is synthesized)
ggggccacgccgcacctgcgcaacctcgccgtggccatgtgcagccgctacccaggaagaccaacaaacaggtgtttgtcagctataaccttcagaacacagacagtaacttcgcattac

SEQ ID NO: 636480 - DNA, 120 bp, Artificial Sequence
  ENSG00000180822_33 (sequence is synthesized)
ctttaatggaaccatgaagcaagtcccttcggaagtaaagcatctttatgctaagaaccatcacctcattgctgctgggaagcacagacctttgcacgttgggtcttatttaaggggcac

SEQ ID NO: 636481 - DNA, 120 bp, Artificial Sequence
  ENSG00000180822_34 (sequence is synthesized)
attccatgctcgcctgtcatcaccaccgtcccagggctggcctgttcccaaaggactcccacctcgtccttgggtgtgtccttgagtccatgagctgatttagttgccttccgtaagtgc

SEQ ID NO: 636482 - DNA, 120 bp, Artificial Sequence
  ENSG00000180822_35 (sequence is synthesized)
atcaccacctcctgggaggagagcatgagaagtgcccacagcccctgtgggtggtggctcaaggtagcctcccgggccttaggaggagtcagtgcagctggtggagcaggtgtcacctct

SEQ ID NO: 636483 - DNA, 120 bp, Artificial Sequence
  ENSG00000180822_36 (sequence is synthesized)
gtgcaggaaggactgtcctcactcagtgtgataccgttcagggctcggagggaagactggcctggcctgtgagtgtggcgtagagtggggattaagcaaaggtcatgaggctgaatgctc

SEQ ID NO: 636484 - DNA, 120 bp, Artificial Sequence
  ENSG00000180822_37 (sequence is synthesized)
cactcttcccacaccccaacacacttcctgtgggccaggtaaggcttccatgtgctctgcgacccccagccccagtgcctgtggccagtgtgcacaggatgcctgtctcctgcccaggcc

SEQ ID NO: 636485 - DNA, 120 bp, Artificial Sequence
  ENSG00000180822_38 (sequence is synthesized)
tggcgttctccagtaggcccagctgcttctgctctggagtcttctctgtgtctcaggcacaggacctggtacctgacaagcaggaacctctgtgtcagtcacactgaggcaaatgcacac

SEQ ID NO: 636486 - DNA, 120 bp, Artificial Sequence
  ENSG00000180822_39 (sequence is synthesized)
gaatagcatggcacctggcccagggggaaggcagggcagggtggagtgtcaccagcaggcccatgacagtatgtggataggacagaggtcagggagggcacaggtcagcatttcaggaac

SEQ ID NO: 636487 - DNA, 120 bp, Artificial Sequence
  ENSG00000180822_40 (sequence is synthesized)
tcgcagtattctttttccctcccttggaggtggggacctgacttgtaagttaatttggtaatttttaactaggaagtaaatttaaaatttacagaaaagttgcaaagaagatagaattcc

SEQ ID NO: 636488 - DNA, 120 bp, Artificial Sequence
  ENSG00000180822_41 (sequence is synthesized)
tgcttagcttttgccccaatttcccacttgccacccttccctctttgtgtttgtatctttttttttctgagccacatgaaagtaaagctgccttttgtgtctgtgtcactctgtgtgtgt

SEQ ID NO: 636489 - DNA, 120 bp, Artificial Sequence
  ENSG00000180822_42 (sequence is synthesized)
gactgtgtaaggggtagcacacttacatggaacaggttactgcgtgtgggagaaggctcaggaaggtattcatatttatacagacggaaagctgggtggggttgcggacacactcccata

SEQ ID NO: 636490 - DNA, 120 bp, Artificial Sequence
  ENSG00000180822_43 (sequence is synthesized)
gagaaggtggtgtgagcttgtctggcaggccgtgaataactttcatatcaataaggtaaattagtctccagaatatttgcgagatggaggcctagtatctatatgcaaaaaagaggggtt

SEQ ID NO: 636491 - DNA, 120 bp, Artificial Sequence
  ENSG00000180822_44 (sequence is synthesized)
ctcagtatctcgactgtctcaacaagtcacgggtgtgccgtggcttccggcgtctcttaagggaatggtgctgcagagctcggaccaagaaggttttccagcaaagtcccatgctttgcc

SEQ ID NO: 636492 - DNA, 120 bp, Artificial Sequence
  ENSG00000180822_45 (sequence is synthesized)
agttgccttgagcctgggtctgggccctcaagttgaaaatgcactataatgaaaagggagaggtgtcctgaatcagtatcttatatgagagatgaaagcaggtagggaaagagaaggcct

SEQ ID NO: 636493 - DNA, 120 bp, Artificial Sequence
  ENSG00000180822_46 (sequence is synthesized)
ggggggttctcagtagctctggaagcatcgcaggagttggtgtggccaaggggacccaacctcctatggccctggaggggcacagcttgggtctgaggggctcagtgcctccagacacag

SEQ ID NO: 636494 - DNA, 120 bp, Artificial Sequence
  ENSG00000180822_47 (sequence is synthesized)
cgttgttcctcagaaatcctgtctctgcagttagaacagttggaataccaggggggcccccttagggtaaagggggatgttcctgcccctgggatatagggcagggtgtgacttacaggc

SEQ ID NO: 636495 - DNA, 120 bp, Artificial Sequence
  ENSG00000180822_48 (sequence is synthesized)
tcctcctaggcagccttggtgagccccagcttcctaccacactgcctgcctttagatcaccctctacatgagtggtcccagcctgcctaacacagctaggaaaggatgaggttggtccct

SEQ ID NO: 636496 - DNA, 120 bp, Artificial Sequence
  ENSG00000180822_49 (sequence is synthesized)
ctgagcagataactgggcacaactctccgcctcgggggcacactgcacccagcacactggtgggaggctctgtgctaagtactgtaagctgttctttaaacaccagctcttggaataacc

SEQ ID NO: 636497 - DNA, 120 bp, Artificial Sequence
  ENSG00000180822_50 (sequence is synthesized)
gaacagctgcctttgtccggacacattcctttttttttttttttaataaaaaaacagctttaccgagacgtaaacacatgtcatacaattcagcagctgtcctcaggcagaggctgtgct

SEQ ID NO: 636498 - DNA, 120 bp, Artificial Sequence
  ENSG00000180822_51 (sequence is synthesized)
tgccgccgccttgctttttcataggtgtgttggctgctttgtaaggacagtcagtgagttaatacccaagacctttccagccctaaaaatcacgcagccttgtacagcggaaaaacaggc

SEQ ID NO: 636499 - DNA, 120 bp, Artificial Sequence
  ENSG00000180822_52 (sequence is synthesized)
ttttggggtcctgggctctccctctcctcaatttccaaacaaagctgggagaggtttccaggccacggtggggcctgggcctgcgcctgcacctgcgcccctgagccacactgcctctca

SEQ ID NO: 636500 - DNA, 120 bp, Artificial Sequence
  ENSG00000180822_53 (sequence is synthesized)
gggttcttggtgggaccatagctcagatggcagcaactgaaaggacagaactgctgcccagatgagatcccatgacgtgtgttctaaatcggcctttagtaatggtgcaggtggcctggt

SEQ ID NO: 636501 - DNA, 120 bp, Artificial Sequence
  ENSG00000180822_54 (sequence is synthesized)
gccctcagcctcaccgcaccacccttttgccttttggtgatgaggctaagtacatgcttgccatatgttgaggtgggggtgggtcagtgcctctccaggggtgagtagttctgcactggc

SEQ ID NO: 636502 - DNA, 120 bp, Artificial Sequence
  ENSG00000180822_55 (sequence is synthesized)
cctgcgtatgggtgaggctaaaggaggaggccgcgcagtggggcaggcaacatccaactgctttagcctttttgcccacgtattttcaggatattggctttcagattccaggtgtatgac

SEQ ID NO: 636503 - DNA, 120 bp, Artificial Sequence
  ENSG00000180822_56 (sequence is synthesized)
tctgcttgatttttgcagttggcccaatgtgcacctcagccattttctattgattctgtagaaggggactaaaacttacattcagtagaaaattacgtgtgtgtccatatgcctatctgt

SEQ ID NO: 636504 - DNA, 120 bp, Artificial Sequence
  ENSG00000180822_57 (sequence is synthesized)
gcacacacacacaaatatatttgtgtgtatacacatatatgcaaatgcatggaaacgtaggagggagggaagtggaactggttggggtggggtggtgctgaaggagaactttaatatttt

SEQ ID NO: 636505 - DNA, 88 bp, Artificial Sequence
  ENSG00000180822_58 (sequence is synthesized)
gggcgtgagccaccgctcccggccaaaatcaaaacaccagaaacccctctgtgtagggcagaggttcttaagcagtgcggggcacctg

SEQ ID NO: 636506 - DNA, 120 bp, Artificial Sequence
  ENSG00000180822_59 (sequence is synthesized)
ctgtgtagggcagaggttcttaagcagtgcggggcacctgcaggatctgttccagcagacagctggccccaaatcctggctttctgggtcaggagggctgggtggggcccagcagctgcc

SEQ ID NO: 636507 - DNA, 120 bp, Artificial Sequence
  ENSG00000180822_60 (sequence is synthesized)
tctcgaacaagttccagggaggctgctgaggtggggcctgcccttcagaaccctgggtctggtggagagactgggagaggcctgagtgactcgtctgcatttgcagcacctgtctgaaga

SEQ ID NO: 636508 - DNA, 120 bp, Artificial Sequence
  ENSG00000180822_61 (sequence is synthesized)
gaggcatggagattagagctttcttttctccctacaaccccatcctctttctgagcatttcccagctgcacgtggctgtgaggaacacggggcctgcagtatttcaggagtggctgtatc

SEQ ID NO: 636509 - DNA, 120 bp, Artificial Sequence
  ENSG00000180822_62 (sequence is synthesized)
cagggaatgcacgctgagtcctagacacagagccaggccgggtggaaaacaaaaagagaagaagtgattatgaaataataagacggaccgtgtgccccttgcaaggtgcggcctgcgaaa

SEQ ID NO: 636510 - DNA, 120 bp, Artificial Sequence
  ENSG00000180822_63 (sequence is synthesized)
tcaacagacttataaataaggtctggtggaagcgcaggagcgcacgcgggaggctatggcgggggaacctctgtgagttccgcggcggaggctagaacatcgctgtggctgcgggaccct

SEQ ID NO: 636511 - DNA, 120 bp, Artificial Sequence
  ENSG00000180822_64 (sequence is synthesized)
cacccggcgctgaaaaccctccacatcagctcctgctcggaaatgtctccgcagctcaccagtgcttttcgaaatctgcccaagacctttgtttgccatttaaatgaaatgaaaacgaac

SEQ ID NO: 636512 - DNA, 120 bp, Artificial Sequence
  ENSG00000180822_65 (sequence is synthesized)
acttggaatatgcttctattcctaagaagttggctgcataggagcacaacatcaccagcttaccacgtattggtcattctctttgaggagcagggccatactgacggcttacatgtgcgc

SEQ ID NO: 636513 - DNA, 120 bp, Artificial Sequence
  ENSG00000180822_66 (sequence is synthesized)
gtttagtcgcaggggctgcggggtggcagcctcagagccctgtccttccgcagccgtgggccccgcagggaccagccaagcagggcaaccaaaagctggaaccagcagcgaaaaccccga

SEQ ID NO: 636514 - DNA, 120 bp, Artificial Sequence
  ENSG00000180822_67 (sequence is synthesized)
gcccacgaacgcagcgcagtgcgggaacacttgccctttgttcctcagtaaggccgggtgttttcgcatccccggaggttgtgaatttgagttataatggcctcggtcgggactgagaga

SEQ ID NO: 636515 - DNA, 120 bp, Artificial Sequence
  ENSG00000180822_68 (sequence is synthesized)
gccgagcttccacgagagagctttgcctgctttgtcctacaaatcggcggagggagtagcatcctggcttttctagggcgccatttccctgctacaggcaatctcccctcccccacgctg

SEQ ID NO: 636516 - DNA, 120 bp, Artificial Sequence
  ENSG00000180822_69 (sequence is synthesized)
ttcttcagcctcagataggctttgctccaagcgcagggcagcacctgggaggctgtgggagctctttcagtcagcaagtaggtacaacagatgcgacaccatgcagacacgcagctgtga

SEQ ID NO: 636517 - DNA, 120 bp, Artificial Sequence
  ENSG00000180822_70 (sequence is synthesized)
acgacagttcagaactcagcgtaagcttgtgctatgaacgagcaccgtcagagaattcccacccacacgtacagaaacacagtttttatattacaacctcaaggacagggagggaagtgt

SEQ ID NO: 636518 - DNA, 120 bp, Artificial Sequence
  ENSG00000180822_71 (sequence is synthesized)
gacagctgtagtgtggacctcccccgcacatgcgatacctcgggccgggcggtgtgacctcacaggcccacttatggcacttgcagtttgggattgctcatttggctctaggaagcggtg

SEQ ID NO: 636519 - DNA, 120 bp, Artificial Sequence
  ENSG00000180822_72 (sequence is synthesized)
gtgtctgagtgtgatacttcccttacgaggtttgtttttgttttctttctgttctgtagccaaaccaatttaccagcccgtcttccagatgcaggtgatcttactctcagtaaacaaaaa

SEQ ID NO: 636520 - DNA, 120 bp, Artificial Sequence
  ENSG00000180822_73 (sequence is synthesized)
catgtaacctttttcctgtttctcttgggtggtaataattttagggcatttgataagagtttgacttcagaaaaagaacaaagtgaagaaatgttcagctccatctcaggtgttcacatt

SEQ ID NO: 636521 - DNA, 120 bp, Artificial Sequence
  ENSG00000180822_74 (sequence is synthesized)
tgtgcataacttttattgaaaggctgacagggtaggctagcggaacggaggggtgtgtggaggagagtagcagggggtgggagggtcaagttgaaacagtgggtgcctgcgaagggtctc

SEQ ID NO: 636522 - DNA, 120 bp, Artificial Sequence
  ENSG00000180822_75 (sequence is synthesized)
cctattagccaggaagggaacagcacagaggggttcaagcgtgacagacggtgctgggaagtgggcagccgtagcagcctcccctgctgagcccggcgggcccagatgcgtatcaggctt

SEQ ID NO: 636523 - DNA, 120 bp, Artificial Sequence
  ENSG00000180822_76 (sequence is synthesized)
gggtgggtcctgccaccttgctcacttggtaccggatttcccggggctgtgcccacagggaagtgttgctgctctggcaacatttcataaaggtgttgctcaacagcttcaggtatccct

SEQ ID NO: 636524 - DNA, 120 bp, Artificial Sequence
  ENSG00000180822_77 (sequence is synthesized)
aggctgaagctgccaccaaacaggcacccggcctcctcctcctcaggctgccctgggaggagagctgtgggaccgcctcgccggctgagagccattacctgccgaccgtcggcaagtcag

SEQ ID NO: 636525 - DNA, 120 bp, Artificial Sequence
  ENSG00000180822_78 (sequence is synthesized)
cctcacacccactggactctgctcccaagagcccaggctgttttcctcaaagctagcctcttttccagtcatcgatggattagtcctgatggctgaagtgctgagcagtgtcttcgttgg

SEQ ID NO: 636526 - DNA, 120 bp, Artificial Sequence
  ENSG00000180822_79 (sequence is synthesized)
accagttttttattgtcatttgaggtggagatcagagatcatgaccagaagagtgtgagtgctgtcccttgccaccaacttcctagagatttcgggcagcactctacagcttcaatttcc

SEQ ID NO: 636527 - DNA, 120 bp, Artificial Sequence
  ENSG00000180828_0 (sequence is synthesized)
gtaaaagactcccccgtctgtggcggcggctgtttgatgggtccggaaatctcttgaaggtgaatccaagcaagataaacggtgcggagaggaggcgcggggctgggctcagagcggcgg

SEQ ID NO: 636528 - DNA, 120 bp, Artificial Sequence
  ENSG00000180828_1 (sequence is synthesized)
cggcggcggctccactccctccgcgcccaccctcccaccatgcggggccgcggcccatggtgagccccagcagccagcaccatcggctggagacgaagaagaagaagaagaggaggcggc

SEQ ID NO: 636529 - DNA, 120 bp, Artificial Sequence
  ENSG00000180828_2 (sequence is synthesized)
gagcgcgggggaaggcgaaaaagaaaaagaaagaaggggagagggctcccggcagcaccaggaccgacgcgcgcaccagctccggagcccagctcgcgcgcgtctgtggggccgcctgac

SEQ ID NO: 636530 - DNA, 120 bp, Artificial Sequence
  ENSG00000180828_3 (sequence is synthesized)
cgggcgcggcggcccgggctgcgcgccggcgcgggaccatggagcgcgggatgcacctcggtgcagcggccgccggcgaggacgacctcttcctgcacaagagcctgagcgcctccacct

SEQ ID NO: 636531 - DNA, 120 bp, Artificial Sequence
  ENSG00000180828_4 (sequence is synthesized)
ctgcacaagagcctgagcgcctccacctccaagcgcttggaagcggctttccgctccacgcccccgggcatggacctgtccctggcgccgccgcctcgggaacgcccggcgtcctcctcc

SEQ ID NO: 636532 - DNA, 80 bp, Artificial Sequence
  ENSG00000180828_5 (sequence is synthesized)
tcgtcgcccctgggctgcttcgagccggctgaccccgagggggcagggctgctgttgccgccgcctggaggaggcggcgg

SEQ ID NO: 636533 - DNA, 120 bp, Artificial Sequence
  ENSG00000180828_6 (sequence is synthesized)
ggtgtccccgggctgctagtaggttcagccggcgttgggggcgaccctagcctaagcagcctgccggccggggccgccctttgcctcaagtacggcgaaagcgcgagccggggctcggtg

SEQ ID NO: 636534 - DNA, 120 bp, Artificial Sequence
  ENSG00000180828_7 (sequence is synthesized)
gccgagagcagcggcggcgagcagagccccgacgacgacagcgacggtcgctgcgagctcgtgctgcgggccggagtagccgacccgcgggcctccccgggagcgggaggtggtggcgcg

SEQ ID NO: 636535 - DNA, 80 bp, Artificial Sequence
  ENSG00000180828_8 (sequence is synthesized)
gtggcgcgaaggcagccgagggctgctccaatgcccacctccacggcggcgccagcgtccccccggggggcctgggcggc

SEQ ID NO: 636536 - DNA, 120 bp, Artificial Sequence
  ENSG00000180828_9 (sequence is synthesized)
agcagcagcagcagcagcagcagcaagaaatccaaagagcaaaaggcgctgcggcttaacatcaatgcccgagagcgccggcggatgcacgacctgaacgacgcgctggacgagctgcgc

SEQ ID NO: 636537 - DNA, 120 bp, Artificial Sequence
  ENSG00000180828_10 (sequence is synthesized)
aacgacgcgctggacgagctgcgcgcggtgatcccctacgcgcacagcccctcggtgcgaaagctctccaagatcgccacgctgctgctcgccaagaactacatcctcatgcaggcgcag

SEQ ID NO: 636538 - DNA, 120 bp, Artificial Sequence
  ENSG00000180828_11 (sequence is synthesized)
gccctggaggagatgcggcgcctagtcgcctacctcaaccagggccaggccatctcggctgcctccctgcccagctcggcggctgcagcggcagcagctgctgccctgcacccggcgctc

SEQ ID NO: 636539 - DNA, 120 bp, Artificial Sequence
  ENSG00000180828_12 (sequence is synthesized)
ggcgcctacgagcaggcagccggctacccgttcagcgccggactgcccccggctgcctcctgcccggagaagtgcgccctgtttaacagcgtctcctccagcctctgcaaacagtgcacg

SEQ ID NO: 636540 - DNA, 120 bp, Artificial Sequence
  ENSG00000180828_13 (sequence is synthesized)
aaaaacacaagaccgacccaaaatctagaggaaagcgaaaagctgctccccaccccctttattttggtcctctcgtagttgtgaaacacttgcagagcaaacaaagcagaggcaagaact

SEQ ID NO: 636541 - DNA, 120 bp, Artificial Sequence
  ENSG00000180828_14 (sequence is synthesized)
gaggagaagtatcagagacaaacgggacttttagccttgacatccccagaatctcggtctttggggtggggagggagggaggagggaggtggagttgggatggagtatggatgtcttttt

SEQ ID NO: 636542 - DNA, 120 bp, Artificial Sequence
  ENSG00000180828_15 (sequence is synthesized)
tttctcagaaaagtggcaactttggtggcagcctagaccgcgaggaagtggaatcttccttaaaggtgaaacataagttgagaagtagtgcttggttattaagcctggagagtgtttgaa

SEQ ID NO: 636543 - DNA, 120 bp, Artificial Sequence
  ENSG00000180828_16 (sequence is synthesized)
tggcaaaatactaatcctactaataattgtggatttggctagtgctgagggggagaggaggggttaggggttgggtagcatgagagatggaatattcattcagacaaatcagaaagggca

SEQ ID NO: 636544 - DNA, 120 bp, Artificial Sequence
  ENSG00000180828_17 (sequence is synthesized)
cttgaaaataaattttgattctgagccaggagaaaaacttgaaatgttgacttaagtgagggggaaataaaacccagagagagagagagagcgagagagagagacatgttactatgaaag

SEQ ID NO: 636545 - DNA, 120 bp, Artificial Sequence
  ENSG00000180828_18 (sequence is synthesized)
acttgtattttttattgtctctgaactttaatcctgtgaaaatgctcaaagttttggcgagagtgatataaaaaaactgactgtggctgaaagaattgcatttaaaaatatttatgtgca

SEQ ID NO: 636546 - DNA, 120 bp, Artificial Sequence
  ENSG00000180828_19 (sequence is synthesized)
ccttgttactttctactctgcaatgatgtattaacaattcatggtatttatttgttattcttcaatgacccttccacatcaacagtatttatcatgtgttaaagtcatgggtcttatgtg

SEQ ID NO: 636547 - DNA, 120 bp, Artificial Sequence
  ENSG00000180828_20 (sequence is synthesized)
cagatttttttaatgcctctaaaattgttttatagattacttatgctgtgtgccaagtgtttaaaggtttatttgccaacaagtatgaagagaaatattgatgtatctgagctgcttagg

SEQ ID NO: 636548 - DNA, 120 bp, Artificial Sequence
  ENSG00000180828_21 (sequence is synthesized)
tttatgaaaggtcacctggatattttcagttgcatcatccctgtatttaaattgagctttaataaattgcttcagtccaaaaattacaggaaaggtgtattcttaattgatgaatgaatt

SEQ ID NO: 636549 - DNA, 120 bp, Artificial Sequence
  ENSG00000180828_22 (sequence is synthesized)
gatctcttttttgaaaggggactcctttacattccaaaagggaaaaacatcacagcaatagttgctatacgtaagaacatgctaagcaaatatttttccaggctgtgctgtgcattttta

SEQ ID NO: 636550 - DNA, 120 bp, Artificial Sequence
  ENSG00000180828_23 (sequence is synthesized)
aaaggtctaatttaattgcttttaatatatatgtacatatatgttattttaactgtggagaattatttaagttaaaagactggtttgatttgcctatggtgtgaaatcctttgttatttt

SEQ ID NO: 636551 - DNA, 120 bp, Artificial Sequence
  ENSG00000180828_24 (sequence is synthesized)
tctaaaaaaataaaatttaaaaagaaagaaaactaaggaagaacaagaagctatttacccaaagtgagctttcagttttagttttgcatggctgtttgactgcctttccgccctatgaaa

SEQ ID NO: 636552 - DNA, 120 bp, Artificial Sequence
  ENSG00000180828_25 (sequence is synthesized)
atcaagaaaatcttttttaaaaatggagtcctgctattttccactccttgcagataatacaaattcagtttgtcaggttggatggtgagttgggagctgtgatggatctgttggcgggtt

SEQ ID NO: 636553 - DNA, 120 bp, Artificial Sequence
  ENSG00000180828_26 (sequence is synthesized)
ttggatgtgtaaagaatgatatatatattaaataggtcaatcagactatgacagctatgtacgaccatttgtatgtgtatctatgtcagaaagaatctttattaaaatattttgatcaaa

SEQ ID NO: 636554 - DNA, 120 bp, Artificial Sequence
  ENSG00000180834_0 (sequence is synthesized)
cgggagcggggcggcgggcgccggggctggcatggcgtggccctgtatcagccgcctgtgctgcctggcgcggcgctggaaccagctggaccgctccgacgtggcggtgccgctcactct

SEQ ID NO: 636555 - DNA, 120 bp, Artificial Sequence
  ENSG00000180834_1 (sequence is synthesized)
gcacggctactcggacctcgacagcgaggagccgggcacgggcggcgccgcctcgcgcaggggccagcctcccgcgggcgcccgggattccggccgggacgtgccgctcactcagtacca

SEQ ID NO: 636556 - DNA, 120 bp, Artificial Sequence
  ENSG00000180834_2 (sequence is synthesized)
cactcagtaccagcgggacttcggcttgtggaccacgcccgccgggcccaaggatccgccgccggggcgcggaccgggggcgggcggccgcaggggcaaatcctccgcgcagtcctccgc

SEQ ID NO: 636557 - DNA, 120 bp, Artificial Sequence
  ENSG00000180834_3 (sequence is synthesized)
cggcgcccgcggggtctacgtgctgcccatcggcgacgcggacgcggctgcagcagtgaccacgtcgtacagacaggaattccaggcttggactggagtgaagccctcaagatccacaaa

SEQ ID NO: 636558 - DNA, 120 bp, Artificial Sequence
  ENSG00000180834_4 (sequence is synthesized)
gacaaaaccagcccgagtcatcacaacccacacttcgggatgggacagcagccctggggccggcttccaggtcccagaggtgaggaagaagttcactcctaacccctccgccatctttca

SEQ ID NO: 636559 - DNA, 120 bp, Artificial Sequence
  ENSG00000180834_5 (sequence is synthesized)
ggcctcagctccccggattctcaacgtgtgactgcctgcaccgtgacaccatggctgccgacaggacagggctggggagcggcctcaggacccactgccgcggggctgggcgagagcatg

SEQ ID NO: 636560 - DNA, 120 bp, Artificial Sequence
  ENSG00000180834_6 (sequence is synthesized)
gcatgggcccctgcgggagggcacagcccctctcaaagctgtcaccagggccaaagtgctggtgtggagcagatgcaccgatggacttggcacacccagctcagcctcaagcatcctctt

SEQ ID NO: 636561 - DNA, 120 bp, Artificial Sequence
  ENSG00000180834_7 (sequence is synthesized)
gagaagcctgtggaaggctcctgcgttcgttaactgccatctggccgtctctcagttttgaaatctctgaggagcctgaggatcaagtcagttgggaaccgaattggtccatggaagctg

SEQ ID NO: 636562 - DNA, 120 bp, Artificial Sequence
  ENSG00000180834_8 (sequence is synthesized)
gagcacttgattaatttcataacctacagtgagacccttggctcttcctacaaatggcccctgcagttgaagctgttggaatcttgggccgtcacctgcatgactcatggtgatgctgag

SEQ ID NO: 636563 - DNA, 120 bp, Artificial Sequence
  ENSG00000180834_9 (sequence is synthesized)
tatccaggaggaaatttccagaagaaacagaccgtcagtcacgggcttccacttcacagacctccttatggccaagatgagcctcatgttttaacaaaacagttcttgggattgaatgac

SEQ ID NO: 636564 - DNA, 120 bp, Artificial Sequence
  ENSG00000180834_10 (sequence is synthesized)
tcacatttaccttgtgctaggttctaaagattgaatccacattttgttactaatgattttcccgctaacataaggatgatgagcagggcactatcatacacactggctgagaactggaac

SEQ ID NO: 636565 - DNA, 120 bp, Artificial Sequence
  ENSG00000180834_11 (sequence is synthesized)
tgtttttgggaaggtggcatttgtctcattccctgaaataccttaaaatgtcctctacaccaacccttccgtctaccctgctcacatgtacagtgacggggaactcaccaccttttgaag

SEQ ID NO: 636566 - DNA, 120 bp, Artificial Sequence
  ENSG00000180834_12 (sequence is synthesized)
aggcagttcattttctttgcaaagctctctcctaacttcctccgtaaattccagccagcatggccacatgggtcacgcctggtgccttcacacgtttgaggggtcttcgtctctttttaa

SEQ ID NO: 636567 - DNA, 120 bp, Artificial Sequence
  ENSG00000180834_13 (sequence is synthesized)
agcttagaggtacaagctcaggacagtcttcagtaaggaaatttgtggatttccctttggatctttcttcctctccagcccacaagtggctctagtgagacgagcatttaagctgcaggt

SEQ ID NO: 636568 - DNA, 120 bp, Artificial Sequence
  ENSG00000180834_14 (sequence is synthesized)
ggtggcactcgggtctcagagccaccagacgtgcaggtgggacagtggttccagctccgactgcctgtcagcgtccctcccaggtgctagccctggcaggcacagccctcccctcatgcc

SEQ ID NO: 636569 - DNA, 120 bp, Artificial Sequence
  ENSG00000180834_15 (sequence is synthesized)
agcaaaggaaatgctcttgatgagaggctcgctttaaagaagcccaaagcgtgtgcttatccaaggggttcagctattcctgacttcacggcttgcatgtttgatttttctaagagaaaa

SEQ ID NO: 636570 - DNA, 120 bp, Artificial Sequence
  ENSG00000180834_16 (sequence is synthesized)
gaggctgcctgctgggtgtctgtggaaatgagattaaaaactgtacaatctcagattttactaaaatgcaaaaatgtagtttcagtttcttaaattataagcacgagtcttctcacgctt

SEQ ID NO: 636571 - DNA, 120 bp, Artificial Sequence
  ENSG00000180834_17 (sequence is synthesized)
ctgcgcccggcgcccgcggggtctacgtgctgcccatcggcgacgcggacgcggctgcagcagtgaccacgtcgtacaggaatagcaagagcttggctgcctggacccctgcccccaatt

SEQ ID NO: 636572 - DNA, 120 bp, Artificial Sequence
  ENSG00000180834_18 (sequence is synthesized)
cgggcagaaacacaggatcactgttgaacttgaccctcccagcgccatgccagtgggcctctgggacccccaccttccagctctgggacctgatacaagccactccctccagccttgtct

SEQ ID NO: 636573 - DNA, 120 bp, Artificial Sequence
  ENSG00000180834_19 (sequence is synthesized)
tgtaagatgtacatcatctaagcaaacttaagaaattcagaaagccaaggaaacgaacagagccaggaatcctgaagatgtgaggccactcctaactcaaggttcttgagggagtaccca

SEQ ID NO: 636574 - DNA, 120 bp, Artificial Sequence
  ENSG00000180855_0 (sequence is synthesized)
gtagctgagagacgacctggaagttctgaggcagcctttgtctggctggaacacgcattggcagcgggagctgtcggtaggacctgggacaccgcggaagtcgggaaatggcctcagtgg

SEQ ID NO: 636575 - DNA, 120 bp, Artificial Sequence
  ENSG00000180855_1 (sequence is synthesized)
ctttagaggatgtggctgtgaacttcacccgagaagagtgggctttgctgggtccttgtcagaagaatctctacaaagatgtgatgcaggaaaccatcaggaacctggattgtgtagtaa

SEQ ID NO: 636576 - DNA, 120 bp, Artificial Sequence
  ENSG00000180855_2 (sequence is synthesized)
tgaaatggaaagaccagaacattgaagatcaatatagatatcccaggaaaaatctaagatgtcgtatgttagagagatttgttgaaagtaaagatggaactcaatgtggagaaacatcta

SEQ ID NO: 636577 - DNA, 120 bp, Artificial Sequence
  ENSG00000180855_3 (sequence is synthesized)
gccagattcaagatagtattgtgaccaagaacactcttcctggagtaggtccttgtgaaagcagtatgagaggagaaaaagtcatgggtcattcatcccttaattgttacatcagagttg

SEQ ID NO: 636578 - DNA, 120 bp, Artificial Sequence
  ENSG00000180855_4 (sequence is synthesized)
gtgctgggcacaaaccacatgagtatcatgaatgtggagagaagccagatacgcataaacaacgtgggaaagccttcagttaccacaactcatttcaaacacatgagaggcttcacactg

SEQ ID NO: 636579 - DNA, 120 bp, Artificial Sequence
  ENSG00000180855_5 (sequence is synthesized)
gaaagaaaccatatgattgtaaagaatgtgggaagtccttcagttctttgggaaaccttcaaagacacatggcagtgcagcgtggagatggaccttataaatgtaagttgtgtgggaaag

SEQ ID NO: 636580 - DNA, 120 bp, Artificial Sequence
  ENSG00000180855_6 (sequence is synthesized)
cgtttttttggcccagtttattacatatgcatgaaagaacgcacactggagagaaaccatatgaatgtaagcagtgttctaaagccttttctttttacagttcctatctaagacatgaaa

SEQ ID NO: 636581 - DNA, 120 bp, Artificial Sequence
  ENSG00000180855_7 (sequence is synthesized)
gaacacatactggggagaaaccgtatgaatgtaaacagtgttctaaagcctttcctttttacagttcctatctaagacatgaaagaacacatactggggagaaaccatataaatgtaagc

SEQ ID NO: 636582 - DNA, 120 bp, Artificial Sequence
  ENSG00000180855_8 (sequence is synthesized)
agtgttctaaagccttccctgattccagttcttgtctaatacatgaaagaactcacactggagagaaaccctatacatgtaaacaatgtgggaaagccttcagtgtttccggttcccttc

SEQ ID NO: 636583 - DNA, 120 bp, Artificial Sequence
  ENSG00000180855_9 (sequence is synthesized)
aaagacatgaaaccactcacagtgcagagaaaccctatgcatgtcagcaatgtgggaaagcgtttcatcatctgggaagctttcaaagacacatgataaggcacactggaaatggacctc

SEQ ID NO: 636584 - DNA, 120 bp, Artificial Sequence
  ENSG00000180855_10 (sequence is synthesized)
catgaaagaactcacactggagagaaaccctatgaatgcaagcagtgtgggaaagcattatctcatcgctcaagctttcgaagtcatatgataatgcacactggagatggacctcataaa

SEQ ID NO: 636585 - DNA, 120 bp, Artificial Sequence
  ENSG00000180855_11 (sequence is synthesized)
tgcaaggtatgtgggaaagcctttgtttatcccagtgtatttcaaagacatgaaaggactcacactgcagagaaaccctataaatgtaaacaatgtggcaaagcctaccgtatttccagt

SEQ ID NO: 636586 - DNA, 120 bp, Artificial Sequence
  ENSG00000180855_12 (sequence is synthesized)
tcccttcgaaggcatgaaacaactcatactggagagaaaccctataaatgcaaacttgggaaagcctgtattgatttctgttcctttcaaaatcacaaaacaactcacactggagagaag

SEQ ID NO: 636587 - DNA, 120 bp, Artificial Sequence
  ENSG00000180855_13 (sequence is synthesized)
ccatatgagtgtaaggaatgtgggaaagcattcagtcgtttcagatacctttctcgacataaaaggactcacacaggagagaaaccttatgagtgtaaaacatgtaggaaagccttcggt

SEQ ID NO: 636588 - DNA, 120 bp, Artificial Sequence
  ENSG00000180855_14 (sequence is synthesized)
cattatgataacttaaaggtacatgaaagaattcactctggagagaagccgtatgaatgtaaggaatgtgggaaagcattctcttggctcacttgctttctacgacatgaaagaattcac

SEQ ID NO: 636589 - DNA, 120 bp, Artificial Sequence
  ENSG00000180855_15 (sequence is synthesized)
atgagagagaaatcctatgaatgtccacaatgtggtaaagccttcactcattcccgttttcttcaaggacatgaaaaaactcatactggagagaacccgtatgaatgtaaggaatgtggg

SEQ ID NO: 636590 - DNA, 120 bp, Artificial Sequence
  ENSG00000180855_16 (sequence is synthesized)
aaagcatttgcttctctcagttccttgcatagacataaaaagactcactggaaaaaaactcacactggagagaacccatatgaatgtaaggaatgtgggaaagcatttgcttctctcagt

SEQ ID NO: 636591 - DNA, 120 bp, Artificial Sequence
  ENSG00000180855_17 (sequence is synthesized)
tccttgcatagacataaaaagactcactagcattctctctaaatgtatggaatgtgggaaagcatttattaattttatttcatttcagatacttgtacgaaacacattggagatagaccc

SEQ ID NO: 636592 - DNA, 120 bp, Artificial Sequence
  ENSG00000180855_18 (sequence is synthesized)
tgtgaatgtaagcacttggtaaagccttaagtagtttcagtttctttccagtacagtcatcccttgatacctgctgggtattggttccagcactccgtgagccatgtccagtccctttta

SEQ ID NO: 636593 - DNA, 120 bp, Artificial Sequence
  ENSG00000180855_19 (sequence is synthesized)
taaaatgacatgtttgtatgtaacttacccacatcctcttgtatagtctcaattatgtctagattacttaaaatacctcatgcattataaaagctatgcaaatagttgttctattgtatt

SEQ ID NO: 636594 - DNA, 120 bp, Artificial Sequence
  ENSG00000180855_20 (sequence is synthesized)
gtttagggaatcatgataaggaaaagagtctatgtattttcagtatagatgcagtaattgtgagcctatcaacatagtgtagtcagccagaacattaaagtttctttgtttcaactctca

SEQ ID NO: 636595 - DNA, 120 bp, Artificial Sequence
  ENSG00000180855_21 (sequence is synthesized)
tgaaatggaaagaccagaacattgaagatcaatatagatatcccaggaaaaatctaaggtaatttacactcacaagagaaagatatgtccctggagccgttctgagaatgacatgaaaat

SEQ ID NO: 636596 - DNA, 120 bp, Artificial Sequence
  ENSG00000180871_0 (sequence is synthesized)
agagacagaaggtggatagacaaatctccaccttcagactggtaggctcctccagaagccatcagacaggaagatgtgaaaatccccagcactcatcccagaatcactaagtggcacctg

SEQ ID NO: 636597 - DNA, 120 bp, Artificial Sequence
  ENSG00000180871_1 (sequence is synthesized)
tcctgggccaaagtcccaggacagacctcattgttcctctgtgggaatacctccccaggagggcatcctggatttcccccttgcaacccaggtcagaagtttcatcgtcaaggttgtttc

SEQ ID NO: 636598 - DNA, 120 bp, Artificial Sequence
  ENSG00000180871_2 (sequence is synthesized)
atcttttttttcctgtctaacagctctgactaccacccaaccttgaggcacagtgaagacatcggtggccactccaataacagcaggtcacagctgctcttctggaggtgtcctacaggt

SEQ ID NO: 636599 - DNA, 120 bp, Artificial Sequence
  ENSG00000180871_3 (sequence is synthesized)
gaaaagcccagcgacccagtcaggatttaagtttacctcaaaaatggaagattttaacatggagagtgacagctttgaagatttctggaaaggtgaagatcttagtaattacagttacag

SEQ ID NO: 636600 - DNA, 120 bp, Artificial Sequence
  ENSG00000180871_4 (sequence is synthesized)
ctctaccctgcccccttttctactagatgccgccccatgtgaaccagaatccctggaaatcaacaagtattttgtggtcattatctatgccctggtattcctgctgagcctgctgggaaa

SEQ ID NO: 636601 - DNA, 120 bp, Artificial Sequence
  ENSG00000180871_5 (sequence is synthesized)
ctccctcgtgatgctggtcatcttatacagcagggtcggccgctccgtcactgatgtctacctgctgaacctagccttggccgacctactctttgccctgaccttgcccatctgggccgc

SEQ ID NO: 636602 - DNA, 120 bp, Artificial Sequence
  ENSG00000180871_6 (sequence is synthesized)
ctccaaggtgaatggctggatttttggcacattcctgtgcaaggtggtctcactcctgaaggaagtcaacttctatagtggcatcctgctactggcctgcatcagtgtggaccgttacct

SEQ ID NO: 636603 - DNA, 120 bp, Artificial Sequence
  ENSG00000180871_7 (sequence is synthesized)
ggccattgtccatgccacacgcacactgacccagaagcgctacttggtcaaattcatatgtctcagcatctggggtctgtccttgctcctggccctgcctgtcttacttttccgaaggac

SEQ ID NO: 636604 - DNA, 120 bp, Artificial Sequence
  ENSG00000180871_8 (sequence is synthesized)
cgtctactcatccaatgttagcccagcctgctatgaggacatgggcaacaatacagcaaactggcggatgctgttacggatcctgccccagtcctttggcttcatcgtgccactgctgat

SEQ ID NO: 636605 - DNA, 120 bp, Artificial Sequence
  ENSG00000180871_9 (sequence is synthesized)
catgctgttctgctacggattcaccctgcgtacgctgtttaaggcccacatggggcagaagcaccgggccatgcgggtcatctttgctgtcgtcctcatcttcctgctctgctggctgcc

SEQ ID NO: 636606 - DNA, 120 bp, Artificial Sequence
  ENSG00000180871_10 (sequence is synthesized)
ctacaacctggtcctgctggcagacaccctcatgaggacccaggtgatccaggagacctgtgagcgccgcaatcacatcgaccgggctctggatgccaccgagattctgggcatccttca

SEQ ID NO: 636607 - DNA, 120 bp, Artificial Sequence
  ENSG00000180871_11 (sequence is synthesized)
ggactccctgcccaaagacagcaggccttcctttgttggctcttcttcagggcacacttccactactctctaagacctcctgcctaagtgcagccccgtggggttcctcccttctcttca

SEQ ID NO: 636608 - DNA, 120 bp, Artificial Sequence
  ENSG00000180871_12 (sequence is synthesized)
cagtcacattccaagcctcatgtccactggttcttcttggtctcagtgtcaatgcagcccccattgtggtcacaggaagtagaggaggccacgttcttactagtttcccttgcatggttt

SEQ ID NO: 636609 - DNA, 120 bp, Artificial Sequence
  ENSG00000180871_13 (sequence is synthesized)
agaaagcttgccctggtgcctcaccccttgccataattactatgtcatttgctggagctctgcccatcctgcccctgagcccatggcactctatgttctaagaagtgaaaatctacactc

SEQ ID NO: 636610 - DNA, 120 bp, Artificial Sequence
  ENSG00000180871_14 (sequence is synthesized)
tctaagaagtgaaaatctacactccagtgagacagctctgcatactcattaggatggctagtatcaaaagaaagaaaatcaggctggccaacggggtgaaaccctgtctctactaaaaat

SEQ ID NO: 636611 - DNA, 120 bp, Artificial Sequence
  ENSG00000180871_15 (sequence is synthesized)
cgacagtgagactctgtctcagtccatgaagatgtagaggagaaactggaactctcgagcgttgctgggggggattgtaaaatggtgtgaccactgcagaagacagtatggcagctttcc

SEQ ID NO: 636612 - DNA, 120 bp, Artificial Sequence
  ENSG00000180871_16 (sequence is synthesized)
tcaaaacttcagacatagaattaacacatgatcctgcaattccacttataggaattgacccacaagaaatgaaagcagggacttgaacccatatttgtacaccaatattcatagcagctt

SEQ ID NO: 636613 - DNA, 120 bp, Artificial Sequence
  ENSG00000180871_17 (sequence is synthesized)
attcacaagacccaaaaggcagaagcaacccaaatgttcatcaatgaatgaatgaatggctaagcaaaatgtgatatgtacctaacgaagtatccttcagcctgaaagaggaatgaagta

SEQ ID NO: 636614 - DNA, 120 bp, Artificial Sequence
  ENSG00000180871_18 (sequence is synthesized)
ctcatacatgttacaacacggacgaaccttgaaaactttatgctaagtgaaataagccagacatcaacagataaatagtttatgattccacctacatgaggtactgagagtgaacaaatt

SEQ ID NO: 636615 - DNA, 120 bp, Artificial Sequence
  ENSG00000180871_19 (sequence is synthesized)
tacagagacagaaagcagaacagtgattaccagggactgaggggaggggagcatgggaagtgacggtttaatgggcacagggtttatgtttaggatgttgaaaaagttctgcagataaac

SEQ ID NO: 636616 - DNA, 120 bp, Artificial Sequence
  ENSG00000180871_20 (sequence is synthesized)
agtagtgatagttgtaccgcaatgtgacttaatgccactaaattgacacttaaaaatggtttaaatggtcaattttgttatgtatattttatatcaatttaaaaaaaaacctgagcccca

SEQ ID NO: 636617 - DNA, 120 bp, Artificial Sequence
  ENSG00000180871_21 (sequence is synthesized)
aaaggtattttaatcaccaaggctgattaaaccaaggctagaaccacctgcctatattttttgttaaatgatttcattcaatatcttttttttaataaaccatttttacttgggtgttta

SEQ ID NO: 636618 - DNA, 120 bp, Artificial Sequence
  ENSG00000180871_22 (sequence is synthesized)
catacacctccagcccacccccagcacagctgagcactggattatccacagtcaggatttaagtttacctcaaaaatggaagattttaacatggagagtgacagctttgaagatttctgg

SEQ ID NO: 636619 - DNA, 120 bp, Artificial Sequence
  ENSG00000180872_0 (sequence is synthesized)
atgaaattattgacaaccatatgtagactgaaacttgaaaaaatgtactcaaagacaaatacatcttccacaatatttgaaaaggcccgacatgggacagagaaaatcagcacagccaga

SEQ ID NO: 636620 - DNA, 120 bp, Artificial Sequence
  ENSG00000180872_1 (sequence is synthesized)
tgtgcaagacctacaactcattgctgcgtgacagaatgtgaccctacggacccaaataattggatcccaaaggactcagtagggactcaagaatggtaccctaaagactcacgtcattga

SEQ ID NO: 636621 - DNA, 120 bp, Artificial Sequence
  ENSG00000180872_2 (sequence is synthesized)
ttacaatgaagatccttctctttttctgtattttgcttttctttggagtccttattccaccagccagaagtgaagggcaccatatcacctttagtaggtggaagtcatgtacagcgattg

SEQ ID NO: 636622 - DNA, 120 bp, Artificial Sequence
  ENSG00000180872_3 (sequence is synthesized)
cctataatttccatgcatgcatacctataatgaataaataattaaataaaatatatttcagctggacatttttataaacattgtgcttgcttagaagaaagaatcagaatacaaagcagg

SEQ ID NO: 636623 - DNA, 120 bp, Artificial Sequence
  ENSG00000180872_4 (sequence is synthesized)
gatttgaactctggaatagaagcagcgtggagaagaaaatccatgatgggaccgctaagtttagtgagattctggggccaattccttatttagtgtgaaaagcatattatgagtcattag

SEQ ID NO: 636624 - DNA, 120 bp, Artificial Sequence
  ENSG00000180872_5 (sequence is synthesized)
tgaggtattatcaagaattctttgaggagactcaggagtggggacagagttgataagagatgtgacccctgaactagtaaaaatcgttgcaagaaatttgaaggattatgaaatcctcat

SEQ ID NO: 636625 - DNA, 120 bp, Artificial Sequence
  ENSG00000180872_6 (sequence is synthesized)
aactttctcatattgcttatacttcctggttatactttttctctcttttttgaaagaattatgaaaataaaaataactgattttttttccaagaataatctcaaaaggtagaatagaggg

SEQ ID NO: 636626 - DNA, 120 bp, Artificial Sequence
  ENSG00000180872_7 (sequence is synthesized)
tagcttgtggcaataacgataatgtgaaattatgattaacttttttgttttgttttgctttgtttcatgtttttaatgtttccacatattatcagatgattcttatcatgctacttattg

SEQ ID NO: 636627 - DNA, 120 bp, Artificial Sequence
  ENSG00000180872_8 (sequence is synthesized)
gtgtcttagtaaattttaagtttttaaaaaataatgtaacagaattatatatgtgtgtatgcatgctcacacatataatttctattatagaaatttttgtcatacccaggatttatgtgg

SEQ ID NO: 636628 - DNA, 120 bp, Artificial Sequence
  ENSG00000180872_9 (sequence is synthesized)
caaggatgtgttaacaaaggctaaattgtggccttgagggaaagggtcagcagttggtcttaatacctcacctagattaaagattttccccttattcaaacattttgaaatatcaactct

SEQ ID NO: 636629 - DNA, 120 bp, Artificial Sequence
  ENSG00000180872_10 (sequence is synthesized)
aaaaataggtgatggttttgcagggcttggtatgtgctaagtattacttaaagaatgtcctctaggctttgtccttggctggcagccttggttattatgtgacttacaacctgtggacta

SEQ ID NO: 636630 - DNA, 120 bp, Artificial Sequence
  ENSG00000180872_11 (sequence is synthesized)
aggccacatgaagaaaagggagctagtcacttaaaattatgtggtaacaaggtatttaagttgaggctacttgtacctggtaggtttcttatgctgctgtgacatatacacatttcagct

SEQ ID NO: 636631 - DNA, 120 bp, Artificial Sequence
  ENSG00000180872_12 (sequence is synthesized)
ttgggttaatcttataaccaaaacatatcctgtacacagtacctgggcacatagggaaaagcatctgggtgtccaaattatatatgatattcctgatatgtataatactatgctctctga

SEQ ID NO: 636632 - DNA, 120 bp, Artificial Sequence
  ENSG00000180872_13 (sequence is synthesized)
ccagtgtcaatttggagctaaataaccctatttgcatcttgtgattttggtttatgatccaaactctgaaccccacttcaggggtctcacagtatacctatactataatttaatgtatct

SEQ ID NO: 636633 - DNA, 120 bp, Artificial Sequence
  ENSG00000180875_0 (sequence is synthesized)
agagctaagtctccgggctcctttcacatctgcaggagcagccagcctgggaccgcgcggcgcggggcgcgctctcgcctctcctgcaccctcagccggcgcgcttctcttatgggcgtc

SEQ ID NO: 636634 - DNA, 120 bp, Artificial Sequence
  ENSG00000180875_1 (sequence is synthesized)
tgctgcagtctggctgcggtcgaactgaaagcggcggcgggagaccaaacttagaccccgctgtggactagagaactcagagaaggcagagggagagggagagagagagagagaagggac

SEQ ID NO: 636635 - DNA, 120 bp, Artificial Sequence
  ENSG00000180875_2 (sequence is synthesized)
ccgaggaggaggcttccatcacgtcattgcaggatgttctggaagctttccctgtccttgttcctggtggcggtgctggtgaaggtggcggaagcccggaagaaccggccggcgggcgcc

SEQ ID NO: 636636 - DNA, 120 bp, Artificial Sequence
  ENSG00000180875_3 (sequence is synthesized)
atcccctcgccttacaaggacggcagcagcaacaactcggagagatggcagcaccagatcaaggaggtgctggcctccagccaggaggccctggtggtcaccgagcgcaagtacctcaag

SEQ ID NO: 636637 - DNA, 120 bp, Artificial Sequence
  ENSG00000180875_4 (sequence is synthesized)
agtgactggtgcaagacgcagccgctgcggcagacggtgagcgaggagggctgccggagccgcaccatcctcaaccgcttctgctacggccagtgcaactccttctacatcccgcggcac

SEQ ID NO: 636638 - DNA, 120 bp, Artificial Sequence
  ENSG00000180875_5 (sequence is synthesized)
gtgaagaaggaggaggagtccttccagtcctgcgccttctgcaagccccagcgcgtcacctccgtcctcgtggagctcgagtgccccggcctggacccacccttccgactcaagaaaatc

SEQ ID NO: 636639 - DNA, 120 bp, Artificial Sequence
  ENSG00000180875_6 (sequence is synthesized)
cagaaggtgaagcagtgccggtgcatgtccgtgaacctgagcgactcggacaagcagtgagcgccgggccggacgcagctcagccccgcgcgcgcccggccgctgggtggcgccgccgcc

SEQ ID NO: 636640 - DNA, 120 bp, Artificial Sequence
  ENSG00000180875_7 (sequence is synthesized)
gcctctgtccctgccctccgagcccactgtcacgctgcctggtgttccccctcagcagcaagcacttctcttagggctgacggtgtccttgtcacagacgtggatcgcaagtggagcttt

SEQ ID NO: 636641 - DNA, 120 bp, Artificial Sequence
  ENSG00000180875_8 (sequence is synthesized)
tgctgatgtgttcctgaccgaccccgggtcccacctgtgccccctaaaccaggcggtggatcaggcccgaaggaaaatgctggaaaaccaccaccgccacccagcagtcagagaggacct

SEQ ID NO: 636642 - DNA, 120 bp, Artificial Sequence
  ENSG00000180875_9 (sequence is synthesized)
ttcgaggtgatgcactgtaaatccggcattgatgtttccaccatgtggaaaagcaaggatttccctggccccgccctgcactccagctcgcccctttcccgcgcgaagtgaaggatgcgt

SEQ ID NO: 636643 - DNA, 120 bp, Artificial Sequence
  ENSG00000180875_10 (sequence is synthesized)
cacttttctgagcggcccctcagacctctcctgctggtccctggacctctggctgggagcgctcattcttgtgactggcaggctgccctcggtcgctgctgtgatgaggatatgtgcaac

SEQ ID NO: 636644 - DNA, 120 bp, Artificial Sequence
  ENSG00000180875_11 (sequence is synthesized)
ctccataaatatgtcggtggacggggcgtctcctaataaacctgataccaagaagacaacttgagccacttggatcccgaagtgggcttcccgggaaacctcgagcagagcaggctacac

SEQ ID NO: 636645 - DNA, 120 bp, Artificial Sequence
  ENSG00000180875_12 (sequence is synthesized)
aatcccccatcctcaagtccccaccgcctcttcttcctcactgtccccgccccctatttgtggactaaagatgaactctggtgtgcatgctattattgctgcaattagaatattatcaca

SEQ ID NO: 636646 - DNA, 120 bp, Artificial Sequence
  ENSG00000180875_13 (sequence is synthesized)
cacaaaggtctctatattaacgctggttttataagtgaccgtatattgtaaagagctgttaaaaagtattatagacctattcatgtattatttcacatgttttgactctggcttgcagca

SEQ ID NO: 636647 - DNA, 120 bp, Artificial Sequence
  ENSG00000180875_14 (sequence is synthesized)
ccattcggagtaaggatgacagcaggcccagaaggtgtcttactcagaaaaaaaaatgcctggtcagcaattcactgtcatgcacctatttttagattgggcagggagatgggaggagtc

SEQ ID NO: 636648 - DNA, 120 bp, Artificial Sequence
  ENSG00000180875_15 (sequence is synthesized)
gtgatttttactttgaatactatttcactgacgttactaagcattgcagcacaatgtagaaattggcttgggatggataggtatagggaagggcattcgttgggaaattgatgaccggaa

SEQ ID NO: 636649 - DNA, 120 bp, Artificial Sequence
  ENSG00000180875_16 (sequence is synthesized)
actagaaagcccctataatgtggaatatgcatatgtggggtgaaaccgtatactactttcactgccatgacactaggcaaaaaatatttcctgttaaaagaaagagaaaaagagagggat

SEQ ID NO: 636650 - DNA, 120 bp, Artificial Sequence
  ENSG00000180875_17 (sequence is synthesized)
aacatgcttccttttcaaagaatagacttcaaaagggacgaacaaacattaggtcaccttttgtgtttataatgaattgttgacgtttccatgctgtggtctcttgatatacggaagtag

SEQ ID NO: 636651 - DNA, 120 bp, Artificial Sequence
  ENSG00000180875_18 (sequence is synthesized)
acgtaacttattttccagcgaaattatatacttcttctgggctcctttgctcagttgccccaggaaggcttccctgtgagtaatgcttatggaatctgacaaatgtgaatgagctgccat

SEQ ID NO: 636652 - DNA, 120 bp, Artificial Sequence
  ENSG00000180875_19 (sequence is synthesized)
tggtgggaatcagtaaactttgaaaacctttcactgatgattccctggtaagtgctcctgtgaggggccacttccctagtatgtgagagagaccctctgcaagccgctgtggggacttag

SEQ ID NO: 636653 - DNA, 120 bp, Artificial Sequence
  ENSG00000180875_20 (sequence is synthesized)
cttcctgatactaggtagtgatggtggatctagagacattcacttgaagagcaaggattggggtggggtgggttggtgaatctatctcaggccactgcactgcaaggtgcatttctgtca

SEQ ID NO: 636654 - DNA, 120 bp, Artificial Sequence
  ENSG00000180875_21 (sequence is synthesized)
tttctgcaacaccatgagacctgagcaagaatgtgctgtggcagagggggtcttggtttcataaatgggtatatacagcctgaactcaggaggcagaaatcaaaagaaatccttgagggc

SEQ ID NO: 636655 - DNA, 120 bp, Artificial Sequence
  ENSG00000180875_22 (sequence is synthesized)
tggaacctgaggatagagcgaaaatggagagaagggtgttcaaggtcaggagtgatttttgcatttggtggaaaacctcaagtcagactcagtggcagaacatgcagcagaaaagctgtg

SEQ ID NO: 636656 - DNA, 120 bp, Artificial Sequence
  ENSG00000180875_23 (sequence is synthesized)
aaggaaggaaatttacgtgattgtaatggaggctaggggtggattgggaggtgagtggaggagagtctctgaccagctgcagagccaacccctatcattttattaacatggaacccacac

SEQ ID NO: 636657 - DNA, 120 bp, Artificial Sequence
  ENSG00000180875_24 (sequence is synthesized)
agataggggagggattaagctaagaacttacagaatgcaaacacgagcacactctcttcgaacccaattgtgggtgtagcaatgaaagcaatatgatatgctgcagtgtgaagctccttc

SEQ ID NO: 636658 - DNA, 120 bp, Artificial Sequence
  ENSG00000180875_25 (sequence is synthesized)
tggggttatcgtatgtacaaagtttaccttataatggctcaaattgtatttaatttttttgttttgtttataaatgaagaaaagctataagtataatgtaattattttataggtatacta

SEQ ID NO: 636659 - DNA, 120 bp, Artificial Sequence
  ENSG00000180875_26 (sequence is synthesized)
ttaaattatagaacaaataaagataatctaggattatatgtgatcccggtgtgacgtgccataaaagtggaatttttgacttgttgcagtgagctgtgaagcagcactatgcgttcagag

SEQ ID NO: 636660 - DNA, 120 bp, Artificial Sequence
  ENSG00000180875_27 (sequence is synthesized)
agtttttgttcaaccatggtgagttcaacctctagcttatgtcacatgatctcctttggggtctggaatcttctaagagaaatagaatcaggcatccaaggagcagaagtgatggaggtg

SEQ ID NO: 636661 - DNA, 120 bp, Artificial Sequence
  ENSG00000180875_28 (sequence is synthesized)
gccctcaatcctggtctttggaagcttccaagcctcttccacatcccctgccagctgaagacagagtattctcactgtgctggctgaaggagaaacactaaacaaggaaaccttgagaaa

SEQ ID NO: 636662 - DNA, 120 bp, Artificial Sequence
  ENSG00000180875_29 (sequence is synthesized)
ctgcagcaatggaagtccactgttagtctctccgttagcaccagggacacacttgttctgagttttgttcattttcacatttactcctcatgagttccaacatttcttaatttaaatatt

SEQ ID NO: 636663 - DNA, 120 bp, Artificial Sequence
  ENSG00000180875_30 (sequence is synthesized)
tcttagtttatagcatctccatttttctattaattgacttaatctgccatttaagaaaactccgtaatcaataaaaaataaaatccacaatcaaactgcacatggttgatccactgtgta

SEQ ID NO: 636664 - DNA, 120 bp, Artificial Sequence
  ENSG00000180875_31 (sequence is synthesized)
ggcttcaaaggaattaaactcaacttcctaggaaataattcatcttagtttattaaatgggacagaatatttcactgctaacgtattctaactcacttgtttttgaaattggccagatga

SEQ ID NO: 636665 - DNA, 120 bp, Artificial Sequence
  ENSG00000180875_32 (sequence is synthesized)
tttttaagttataaagtcaatgaaaatgacttttgctattgtgtgaacaacttagaatgtatatattcccagaaggcttatttaatgattgacctatcaccactgattattaatgtctgc

SEQ ID NO: 636666 - DNA, 84 bp, Artificial Sequence
  ENSG00000180875_33 (sequence is synthesized)
tttaatgattgacctatcaccactgattattaatgtctgcatgaatgataacaataagaccaagtcatcaataatgcaatgaaa

SEQ ID NO: 636667 - DNA, 120 bp, Artificial Sequence
  ENSG00000180878_0 (sequence is synthesized)
gggctgcctggggttcctgcagcagccactgccctgcccaatccctcccataccccaccatgttggtgggtacccccaacctgctgacactggatgaagctgatgccacctggaccctca

SEQ ID NO: 636668 - DNA, 120 bp, Artificial Sequence
  ENSG00000180878_1 (sequence is synthesized)
tcaaggataaggtcatcgaggagcactttgggcccaatgcagtagcagtacctttcctgtcagatgcagcctgctatgacctactgggtgtgctggtaaaacagtcccgcccagcccata

SEQ ID NO: 636669 - DNA, 120 bp, Artificial Sequence
  ENSG00000180878_2 (sequence is synthesized)
cccgcctggctttgccaggtcggcagggccggagggcactgaaaccagtggggccactaccaagcctcctggagcaggcaggatctgagggtgccttcgcccactgcactcgggaatact

SEQ ID NO: 636670 - DNA, 120 bp, Artificial Sequence
  ENSG00000180878_3 (sequence is synthesized)
caccaaatggccgagcagagagagcctatgaagagacgcgaatgttggatggacagccctgcaagatccgcctacatatgggtgacctgcgcaagaaggttgccttcctgttgctgccac

SEQ ID NO: 636671 - DNA, 120 bp, Artificial Sequence
  ENSG00000180878_4 (sequence is synthesized)
ttctcttgttcctggctgcagctggggctgacgtctacagcccgtgagccccagctcctccggctacttcggtcattacctgttgccttctcctgcctcaagttttcactgcagtctaag

SEQ ID NO: 636672 - DNA, 120 bp, Artificial Sequence
  ENSG00000180878_5 (sequence is synthesized)
ggcgtgctgggaccacagaagcctctcactaaagacccattgccccatggggccaactgggtcagacccaacctcagcatcatgccgcctctggcccccacatcagcacctgctgataca

SEQ ID NO: 636673 - DNA, 120 bp, Artificial Sequence
  ENSG00000180878_6 (sequence is synthesized)
actgaagctgctgatgtgcccccacctgtcccagccccacctacgccacctccccaggaagggccagaggacaaacccaccagattctcctacaagggccgaaaccccttctggaggggg

SEQ ID NO: 636674 - DNA, 120 bp, Artificial Sequence
  ENSG00000180878_7 (sequence is synthesized)
ccccagatactgtcagagaactggctcttcagcccccgcagccctccaccaggagcccagggtgggggccccagggaccccgacgggcactccatgtccctgcccctgctgcagggtcta

SEQ ID NO: 636675 - DNA, 120 bp, Artificial Sequence
  ENSG00000180878_8 (sequence is synthesized)
tcctcagagttcgacagtgacgactgaagctgaagcaaaagattccgggggcaaagcccccaagatctggcataggggtactggtctctaataaacatcagctgctgctcccccaaacca

SEQ ID NO: 636676 - DNA, 120 bp, Artificial Sequence
  ENSG00000180879_0 (sequence is synthesized)
gccacgcagtggctcagtgtgggagcatggcctagaggtcaaacctcttacccatcagggccaggtgctggctggcagctgcttcagatggtttccagcccacctaggacctaaattaac

SEQ ID NO: 636677 - DNA, 120 bp, Artificial Sequence
  ENSG00000180879_1 (sequence is synthesized)
ctcttcttaaataagtgtaaggaaagaagactcggacctgaatacgcaagaccgcacacggagaagagcagaagcaaaacccccgcagcctcagaaaccctagctccttcccattccagg

SEQ ID NO: 636678 - DNA, 120 bp, Artificial Sequence
  ENSG00000180879_2 (sequence is synthesized)
cgcctcgaggggaaggcatctggggctctaagactgggggactatgggggatgactggcaaagtccggttctttgccaccgggataggtggcaaagcggtccacgagagaggaaaccgtg

SEQ ID NO: 636679 - DNA, 120 bp, Artificial Sequence
  ENSG00000180879_3 (sequence is synthesized)
gagaaatttgagtcccggaaccggattcccgaagcggtttgagaaaggcgggccgggatacgtgagtgactgcctcagaagggctccttcaaggacactaaggaggtgacagccgccgtg

SEQ ID NO: 636680 - DNA, 120 bp, Artificial Sequence
  ENSG00000180879_4 (sequence is synthesized)
gcccactctcccggcccgtccggagggccccccgccacccgatgcagaccccctgggggagccggtccagggccaacttcggccaatcccctcagtgacagcggaggcggccaatcaacc

SEQ ID NO: 636681 - DNA, 120 bp, Artificial Sequence
  ENSG00000180879_5 (sequence is synthesized)
ccggcgcgaagccctttccccgcccctggtggggcccctagccaatcggactccagactgcttcgggtgcggctaccccaccgctcccctgcgaccgctgccgcggtcccgtggctcttt

SEQ ID NO: 636682 - DNA, 120 bp, Artificial Sequence
  ENSG00000180879_6 (sequence is synthesized)
gcacgtcccgacacgcagataccgctctcgcgagagttcgacggggtgcgaagtttcggggacaggcgcggacccggtactgcgcacgcgcgcggtcgcaccgattcacgcccccttccg

SEQ ID NO: 636683 - DNA, 120 bp, Artificial Sequence
  ENSG00000180879_7 (sequence is synthesized)
gcgcctagagcaccgctgccgccatgttgagggggggaccgcgaccagctgggcccctggctcagggaggggccacgtcagtgctgccagagacgtcacaatgccggcccagccgttcgg

SEQ ID NO: 636684 - DNA, 120 bp, Artificial Sequence
  ENSG00000180879_8 (sequence is synthesized)
cagagaagaggcgatggcggcgatggcatctctcggcgccctggcgctgctcctgctgtccagcctctcccgctgctcagccgaggcctgcctggagccccagatcaccccttcctacta

SEQ ID NO: 636685 - DNA, 120 bp, Artificial Sequence
  ENSG00000180879_9 (sequence is synthesized)
caccacttctgacgctgtcatttccactgagaccgtcttcattgtggagatctccctgacatgcaagaacagggtccagaacatggctctctatgctgacgtcggtggaaaacaattccc

SEQ ID NO: 636686 - DNA, 120 bp, Artificial Sequence
  ENSG00000180879_10 (sequence is synthesized)
tgtcactcgaggccaggatgtggggcgttatcaggtgtcctggagcctggaccacaagagcgcccacgcaggcacctatgaggttagattcttcgacgaggagtcctacagcctcctcag

SEQ ID NO: 636687 - DNA, 120 bp, Artificial Sequence
  ENSG00000180879_11 (sequence is synthesized)
gaaggctcagaggaataacgaggacatttccatcatcccgcctctgtttacagtcagcgtggaccatcggggcacttggaacgggccctgggtgtccactgaggtgctggctgcggcgat

SEQ ID NO: 636688 - DNA, 120 bp, Artificial Sequence
  ENSG00000180879_12 (sequence is synthesized)
cggccttgtgatctactacttggccttcagtgcgaagagccacatccaggcctgagggcggcaccccagccctgcccttgcttccttcaataaacatcacaggacctgggactgcacagg

SEQ ID NO: 636689 - DNA, 120 bp, Artificial Sequence
  ENSG00000180879_13 (sequence is synthesized)
agagaagaggcgatggcggcgatggcatctctcggcgccctggcgctgctcctgctgtccagcctctcccgctgctcaggaaacgctggggccagtcttcaccttctgtcaactggccgg

SEQ ID NO: 636690 - DNA, 120 bp, Artificial Sequence
  ENSG00000180879_14 (sequence is synthesized)
gcggggtcggaccggagcgaagctctgtagcgctgagcgatcgcggccaaaaacggggctggaggagccacataagctaggaagggacctcagtgaggagagggagcaagagcggggcga

SEQ ID NO: 636691 - DNA, 120 bp, Artificial Sequence
  ENSG00000180879_15 (sequence is synthesized)
tttcttttcctctaggcagagaagaggcgatggcggcgatggcatctctcggcgccctggcgctgctcctgctgtccagcctctcccgctgctcaggtagcggcccagccggggcttctt

SEQ ID NO: 636692 - DNA, 120 bp, Artificial Sequence
  ENSG00000180879_16 (sequence is synthesized)
tcttgcgagcctctgacccacggcaggtggtgttgggggcaggagggatgcgggggtccggcctttcagggtccgtcgctgcgggccgggccttcccccgagaggcaggcggccttggga

SEQ ID NO: 636693 - DNA, 120 bp, Artificial Sequence
  ENSG00000180879_17 (sequence is synthesized)
cggggggaccaaagcacctcgcgcacgtttaccggcagccaggcttttccttgtctgcccatacgaagaggagtccccgagcctccatggtgcgcccggcccccaagctgcagcacggaa

SEQ ID NO: 636694 - DNA, 120 bp, Artificial Sequence
  ENSG00000180879_18 (sequence is synthesized)
ttcggcagagccgaccaggggtcccgtcgatttgcattcgtgaggggctgaggtctgaactccagagtgtgtttaggaggtggctgcagcagccagccccgggcccgggggccaggactg

SEQ ID NO: 636695 - DNA, 120 bp, Artificial Sequence
  ENSG00000180879_19 (sequence is synthesized)
gacaggggcggctttctccacattcccttttctgccgtccttcaggccagtagccttgctgcctgcaacgttttggcagcctaactggcctccctttccgcacactcctcatctgcccct

SEQ ID NO: 636696 - DNA, 120 bp, Artificial Sequence
  ENSG00000180879_20 (sequence is synthesized)
caggaattccctgaactatagtcagggacgtatccagaggacaagcctggccataaaacccttcgggggctcccctgcgccacaggaagcaggcccaacttaggcaggacacagaagggc

SEQ ID NO: 636697 - DNA, 120 bp, Artificial Sequence
  ENSG00000180879_21 (sequence is synthesized)
tggcgggatctagcccctgagaactgcctccacgctgttcctagggatctgcctcctgtggtccagacccagagccttctctgacgtcctctgctgaagccatcgttctgccagggcacc

SEQ ID NO: 636698 - DNA, 120 bp, Artificial Sequence
  ENSG00000180879_22 (sequence is synthesized)
acatttggacagcgggtggctgagaacattcccactttggggagcctttgtttcacaccctctgatgtaggcggcagccttcctttcctttgggcctctggttatggagaaggctaaggc

SEQ ID NO: 636699 - DNA, 120 bp, Artificial Sequence
  ENSG00000180879_23 (sequence is synthesized)
aactcgtccaggccgtttgtggctctgaattgaggctggcgtggcccccgggcctccgtgtcataggtccaagtgttggcatgtattgtccagtgaatccagcccccacctgtccccagt

SEQ ID NO: 636700 - DNA, 120 bp, Artificial Sequence
  ENSG00000180879_24 (sequence is synthesized)
tcgctcttcctgcacacctccagaaagccggccttgcccctccccagccttccttcacagccatcccgcctacgttgccattgcatttgtgaccgagcacttggatctgtctcgcatatc

SEQ ID NO: 636701 - DNA, 120 bp, Artificial Sequence
  ENSG00000180879_25 (sequence is synthesized)
ccacctggaaggggcaggaagagcgcatgggtccccagctgatccgtgctatgaggcagggccgggccatcctgccctcagaccgggatactcgagctggccttacccaggcatctctcc

SEQ ID NO: 636702 - DNA, 120 bp, Artificial Sequence
  ENSG00000180879_26 (sequence is synthesized)
cgggtgagtggcctggtccctcctcctttttggggttgttgggctgagtgaaggttatcctctccacagccccagctctgctgctgggccgtgattggccagcatgtcttggttcccctg

SEQ ID NO: 636703 - DNA, 120 bp, Artificial Sequence
  ENSG00000180879_27 (sequence is synthesized)
gcggaaggtgaccagggctggctggtctgctcacctgtactcccctgagctggcttgtgatctcctttttttcagggcacttggaacgggccctgggtgtccactgaggtgctggctgcg

SEQ ID NO: 636704 - DNA, 120 bp, Artificial Sequence
  ENSG00000180879_28 (sequence is synthesized)
ctccctgacatgcaagaacagggtccaggtgagacagtggggtttcagacaggagggcgggtggggggtgctcctcactgctagttgatgggggacctgtgtcgatagagggagaatcaa

SEQ ID NO: 636705 - DNA, 120 bp, Artificial Sequence
  ENSG00000180879_29 (sequence is synthesized)
tcttggggtgccggagagatcagggcacggtgatgccagatcctagccagtgttgacaggtcaccttcctcacctgctttgtgtgctgtgcctacacgaggtaaccctgggctcaccacc

SEQ ID NO: 636706 - DNA, 120 bp, Artificial Sequence
  ENSG00000180879_30 (sequence is synthesized)
cacccgctgtttcctgaatgagtatctggaccgggagaaagggccaggagtcagcccaccccggttgccattggccagtttgtctgtgtgggtgttttgtttttgtttttgttttttgtt

SEQ ID NO: 636707 - DNA, 63 bp, Artificial Sequence
  ENSG00000180879_31 (sequence is synthesized)
gcatcagtctcctaagtagctgggatgacaggtgctcgccaccatgcccagctaagttcccat

SEQ ID NO: 636708 - DNA, 120 bp, Artificial Sequence
  ENSG00000180879_32 (sequence is synthesized)
gatgacaggtgctcgccaccatgcccagctaagttcccataagtccaaagaaggaaatggggccttttttgggtatggccctcttagggtaaagcaccccttgggcagcccactgggcac

SEQ ID NO: 636709 - DNA, 120 bp, Artificial Sequence
  ENSG00000180879_33 (sequence is synthesized)
ccctgaccccagcacctcccttgtagactcaggaaatcactcagcccttttgatcatcccgcccctgctcacagtcaacagggttcctatgcgtccagttaggcccggccatggggatct

SEQ ID NO: 636710 - DNA, 120 bp, Artificial Sequence
  ENSG00000180879_34 (sequence is synthesized)
ggccttgtgcccccgtagggaagaccaatgcagagggccagtcacgggattggtgagtgttacttggtacctcctgccagggacactgcagcccccaactgggcctagcctgcccacctg

SEQ ID NO: 636711 - DNA, 120 bp, Artificial Sequence
  ENSG00000180879_35 (sequence is synthesized)
caggccgtgtgagcagcgcacagggctcctctgcccacacccagagggggcagaaggtgaccctgcctttgttccctcacccagaacatggctctctatgctgacgtcggtggaaaacaa

SEQ ID NO: 636712 - DNA, 120 bp, Artificial Sequence
  ENSG00000180879_36 (sequence is synthesized)
tcctttctctcacagctaacaagttgtgcttctggaaccagagtctctcccgtttacttcttcaggaaacgctggggccagtcttcaccttctgtcaactggccgggggcagagaccctt

SEQ ID NO: 636713 - DNA, 120 bp, Artificial Sequence
  ENSG00000180879_37 (sequence is synthesized)
ccgtgggctctggctgccggagtgctgcagtgtcggcactggtggtcagggtggcccctccgtgtccactctgcccacactctgctcaacacccaacccaggtgtcctggagcctggacc

SEQ ID NO: 636714 - DNA, 120 bp, Artificial Sequence
  ENSG00000180881_0 (sequence is synthesized)
ggagccaaattcagccattctttggaagaaagaagcctctacaacaaaggtggacttctgagtcatggacaaaccagaattcttgcccaccagtggtcccacgacttgatttgggaagcc

SEQ ID NO: 636715 - DNA, 120 bp, Artificial Sequence
  ENSG00000180881_1 (sequence is synthesized)
ttgttgactctgatgatgaggacaatttttcatatattccacttagtacagcaaacctgccaaattcatcttctactcttggctgggtcacaccatgtcaaactccatatactcagtatc

SEQ ID NO: 636716 - DNA, 120 bp, Artificial Sequence
  ENSG00000180881_2 (sequence is synthesized)
atctaaataaattggatcagaacataatacctgaaaatttgccagcaccaacagacaaatgtaaactaaaatatcagcaatgtaaaactgaaattaaagagggctataagcagtatagtc

SEQ ID NO: 636717 - DNA, 120 bp, Artificial Sequence
  ENSG00000180881_3 (sequence is synthesized)
agagaaatgcagaaaatacaaaatcaaatgttacacataaacagtctccaagaaacaagatagatgaaaagtgtgtgcaagatgaagaagccaacacagatgaccttacgactctggata

SEQ ID NO: 636718 - DNA, 120 bp, Artificial Sequence
  ENSG00000180881_4 (sequence is synthesized)
ggaaagccatcttacagcaaggttatgcagacaactcttgcgataaacaacagagggcaagaaaattggatgcagaaattgtggctgcagagaagaagaaacagattgttgcagagcaag

SEQ ID NO: 636719 - DNA, 120 bp, Artificial Sequence
  ENSG00000180881_5 (sequence is synthesized)
tgatgatagaccacttatctagggctgtcatcagtgatccagagcaaaatttagccattgagcaaaaagaaagtgatcatatccttccagattcaaagatgacacctcttcgatttagaa

SEQ ID NO: 636720 - DNA, 120 bp, Artificial Sequence
  ENSG00000180881_6 (sequence is synthesized)
aaagaacactacatgaaacaaagataagaactcattctacattaactgaaaatgtgctttctcataaattacagtttgatggtaggatcgtatcacgtaatggacgtgatgcttgcagag

SEQ ID NO: 636721 - DNA, 120 bp, Artificial Sequence
  ENSG00000180881_7 (sequence is synthesized)
agctcattgggttctttttcactcatgaccaatcccttacaatttatgaatatcgacaatttgggaaaaatagaacaaatgtgcttccttttattcaaaaaagcatttatagtcatcagt

SEQ ID NO: 636722 - DNA, 120 bp, Artificial Sequence
  ENSG00000180881_8 (sequence is synthesized)
gtggacgaagaaaaggaaaacaataccgacttggtgatttttatgttggtgcaaccttgacatttttgagttctgatcatctcagccttccagaaagcatcaaagaaaacacattactta

SEQ ID NO: 636723 - DNA, 120 bp, Artificial Sequence
  ENSG00000180881_9 (sequence is synthesized)
aactccgaatcacaaatattgatcaaatagctttggattctctcaaaactgcttctatggaacaggaggatgatataatcattcaagaaaccaatgataggctggtcttcaaagcaattc

SEQ ID NO: 636724 - DNA, 120 bp, Artificial Sequence
  ENSG00000180881_10 (sequence is synthesized)
aagatgtgctaaaagaaaaactacataaaagaggtgttcgtattttgactggattgggaaaatattttcaacagttggacaaggaaggaaatggacttttagataaggcagattttaagc

SEQ ID NO: 636725 - DNA, 120 bp, Artificial Sequence
  ENSG00000180881_11 (sequence is synthesized)
aagctctaaaagtgtttcacttagaagtgtctgaaaaggattttgagtctgcatggctaattctgaatgacaatggcaatggcaaggttgattatggagaattcaaacgtggtattattg

SEQ ID NO: 636726 - DNA, 120 bp, Artificial Sequence
  ENSG00000180881_12 (sequence is synthesized)
gtgaaatgaatgaatacaggaaatcatatgttcgaaaggcctttatgaaactggatttcaacaaaagtggcagtgtgcctattataaacataagaaaatgttactgtgcaaagaagcatt

SEQ ID NO: 636727 - DNA, 120 bp, Artificial Sequence
  ENSG00000180881_13 (sequence is synthesized)
ctcaagtaatttcaggccattcaacagaggaagaaatcaaatcatcctttctagaaacattaaaagttgcctgcagcaagtctgatgaagtgtcatatggtgaatttgaagattactatg

SEQ ID NO: 636728 - DNA, 120 bp, Artificial Sequence
  ENSG00000180881_14 (sequence is synthesized)
gtctttaataatacatatgtcatcaacactaagcattttattggagagatgatatcaatgtaaaggatgatcaaacactggaatatattttcctaggacttcctttattctggtttcttg

SEQ ID NO: 636729 - DNA, 120 bp, Artificial Sequence
  ENSG00000180881_15 (sequence is synthesized)
tttgtttgttttgttttgttttgttttctcaaaaatgttgaatttggaaagagaactatccagaaagatagatgtaggggtgtgttagtgtttgtgcatgtgtatgcctgttcacatgtc

SEQ ID NO: 636730 - DNA, 120 bp, Artificial Sequence
  ENSG00000180881_16 (sequence is synthesized)
cttacatttgtaaagatatctttttggtttattacttatcttgcgtatattttagaggtcattttttattaacttcagtaggaaagttacatctgcatcaaacaatatggcaacatctat

SEQ ID NO: 636731 - DNA, 120 bp, Artificial Sequence
  ENSG00000180881_17 (sequence is synthesized)
ttattaaccaagtttcctgtcctttcacattgttttttgctacctcttcctcagaatatatttgccaccatggtcaatttgataaattagaattgggcccaaagccagtgagataattca

SEQ ID NO: 636732 - DNA, 120 bp, Artificial Sequence
  ENSG00000180881_18 (sequence is synthesized)
atgtgtttttaacacatgaaaatattaaaggatatgcaagagaaatttttcaagcagtgtgattatagatgttttctgtatatagaatatttcaaatgatggaggtttaccccatgatgc

SEQ ID NO: 636733 - DNA, 120 bp, Artificial Sequence
  ENSG00000180881_19 (sequence is synthesized)
tcatttaaatactgacttgtcttttaaatctgtcttctaaattatgtactgttgttggttaaatagagcacaatgtagttattctaatgcccagttgtatttgttcttttattctgcttt

SEQ ID NO: 636734 - DNA, 120 bp, Artificial Sequence
  ENSG00000180881_20 (sequence is synthesized)
ttaactgtaatcctttttaccagcatacgattgttattgagcaatatgaaagggaaatgttctttattaaaatcaatacattatcttattaaacaaagatcctaaaagtatattgttgca

SEQ ID NO: 636735 - DNA, 120 bp, Artificial Sequence
  ENSG00000180881_21 (sequence is synthesized)
tatatgaatccaaggaatagttcagtaattattgcctaaaatgtgaaagcatattttgtatcctaaaatgaatgtatgatattctaaacatctgttttagtataacaaacaattgaaaca

SEQ ID NO: 636736 - DNA, 120 bp, Artificial Sequence
  ENSG00000180881_22 (sequence is synthesized)
tttccttctaaatatatgttatttaatagttacatgtattataatcattctttctaaattctttgctagtcatttcttcctgggaatacagagaaaagagacaactttatgagttgtttt

SEQ ID NO: 636737 - DNA, 120 bp, Artificial Sequence
  ENSG00000180881_23 (sequence is synthesized)
tttaaattttctatgttaatataacataaattagaaaaaataagtgattcaaaatgaaaatatttactttgtagaatatgactttagacatatcactgtatccatctatacttggcagca

SEQ ID NO: 636738 - DNA, 120 bp, Artificial Sequence
  ENSG00000180881_24 (sequence is synthesized)
tacttggcagcaacatgagaagtgtgatacatgtgaacccaacaaattcaaagttgcacttttcaagatgtgagaaggtactaaaacttaatactaaaacatgagagggaaaatatgtgt

SEQ ID NO: 636739 - DNA, 120 bp, Artificial Sequence
  ENSG00000180881_25 (sequence is synthesized)
aaacctctagtgctattttcactggctaaattctttatttcttgatttttttaaaaattaggttattaaaattaaaacaatatgctagaagacattttggcagaaataagtctataacac

SEQ ID NO: 636740 - DNA, 120 bp, Artificial Sequence
  ENSG00000180881_26 (sequence is synthesized)
tatttttgtcacatatctttttcttggaaaaatttatccaactatagacatcttaaaccctacaaattgttcttgttaaaaatgactaatactgggggtgctcaatatgcatatagtgtt

SEQ ID NO: 636741 - DNA, 120 bp, Artificial Sequence
  ENSG00000180881_27 (sequence is synthesized)
tttcattgataatttttatttagttcttaagaaacctgttcttaatgttggcatgtcacatttttctgttactataatcagaaaatgtatagtctgttatactgtaaaaaaaaaaaaaaa

SEQ ID NO: 636742 - DNA, 120 bp, Artificial Sequence
  ENSG00000180881_28 (sequence is synthesized)
gtctaaagctttctgaatgcggtttttggaggaatcgcgctagtttataccttttccaactcttctaactctggacctcttcttaccgagcttgttaggtgaaatcaggctgactgtctc

SEQ ID NO: 636743 - DNA, 120 bp, Artificial Sequence
  ENSG00000180881_29 (sequence is synthesized)
cttaaaaaaaagaaagcgcttaaaacaaagaaatagaaggtaatgggcatatataaaataagccaagcaagagaagagcaaagacaatctgcagggtggacatggatgtattcgtttctg

SEQ ID NO: 636744 - DNA, 120 bp, Artificial Sequence
  ENSG00000180881_30 (sequence is synthesized)
atcatgagaagaggctcttgtcatacatatcgttccatttttattttaaagttctataaacttctgaggtaaactgatttcttggatgtacttaataaagaataaatgtttcatattgga

SEQ ID NO: 636745 - DNA, 120 bp, Artificial Sequence
  ENSG00000180881_31 (sequence is synthesized)
agacctgcagagtgaagaaagctggtaatagatgtctgacaaactaaagaaagacttgtgttacggtcccacgacttgatttgggaagccttgttgactctgatgatgaggatcagaaca

SEQ ID NO: 636746 - DNA, 120 bp, Artificial Sequence
  ENSG00000180881_32 (sequence is synthesized)
aggggagggggagaggaggggaaagctagacctgcagagtgaagaaagctggtaatagatgtctgacaaactaaagaaagacttgtgttacgaaaaccagaatcatggcattctgaagac

SEQ ID NO: 636747 - DNA, 120 bp, Artificial Sequence
  ENSG00000180881_33 (sequence is synthesized)
aacagatgatttgacaaaacctacagatgttcctcatttggaatcccattgagcctgatctgcttttcattgcatatgctctgttgctaaaactatacaagcaccttccctctaggccca

SEQ ID NO: 636748 - DNA, 120 bp, Artificial Sequence
  ENSG00000180881_34 (sequence is synthesized)
cagatcctctcaatgaaggatgggtacacagatgcctaaacagctggtaaaacagggactttgccttctgagctgttatgtggcaccttttaatccattctaaccataaataatttgctg

SEQ ID NO: 636749 - DNA, 120 bp, Artificial Sequence
  ENSG00000180881_35 (sequence is synthesized)
attcctgtagaattaaaaacaaattattactgaaagaatataaagatacccatgacaaagcctcctgggtactcccagttatgagatttatgaagataattatatattaaaaatttttat

SEQ ID NO: 636750 - DNA, 120 bp, Artificial Sequence
  ENSG00000180881_36 (sequence is synthesized)
gggaaagctagacctgcagagtgaagaaagctggtaatagatgtctgacaaactaaagaaagacttgtgttactgtctgcacactggaaattcttcctggttgtgagacaagacctcaga

SEQ ID NO: 636751 - DNA, 120 bp, Artificial Sequence
  ENSG00000180881_37 (sequence is synthesized)
cttatctgagctaaggggaagaaagactgcaacagtgttgggcctgtgggtacacagaagtcaagaattgaagattggaaacctccacctagatttcagaggacatatggaaatgcctgg

SEQ ID NO: 636752 - DNA, 120 bp, Artificial Sequence
  ENSG00000180881_38 (sequence is synthesized)
gccctcatggagaacctctactagggcagtgtggaaagaaaaggtggggttggagactccacacagagtccccactggcacactgcctagtggagctgtgagaacagggccaccattctc

SEQ ID NO: 636753 - DNA, 120 bp, Artificial Sequence
  ENSG00000180881_39 (sequence is synthesized)
agtggagctgtgagaacagggccaccattctccagacctcagaatggtagatcaaatgacaacttgcaccatgcaccaggaaaagccacaagctctcaatatcagcctgtgaaggagctg

SEQ ID NO: 636754 - DNA, 120 bp, Artificial Sequence
  ENSG00000180881_40 (sequence is synthesized)
cctaaggccatgggaacccacctctcccatcagcatgcccccgatatgagacatggcgccaaaggagattatttcagagatttaagatttaatgactgccccactggattttggacttgt

SEQ ID NO: 636755 - DNA, 120 bp, Artificial Sequence
  ENSG00000180881_41 (sequence is synthesized)
gaagggacttgccttttctcagatgagactttggattatggactttgagttaatgctgaaatcatttaaaattttgggggactgttgcgtaggcatgattggttgggaaatgtaaaaaga

SEQ ID NO: 636756 - DNA, 120 bp, Artificial Sequence
  ENSG00000180881_42 (sequence is synthesized)
caagagatttggatgggctggggcagaatgatagggtttggctctgtgtccccacccaaaccttatctcgaattgtaattcttatgtgttgagggagggaactataatctccacatgttg

SEQ ID NO: 636757 - DNA, 69 bp, Artificial Sequence
  ENSG00000180881_43 (sequence is synthesized)
gatgttttgaagttcctccttttctttctcttgctgcactgtgaagaaggtgcttgtttcccctttgcc

SEQ ID NO: 636758 - DNA, 120 bp, Artificial Sequence
  ENSG00000180881_44 (sequence is synthesized)
cttgctgcactgtgaagaaggtgcttgtttcccctttgccttatgccatcattgtaagtttctgaggcctccctagctatgtggaactgtagtcaattaaacctatttcctttataaatg

SEQ ID NO: 636759 - DNA, 120 bp, Artificial Sequence
  ENSG00000180881_45 (sequence is synthesized)
agacctgcagagtgaagaaagctggtaatagatgtctgacaaactaaagaaagacttgtgttactatactgcatgataaacacaggaactcaaatggatttagaggttaaaggagttgct

SEQ ID NO: 636760 - DNA, 86 bp, Artificial Sequence
  ENSG00000180881_46 (sequence is synthesized)
gaaagctagacctgcagagtgaagaaagctggtaatagatgtctgacaaactaaagaaagacttgtgttacagtattgccaaagga

SEQ ID NO: 636761 - DNA, 120 bp, Artificial Sequence
  ENSG00000180881_47 (sequence is synthesized)
gagcagtgaactgggaaaagcagacccacctcaatgtgggtgggcaacatccaatcggctgccagctagaataaaccaggcaggagaagatggaagagccgacttgctgaatcttccagc

SEQ ID NO: 636762 - DNA, 120 bp, Artificial Sequence
  ENSG00000180881_48 (sequence is synthesized)
agccacacactgaaggctgaattgtcggcttcccgacttttgagattttgaaacttggactgagctactgctggcttccttgcttctcaacttacagatgggacttcacctatagatcat

SEQ ID NO: 636763 - DNA, 120 bp, Artificial Sequence
  ENSG00000180881_49 (sequence is synthesized)
gggggagaggaggggaaagctagacctgcagagtgaagaaagctggtaatagatgtctgacaaactaaagaaagacttgtgttaccacaattcagacagcccggaatatcaagattcatc

SEQ ID NO: 636764 - DNA, 120 bp, Artificial Sequence
  ENSG00000180881_50 (sequence is synthesized)
cacaccataaagttgggcatgcacagaagcatttcatcatcaaatggaagtggtatatacatgatggggcgcaagcagatcctgaaggcacaagttacatgaggaagtggctcaaatgac

SEQ ID NO: 636765 - DNA, 120 bp, Artificial Sequence
  ENSG00000180881_51 (sequence is synthesized)
ttccctatgatcagttggcagaggaaaagaagactagggcctggtttacagatggttttgcatgatatacagacaccaccccaaaatggacagctgtagcaccatagcccctttcttggt

SEQ ID NO: 636766 - DNA, 120 bp, Artificial Sequence
  ENSG00000180881_52 (sequence is synthesized)
atccctgaaggatgctggtgaagggaaatctccccagtatgcagaactttgagcaatgcacctggctgtacactttgcttggaaggagaaatggccagatgtatgataatatagtgattc

SEQ ID NO: 636767 - DNA, 120 bp, Artificial Sequence
  ENSG00000180884_0 (sequence is synthesized)
cttcccgccctggaccctcagcctgacgagaggctgggcagaaactcgcgatccccaggccctgcctgtgcaccagcggctggcgccaggccaatgacagtacgggagagggcaactctc

SEQ ID NO: 636768 - DNA, 120 bp, Artificial Sequence
  ENSG00000180884_1 (sequence is synthesized)
ccggccgccacggtgggggccggaacttcctgcactgcagcctcgcaggtcatttcccggcggggaggctgagtccccaggagctggggaccccgagttgggggcggggcggctggggct

SEQ ID NO: 636769 - DNA, 120 bp, Artificial Sequence
  ENSG00000180884_2 (sequence is synthesized)
acgcccgtgaagctgccccgccggctttcccggaccgcgagggggacagtgaggccgggaccccctccgcgcctttgcaccagccgtgaccccttgcaacgggggtacccagcggagctg

SEQ ID NO: 636770 - DNA, 120 bp, Artificial Sequence
  ENSG00000180884_3 (sequence is synthesized)
cgcgctctcggcgcccccggagcctgcgccccgggccccttgcgcattttgcacgggggagactgaggctaggagtgcgaccctcagcccggggtcacacctcgtctggggcacggccag

SEQ ID NO: 636771 - DNA, 120 bp, Artificial Sequence
  ENSG00000180884_4 (sequence is synthesized)
gtgggtggtagcctcagcctgcgagaccccctacccccgccccgtggtttcccgcaccgtggggccctgctctgaccacagactccgatggcagcggcggcgctgcgggaccccgcgcag

SEQ ID NO: 636772 - DNA, 120 bp, Artificial Sequence
  ENSG00000180884_5 (sequence is synthesized)
ggctgcgtgacctttgaggacgtgaccatttacttctcccaggaggagtgggtgctcctcgatgaggctcagagactcctgtactgcgatgtgatgctggaaaactttgcacttatagcc

SEQ ID NO: 636773 - DNA, 120 bp, Artificial Sequence
  ENSG00000180884_6 (sequence is synthesized)
tcgctgggacttatatctttcaggtcccacatcgtttcccagttggagatggggaaagagccctgggtgcctgacagtgtggatatgacatcagccatggccagaggggcttatggcagg

SEQ ID NO: 636774 - DNA, 120 bp, Artificial Sequence
  ENSG00000180884_7 (sequence is synthesized)
cctggctctgatttttgccatggaacagagggcaaggacttaccttctgagcataacgtttctgtagaaggagtggcacaggacaggagtcccgaggcaactctgtgcccccagaagacc

SEQ ID NO: 636775 - DNA, 120 bp, Artificial Sequence
  ENSG00000180884_8 (sequence is synthesized)
tgcccctgtgacatatgtggcctacgtttgaaagacattttgcatttggctgaacaccagacaacacatcccaggcagaaaccatttgtgtgtgaggcatatgtgaaaggctctgagttc

SEQ ID NO: 636776 - DNA, 120 bp, Artificial Sequence
  ENSG00000180884_9 (sequence is synthesized)
agtgcaaaccttccccggaaacaggtgcagcagaacgtacacaaccctatcagaacggaggagggccaggcttcccctgtaaagacctgcagagaccacacatcagatcagctttccacc

SEQ ID NO: 636777 - DNA, 120 bp, Artificial Sequence
  ENSG00000180884_10 (sequence is synthesized)
tgcagggagggtgggaaggactttgtggccacagcagggtttctgcagtgtgaggtcactcccagcgatggggagccgcacgaggccaccgaaggtgtggtggattttcacattgcacta

SEQ ID NO: 636778 - DNA, 120 bp, Artificial Sequence
  ENSG00000180884_11 (sequence is synthesized)
aggcataacaagtgctgtgaatctggggatgccttcaataacaaatccactcttgttcagcaccagagaatccacagcagagaaaggccttatgaatgcagcaaatgtggaatcttcttc

SEQ ID NO: 636779 - DNA, 120 bp, Artificial Sequence
  ENSG00000180884_12 (sequence is synthesized)
acttacgccgctgacctcactcaacaccagaaagttcacaatagaggaaaaccgtatgagtgctgtgaatgtggaaaattcttcagccagcactccagccttgttaaacatcgcagggtt

SEQ ID NO: 636780 - DNA, 120 bp, Artificial Sequence
  ENSG00000180884_13 (sequence is synthesized)
cacaccggtgaaagccctcacgtgtgtggtgactgtgggaaattcttcagccgaagctccaacctcattcagcataagagggttcacactggtgaaaagccatatgagtgcagcgactgt

SEQ ID NO: 636781 - DNA, 120 bp, Artificial Sequence
  ENSG00000180884_14 (sequence is synthesized)
gggaagttcttcagccagcgttccaacctcattcatcataagagggttcatacgggcagaagtgcccatgagtgcagtgaatgtgggaaatctttcaactgcaactccagcctaattaaa

SEQ ID NO: 636782 - DNA, 120 bp, Artificial Sequence
  ENSG00000180884_15 (sequence is synthesized)
cattggagagttcacactggagaaagaccttacaagtgtaacgaatgtgggaaattcttcagccacattgccagcctcattcaacatcagatagttcacactggcgagcggcctcacggg

SEQ ID NO: 636783 - DNA, 120 bp, Artificial Sequence
  ENSG00000180884_16 (sequence is synthesized)
agccagagctccagcctcaatagccatcggagacttcacactggtgaacggccttaccagtgcagtgaatgtgggaaattctttaaccaaagctccagcctcaataaccaccggagactt

SEQ ID NO: 636784 - DNA, 120 bp, Artificial Sequence
  ENSG00000180884_17 (sequence is synthesized)
cacaccggcgagcggccttatgagtgcagcgaatgtgggaaaaccttcaggcagaggtccaatctgaggcagcacctgaaagttcacaaaccagacaggccttacgaatgcagcgaatgt

SEQ ID NO: 636785 - DNA, 120 bp, Artificial Sequence
  ENSG00000180884_18 (sequence is synthesized)
gggaaagccttcaaccaaaggcctaccctcattcggcatcagaagattcacatcagagaaaggagcatggagaatgtgctccttccctgttcacagcacacaccagagataagctctgag

SEQ ID NO: 636786 - DNA, 120 bp, Artificial Sequence
  ENSG00000180884_19 (sequence is synthesized)
aacagaccttatcagggcgctgtcaactacaagttgaaacttgttcatccaagtacccaccctggggaggttccctaggaatgctagctgtgttggaagctttctggagacaagttacat

SEQ ID NO: 636787 - DNA, 120 bp, Artificial Sequence
  ENSG00000180884_20 (sequence is synthesized)
tctcttactgtagagtttatcagcgttttttcactgctggggttgtgatagaagccatgtcagcaccacacactgcagctctccaaagagtgtgtccaccactccactgtgctcagggaa

SEQ ID NO: 636788 - DNA, 120 bp, Artificial Sequence
  ENSG00000180884_21 (sequence is synthesized)
ggcagacctctcctctctctttccaatccctaaagggaattaggagtagtctgaagccttgggaagatgtcattcccgccctgtatggctggtttagccatggacatgaccagcttttgg

SEQ ID NO: 636789 - DNA, 120 bp, Artificial Sequence
  ENSG00000180884_22 (sequence is synthesized)
ctgtgaagacctgagcagggttttgccaacagcttgttctagagaaggtttccctttttctgggacattgttggtctcatgttatgcctgtgaaggatttgtccagccttcatgttactc

SEQ ID NO: 636790 - DNA, 120 bp, Artificial Sequence
  ENSG00000180884_23 (sequence is synthesized)
tacacaacaacttatctcctgtgtattgccctggttcatgtgatgataatggccttatgataaagccgcctttagtcttccatgttctgatcactgtgtggggtggttcaagagcagagt

SEQ ID NO: 636791 - DNA, 120 bp, Artificial Sequence
  ENSG00000180884_24 (sequence is synthesized)
taagatctaccaaactgaaggggtctccagattatcttggaggggacaggaggatggcagagaaacaactgtcaatccagatttgacctcatttgcattgccaccaaggcctcctaggaa

SEQ ID NO: 636792 - DNA, 120 bp, Artificial Sequence
  ENSG00000180884_25 (sequence is synthesized)
aaattgtaggaatttatgggtataatattgtggtctgaatggcgtgaatttttatcccgaggagggggcagttgtgacaacctccagtgcatgtgggaacagcatgaattgggtccctta

SEQ ID NO: 636793 - DNA, 120 bp, Artificial Sequence
  ENSG00000180884_26 (sequence is synthesized)
ttcccagggggtgccccatattccccaatactgtaaagcagatgctgtttagcacctgccaaggagccatatgccctgaagttcagcattaggcaggtatctcttaactgtaagacatac

SEQ ID NO: 636794 - DNA, 120 bp, Artificial Sequence
  ENSG00000180884_27 (sequence is synthesized)
caggcccagctgggaccataatttgtacagaaacactggatgtgattaatagggagtaggcgagattatagcaaaccagcagaaatggaactctgctaaatgtgcatccgtgaatgctcc

SEQ ID NO: 636795 - DNA, 120 bp, Artificial Sequence
  ENSG00000180884_28 (sequence is synthesized)
cttgaatgtggctgtgcaggattcagggtttgcagaaattctcaggacctcagacctctgtcctatgactaatgttactggcagagcaaataatctaaaggttttggttttgtggattac

SEQ ID NO: 636796 - DNA, 120 bp, Artificial Sequence
  ENSG00000180884_29 (sequence is synthesized)
catctccgtgctgtgcatctgaaggccagtgctgtgctggcaggaaaatagggactgagaaaaagcagatcctatactatagggactgtagtatctatgacgtagccagccattctttgc

SEQ ID NO: 636797 - DNA, 120 bp, Artificial Sequence
  ENSG00000180884_30 (sequence is synthesized)
tcccaaggcaagaagaaagagatgacagagtcaatatagggttgccaaatcggattttctaaaatgagtaggaagttggatttttatgtgcaacagtttcttttaatgctttgttgatat

SEQ ID NO: 636798 - DNA, 120 bp, Artificial Sequence
  ENSG00000180884_31 (sequence is synthesized)
gtgattgtcatgcaataattattcatatttggtaagttttgtacatatattatgtacactcagggaaccaataccataatcatgataatgaacgtatccatcacctgcaaagctacctca

SEQ ID NO: 636799 - DNA, 120 bp, Artificial Sequence
  ENSG00000180884_32 (sequence is synthesized)
tgcccctttacattccctccttgccttccctaggaaaccgttgatttacattttttactttagatttgtttgccttttctagaattaacacaattggaatcataaagtatttatactctc

SEQ ID NO: 636800 - DNA, 120 bp, Artificial Sequence
  ENSG00000180884_33 (sequence is synthesized)
tccctcctctccctgagctgcccccacacctgctgcctgaagccttgcagggaagctccaggcatgaggggtcttgcggttagctgtgtgactacctctgactcggccattccctcctgg

SEQ ID NO: 636801 - DNA, 120 bp, Artificial Sequence
  ENSG00000180884_34 (sequence is synthesized)
gtgattatccagatctgacagttctgtggtttagattctgtgcctttcctcttgctaatatttcctaagcctgactgtgccaggaattccaatcactgatgtggttactgcttgccgtga

SEQ ID NO: 636802 - DNA, 120 bp, Artificial Sequence
  ENSG00000180891_0 (sequence is synthesized)
aagtgtggccacttcctcttgcctggcctgactcaccctggctgctgcccattgtggctgccatggaaatacaactcgaggagaacccagaccaggacagggaggccatgttctgggtgg

SEQ ID NO: 636803 - DNA, 120 bp, Artificial Sequence
  ENSG00000180891_1 (sequence is synthesized)
cagtggagcctggcaaggtgccctcctggcctgggactgctgtggcagaggaagcatgaggtggggcctggcctgcccagctcagagctgaggtgcccccttggttttttacctccctgt

SEQ ID NO: 636804 - DNA, 120 bp, Artificial Sequence
  ENSG00000180891_2 (sequence is synthesized)
tccctggctggcccactgcacccacgcactcaacgcagtggcttcgctcctcctccaggatggctggaggtgggaccattgccaggatggcctcaagtgcccagccctcctggaagactc

SEQ ID NO: 636805 - DNA, 120 bp, Artificial Sequence
  ENSG00000180891_3 (sequence is synthesized)
agtttccctctttgtcccatgcagaggtgcagagattcattattgtgggaccatccgtgaaaccggtgccaggatgcaccgggggtgtggatgaccggccgcccagccccagcacggccc

SEQ ID NO: 636806 - DNA, 120 bp, Artificial Sequence
  ENSG00000180891_4 (sequence is synthesized)
ggtcccgcatgccaccgccccgcgaggaccgctctccaagggctgcctggggccccgcgcccgtactctcctaacccggagctcttggcagcccattgctgcctggctacccggggagga

SEQ ID NO: 636807 - DNA, 120 bp, Artificial Sequence
  ENSG00000180891_5 (sequence is synthesized)
ggaggcgcaggagtgagctgcccgagaccgcagggcaagtaagcggctgacggcggaaagaccctggggaaggggctttgcggccggctagaaacattttccccaagcggctccgcaaaa

SEQ ID NO: 636808 - DNA, 120 bp, Artificial Sequence
  ENSG00000180891_6 (sequence is synthesized)
ggctccgcaaaatgaccagcctgttccgccggagcagcagcggcagcggcgggggtggcaccgccggggcacgcgggggcgggggaggcacggccgccccccaggagctcaacaacagcc

SEQ ID NO: 636809 - DNA, 120 bp, Artificial Sequence
  ENSG00000180891_7 (sequence is synthesized)
aggtgcgccgcctggagttcaaccaggccatggacgacttcaagaccatgttccccaacatggattacgacatcatcgaatgcgtgctgcgcgccaacagcggcgctgtggacgccacca

SEQ ID NO: 636810 - DNA, 120 bp, Artificial Sequence
  ENSG00000180891_8 (sequence is synthesized)
tcgaccagctgctgcagatgaacctggagggcggtggcagcagcggcggcgtctatgaggacagctccgactcggaggacagcatccccccggagatcttggaaaggactttggaacctg

SEQ ID NO: 636811 - DNA, 120 bp, Artificial Sequence
  ENSG00000180891_9 (sequence is synthesized)
ccccgccagcctaccacatgcacgtgttcgaccggccctaccctctggctcccccgactccgcctccccgtatcgacgcgctgggctctggagcccctacaagccagagacgctatcgga

SEQ ID NO: 636812 - DNA, 120 bp, Artificial Sequence
  ENSG00000180891_10 (sequence is synthesized)
actggaacccaccactgctgggcaaccttccggatgactttctccgcatcctgccccagcagctggacagcatacagggtaacgctgggggccccaagcctgggagtggagagggatgtc

SEQ ID NO: 636813 - DNA, 120 bp, Artificial Sequence
  ENSG00000180891_11 (sequence is synthesized)
cacctgccatggctgggccagggcccggagaccaggagagccgctggaagcagtacctggaggacgagaggatcgcgcttttcctgcagaacgaggagttcatgaaggagctgcaacgga

SEQ ID NO: 636814 - DNA, 120 bp, Artificial Sequence
  ENSG00000180891_12 (sequence is synthesized)
accgcgacttcctcctcgctctggagagagatcgattgaaatacgaatcccagaaatctaaatccagcagcgtggctgtcggaaacgactttggcttttcctctcctgtcccaggaactg

SEQ ID NO: 636815 - DNA, 120 bp, Artificial Sequence
  ENSG00000180891_13 (sequence is synthesized)
gcgacgccaaccccgctgtgtctgaagatgccttattcagggacaagctgaaacacatgggaaagtccacccggaggaaactgtttgaacttgcccgagccttctcagagaagaccaaaa

SEQ ID NO: 636816 - DNA, 120 bp, Artificial Sequence
  ENSG00000180891_14 (sequence is synthesized)
tgaggaagtcaaagaggaaacacttgttgaagcatcagtcgctgggggctgccgcgtcaacagccaacctcctggatgatgtggagggccacgcgtgtgatgaagacttccggggcaggc

SEQ ID NO: 636817 - DNA, 120 bp, Artificial Sequence
  ENSG00000180891_15 (sequence is synthesized)
gtcaggaggcacccaaggtggaggaaggcctgcgagaaggacagtaagagatgccagcagctcttccttgccagagatgatctgacccggtgggggcagctggaaagcaacactggcccc

SEQ ID NO: 636818 - DNA, 120 bp, Artificial Sequence
  ENSG00000180891_16 (sequence is synthesized)
cagctgaagggcccagctgcagccagacagatggtgcttgagaaccgaggcccggtgatcctccagccacagtccagcccaaccactgccactttccatgggacttagaacttcggagtt

SEQ ID NO: 636819 - DNA, 120 bp, Artificial Sequence
  ENSG00000180891_17 (sequence is synthesized)
gctgccttgcaattggaggaaggacctggggcccctataggcagcagccaattacagccccttttgtagccaggcgttcctatggtcaaagagtggaaatgcaggaaccaacctcccttt

SEQ ID NO: 636820 - DNA, 120 bp, Artificial Sequence
  ENSG00000180891_18 (sequence is synthesized)
gctgccagggcctgagctctgggacaccacctagtggcctggcttggcagcgccactgggctgtgccagatcttaggcaagaagcaaatccctctgcaggcaggcatcacggcagtcaca

SEQ ID NO: 636821 - DNA, 120 bp, Artificial Sequence
  ENSG00000180891_19 (sequence is synthesized)
tggaaaagggcaagatgacccccaccagaggctctttggcctgaaggtggagtctctgcctccgtccgttctctatctctcctgtcacagactctgcctgaccccctttcctcagctccc

SEQ ID NO: 636822 - DNA, 120 bp, Artificial Sequence
  ENSG00000180891_20 (sequence is synthesized)
ttctggtcccccttcctcagctccctccgggcacttgtgcccttcccttccatgtcctcctgtatctcagccttcccccggggctgctggcccagcacacgagccctgcacccagcctgg

SEQ ID NO: 636823 - DNA, 80 bp, Artificial Sequence
  ENSG00000180891_21 (sequence is synthesized)
gcatttctcgccgcccgccgctaggaagccggcctcgcctcactttctccgcctccccgcgccccagccgcgccgccgcc

SEQ ID NO: 636824 - DNA, 120 bp, Artificial Sequence
  ENSG00000180891_22 (sequence is synthesized)
ggccagtcccccaggaactctgaggagctatgggctactgcaaagcatctgccgactgccctgccccgtctggcctcatcaggctgctgctgttagggatgggctcactcccagcagctc

SEQ ID NO: 636825 - DNA, 120 bp, Artificial Sequence
  ENSG00000180891_23 (sequence is synthesized)
ccggtcacccagcagggatggggagggtggccaccctggagctggaggactctggggaggcagggtctttaatttggcagcagacaaaagccagttctggagtcacaccacagtaggggc

SEQ ID NO: 636826 - DNA, 120 bp, Artificial Sequence
  ENSG00000180891_24 (sequence is synthesized)
tcacaggggctctgactccccagctggactggaagccctgctgtccgagggtgggcagcggtgggtcctggagtgacccctttgagcaggtgcagggctaaagagcaaggcggaaaggcc

SEQ ID NO: 636827 - DNA, 120 bp, Artificial Sequence
  ENSG00000180891_25 (sequence is synthesized)
gccagcctgggtgagcgcctagggcataagggcttgctgggtgcccctgagaagggcgggtgatctgaggaggagaactctgattctaggaacgcttacacggcactgaccactgccacg

SEQ ID NO: 636828 - DNA, 120 bp, Artificial Sequence
  ENSG00000180891_26 (sequence is synthesized)
gggagggaggctgcccagcccgtggccccgccctggacatgggagcgcgcagaccttccggagagccgggaagcctgggcaggcacgaggcttcggcgcggctctgggaggttgggagtg

SEQ ID NO: 636829 - DNA, 120 bp, Artificial Sequence
  ENSG00000180891_27 (sequence is synthesized)
gcatccgatccttggccgggccctggtggcctccgtggccccaagatcacaagggcgtagcgaaggcgagccggcgatcgcacctcgtcccgcccaccctgcccggactcgcaacgccga

SEQ ID NO: 636830 - DNA, 120 bp, Artificial Sequence
  ENSG00000180891_28 (sequence is synthesized)
ggactcgcaacgccgagcttggggagggccgggacgcgcagccgccgccgagcgtgaccaagtttggaaacgcgcgcggggccgggacgctggctcggggggccctgccgaggagcggtc

SEQ ID NO: 636831 - DNA, 120 bp, Artificial Sequence
  ENSG00000180891_29 (sequence is synthesized)
cccgcgccaggcctggggccctggagggaggggggggggtctccgaggagtgcctcggtaccccagctcgagttctcgacgggtctctgagccttccccgcgccaggacccggcgcactg

SEQ ID NO: 636832 - DNA, 120 bp, Artificial Sequence
  ENSG00000180891_30 (sequence is synthesized)
tgggggaagccccagccccatgtctgttgagtgttgctttgttattttttttcctcctatgtgtgggttttttcttggagctgtttcataggaattcctgtaataaacagttggtgttct

SEQ ID NO: 636833 - DNA, 120 bp, Artificial Sequence
  ENSG00000180891_31 (sequence is synthesized)
cttggtgctctgatgtggccagcggcgtgggctggaccctcctgctccctcctccctcccggcctggggcagggtttgtccccaggagccccgcgtcgcatccctagggtacccctgcct

SEQ ID NO: 636834 - DNA, 120 bp, Artificial Sequence
  ENSG00000180891_32 (sequence is synthesized)
tgcctggcccattcacccgcggcgctctccgactgcactctcgaggtgacacctgcggcaccgctgcacctcaaccttgcggacctgccggctgcgtctagcgctgtcgccttcctgttt

SEQ ID NO: 636835 - DNA, 120 bp, Artificial Sequence
  ENSG00000180891_33 (sequence is synthesized)
ggcccaggactgtaaaccgcttgctgtatcaggcaagggaaacaccatggggaaagccagtctgttgagaaagctccagacggccacctccctaaataaacagcttctggattaaaggca

SEQ ID NO: 636836 - DNA, 120 bp, Artificial Sequence
  ENSG00000180891_34 (sequence is synthesized)
ctggaagggcctcagaggtcatctagatagtccagcttttccatcccattttatagatgaggaaatttgaggcccaaagacgaggggagaacttgtccaaggtctcagagctcagtggtg

SEQ ID NO: 636837 - DNA, 120 bp, Artificial Sequence
  ENSG00000180891_35 (sequence is synthesized)
gaccctggccagcacctgagtgtcctgctgcctctctccctggacccatgcatcgtctacctggggggatctgcatgggtcccaaatgaagggggcagagagagtcgggtcagctctctt

SEQ ID NO: 636838 - DNA, 120 bp, Artificial Sequence
  ENSG00000180891_36 (sequence is synthesized)
gcggagttcctgggtgtttcatgggagcacccgccctgtcccctggaggaacacactgagggttggtgggcaggtgacccaaagatatggatccccctgacttggtcgacattgcttccc

SEQ ID NO: 636839 - DNA, 120 bp, Artificial Sequence
  ENSG00000180891_37 (sequence is synthesized)
cctttctgcaacccctgaaaaggggccctagccctacttccacctagatgtgtacctgtagcatgaagtgccaggtactgtttctggggaatattcttttgggtgtgaggtggcagacag

SEQ ID NO: 636840 - DNA, 120 bp, Artificial Sequence
  ENSG00000180891_38 (sequence is synthesized)
gcctgcccccatgggggaccctcggcctgagaaccaagcactgggcagcttcagtctgtgggcccagaggcttctcaactttcacccagtcccttccaaaggccacgtgggccagaagac

SEQ ID NO: 636841 - DNA, 120 bp, Artificial Sequence
  ENSG00000180891_39 (sequence is synthesized)
ccagagatgtaagctgggcgagagtgtcagggcctggccataccactgacctcaggaaaatgagcctgggggacagtactaagggtgtggggggtcaggtgggtgtgtcaggtacctcca

SEQ ID NO: 636842 - DNA, 120 bp, Artificial Sequence
  ENSG00000180891_40 (sequence is synthesized)
gagctttgaggggtggggcagagagtcagtgggactgggaggactagggcagtgtcccctcatccctgggacggttttcctgaatggcctggcaggctgggggctgccgcgtcaacagcc

SEQ ID NO: 636843 - DNA, 120 bp, Artificial Sequence
  ENSG00000180891_41 (sequence is synthesized)
acagtaagaggaaccagtgaccaggaaagaccattgggctcctttgaaaaagattcctcccatcccttttttcccctaccagatgccagcagctcttccttgccagagatgatctgaccc

SEQ ID NO: 636844 - DNA, 120 bp, Artificial Sequence
  ENSG00000180891_42 (sequence is synthesized)
gcccctgcaggctgacccaggatgtagcctcttgctcctggggtggcgtcctcaggggtctgcgattcctgtcatctctccctcctcagctcccacccttgcctgccccctgctccctct

SEQ ID NO: 636845 - DNA, 120 bp, Artificial Sequence
  ENSG00000180891_43 (sequence is synthesized)
ccggggggccttggtcctcccctggcctttcccacacctgggaggaggccatctggtgtgctggctgctgagagaatgactcacaggtctctctgcccccagccacccggaggaaactgt

SEQ ID NO: 636846 - DNA, 80 bp, Artificial Sequence
  ENSG00000180900_0 (sequence is synthesized)
ggactcggcttcccgacgggctgcgcggcggccgggtgggtgtcggcggggcagtccggcgggcagcggcggttccggtg

SEQ ID NO: 636847 - DNA, 120 bp, Artificial Sequence
  ENSG00000180900_1 (sequence is synthesized)
agcaggaccaagcgggatgcggagccgccgccgccgccgctccccgcgcttcctaagagtctgagacccgccgggccgcgccccctgcccaggcccgcagtccgagcgttccgagcgcgg

SEQ ID NO: 636848 - DNA, 80 bp, Artificial Sequence
  ENSG00000180900_2 (sequence is synthesized)
cgcgtccccgtccagtctcgggcggcccgccccctgcctgcgccccctccccatgcgcggcgcccatgcggactgagccc

SEQ ID NO: 636849 - DNA, 120 bp, Artificial Sequence
  ENSG00000180900_3 (sequence is synthesized)
gccgagcgccgccgccggagcccgcgccgcccacccgcaccatgctcaagtgcatcccgctgtggcgctgcaaccggcacgtggagtcggtggacaagcggcactgttcgctgcaggccg

SEQ ID NO: 636850 - DNA, 120 bp, Artificial Sequence
  ENSG00000180900_4 (sequence is synthesized)
tgccggaggagatctaccgctacagccgcagcctggaggagctgctgctcgacgccaaccagctgcgcgagctgcccaagccttttttccggctgctgaacttgcgcaagctgggcctga

SEQ ID NO: 636851 - DNA, 120 bp, Artificial Sequence
  ENSG00000180900_5 (sequence is synthesized)
gcgacaacgagatccagcggttgcctcccgaggtggccaacttcatgcagctggtggagctggacgtgtcccggaacgatatccctgagatcccggagagcatcaagttctgcaaggctc

SEQ ID NO: 636852 - DNA, 120 bp, Artificial Sequence
  ENSG00000180900_6 (sequence is synthesized)
tggagatcgcggacttcagcgggaaccccctctccaggctccctgatggcttcactcagctgcgcagcctggctcacctggccctgaatgatgtgtctctgcaggcactgcccggggacg

SEQ ID NO: 636853 - DNA, 120 bp, Artificial Sequence
  ENSG00000180900_7 (sequence is synthesized)
tgggcaacctcgccaacctggtgaccctggagctccgggagaacctgctcaagtccctgccagcgtccctgtcatttctggtcaagctggaacagctggatctgggaggcaacgatctgg

SEQ ID NO: 636854 - DNA, 120 bp, Artificial Sequence
  ENSG00000180900_8 (sequence is synthesized)
aagtgctgccagacactctgggggctctgcccaatcttcgggagctgtggcttgaccggaaccagctgtcagcactgcccccggagctcgggaacctgcggcgcctggtgtgcctggacg

SEQ ID NO: 636855 - DNA, 120 bp, Artificial Sequence
  ENSG00000180900_9 (sequence is synthesized)
tgtcggaaaaccggctggaggagctgcctgctgagctcggcgggctggtgctgctcactgacctgctgctgtcccagaacctgctgcggaggctgcccgacggcatcggtcagctgaagc

SEQ ID NO: 636856 - DNA, 120 bp, Artificial Sequence
  ENSG00000180900_10 (sequence is synthesized)
agctatccatcctaaaggtagaccagaatcggctgtgcgaggtgaccgaggccatcggggactgtgagaacctctctgagctgatcctcacggagaacctgctgatggccctgccccgct

SEQ ID NO: 636857 - DNA, 120 bp, Artificial Sequence
  ENSG00000180900_11 (sequence is synthesized)
ccctgggaaagctgactaagctgaccaacctcaacgtggaccggaaccacctcgaggcgctgccgcccgagatcgggggctgtgtggcactcagcgtcctctccttgagggacaaccgcc

SEQ ID NO: 636858 - DNA, 120 bp, Artificial Sequence
  ENSG00000180900_12 (sequence is synthesized)
tggccgtcctgccaccagagctggcccacacgacagagctgcacgtgctggacgtggcggggaaccgcctgcagagtctgccgttcgcgctcacccacctcaatctcaaggccctgtggc

SEQ ID NO: 636859 - DNA, 120 bp, Artificial Sequence
  ENSG00000180900_13 (sequence is synthesized)
tggcagagaaccaggcgcagcccatgctccggttccagacggaggatgatgcccggaccggcgagaaggtgctcacctgctacttgctgccccagcagcccccacccagcctcgaggatg

SEQ ID NO: 636860 - DNA, 120 bp, Artificial Sequence
  ENSG00000180900_14 (sequence is synthesized)
ctgggcagcaggggagcctctcggagacctggagcgatgccccgccgagccgcgtcagcgtcatccagttcctggaggcccccataggtgatgaggacgctgaggaagctgcagctgaga

SEQ ID NO: 636861 - DNA, 120 bp, Artificial Sequence
  ENSG00000180900_15 (sequence is synthesized)
agcggggcctacagcgccgggccacacctcaccccagcgagctcaaggtgatgaagaggagcatcgaggggcggcggagcgaggcctgcccttgccagccagactctgggtcgcccttgc

SEQ ID NO: 636862 - DNA, 120 bp, Artificial Sequence
  ENSG00000180900_16 (sequence is synthesized)
ctgcagaggaggagaagcggctgagtgccgagtctggcctgagtgaagactctcgcccatctgccagcacagtctctgaggctgagcccgagggcccgtcggctgaggcacagggtggga

SEQ ID NO: 636863 - DNA, 120 bp, Artificial Sequence
  ENSG00000180900_17 (sequence is synthesized)
gccagcaggaagccacgactgctggcggggaggaagacgccgaagaggactaccaggagcccacggtgcatttcgcagaggacgcactgctgcccggggatgacagggagatcgaggagg

SEQ ID NO: 636864 - DNA, 120 bp, Artificial Sequence
  ENSG00000180900_18 (sequence is synthesized)
ggcagcctgaggccccctggaccctgccaggcgggaggcagcggctcatccgcaaggacacacctcactacaaaaagcacttcaagatctccaagctgccccagcccgaggccgttgtgg

SEQ ID NO: 636865 - DNA, 120 bp, Artificial Sequence
  ENSG00000180900_19 (sequence is synthesized)
ctctgctgcagggcatgcagcctgatggggagggccctgtggctcccgggggctggcacaatggcccccacgcaccctgggctcctcgggcccagaaggaggaggaggaggaggaagagg

SEQ ID NO: 636866 - DNA, 120 bp, Artificial Sequence
  ENSG00000180900_20 (sequence is synthesized)
gtagtcctcaggaggaggaggaagaggaggaggaggaaaacagggctgaagaggaagaggccagcactgaggaggaggacaaggagggggccgtggtttctgcgccctctgtcaagggag

SEQ ID NO: 636867 - DNA, 120 bp, Artificial Sequence
  ENSG00000180900_21 (sequence is synthesized)
tgtcgtttgaccaggccaataacctgctgatagagcctgctcgcattgaggaggaagagctgaccctcactatcctgcggcagactgggggcctgggcatcagcattgcgggcggcaagg

SEQ ID NO: 636868 - DNA, 120 bp, Artificial Sequence
  ENSG00000180900_22 (sequence is synthesized)
gctccacaccctataagggggacgacgagggcatattcatctctcgggtgtccgaggaaggccctgcggcccgggctggagtccgtgtgggtgacaagctcctggaggtgaatggtgtgg

SEQ ID NO: 636869 - DNA, 120 bp, Artificial Sequence
  ENSG00000180900_23 (sequence is synthesized)
tggtggagcctgagaacgcggtcaccatcacgccgctgcggcccgaggatgattacagcccccgagagcggcggggaggggggctgcgcctgcccctgctcccgcctgagagccccgggc

SEQ ID NO: 636870 - DNA, 120 bp, Artificial Sequence
  ENSG00000180900_24 (sequence is synthesized)
ccctccgtcagcgccacgtggcctgcctggcacgcagcgagagggggctgggcttcagcattgctggtgggaaaggctccacaccctacagggctggtgatgcgggcatcttcgtctccc

SEQ ID NO: 636871 - DNA, 120 bp, Artificial Sequence
  ENSG00000180900_25 (sequence is synthesized)
gcattgccgagggcggtgctgctcaccgcgcgggcacactgcaggttggcgaccgcgtcctctctattaatggagtggacgtgactgaggccaggcatgaccacgccgtctccctgctga

SEQ ID NO: 636872 - DNA, 120 bp, Artificial Sequence
  ENSG00000180900_26 (sequence is synthesized)
ccgctgcctcccccaccatcgccctgctgttggagcgggaggctgggggccctcttcctcccagccctctgccacattcctcaccccccaccgctgctgttgccaccaccagcataacca

SEQ ID NO: 636873 - DNA, 120 bp, Artificial Sequence
  ENSG00000180900_27 (sequence is synthesized)
ctgccacccccggggtgcctgggttgccgagcctggcccccagcctgctggctgccgcgttggaagggccatacccagtggaggagatccgtctgccaagagctgggggccctctggggc

SEQ ID NO: 636874 - DNA, 120 bp, Artificial Sequence
  ENSG00000180900_28 (sequence is synthesized)
ttagtattgtcggaggctccgaccattccagccacccgtttggtgtccaggagcctggtgtgttcatctccaaggtgctcccgcggggcctggccgctcgcagcggcctgcgggttgggg

SEQ ID NO: 636875 - DNA, 120 bp, Artificial Sequence
  ENSG00000180900_29 (sequence is synthesized)
accgcatcctggcagtgaacgggcaagacgtgcgggatgccacgcaccaagaagcagtcagtgccctgctccggccctgcctggagctgtcgctgctggtgcggagggacccggcacccc

SEQ ID NO: 636876 - DNA, 120 bp, Artificial Sequence
  ENSG00000180900_30 (sequence is synthesized)
cgggcctacgggaactgtgcatccagaaggcacctggggagaggctgggcatcagcatccgcgggggtgccaggggccacgctggcaacccccgcgaccccacagacgagggcatcttca

SEQ ID NO: 636877 - DNA, 120 bp, Artificial Sequence
  ENSG00000180900_31 (sequence is synthesized)
tctccaaggtgagccccacgggggcagccgggcgcgacggtcggctgcgtgtgggtttgcggctgttggaggtgaaccagcagagcctgctgggcctgacgcacggcgaggcggtgcagc

SEQ ID NO: 636878 - DNA, 120 bp, Artificial Sequence
  ENSG00000180900_32 (sequence is synthesized)
tgctccgcagtgtgggcgacaccctcaccgtgctggtctgtgacggctttgaggccagcaccgacgcagccctggaggtgtccccaggtgtcattgccaacccctttgcggcaggcatcg

SEQ ID NO: 636879 - DNA, 120 bp, Artificial Sequence
  ENSG00000180900_33 (sequence is synthesized)
gccaccggaacagcctggagagcatctcttccatcgaccgggagctgagccctgagggcccaggcaaggagaaggagctgcctggacagaccctgcactgggggcccgaggccacagaag

SEQ ID NO: 636880 - DNA, 120 bp, Artificial Sequence
  ENSG00000180900_34 (sequence is synthesized)
ccgcaggtcggggtctgcagcccctgaagctggactaccgcgccctggccgccgtgcccagcgctggcagcgtgcagagggtaccgtctggagcagctggagggaagatggctgaatctc

SEQ ID NO: 636881 - DNA, 120 bp, Artificial Sequence
  ENSG00000180900_35 (sequence is synthesized)
cctgctcccctagtggccagcagccgccctccccgccttctccggatgagctgcccgccaatgtgaagcaggcctacagggccttcgcggccgtgcccacttctcacccgcctgaggatg

SEQ ID NO: 636882 - DNA, 120 bp, Artificial Sequence
  ENSG00000180900_36 (sequence is synthesized)
cccctgcccagccccccacgcctgggcctgcagcctccccggagcagctgtccttccgggagcggcagaagtactttgagctggaggtgcgcgtgccccaggccgagggcccccctaagc

SEQ ID NO: 636883 - DNA, 120 bp, Artificial Sequence
  ENSG00000180900_37 (sequence is synthesized)
gcgtgtccctggtgggtgctgacgacctgcggaagatgcaggaggaggaagccagaaaactacagcagaagagagcgcagatgctgcgggaggcggcagaggctggggccgaagcgaggc

SEQ ID NO: 636884 - DNA, 120 bp, Artificial Sequence
  ENSG00000180900_38 (sequence is synthesized)
tcgccctggacggggagacgctgggcgaggaggaacaggaggatgagcagccaccctgggccagcccgagccccacctcaaggcagagcccggcgtcccccccacccctgggaggtggcg

SEQ ID NO: 636885 - DNA, 120 bp, Artificial Sequence
  ENSG00000180900_39 (sequence is synthesized)
ccccggtgcggacggccaaagctgaacggcgccaccaggagcggctgcgcgtgcagagtccggagccaccggcacccgagcgtgccctgtcccctgccgagctccgggccctggaggccg

SEQ ID NO: 636886 - DNA, 120 bp, Artificial Sequence
  ENSG00000180900_40 (sequence is synthesized)
agaagcgtgcgctgtggagggcagccaggatgaagtcattggaacaggacgctctccgagcacagatggtcctcagcaggtcccaggaaggccggggcacgcgggggcccctggagcgac

SEQ ID NO: 636887 - DNA, 120 bp, Artificial Sequence
  ENSG00000180900_41 (sequence is synthesized)
tggccgaggccccttcccctgcgcccaccccgtcgcccacccctgtggaagacctcggcccccagaccagcacctccccgggacgcctgcccttgtctggaaagaagtttgactacaggg

SEQ ID NO: 636888 - DNA, 120 bp, Artificial Sequence
  ENSG00000180900_42 (sequence is synthesized)
cctttgcggccctgccttcttccagacctgtctatgacatccagtcaccggactttgctgaggagttgaggtccctggaaccatctcccagccctggcccgcaggaggaggatggagaag

SEQ ID NO: 636889 - DNA, 120 bp, Artificial Sequence
  ENSG00000180900_43 (sequence is synthesized)
tggctctggtgcttctgggcaggccctcacccggcgctgtgggccctgaagatgtggcactgtgcagcagccgccgccccgtaaggcctgggcgccgtggcctgggccctgtgccctcct

SEQ ID NO: 636890 - DNA, 120 bp, Artificial Sequence
  ENSG00000180900_44 (sequence is synthesized)
agaggagcaggcacctcccccagacttggggtgggggccctgccagctccagcaccacccttgccccaagtcttttaacctgggtgttagcattttaaagagaccccacaggagttctgg

SEQ ID NO: 636891 - DNA, 120 bp, Artificial Sequence
  ENSG00000180900_45 (sequence is synthesized)
cctgtgactaactaactgccccaccccagccgagacctcggcgagactgtaactagtgatgtttgtacaaccaaagactctattttgtggtttaaggagaataaagttgactacatttta

SEQ ID NO: 636892 - DNA, 120 bp, Artificial Sequence
  ENSG00000180900_46 (sequence is synthesized)
gagtgaaacccgtggggattcagggaggtggatggggttagggtggaacttggattcaggtggctgatgagtactagcttcttgggccgctctggaggtgggtccagacctcctctcctt

SEQ ID NO: 636893 - DNA, 120 bp, Artificial Sequence
  ENSG00000180900_47 (sequence is synthesized)
ttttgtctgggggtccttgcccccccactgttggcacctcccaacacactgccacgtgggggtggaggtggcagcccccatgagacccagccccagctcagcccctcacaggcaagatgt

SEQ ID NO: 636894 - DNA, 120 bp, Artificial Sequence
  ENSG00000180900_48 (sequence is synthesized)
cagccccacccaggttggtcggtctctctctctctgtctctcccacccccctctctacccccgtcccttgccttaaacccctgatcctgctctcctctgcccccgccgcccccacctgcc

SEQ ID NO: 636895 - DNA, 120 bp, Artificial Sequence
  ENSG00000180900_49 (sequence is synthesized)
ttttttagacaaaaccaggggtgatccagccattggctcaggcctggccaaggggctccccagcccccaggggcagaggttgtccccactccgtgagtgctctgtcccgtgggtgggggt

SEQ ID NO: 636896 - DNA, 120 bp, Artificial Sequence
  ENSG00000180900_50 (sequence is synthesized)
ggcagagcctccttccccagcaggatggtgggtggggatcaaaggcaggcggggggacaggcggggggacagccggtggtgagttgcacacagctgcagccccgacagctgccccagcat

SEQ ID NO: 636897 - DNA, 120 bp, Artificial Sequence
  ENSG00000180900_51 (sequence is synthesized)
ggctgtcctgtctgctcccatctctcctgcaaagctccagccagcacactgccatggagacagcagctgcccagcccaggcccccgcatcctgtgggaacggggacgagcccctccgtgc

SEQ ID NO: 636898 - DNA, 120 bp, Artificial Sequence
  ENSG00000180900_52 (sequence is synthesized)
gaagaggaagaggccagcactgaggaggaggacaaggagggggccgtggtttctgcgccctctgtcaagctgaccctcactatcctgcggcagactgggggcctgggcatcagcattgcg

SEQ ID NO: 636899 - DNA, 120 bp, Artificial Sequence
  ENSG00000180900_53 (sequence is synthesized)
tcagccgggctctgtgggcctcagggctgggagcccacccgtccacctgggtggtttggggcagggctggcaccggcctgaccaacactctccccatcacagtcaccggactttgctgag

SEQ ID NO: 636900 - DNA, 80 bp, Artificial Sequence
  ENSG00000180901_0 (sequence is synthesized)
agcagcggtggcggcggcggtccaagatggcggaactgcagctggacccggcgatggcggggctgggagggggcggcggg

SEQ ID NO: 636901 - DNA, 80 bp, Artificial Sequence
  ENSG00000180901_1 (sequence is synthesized)
cgcagccgctggagccgggtcccggaccacccgagcgggcagggggcggcggcgcggcccgctgggtcaggctgaacgtg

SEQ ID NO: 636902 - DNA, 120 bp, Artificial Sequence
  ENSG00000180901_2 (sequence is synthesized)
gctgggtcaggctgaacgtgggaggcacctacttcgtgaccaccagacagaccttaggccgggagcccaagtcatttctctgccgcctctgctgccaggaggacccggagctggactcag

SEQ ID NO: 636903 - DNA, 120 bp, Artificial Sequence
  ENSG00000180901_3 (sequence is synthesized)
acaaggatgagacaggagcctatctgattgacagggaccccacctactttggtcctatcctcaactacctccgccacgggaaactcatcatcactaaggagttggcagaagaaggtgtgc

SEQ ID NO: 636904 - DNA, 120 bp, Artificial Sequence
  ENSG00000180901_4 (sequence is synthesized)
tggaggaagcggagttttacaacatcgcgtcccttgtgcggctggttaaggaaaggatacgggacaatgagaacagaacttcacaaggccccgtgaagcacgtgtacagagtcctgcagt

SEQ ID NO: 636905 - DNA, 120 bp, Artificial Sequence
  ENSG00000180901_5 (sequence is synthesized)
gtcaggaagaagagctcacgcagatggtgtccacgatgtccgacggctggaaattcgaacagctcatcagcatcggatcttcctataactacggcaatgaggatcaggcagaattcctct

SEQ ID NO: 636906 - DNA, 120 bp, Artificial Sequence
  ENSG00000180901_6 (sequence is synthesized)
gtgttgtctccagagaactaaataattctaccaatggcatcgtcatagagccgagcgaaaaggcgaagattcttcaggagagaggatcgcggatgtaaactaagaccccgaaaactccag

SEQ ID NO: 636907 - DNA, 120 bp, Artificial Sequence
  ENSG00000180901_7 (sequence is synthesized)
accttcaggagagcagtcagcagagcccctctgtgaagtgaaacctcactcctgtccagtgaccgagccactgcaaagcacagctgatcctggccccctgtgaagaagtgttctggtcaa

SEQ ID NO: 636908 - DNA, 120 bp, Artificial Sequence
  ENSG00000180901_8 (sequence is synthesized)
aactaaaggaactccctccccacctgcaggactccgaagacagtgcgacttctggctgcagaataccttttcagaaacctgctttcatttgcttagccagtattagaacagatctttaca

SEQ ID NO: 636909 - DNA, 120 bp, Artificial Sequence
  ENSG00000180901_9 (sequence is synthesized)
acagcagctgggctgggttcccagtcggagcctttcggggatctgggggatgagggcggaaggcctagctccttggaaatggcctgtactttaaggacgctggagccaagaggattgttc

SEQ ID NO: 636910 - DNA, 120 bp, Artificial Sequence
  ENSG00000180901_10 (sequence is synthesized)
ccgtgccgtgccatggtttcaccctatgtgtgccacaatggacgttagcagctgcttcggaacaccgtccctcctatgcaccctccaagacgtgcagcagatgcaaagggttctagctgc

SEQ ID NO: 636911 - DNA, 120 bp, Artificial Sequence
  ENSG00000180901_11 (sequence is synthesized)
agtttgtcgaattgaggttttaggtaaagcatagagttgccagagtaccccgcattcccatgaatagagcctccaaggaaagggaggatggggtgtcctttgttgtggttggaggttggt

SEQ ID NO: 636912 - DNA, 120 bp, Artificial Sequence
  ENSG00000180901_12 (sequence is synthesized)
gatcattgctctggatttggggctcccggctgccaccacatgcagctttgcctcacctttctccagcagccgggaccctctggagagcttgttttccctccaagaagaggtttgagacag

SEQ ID NO: 636913 - DNA, 120 bp, Artificial Sequence
  ENSG00000180901_13 (sequence is synthesized)
gcggcatcctgcactgagtcagacaagtgggagctgtaggaactgcacctgcagcctcttcttactccccattgaccctgtcttccttccctggctttttcaactggaccaaagatgaag

SEQ ID NO: 636914 - DNA, 120 bp, Artificial Sequence
  ENSG00000180901_14 (sequence is synthesized)
gcacttatggaccctttgatggcttggagtggggaaggctgtttctttgaaagttgccaaatgtgttatgttgtgtctcagagagagttatttctgtgactctcttggaaatgccttgac

SEQ ID NO: 636915 - DNA, 120 bp, Artificial Sequence
  ENSG00000180901_15 (sequence is synthesized)
gtactgtccccagtggtatgtatgtatgtgctaggcagtctggggaccccctgtgtctctgaccacccccctgacccccgccattactttcttttctggagtgccatgctggcgaggatc

SEQ ID NO: 636916 - DNA, 120 bp, Artificial Sequence
  ENSG00000180901_16 (sequence is synthesized)
cggatgcggcagcaccctctttcgggctgcatccacagagtttgtgtccacactttctctccgagcatgtgggtctcgctgagcagtcatggaatgcggtagagccaggggaccctgtct

SEQ ID NO: 636917 - DNA, 120 bp, Artificial Sequence
  ENSG00000180901_17 (sequence is synthesized)
gccccgaataactttcagtagtatggcagatggcacagagaaagggaaggggctctggggacttctccttctatgaaagcctcctcgagccaggtgctcctgggcaccttcagaagtgat

SEQ ID NO: 636918 - DNA, 120 bp, Artificial Sequence
  ENSG00000180901_18 (sequence is synthesized)
gtcctgtgtgctccacagctcacctgcttgccaaggtacgtctgggtagtagtttctggaaatgactgcagactgtgccaaatgtcttttgagcttctgacctgaccatgcccagatggc

SEQ ID NO: 636919 - DNA, 120 bp, Artificial Sequence
  ENSG00000180901_19 (sequence is synthesized)
ataacttttccctaggaccctcagtctccttgtttctctgtatctgtagcatagcatagaacccggtatacaggggtttctgctgacacatcaacgtctacacacctatgcgccacattt

SEQ ID NO: 636920 - DNA, 120 bp, Artificial Sequence
  ENSG00000180901_20 (sequence is synthesized)
tacagctgtaaagtgttagatgaactgccgtcctcagtaaaagcagccaccccttcaagagtcacaggcatccatccagtcgtatctttcagagaaaaaaaaagttagatgtagccaagg

SEQ ID NO: 636921 - DNA, 120 bp, Artificial Sequence
  ENSG00000180901_21 (sequence is synthesized)
aaagtagtgatcacgggaaggactgctctgagccgggtaggatggaggactttggaagaggcgctccttggccaggtccaatgagtaacatcagactgacagaggaaaagcagcttggtt

SEQ ID NO: 636922 - DNA, 120 bp, Artificial Sequence
  ENSG00000180901_22 (sequence is synthesized)
tgcggccttgtgcccagtctcgttgaggcgcttgtccctgtctgctttcctggggcatgcctgatcagcgtgggctggagctcctagaccaaccccagctttctcaccaggttcagcaag

SEQ ID NO: 636923 - DNA, 120 bp, Artificial Sequence
  ENSG00000180901_23 (sequence is synthesized)
gaggcctgggggtcagacaccaatgttgagcacctcctgagggcgccgtttccttcattcctcttagattccatagttgccgccatgaaaagactgctcttgagccccaaggcacaggca

SEQ ID NO: 636924 - DNA, 120 bp, Artificial Sequence
  ENSG00000180901_24 (sequence is synthesized)
cgtgctctgggaaatagacaggagtggtatttccgccctctcggagggctggtgttcaccaagtttccctcctcgctgcaacccaatgacacctgtattgttccagcgctccaggactct

SEQ ID NO: 636925 - DNA, 120 bp, Artificial Sequence
  ENSG00000180901_25 (sequence is synthesized)
gggttcttaagatttctgggagcgttgttcacccaccccctttaggaaccaggctggtgttcttgcttgaaagcgttgtgccctctgagtgtctggctgatcacatcagagaggtctgcg

SEQ ID NO: 636926 - DNA, 120 bp, Artificial Sequence
  ENSG00000180901_26 (sequence is synthesized)
tggcagtttggggctgtcacgtgaccagtgacccacactctctgctgcccagtactgccaagtggggagggtcctgcctttttctctgccccaggtctgggacgcaggtgatgccagcca

SEQ ID NO: 636927 - DNA, 120 bp, Artificial Sequence
  ENSG00000180901_27 (sequence is synthesized)
ggcccaggagtgcccagcatcccccaactgatgacacagtagcactgattctgtcttttcctcagaatctggcctttttccatggcaatgaggtggggcccagcctcctctaaagtgact

SEQ ID NO: 636928 - DNA, 120 bp, Artificial Sequence
  ENSG00000180901_28 (sequence is synthesized)
ttgtttctgcacagttgtaactgctcttggggatgtcagtgaggctgggagcagggagccacgggatgctgagagaggaggcccgagaggacaccccaccctccagcgtggcctttgatc

SEQ ID NO: 636929 - DNA, 120 bp, Artificial Sequence
  ENSG00000180901_29 (sequence is synthesized)
cagacttagggacgaggctgtcactggtgggcaccctctgttcctgtttgtgtgtttgaatagtctgaaatgctgtgactttttttgtgtgaataaagatatgaaacttctgaatctcaa

SEQ ID NO: 636930 - DNA, 120 bp, Artificial Sequence
  ENSG00000180901_30 (sequence is synthesized)
gtgcccagtggtgatgcccaggagagggaatggaaacctggagctgggagtgaggttagagctgtaagatccaagacccagggagacaagaggaccctggggacgaataggaacagctga

SEQ ID NO: 636931 - DNA, 120 bp, Artificial Sequence
  ENSG00000180901_31 (sequence is synthesized)
gcaaggcaaggctgagccccgggcgggcgggttgggggaacatgcctagctagagggcggcagcaggaaagcagagaaggcatccctgcaggttggccctggggcagagtgctggatccc

SEQ ID NO: 636932 - DNA, 120 bp, Artificial Sequence
  ENSG00000180901_32 (sequence is synthesized)
agcaacggacaagttagttaacttaaaggggggcatcctcaaggcagtaaactggagccaagtgggttaaatccttcttgctgctattaaggggaggagacaggtttctgcagactctac

SEQ ID NO: 636933 - DNA, 120 bp, Artificial Sequence
  ENSG00000180901_33 (sequence is synthesized)
ccgacgctgcccttggctgaacttcttctgttaaatccttcggatggatgctggaatcgaccttggtctctagttcgactcccgtgcaacgtgttgaggaggagccacctcctccaagcg

SEQ ID NO: 636934 - DNA, 120 bp, Artificial Sequence
  ENSG00000180901_34 (sequence is synthesized)
cctaaagccgacccagaaacgcctcccaatccctccacaccgcggctcccgggatccgaagctggggagctgcttctgtccaatcaggctttgcatcccgggacgcttccggttatggcg

SEQ ID NO: 636935 - DNA, 120 bp, Artificial Sequence
  ENSG00000180901_35 (sequence is synthesized)
gatgcccaggagagggaatggaaacctggagctgggagtgaggttagagctgtaagatccaagacccagggagacaagaggaccctggggacgaataggaacagctgagcaagggatgct

SEQ ID NO: 636936 - DNA, 80 bp, Artificial Sequence
  ENSG00000180901_36 (sequence is synthesized)
tctccctgccgagaaatgggccggcccggctgcgcgcgggcagcagcggtggcggcggcggtccaagatggcggaactgc

SEQ ID NO: 636937 - DNA, 120 bp, Artificial Sequence
  ENSG00000180901_37 (sequence is synthesized)
aataataaataataataattttaccttatttttgacttggggaaatggattaaatctaagtttgttggcatagttgctcaagcattcatccctctgaagttcagaattattttacctttt

SEQ ID NO: 636938 - DNA, 120 bp, Artificial Sequence
  ENSG00000180901_38 (sequence is synthesized)
ttattctttcactctttggatatgtttttattgaaaagccacagtatgctggcttgtggtcacttaaaaagaaaaacattttttaaagagaagggaaaaaaagaaacgccacagtactat

SEQ ID NO: 636939 - DNA, 120 bp, Artificial Sequence
  ENSG00000180901_39 (sequence is synthesized)
ttgtaaaaggggatagtgggtggctgccaagaaaagatttccaagcaaactccttttcagtgtttattcatttgaagagcctccttggggcagctgcaaactgtggtgtccttggtgctg

SEQ ID NO: 636940 - DNA, 120 bp, Artificial Sequence
  ENSG00000180901_40 (sequence is synthesized)
gtcgtcgccaatacacccaggagctcaaagggctggaagctacgaatccttaaaggtcatactgaaagacattctgtgtcccaagcggaaacgaatacgcatctcaatactggagtagaa

SEQ ID NO: 636941 - DNA, 120 bp, Artificial Sequence
  ENSG00000180901_41 (sequence is synthesized)
agaatattagactgggaacaggagctcaagggtcttctcagccctatcactaactcggaaccctggacaattctttatgatgataagcttcattttcttcatctgaaaaggacagctgga

SEQ ID NO: 636942 - DNA, 120 bp, Artificial Sequence
  ENSG00000180901_42 (sequence is synthesized)
aaagatttcagttacacagctacggcattttctccctttcttaataacaaacacgctacagaagaatgtttgtcactgtaattattgtccaggcaaagattgcaaattccagccagatga

SEQ ID NO: 636943 - DNA, 120 bp, Artificial Sequence
  ENSG00000180901_43 (sequence is synthesized)
agtgtggttttgccttcgaggaggggtgcccagtggtgatgcccaggagagggaatggaaacctggagctgggagtgaggggaggagacaggtttctgcagactctacattttggagaga

SEQ ID NO: 636944 - DNA, 120 bp, Artificial Sequence
  ENSG00000180902_0 (sequence is synthesized)
tcggcggctctgggcctgcggcgggcgctgcgggttggagctcgggacgtgatcgtgggcgcgcagccagcggctccctgcccttcccctccgggccctgagtaccggccccccaccaag

SEQ ID NO: 636945 - DNA, 120 bp, Artificial Sequence
  ENSG00000180902_1 (sequence is synthesized)
ccaccaaggaggagcccgaggtctccgtcccggcggcgatgctgccccgtcggcctctggcgtggcccgcgtggctgttgcggggtgctccgggagccgcgggttcttggggtcggccgg

SEQ ID NO: 636946 - DNA, 120 bp, Artificial Sequence
  ENSG00000180902_2 (sequence is synthesized)
ttggccccctggcccgcagaggctgctgctccgccccggggacccccgaggtgccgctgacccgggagcgctaccccgtgcggcgcttgccgttctccacggtgtctaagcaggacctgg

SEQ ID NO: 636947 - DNA, 120 bp, Artificial Sequence
  ENSG00000180902_3 (sequence is synthesized)
ccgcctttgagcgcatcgtgcccggcggggtcgtcacggacccggaagcgctgcaggctcccaacgtggactggttgcggacgctgcgaggctgtagcaaggtgctgctgaggccacgga

SEQ ID NO: 636948 - DNA, 120 bp, Artificial Sequence
  ENSG00000180902_4 (sequence is synthesized)
cgtcggaggaggtgtcccacatcctcaggcactgccacgagaggaacctggccgtgaacccacaggggggcaacacaggcatggtgggtggcagcgtccccgtctttgacgagatcatcc

SEQ ID NO: 636949 - DNA, 120 bp, Artificial Sequence
  ENSG00000180902_5 (sequence is synthesized)
tctccactgcccgcatgaaccgggtcctcagcttccacagcgtgtctggaattctggtttgccaggcgggctgcgtcctggaggagctgagccggtatgtggaggaacgggacttcatca

SEQ ID NO: 636950 - DNA, 120 bp, Artificial Sequence
  ENSG00000180902_6 (sequence is synthesized)
tgccgctggacttaggagccaagggcagctgccacatcgggggaaacgtggcaaccaacgctggaggcctgcggtttcttcgatatggctcactgcatgggactgtcctgggcctggaag

SEQ ID NO: 636951 - DNA, 120 bp, Artificial Sequence
  ENSG00000180902_7 (sequence is synthesized)
tggtgctggccgacggcactgtcctggactgcctgacctccctgaggaaggacaacacgggctatgacctgaagcagctgttcatcgggtcggagggcactttggggatcatcaccacgg

SEQ ID NO: 636952 - DNA, 120 bp, Artificial Sequence
  ENSG00000180902_8 (sequence is synthesized)
tgtccatcttgtgtccacccaagcccagggctgtgaacgtggctttcctcggctgcccaggctttgctgaggttctgcagaccttcagcacctgcaaggggatgctgggtgagatcctgt

SEQ ID NO: 636953 - DNA, 120 bp, Artificial Sequence
  ENSG00000180902_9 (sequence is synthesized)
ctgcattcgagttcatggatgctgtgtgcatgcagctggtcgggcgccatctccacctggccagcccggtgcaagagagtccgttttacgtcctcatcgagacttcaggctccaacgcag

SEQ ID NO: 636954 - DNA, 120 bp, Artificial Sequence
  ENSG00000180902_10 (sequence is synthesized)
ctccggcctggtgaccgatgggaccatggccaccgaccagaggaaagtcaagatgctgtgggccctgagggaaaggatcacagaggcgctgagccgggatggctacgtgtacaagtacga

SEQ ID NO: 636955 - DNA, 120 bp, Artificial Sequence
  ENSG00000180902_11 (sequence is synthesized)
cctctccctccctgtggagcggctctacgacatcgtgactgacctgcgcgcccgcctcggcccgcacgccaagcacgtggtgggctatggccaccttggagatggtaacctgcacctcaa

SEQ ID NO: 636956 - DNA, 120 bp, Artificial Sequence
  ENSG00000180902_12 (sequence is synthesized)
tgtgacggcggaggccttcagcccctcgctcctggctgccctggagccccacgtgtacgagtggacggccgggcagcagggcagcgtcagcgcggagcacggagtgggcttcaggaagag

SEQ ID NO: 636957 - DNA, 120 bp, Artificial Sequence
  ENSG00000180902_13 (sequence is synthesized)
ggacgtcctgggctacagcaagccaccgggggccctgcagctcatgcagcagctcaaggccctgctggaccccaagggcatcctcaacccctacaagacgctgcccagccaggcctgacg

SEQ ID NO: 636958 - DNA, 120 bp, Artificial Sequence
  ENSG00000180902_14 (sequence is synthesized)
gccactcctgctgctgccaaggcccactgggggtcggcgggtggctctcgggcgggggtgttgcggtggctctgagggatgagccggcagtgggcaggggaccaggcacctggttgaagg

SEQ ID NO: 636959 - DNA, 120 bp, Artificial Sequence
  ENSG00000180902_15 (sequence is synthesized)
gactgggagcccgcactggggaactgccggacgcaggccctcgggcaggagcatctggcagagtggggggcgtggcaggcaccctcctttgcagggcgaggtggggcctctgcagccatc

SEQ ID NO: 636960 - DNA, 120 bp, Artificial Sequence
  ENSG00000180902_16 (sequence is synthesized)
ctggacaggccggggtggcggcagctttgcccacgtggaagcggggtgggtctcacttgcgtggtggcccctggccccatcttgcctgctgcggcctggggagcaggcgctgggtggtgg

SEQ ID NO: 636961 - DNA, 120 bp, Artificial Sequence
  ENSG00000180902_17 (sequence is synthesized)
ttctgcctgcttgctgctcgttccccgggcatgcgtgggcagcggggggcatgcgtgggcagcagggggcgtgggcagcgggggcacgggcaggaccacgtgggccgtgatcgtgggttg

SEQ ID NO: 636962 - DNA, 120 bp, Artificial Sequence
  ENSG00000180902_18 (sequence is synthesized)
ccgagaggacctgagcgctgcggctctgctgaatggagccgggtccctcaggccgtggacgccctcgggaggggggtgactgtggcttgtgtctggacaggaatgtgtcatttcccacat

SEQ ID NO: 636963 - DNA, 120 bp, Artificial Sequence
  ENSG00000180902_19 (sequence is synthesized)
cttctagagggctgccagctgggaagacagttatcagggcaagctgtgctctgagtttcgggttctgctcctacaaagaacgtgcggtgctgcgggcgagggccccggcacggacaaggg

SEQ ID NO: 636964 - DNA, 120 bp, Artificial Sequence
  ENSG00000180902_20 (sequence is synthesized)
ccactgcagagtgtgtttctgctcgtcagctgccctgggcagcggatgggctgggcgatgcagctggatgcacatctcattctgtcatgaatgtccagtaaaaatctgaattggttgcaa

SEQ ID NO: 636965 - DNA, 120 bp, Artificial Sequence
  ENSG00000180902_21 (sequence is synthesized)
tgtgtgccgcccgcctgtggtcctgggagcccgaggccagcccggctgccgcatcctgctcttcgcactccaggtctcagacaggagtcactcgcctcttcgtgccacgcccacgtctaa

SEQ ID NO: 636966 - DNA, 120 bp, Artificial Sequence
  ENSG00000180902_22 (sequence is synthesized)
gccgggtggaacaggcccttgcaggtgtctgcccccagcctctgcgcctgtgagaccttctctctggaaaattcttctctgatatccacatgcctttgcattgcctccctgtctcgccct

SEQ ID NO: 636967 - DNA, 120 bp, Artificial Sequence
  ENSG00000180902_23 (sequence is synthesized)
aggccgatctgtctgagccctaggatttggcccggttctgcttcagccaccagcaccgtctgctcctcctcagaatccttcctcccccgtggcccgcccgccgtgtccctcctcctccac

SEQ ID NO: 636968 - DNA, 120 bp, Artificial Sequence
  ENSG00000180902_24 (sequence is synthesized)
ttgtgtccacccaagcccagggctgtgaacgtggctttcctcggttttctgtgttctgctctgatcccactccaactgcagtcacctgtgtgccgcccgcctgtggtcctgggagcccga

SEQ ID NO: 636969 - DNA, 120 bp, Artificial Sequence
  ENSG00000180902_25 (sequence is synthesized)
ttgagctgcctgggccctgctgttgtccccactgcctgtgtgactctgcgcccccttccctaccctgccccaccctggttcagggagcgtccaggcccattctcatcctcagggccttcc

SEQ ID NO: 636970 - DNA, 120 bp, Artificial Sequence
  ENSG00000180902_26 (sequence is synthesized)
ggccggattcccagtggtggcgaggaggtggtatttttttaagtgtcagtgtggcattgtggttgcctcaataaaacagagtctttttttgtcttttttttttgagacagggtctcgctc

SEQ ID NO: 636971 - DNA, 70 bp, Artificial Sequence
  ENSG00000180902_27 (sequence is synthesized)
gtctttttttgtcttttttttttgagacagggtctcgctctcacccaggctggagtgcagtgacacagtt

SEQ ID NO: 636972 - DNA, 120 bp, Artificial Sequence
  ENSG00000180902_28 (sequence is synthesized)
ttgccggagtcccagggtgctcggtgctgtcgtggagcctgggacattcactgtctgggattgattccagggttggagccacacctggtctggggcattcgctgtcctgggtcagagccc

SEQ ID NO: 636973 - DNA, 120 bp, Artificial Sequence
  ENSG00000180902_29 (sequence is synthesized)
ctcctggtctgggacattcgctgtctggggttggagccacacctggtctggggcatttgctgtccggggtcggagcctcacctggtgaagatacagaacatgctgctgccctaaccccgt

SEQ ID NO: 636974 - DNA, 120 bp, Artificial Sequence
  ENSG00000180902_30 (sequence is synthesized)
ctggcatctgatgctggtggtgacaccaggcgtgccctgcccctcctgatctgatgctggtggtgacaccaggcgtgcaccttctcctgatctgatgctggtggtgacactaggtgtgca

SEQ ID NO: 636975 - DNA, 120 bp, Artificial Sequence
  ENSG00000180902_31 (sequence is synthesized)
cctacccctcctgatctgatgctggtggtaacaccaggcgtgcacctgccaggcaaaccctgggctgtttgttgcagtgccagtcctcgtgctcctcgtggctgcccagctcacccaccc

SEQ ID NO: 636976 - DNA, 120 bp, Artificial Sequence
  ENSG00000180902_32 (sequence is synthesized)
acatgagtcgggctgatgttgctgctttgaagggggacttgggtgggctgggtttagctccgtgtggtgcttgacatgctgtgacccgtttcaggctgcccaggctttgctgaggttctg

SEQ ID NO: 636977 - DNA, 120 bp, Artificial Sequence
  ENSG00000180902_33 (sequence is synthesized)
gttctgctctgatcccactccaactgcagtcacctgtgtgccgcccgcctgtggtcctgggagcccgaggccagcccggctgccgcatcctgctcttcgcactccaggtgtctgccccca

SEQ ID NO: 636978 - DNA, 120 bp, Artificial Sequence
  ENSG00000180902_34 (sequence is synthesized)
ctccagggccccagtcagccctggctcctgctctcctgcagctggggcgacttccgacgaggcactcttgtcccacttcctggggattcctgcccactctgagcaagatgcccagtcccc

SEQ ID NO: 636979 - DNA, 120 bp, Artificial Sequence
  ENSG00000180902_35 (sequence is synthesized)
accgccagaccctccaacaccaccaccacctcccacaccccagccctctacgcgtctgcagccacaccccgacatggtgctcgggtcacaggccttgaggtgctcctgtgtcacccagtg

SEQ ID NO: 636980 - DNA, 120 bp, Artificial Sequence
  ENSG00000180902_36 (sequence is synthesized)
caggtgtctgcccccagcctctgcgcctgtgagaccttctctctggaaaattcttctctgatatccacatgcctttgcattgcctccctgtctcgccctgaaaggtgggcacgggccccc

SEQ ID NO: 636981 - DNA, 120 bp, Artificial Sequence
  ENSG00000180902_37 (sequence is synthesized)
tcctgctgcagcgtctctggggctgcccgcctgcagacatctccactcagttcctttccatctttgcacttgagggtcggcttccccagggcagcggcctcactggtagcccccaccaac

SEQ ID NO: 636982 - DNA, 120 bp, Artificial Sequence
  ENSG00000180902_38 (sequence is synthesized)
cctggagcactaacacgcctgttggatgaggtcctgagtgcagggaagacctgagtgctgattgtgttaagagaaatgcagccattcccaaaggctgcctgttgctggctctgtgtttgc

SEQ ID NO: 636983 - DNA, 120 bp, Artificial Sequence
  ENSG00000180902_39 (sequence is synthesized)
agaattcccaagatacgccccctctgagtcccactgccgtctcaggtgctgtgtggttcttcggcgccttcccctcctgatttgatgctggtggtgacaccaggcgtgcacctgtccctc

SEQ ID NO: 636984 - DNA, 120 bp, Artificial Sequence
  ENSG00000180902_40 (sequence is synthesized)
ctgatctgatgctggtgacaccaggcgtgcacctgcccctcctggcatctgatgctggtggtgacaccaggcgtgccctgcccctcctgatctgatgctggtggtgacaccaggcgtgca

SEQ ID NO: 636985 - DNA, 120 bp, Artificial Sequence
  ENSG00000180902_41 (sequence is synthesized)
ttctgtgttctgctctgatcccactccaactgcagtcacctgtgtgccgcccgcctgtggtcctgggagcccgaggccagcccggctgccgcatcctgctcttcgcactccaggctgccc

SEQ ID NO: 636986 - DNA, 120 bp, Artificial Sequence
  ENSG00000180902_42 (sequence is synthesized)
tgggattacaggcgtgagccaccccgccctgccaacaacccaagtttgcctggcgcagtggctctgcctgtaatctcagctgccctggaggctgaagccaggagttcaagaccagcctgg

SEQ ID NO: 636987 - DNA, 86 bp, Artificial Sequence
  ENSG00000180902_43 (sequence is synthesized)
cagaacccccgccccactcacctctaaaaataaaaataaataaataaaagtagccggcccaggattgaaaaaacaaaaagtaaaaa

SEQ ID NO: 636988 - DNA, 120 bp, Artificial Sequence
  ENSG00000180902_44 (sequence is synthesized)
aatgcgcaggcgcggcgtcgccccgcccactccggctcggcggctctgggcctgcggcgggcgctgcgggttggagctcgggacgtgatcgtgggctgtagcaaggtgctgctgaggcca

SEQ ID NO: 636989 - DNA, 120 bp, Artificial Sequence
  ENSG00000180914_0 (sequence is synthesized)
atttgttaaggctctgggaccaacgctgggcgaaccagctccgctccggaggggtctgcgcggctggcctcgcccgccccctagcggacccgtgcgatagtgcagcctcagccccagcgc

SEQ ID NO: 636990 - DNA, 120 bp, Artificial Sequence
  ENSG00000180914_1 (sequence is synthesized)
acagcgccgcatccagacgctgtccgcgcgcgcagcctgggaggcgctcctcgctcgcctcctgtacccatccagcgaccagccaggctgcggcgaggggattccaaccgaggctccagt

SEQ ID NO: 636991 - DNA, 120 bp, Artificial Sequence
  ENSG00000180914_2 (sequence is synthesized)
gagagacctcagcttagcatcacattaggtgcagccggcaggccatcccaactcgggccgggagcgcacgcgtcactggggccgtcagtcgccgtgcaacttccccggggggagtcaact

SEQ ID NO: 636992 - DNA, 120 bp, Artificial Sequence
  ENSG00000180914_3 (sequence is synthesized)
ttaggttcgcctgcggactcggtgcagtggaagccgctgaacatcccgaggaactggcacgctgggggctctgggcttgtggccggtagaggattcccgctcatttgcagtggctcagag

SEQ ID NO: 636993 - DNA, 120 bp, Artificial Sequence
  ENSG00000180914_4 (sequence is synthesized)
gagggtggacccagcagatccgtccgtggagtctccaggagtggagccccgggcgcccctacaccctccgacacgccggatccggcccagccgcgccaagccgtaaagggctcgaaggcc

SEQ ID NO: 636994 - DNA, 120 bp, Artificial Sequence
  ENSG00000180914_5 (sequence is synthesized)
caagccgtaaagggctcgaaggccggggcgcaccgctgccgccagggtcatggagggcgcgctcgcagccaactggagcgccgaggcagccaacgccagcgccgcgccgccgggggccga

SEQ ID NO: 636995 - DNA, 120 bp, Artificial Sequence
  ENSG00000180914_6 (sequence is synthesized)
gcggcgcaacgaggccctggcgcgcgtggaggtggcggtgctgtgtctcatcctgctcctggcgctgagcgggaacgcgtgtgtgctgctggcgctgcgcaccacacgccagaagcactc

SEQ ID NO: 636996 - DNA, 120 bp, Artificial Sequence
  ENSG00000180914_7 (sequence is synthesized)
gcgcctcttcttcttcatgaagcacctaagcatcgccgacctggtggtggcagtgtttcaggtgctgccgcagttgctgtgggacatcaccttccgcttctacgggcccgacctgctgtg

SEQ ID NO: 636997 - DNA, 120 bp, Artificial Sequence
  ENSG00000180914_8 (sequence is synthesized)
ccgcctggtcaagtacttgcaggtggtgggcatgttcgcctccacctacctgctgctgctcatgtccctggaccgctgcctggccatctgccagccgctgcgctcgctgcgccgccgcac

SEQ ID NO: 636998 - DNA, 120 bp, Artificial Sequence
  ENSG00000180914_9 (sequence is synthesized)
cgaccgcctggcagtgctcgccacgtggctcggctgcctggtggccagcgcgccgcaggtgcacatcttctctctgcgcgaggtggctgacggcgtcttcgactgctgggccgtcttcat

SEQ ID NO: 636999 - DNA, 120 bp, Artificial Sequence
  ENSG00000180914_10 (sequence is synthesized)
ccagccctggggacccaaggcctacatcacatggatcacgctagctgtctacatcgtgccggtcatcgtgctcgctgcctgctacggccttatcagcttcaagatctggcagaacttgcg

SEQ ID NO: 637000 - DNA, 120 bp, Artificial Sequence
  ENSG00000180914_11 (sequence is synthesized)
gctcaagaccgctgcagcggcggcggccgaggcgccagagggcgcggcggctggcgatggggggcgcgtggccctggcgcgtgtcagcagcgtcaagctcatctccaaggccaagatccg

SEQ ID NO: 637001 - DNA, 120 bp, Artificial Sequence
  ENSG00000180914_12 (sequence is synthesized)
cacggtcaagatgactttcatcatcgtgctggccttcatcgtgtgctggacgcctttcttcttcgtgcagatgtggagcgtctgggatgccaacgcgcccaaggaagcctcggccttcat

SEQ ID NO: 637002 - DNA, 120 bp, Artificial Sequence
  ENSG00000180914_13 (sequence is synthesized)
catcgtcatgctcctggccagcctcaacagctgctgcaacccctggatctacatgctgttcacgggccacctcttccacgaactcgtgcagcgcttcctgtgctgctccgccagctacct

SEQ ID NO: 637003 - DNA, 120 bp, Artificial Sequence
  ENSG00000180914_14 (sequence is synthesized)
gaagggcagacgcctgggagagacgagtgccagcaaaaagagcaactcgtcctcctttgtcctgagccatcgcagctccagccagaggagctgctcccagccatccacggcgtgacccac

SEQ ID NO: 637004 - DNA, 120 bp, Artificial Sequence
  ENSG00000180914_15 (sequence is synthesized)
cagccagggccagggctgcagcctgaggctcaggctgtgctggcataagtgctctgctcctaggtgatggcgtatgtttgtgtataaggtacctatcagtttgtatccctcccctccttg

SEQ ID NO: 637005 - DNA, 120 bp, Artificial Sequence
  ENSG00000180914_16 (sequence is synthesized)
gggtggcttcagtggggtggagagtggcctccatgatggaagatgataggggactcagccatcagacaacaccctggcctcctacacgtacttctaccaccctgaacccactgctgccct

SEQ ID NO: 637006 - DNA, 120 bp, Artificial Sequence
  ENSG00000180914_17 (sequence is synthesized)
gggcagtgagtggcttgttttttctcctggacttgtaatttcactccagtatatttttacttcttcattctgggatattgtgaaaagcggtaaatataggattggtgaccaattgggtca

SEQ ID NO: 637007 - DNA, 120 bp, Artificial Sequence
  ENSG00000180914_18 (sequence is synthesized)
cctcagatgggaagggtggtgctaagatcctcctgacctcaaagtgtatttgcctttaagcgaacaaatgctggggtccttggggaccagcttgtcagagggtagccctaagagaagggg

SEQ ID NO: 637008 - DNA, 120 bp, Artificial Sequence
  ENSG00000180914_19 (sequence is synthesized)
attaccttgtaagaccatctggcgcagtggacctattagaacttgggttaaaaatgtttaagaagctaatgtttaagaagcatttgggaaagaaaaagaaataaatgtatccagatagga

SEQ ID NO: 637009 - DNA, 120 bp, Artificial Sequence
  ENSG00000180914_20 (sequence is synthesized)
aaagaaaaagaaataaatgtatccagataggaaaagaagaagtaaaactatttgcagatgacacagttttgtatatagaaaatcctaaggaactcacacacacacacacacacacacacg

SEQ ID NO: 637010 - DNA, 120 bp, Artificial Sequence
  ENSG00000180914_21 (sequence is synthesized)
gcaaggtttcaagatacaagatcaatatacaaaaatgaattgtatttctttatactagcaacaaacaatatgaaaacgaagttaaataattccatttataataccatcagaaagaataaa

SEQ ID NO: 637011 - DNA, 120 bp, Artificial Sequence
  ENSG00000180914_22 (sequence is synthesized)
ataggaatcaacttaacaaaacaagtgcaagactgaaaactacaaaattggaaagaaattaaagaaggcttaaataaatggaaagacatcctgtgttcatggatcagacttagtattgtt

SEQ ID NO: 637012 - DNA, 120 bp, Artificial Sequence
  ENSG00000180914_23 (sequence is synthesized)
aagatggcaatactatcctaactgacatgcagattcagtgcaatccttatgaaaatcatagctggcttctttacagaaattgataagctagtcccaaaattcataaagaaatgcaaggga

SEQ ID NO: 637013 - DNA, 120 bp, Artificial Sequence
  ENSG00000180914_24 (sequence is synthesized)
cccagaatatccaaataagccttgaaaaagaacaaagttggtggattcacacttcctgatttcataatttacgataaaggtaatcagctcagtgtgttactggtttaaggatagacatac

SEQ ID NO: 637014 - DNA, 120 bp, Artificial Sequence
  ENSG00000180914_25 (sequence is synthesized)
ggagcagaataaagagtacagatatgaacacttatacttacggtcaattgatttttgacaaggttcccaagacaattcaatagagaaaggagagtcttttcaacaaatggcaccgagaca

SEQ ID NO: 637015 - DNA, 120 bp, Artificial Sequence
  ENSG00000180914_26 (sequence is synthesized)
atgatatgcaagtgcaaaagaatgaggttggacctttactcacactatgtgcaaaaatcaactcaaaacgcatccaagatctaaatataagagctgaaactataaaatcttagaaagaaa

SEQ ID NO: 637016 - DNA, 120 bp, Artificial Sequence
  ENSG00000180914_27 (sequence is synthesized)
cataggcatagatctttgtaaccttgaattaggcagtggtttcttagatatgataccaaagacacaagcaaccaatggaaaaataggtaaattggacttaatcaagatttgaagcttttg

SEQ ID NO: 637017 - DNA, 120 bp, Artificial Sequence
  ENSG00000180914_28 (sequence is synthesized)
tgattgaaaagaccctatcaagaaggtgaaaagataacctgcagaatgggagaaaatatttgcgagtcatatatatgataaggggcttgtatctggaatatataaataactcttataaca

SEQ ID NO: 637018 - DNA, 120 bp, Artificial Sequence
  ENSG00000180914_29 (sequence is synthesized)
caacaataaggagaaaaataaatcaatttaaaaaatgggctaacggtttgaatagacatttctccaaagaagatatgcaaatggctactaagcacatgaaaaaatactcaacattattat

SEQ ID NO: 637019 - DNA, 120 bp, Artificial Sequence
  ENSG00000180914_30 (sequence is synthesized)
tcattagggaaatgcaagtcaaaatcacaatgagattccagtttacaatcactaggatggctacaataaaaagatggacaagaacgagtgtcggtgaggatgtagagaaactggtagaaa

SEQ ID NO: 637020 - DNA, 120 bp, Artificial Sequence
  ENSG00000180914_31 (sequence is synthesized)
tttaaattgttggtgggaatgtaaatggtgcacctgctttgaaaaacagtttggcagtacctcaaaaagttaaacgtagagtgaccatatgacccaggaatgccactcctaggtatttac

SEQ ID NO: 637021 - DNA, 120 bp, Artificial Sequence
  ENSG00000180914_32 (sequence is synthesized)
ccaagagaaatgaaaacgtacatacacacaaaaacttgtacaccaatgttcatagcaacattatttgtaatagccaaaaagtggaaacaacccaaatgtctaccaactgatgaatgggaa

SEQ ID NO: 637022 - DNA, 120 bp, Artificial Sequence
  ENSG00000180914_33 (sequence is synthesized)
ataaaatgtggtctgtccacgcaatggaacattattagactctaaaaagaaatgaagtactcacacatgccacaacatggatgagccttgaaaacttgctaagtgaaagaagccaggtgc

SEQ ID NO: 637023 - DNA, 120 bp, Artificial Sequence
  ENSG00000180914_34 (sequence is synthesized)
aaaagcccacatattgtctgactgcattgaaatgcaatgtctaaaatggacgaatctatatagagtgaatatagattagcgtttgccagggcctggaggctgtgagagatgaggcatgac

SEQ ID NO: 637024 - DNA, 120 bp, Artificial Sequence
  ENSG00000180914_35 (sequence is synthesized)
tactaagggtttggggtttctttttcgggtgatgaaaatgttctgaaattagtggtgattgtgcacgattttgagaatgtactaaaaaccaatgaactttaaaaaataaaaataaacaaa

SEQ ID NO: 637025 - DNA, 120 bp, Artificial Sequence
  ENSG00000180917_0 (sequence is synthesized)
ggacggagccaaagaatgctccgcctgcgcgcgccgcttccgttgccatagtggccgggggcgggaggctggcgcctcccagcttctgtactccgcgaagcaaaacctagggagctgagg

SEQ ID NO: 637026 - DNA, 120 bp, Artificial Sequence
  ENSG00000180917_1 (sequence is synthesized)
cctaggcgaggcgagagtcgccggcgtgcgtaacgttggcgcacgtgactccggcccggcctacagggcgcgtgcgcagtgggacttgagtgcctcctggtccctgtctgccggcattcg

SEQ ID NO: 637027 - DNA, 120 bp, Artificial Sequence
  ENSG00000180917_2 (sequence is synthesized)
cggctgcggggcccggagttgctggtaggaggagttggcggaagcacttggaactcctttataagtgtcagctgtgagattttaatttgatttgaaaatgagtaagtgcagaaagacacc

SEQ ID NO: 637028 - DNA, 120 bp, Artificial Sequence
  ENSG00000180917_3 (sequence is synthesized)
agttcagcagctagcaagtcccgcgtcattcagcccagatattcttgctgacatttttgaactctttgccaagaacttttcttatggcaagccacttaataatgagtggcagttaccaga

SEQ ID NO: 637029 - DNA, 120 bp, Artificial Sequence
  ENSG00000180917_4 (sequence is synthesized)
tcccagtgagattttcacctgtgaccacactgaacttaatgcatttcttgatttgaagaactccctaaatgaagtaaaaaacctactgagtgataagaaactggatgagtggcatgagca

SEQ ID NO: 637030 - DNA, 120 bp, Artificial Sequence
  ENSG00000180917_5 (sequence is synthesized)
cactgctttcactaataaagcggggaaaatcatttctcatgttagaaaatctgtgaatgctgaactttgtactcaagcatggtgtaagttccatgagattttgtgcagctttccacttat

SEQ ID NO: 637031 - DNA, 120 bp, Artificial Sequence
  ENSG00000180917_6 (sequence is synthesized)
tccacaggaagcttttcagaatggaaaactgaattctctacacctttgtgaagctccaggagcttttatagctagtctcaaccactacttaaaatcccatcggtttccttgtcattggag

SEQ ID NO: 637032 - DNA, 120 bp, Artificial Sequence
  ENSG00000180917_7 (sequence is synthesized)
ttgggtagcgaatactctgaatccataccatgaagcaaatgacgacctcatgatgattatggatgaccggcttattgcaaataccttgcactggtggtactttggtccagataacactgg

SEQ ID NO: 637033 - DNA, 120 bp, Artificial Sequence
  ENSG00000180917_8 (sequence is synthesized)
tgatatcatgaccctgaaattcttgactggacttcagaatttcataagcagcatggctactgttcacttggtcactgcagatgggagttttgattgccaaggaaacccaggtgaacaaga

SEQ ID NO: 637034 - DNA, 120 bp, Artificial Sequence
  ENSG00000180917_9 (sequence is synthesized)
agctttagtttcttctttgcattactgtgaagttgtcactgctctgaccactcttggaaacggtggctcttttgttctaaagatgtttactatgtttgaacattgttccataaacttgat

SEQ ID NO: 637035 - DNA, 120 bp, Artificial Sequence
  ENSG00000180917_10 (sequence is synthesized)
gtacctgctaaactgttgttttgaccaagtccatgttttcaaacctgctactagcaaggcaggaaactccgaagtctatgtggtttgcctccactataaggggagagaggccatccatcc

SEQ ID NO: 637036 - DNA, 120 bp, Artificial Sequence
  ENSG00000180917_11 (sequence is synthesized)
tctgttatctaagatgaccttgaattttgggactgaaatgaaaaggaaagccctttttccccatcatgtgattcctgattcttttcttaagagacatgaagaatgttgtgtgttctttca

SEQ ID NO: 637037 - DNA, 120 bp, Artificial Sequence
  ENSG00000180917_12 (sequence is synthesized)
taaatatcagctagagactatttctgaaaacattcgtctatttgagtgcatgggaaaggcggaacaagaaaagctgaataatttaagggattgtgctatacaatattttatgcaaaaatt

SEQ ID NO: 637038 - DNA, 120 bp, Artificial Sequence
  ENSG00000180917_13 (sequence is synthesized)
tcaactgaaacatctttccagaaataattggctagtaaaaaaatctagtattggttgtagtacaaatacaaaatggtttgggcagaggaacaaatattttaaaacttataatgaaaggaa

SEQ ID NO: 637039 - DNA, 120 bp, Artificial Sequence
  ENSG00000180917_14 (sequence is synthesized)
gatgctagaagccctttcatggaaagataaagtagccaaaggatactttaatagttgggctgaagaacatggtgtatatcatcctgggcagagttctattttagaaggaacagcttccaa

SEQ ID NO: 637040 - DNA, 120 bp, Artificial Sequence
  ENSG00000180917_15 (sequence is synthesized)
tcttgagtgtcacttatggcatattttggagggaaagaaactgccaaaggtaaaatgttctcctttttgcaatggtgaaattttaaaaactcttaatgaagcaattgaaaagtcattagg

SEQ ID NO: 637041 - DNA, 120 bp, Artificial Sequence
  ENSG00000180917_16 (sequence is synthesized)
aggagcttttaatttggattccaagtttaggccaaaacagcagtattcttgttcttgtcatgttttttctgaagaactgatattttccgagttgtgtagccttactgagtgccttcagga

SEQ ID NO: 637042 - DNA, 120 bp, Artificial Sequence
  ENSG00000180917_17 (sequence is synthesized)
tgagcaggttgtagtacccagcaatcaaataaagtgcctgctggtgggcttttcgactctccgtaatatcaaaatgcatataccgttggaagttcgactcctagaatcagctgaactcac

SEQ ID NO: 637043 - DNA, 120 bp, Artificial Sequence
  ENSG00000180917_18 (sequence is synthesized)
aacttttagctgttcattgcttcatgatggagatccaacttaccagcgtttatttttggactgccttctacattcattgcgggagcttcatacaggagatgttatgattttgcctgtact

SEQ ID NO: 637044 - DNA, 120 bp, Artificial Sequence
  ENSG00000180917_19 (sequence is synthesized)
ttcttgcttcacaagatttatggctggtttgatctttgtactccacagttgttttagattcatcacttttgtttgtcccacatcctctgatcccctgaggacctgcgcagtcctgctatg

SEQ ID NO: 637045 - DNA, 120 bp, Artificial Sequence
  ENSG00000180917_20 (sequence is synthesized)
tttgctcaactctgactcaccccagcaggttttacagtttgtgccaatggaggtactccttaagggggccctgcttgattttttgtgggatttgaatgctgccattgctaaaaggcattt

SEQ ID NO: 637046 - DNA, 120 bp, Artificial Sequence
  ENSG00000180917_21 (sequence is synthesized)
gcatttcattattcaaagagagagagaagaaattatcaacagccttcagttacaaaactgaacatatgctttctgagattcaactttatgatttcttataatttgcccagtatttgcatc

SEQ ID NO: 637047 - DNA, 120 bp, Artificial Sequence
  ENSG00000180917_22 (sequence is synthesized)
ctgttgctctattaatttaaaaaccttttattttggggaaaggccaacatttgcatcattcaaagtctcattaattctggaaaaccatccattctgatctctagggtatatacacccaca

SEQ ID NO: 637048 - DNA, 120 bp, Artificial Sequence
  ENSG00000180917_23 (sequence is synthesized)
ggcatagagctcttccacgtggtggaatctatgcaatgatagatattcacactctaaatatgaggtgtgtgtatgtgtatgggtggccacagccatgcttacctatgccatttagttggt

SEQ ID NO: 637049 - DNA, 120 bp, Artificial Sequence
  ENSG00000180917_24 (sequence is synthesized)
cttacttaatctgcttaagatttgcatctgtgtacctttgttcagattagttttttttttccagccgatttcctcttagtggctaatgctgttagtgaattttccaactaatttcctctc

SEQ ID NO: 637050 - DNA, 120 bp, Artificial Sequence
  ENSG00000180917_25 (sequence is synthesized)
attggttaatgttgttaatgaattgagagaggtaattgaggaaaggaaatgagtaaatcactgttcagcaacactgatttccgttaacacatcagttatgaatttcagggaattcatctc

SEQ ID NO: 637051 - DNA, 120 bp, Artificial Sequence
  ENSG00000180917_26 (sequence is synthesized)
gccagattcttgataacatgccattcattgcccttaggtgattgaccctattttcttacatggctcaaataaaactagtatgctgttgtatgaatcttttactgaccacaccatccaact

SEQ ID NO: 637052 - DNA, 120 bp, Artificial Sequence
  ENSG00000180917_27 (sequence is synthesized)
ataaaaatataacgggacagctttaaaccaaagatcatgtttagaacaatgaaaaattatttgttgtatctaatacacgcctgtattgtgaaaagcttcatttagcaatgatgtaataat

SEQ ID NO: 637053 - DNA, 120 bp, Artificial Sequence
  ENSG00000180917_28 (sequence is synthesized)
ttttaacttccaggaaataatctgtgaatggaaagattttttaagattttgagatagtgtttagtctcatgttgggaacacatgaatgtgatgaacatagtgaatactaaagaaaacgct

SEQ ID NO: 637054 - DNA, 120 bp, Artificial Sequence
  ENSG00000180917_29 (sequence is synthesized)
tcagactttcagaatgatggttcagaatttaaaatttttaatcttttctaatttctttttttcagtgtgaaaatagcactttaccaaaagattagccatgaaatggttattttgccagtt

SEQ ID NO: 637055 - DNA, 120 bp, Artificial Sequence
  ENSG00000180917_30 (sequence is synthesized)
acatttgatttcttttgtatctgcaatgtaatgagttattttatttcttctgtatttgcagtgtaatgagtttttgtggcaaagtgtattaagcaatttttcattatcttgaagttccac

SEQ ID NO: 637056 - DNA, 120 bp, Artificial Sequence
  ENSG00000180917_31 (sequence is synthesized)
aaagtggagaatatttatattctcacatgcattttaggcacttttgatatgtgaaaatagatgtattttctgatgcatttggttaataaatattaatctgaacattttcatgttctttgc

SEQ ID NO: 637057 - DNA, 120 bp, Artificial Sequence
  ENSG00000180917_32 (sequence is synthesized)
tattttgaattccattatagattcatgaataaagtcattactagagagattttgtgttcatcttttttaaatggaattatgggagaagttaaaaatataagttggaaacagacattttta

SEQ ID NO: 637058 - DNA, 120 bp, Artificial Sequence
  ENSG00000180917_33 (sequence is synthesized)
aagggagttttgaatgatagttaatgttctttcattttctctgatttgcattcattaaaatttagtccttaatattgtaatacttatggaaggcctacttcaggaaagaaattgaatact

SEQ ID NO: 637059 - DNA, 120 bp, Artificial Sequence
  ENSG00000180917_34 (sequence is synthesized)
taagggggattggaagaggagtgtgtggaggcctggaagtagatttttgaaagaaatctgatttcctactggtgactctatggaagcaattccagttgtatgacgatggaagtctgacag

SEQ ID NO: 637060 - DNA, 120 bp, Artificial Sequence
  ENSG00000180917_35 (sequence is synthesized)
aaggttgattaccaggaggaaaaaaaaaaacactcttggaaaaccattttgcacttaatagtctttatgccttgctaagtgggattcaatatactaataatgcagcttattttttactta

SEQ ID NO: 637061 - DNA, 120 bp, Artificial Sequence
  ENSG00000180917_36 (sequence is synthesized)
ttttaactatttgataagaatgaagttgaaggcatgggtccagattctagcattattactgtctttaagcccttcaaataagtattgaatgcttagtgttttgttgacactaatctgtac

SEQ ID NO: 637062 - DNA, 120 bp, Artificial Sequence
  ENSG00000180917_37 (sequence is synthesized)
tggaatatataacactgaagtattctcaaatgtattttgctttttaacgtgggttttggaatcaattgctcatctgattcattggattcaaattgctttagaggttagacatgacttgag

SEQ ID NO: 637063 - DNA, 120 bp, Artificial Sequence
  ENSG00000180917_38 (sequence is synthesized)
gaaggttcagattgaactggatatattaatagatgacaggtactaatgatttatatgagtttctctttaagagaaaggagaggaaaaatgctattcaaaagatgaatggaaaagtagaag

SEQ ID NO: 637064 - DNA, 120 bp, Artificial Sequence
  ENSG00000180917_39 (sequence is synthesized)
aagacaggaagaggtgagagtatgcatgttttaccaaggtagactgttcttaaaaacttttttccacaggttttgagatttttaatttgtaatatctattaaaaaacaaacatcaaattg

SEQ ID NO: 637065 - DNA, 120 bp, Artificial Sequence
  ENSG00000180917_40 (sequence is synthesized)
agtccggcgcaccatctccctgccttgtggctggaggcgccgcggacccaaagggagggaccatcccgggaagcagccccgagagcggaagtgcagaatggcttcctcgagagagtaaag

SEQ ID NO: 637066 - DNA, 120 bp, Artificial Sequence
  ENSG00000180917_41 (sequence is synthesized)
actgttgatgagatcttgtgggttttgttttgggttcactaatttgggcgggggctacataactgcctacttgagtttgcaatatgagaatggtaatagcgacccacttagcagaattat

SEQ ID NO: 637067 - DNA, 120 bp, Artificial Sequence
  ENSG00000180917_42 (sequence is synthesized)
gatgtcacaaagctcaaaggactgtttaatgaaaggctcagaggatcatatactggaaaatttttccacacacgctgtaagccacatgcttttttttttttttttaagtcatgcatttaa

SEQ ID NO: 637068 - DNA, 120 bp, Artificial Sequence
  ENSG00000180917_43 (sequence is synthesized)
gtgctggagtgaagttgaggtgcactattaatgactcatattcagaacctgaagagagagatcccttttgtgctaagtatgatatccactcatttattcagtaatactgagtgcttactg

SEQ ID NO: 637069 - DNA, 120 bp, Artificial Sequence
  ENSG00000180917_44 (sequence is synthesized)
tgtaccaggcaatgtccaacttcttggaatggtctatgtgtaaacaaaacaaagatctctgtcctgtggagcttacattctagtttggggaagacaaataataaacagtaaacaaaaaga

SEQ ID NO: 637070 - DNA, 120 bp, Artificial Sequence
  ENSG00000180917_45 (sequence is synthesized)
aggaagttataggttggaagtacatgagtaccataggaaaaaaatacagcgaggtaagaggcatggggaatgcaagatgcaatcttaggtaggcttcactgagaaaatgacatttgagca

SEQ ID NO: 637071 - DNA, 120 bp, Artificial Sequence
  ENSG00000180917_46 (sequence is synthesized)
aatattggaaggaggtgaaggagttagctgtgctgacagctggggaaagagcattccaggcagagggaccaccaatgcagaaagacttttgtcttggaatgtgcttggtgtcttcagtga

SEQ ID NO: 637072 - DNA, 120 bp, Artificial Sequence
  ENSG00000180917_47 (sequence is synthesized)
acagcagaaaggcctgtttggctggagtagtgagtaagggagtagtaataaaaattaggtggcaacacagcaaaagtatagtcagaacggtggagtgtctgaatcacttaagttgtcctc

SEQ ID NO: 637073 - DNA, 120 bp, Artificial Sequence
  ENSG00000180917_48 (sequence is synthesized)
atgtgaaggtaatttcctattagcttaggtaaggtttcacagcttaactacagccgttaattagtatgtgaagttaatgattaaaattagactttttccgaaatagagtatagatgagat

SEQ ID NO: 637074 - DNA, 120 bp, Artificial Sequence
  ENSG00000180917_49 (sequence is synthesized)
gtagtttccagcaagcacaatgcgaattaagacagaggagcttgttgaaaaaaacttttatatgcccttattttaagattttagtgaatgtggaaacacctcagttttgtcttcctttag

SEQ ID NO: 637075 - DNA, 120 bp, Artificial Sequence
  ENSG00000180917_50 (sequence is synthesized)
aaatttgtctaaatatagctctaccagtaaaaaagaaacaaacaaaaaacaggcatagtggctgacacctgtaatcccagcaccttggaaggccgagttggagggattgcttgagcccag

SEQ ID NO: 637076 - DNA, 120 bp, Artificial Sequence
  ENSG00000180917_51 (sequence is synthesized)
tgggcaacagagcaagaccccatctccacaattttttttttaactaactgggtgtggtggtgcacgtctgtagtcccaactcctttggaggctgaggtgggaggatcctttgagcctggg

SEQ ID NO: 637077 - DNA, 120 bp, Artificial Sequence
  ENSG00000180917_52 (sequence is synthesized)
ttggaggctgaggtgggaggatcctttgagcctgggaagaggtcaaggctgcagggagctatgacctgtgccactgcactccagcctgggtagcagagtgagaccctgtctcaaaaaaaa

SEQ ID NO: 637078 - DNA, 120 bp, Artificial Sequence
  ENSG00000180917_53 (sequence is synthesized)
taccgtggcaaacaaatgactaagaagacacctgttacttcaaggaaattacaaactggtagagtagacttgcaaataatttaaacaaaataagaaagaatgaaaaaagtgtgctaaaag

SEQ ID NO: 637079 - DNA, 120 bp, Artificial Sequence
  ENSG00000180917_54 (sequence is synthesized)
aacagtacaaagtaaatgctaaaagaaacatcatctgaatattattgtatgtattacagcagtagttccctttgtttctcattttgtccttgaacatctgcttttctggagtgatgattt

SEQ ID NO: 637080 - DNA, 120 bp, Artificial Sequence
  ENSG00000180917_55 (sequence is synthesized)
gattgccaattttttcatatttaacaaattcagatttttttgaaaatcatttgtagaatgcattgtgtatgctaaataagtgcagaatttgtgaactaaagcatctattgattaacattg

SEQ ID NO: 637081 - DNA, 120 bp, Artificial Sequence
  ENSG00000180917_56 (sequence is synthesized)
cactaacaggtaccatgtaatattcattgctctccctgctggaatttgtaacttttccaaaactatgccattaagccatacttctcatatcctttttcctcttcagaaggaagaggtttc

SEQ ID NO: 637082 - DNA, 120 bp, Artificial Sequence
  ENSG00000180917_57 (sequence is synthesized)
tttgtttctggtttctttggcagtgttgactgccagagtatgtagagtgactatttgtaatttgtatattcaatatgtatatttcttcagtataaaattctgctatccaagtgttaagtt

SEQ ID NO: 637083 - DNA, 120 bp, Artificial Sequence
  ENSG00000180917_58 (sequence is synthesized)
ttagtggctagaagaaataatgatatgttatggtggaagtgtggagctgtctgaaccatatgaaagccaggaatctatagtttgagacataccgggtaaacagttggtcactttcagcat

SEQ ID NO: 637084 - DNA, 120 bp, Artificial Sequence
  ENSG00000180917_59 (sequence is synthesized)
caagcagaaaaaggctaaccactcaagtacagcacagtttacaagcagtatgatgatgaacgttagttgatgacctgtataggtgattggtaccaccaaagtgcctgtcttagagaatga

SEQ ID NO: 637085 - DNA, 120 bp, Artificial Sequence
  ENSG00000180917_60 (sequence is synthesized)
aatctggacagaggatgtattcaacaatcctactagtgaggtaagtggcttgtggcaggatcagtactgggttcaggtacatgatcctctccctgaaggaggtaaagtatgacgggaact

SEQ ID NO: 637086 - DNA, 120 bp, Artificial Sequence
  ENSG00000180919_0 (sequence is synthesized)
acaggcatgaaccacgatgctcagccccttagctgaacttttaaacagagatttcttctatttcagacagacactgagactgaggcacccattccatggatacctccaccagtgttacct

SEQ ID NO: 637087 - DNA, 120 bp, Artificial Sequence
  ENSG00000180919_1 (sequence is synthesized)
atgactccagcctccagatttcccagttcatcctgatgggattaccaggcattcatgagtggcagcactggctctccctgcccctgactctgctctacctcttagctcttggtgccaatc

SEQ ID NO: 637088 - DNA, 120 bp, Artificial Sequence
  ENSG00000180919_2 (sequence is synthesized)
tcctcatcataatcaccattcaacatgagaccgtgctacatgaacccatgtaccatttgctgggcatattagcagtggtggacattggcctggccaccaccatcatgcccaagatcctgg

SEQ ID NO: 637089 - DNA, 120 bp, Artificial Sequence
  ENSG00000180919_3 (sequence is synthesized)
ccatcttctggtttgatgccaaggccattagcctccccatgtgttttgctcagatctatgccatccactgcttcttctgcatagagtcaggcatctttctctgcatggcagtagacagat

SEQ ID NO: 637090 - DNA, 120 bp, Artificial Sequence
  ENSG00000180919_4 (sequence is synthesized)
tcatcatgctcaggaatggcctgttgaccatcccagtgcctatactggctgcccagagacactactgttccaggaatgaaatcgagcactgcctctgctctaacttgggggttatcagcc

SEQ ID NO: 637091 - DNA, 120 bp, Artificial Sequence
  ENSG00000180919_5 (sequence is synthesized)
tggcttgtgatgacatcactgtgaacaaattttaccaactgatgctagcatgggtcttggttgggagtgatatggctctggtattttcttcctatgctgtaatccttcactctgtgctga

SEQ ID NO: 637092 - DNA, 120 bp, Artificial Sequence
  ENSG00000180919_6 (sequence is synthesized)
ggctgaactcagcagaagcaatgtccaaggctctgagcacttgtagctcccacctcatcctcatcctcttccacacaggtatcattgtgctgtctgtcacacaccttgcagagaaaaaga

SEQ ID NO: 637093 - DNA, 120 bp, Artificial Sequence
  ENSG00000180919_7 (sequence is synthesized)
ttccccttattcctgtgttccttaatgtgctgcacaatgtcatcccccctgcactcaaccccctggcctgtgcactcaggatgcacaaactcagactgggctttcagagactgcttggac

SEQ ID NO: 637094 - DNA, 120 bp, Artificial Sequence
  ENSG00000180919_8 (sequence is synthesized)
tgggtcaggacgtgtccaagtaactccagctttaggaatccagtaagatgttaggaaatgacagaggttttagttctcaatagatcagggttataatctgcacttaccacactccctagg

SEQ ID NO: 637095 - DNA, 120 bp, Artificial Sequence
  ENSG00000180921_0 (sequence is synthesized)
gctgccggaccgaccggaccgcgaggccgctgggcggcggtcggctcctgctgcccctgtgccgagaccccgcgcacctggccaggcccctggccccaacatggcccgtcgctctcagag

SEQ ID NO: 637096 - DNA, 120 bp, Artificial Sequence
  ENSG00000180921_1 (sequence is synthesized)
agagctcctcgcagggggacaacccactggcacccgggtacctgccgcctcactacaaagagtactaccgcctggcggtggatgcactggccgagggtggctcggaggcctacagccgct

SEQ ID NO: 637097 - DNA, 120 bp, Artificial Sequence
  ENSG00000180921_2 (sequence is synthesized)
tcctcgctaccgagggggcaccagacttcctgtgccctgaagagctggaacatgtgagccgacaccttcggcctccgcagtatgttacccgagagccacctgaaggcagccttctcgacg

SEQ ID NO: 637098 - DNA, 120 bp, Artificial Sequence
  ENSG00000180921_3 (sequence is synthesized)
tggacatggatggctcctcgggtacatactggccagtgaactcagaccaggccgtgcctgagcttgatttgggctggcctctgaccttcggcttccagggcaccgaggtgaccaccttgg

SEQ ID NO: 637099 - DNA, 120 bp, Artificial Sequence
  ENSG00000180921_4 (sequence is synthesized)
tgcagccaccgccccccgacagccccagtatcaaggatgaggcccgcaggatgatccgttccgcccagcaggtggtggccgtggtgatggacatgttcactgatgtggacctgctcagcg

SEQ ID NO: 637100 - DNA, 120 bp, Artificial Sequence
  ENSG00000180921_5 (sequence is synthesized)
aagtgctggaggccgcggcccgtcgggtcccagtctacatcctgctggatgagatgaacgcgcagcacttcctggacatggccgacaagtgccgtgtcaacctgcagcacgtggatttcc

SEQ ID NO: 637101 - DNA, 120 bp, Artificial Sequence
  ENSG00000180921_6 (sequence is synthesized)
tgcgcgtacggactgtggcgggccccacctactactgccgcactgggaagtccttcaagggccacgtcaaggagaagttcctgctggtggactgtgccgtggtgatgagtgggagctaca

SEQ ID NO: 637102 - DNA, 120 bp, Artificial Sequence
  ENSG00000180921_7 (sequence is synthesized)
gcttcatgtggtcctttgagaagatccaccgcagcctggcgcacgtgttccaaggagagctggtctccagcttcgacgaggagttccgcatcctcttcgcgcagtccgagccgcttgtgc

SEQ ID NO: 637103 - DNA, 120 bp, Artificial Sequence
  ENSG00000180921_8 (sequence is synthesized)
cctcggccgcggccctggcccgcatggacgcctatgccctggctccgtatgccggggccgggcctctcgtgggcgtccctggggtcggggcgccaacccccttctccttccctaaacgag

SEQ ID NO: 637104 - DNA, 120 bp, Artificial Sequence
  ENSG00000180921_9 (sequence is synthesized)
cgcacctcctgttcccgccaccccgggaagagggcctgggcttcccctccttcctcgacccggaccgccacttcctgtcggccttccgccgggaggagccgccgcggatgccggggggcg

SEQ ID NO: 637105 - DNA, 120 bp, Artificial Sequence
  ENSG00000180921_10 (sequence is synthesized)
ctgcggccgctctcgcggcgcctggaggccgaggccgggccggctggggagctcgcgggcgcgcggggcttcttccaggcgcggcacctggagatggacgccttcaagcggcacagcttc

SEQ ID NO: 637106 - DNA, 120 bp, Artificial Sequence
  ENSG00000180921_11 (sequence is synthesized)
ccttcaagcggcacagcttcgcgaccgagggcgcgggcgccgtggagaacttcgcggccgcgcggcaggtgtcgcggcagacgttcctcagccacggcgacgacttccgcttccagacca

SEQ ID NO: 637107 - DNA, 120 bp, Artificial Sequence
  ENSG00000180921_12 (sequence is synthesized)
gccacttccaccgtgaccagctctaccagcagcagtaccagtgggacccgcagctcacgccggcgcgcccgcaaggcctgttcgagaagcttcgcgggggccgcgcgggtttcgcggacc

SEQ ID NO: 637108 - DNA, 120 bp, Artificial Sequence
  ENSG00000180921_13 (sequence is synthesized)
cggatgacttcaccctgggcgccgggccccgcttcccggagctcggacccgacgggcaccagcggctggactacgtgccgtccagcgcgtcccgcgaggtgcgccacggctcggaccccg

SEQ ID NO: 637109 - DNA, 80 bp, Artificial Sequence
  ENSG00000180921_14 (sequence is synthesized)
ccttcgcgcccggaccccgcggcctggagcccagcggagccccgcgccccaacctgacccagcgcttcccatgccaggcc

SEQ ID NO: 637110 - DNA, 120 bp, Artificial Sequence
  ENSG00000180921_15 (sequence is synthesized)
cggagcgcaggggcgggcccgaggggcgggcagggctgcggcgctggcgtttggcctcctacttgagcggctgccacggcgaggatgggggcgacgacggcctaccggcgcccatggaag

SEQ ID NO: 637111 - DNA, 120 bp, Artificial Sequence
  ENSG00000180921_16 (sequence is synthesized)
cggaggcttacgaagacgacgtgctggctcccgggggccgggcacctgccggcgacctgctcccctcggccttccgcgtcccagcagccttccccaccaaggtcccggtgccaggcccgg

SEQ ID NO: 637112 - DNA, 120 bp, Artificial Sequence
  ENSG00000180921_17 (sequence is synthesized)
gcagcggcggcaacggcccagagcgcgagggcccggaggagcctggcctggccaagcaggactcattccgctcgcgcctgaaccccctggtccagcgcagctccaggctgcgctcctcgc

SEQ ID NO: 637113 - DNA, 120 bp, Artificial Sequence
  ENSG00000180921_18 (sequence is synthesized)
tcatcttcagcacgtcacaggccgagggcgcggccggggctgcggcggccactgagaaggtgcagctgctgcacaaggagcagacggtcagcgagacgctggggcccggcggagaggccg

SEQ ID NO: 637114 - DNA, 120 bp, Artificial Sequence
  ENSG00000180921_19 (sequence is synthesized)
tgcgctccgcggcttccaccaaggtggcggagctgctggagaagtacaagggcccagcccgtgatcccggcggcggcgcgggcgccatcaccgttgccagccacagcaaggccgtcgtgt

SEQ ID NO: 637115 - DNA, 120 bp, Artificial Sequence
  ENSG00000180921_20 (sequence is synthesized)
cccaggcgtggcgggaagaggtggcggccccaggtgccgtggggggcgagcgccgcagcctcgagagctgcctgctggacctgcgcgactcctttgcacagcagctgcaccaggaggcgg

SEQ ID NO: 637116 - DNA, 120 bp, Artificial Sequence
  ENSG00000180921_21 (sequence is synthesized)
agcggcagccgggagccgcgtcgctcaccgcggcgcagctgctcgacacactgggccggagcggctccgaccgcctgccttcccgcttcctctctgcccagagccactcaacgtccccgc

SEQ ID NO: 637117 - DNA, 120 bp, Artificial Sequence
  ENSG00000180921_22 (sequence is synthesized)
aagggctggacagccctctgccgctggaagggtccggagcgcaccaggtgctccataatgagtcaaaagggagccccacctcggcttaccctgagcggaaggggagccccacgcctgggt

SEQ ID NO: 637118 - DNA, 120 bp, Artificial Sequence
  ENSG00000180921_23 (sequence is synthesized)
gagcagtccggtgccccccgtgccggagcgcaggggcagcctcacccttaccatctccggggagtccccgaaggccgggcccgcggaggaggggccgagcggccccatggaagtcctgcg

SEQ ID NO: 637119 - DNA, 120 bp, Artificial Sequence
  ENSG00000180921_24 (sequence is synthesized)
caaaggctccttgcgtcttaggcagctgctgagccccaagggcgagcggcgcatggaggatgagggtggcttcccagtgccgcaggagaacggccaacccgagagcccgcggcgtctgtc

SEQ ID NO: 637120 - DNA, 120 bp, Artificial Sequence
  ENSG00000180921_25 (sequence is synthesized)
actgggccagggtgacagcacggaggctgccacagaagagcggggtccgcgggcgcgcctgtcctcagccacggccaacgccttgtacagcagcaaccttcgggatgacacgaaggccat

SEQ ID NO: 637121 - DNA, 120 bp, Artificial Sequence
  ENSG00000180921_26 (sequence is synthesized)
tctggagcagatcagtgcccacggccagaagcaccgtgcggtccctgccccgagccccggcccgacccacaacagccccgagctaggccgtccaccggctgctggcgtcctggccccaga

SEQ ID NO: 637122 - DNA, 120 bp, Artificial Sequence
  ENSG00000180921_27 (sequence is synthesized)
tatgtccgacaaggacaagtgttcagccatcttccgctcggacagcttggggacccagggccggctgagccgcacgctgccagccagcgcggaggagcgcgatcggctgctgcgccgcat

SEQ ID NO: 637123 - DNA, 120 bp, Artificial Sequence
  ENSG00000180921_28 (sequence is synthesized)
ggagagcatgcgcaaggagaagcgcgtgtacagccgcttcgaggtcttctgcaagaaagaggaggccagcagccctggggcaggggaaggccccgcggaggagggcaccagggacagcaa

SEQ ID NO: 637124 - DNA, 120 bp, Artificial Sequence
  ENSG00000180921_29 (sequence is synthesized)
ggtgggcaagttcgtgcccaagatcctgggcacgttcaaaagcaagaagtgagtcttctggcctggcaacccaggccagggtgcccgcatcgctgccccggtcatccagaagccccgcgg

SEQ ID NO: 637125 - DNA, 120 bp, Artificial Sequence
  ENSG00000180921_30 (sequence is synthesized)
aacagagagccctgctcatctgcttgagcagcggctgtcaggccacggccgcttggggcttggctgagtgcgccagacctcggctccactggaggctcacctggcagctgccgtctctgc

SEQ ID NO: 637126 - DNA, 120 bp, Artificial Sequence
  ENSG00000180921_31 (sequence is synthesized)
cccctggcctccccaacgctggggctgcacccctcgccaccagtgcctttctcccctcagcaccttcatctctgcaccgtcagccttgcgtggcgcagcgtctggctccgccatctcttt

SEQ ID NO: 637127 - DNA, 120 bp, Artificial Sequence
  ENSG00000180921_32 (sequence is synthesized)
gcgcagcgtctggctccgccatctctttgtgcctcagtcccccccgccccctttatttttttgagacctagggctggagtgcagttgagcggtctgggctcactgcaacctctgcctccc

SEQ ID NO: 637128 - DNA, 120 bp, Artificial Sequence
  ENSG00000180921_33 (sequence is synthesized)
cagcccgcttcagcctcccaaagtggggggattacaggcgtgagccttgcaccccgctaagtcccctatcctcttgcaagggtctcgcctctgtgcctcaattcctcattctctgggccc

SEQ ID NO: 637129 - DNA, 120 bp, Artificial Sequence
  ENSG00000180921_34 (sequence is synthesized)
gtgcctcaattcctcattctctgggcccttctcctcctcagggcctcctgttctcagggcctcccccctccccgctccctccctctctcaaggtctcctccttccctccccccccccccc

SEQ ID NO: 637130 - DNA, 120 bp, Artificial Sequence
  ENSG00000180921_35 (sequence is synthesized)
ttcacttcctttcctacttggattctcctgctcgctgcctcccagcatcttttttggaggcccgtctcttgctgtggggaagactgggctggctgcgggcagtttgcaaggggtgggtgg

SEQ ID NO: 637131 - DNA, 120 bp, Artificial Sequence
  ENSG00000180921_36 (sequence is synthesized)
ggcaggggggggggagctggaccagaagatgccccttggagtggcaaggaagctggacagggcaggcctctggggacgggacacagggaagcccgaaggggcgccttggccaggtctgcc

SEQ ID NO: 637132 - DNA, 120 bp, Artificial Sequence
  ENSG00000180921_37 (sequence is synthesized)
atctcctccagcgaggctctggccagcactgggtgagagtggggagggggcattggcctttgcagcacagtaaaacatggtccagacaacctgtggccccggcctcatgagcaccccctg

SEQ ID NO: 637133 - DNA, 120 bp, Artificial Sequence
  ENSG00000180921_38 (sequence is synthesized)
cacaggcccggcccaagccaggcgctagaagggctggttgtggagtgcttatccttgacaggtatggggccaggtgagggcaggggacaaggtgcagctgaggccgagcccaactaggtc

SEQ ID NO: 637134 - DNA, 120 bp, Artificial Sequence
  ENSG00000180921_39 (sequence is synthesized)
ctgggcacccctgcaggtgggagtggtccttgtcctcctggtatccagcagacacccccctctccccaccagccccattctcaggtcctttcctctttgtcaccaacaccaagaatctgt

SEQ ID NO: 637135 - DNA, 120 bp, Artificial Sequence
  ENSG00000180921_40 (sequence is synthesized)
ccagggttcttggcttatcttttatctcttttcactcctagagaggaattgcaattgactcagaatgacacattttggcaccacgtgtgtagaaagcccccactgttagatgatagcctc

SEQ ID NO: 637136 - DNA, 120 bp, Artificial Sequence
  ENSG00000180921_41 (sequence is synthesized)
gtgaaattcatgtttctgtattctcctatttcttttcaaaaactaattttttttttagtgtaataaatcctaagagggaactgatttaagaaacaaggccgccaaacaaaggcagcagtt

SEQ ID NO: 637137 - DNA, 120 bp, Artificial Sequence
  ENSG00000180921_42 (sequence is synthesized)
ccgactccagcagctgggaaaggaaggaaagtgaccccactttcactcctgcacagcccactggttaccaaaaccaccgtgcaagtcgggatgacagcagggacttctggccaggtggga

SEQ ID NO: 637138 - DNA, 120 bp, Artificial Sequence
  ENSG00000180921_43 (sequence is synthesized)
aaggtgcctggaagcgggatgcgcctgtgcgtctcttggccatgatgttcttgtgggcatgttattcttggtgctgcctggggtgttgctgagcggacaggctctccagctggagtccat

SEQ ID NO: 637139 - DNA, 120 bp, Artificial Sequence
  ENSG00000180921_44 (sequence is synthesized)
ggagaggccagaggctggcggccctgcctgggccttcggagcctcctgcctgcaccctccacctcttctaaaccatgatgtggcacattttggtgttaataaaacacaacacacaaagta

SEQ ID NO: 637140 - DNA, 120 bp, Artificial Sequence
  ENSG00000180921_45 (sequence is synthesized)
atgtctgggaaacgaagtcgagttcgcaaaccccgggccaggagggcaggcagggcccagccggcagctgggcagcagggccctgaggtcgagcccccgccccccaccccagggggccct

SEQ ID NO: 637141 - DNA, 120 bp, Artificial Sequence
  ENSG00000180921_46 (sequence is synthesized)
cagggtgaagcgggggtggcccctacagggcacgtgaccagcatcgagccagcacctcagggacaccccagggtggccaggccagagcagccacaggcagcctcgagaccggtgccggcc

SEQ ID NO: 637142 - DNA, 120 bp, Artificial Sequence
  ENSG00000180921_47 (sequence is synthesized)
actgctccggggtctgagctggtgctggtccttgctgggcacatggaaggctgtggagcaggggaccccatgccggccctgggccccgaactgctgaggctccatgaggtccagctgtgc

SEQ ID NO: 637143 - DNA, 120 bp, Artificial Sequence
  ENSG00000180921_48 (sequence is synthesized)
ctggcccaggagcagctgctgctggaggaccggtggcggcaggtccagctgcagatgcagctgtggcgggaggagcagctatggctgcagcagctacaggaggagcagctgtggctgcag

SEQ ID NO: 637144 - DNA, 120 bp, Artificial Sequence
  ENSG00000180921_49 (sequence is synthesized)
cagctacaggaggagcaggcctgggtacacgtggaggggctgcagctggccgtggccctggagcagctccggagtgagggcttcgaagcactgcagacccaaggccaggcccctggcccc

SEQ ID NO: 637145 - DNA, 120 bp, Artificial Sequence
  ENSG00000180929_0 (sequence is synthesized)
agtaccatctccgacaggggctgagttgctggagctgggctggggcaggggagaaagacagcagactcatccttgcacccctccatgggcctggccaagcccccaagaggatggcagcct

SEQ ID NO: 637146 - DNA, 120 bp, Artificial Sequence
  ENSG00000180929_1 (sequence is synthesized)
gggcgtcggagccacctcctgggcagccaatgaggtgaggggccggaggagcaagggacaagaggagcagaggacaggtgatggaaatcctgcagctttaggctccattctgccatctac

SEQ ID NO: 637147 - DNA, 120 bp, Artificial Sequence
  ENSG00000180929_2 (sequence is synthesized)
atcccagcgcagggtgaagcctgagagcccaaatggccaactccacagggctgaacgcctcagaagtcgcaggctcgttggggttgatcctggcagctgtcgtggaggtgggggcactgc

SEQ ID NO: 637148 - DNA, 120 bp, Artificial Sequence
  ENSG00000180929_3 (sequence is synthesized)
tgggcaacggcgcgctgctggtcgtggtgctgcgcacgccgggactgcgcgacgcgctctacctggcgcacctgtgcgtcgtggacctgctggcggccgcctccatcatgccgctgggcc

SEQ ID NO: 637149 - DNA, 120 bp, Artificial Sequence
  ENSG00000180929_4 (sequence is synthesized)
ccgcgtgcgcctgggccccgcgccatgccgcgccgctcgcttcctctccgccgctctgctgccggcctgcacgctcggggtggccgcacttggcctggcacgctaccgcctcatcgtgca

SEQ ID NO: 637150 - DNA, 120 bp, Artificial Sequence
  ENSG00000180929_5 (sequence is synthesized)
gcctggcacgctaccgcctcatcgtgcacccgctgcggccaggctcgcggccgccgcctgtgctcgtgctcaccgccgtgtgggccgcggcgggactgctgggcgcgctctccctgctcg

SEQ ID NO: 637151 - DNA, 120 bp, Artificial Sequence
  ENSG00000180929_6 (sequence is synthesized)
cctgctcctgctcgctgctcggtcctggctgggggcctcgggcccttccggccgctctgggccctgctggccttcgcgctgcccgccctcctgctgctcggcgcctacggcggcatcttc

SEQ ID NO: 637152 - DNA, 120 bp, Artificial Sequence
  ENSG00000180929_7 (sequence is synthesized)
gcgcctacggcggcatcttcgtggtggcgcgtcgcgctgccctgaggcccccacggccggcgcgcgggtcccgactccactcggactctctggatagccgcctttccatcttgccgccgc

SEQ ID NO: 637153 - DNA, 120 bp, Artificial Sequence
  ENSG00000180929_8 (sequence is synthesized)
ttatggctgcgcgtgcctggcgcccgcagcgcgggccgcggaagccgaagcggctgtcacctgggtcgcctactcggccttcgcggctcaccccttcctgtacgggctgctgcagcgccc

SEQ ID NO: 637154 - DNA, 120 bp, Artificial Sequence
  ENSG00000180929_9 (sequence is synthesized)
cgtgcgcttggcactgggccgcctctctcgccgtgcactgcctggacctgtgcgggcctgcactccgcaagcctggcacccgcgggcactcttgcaatgcctccagagacccccagaggg

SEQ ID NO: 637155 - DNA, 120 bp, Artificial Sequence
  ENSG00000180929_10 (sequence is synthesized)
ccctgccgtaggcccttctgaggctccagaacagacccccgagttggcaggagggcggagccccgcataccaggggccacctgagagttctctctcctgagcaggagaaaggagggtggt

SEQ ID NO: 637156 - DNA, 120 bp, Artificial Sequence
  ENSG00000180929_11 (sequence is synthesized)
ttccgtgggggctcatccaacccctgcacaggtcacagcaggtgccctgctggatatctgggtctggaacaggaggagaaagggtgtctgctgcctggtgaggcccacggacttctgaga

SEQ ID NO: 637157 - DNA, 120 bp, Artificial Sequence
  ENSG00000180929_12 (sequence is synthesized)
gccaggaatcctgcggtctgggcccaacactgcatagcactgtgcataggccgacccttccttaggcctcagctttcccatctgcaccctgcagcatctctaagggcccctccagcatag

SEQ ID NO: 637158 - DNA, 120 bp, Artificial Sequence
  ENSG00000180929_13 (sequence is synthesized)
gtggtttgtgaaactcacaggtggtccccaggccaagatgggcaggtgtcacaaagaagagggccctaagggctcacaaccaaagtgatccgccaagcagggcagtatctgggttacagc

SEQ ID NO: 637159 - DNA, 120 bp, Artificial Sequence
  ENSG00000180929_14 (sequence is synthesized)
cacagcaggaagaaccactggagagacactcagaaggacttccctgacatctgcaccaaggagagtctggacaaagctactgaaactcctccacctgcttctaaaatgcccagaagacaa

SEQ ID NO: 637160 - DNA, 120 bp, Artificial Sequence
  ENSG00000180929_15 (sequence is synthesized)
ctggaccagtttggtattagaagtaggaggctggacgacttcacccccaaagggtcctgaagccccagaactggcatgtggaaggggctgaggcctaattgaggttggtggattcacaca

SEQ ID NO: 637161 - DNA, 120 bp, Artificial Sequence
  ENSG00000180929_16 (sequence is synthesized)
tgggggtcctccaggacctcagctgcacccattttctggaggttttgctgcccacaacaccagtatttcacaacttcctggtcgctgagaatatttattcaaaaacagggattgaaaaaa

SEQ ID NO: 637162 - DNA, 120 bp, Artificial Sequence
  ENSG00000180934_0 (sequence is synthesized)
catggccacccctgcagcagttacaacactaagagctcgttcttttgcatcctcttcatcagaagcctactcagctcatgattcagcctatggcgtcacccagcaacagctccactgtcc

SEQ ID NO: 637163 - DNA, 120 bp, Artificial Sequence
  ENSG00000180934_1 (sequence is synthesized)
cagtctctgaattcctcctcatctgcttccccaacttccagagttggcagcactggctctccctgcccctcagccttctcttcctcctggccatgggagctaacaccaccctcctgatca

SEQ ID NO: 637164 - DNA, 120 bp, Artificial Sequence
  ENSG00000180934_2 (sequence is synthesized)
ccatccagctggaggcctctctgcaccagcccctgtactacctgctcagcctcctctccctgctggacatcgtgctctgcctcaccgtcatccccaaggtcctggccatcttctggtatg

SEQ ID NO: 637165 - DNA, 120 bp, Artificial Sequence
  ENSG00000180934_3 (sequence is synthesized)
atcttaggtcgatcagcttccctgcctgcttcctccagatgttcatcatgaacagtttcctccccatggagtcctgcacgtttatggtcatggcctatgaccgttatgtggccatctgcc

SEQ ID NO: 637166 - DNA, 120 bp, Artificial Sequence
  ENSG00000180934_4 (sequence is synthesized)
acccactgcggtacccatccatcatcactaatcaatttgtggccaaagctagtgtcttcattgtggtgcggaatgcgcttcttactgcacccattcctatcctcacttccctgctccatt

SEQ ID NO: 637167 - DNA, 120 bp, Artificial Sequence
  ENSG00000180934_5 (sequence is synthesized)
actgtggggaaaatgtcattgagaactgcatctgtgccaacttgtctgtgtccaggctctcctgtgataatttcacccttaacagaatctaccaatttgtggctggttggaccttgctgg

SEQ ID NO: 637168 - DNA, 120 bp, Artificial Sequence
  ENSG00000180934_6 (sequence is synthesized)
gctcagatttattcctcatcttcctctcttacaccttcattctaagagctgtgcttagattcaaagcagagggggcggcagtgaaggccctgagcacatgtggctcccacttcatcctca

SEQ ID NO: 637169 - DNA, 120 bp, Artificial Sequence
  ENSG00000180934_7 (sequence is synthesized)
ttcttttcttcagcaccatactgctggttgtggtgttgacaaacgtggccagaaagaaggtccccatggacatcctgatcctgctgaacgtccttcatcaccttattcctcctgcattga

SEQ ID NO: 637170 - DNA, 120 bp, Artificial Sequence
  ENSG00000180934_8 (sequence is synthesized)
accctattgtgtatggggttcggaccaaagagataaaacagggaattcagaagttactgcagagagggaggtgaatatgtaaagcatttctaatacctcctgttcttcctcttcagtgat

SEQ ID NO: 637171 - DNA, 120 bp, Artificial Sequence
  ENSG00000180934_9 (sequence is synthesized)
tttacctaggcagcgaagtagagaaatgtcagttagtgagtgtttattgcatgcactgaggctcccttcattactgaaccagattccttcctttactttccttgcctagttcaggtggag

SEQ ID NO: 637172 - DNA, 120 bp, Artificial Sequence
  ENSG00000180934_10 (sequence is synthesized)
gtaggcaaggggaagaaactcgtatttattgagtggctgctttgaaccttggcagttacatttaagtaatttaatcttcaacacatctctgcaggcattgttactttcatttcacatagt

SEQ ID NO: 637173 - DNA, 120 bp, Artificial Sequence
  ENSG00000180934_11 (sequence is synthesized)
agaaaaagagatgcttttaggaagggaaatgaccaaagatcacatatgtgggaagcaaaaacaataaaacctaggctctttctacatagttgaaatgcctcatcaattgcaattgaagct

SEQ ID NO: 637174 - DNA, 120 bp, Artificial Sequence
  ENSG00000180934_12 (sequence is synthesized)
caagaccagcctttgctttcctttgacctgtattttgtctttctggatgtcgacaggtattttctgcctattcttacttctttgagaccaaagggacttctcagagaaggcagagtcttg

SEQ ID NO: 637175 - DNA, 120 bp, Artificial Sequence
  ENSG00000180934_13 (sequence is synthesized)
cttgacaaaacttctgctgggcaagaagaaaagaactttataacaatataaagcaatgtcagctttctattctatcctatacagcctcatcaccttagagagagtcttgaaagtgaggat

SEQ ID NO: 637176 - DNA, 120 bp, Artificial Sequence
  ENSG00000180934_14 (sequence is synthesized)
ggatgcagacaggtagaggggaccctaagagagtaggaaacaggaaagctgactaggacattgtgttggccactttccctatatgtttaagctacacattcagtgaactgaatatcaagt

SEQ ID NO: 637177 - DNA, 120 bp, Artificial Sequence
  ENSG00000180934_15 (sequence is synthesized)
cttacttgatctgttgactgcccaagtgctgtagttgaatgtggaaagatatgtcatagtgtcaggtttctggataataatggttccagttaggtgaaaaaaaaccttacactggttatt

SEQ ID NO: 637178 - DNA, 120 bp, Artificial Sequence
  ENSG00000180934_16 (sequence is synthesized)
tacagataatttaatgtaaacaattgtttaagtgggtattggagacaatgatgaaaaaaaggaggttcaagtaacagataaacagtatctatgggaagaaacctccacttggaaagaggt

SEQ ID NO: 637179 - DNA, 120 bp, Artificial Sequence
  ENSG00000180934_17 (sequence is synthesized)
tgggtcattagaacctaaaaggctaggaagtggcccatagaactggatctcagatatctgaggaaggatgctgtccctaattggtacttatgccataggacctcagaggatgtggccctc

SEQ ID NO: 637180 - DNA, 120 bp, Artificial Sequence
  ENSG00000180934_18 (sequence is synthesized)
agagctgggactaaaacctttgaggatgggacactaccttgatggtgctggtatttttgagagagttcaataaggctgggagttaaacaaaaaccaaaaccaatcaaccaaccaaccaat

SEQ ID NO: 637181 - DNA, 120 bp, Artificial Sequence
  ENSG00000180934_19 (sequence is synthesized)
ctggagactagaatcaattccacttccaagataaagagttgctgctaaggaatactgacaagacaggaacagacagaaagagcaagtgtccctctccatgtttcaaccttctaatgtttc

SEQ ID NO: 637182 - DNA, 120 bp, Artificial Sequence
  ENSG00000180934_20 (sequence is synthesized)
tgttgctctctgtaggtagaaactcagagagagacagctggcaaagaagggtttgactcccagtgccagcatgacagagtacagtatggacggcaggcttgggactgagagataagtgtt

SEQ ID NO: 637183 - DNA, 120 bp, Artificial Sequence
  ENSG00000180934_21 (sequence is synthesized)
agtaactggcgcagctccaatcttatgtgggtctgaaagcttgtgactactgaggagcacctataacatcaccctgcagtgcactgttcctaccagggaattagagtcagaatcaagtcc

SEQ ID NO: 637184 - DNA, 120 bp, Artificial Sequence
  ENSG00000180934_22 (sequence is synthesized)
cctagtgcaggtgggtggagaaacatgacatcatgtttagaggcagcattcatagctatgaaggaattgacatgaagctggtaagaggagtaagatcaactgccccacattgtggggatt

SEQ ID NO: 637185 - DNA, 120 bp, Artificial Sequence
  ENSG00000180934_23 (sequence is synthesized)
agataaagtaactgtaacccaatgctggtgtgggctctaggaggagagtttcttccagtcactcaacaacagtaggaaagaaaaattatacccattggcttacaggaaggggctcttagt

SEQ ID NO: 637186 - DNA, 120 bp, Artificial Sequence
  ENSG00000180934_24 (sequence is synthesized)
accttcaggcttggctctcattgtctcaagccagagccacaggttcaactcagtatttgtcatattttaagcacagaattctctaatagaacttctctccatttcacagttgctaagaga

SEQ ID NO: 637187 - DNA, 120 bp, Artificial Sequence
  ENSG00000180934_25 (sequence is synthesized)
gttcatgtgttttgagcacttgcaatataccaatgtctatgaataataatatttaattttcataagagccttctatacgtgatcataaaagtgagtttttaaaaaggaatctaataggat

SEQ ID NO: 637188 - DNA, 120 bp, Artificial Sequence
  ENSG00000180934_26 (sequence is synthesized)
ataattcataggaatataatacatctgtaatcaggtgatattttcaagcatttggtcaactccattcgtctttccaggagtgctttccctgcatctgccatgatttcacccggaagcaag

SEQ ID NO: 637189 - DNA, 120 bp, Artificial Sequence
  ENSG00000180934_27 (sequence is synthesized)
cccagaatgaactcaaagaggagtctatgttatttggccaaaactcagatcttaattcccgaaccagacttctgtagatcaatgcaaatggccaacacaattatgagatgcttgactcaa

SEQ ID NO: 637190 - DNA, 120 bp, Artificial Sequence
  ENSG00000180934_28 (sequence is synthesized)
actgggtgtacatagggatagaaactaccaactttgttgtagggatttgtaaaggatggagggaccaagacagcagtgggacaacagtgatcacccctcacagtaactagcacagctctc

SEQ ID NO: 637191 - DNA, 120 bp, Artificial Sequence
  ENSG00000180934_29 (sequence is synthesized)
acatattgaggggctcagtaaacatttccttacttatgatattgaattggctaaaagaagagttgaaaaatcatgtctatctttaatctctagttccccagtagtagagtcctaaacgta

SEQ ID NO: 637192 - DNA, 120 bp, Artificial Sequence
  ENSG00000180934_30 (sequence is synthesized)
acaaatggataaaccacatacttgaaaagttggctctctgctctggttctaagtatagaggtttagaggaccacagatttctcacaaaattgtcaagctcactgcaagtggtaaaataac

SEQ ID NO: 637193 - DNA, 120 bp, Artificial Sequence
  ENSG00000180934_31 (sequence is synthesized)
tggtctcaagggtcctagataggctttgaagtaaatcctcatacagatgataaaggagcaagataaccaaagaatcagaccatgaagggcagacccaactctgctgtgaagttcccatag

SEQ ID NO: 637194 - DNA, 120 bp, Artificial Sequence
  ENSG00000180934_32 (sequence is synthesized)
caaaatgttaaaacatgtcctctctgtaaaggttttcaagcactgtcttgagtggatataatgaagtagtataaattaaaggcattttaaatggatggggtaccaatgttttgtcagttt

SEQ ID NO: 637195 - DNA, 120 bp, Artificial Sequence
  ENSG00000180934_33 (sequence is synthesized)
ttcaaaactgaggaagtctatgaagatttgctttgctgatacaacctgaatatgttccaactgcattggaagagggtgcattcagaacatgagaagagagacaggagtagctttccaaag

SEQ ID NO: 637196 - DNA, 120 bp, Artificial Sequence
  ENSG00000180934_34 (sequence is synthesized)
gtcactcccctcactccctggtttgcaggttagtcatatttgtgtgaggaacacagcctcttgagcaggaagatctgatatcattgcacattgctattcaataccatagctgacttaaat

SEQ ID NO: 637197 - DNA, 120 bp, Artificial Sequence
  ENSG00000180934_35 (sequence is synthesized)
caaggccagtggaaagaaagaatagcaagtcctctggaattaaggtggaaaaagaagggaccctatgttggtagccaaagctcaaaacaaacacctaagtattgttgagggaacaatact

SEQ ID NO: 637198 - DNA, 120 bp, Artificial Sequence
  ENSG00000180934_36 (sequence is synthesized)
acactttccatttatcacagaaagctttttagtgcctagccatcctgatactttattatgctttggtgtatattctaggcagtgagagttctgagacatcagagaaagtttatagcatca

SEQ ID NO: 637199 - DNA, 120 bp, Artificial Sequence
  ENSG00000180934_37 (sequence is synthesized)
agactgcaactgtagaacttaaacagcaacgtctgaagttaagcaaactcttcatagttggcaagtcaacattgcccctttgtggctatttgtgggaataacggtactgtattgaatgcc

SEQ ID NO: 637200 - DNA, 120 bp, Artificial Sequence
  ENSG00000180934_38 (sequence is synthesized)
agttctcagtctcaggtgtttgaaagagaacgtgacaagtccgtttagaaaactcctgtacttcctgctcatagggcacatagggacttgagtgattaatttaacaaataaaagagacat

SEQ ID NO: 637201 - DNA, 120 bp, Artificial Sequence
  ENSG00000180934_39 (sequence is synthesized)
accaatttataccatgattttcttttcttcagcaacatttaaaagtcaataccaaatcactgacatgagtcaggtattcataagaatagtgaatatccttagtgtttcataacatattac

SEQ ID NO: 637202 - DNA, 120 bp, Artificial Sequence
  ENSG00000180934_40 (sequence is synthesized)
actatcagcatttggctgagtactgtatataataacaacatttctgcacctattcaaccaaaaattagttattgagttctttacgtgtgattagcactctgaacatacaggaaaactaag

SEQ ID NO: 637203 - DNA, 120 bp, Artificial Sequence
  ENSG00000180934_41 (sequence is synthesized)
ttttagagagattatggtcaaaatagcccatgaattataattcccatttttgcagatgaggcaactgagcaaaatgataaattatacatagtcatttaatcaatagggaccagagttaaa

SEQ ID NO: 637204 - DNA, 120 bp, Artificial Sequence
  ENSG00000180934_42 (sequence is synthesized)
attgagaagtaaggcattttgctacataaacccatttttgcttcttcagagtctagggattgaggtatatttttaatctttcactggatagctttgtagtttcctaagtttttcatactc

SEQ ID NO: 637205 - DNA, 120 bp, Artificial Sequence
  ENSG00000180934_43 (sequence is synthesized)
cagattatagatatcaaaggcagagtacactaaaaacccacacgcattgaattagtcaatgcaattaaagttagctactgtaacaatgatagcacagtggcctaacacaataaaatttac

SEQ ID NO: 637206 - DNA, 120 bp, Artificial Sequence
  ENSG00000180934_44 (sequence is synthesized)
ttctcacccacacctcattccaatgcatgagggctttgctccacatcaacatttagggacccatgctttttttattatgtggatcctccatgttctgggctcttagagaccttcactggt

SEQ ID NO: 637207 - DNA, 120 bp, Artificial Sequence
  ENSG00000180934_45 (sequence is synthesized)
gcttctgaatctgggtggcaagccagaaagagaaagaatatgcaggattttgtaagctttagggccccaaactaggagacacatcactttctctatcatttcatcggccagactcctcac

SEQ ID NO: 637208 - DNA, 120 bp, Artificial Sequence
  ENSG00000180934_46 (sequence is synthesized)
atagatccagctgcttgcaaaagagccttgatcataaattttcatttctctttttcctacatagacaataggcttacctccttatcaagggagaccacccaagctctcatctgattactc

SEQ ID NO: 637209 - DNA, 120 bp, Artificial Sequence
  ENSG00000180934_47 (sequence is synthesized)
tatgcagcaaaaaatccaagacctacagatgtgtgtggccttctccatcagatcccattgtgatttctctttcaccagtgatattctgtctctctattaatggcggagcagatgatttcc

SEQ ID NO: 637210 - DNA, 120 bp, Artificial Sequence
  ENSG00000180934_48 (sequence is synthesized)
aactggaaatgaagtgtagaattcagttagcagtaacttaatagtaatgcgagaatgctttaggagcagatattgcaatatttttacttactgagagggggacaagtttcttgactagac

SEQ ID NO: 637211 - DNA, 120 bp, Artificial Sequence
  ENSG00000180934_49 (sequence is synthesized)
attgtttgcgttctctaggaggaactctcctgatcattgttttcaatgtcctgatcattgctttttattgtttttttaatgccatctgcctttgggggtttgtgcctttattaatgttcc

SEQ ID NO: 637212 - DNA, 120 bp, Artificial Sequence
  ENSG00000180934_50 (sequence is synthesized)
aacaatgtgacttcttttggagtgacactgcatttgaacctactttctacttataaaatattagtatcagtactttaaataattttttatttaattattcattttaaaattgatacataa

SEQ ID NO: 637213 - DNA, 74 bp, Artificial Sequence
  ENSG00000180934_51 (sequence is synthesized)
agtgagactttgtgttgggtatattcaatattctttcttctagctatttgaaaatatacaatatattgttgact

SEQ ID NO: 637214 - DNA, 120 bp, Artificial Sequence
  ENSG00000180934_52 (sequence is synthesized)
aaaatatacaatatattgttgactattatcatcctttagttctgtaaaacactagtacttgtttctcctttctaattgtaatttgtgtaggatcaatacattttttaaattctaaagcaa

SEQ ID NO: 637215 - DNA, 120 bp, Artificial Sequence
  ENSG00000180934_53 (sequence is synthesized)
aaactttcttcaaaagtcaagttcatgtttctttggcaataaaccccctcgaaggcctaataggtttttgatctatctgtatcaggtcagttcaatgtgctagtgatcacactcaaagga

SEQ ID NO: 637216 - DNA, 120 bp, Artificial Sequence
  ENSG00000180934_54 (sequence is synthesized)
ttttcttaggcataatttccattacttttcttttctatattgtcttctccctttctccatgccactctttttctacttaatgatgtttattttaaggctgtcagacttgagaaggactgc

SEQ ID NO: 637217 - DNA, 120 bp, Artificial Sequence
  ENSG00000180934_55 (sequence is synthesized)
tatacacatcatctaactttttctcaggctggatttctgtgagtcttctttactcaaagaaattctaaaattttctcttaacttttgacctccaaaatgggcaaaagatggaagcattcc

SEQ ID NO: 637218 - DNA, 120 bp, Artificial Sequence
  ENSG00000180934_56 (sequence is synthesized)
cctccaaaatgggcaaaagatggaagcattcccctataaaactggcacaaggcaaagatgccttctctcaccacttctgttcaacatagtattagaagtcctagccagagcaatcaggca

SEQ ID NO: 637219 - DNA, 120 bp, Artificial Sequence
  ENSG00000180934_57 (sequence is synthesized)
gacatgaagtcaaactgtctctgtttgcagatgacatgattctatatatagaaaaccccacagtctaggcccaaaacctcctccagctgataaacgttagtaaagttgcaggatacaaaa

SEQ ID NO: 637220 - DNA, 120 bp, Artificial Sequence
  ENSG00000180934_58 (sequence is synthesized)
ttaatgtacaaaaatcactagcattcctacataacaacaacagccaaactgagattcaaattagaaaggcaatcccattcacagctgccacacaaaaaataaaataccaaggaatacagc

SEQ ID NO: 637221 - DNA, 120 bp, Artificial Sequence
  ENSG00000180934_59 (sequence is synthesized)
tactcagggaggtgaaagatctctacagtgagaattaccaaacactgctcaaagaaatcagaggagatacaaactaatggacagacatcccgtgctcatggataggaagaatcagtacca

SEQ ID NO: 637222 - DNA, 120 bp, Artificial Sequence
  ENSG00000180934_60 (sequence is synthesized)
ttaaaatcactacactgcccaaaagcaatttacagattcaatgctattccagtcaaactaccaatgacattctttacagaactagaaaaaactattttaaaattcatatgaaaccaaaaa

SEQ ID NO: 637223 - DNA, 120 bp, Artificial Sequence
  ENSG00000180934_61 (sequence is synthesized)
agagcctgaatagccaaagaaattcagttcctagtttaggactgttcaaacatatacttgaaatctgccttgacattctgctatgattatgttaagatcctggtatttgattggaaacaa

SEQ ID NO: 637224 - DNA, 120 bp, Artificial Sequence
  ENSG00000180934_62 (sequence is synthesized)
tgtattttctgcttagcttttgagtttatgcagaattcttgtggtctgtcaagagatgccgttgttagtatgtggtgggggaggagagatacctgagtcaatactcttggaaaaaataaa

SEQ ID NO: 637225 - DNA, 120 bp, Artificial Sequence
  ENSG00000180934_63 (sequence is synthesized)
ccttgatacattttctgaaaaagtcactagagctcttacatttaccaggatgcttataatagaattaagactgtgtcctatttaagaaagaggttgagagactttccttaaacctatgct

SEQ ID NO: 637226 - DNA, 120 bp, Artificial Sequence
  ENSG00000180934_64 (sequence is synthesized)
tatccctggaaaagtaaatgctggtttgcctgtggatagagccaagagagggatcaaggtctcatttttacttgaattcacagagtgactgacgaattgaatactgtgcctaaatgcttt

SEQ ID NO: 637227 - DNA, 120 bp, Artificial Sequence
  ENSG00000180934_65 (sequence is synthesized)
tgagaaaaagccttctgacattcacttttggcttaatgagaacttgaattttaagtttagaagtcaggtttagtatcttagttatgctgttgcctgacatattgtctttttaaattggaa

SEQ ID NO: 637228 - DNA, 120 bp, Artificial Sequence
  ENSG00000180934_66 (sequence is synthesized)
agacaattgggaggcaatttaattatgggggtgggtctttcctgcacccataattctcatgatagtgaatgaatctcataagatctgatggtttaaaaaaactagagtttccctgcacaa

SEQ ID NO: 637229 - DNA, 120 bp, Artificial Sequence
  ENSG00000180934_67 (sequence is synthesized)
agatctgatggtttaaaaaaactagagtttccctgcacaagctcctctcttttcctcccaccacccatgcaagatgtaagttgctccttcttgtcttctgccatgattgtgaggcttccc

SEQ ID NO: 637230 - DNA, 120 bp, Artificial Sequence
  ENSG00000180934_68 (sequence is synthesized)
ttgtaaattgcccagtttcagataagtctttatcagcagcatgagaaaacggactaatacatgatgtatcacatttattgatttgcatgcgttgaaccatttttgcattcctgggataaa

SEQ ID NO: 637231 - DNA, 120 bp, Artificial Sequence
  ENSG00000180938_0 (sequence is synthesized)
ctgtttctgccttccgggtttgagagtttaggaccctgggttggtggggtcagagggagagggggtaccttcctcccggaccgctgggggtgcagggcgccttgggtgtagcacccagaa

SEQ ID NO: 637232 - DNA, 120 bp, Artificial Sequence
  ENSG00000180938_1 (sequence is synthesized)
caggtttctgatctctaacttggctgtgatcattgtgatggagcaagaaaaaaaactgttggtctcagattctaacagctttatggagagggagagtttgaaaagccctttcacaggaga

SEQ ID NO: 637233 - DNA, 120 bp, Artificial Sequence
  ENSG00000180938_2 (sequence is synthesized)
tacaagtatgaataatttggaaactgttcaccacaataattctaaggcagataaacttaaagagaaaccttcagaatggtctaaaagacatagaccacaacattataagcatgaggatgc

SEQ ID NO: 637234 - DNA, 120 bp, Artificial Sequence
  ENSG00000180938_3 (sequence is synthesized)
aaaagaaatgccactgacatgggttcaagatgagatttggtgtcatgattcctatgagagtgatggcaagtcagagaattggggaaattttatagctaaagaggaggaaaaacccaatca

SEQ ID NO: 637235 - DNA, 120 bp, Artificial Sequence
  ENSG00000180938_4 (sequence is synthesized)
ccaggaatgggactcaggagaacataccaatgcctgtgtccagcagaattcatcctttgtagacagaccctataaatgttccgaatgttggaaaagcttcagtaatagttctcatttgcg

SEQ ID NO: 637236 - DNA, 120 bp, Artificial Sequence
  ENSG00000180938_5 (sequence is synthesized)
tactcaccagaggacccactcaggagaaaagccttataaatgctctgagtgtgcaaaatgtttttgtaacagttctcacctgattcagcatctaagaatgcacacaggagagaagcccta

SEQ ID NO: 637237 - DNA, 120 bp, Artificial Sequence
  ENSG00000180938_6 (sequence is synthesized)
ccagtgtggtgaatgtgggaaaagcttcagcaatacctcccatcttattatccatgagagaactcacacgggagagaaaccctacaaatgtcccgagtgtgggaagagattcagcagcag

SEQ ID NO: 637238 - DNA, 120 bp, Artificial Sequence
  ENSG00000180938_7 (sequence is synthesized)
ctctcaccttattcagcatcacagatcacatacaggtgaaaaaccatatgaatgttctgtctgcggaaaaggcttcagtcacagctatgtcctaatagaacatcagaggactcacactgg

SEQ ID NO: 637239 - DNA, 120 bp, Artificial Sequence
  ENSG00000180938_8 (sequence is synthesized)
agaaaaaccttataagtgccctgattgtgggaagagttttagtcagagttccagcctcattcgccaccagcggacacacacaggtgagaagccctacaaatgtcttgagtgtgaaaaaag

SEQ ID NO: 637240 - DNA, 120 bp, Artificial Sequence
  ENSG00000180938_9 (sequence is synthesized)
ctttggttgtaattctactctaataaaacatcagagaatacatacaggagaaaagccttatcaatgtccagaatgtgggaagaattttagtcgtagttcaaaccttattacacaccagaa

SEQ ID NO: 637241 - DNA, 120 bp, Artificial Sequence
  ENSG00000180938_10 (sequence is synthesized)
aatgcacacaggagagaaatcctatgaaagttctgaatatgaggaaagtttgggtcagaactgcaatgtgatagaagaatgcagaatccagttaggagagaaaccatatagatgttgtga

SEQ ID NO: 637242 - DNA, 120 bp, Artificial Sequence
  ENSG00000180938_11 (sequence is synthesized)
atgtgggaagagttttggccttagctcccatctcattagacatcagagaacacatacaggagaaaaaccttacagatgttctgagtgctggaaaactttcagtcagagttccaccctggt

SEQ ID NO: 637243 - DNA, 120 bp, Artificial Sequence
  ENSG00000180938_12 (sequence is synthesized)
gattcaccaaaggacacatacaggagagaaaccttataaatgtcctgattgtggtgaaagcttcagtcagagctttaaccttatcaggcaccggaggacccacataggggaaaaacctta

SEQ ID NO: 637244 - DNA, 120 bp, Artificial Sequence
  ENSG00000180938_13 (sequence is synthesized)
cctacctcagtcagcatcggaaaattcacgtagaaaagccttttgagtctcccgacgttggggattttcctcatgaatggacttggaaaaactgttcaggggaaatgcccttcatctctt

SEQ ID NO: 637245 - DNA, 120 bp, Artificial Sequence
  ENSG00000180938_14 (sequence is synthesized)
cattttccgtctcaaattcatcttcctgagtcccaaagcctggttggtgatggttttttcttccttgttggaccatgacaatttaggtattctgtgattgttgtgctataaagtttcttt

SEQ ID NO: 637246 - DNA, 120 bp, Artificial Sequence
  ENSG00000180938_15 (sequence is synthesized)
gatgtgtttgtcaaaacatttggaaaaagtcaacctcccagtttaaaggatgggaagaccccaatcaccaggttattggatctgtccagtgagagattcatccaccaaggatgaagaaag

SEQ ID NO: 637247 - DNA, 120 bp, Artificial Sequence
  ENSG00000180938_16 (sequence is synthesized)
gaggacttttaaaaatttaaggtaagatagtaatagcttcaaaagaacacatacagagtaatcctgagagtaagcaaaggaaccatgagaaccgaagctagaattgctattgaattactt

SEQ ID NO: 637248 - DNA, 120 bp, Artificial Sequence
  ENSG00000180938_17 (sequence is synthesized)
tattttctcttcccttattgggtagagatacatcattactggcctcaggggtttacccaaagaaagggtatttttgagcaaataatgtgatttcctggctattttgttgggggcttaaga

SEQ ID NO: 637249 - DNA, 120 bp, Artificial Sequence
  ENSG00000180938_18 (sequence is synthesized)
tttttttttttcaaatgcatttttagtcactaaaaattaactgtcgtaccatctagaactatactgtccagtaccatagcctctagccgtatgtagctatttgtattaagattaattgaa

SEQ ID NO: 637250 - DNA, 120 bp, Artificial Sequence
  ENSG00000180938_19 (sequence is synthesized)
attttaaatccagttcctcagtcacactagccactttctaagtgctcagtagctctgtgtgaccagcggctactgtattggatattatagaaggttctttcattcaagatcatcattctt

SEQ ID NO: 637251 - DNA, 120 bp, Artificial Sequence
  ENSG00000180938_20 (sequence is synthesized)
gacagacccataaatatttcctataaagactgtagaagtgtgttctggagggtttgctctccaaaaagaattgtaatatagagtagaattgggatagagtattgaagacactgggtttag

SEQ ID NO: 637252 - DNA, 120 bp, Artificial Sequence
  ENSG00000180938_21 (sequence is synthesized)
acattggatattttaatgattgtgtgttctaattcatgtgctgccaactgagttatctagtgatatgacctcactgtcttgaccaaagccagaatagaaggcaggattcctgaattctat

SEQ ID NO: 637253 - DNA, 120 bp, Artificial Sequence
  ENSG00000180938_22 (sequence is synthesized)
cttaaaatttgcaatgaagagccttttccctaaattatcccattatgtaattcttggtcagctcaagaactgggttctttttctaataattaactcactaaatctgagccagtgtccaag

SEQ ID NO: 637254 - DNA, 120 bp, Artificial Sequence
  ENSG00000180938_23 (sequence is synthesized)
gacagtttgtcattaaggagtactgagacttcttagctttggtactgacagttttcttttgcctcttgacataattggtatatggatctgataactgaggtcccatcttccctactcatt

SEQ ID NO: 637255 - DNA, 120 bp, Artificial Sequence
  ENSG00000180938_24 (sequence is synthesized)
cctatgggaatgatgctttggaaattattagatatatcctattcccttcctcccatttttttcctgctagtgcaaaaggtagatgagtaggaagattaggactcctgagttgcccatgat

SEQ ID NO: 637256 - DNA, 120 bp, Artificial Sequence
  ENSG00000180938_25 (sequence is synthesized)
ttcatctaatttttggattcagaatgtattttatgaataatatgcagagatgcatattaggaatgtgaagccagaatgggtcagttgtagctgctgcaaagttctgtagctgatggtcat

SEQ ID NO: 637257 - DNA, 120 bp, Artificial Sequence
  ENSG00000180938_26 (sequence is synthesized)
ttaattgcatgggggttattttatctttcatgattgtggtgcacctgatgctggcggggtatttgtgtgtttttgtattgttatttgattacaaaaataaagcaaaaactaacaaataaa

SEQ ID NO: 637258 - DNA, 120 bp, Artificial Sequence
  ENSG00000180953_0 (sequence is synthesized)
gtttgttcctaaatctaatcgagctcccaaggaactagtatcttatagaacacacatagaaaatagtgctctacagtagtcactttcacatttttttcttggatccaacttcatgataag

SEQ ID NO: 637259 - DNA, 120 bp, Artificial Sequence
  ENSG00000180953_1 (sequence is synthesized)
aaatacattttaactcataatctattcacatgtatatgaataactgaaacagaagtttcacaaaattatgattatgtttgccacaaatggtgtgctctaatattttccttctgtttcatc

SEQ ID NO: 637260 - DNA, 120 bp, Artificial Sequence
  ENSG00000180953_2 (sequence is synthesized)
agaagaaaaatactggttactatccagctaagctgattttgtgacccattaatgagtttcagttctcactttgaaaacactgttctagaattacagaaaggtctagggatgagaactaac

SEQ ID NO: 637261 - DNA, 120 bp, Artificial Sequence
  ENSG00000180953_3 (sequence is synthesized)
accactgtgcatcacagtgtgtcagtctgtgccaggcagcttataaatattttttgcctctaatttttatacatttatgaggtaagtatcattttctaggtaaggatgctaatctgtctc

SEQ ID NO: 637262 - DNA, 120 bp, Artificial Sequence
  ENSG00000180953_4 (sequence is synthesized)
ctgggtctttatacatcatagcccatgctgttctcactgtattttgctttttccaagtataaccccgttttcacacgaatggccccttcacatatttgaagactaccgtcgtgtccgtgc

SEQ ID NO: 637263 - DNA, 80 bp, Artificial Sequence
  ENSG00000180953_5 (sequence is synthesized)
ggaaaatggctttgtaaagaagcttgagcctaaatctggctggatgacttttctagaagttacaggaaagatctgtgaaa

SEQ ID NO: 637264 - DNA, 120 bp, Artificial Sequence
  ENSG00000180953_6 (sequence is synthesized)
tggatgacttttctagaagttacaggaaagatctgtgaaatgctcttctgtcctgaagcaatactgttgaccagaaaggacactccatattgtgaaaccggcctaatttttctgactctt

SEQ ID NO: 637265 - DNA, 120 bp, Artificial Sequence
  ENSG00000180953_7 (sequence is synthesized)
acgaaaacgattgccaacacatacttctacttttaaataaacaactttgatgatgtaacttgaccttccagagttacagaaattttgtccctatttaatgaataaattgtatgtattttt

SEQ ID NO: 637266 - DNA, 120 bp, Artificial Sequence
  ENSG00000180953_8 (sequence is synthesized)
cccgaatcccggacctgcgctgaggaggcggttcatctgtggccagcggtgcttcgggacccgcgctgggggaaccctggcgacggggcctggccctgctatatgcgggggcctcggctg

SEQ ID NO: 637267 - DNA, 120 bp, Artificial Sequence
  ENSG00000180953_9 (sequence is synthesized)
gagtgagcggcgtggacgcctctttcctccggctcttcccttgttgctgcgagagcgagagggccgcgggcggcggaggcagcggggccgggatggaggacgttaactctaacgtgaacg

SEQ ID NO: 637268 - DNA, 120 bp, Artificial Sequence
  ENSG00000180953_10 (sequence is synthesized)
cccaaaagggctacttgccttctccttccacttacccagacccctgcctcccttacccttctgctaggaacatgtctacaactatataaattcgtgtaattttgacatgatatttgaaaa

SEQ ID NO: 637269 - DNA, 120 bp, Artificial Sequence
  ENSG00000180953_11 (sequence is synthesized)
agacaatttgggcagtaaatagcagaattaagtagtgtcttaatgtaaatggtttgtgttaccacaatacactgttctagccaaagcacattgcatgtgactcctgttgcactagttttt

SEQ ID NO: 637270 - DNA, 120 bp, Artificial Sequence
  ENSG00000180957_0 (sequence is synthesized)
gtgagaggcggtagcggcggcggcggcggtggtatcggcggcagctgtgagggggttccgggaagatggtgctgatcaaggaattccgtgtggttttgccatgttctgttcaggagtatc

SEQ ID NO: 637271 - DNA, 120 bp, Artificial Sequence
  ENSG00000180957_1 (sequence is synthesized)
aggttgggcagctttactctgttgcagaagctagtaagaatgagactggtggtggagaaggaattgaagtcttaaagaatgaaccttatgagaaggatggagaaaagggacagtatacgc

SEQ ID NO: 637272 - DNA, 120 bp, Artificial Sequence
  ENSG00000180957_2 (sequence is synthesized)
acaaaatttatcacctaaagagcaaagtgcctgcattcgtgaggatgattgctcccgagggctccttggtgtttcatgagaaagcctggaatgcgtacccctactgtagaacaattgtaa

SEQ ID NO: 637273 - DNA, 120 bp, Artificial Sequence
  ENSG00000180957_3 (sequence is synthesized)
cgaatgaatatatgaaagatgatttcttcattaaaatcgaaacatggcacaaaccagacttgggaacattagaaaatgtacatggtttagatccaaacacatggaaaactgttgaaattg

SEQ ID NO: 637274 - DNA, 120 bp, Artificial Sequence
  ENSG00000180957_4 (sequence is synthesized)
tccatatagatattgcagatagaagtcaagttgaaccagcagactacaaagctgatgaagacccagcattattccagtcagtcaagaccaagagaggccctttgggacccaactggaaga

SEQ ID NO: 637275 - DNA, 120 bp, Artificial Sequence
  ENSG00000180957_5 (sequence is synthesized)
aggagctggcaaacagccctgactgtccccagatgtgtgcctataagctggtgaccatcaaattcaagtggtggggactgcaaagcaaagtagaaaacttcattcaaaagcaagaaaaac

SEQ ID NO: 637276 - DNA, 120 bp, Artificial Sequence
  ENSG00000180957_6 (sequence is synthesized)
ggatatttacaaacttccatcgccagcttttttgttggattgacaagtggatcgatctcacgatggaagacattaggagaatggaagacgagactcagaaagaactagaaacaatgcgta

SEQ ID NO: 637277 - DNA, 120 bp, Artificial Sequence
  ENSG00000180957_7 (sequence is synthesized)
agaggggttccgttcgaggcacgtcggctgctgatgtctagatgagtcccctgtagggtcagagacaatgtcaaactgtttacgtaatcaaggtcaagtgaggggaacaagcgcagccag

SEQ ID NO: 637278 - DNA, 120 bp, Artificial Sequence
  ENSG00000180957_8 (sequence is synthesized)
tgatgagtgaagaagaatctgaccagtatcttgcagtgttgacgtttcccagatgtgtgcttgtgatgatacacacacatgcacaggttctcaaccacgtgtgtatatatgtatgtgtgc

SEQ ID NO: 637279 - DNA, 120 bp, Artificial Sequence
  ENSG00000180957_9 (sequence is synthesized)
atatgtctgtagctgtatataaagcgcatgtagagctacagatccagatacacacacttgtgtatatatgtacatacagacatactgaagggattagtacaatttctccaaagtactgta

SEQ ID NO: 637280 - DNA, 120 bp, Artificial Sequence
  ENSG00000180957_10 (sequence is synthesized)
cctatcttcagcaagaatgcaaaagaaaatattttcaatatatatacctggaacagattttaataattatcagagtaataccattaatggacaaattgactgcaatgtaatactagctgg

SEQ ID NO: 637281 - DNA, 120 bp, Artificial Sequence
  ENSG00000180957_11 (sequence is synthesized)
tatgtttcataaatgtcaagctgtggaccaacatatatagccttttattatttttctcttcttttaagtcagtctgttataaatttttttttagtcccataagcagtagactcccacaga

SEQ ID NO: 637282 - DNA, 120 bp, Artificial Sequence
  ENSG00000180957_12 (sequence is synthesized)
tctgggatgtaaactctgaatgtatttataactatttatttctggatggtcattatcttgtagccaaatttgacaatataaagtaaggagcaaagttacaggccagtttttacttgtttg

SEQ ID NO: 637283 - DNA, 120 bp, Artificial Sequence
  ENSG00000180957_13 (sequence is synthesized)
ccctgagggaaaaatccttttaaaaaaaatttctggtttttattggatttttgtattttaaatttcaaatatttttctacatcaaacctagcaaaaatggagatgacggtttctgattta

SEQ ID NO: 637284 - DNA, 120 bp, Artificial Sequence
  ENSG00000180957_14 (sequence is synthesized)
taataaatactagacagttttcaggctcctgttagacaaacacattgatgaagaaattagtcttaataggattgtaggctgtgtagaaaagttggaaatatagcacttcatggagtcttg

SEQ ID NO: 637285 - DNA, 120 bp, Artificial Sequence
  ENSG00000180957_15 (sequence is synthesized)
ttttgaagatgacagttttctgtaactacagcttggaaactatgcaaatggtctagattcctcagagctcacatgataggatatagttagtgatgacattttgctcttcttgtgggaaca

SEQ ID NO: 637286 - DNA, 120 bp, Artificial Sequence
  ENSG00000180957_16 (sequence is synthesized)
cacacttcaaggaggagatagtgactttgagataggaacagtttaagatgcagtgtgagtctggcctgcgtgcggtgaggaggccccgccaagagactggtggacatctgactgtgggat

SEQ ID NO: 637287 - DNA, 120 bp, Artificial Sequence
  ENSG00000180957_17 (sequence is synthesized)
gtgctctcaagtaggacgtcatcaggacagattctgaataggcatcatgagagtgctggtcagaaacggctgccactttttttaatttaattttattttttatttaaaggaaggaacaat

SEQ ID NO: 637288 - DNA, 120 bp, Artificial Sequence
  ENSG00000180957_18 (sequence is synthesized)
agctaggtaagatttttatcagctttctctgtctgaatccagtttttcctctgtcagtcctggaagcttgaatagaattatattgttgaagccttcaggtcacaaactgtcttttgtaac

SEQ ID NO: 637289 - DNA, 120 bp, Artificial Sequence
  ENSG00000180957_19 (sequence is synthesized)
ctcctgtccctcctaaaacacgccaacccctgcagtcaaatcacattagtaatctgatttgctgacagtcctgccctgcctgctcctcgttttcccacatgtcctgcatccctcccccac

SEQ ID NO: 637290 - DNA, 120 bp, Artificial Sequence
  ENSG00000180957_20 (sequence is synthesized)
tggagtgatttcagtgaatcagacaaggaaggatgtgtaggatcactactgcattgcaataccctgttatcctcagcaacaaaacccacatttcatacatcctttgtgtactcaggataa

SEQ ID NO: 637291 - DNA, 120 bp, Artificial Sequence
  ENSG00000180957_21 (sequence is synthesized)
agactgatgtttactctctgggcactgttgtaagataggttttgtcagagcataatcattgtctgcaaagtgtttggtgcgaggaagattattgctaattttgtgaaataaagagtctag

SEQ ID NO: 637292 - DNA, 120 bp, Artificial Sequence
  ENSG00000180957_22 (sequence is synthesized)
ccctctccttttaatgaacttaactctcgctggcatctgtagtatcattgggagcttaggcgcacatggaaatgagagcccggcgcatggattttaatgtttttctaacaactgtggaga

SEQ ID NO: 637293 - DNA, 120 bp, Artificial Sequence
  ENSG00000180957_23 (sequence is synthesized)
tttgagggaatgtgtggtgaatgtaaaatacctagtttacttgccagtctcttgtgtaaattacagtaaaacaaagtaaatgaaatttaaacaaaaaataaatttgatcacaaaatgcca

SEQ ID NO: 637294 - DNA, 120 bp, Artificial Sequence
  ENSG00000180957_24 (sequence is synthesized)
ccgggaagatggtgctgatcaaggaattgtgagtgggtctgtgggcgcgagcgaggccgtgggacggcagtgatgggagatttgttgatggagaagtgccgtgtggttttgccatgttct

SEQ ID NO: 637295 - DNA, 120 bp, Artificial Sequence
  ENSG00000180957_25 (sequence is synthesized)
acctaaagaggtaagcggtgttcacatttgacgccttgtaactacctggcttacttatgatgcatgtaactagctaacttaactagtagatgtgaagtacatttttaatttcagtttgat

SEQ ID NO: 637296 - DNA, 120 bp, Artificial Sequence
  ENSG00000180957_26 (sequence is synthesized)
taaattagaaaaggattatatctgcttataacaaaaattcagataaaaacttagtccctgctccttgccatcaaatatttgtaacacagagagaaacactagaagcagcttagagtttat

SEQ ID NO: 637297 - DNA, 120 bp, Artificial Sequence
  ENSG00000180957_27 (sequence is synthesized)
ctttctagatcattttctgtatatattcaaaggaatttttaaaacatagcgatgtattacttgtatcaattttagttttctacaacaaatggaccatatgaatggttttgcagtttgctt

SEQ ID NO: 637298 - DNA, 120 bp, Artificial Sequence
  ENSG00000180957_28 (sequence is synthesized)
tatttctgatgaacatcttccatattgttatttaatatctgtgtgattctttttaaagctaagtaaaatttcttctggacatagtatagtttacttaaccattccctacgttgtaagtcc

SEQ ID NO: 637299 - DNA, 120 bp, Artificial Sequence
  ENSG00000180957_29 (sequence is synthesized)
tcctgtgtcccaccaaccagccgccacactctaccacatgttcccagtgttcatgggccctttccacccttgtctcaaaatctccctattgattttattttgcttttgttactcccttca

SEQ ID NO: 637300 - DNA, 120 bp, Artificial Sequence
  ENSG00000180957_30 (sequence is synthesized)
atttaaaatgtaaaaaattatgtgttcatttctactggattactttaggattgaaataaactagttcatcagacttagaacctggtcacctttgattgccatactctttcaagcagttgg

SEQ ID NO: 637301 - DNA, 120 bp, Artificial Sequence
  ENSG00000180957_31 (sequence is synthesized)
tgtgcctcaccacatccacagtgggagtgcggtaatggtgttatgagaacccttatgtattaaagacactattggtttgatgtgaatagaatttggtatttaatatgaaatctgaatagt

SEQ ID NO: 637302 - DNA, 120 bp, Artificial Sequence
  ENSG00000180957_32 (sequence is synthesized)
gttatttgaggcagagcaacatacctattaaactttagagctaggaagtaacttggtctgtggaaggagggtttacagcaggggaatactgcggcttttgctaaaatgatttcaaatttt

SEQ ID NO: 637303 - DNA, 120 bp, Artificial Sequence
  ENSG00000180957_33 (sequence is synthesized)
actgtattcatagcatagcacttccccaccaccccaaattctccctgctttctttccaagtgagttgtctcctctagactgtgagcttcttgagaacagggactgtgtctgcttctagat

SEQ ID NO: 637304 - DNA, 120 bp, Artificial Sequence
  ENSG00000180957_34 (sequence is synthesized)
gcatccccactgcctagaaccgtgtctgacacagagcaagccagcgacctccgggctgcggctttgaggcccacggcgctttcggtgtaactgcgcgaaccaactcctgaacagcccgct

SEQ ID NO: 637305 - DNA, 120 bp, Artificial Sequence
  ENSG00000180957_35 (sequence is synthesized)
ttttacagttaaaaattattttctactatcacatttgggattaagttaaaaaaattatttcctttctttcttgtatggcctacatttctatgccgaagtgagcttggagtgaagtctagt

SEQ ID NO: 637306 - DNA, 120 bp, Artificial Sequence
  ENSG00000180957_36 (sequence is synthesized)
acgtctgtgcagcaaagagaccagagtaagagagaaggcgatttgttttctgtgtagattttggctttgtgcaagtgatccctttaagaaatcccagtatacctgggaaatgtaggttgt

SEQ ID NO: 637307 - DNA, 120 bp, Artificial Sequence
  ENSG00000180957_37 (sequence is synthesized)
tttcattgaaaaacaaaaaacacattgtttacaaaataattctccctccagctaggtcccttttacttttcaaatgtgattaagaaagcaaaaatttaatttgcatacaagtatttagta

SEQ ID NO: 637308 - DNA, 120 bp, Artificial Sequence
  ENSG00000180964_0 (sequence is synthesized)
acgtgaccaggagtcgacgtgtgcagaagtccttatagtccagggcctgtttccctgtagcagctccttattgctggagaaggagaaaagtgcccaagatcctttcaggattaatttatt

SEQ ID NO: 637309 - DNA, 120 bp, Artificial Sequence
  ENSG00000180964_1 (sequence is synthesized)
caaaaaggaaataaaaaatactcaatatgcaaaagtcttgtgaagaaaatgagggaaaaccacagaacatgccaaaggccgaggaagatcgccctttggaggatgtaccacaggaggcag

SEQ ID NO: 637310 - DNA, 120 bp, Artificial Sequence
  ENSG00000180964_2 (sequence is synthesized)
aaggaaatcctcaaccttccgaagaaggcgtaagccaggaagcagaaggaaaccccagaggagggccgaatcagcctggccagggatttaaagaggacacacccgttaggcatttggacc

SEQ ID NO: 637311 - DNA, 120 bp, Artificial Sequence
  ENSG00000180964_3 (sequence is synthesized)
ctgaagaaatgataagaggagtagatgagcttgaaaggcttagggaagagataagaagagtaagaaacaagtttgtgatgatgcattggaagcaaagacattcacgcagccgtccttatc

SEQ ID NO: 637312 - DNA, 120 bp, Artificial Sequence
  ENSG00000180964_4 (sequence is synthesized)
ccagctttctttctgttagcattttctgatgtatctttgacctccattttacttttaatcatctgatgaaattttgttttaggtaatttccttggtaccagcatctcattggattttgga

SEQ ID NO: 637313 - DNA, 120 bp, Artificial Sequence
  ENSG00000180964_5 (sequence is synthesized)
ttttgacccattttccaggtctatttttcaattggaaactttcacacatttgcatgggaatatgttcattccatgttgtaaagtaaaacataacaggttatggcaaagcagcatatttaa

SEQ ID NO: 637314 - DNA, 120 bp, Artificial Sequence
  ENSG00000180964_6 (sequence is synthesized)
tatcagctcacatatgtaggataaaattccaaactttgtgtgtgtgcgtgtgtgtatacatacatccatataacatatatcacaaacttaaccaagcttatttctgtgtggtgtgaaatt

SEQ ID NO: 637315 - DNA, 120 bp, Artificial Sequence
  ENSG00000180964_7 (sequence is synthesized)
ttatttgttttcttctttttgttctttttgcttatatgtactttttaatgaacacgtgtctcacacacaaaaagaattaaggattttttttacaagtaagagtcaaataatttgcaacca

SEQ ID NO: 637316 - DNA, 120 bp, Artificial Sequence
  ENSG00000180964_8 (sequence is synthesized)
gcttatgagggcaatgggggcacctaaactcttgatgaaagaactttaaaaagaaatgtaaacctcaaattacctctggatctcttagccagaggaataaactggcaattattacagata

SEQ ID NO: 637317 - DNA, 120 bp, Artificial Sequence
  ENSG00000180964_9 (sequence is synthesized)
ccttatagtccagggcctgtttccctgtagcagctccttattgctggagaaggagaaaagtgcccaagatcctttcaggatatttggttttttgggcgcgacacaaatcgaggtgaggga

SEQ ID NO: 637318 - DNA, 120 bp, Artificial Sequence
  ENSG00000180974_0 (sequence is synthesized)
ttcagtgacacttgctgggagaatgccttctatcaatgacacccacttctatccccccttcttcctcctgctaggaataccaggactggacactttacatatctggatttctttcccatt

SEQ ID NO: 637319 - DNA, 120 bp, Artificial Sequence
  ENSG00000180974_1 (sequence is synthesized)
ctgtattgtgtacctgattgccattgtggggaatatgaccattctctttgtgatcaaaactgaacatagtctacaccagcccatgttctacttcctggccatgttgtctatgattgatct

SEQ ID NO: 637320 - DNA, 120 bp, Artificial Sequence
  ENSG00000180974_2 (sequence is synthesized)
gggtctgtccacatccactatccccaaaatgctaggaatcttctggttcaacctccaagagatcagctttgggggatgccttcttcagatgttctttattcacatgtttacaggcatgga

SEQ ID NO: 637321 - DNA, 120 bp, Artificial Sequence
  ENSG00000180974_3 (sequence is synthesized)
gactgttctgttggtggtcatggcttatgaccgctttgttgccatctgcaaccctctccagtacaccatgatcctcaccaataaaaccatcagtatcctagcttctgtggttgttggaag

SEQ ID NO: 637322 - DNA, 120 bp, Artificial Sequence
  ENSG00000180974_4 (sequence is synthesized)
gtacctcacacatactgtgagcacaggggtctggccgggttggcctgtgcacccattaagatcaacataatctatgggctcatggtgatttcttatattattgtggatgtgatcttaatt

SEQ ID NO: 637323 - DNA, 120 bp, Artificial Sequence
  ENSG00000180974_5 (sequence is synthesized)
gcctcttcctatgtgcttatccttagagctgtttttcgccttccctctcaagatgtccgactaaaggccttcaatacctgtggttctcatgtctgtgttatgctgtgcttttacacacca

SEQ ID NO: 637324 - DNA, 120 bp, Artificial Sequence
  ENSG00000180974_6 (sequence is synthesized)
gcatttttttcttttatgacacatcgttttggccaaaacattccccactatatccatattcttttggctaacctgtatgtggttgtcccacctgcccttaaccctgtcatttatggagtc

SEQ ID NO: 637325 - DNA, 120 bp, Artificial Sequence
  ENSG00000180974_7 (sequence is synthesized)
aggaccaagcagatccgagagcaaattgtgaaaatatttgtacagaaagaataattctgtattaaagtttggataaatatatctatatacaacccaaattatcatcatctgagctccctt

SEQ ID NO: 637326 - DNA, 120 bp, Artificial Sequence
  ENSG00000180974_8 (sequence is synthesized)
ggggaacctaatcacggtctttaagaacctggactcatgctccaattctgctccaagtgagggctgggagaagaaatattacagaggaacttgacaagagaggaccttaaagaaagtgag

SEQ ID NO: 637327 - DNA, 120 bp, Artificial Sequence
  ENSG00000180974_9 (sequence is synthesized)
attttttccttttgactggaagtgctttagtgttgacagataatgcaaacttaaaacctttgctgcctgtttcccctacttctctccaagtacctggacaaaggttagagattaatggag

SEQ ID NO: 637328 - DNA, 120 bp, Artificial Sequence
  ENSG00000180974_10 (sequence is synthesized)
aaggtaactatgctgaaggttgaggtggctttggagtagaactgcttgtaaacaagggtgataggtagctccatttttttccatatgtcttctctctaggtaagtttagatcctgaagga

SEQ ID NO: 637329 - DNA, 120 bp, Artificial Sequence
  ENSG00000180974_11 (sequence is synthesized)
tcatagctttgtattctttacagaatccaaaattttgttgttcttctccaaaatctttgactcccatgtttattttaatgctctctcagtcttgctgttactgccatttttgctcctttc

SEQ ID NO: 637330 - DNA, 120 bp, Artificial Sequence
  ENSG00000180974_12 (sequence is synthesized)
cttctttcagattcctgctctctctctttttgtgatggttaatactgagtgtcaactttatttgactgaaggatacaaagtattgatcctggttttgtctgtgagggtgttgccaaaaga

SEQ ID NO: 637331 - DNA, 120 bp, Artificial Sequence
  ENSG00000180974_13 (sequence is synthesized)
agatgggcctagcctcccaggctacatccttctcctgtgctggatgcttcctcctcgaacgtcggactccaagttcctcagttttgggactcagagtggctctccttgatcttcagcttg

SEQ ID NO: 637332 - DNA, 77 bp, Artificial Sequence
  ENSG00000180974_14 (sequence is synthesized)
cttgtgatcatgtgagttaatacttaattccccctttgtgtgtgtgtgtacctattagttcagtccctctagagaac

SEQ ID NO: 637333 - DNA, 120 bp, Artificial Sequence
  ENSG00000180974_15 (sequence is synthesized)
gttcagtccctctagagaacactgactaatacacttttcttttacattcgttctctgataaagtaagtctttgtgaatttagggatatgagagactacagtgtgggtattacggagacat

SEQ ID NO: 637334 - DNA, 120 bp, Artificial Sequence
  ENSG00000180974_16 (sequence is synthesized)
gttttctcacttgaagcaaagtcattttagatgtgactacttgtatgtgtcgcctgtctaattctaattctcaattctatctgacaatttcccttcagacaaaatatataaaacttatga

SEQ ID NO: 637335 - DNA, 120 bp, Artificial Sequence
  ENSG00000180974_17 (sequence is synthesized)
gactttataaaacttagaaaaacaattaggctcaagctatggtaagcacagggccagacttgatatcgacttcaaaataatatcattataatttattaatcctgtagatctccaatattt

SEQ ID NO: 637336 - DNA, 120 bp, Artificial Sequence
  ENSG00000180974_18 (sequence is synthesized)
agtcctattttcaaacttcagatatggctggagaatgtggtttgctttaaaatagataaaagagacattgaactgaaatttgtgacttatcagggtactcatgcttcaaaatcagaagaa

SEQ ID NO: 637337 - DNA, 120 bp, Artificial Sequence
  ENSG00000180974_19 (sequence is synthesized)
gtctccctcatgttctataatttagaaccactgtgtagtttgtatgacaatatacaaaatactcaaaagtacgcagataacgattttaggaaatgggggcggatatagccaagtagacaa

SEQ ID NO: 637338 - DNA, 120 bp, Artificial Sequence
  ENSG00000180974_20 (sequence is synthesized)
gaaaagcaacatcacctattcagtatctgtgaatctggacagttcttggtcttaacactggctaagcacaattcctgaattctatagtattttgtagattttctttaggtctgtatgcat

SEQ ID NO: 637339 - DNA, 120 bp, Artificial Sequence
  ENSG00000180974_21 (sequence is synthesized)
gggttctaatttgatttttgcagcttctgcttcatgtacttaacattttatgggaacatagggttttaaatgtggaaatacattgaaacttgatctattccctttgtcttacaaataaaa

SEQ ID NO: 637340 - DNA, 120 bp, Artificial Sequence
  ENSG00000180979_0 (sequence is synthesized)
gatgacgtcacagggcgttcccgcccgggactaagccggggagcgcatcccggctactgcgggtcctgggtcttcacctgcggagccttacggcagctgagcggtgggaggcgagtccgg

SEQ ID NO: 637341 - DNA, 120 bp, Artificial Sequence
  ENSG00000180979_1 (sequence is synthesized)
ggctccctgatcttccgtaggctcccagaggcgcctggcctccgcagagctgcaaaggcggcagggcttggtggtcgggctgtgtgttcttccgtttcttccttgtcgctcttgggtcgg

SEQ ID NO: 637342 - DNA, 120 bp, Artificial Sequence
  ENSG00000180979_2 (sequence is synthesized)
gccccaggagccagggatcggcgggagttgagagctggggcaggagccccagccgggaggccgaccgggtggactgggcggtgacagcagcgcttccttcccgcagggacctgagccgcg

SEQ ID NO: 637343 - DNA, 120 bp, Artificial Sequence
  ENSG00000180979_3 (sequence is synthesized)
gcgctaggatgggaaacagtgcgctccgcgctcatgtggaaacggcgcagaaaactggtgtctttcagcttaaggaccgagggctgaccgagttccccgcagacttgcagaagctgacga

SEQ ID NO: 637344 - DNA, 120 bp, Artificial Sequence
  ENSG00000180979_4 (sequence is synthesized)
gcaatctcaggaccatcgacttgtccaacaacaagatcgaaagcctaccgcctttgctgataggaaagttcactctgctgaagagcctctccctgaacaacaacaaactgactgttctgc

SEQ ID NO: 637345 - DNA, 120 bp, Artificial Sequence
  ENSG00000180979_5 (sequence is synthesized)
ctgatgagatatgcaatctgaaaaaactagagacgctaagcctaaacaacaatcaccttagagagctgccgtctacctttgggcaactctctgccctcaagaccctgagcctctctggga

SEQ ID NO: 637346 - DNA, 120 bp, Artificial Sequence
  ENSG00000180979_6 (sequence is synthesized)
accaactgggagcattacctccccaactttgtagcctacggcacctggatgtgatggatctctctaagaaccagattcgaagtatacctgactcagtgggagagctgcaagtcatcgaac

SEQ ID NO: 637347 - DNA, 120 bp, Artificial Sequence
  ENSG00000180979_7 (sequence is synthesized)
tcaacctcaaccagaatcagatatctcagatctcagtgaagatatcttgctgtccacgccttaaaattcttcgcctggaagagaattgtcttgagctcagcatgcttccccagagcatcc

SEQ ID NO: 637348 - DNA, 120 bp, Artificial Sequence
  ENSG00000180979_8 (sequence is synthesized)
tcagtgattcccagatctgtctgcttgctgtggaaggcaatctttttgaaataaagaaacttcgagaactggaaggctatgataagtacatggagaggttcacagccaccaagaagaagt

SEQ ID NO: 637349 - DNA, 120 bp, Artificial Sequence
  ENSG00000180979_9 (sequence is synthesized)
ttgcgtgaagttctccaggactatggaaaccttacaggatactgacttagaacctctgttggaatgtggctgagtcaaagcctcctgttgttgttaggggtatctacagtaaggagatga

SEQ ID NO: 637350 - DNA, 120 bp, Artificial Sequence
  ENSG00000180979_10 (sequence is synthesized)
tacttcaggagattatatttcactcaatgatcttttctcatttcagggctcttctcaaataagctaaaagaaaaaggatcaggagacaggaaaagtcttccgttttgagtcatgagtagg

SEQ ID NO: 637351 - DNA, 120 bp, Artificial Sequence
  ENSG00000180979_11 (sequence is synthesized)
gcaatagacaaggttctcttcaaaaccatcattagtttggctttaagaaaccagtagctagctgctatttatatggtgagggggtgctgcctggtaacagaatagctccacaccacagct

SEQ ID NO: 637352 - DNA, 120 bp, Artificial Sequence
  ENSG00000180979_12 (sequence is synthesized)
tgagattttgtttagtttcactgtgtgagctttcataaagtctgttgccattccatctctgtgttaacacttcatatttttatgaaattcagataatttgtgagaggctggcatggatct

SEQ ID NO: 637353 - DNA, 120 bp, Artificial Sequence
  ENSG00000180979_13 (sequence is synthesized)
aaggatttattatttttattctagtccatcagttcagtcgcagtttttatactaggactttaggatgtacataaatgtgtgactgtttgtcttgattaaaagtgcactttggcctgggca

SEQ ID NO: 637354 - DNA, 88 bp, Artificial Sequence
  ENSG00000180979_14 (sequence is synthesized)
gggtgacagagtgagactctgtctcaaattaaaaaaataaaaaataattttttttttttaaagtacgctttgttggctgggcacggcg

SEQ ID NO: 637355 - DNA, 68 bp, Artificial Sequence
  ENSG00000180979_15 (sequence is synthesized)
gactctgggcaacagagcaagactctgtctcgggggaaacaaaaaaaaagtgtgctttgtcaagagaa

SEQ ID NO: 637356 - DNA, 120 bp, Artificial Sequence
  ENSG00000180979_16 (sequence is synthesized)
ctcgggggaaacaaaaaaaaagtgtgctttgtcaagagaagcaccagcagacctctaagaactgctctctaaggctgcggtagcaaattatctactattgcaggtgccttattggtagag

SEQ ID NO: 637357 - DNA, 120 bp, Artificial Sequence
  ENSG00000180979_17 (sequence is synthesized)
ggctctgaagagccaaaactgtatatgcaacacttgtaagataaaagggactttaataatcaagattttcttgaagatttgttagaaataatgtcttatttctggtaacctttccctttt

SEQ ID NO: 637358 - DNA, 120 bp, Artificial Sequence
  ENSG00000180979_18 (sequence is synthesized)
tgtatttataactctactaaccaaattacctatcaataaaccattactataatattttaaaacaacctatgtttatcaagcttactctctgagtgacagaatatactaaataaagaattt

SEQ ID NO: 637359 - DNA, 120 bp, Artificial Sequence
  ENSG00000180979_19 (sequence is synthesized)
tttaatgaactttggctggaagcaaggttaatcctttaaaggaggaggacaggagaacttaaacctataaatagattaggaagacatgtttcatgcttatgttcagattgtatgagtagt

SEQ ID NO: 637360 - DNA, 120 bp, Artificial Sequence
  ENSG00000180979_20 (sequence is synthesized)
tttcatgcttatgttcagattgtatgagtagtgaaatgccttcatgtgacataaacattttgtgatactagaactatgcttattaagagaatctgaggttgggcgcggtggctcacgcct

SEQ ID NO: 637361 - DNA, 84 bp, Artificial Sequence
  ENSG00000180979_21 (sequence is synthesized)
cttgcagtgagggtgccattgaactccagcctgggcaatagagtgagactgcgtctcaaaaaaaaaaaaaaaggccgggcgcgg

SEQ ID NO: 637362 - DNA, 120 bp, Artificial Sequence
  ENSG00000180979_22 (sequence is synthesized)
ctccatctcaaaaaaaaaaaaaaaagaatctgaaggtacaaaggtagaggatttcagactaccactaacatcaacatttagaaagctaccattttggtcattttctgattttatcttagt

SEQ ID NO: 637363 - DNA, 120 bp, Artificial Sequence
  ENSG00000180979_23 (sequence is synthesized)
gtcattttctgattttatcttagtcacaaagctattactaactatatatcaacagttctcaataatggttaaacctagcttatccattaagtcaagagatcacacaaacctactatttaa

SEQ ID NO: 637364 - DNA, 120 bp, Artificial Sequence
  ENSG00000180979_24 (sequence is synthesized)
ctttctgacgtaaatctggtctaggtgttctctttttcccatatgttactttcttttttgagacagaatttcattccagactggagcgcagtagcactatcttggctcactgcaacctcc

SEQ ID NO: 637365 - DNA, 120 bp, Artificial Sequence
  ENSG00000180979_25 (sequence is synthesized)
agtgctgggattacaggtgggagccaacacacccagcctcccatatgtcattttctatttctcactttgaaaggggtactagtttatccataccagtttaggagttttgttttttctaaa

SEQ ID NO: 637366 - DNA, 120 bp, Artificial Sequence
  ENSG00000180979_26 (sequence is synthesized)
agtttatccataccagtttaggagttttgttttttctaaattttaatgtttattaatcttattgatctactgaacaattaacatttctgtgttttatcagtacttctcatctaataaatc

SEQ ID NO: 637367 - DNA, 82 bp, Artificial Sequence
  ENSG00000180979_27 (sequence is synthesized)
cttatacatttaacaatttaaatgttcccatttaattattaattggagtttaatccacactcttatcagaatccacaactac

SEQ ID NO: 637368 - DNA, 120 bp, Artificial Sequence
  ENSG00000180979_28 (sequence is synthesized)
ttggagtttaatccacactcttatcagaatccacaactaccacccttcacaatttgggcctagacttattgccctttcttcactctcatttgcctgcccacccatatcagattattctct

SEQ ID NO: 637369 - DNA, 120 bp, Artificial Sequence
  ENSG00000180979_29 (sequence is synthesized)
ctaaacccacagtgcagtcttttctgacctcctttatacagcttgtccctcagtgtccatggaggattggtttcaatacctccatggataccaagtccatgatgctcaagtcccttatac

SEQ ID NO: 637370 - DNA, 120 bp, Artificial Sequence
  ENSG00000180979_30 (sequence is synthesized)
ctctagattacttataatacctaatatgcctacacataacttcatttgcatagattcaacatagtatttgatgcatgctaaattaaggttttgttttttagaaatttgaggcattttccc

SEQ ID NO: 637371 - DNA, 120 bp, Artificial Sequence
  ENSG00000180979_31 (sequence is synthesized)
aaggttttgttttttagaaatttgaggcattttcccgctcaaatatttctgacctgcagttgaatccacagatgtggaacccatggatacttagggccaactgtattgttcactcagttg

SEQ ID NO: 637372 - DNA, 90 bp, Artificial Sequence
  ENSG00000180979_32 (sequence is synthesized)
ccatggatacttagggccaactgtattgttcactcagttgggaatgccctttttttttttttttttggtccagaggctcactcttgccca

SEQ ID NO: 637373 - DNA, 120 bp, Artificial Sequence
  ENSG00000180979_33 (sequence is synthesized)
tgccttggcctcccaaaatgctgggaattgcaggcgtgagctaacgtgcccagcctgccctctcttaattaatatgctcattctgtatgtctaagcctctttcctgcgtctaagccgaat

SEQ ID NO: 637374 - DNA, 120 bp, Artificial Sequence
  ENSG00000180979_34 (sequence is synthesized)
tctaagccgaattaactgctcacccatctgttactatagcacttctcacattctatatttatctttcatgatagactaactctttgagggcaagggctatatacagtaatatgcccaaag

SEQ ID NO: 637375 - DNA, 120 bp, Artificial Sequence
  ENSG00000180979_35 (sequence is synthesized)
ttacagcaaacaagatttagatttaaatatgagctaatcaagtaaactagcttgtggtctaaagacccagatttgaatctggccactagtccaagtcacctaattttttttttctttttt

SEQ ID NO: 637376 - DNA, 86 bp, Artificial Sequence
  ENSG00000180979_36 (sequence is synthesized)
ggccactagtccaagtcacctaattttttttttctttttttgcgacagatcttgctgtgttgcctgggctagtcttaaactggaat

SEQ ID NO: 637377 - DNA, 87 bp, Artificial Sequence
  ENSG00000180979_37 (sequence is synthesized)
ttttttttttttttgagacagaggctgtctgtttcgcccaggttggaacacttcctgagttctagcaattctcctgcctcagcctcc

SEQ ID NO: 637378 - DNA, 90 bp, Artificial Sequence
  ENSG00000180979_38 (sequence is synthesized)
atggggtttcactatgttagccaggcttatctcagactcctggcctcaggtgatccccctgccttggcttcccatagtgctgggattaca

SEQ ID NO: 637379 - DNA, 84 bp, Artificial Sequence
  ENSG00000180979_39 (sequence is synthesized)
actatgttagccaggcttatctcagactcctggcctcaggtgatccccctgccttggcttcccatcctatatgtattttttgag

SEQ ID NO: 637380 - DNA, 120 bp, Artificial Sequence
  ENSG00000180979_40 (sequence is synthesized)
atgatcacagctcacaaatgccttgatctcctgggctcaagctatctcctcccacctcagcctcttaagtagctggagctacaggttatctgccaccacactcagctaatttttaatttt

SEQ ID NO: 637381 - DNA, 120 bp, Artificial Sequence
  ENSG00000180979_41 (sequence is synthesized)
cacactcagctaatttttaattttttagaaagacggggtcttcctgtgttccccaggctggccccaaactcctgggctcaagcaatcctgccttacctcccaaagtgctgggattacagg

SEQ ID NO: 637382 - DNA, 120 bp, Artificial Sequence
  ENSG00000180979_42 (sequence is synthesized)
gtcacccaaattttttacagcttggtttggaaggcaatgtagtatattaaaattatgggccctggagtcagaaagatccaggtttgaatacagagtccgtcatttattagctttatgaat

SEQ ID NO: 637383 - DNA, 120 bp, Artificial Sequence
  ENSG00000180979_43 (sequence is synthesized)
ttgagcaatttcgtctcacttgtaaatatagggaatagctcctacctctcaggtatgttgcaaaaaactatataaaagcacttagcatagtggccatgacagagtaagcactcagtaaat

SEQ ID NO: 637384 - DNA, 120 bp, Artificial Sequence
  ENSG00000180979_44 (sequence is synthesized)
catgccatttatctcatctataaggcatgaaagtagaattttacaagttgtacagaaatagaaggcttggagtggacactacattaaaaggataaaaaaatggagccaggcagaggcagg

SEQ ID NO: 637385 - DNA, 120 bp, Artificial Sequence
  ENSG00000180979_45 (sequence is synthesized)
catctatagtcccagctattgaggaggcctgaggctggaggatcccttgaacctaggagtttgaggccagcctggacaacaatgtgagattgtggctccaaaaaaataataaaaaatagg

SEQ ID NO: 637386 - DNA, 120 bp, Artificial Sequence
  ENSG00000180979_46 (sequence is synthesized)
gtagccattcttttattcctttacttttttaataaacttgcttttactttatggaaaaaataaatttttaaatgactagatgagaaacttgaatatcaatctgagaaataaaatctgatt

SEQ ID NO: 637387 - DNA, 120 bp, Artificial Sequence
  ENSG00000180979_47 (sequence is synthesized)
gaaataaaatctgattaggaatgtaattgggataacctgaagttttggtaagagtgacctaaagaaaacagcacttagataagctactttgttttcctttttcactttactatttttctg

SEQ ID NO: 637388 - DNA, 120 bp, Artificial Sequence
  ENSG00000180979_48 (sequence is synthesized)
atatatatttgttcatatttatggggtacttgtgatattctgagacatgcatagaatgtataatgatcaagtcaggatatttatgttattcattatctcaaacatttatcatttgtttgt

SEQ ID NO: 637389 - DNA, 120 bp, Artificial Sequence
  ENSG00000180979_49 (sequence is synthesized)
gttgggaacatttcaaatcttctagccattttgaaacttacattaagtatagtcaccgtactatgctatcaagcattaaaacttattccttctatctaactgtatgtttgtatctaccca

SEQ ID NO: 637390 - DNA, 120 bp, Artificial Sequence
  ENSG00000180979_50 (sequence is synthesized)
ttaacctaccttccttcatcgccccaccctgtacacccactacccagcctctggtaactatcattctactctctacctccatgaaataaattttttagctcacatgagtaagaacatgca

SEQ ID NO: 637391 - DNA, 120 bp, Artificial Sequence
  ENSG00000180979_51 (sequence is synthesized)
ctaagccggggagcgcatcccggctactgcgggtcctgggtcttcacctgcggagccttacggcagctgagcggtgggaggcgagtccggggctccctgatcttccggacctgagccgcg

SEQ ID NO: 637392 - DNA, 120 bp, Artificial Sequence
  ENSG00000180979_52 (sequence is synthesized)
cgtagtaacagaagctagataacagaggcttctggagtgagtaggcagtgagaaaatggaggtggtaaaagaggggaaaactagaacaaatagtcaagtaaagatttttgttttgtttta

SEQ ID NO: 637393 - DNA, 120 bp, Artificial Sequence
  ENSG00000180979_53 (sequence is synthesized)
agggaggcttttgctagtgatcagctgttaccaggggtggttttctcttacaagctgatttttgtttttgttatgaaaccgtgcaggagggctcaagttgcgaatgccggaatccttgaa

SEQ ID NO: 637394 - DNA, 120 bp, Artificial Sequence
  ENSG00000180979_54 (sequence is synthesized)
gccttctttctacttcttgtaattacatctaaaataagccttataatgattgggtgttataatgattgttactgggttaatttggacttgaaagagaagaacattttggggatgtaatgt

SEQ ID NO: 637395 - DNA, 120 bp, Artificial Sequence
  ENSG00000180979_55 (sequence is synthesized)
aaacaaagctacctaacttggaatgggggatggatgagaaggggaggatcttccaaatatcacaaaattgctgtcggattgtgccttgggcccctttacaaaaggagcccattatacaca

SEQ ID NO: 637396 - DNA, 120 bp, Artificial Sequence
  ENSG00000180979_56 (sequence is synthesized)
tgatggcaccctcaccttctaaagactatgttggtaaaatgcaatatctaaaaatggcacatgtgggagttttacatatattaacaagaggcgaagcaggctgccatatagtctttataa

SEQ ID NO: 637397 - DNA, 120 bp, Artificial Sequence
  ENSG00000180988_0 (sequence is synthesized)
tgctctcctcctgtcagccatcatgtctggggacaacagctccagcctgaccccaggattctttatcttgaatggcgttcctgggctggaagccacacacatctggatctccctgccatt

SEQ ID NO: 637398 - DNA, 120 bp, Artificial Sequence
  ENSG00000180988_1 (sequence is synthesized)
ctgctttatgtacatcattgctgtcgtggggaactgtgggctcatctgcctcatcagccatgaggaggccctgcaccggcccatgtactacttcctggccctgctctccttcactgatgt

SEQ ID NO: 637399 - DNA, 120 bp, Artificial Sequence
  ENSG00000180988_2 (sequence is synthesized)
caccttgtgcaccaccatggtacctaatatgctgtgcatattctggttcaacctcaaggagattgactttaacgcctgcctggcccagatgttttttgtccatatgctgacagggatgga

SEQ ID NO: 637400 - DNA, 120 bp, Artificial Sequence
  ENSG00000180988_3 (sequence is synthesized)
gtctggggtgctcatgctcatggccctggaccgctatgtggccatctgctaccccttacgctatgccaccatccttaccaaccctgtcatcgccaaggctggtcttgccaccttcttgag

SEQ ID NO: 637401 - DNA, 120 bp, Artificial Sequence
  ENSG00000180988_4 (sequence is synthesized)
cacctactgtgaccatatgtctgtggccaaggtatcctgtggcaatttcaaggtcaatgctatttatggtctgatggttgctctcctgattggtgtgtttgatatctgctgtatctctgt

SEQ ID NO: 637402 - DNA, 120 bp, Artificial Sequence
  ENSG00000180988_5 (sequence is synthesized)
atcttacactatgattttgcaggctgttatgagcctgtcatcagcagatgctcgtcacaaagccttcagcacctgcacatctcacatgtgttccattgtgatcacctatgttgctgcttt

SEQ ID NO: 637403 - DNA, 120 bp, Artificial Sequence
  ENSG00000180988_6 (sequence is synthesized)
tttcacttttttcactcatcgttttgtaggacacaatatcccaaaccacatacacatcatcgtggccaacctttatctgctactgcctcctaccatgaacccaattgtttatggagtcaa

SEQ ID NO: 637404 - DNA, 120 bp, Artificial Sequence
  ENSG00000180988_7 (sequence is synthesized)
gaccaagcagattcaggaaggtgtaattaaatttttacttggagacaaggttagttttacctatgacaaatgaaacatagaatagacatattgtttcaggtggtgagaaaataatggaga

SEQ ID NO: 637405 - DNA, 120 bp, Artificial Sequence
  ENSG00000180992_0 (sequence is synthesized)
gtccgccgggctgggcctggcgcgcaggcgctaggaagaggccgcgtggggcgaaggcggcgcttggctggtggggcccgcggcgggattttcccgggcggcgagagcggatctatcttg

SEQ ID NO: 637406 - DNA, 120 bp, Artificial Sequence
  ENSG00000180992_1 (sequence is synthesized)
ggatcccatggctttctttactgggctctggggccccttcacctgtgtaagcagagtgctgagccatcactgtttcagcaccactgggagtctgagtgcgattcagaagatgacgcgggt

SEQ ID NO: 637407 - DNA, 120 bp, Artificial Sequence
  ENSG00000180992_2 (sequence is synthesized)
acgagtggtggacaacagtgccctggggaacagcccataccatcgggctcctcgctgcatccatgtctataagaagaatggagtgggcaaggtgggcgaccagatactactggccatcaa

SEQ ID NO: 637408 - DNA, 120 bp, Artificial Sequence
  ENSG00000180992_3 (sequence is synthesized)
acgaattaagacacccatccccaccagcctgcgcaagcgggaaggcgagtattccaaggtgctggccattgctcagaactttgtgtgagttgagcccaggcctctggttgcaggactcgt

SEQ ID NO: 637409 - DNA, 120 bp, Artificial Sequence
  ENSG00000180992_4 (sequence is synthesized)
gaatggagcagttctgagaaccacccttttgctaagggagcttgggagccacatggctgctcccttcacactgggtaacagtgtagtatcctgtgagagaataaatgtattcatttatgt

SEQ ID NO: 637410 - DNA, 120 bp, Artificial Sequence
  ENSG00000180992_5 (sequence is synthesized)
gtttttccagagctttctgggatgtgggaaaataaattacactgaagcagttgaaaggtggcttacccgagtctggccacacggggtagcattctttacatggagcagccttggtgccag

SEQ ID NO: 637411 - DNA, 120 bp, Artificial Sequence
  ENSG00000180992_6 (sequence is synthesized)
ggtctgagcccttgcttttctggtttggaccctataagttcatccaggactgtcaggccctggaaaactgaggtacacaccaaatgccaatttataaatgtaccatggctctaaccaaaa

SEQ ID NO: 637412 - DNA, 120 bp, Artificial Sequence
  ENSG00000180998_0 (sequence is synthesized)
agtgcggagcgagcgcctcaaatgctcgggtttctcagctgattgtctccagccgagagttgttttttgcagctacggagccgagccgcagcaggaggagccgagacccccggggggtgg

SEQ ID NO: 637413 - DNA, 120 bp, Artificial Sequence
  ENSG00000180998_1 (sequence is synthesized)
ggggaaagaggaggcggggtccgggggagccgcggctgctttgcgctggactccgggtcccgtcacggcgcttcctggggttagaggctggggtgggtggggggtaagggggcagtcctt

SEQ ID NO: 637414 - DNA, 120 bp, Artificial Sequence
  ENSG00000180998_2 (sequence is synthesized)
cagtccttctccccttcgacggcggctccgagtccagccccttccttcccgcgctcgctcgcccggcccccagccccctcatgagggtgtccgtgccgggtccggcggccgctgccgccc

SEQ ID NO: 637415 - DNA, 120 bp, Artificial Sequence
  ENSG00000180998_3 (sequence is synthesized)
gcgagccctccacgcccggcgggggcagcggaggcggaggcgccgtcgctgcagcctcaggcgccgcggtgccgggctccgtgcagttggcgctgagcgtcctgcacgccctgctctacg

SEQ ID NO: 637416 - DNA, 120 bp, Artificial Sequence
  ENSG00000180998_4 (sequence is synthesized)
tacgccgcgctgttcgcctttgcctacctgcagctgtggcggctgctcctgtaccgcgagcggcggctgagttaccagagcctctgcctcttcctctgtctcctgtgggcagcgctcagg

SEQ ID NO: 637417 - DNA, 120 bp, Artificial Sequence
  ENSG00000180998_5 (sequence is synthesized)
accaccctcttctccgccgccttctcgctcagcggctccctgcccttgctccggccgcccgctcacctgcacttcttcccccactggctgctctactgcttcccctcctgtctccagttc

SEQ ID NO: 637418 - DNA, 120 bp, Artificial Sequence
  ENSG00000180998_6 (sequence is synthesized)
tccacgctctgtctcctcaacctctacctggcggaggttatatgtaaagtcagatgtgccactgaacttgacagacacaaaattctactgcatttgggctttataatggcaagcctgctc

SEQ ID NO: 637419 - DNA, 120 bp, Artificial Sequence
  ENSG00000180998_7 (sequence is synthesized)
tttttagtggtgaacttgacttgcgcaatgctagttcatggagatgtcccagaaaatcagttgaagtggactgtgtttgttcgagcattaattaatgatagcctgtttattctttgtgcc

SEQ ID NO: 637420 - DNA, 120 bp, Artificial Sequence
  ENSG00000180998_8 (sequence is synthesized)
atctctttagtgtgttacatatgcaaaattacaaaaatgtcatcagctaatgtctacctcgaatcaaagggtatgtctctgtgccagactgtcgtcgtgggctctgtagtcattcttctg

SEQ ID NO: 637421 - DNA, 120 bp, Artificial Sequence
  ENSG00000180998_9 (sequence is synthesized)
tactcttccagagcttgttataatttggtggtggtcaccatatctcaggatacattagaaagtccatttaattatggctgggataatctttcagataaggctcatgtagaagacataagt

SEQ ID NO: 637422 - DNA, 120 bp, Artificial Sequence
  ENSG00000180998_10 (sequence is synthesized)
ggagaagagtatatagtatttggaatggtcctctttctgtgggaacatgtgccagcatggtcggtggtactgtttttccgggcacagagattaaaccagaatttggcacctgctggcatg

SEQ ID NO: 637423 - DNA, 120 bp, Artificial Sequence
  ENSG00000180998_11 (sequence is synthesized)
ataaatagtcacagttatagttccagagcttactttttcgacaatccaagacgatatgatagtgatgatgacctgccaagactgggaagttcaagagaaggaagtttaccaaattcgcaa

SEQ ID NO: 637424 - DNA, 120 bp, Artificial Sequence
  ENSG00000180998_12 (sequence is synthesized)
agtttgggctggtatggcaccatgactgggtgtggcagcagcagttacacagtcactccccacctgaatggacctatgacagatactgctcctttgctctttacttgtagtaatttagat

SEQ ID NO: 637425 - DNA, 120 bp, Artificial Sequence
  ENSG00000180998_13 (sequence is synthesized)
ttgaacaatcatcatagcttatatgtgacaccacaaaactgacagcatcaccaagtcatgattcttgagttgtttttcataaatgtgtatattcaatgtgtttaaattccatctacataa

SEQ ID NO: 637426 - DNA, 120 bp, Artificial Sequence
  ENSG00000180998_14 (sequence is synthesized)
acattccattatctgttgcaactgaaaacaaaatctggaagtgtggctgtgtttggtaaataacacagctattatttttgacctcttcatagtaaaatgaagtaaaatggaaagtttgga

SEQ ID NO: 637427 - DNA, 120 bp, Artificial Sequence
  ENSG00000180998_15 (sequence is synthesized)
gtaggagaaaagagagattagatcttaaggcacttgatggcctccaaaaatcctgactttggaacatcaaatgcatatgtgcacttttatctttgttctgagtcactgcagtccccaaag

SEQ ID NO: 637428 - DNA, 120 bp, Artificial Sequence
  ENSG00000180998_16 (sequence is synthesized)
tcatatgccaatgttcacactgaaatactgtattgtacaccaaactggaaggcaattttcctatgaaaatcaaagccggtatattcattggtatgctctatacagatatcttaataaaaa

SEQ ID NO: 637429 - DNA, 120 bp, Artificial Sequence
  ENSG00000180998_17 (sequence is synthesized)
ttttatagtgtgaacagtgcacagagttaaggcataaaaatgtatcattctttataaaaatctactgaaaatgtgtaatcattgaagacagttcttttaagcatgattttaaaatagcaa

SEQ ID NO: 637430 - DNA, 120 bp, Artificial Sequence
  ENSG00000180998_18 (sequence is synthesized)
ctgaaattcaatcattttaaacaaatgatggtagtaatccattagttatggccagcagtgttctttggagagccacaataatttcaagaggaaaatataccagtgaaaattgtgtggcta

SEQ ID NO: 637431 - DNA, 120 bp, Artificial Sequence
  ENSG00000180998_19 (sequence is synthesized)
ttttgagtagaattggtcagttgattattttgtgtaattgagatatatgtagtagtttaagcatgattcttgaagaaagcaatagtgacttttgcatagggagattttggtagaaacttc

SEQ ID NO: 637432 - DNA, 120 bp, Artificial Sequence
  ENSG00000180998_20 (sequence is synthesized)
ttgggactaaacaagtttagagatgcatttaagaattattcacaaaatgtgtaattctaaattaaaacataaatatattttcaaaagcatttgatttctctgaagcatgatatagctggt

SEQ ID NO: 637433 - DNA, 120 bp, Artificial Sequence
  ENSG00000180998_21 (sequence is synthesized)
cttacctagtgaatcaggattgtcctcaggtaaatgaaatcatgatacattattgcagtgaactcaagtgcaatactttgtaagacatataattcctatgattttcacatttttatatct

SEQ ID NO: 637434 - DNA, 120 bp, Artificial Sequence
  ENSG00000180998_22 (sequence is synthesized)
tatatatgggaaaagccaaattaaattgaattcagattaattccagcattagactaaatgagcaaacttaagtaaatgtacaaactaggtaagtataaaaccacaggttaacaatattgg

SEQ ID NO: 637435 - DNA, 120 bp, Artificial Sequence
  ENSG00000180998_23 (sequence is synthesized)
agtacttttagaattacattaaaactgtcttaaatgtcctatcccaaatctaaaaaaaaagaaaatggcaggctgagataatacagaattttaaaatgcactttgtaccagtgtctatat

SEQ ID NO: 637436 - DNA, 120 bp, Artificial Sequence
  ENSG00000180998_24 (sequence is synthesized)
ggaaagaagtagatgctgaatacctcaagatgccaagggaacaagcaacattgggaagttgtcacaacatgctcaaagacaaactacaattgtctgctagctatttcttcagaactggaa

SEQ ID NO: 637437 - DNA, 120 bp, Artificial Sequence
  ENSG00000180998_25 (sequence is synthesized)
ctaatacgactatccttttctgttttatactttgattagaatgttatttcctcgcttacttaaaatgtacttcaactttttaacaactgatacaataacttcataaaagtataacactag

SEQ ID NO: 637438 - DNA, 120 bp, Artificial Sequence
  ENSG00000180998_26 (sequence is synthesized)
gttgaaaccttaaggaaaaattgaaattgttaatgctttcgatcttttgggaggccagtacacagacaaataaatttcttctttttatgatacaaaatgactttgtattcaatcagaagc

SEQ ID NO: 637439 - DNA, 120 bp, Artificial Sequence
  ENSG00000180998_27 (sequence is synthesized)
atatacttatgttattttgggtttgtttataattctctcattgtaaccaaattattttaaaatgtatagtataaaaagttacccgtggtattaagtgacaaaagcgtacttttattacaa

SEQ ID NO: 637440 - DNA, 120 bp, Artificial Sequence
  ENSG00000180998_28 (sequence is synthesized)
ctccagttgttagattgcttctcagaatgctaactgtttattttgctaataatgttaggcatctaatcatctagagctgtccaaaaagatatgttgtctttgttaatccttggggttcaa

SEQ ID NO: 637441 - DNA, 120 bp, Artificial Sequence
  ENSG00000180998_29 (sequence is synthesized)
ggtgataaagtttttctagtaaggctcccctcgataatgttcctatttgaccaaactaacaaagattactttttaaaaatttttcagataaaataacttggttctttctgctgcattagt

SEQ ID NO: 637442 - DNA, 120 bp, Artificial Sequence
  ENSG00000180998_30 (sequence is synthesized)
tgattgttccaaatttgaggtttgtaagtttattcttatcactgactagggtacccaaattcttgcatttgtctccttatacacatctaacatatcaccaaagacaaataaagatacact

SEQ ID NO: 637443 - DNA, 120 bp, Artificial Sequence
  ENSG00000180998_31 (sequence is synthesized)
ctggcccaatctttgcttaaaaattccaaagcactaggagcactttaagtttggtctcgaaaggagttgtttataaaatcaaagggctaccgattccctgttcatcctgcactgaagcac

SEQ ID NO: 637444 - DNA, 120 bp, Artificial Sequence
  ENSG00000180998_32 (sequence is synthesized)
atgatgacagtatcaaaccttcatttttgttcattaaaaagtgaatttcattacttaagtgtgtaattctatagtgattagcagtatttgttttcatcatttcacttgggtggccattaa

SEQ ID NO: 637445 - DNA, 120 bp, Artificial Sequence
  ENSG00000180998_33 (sequence is synthesized)
ttttgaaacctttaccactcattgtagttggttgtagttttatggaaaatgtaatttatagctaaagtggcttttttatgcatagctgccttttttattgtttaacagtgtttctcagct

SEQ ID NO: 637446 - DNA, 120 bp, Artificial Sequence
  ENSG00000180998_34 (sequence is synthesized)
atataatcagtttcaaactggttgtaaaagtatagctgtggccaatgaatgtatttatttgttgtttcactaaattgtaacaaaacactactattaaaaataaaagtgtttgtgctttta

SEQ ID NO: 637447 - DNA, 120 bp, Artificial Sequence
  ENSG00000180998_35 (sequence is synthesized)
atttttgtcatattccttgaattttaaggatacaacctccttttgttattttttgttatttttttaattttggtattttcattgttatattatttaaaatgttattaaacctacacttga

SEQ ID NO: 637448 - DNA, 120 bp, Artificial Sequence
  ENSG00000180998_36 (sequence is synthesized)
agtaaaattaaccaactttttttgactttttagtatcttttcaggtttcaggatataaatgtatttatttcaaataaattgtacactacatagtacaaagtagtaataactcaaggtcta

SEQ ID NO: 637449 - DNA, 120 bp, Artificial Sequence
  ENSG00000180998_37 (sequence is synthesized)
gagttatattgctggatttaaatcagagatctgccatttatcagctctatgactttaacctctctgtccacctttaaactgaagataaagtatagtaatcatgtccatagtggtgttgca

SEQ ID NO: 637450 - DNA, 120 bp, Artificial Sequence
  ENSG00000180998_38 (sequence is synthesized)
aggatgaaataataatgtatggaaagtcatagtatattacgtggcactaaaaatataaatgttgactcgctatcatcttcatcatcatattttgacatagtttatagaataggcttgttc

SEQ ID NO: 637451 - DNA, 120 bp, Artificial Sequence
  ENSG00000180998_39 (sequence is synthesized)
ttacaaaacttggaaaaatcctttcattacccatttggcagaatgttgttctttggtaaacttttttggttttcttttgtttttcactgttatttgtctgttaactggttttatttctac

SEQ ID NO: 637452 - DNA, 120 bp, Artificial Sequence
  ENSG00000180998_40 (sequence is synthesized)
cagacttgctgttttatagttttatgggcagttagccatattatccttactaaaaatgtattttttctgattattaaaacttggcaatatgaaagaatatgatttctttaatgttctaaa

SEQ ID NO: 637453 - DNA, 120 bp, Artificial Sequence
  ENSG00000180998_41 (sequence is synthesized)
cagccgtagtgtcaccactgacacttaactgtatttggaactcagtgtaaatgtaaatataattttataccctgcttttccccttatactagtaaaggattttctcatgctattaaaaat

SEQ ID NO: 637454 - DNA, 120 bp, Artificial Sequence
  ENSG00000180998_42 (sequence is synthesized)
tatttttaaggctgcataacatttcatcatataccaaaattaattcttatcctactgataggcctttaagtggttttcaaaaaagaatgtcagcctccataatgttaattttcttcaaaa

SEQ ID NO: 637455 - DNA, 120 bp, Artificial Sequence
  ENSG00000180998_43 (sequence is synthesized)
tcagttttgttttgctttttatttttagtaagagttagaggttttagtaattacatctagaactgtgtatcccagcctcagtttacagagcactcacgtatcttttatgttatgatttgc

SEQ ID NO: 637456 - DNA, 120 bp, Artificial Sequence
  ENSG00000180998_44 (sequence is synthesized)
attacttttttttcttgatagagacacattctcactgtgtcacccaggctggaatgtagtggcgcaattatagcttactgtaacctcaaactcctgggcttatgtaattctcctacctca

SEQ ID NO: 637457 - DNA, 90 bp, Artificial Sequence
  ENSG00000180998_45 (sequence is synthesized)
tctcctacctcagcctcccaagtagctagaactgcgagcattcaccaccacactcagctttttttttttttttttctttggagagaacaa

SEQ ID NO: 637458 - DNA, 120 bp, Artificial Sequence
  ENSG00000180998_46 (sequence is synthesized)
agtactgggattacaagcatgagccatggtactcagcccattattattttttttaattcttagaaaattttttatttttaatttttgtgggtgattataaggtatatatgtatggggtat

SEQ ID NO: 637459 - DNA, 120 bp, Artificial Sequence
  ENSG00000180998_47 (sequence is synthesized)
tttttatttttaatttttgtgggtgattataaggtatatatgtatggggtatataaaatatttttgggccaggcgcagtggctcacgcctgttgtaatcccagcaccttgggaggccaag

SEQ ID NO: 637460 - DNA, 67 bp, Artificial Sequence
  ENSG00000180998_48 (sequence is synthesized)
catgccactgcactatttctgatacaggcatgagaagcataataattacattatggaaaatgcaata

SEQ ID NO: 637461 - DNA, 77 bp, Artificial Sequence
  ENSG00000180998_49 (sequence is synthesized)
ccacctcaaaaaaaaaaaaaaaaagatatttctgatacaggcatgagaagcataataattacattatggaaaatgca

SEQ ID NO: 637462 - DNA, 120 bp, Artificial Sequence
  ENSG00000180998_50 (sequence is synthesized)
attattatccatagtcaccctgttgtgctatcaactaggtcttattaattctttctaactactttttgtacccattaaccatccccacttctccccaacccctccactacccttcccaac

SEQ ID NO: 637463 - DNA, 74 bp, Artificial Sequence
  ENSG00000180998_51 (sequence is synthesized)
aattgttctgatttttagctcctattttatttaacatgatgatctccagttccatgttgttgcagattacagga

SEQ ID NO: 637464 - DNA, 120 bp, Artificial Sequence
  ENSG00000180998_52 (sequence is synthesized)
catgatgatctccagttccatgttgttgcagattacaggatctcattctttcttatggctgaatagtactccattgtgtggtatgtctctgtgccagactgtcgtcgtgggctctgtagt

SEQ ID NO: 637465 - DNA, 120 bp, Artificial Sequence
  ENSG00000180999_0 (sequence is synthesized)
aagatgtaaatcacacagatgttggtagagaaaaaggcatactggtattgaaactgtaaactggcctgtttacttcgtctcctaacaaaaaacactttggattcaggttctccacagcag

SEQ ID NO: 637466 - DNA, 120 bp, Artificial Sequence
  ENSG00000180999_1 (sequence is synthesized)
tcttccactggccacagtgaggggagctaggtttccccagtctccagctagaaaaactcagaacatctaaagatctgaaagatggaaaaaagagaactaaaggcttctgttccaaaattt

SEQ ID NO: 637467 - DNA, 120 bp, Artificial Sequence
  ENSG00000180999_2 (sequence is synthesized)
gacaagattccttggcttagtgaggccagccttgtaaacaagccattagtgctcagccttcccagaagatatcctcatacctctgcgacttttctgacttcatccaagaagaatatgaat

SEQ ID NO: 637468 - DNA, 120 bp, Artificial Sequence
  ENSG00000180999_3 (sequence is synthesized)
ttgccaattttgtttcaagttccagatgttttatctaaggccaggaggaaccagtgtgactccatgctgctcagaaaccaacagctgtgctccacatgtcaagaaatgaaaatggtacaa

SEQ ID NO: 637469 - DNA, 120 bp, Artificial Sequence
  ENSG00000180999_4 (sequence is synthesized)
caaaagcatcctttgagaattgtatgagttatagaatgagtcttcatcaacccaaattccagactacacctgagcctttccatgatgacatcccaacagaaagcattcactacagactgc

SEQ ID NO: 637470 - DNA, 120 bp, Artificial Sequence
  ENSG00000180999_5 (sequence is synthesized)
ccattctgggccccaggacagctgtcttccacggattactgacagaggcctacaaaactctaaaagagagacaacgttcttccttgcccagaaaggaaccaataggcaagacaacgaggc

SEQ ID NO: 637471 - DNA, 120 bp, Artificial Sequence
  ENSG00000180999_6 (sequence is synthesized)
agtgagcggtaggagctcatcacctcccagactcccagagagaaaataacctcgccaagccaatctttgacactggcaccttctcctcacaattttctctcttctcccaaaagatgattt

SEQ ID NO: 637472 - DNA, 120 bp, Artificial Sequence
  ENSG00000180999_7 (sequence is synthesized)
aattttgccttcctaagattgctggtattctagctcttacctctatgttctttctcacgtctcctaaagacaaaattgtttaatttacatgattataaagatctgtttatgaaaatggaa

SEQ ID NO: 637473 - DNA, 120 bp, Artificial Sequence
  ENSG00000180999_8 (sequence is synthesized)
ggacaattccctctccattcctgttattgctgctgagctggtcgtaaggaaaccgagtgagaagggaatgcaacagaagaaaaagaccaaagacctgggtttcagggctgggaaagaaag

SEQ ID NO: 637474 - DNA, 120 bp, Artificial Sequence
  ENSG00000180999_9 (sequence is synthesized)
caagacagaatggaggaaatgaggcctgcaggacatggcgtctcaaatgtttgcgtcgcctttaaagtagcctgtcacagctgccttccacgactcttcaatgccctcatcccttctcca

SEQ ID NO: 637475 - DNA, 120 bp, Artificial Sequence
  ENSG00000180999_10 (sequence is synthesized)
gtgccagcagcccacaaagaggcatgccacagtatcaaaattaagccaattaataaccctgcaatggcttttaactgttcaaatgaagagttgcacatctctcattttaaatcaaaagta

SEQ ID NO: 637476 - DNA, 120 bp, Artificial Sequence
  ENSG00000180999_11 (sequence is synthesized)
gaaatgattaagcttagtgaagaaggcatatcaaaagccgagacaggctgaaagccaggcctcttgtgacaaacagccaagttgtgaatgcaaataaaaagttattgaaggaaattaaaa

SEQ ID NO: 637477 - DNA, 120 bp, Artificial Sequence
  ENSG00000181001_0 (sequence is synthesized)
atgtcatttctaaatggcaccagcctaactccagcttcattcatcctaaatggcatccctggtttggaagatgtgcatttgtggatctccttcccactgtgtaccatgtacagcattgct

SEQ ID NO: 637478 - DNA, 120 bp, Artificial Sequence
  ENSG00000181001_1 (sequence is synthesized)
attacagggaacttcggccttatgtacctcatctactgtgatgaggccttacacagacctatgtatgtcttccttgcccttctttccttcacagatgtgctcatgtgcaccagcaccctt

SEQ ID NO: 637479 - DNA, 120 bp, Artificial Sequence
  ENSG00000181001_2 (sequence is synthesized)
cccaacactctcttcatattgtggtttaatctcaaggagattgattttaaagcctgcctcgcccagatgttctttgtgcacaccttcacagggatggagtctggggtgctcatgctcatg

SEQ ID NO: 637480 - DNA, 120 bp, Artificial Sequence
  ENSG00000181001_3 (sequence is synthesized)
gccctggaccactgtgtggccatctgcttccctctgcgttatgccaccatcctcactaattcagtcattgctaaagctgggttcctcacttttcttaggggtgtgatgcttgttatccct

SEQ ID NO: 637481 - DNA, 120 bp, Artificial Sequence
  ENSG00000181001_4 (sequence is synthesized)
actttcctcaccaagcgccttccatactgcaagggcaacgtcataccccacacctactgtgaccacatgtctgtggccaagatatcttgtggtaatgtcagggttaacgccatctatggt

SEQ ID NO: 637482 - DNA, 120 bp, Artificial Sequence
  ENSG00000181001_5 (sequence is synthesized)
ttgatagttgccctgctgattgggggctttgatatcctgtgcattacaatctcctacactatgattcttcaagcagttgtgagtctatcatcagcagatgctcgacagaaggccttcagc

SEQ ID NO: 637483 - DNA, 120 bp, Artificial Sequence
  ENSG00000181001_6 (sequence is synthesized)
acctgcactgcccacttctgtgccatagtcctcacctatgttccagccttctttaccttctttacacaccattttgggggacacaccattcctctacacatacatattattatggctaat

SEQ ID NO: 637484 - DNA, 120 bp, Artificial Sequence
  ENSG00000181001_7 (sequence is synthesized)
ctctacctactaatgcctcccacaatgaaccctattgtgtatggggtgaaaaccaggcaggtacgagaaagtgtcattaggttctttcttaagggaaaggacaattctcataacttttaa

SEQ ID NO: 637485 - DNA, 120 bp, Artificial Sequence
  ENSG00000181001_8 (sequence is synthesized)
agataatagaaatgttccctcctccacttgcctcccaaggtctcaatgtaggtattatatttctccttcaggaccaagaggatcatatagacataaatatgacttgatccatggataggt

SEQ ID NO: 637486 - DNA, 120 bp, Artificial Sequence
  ENSG00000181001_9 (sequence is synthesized)
ttaaatgacaccagaaatctggccacaggaatatttttatgatactcggattactctacatctttggaaagggtaccatcatgttcaaataggtaaataccctctcttatgttattccat

SEQ ID NO: 637487 - DNA, 120 bp, Artificial Sequence
  ENSG00000181001_10 (sequence is synthesized)
gttctttaaagcctttttactatagaggacttcgaagttcactgcatttaatcttcacagacatcatcttctctcctaaatgacagtctacacaaatttgcagcacagtggttggatcac

SEQ ID NO: 637488 - DNA, 120 bp, Artificial Sequence
  ENSG00000181001_11 (sequence is synthesized)
taacactggagtgaaactttttaaaaaatttaaatctctggcaaaacatgagccgtgttcatttatgtctgtcctaacttacttagctcatcattttcctgccaaaatcacttagagttt

SEQ ID NO: 637489 - DNA, 120 bp, Artificial Sequence
  ENSG00000181001_12 (sequence is synthesized)
attctgcttctatcccaagtttgccagctgtatatctatccagtagcaacccatacatatgttaaccagaaaacttctaaagttgtaaattgaagcatgcctgtaatacccagaagctgg

SEQ ID NO: 637490 - DNA, 120 bp, Artificial Sequence
  ENSG00000181001_13 (sequence is synthesized)
caatcacaccaatgtccatcaacattagacaacataaataaataattgtggtctattcaaatatagtattaggtgaaagagataaaaacacatattatatattgtcattgatgtacagtt

SEQ ID NO: 637491 - DNA, 120 bp, Artificial Sequence
  ENSG00000181001_14 (sequence is synthesized)
cagaagtaggccaaactaactgagataatgtttaactttgagaatgagaaaccaggtaatgagggggatgcttctgaggtaccaccgttgattagttcttgacctggatggtagttgcag

SEQ ID NO: 637492 - DNA, 120 bp, Artificial Sequence
  ENSG00000181001_15 (sequence is synthesized)
ggtgtatcaacttagtgatatttcatgagcctattatttgtaatatctgctctttttgcctgtgtactatgcttcaacatttttatttaaaataatatgtcttgagcacatactctcacc

SEQ ID NO: 637493 - DNA, 120 bp, Artificial Sequence
  ENSG00000181001_16 (sequence is synthesized)
tccctaagctgtgagacatttctttcttgcttcctatgaaaactgtctatagtttacaaagtatatatactttcttttctttcagaagtatgttaactttagcataaataatatgtgcat

SEQ ID NO: 637494 - DNA, 120 bp, Artificial Sequence
  ENSG00000181001_17 (sequence is synthesized)
atttatacaaatcataataaaacaacaaagacaacatcatcataaaaaaattaaactttccttttgaaaatgtcctccatctagtccctttttagtgatggcctcttaaaaatattgttt

SEQ ID NO: 637495 - DNA, 120 bp, Artificial Sequence
  ENSG00000181004_0 (sequence is synthesized)
ctcttagcaactaagcccccggctcctccagaagcccctcttcgcacatgcgcaaactgcggacggggaactgggctccctagccctggcgtttttggtgttgctgtcccagccagaatc

SEQ ID NO: 637496 - DNA, 120 bp, Artificial Sequence
  ENSG00000181004_1 (sequence is synthesized)
gcgtctggccggtgggaagccgggaactccagccccctgtaggagaggagaaaggagcgagatcatgatacatggtgatggcttgcagagtcgtaaacaaaagaagacacatgggacttc

SEQ ID NO: 637497 - DNA, 120 bp, Artificial Sequence
  ENSG00000181004_2 (sequence is synthesized)
aacaactttcatcattcgcggaaacaggaagaactttcctaggcccactaaaatcatccaaatttattatagatgaagaatgtcatgaaagtgtattaatcagttcaacagtaaggcttc

SEQ ID NO: 637498 - DNA, 120 bp, Artificial Sequence
  ENSG00000181004_3 (sequence is synthesized)
ttgaaagtttggatttaaccagtgcagtgggacaacttctcaatgaagcagttcaagcacaaaacaacacatatagaactggaatcagtactcttttgtttcttgttggtgcttggagca

SEQ ID NO: 637499 - DNA, 120 bp, Artificial Sequence
  ENSG00000181004_4 (sequence is synthesized)
gtgcagttgaagaatgtcttcatcttggtgtccccatttccataatagtatcagtaatgtcagaaggcttaaacttttgtagtgaagaggtagtttctcttcatgtacctgttcacaata

SEQ ID NO: 637500 - DNA, 120 bp, Artificial Sequence
  ENSG00000181004_5 (sequence is synthesized)
tatttgactgtatggacagcacaaaaacattttctcaacttgaaacatttagtgtaagtttgtgtccttttctacaggtcccttcagatactgatttgatagaggaattgcatggtctca

SEQ ID NO: 637501 - DNA, 120 bp, Artificial Sequence
  ENSG00000181004_6 (sequence is synthesized)
aagatgttgcctctcaaacactgaccatttccaacctttctgggagacctcttaaatcatatgaattatttaaacctcagacaaaggttgaagcagataacaacacatcacgaactctga

SEQ ID NO: 637502 - DNA, 120 bp, Artificial Sequence
  ENSG00000181004_7 (sequence is synthesized)
aaaacagcctgcttgcagatacctgctgcagacagtcaatactaatccacagtaggcattttaataggacagataatactgaaggggtaagcaaaccagatggatttcaagaacatgtta

SEQ ID NO: 637503 - DNA, 120 bp, Artificial Sequence
  ENSG00000181004_8 (sequence is synthesized)
cagctactcacaaaacttacagatgtaatgatttggtagagttggcagtaggcttgagtcatggagatcacagcagcatgaagttagtagaagaagcagtacagctgcaatatcagaatg

SEQ ID NO: 637504 - DNA, 120 bp, Artificial Sequence
  ENSG00000181004_9 (sequence is synthesized)
cttgtgtgcaacaaggcaactgtacaaaaccatttatgtttgacatttcaagaattttcacttgctgtctaccaggcttacctgaaacttcttcttgtgtttgtccaggatatatcactg

SEQ ID NO: 637505 - DNA, 120 bp, Artificial Sequence
  ENSG00000181004_10 (sequence is synthesized)
ttgtgtcagtatctaataatcctgtgatcaaggaattgcagaatcagcctgtgcgaatagttctcattgagggtgacctcacagagaattaccgccacctgggatttaataagtctgcaa

SEQ ID NO: 637506 - DNA, 120 bp, Artificial Sequence
  ENSG00000181004_11 (sequence is synthesized)
atattaaaacagtattagatagcatgcggcttcaagaagacagctcagaagaactgtgggcaaatcacgtgttacaggtgttaatccagttcaaggtgaaccttgtcctggtacaaggaa

SEQ ID NO: 637507 - DNA, 120 bp, Artificial Sequence
  ENSG00000181004_12 (sequence is synthesized)
atgtgtccgaacgcttaattgaaaaatgtataaacagtaagcggttggtaatcggctcagtgaatggcagtgtgatgcaggcttttgcagaggctgcaggagcagtacaggtggcctaca

SEQ ID NO: 637508 - DNA, 120 bp, Artificial Sequence
  ENSG00000181004_13 (sequence is synthesized)
aattaatttggttacggccgtgctcactaacccagttactgcacagatgcaaatcaaagaagataggttctggacatgtgcctatcgtttgtattatgctctaaaagaggaaaaggtctt

SEQ ID NO: 637509 - DNA, 120 bp, Artificial Sequence
  ENSG00000181004_14 (sequence is synthesized)
ccttggaggtggtgcagttgaatttttgtgtcttagctgtcttcatattcttgcagagcaatctctgaaaaaagaaaaccatgcctgctcagggtggctgcataatacttcctcttggct

SEQ ID NO: 637510 - DNA, 120 bp, Artificial Sequence
  ENSG00000181004_15 (sequence is synthesized)
ggcttcatctctggcaatatacagaccaactgtgcttaaattcctggcaaatggatggcagaaatacctttcaactctcctatataacactgccaattactcatcagaatttgaagccag

SEQ ID NO: 637511 - DNA, 120 bp, Artificial Sequence
  ENSG00000181004_16 (sequence is synthesized)
cacatacattcaacatcatctgcaaaatgccacagactctggctctccttcatcttacatcttgaatgaatatagtaaactaaatagtagaatttttaattcagacatttcaaataaact

SEQ ID NO: 637512 - DNA, 120 bp, Artificial Sequence
  ENSG00000181004_17 (sequence is synthesized)
ggagcagattccgagagtttatgacgttgttacaccaaagattgaggcgtggcgccgagcattggatttagtattgttagtacttcagacagacagtgaaataattactggacatggaca

SEQ ID NO: 637513 - DNA, 120 bp, Artificial Sequence
  ENSG00000181004_18 (sequence is synthesized)
cacacagataaattcacaggaattaacgggctttctatttttgtagtgttactggctaagtctttggaaaataatttttcataatatgtcatgctaataataaatatattgatagccaag

SEQ ID NO: 637514 - DNA, 120 bp, Artificial Sequence
  ENSG00000181004_19 (sequence is synthesized)
tcatggtgcctaaaatgccagctattgccaagaagaaaatagttgatgtctgtcaataactgtgcatggtctgagattttaccctacttataagctaacaagttagcctgttactgtttc

SEQ ID NO: 637515 - DNA, 120 bp, Artificial Sequence
  ENSG00000181004_20 (sequence is synthesized)
gtgggatgctacagaatgcataagacacctgggtcagaaacaaaggacttatcgctcacagcaaaagctgtagccagagcttcatgttggttttattcagttcctcatttttctagttcc

SEQ ID NO: 637516 - DNA, 120 bp, Artificial Sequence
  ENSG00000181004_21 (sequence is synthesized)
cacaggaggaacacaaagggcccatgatgaaagcctgcacacagtgggttatgttgtaagcttgggttattaactgcttttatagtaagcaaaaaaatcctggtctttgtccaaagggag

SEQ ID NO: 637517 - DNA, 120 bp, Artificial Sequence
  ENSG00000181004_22 (sequence is synthesized)
ttattaccccatacttgaagatagcttagtgtaaacacaagcctaggacatggactaggtaaagacaaagtccttgcattcttgacatacccagtaagtatgcagggacactcagagccc

SEQ ID NO: 637518 - DNA, 120 bp, Artificial Sequence
  ENSG00000181004_23 (sequence is synthesized)
atagtggatagtctcttccaacagtctgctcctcagcctgagatgttcttggccaaacttgaattttcacatgagtatgccactctatcagctactctgattaacctgacagtcgggttg

SEQ ID NO: 637519 - DNA, 120 bp, Artificial Sequence
  ENSG00000181004_24 (sequence is synthesized)
tttagtcagtaccaaatttgttcatttggtctcatatagcaattaatgcaggctattatcagacacagcagcaggatgaagccaacctgcagtattaacctcagtcctgtcccccaaggt

SEQ ID NO: 637520 - DNA, 120 bp, Artificial Sequence
  ENSG00000181004_25 (sequence is synthesized)
cttgactcaatcaactctaagttccaagggaggaccaataggtctttttattaggcagccagaatgtagtgaaggacaatttattatactttatgacccaataaagggagctttgactga

SEQ ID NO: 637521 - DNA, 120 bp, Artificial Sequence
  ENSG00000181004_26 (sequence is synthesized)
tcatgcttcattgagtagaaacatggcacattttccaaagccatcagcctgtcttgttcatattatatcccagacagacacgcaagtattgtaatcattgataaaaatctcattaggctt

SEQ ID NO: 637522 - DNA, 120 bp, Artificial Sequence
  ENSG00000181007_0 (sequence is synthesized)
aggccccggggattgtggcgtgacccggcagcggcttcctccgttcgggcatcgctgtgcctcgggttcgcgccccgagtgagcagtcctggcccggagcgtcggtcctggtaatctgta

SEQ ID NO: 637523 - DNA, 120 bp, Artificial Sequence
  ENSG00000181007_1 (sequence is synthesized)
ggaaaagcgctgcggcccagggggtaaagagagatcagcctctgtggactcggtgcttctcctggcaagtaaaccccaaggaggactgaccagttcttgaatttctataccatggccctt

SEQ ID NO: 637524 - DNA, 120 bp, Artificial Sequence
  ENSG00000181007_2 (sequence is synthesized)
cgatcagtgatgttcagtgatgtatccatagacttctctccagaagagtgggaatacctggacttggaacaaaaggacttgtacagagatgtcatgttggagaactacagcaacttggtc

SEQ ID NO: 637525 - DNA, 120 bp, Artificial Sequence
  ENSG00000181007_3 (sequence is synthesized)
tcactgggatgcttcatttctaaaccagatgtgatttcctcattggagcaaggaaaagagccttggaaagttgtgaggaaaggaagaagacaatatccagatttggagaccaagtatgag

SEQ ID NO: 637526 - DNA, 120 bp, Artificial Sequence
  ENSG00000181007_4 (sequence is synthesized)
accaagaagttatctttagaaaatgacatttatgaaataaatttatcccagtggaagataatggaaagaattgaaaaccatggccttaagggtctcattttaaaaaatgattgggaatcc

SEQ ID NO: 637527 - DNA, 120 bp, Artificial Sequence
  ENSG00000181007_5 (sequence is synthesized)
acaggaaaaattgaaggacaggagagacctcaagaaggatacttcagtagtgtgaaaatgccatctgaaaaggtgtcctcttaccagaaacgcacatctgttactccacatcagagactt

SEQ ID NO: 637528 - DNA, 120 bp, Artificial Sequence
  ENSG00000181007_6 (sequence is synthesized)
cattttgttgataaaccctatgaatgtaaggaatgtgggaaggcgttcagagtgcgccaacagcttacttttcatcacagaattcatactggtgaaaaaccgtatgaatgtaaggaatgt

SEQ ID NO: 637529 - DNA, 120 bp, Artificial Sequence
  ENSG00000181007_7 (sequence is synthesized)
gggatggccttcagacagactgcacaccttactcgacatcagagacttcattctggtgaaaaactctatgaatgtaaggaatgtggggaagctttcatatgtggtgcagatcttagagta

SEQ ID NO: 637530 - DNA, 120 bp, Artificial Sequence
  ENSG00000181007_8 (sequence is synthesized)
catcagaaaatgcatattggtgagaagccctatgaatgtaaagaatgtgggaaggcttttagggtacgaggacaacttactctgcatcagaggattcatactggtgagaaaccctatgtg

SEQ ID NO: 637531 - DNA, 120 bp, Artificial Sequence
  ENSG00000181007_9 (sequence is synthesized)
tgtaaagagtgtggaaaagcctttagacagtacgcacacctgactcggcatcagaagcttaatagtgctgacaggctctatgaatgcaaagaatgtgggaaggcctttttgtgtggctct

SEQ ID NO: 637532 - DNA, 83 bp, Artificial Sequence
  ENSG00000181007_10 (sequence is synthesized)
catcacaaaccgggaaggcctttagagtgcgacaacaactaacactccatcagagaattcatactggtgagaaaccctatgaa

SEQ ID NO: 637533 - DNA, 120 bp, Artificial Sequence
  ENSG00000181007_11 (sequence is synthesized)
aaaccctatgaatgtaaggaatgtggaaagacctttagccgtggttatcatcttattctccatcacagaattcatactggtgaaaaaccttacgaatgtaaggaatgctggaaagccttt

SEQ ID NO: 637534 - DNA, 120 bp, Artificial Sequence
  ENSG00000181007_12 (sequence is synthesized)
agtcgctactcacaacttatttcacatcagagtattcatattggtgttaagccctatgactgtaaggaatgcgggaaggccttcagactactttcacaactcacacagcatcagagtatt

SEQ ID NO: 637535 - DNA, 120 bp, Artificial Sequence
  ENSG00000181007_13 (sequence is synthesized)
catattggtgagaaaccttataaatgtaaggaatgtggcaaggcctttagattgcgccaaaaacttactctacatcagagcattcatactggcgaaaaaccctttgagtgtaaggaatgt

SEQ ID NO: 637536 - DNA, 120 bp, Artificial Sequence
  ENSG00000181007_14 (sequence is synthesized)
cattcatactggcgaaaaaccctttgagtgtaaggaatgtaggaaggcctttagacttaattcatcccttattcaacatctgagaattcattctggtgagaaaccctatgaatgtaagga

SEQ ID NO: 637537 - DNA, 120 bp, Artificial Sequence
  ENSG00000181007_15 (sequence is synthesized)
catctgaaaattcataatgtaaaaatctaagaaagtcttttcaacttctgtgttatagaacattctatgaatgtagtaattaatctattttgctccatacatgcaactgcgttggcatta

SEQ ID NO: 637538 - DNA, 120 bp, Artificial Sequence
  ENSG00000181007_16 (sequence is synthesized)
gaggttttataccattaaaagagtgtgacaatgtattgtagtccatcatcactcaaacctgaaacttcagcatatttgttctaaaaactaatcctgttataagaatgaaaaagacattta

SEQ ID NO: 637539 - DNA, 120 bp, Artificial Sequence
  ENSG00000181007_17 (sequence is synthesized)
ccgtcatccctatcccatcactttgtgtcatactggacaagacgcttaactgctctgtgctataattttttaatttatgacatggtcatataagagtgcagcagtttgacacactttcaa

SEQ ID NO: 637540 - DNA, 120 bp, Artificial Sequence
  ENSG00000181007_18 (sequence is synthesized)
tcaagaggtggaatctacatccctctgttgtatacaggaatctacatccctctgtgactgcttcgcccagtagaatatggtagacgtactgctgtgctggtttcttgactcagactttac

SEQ ID NO: 637541 - DNA, 120 bp, Artificial Sequence
  ENSG00000181007_19 (sequence is synthesized)
tggtagggttacttcatctcatgaaatgacagaactgtcttgttacaaagtctggctactttgctgaagagaccacatgaagaggccctgaaactacgtagagagggagaggcacctgct

SEQ ID NO: 637542 - DNA, 120 bp, Artificial Sequence
  ENSG00000181007_20 (sequence is synthesized)
gaaccctgtcttcttgacatccaccaagataccagacatttgagtgaaattttggatccaccagaccagccaccagctaaatgccagtgagcgacttggtaacctgaactgatgccatgt

SEQ ID NO: 637543 - DNA, 120 bp, Artificial Sequence
  ENSG00000181007_21 (sequence is synthesized)
agaatggaagaattgaccagctgagcccctggcccaaatttctgacccacaaaaacatgagatataataaaatggttgttgttttaagccactaaactttcttttattatcatactaaat

SEQ ID NO: 637544 - DNA, 120 bp, Artificial Sequence
  ENSG00000181007_22 (sequence is synthesized)
atttatttttacataattcatactaaaggctgtgggcataatgagtatagaaatgccttccaccaacatttaatcttcattgaacttgagatatcttattctcgttaaaatattgaaagt

SEQ ID NO: 637545 - DNA, 120 bp, Artificial Sequence
  ENSG00000181007_23 (sequence is synthesized)
aaggaattcctttccagtttgttcattaaaaaacagataccctagaccaggtgaggtggcccatgcctgtaaatccagcactttgggaggccaagtaaggacgattgcttgaggccagaa

SEQ ID NO: 637546 - DNA, 120 bp, Artificial Sequence
  ENSG00000181007_24 (sequence is synthesized)
taaaaattagctgggcataatggtgcatgcctgtagtcctagctactcgaggctgaggtgggaggatcatttgaacccaagagttgaggcttcagtgagctgtgattgtaccactgcact

SEQ ID NO: 637547 - DNA, 120 bp, Artificial Sequence
  ENSG00000181007_25 (sequence is synthesized)
caagaccctgtctcaaaaaaaaaaaaaaactacaatcagtattctctggccccagtcaatattaaaaattgacaaaggataacatgaaactttggaaattaaaagtcacctgtattatga

SEQ ID NO: 637548 - DNA, 120 bp, Artificial Sequence
  ENSG00000181007_26 (sequence is synthesized)
tattatgaagccccattaattttttaaactacttcattgttttttaaaaatgctaaattgtcaatttagcattttgaggcaatcccctcaaattggctcctgtgtccttttatcatgacc

SEQ ID NO: 637549 - DNA, 120 bp, Artificial Sequence
  ENSG00000181007_27 (sequence is synthesized)
actccaacctttgagcttttttttttcctgaaccaaatgcattgattagttatggagcatactagagcattattaacaaataaaggaaaagaatggaatatttaccttgcctatccttta

SEQ ID NO: 637550 - DNA, 120 bp, Artificial Sequence
  ENSG00000181007_28 (sequence is synthesized)
gcctatcctttacaaactatatttcaagacaaccaaaagttggtgaaggaaagttgttgattagagaattccaactggttaaaaggtcaaaggaggccaggcgcggtggctcaagcctgt

SEQ ID NO: 637551 - DNA, 120 bp, Artificial Sequence
  ENSG00000181007_29 (sequence is synthesized)
aaaaacaaaaaacaaaacaaaacaaagatcaaatgaatgatagaatttgaaaactacgctctttaattttacaaaatcatggattttcgtggtgatagcaatggatgcgaagaccattag

SEQ ID NO: 637552 - DNA, 120 bp, Artificial Sequence
  ENSG00000181007_30 (sequence is synthesized)
accattaggtgaaaaatggataggaagcttataatgcatggagcagaatgacaggacactaatctatattaacatctctaaatgagatcagccagatgaacttgatgtgatgaaatggat

SEQ ID NO: 637553 - DNA, 120 bp, Artificial Sequence
  ENSG00000181007_31 (sequence is synthesized)
acacacagtggacacctgtgaagttttcttggctcccccaaaactgagaagtacaagttagtctccaaacctaattaccagtttacaggaaacatggggaataaaagaacaaattaacaa

SEQ ID NO: 637554 - DNA, 120 bp, Artificial Sequence
  ENSG00000181007_32 (sequence is synthesized)
acaaattaacaacacaaagaagcaaacaaccaaatgcacaatttgggaaattctgcagaagtaatggcctagttttttaaccaatacatgtcaaaaaaaaaaaaaaaaaagacaaaaatg

SEQ ID NO: 637555 - DNA, 120 bp, Artificial Sequence
  ENSG00000181007_33 (sequence is synthesized)
ttaaaggagactaagaaacgtatccttcaaatacagtgtatggagcattttaggatccttgtgttaaaatgcgcttgggatttgttttaatcaatcatggtgagacaggcagacatggaa

SEQ ID NO: 637556 - DNA, 120 bp, Artificial Sequence
  ENSG00000181007_34 (sequence is synthesized)
attattgtcatgaaggaagaagtttatacgcagatcccacaaacgggaggcatggcatggcatgcagggtcacgtaaagaagcacctgggtgtatcaggaggcagagggtgagagcacag

SEQ ID NO: 637557 - DNA, 120 bp, Artificial Sequence
  ENSG00000181007_35 (sequence is synthesized)
catggcccagagcttttattgggggttttcatgggaaggaatggacaaggcaggggtaggcacactggtaagcttaggattgaatagtttgagtaattttgttggtctctgggatctagg

SEQ ID NO: 637558 - DNA, 120 bp, Artificial Sequence
  ENSG00000181007_36 (sequence is synthesized)
ggggattcgtaattgtctagttagggcaggggaatattgaattggtgtatgagagtttggtaaaggagatagttgggagtatgggctctggattggttggtttgtatatgaaaggcatgc

SEQ ID NO: 637559 - DNA, 120 bp, Artificial Sequence
  ENSG00000181007_37 (sequence is synthesized)
ttgcagtggagtttatcatctatgcattagcttgccctgggaggggcagcctatccaggatcaaggccccaagtggccagagcatcaggaatacagaaaataaagaaaacatagtcaata

SEQ ID NO: 637560 - DNA, 120 bp, Artificial Sequence
  ENSG00000181007_38 (sequence is synthesized)
caagatttgaaggaataaaatgtctctacatattgtacaaatgtaaacatggattggttactaaatgatacgaaataatttattgttcatatgttaggcatgactatggcattatgggta

SEQ ID NO: 637561 - DNA, 120 bp, Artificial Sequence
  ENSG00000181007_39 (sequence is synthesized)
tatgtgtatgagtccttaagtgttagagattcatactgaggtatttaaggctgaaatgttatgcctgtgatttacttttaaatacttaaaaacaaaaggtgggagggatagatgaaacaa

SEQ ID NO: 637562 - DNA, 120 bp, Artificial Sequence
  ENSG00000181007_40 (sequence is synthesized)
gattagcaaaatgttggtaaatgtttaatctggatcattaggtacacagggttcattgtgccgttcttactatctttacatatattttaaattttccataataaagttttttaaagtaga

SEQ ID NO: 637563 - DNA, 85 bp, Artificial Sequence
  ENSG00000181007_41 (sequence is synthesized)
tcaagtctgaaattgtagactatttagtgatgaatgatcacatgttgcctacagataacttgggggaaatcaccaaccaaagctc

SEQ ID NO: 637564 - DNA, 120 bp, Artificial Sequence
  ENSG00000181007_42 (sequence is synthesized)
tgcctacagataacttgggggaaatcaccaaccaaagctctacttggtagaaaatttaaagcaatgcatttagaacatctggattgagaaataagtatttgtgttgttcaccattctgtt

SEQ ID NO: 637565 - DNA, 120 bp, Artificial Sequence
  ENSG00000181007_43 (sequence is synthesized)
cacacacctacagtgcctgtcacataacaggcaatttatgggaaaaaataaggattaacttaagctagaaatttttaaaaactaaggtgaataacagcaagtagtttatatgatcaaata

SEQ ID NO: 637566 - DNA, 120 bp, Artificial Sequence
  ENSG00000181007_44 (sequence is synthesized)
aattaatggaatagttaataaaataacagactaaggatattctctttgaaaagaacattaatatagaattggcagttattgagggaaaaacatgactcacagctttatgtatggaaaaag

SEQ ID NO: 637567 - DNA, 120 bp, Artificial Sequence
  ENSG00000181007_45 (sequence is synthesized)
actctgtctcaaaaaacaaacaaacaagcaaaaatcaaaaacattgtttcagatcttattttcctattgacctaagagttatttaatatagacttttgaattttcaggtagattttactt

SEQ ID NO: 637568 - DNA, 120 bp, Artificial Sequence
  ENSG00000181007_46 (sequence is synthesized)
tgaattttcaggtagattttacttgtgtttcttttaattttattattaatttccagttttagtagaaaatgtctatataatttcaaccttttttttttgctaactcctagttttgtgtct

SEQ ID NO: 637569 - DNA, 120 bp, Artificial Sequence
  ENSG00000181007_47 (sequence is synthesized)
agatttcagctttttaatagagaccaccttatcataattgaaaacctcatcctgtttctctctcatacacaactcattcagcttgtagattttcctctggctgttcctgttgctggcttg

SEQ ID NO: 637570 - DNA, 120 bp, Artificial Sequence
  ENSG00000181007_48 (sequence is synthesized)
ccatcctctggcctacatgtaacgtgacttctgttagcaagtccttcacattcagatgactgcaacagttgaacatgcacattacttttttccacatttctgagttacaggcatatcctg

SEQ ID NO: 637571 - DNA, 120 bp, Artificial Sequence
  ENSG00000181007_49 (sequence is synthesized)
tctttttgtgccatgaatttcataagaacttcagtaagatatagacgtgttttcctgtccgaaaaatcactgatacacatttcctaaaaaaacaggaatggccttgactatgagggaatg

SEQ ID NO: 637572 - DNA, 120 bp, Artificial Sequence
  ENSG00000181007_50 (sequence is synthesized)
gaaaggagaaaacctgagcaatgggaggaaagaacaaaaccagttgaacatttgtcaaatgaatgagtaatagaataagttgaagggaagattgagtaggtagaactcctcaataccttt

SEQ ID NO: 637573 - DNA, 120 bp, Artificial Sequence
  ENSG00000181007_51 (sequence is synthesized)
gctatggtgtagagacaaagaaaaagttacccatagctatgtgaaggggcaaatgggcagtgcactgcataggtaaaggcataagcagtggcagatgcataggaatatacagccacctat

SEQ ID NO: 637574 - DNA, 120 bp, Artificial Sequence
  ENSG00000181007_52 (sequence is synthesized)
ttccattcttgtatttagctgggctgccctggatgaataaagagaatatttaatcactgtagtaaggcatgagagactagaggcagagagatacatttagaacaagtatgtagctatggg

SEQ ID NO: 637575 - DNA, 120 bp, Artificial Sequence
  ENSG00000181007_53 (sequence is synthesized)
aattaaatgagtaaaacctattatatgcttagcatttattacttaatgtagcgttaactagggattgtttctgtccttgaggaggtttataggtaagaataggcagtataacaattggag

SEQ ID NO: 637576 - DNA, 120 bp, Artificial Sequence
  ENSG00000181007_54 (sequence is synthesized)
aagttaataaatatataatttttaaattgagagctattataaaggcaaggaatagagaatagcaacatggatttaggtactatcaatagggtcaaccttaaaggaaatgacttttaatct

SEQ ID NO: 637577 - DNA, 120 bp, Artificial Sequence
  ENSG00000181007_55 (sequence is synthesized)
aagatctcaagatgaaaggagccagccatgcaaagagcccaatcaggagatttgtgggagatagaacagactgtgaagagtcctaagagatggaagtaagttaggacatgtgaggtctgc

SEQ ID NO: 637578 - DNA, 120 bp, Artificial Sequence
  ENSG00000181007_56 (sequence is synthesized)
aaggaggcctctccagggagcagtaaaggggacactggtttgagatcatatgatgtaggtaagcagaggccttcttaaccacagtgagcttgactggattctgagaatgaagaaagatga

SEQ ID NO: 637579 - DNA, 120 bp, Artificial Sequence
  ENSG00000181007_57 (sequence is synthesized)
aaaaaatttaagtatagattctcgacctctcatcttcatcagaattatcatgtagagaatattaaatatccttccaggactgcagagtctgatccaggtggtttgggtggtgtctaaacc

SEQ ID NO: 637580 - DNA, 120 bp, Artificial Sequence
  ENSG00000181007_58 (sequence is synthesized)
tcagtgttagtaacaagctatgtggtgattctgatccacacctcaatatgagaaccactgacttaaaatgtttacttcatcaccaatcttgctattttgtatgaactctcatttttcctg

SEQ ID NO: 637581 - DNA, 120 bp, Artificial Sequence
  ENSG00000181007_59 (sequence is synthesized)
atgttccctttggctttttttttctttccaaattgtataacaatattttagagttttggttaaggattacttttgttgtcttttatttctacattagaaatgttgcttcttttagtaaaa

SEQ ID NO: 637582 - DNA, 120 bp, Artificial Sequence
  ENSG00000181007_60 (sequence is synthesized)
agagccttggaaagttgtgaggaaaggaagaagacaatatccagatgctgcgataaccaaaaggacttcgaagatgaaaatgtcagcattatggcagatgtatgattactggtatggtga

SEQ ID NO: 637583 - DNA, 120 bp, Artificial Sequence
  ENSG00000181007_61 (sequence is synthesized)
ggaaagcaactcccatcatgctttgtaaccagctgcttgctttttttgaatgatacttttcaatagaatagaaagcccactagtcctatcttttatatatacattatatgtatttaaact

SEQ ID NO: 637584 - DNA, 120 bp, Artificial Sequence
  ENSG00000181007_62 (sequence is synthesized)
ttcttattgatcaatatttaggtgataagcattttctcactgtgaaaaataccttattgaataggtctgtgtttattactgtacataagcaagagtttctctaaggtatttatcaaaagt

SEQ ID NO: 637585 - DNA, 120 bp, Artificial Sequence
  ENSG00000181007_63 (sequence is synthesized)
aggattgctcagtcatagttaatatttactttcaacctcactagatactgtcatagaagtagagagcatcagtatgctcccagtgcacaatcccttcaaccagtgaaatatgttttcctt

SEQ ID NO: 637586 - DNA, 120 bp, Artificial Sequence
  ENSG00000181007_64 (sequence is synthesized)
atttccttatatccttacttctggtatgcatagtaatattttcctggttaatagtgaattgggcatattttcacatctgaatattggctaaacgctgtaacttgccaatttatgtctttg

SEQ ID NO: 637587 - DNA, 120 bp, Artificial Sequence
  ENSG00000181007_65 (sequence is synthesized)
taagattcttaaaaaataaaattctagatagtagtcctttgttataaatggacttaccttctcccatattgtatttatgttgatattgtcatatgaatacgttaaatgtggatacaatca

SEQ ID NO: 637588 - DNA, 120 bp, Artificial Sequence
  ENSG00000181007_66 (sequence is synthesized)
tagctttcattattacctaataatcttttaaattttattttttactagactcttggttttctaggcaatcaggtgtgtcaactgcaaatagatataattttgtttttttctaaatatagt

SEQ ID NO: 637589 - DNA, 120 bp, Artificial Sequence
  ENSG00000181007_67 (sequence is synthesized)
gattattttttaaattattgttattgtaatagagtctccaaaacaaggtttagtattcatggtgataccaggcatctggtcattttctccaatttaatgaaaattacttggtgtaatgtt

SEQ ID NO: 637590 - DNA, 120 bp, Artificial Sequence
  ENSG00000181007_68 (sequence is synthesized)
tactctaggtctgagataaatagattttgtagctcagttgtctcagttcttgtttaacttttttttttattagaaatatctgctaaatatagtcagatgcctttttggctcattgatatg

SEQ ID NO: 637591 - DNA, 120 bp, Artificial Sequence
  ENSG00000181007_69 (sequence is synthesized)
atgtttttctccttgagtttgttaatgtgacaagttgtactgtagtcattaaggcaggtatgttagaatgaaccagaatgttcgatgagcaagaatgaacaaatagaccaatggaacaaa

SEQ ID NO: 637592 - DNA, 120 bp, Artificial Sequence
  ENSG00000181007_70 (sequence is synthesized)
ataaagagccctgaagtagatctctctctctatatatatgtggttgtctaatttgtgataaagtttcctcggccatgtggttgggaaatggtggtcttttcaataaaaagcactggatca

SEQ ID NO: 637593 - DNA, 120 bp, Artificial Sequence
  ENSG00000181009_0 (sequence is synthesized)
ttctcttcaggatgaaacttctggaaaaatagaatgcctctatttaattcattatgctggtttccaacaattcatgtgactcctccatcttttattcttaatggaatacctggtctggaa

SEQ ID NO: 637594 - DNA, 120 bp, Artificial Sequence
  ENSG00000181009_1 (sequence is synthesized)
agagtacatgtatggatctccctcccactctgcacaatgtacatcatcttccttgtggggaatcttggtcttgtgtacctcatttattatgaggagtccttacatcatccgatgtatttt

SEQ ID NO: 637595 - DNA, 120 bp, Artificial Sequence
  ENSG00000181009_2 (sequence is synthesized)
ttttttggccatgctctctccctcattgacctccttacctgcaccaccactctacccaatgcactctgcatcttctggttcagtctcaaagaaattaacttcaatgcttgcttggcccag

SEQ ID NO: 637596 - DNA, 120 bp, Artificial Sequence
  ENSG00000181009_3 (sequence is synthesized)
atgttctttgttcatgggttcacaggtgtggagtctggggtgctcatgctcatggctctagaccgctatgtagccatttgctaccctttgcgttatgctaccacactcaccaaccctatc

SEQ ID NO: 637597 - DNA, 120 bp, Artificial Sequence
  ENSG00000181009_4 (sequence is synthesized)
tttgcctttctgccaaagcaatattatctcccatacgtactgcgaccacatgtctgtagtaaagctatcttgtgccagcatcaaggtcaatgtaatctatggtctaatggttgctctcct

SEQ ID NO: 637598 - DNA, 120 bp, Artificial Sequence
  ENSG00000181009_5 (sequence is synthesized)
gattggagtgtttgacatttgttgtatatctttgtcttacactttgatcctcaaggcagcgatcagcctctcttcatcagatgctcggcagaaggctttcagcacctgcactgcccatat

SEQ ID NO: 637599 - DNA, 120 bp, Artificial Sequence
  ENSG00000181009_6 (sequence is synthesized)
atctgccatcatcatcacctatgttccagcattcttcactttctttgcccaccgttttgggggacacacaattcccccttctcttcacatcattgtggctaatctttatcttcttcttcc

SEQ ID NO: 637600 - DNA, 120 bp, Artificial Sequence
  ENSG00000181009_7 (sequence is synthesized)
cccaactctaaaccctattgtttatggagtaaagacaaaacagatacgcaagagtgtcataaagttcttccagggtgataagggtgcaggttgattcaaggcaacttaattcagatggaa

SEQ ID NO: 637601 - DNA, 120 bp, Artificial Sequence
  ENSG00000181009_8 (sequence is synthesized)
tgggccctctccctggcatgaacacctttcacatcacttctcctcaggagctatattgtggccagaggcaaccatggatgctacatgtattttgtgtcaaatggctgcccagcgtgggat

SEQ ID NO: 637602 - DNA, 120 bp, Artificial Sequence
  ENSG00000181009_9 (sequence is synthesized)
gaggaggccgcacaggatgcaacagtgataggatcaatcactccacccttcaccagatactggaggcgtggacatctacatcaggtaatggaactcattgtcatcaaggatggacaagca

SEQ ID NO: 637603 - DNA, 120 bp, Artificial Sequence
  ENSG00000181009_10 (sequence is synthesized)
aacttacgtgtgatattttacatttattcatgtgtagtatcatacattttctctctcagtctatgttttctgaaactgttttggggaaatttatagcccattctggatgtatatctcagt

SEQ ID NO: 637604 - DNA, 120 bp, Artificial Sequence
  ENSG00000181009_11 (sequence is synthesized)
cagtgcctttcccttaatttttgtctattgccagtttttaaaaaatgagtttaactcaatttatttaaattgacacataaagttaaatatgtcatatataacataatgttttaaatatat

SEQ ID NO: 637605 - DNA, 120 bp, Artificial Sequence
  ENSG00000181009_12 (sequence is synthesized)
accttacagaatggctaaaactagttcaattcatagaagtaaaaagtagaatggtgtttttttaaaaatcacgtgttatttttctaaattttttaaattgatacataatagttttacaca

SEQ ID NO: 637606 - DNA, 120 bp, Artificial Sequence
  ENSG00000181009_13 (sequence is synthesized)
tttgggaggtgcaaatgatattttgatacatgcataaaatgtgtaataattcaatcaaggtaattagaatatccatcacctcaaacatttatcttttctttttattggaaacattcaaat

SEQ ID NO: 637607 - DNA, 120 bp, Artificial Sequence
  ENSG00000181009_14 (sequence is synthesized)
tctctttgagccatgttgaaacacgtaataaattattgttaactacagttatccactgtactattgaacactatgtcttattctttttaactgtattttagtacctattaattaacctct

SEQ ID NO: 637608 - DNA, 120 bp, Artificial Sequence
  ENSG00000181009_15 (sequence is synthesized)
tttcatcctctcttcctcccaccattcccagcatctggtaaccaccagtctactctctatctccttgagatccacctttttagctcccacatataaatgagaacaacaatatatatccaa

SEQ ID NO: 637609 - DNA, 120 bp, Artificial Sequence
  ENSG00000181009_16 (sequence is synthesized)
aaaaagaaaaacaatatgttgaagagataccagatacctgcactcccatgtttgttgcaacattgttcacaatagccaagacatgaaatcaacctgtgtccatcaacagagaagtggata

SEQ ID NO: 637610 - DNA, 120 bp, Artificial Sequence
  ENSG00000181009_17 (sequence is synthesized)
aagaaaatgtggcatcataaaaaatgatgaaattctgtaatttgcagcatcatggatgaagctggaaattagcatgttaaatgaaataagccagccacagaaagacaaaagttacattgc

SEQ ID NO: 637611 - DNA, 120 bp, Artificial Sequence
  ENSG00000181009_18 (sequence is synthesized)
ccgttttaatcaagtcgttggtatgaattcacacaacttttatctaatatattcatcttggatatattcttaaactttgaaagagtccttaagtgtcttgtctatgttgataatctttcc

SEQ ID NO: 637612 - DNA, 120 bp, Artificial Sequence
  ENSG00000181009_19 (sequence is synthesized)
tatagaacattttccagcccagtcagtctttgaagctaaaattaggtttatgaattaattttgagaaatatttttatgtatatattagaatggacagacaagtcttatttacctcaaggc

SEQ ID NO: 637613 - DNA, 120 bp, Artificial Sequence
  ENSG00000181009_20 (sequence is synthesized)
ttgcgtacaccagaagtcagtgcaggagctagttggtatatggtatggctttcccagttaaatgtcaaccaattggtgaaatgattgattaaatcattgattcactgattcattcattca

SEQ ID NO: 637614 - DNA, 120 bp, Artificial Sequence
  ENSG00000181009_21 (sequence is synthesized)
tgcttcatttgttagttatttcatttcccatatttctgaatatttttatcaactcagctaaatcttaaaatagaacttatcattacctcttcctggttgtcacacacactatattatcac

SEQ ID NO: 637615 - DNA, 120 bp, Artificial Sequence
  ENSG00000181016_0 (sequence is synthesized)
agtccaataaaaacctcatcagttaccaactaaatcagggcatggtgtttttttgttgttttctttttaaagcatagttttagtaatatatttactaaaaaccttagacattatgaaaaa

SEQ ID NO: 637616 - DNA, 120 bp, Artificial Sequence
  ENSG00000181016_1 (sequence is synthesized)
agtcaggatttggaatcttacactgcttggctaaattgacacaatatagaccaacagtttcatcctggggcttatgggtctcataggagcacccgtatgctgaagaaaggcaaagagaga

SEQ ID NO: 637617 - DNA, 120 bp, Artificial Sequence
  ENSG00000181016_2 (sequence is synthesized)
tcataggagcacccgtatgctgaagaaaggcaaagagagaactacagaatttgtagaaaagttttgttgtagttgcttctgaacaattagtttttgtttgtttgttttgttttgttttgt

SEQ ID NO: 637618 - DNA, 120 bp, Artificial Sequence
  ENSG00000181016_3 (sequence is synthesized)
aatgactcattcttcccaggacactggttcttgtggcattcaggaagatggaaagctttatgtggtggattccataaatgacttaaacaaactaaacctctgtccagccggatcgcagca

SEQ ID NO: 637619 - DNA, 120 bp, Artificial Sequence
  ENSG00000181016_4 (sequence is synthesized)
tctgttccctctagaggacaaaatcccagtccttggcacaaactcaggaaatggaagccggagtctgttttttgtggggctgctaattgtgctgattgtcagcctggcactggttttttt

SEQ ID NO: 637620 - DNA, 120 bp, Artificial Sequence
  ENSG00000181016_5 (sequence is synthesized)
cgtgatatttctaatagttcaaactggaaacaagatggatgatgtgtcaagaagactaacagctgaaggaaaagacatagatgatcttaagagaatcaataacatgatcgtaaagcgact

SEQ ID NO: 637621 - DNA, 120 bp, Artificial Sequence
  ENSG00000181016_6 (sequence is synthesized)
caaccaactcaaccaactggactctgaacaaaactaaaggaatgattttctgaaagcacctgctaacaccttgagctttttactttcctgggagtgtacagggttaggaactgagaaagt

SEQ ID NO: 637622 - DNA, 120 bp, Artificial Sequence
  ENSG00000181016_7 (sequence is synthesized)
ggagcaattccaaggcaagtgggtatgggaatagcaactaaaaaggggtgaacttgtctcagcccccttttatggtagggcacttcaactttaatggggtgggcggctagcagggaggag

SEQ ID NO: 637623 - DNA, 120 bp, Artificial Sequence
  ENSG00000181016_8 (sequence is synthesized)
aatcaacaaagcaagagaacttgactatgtacgtccaacttcttacagaaggagctttgctaccagaacaagttcactgtgtcaatgaagttcatgacacctcatgcacctttacagata

SEQ ID NO: 637624 - DNA, 120 bp, Artificial Sequence
  ENSG00000181016_9 (sequence is synthesized)
tctgggaaagcctgagaaattcattgagttttatgtattgaagggaaccaggtgattactcttttcaataagagggattctgctcaggtgattagactttgactctatttccccagggac

SEQ ID NO: 637625 - DNA, 120 bp, Artificial Sequence
  ENSG00000181016_10 (sequence is synthesized)
agtgatgggtgggccccagagctagttgctgtctggtgtttgctggtgaaaacatgagcagtagttatgtggggctgagagtcaaaagggaaagcctaattaattcaactaatgtttatt

SEQ ID NO: 637626 - DNA, 120 bp, Artificial Sequence
  ENSG00000181016_11 (sequence is synthesized)
aagctcctactctgtgcaaatcactctactcaagaggagctcacataagagtgcaggataaagaaaggagatggacagttatatgtaattatataaactttgtgtattttgtttctcatg

SEQ ID NO: 637627 - DNA, 120 bp, Artificial Sequence
  ENSG00000181016_12 (sequence is synthesized)
aaaaaacccctttggcaccctgctgattgatttggaagaaatctgatagatttgtggcctttcctaaattgcactaggaaattatgtagttagaatatttggaacctgcattagttccag

SEQ ID NO: 637628 - DNA, 120 bp, Artificial Sequence
  ENSG00000181016_13 (sequence is synthesized)
caatgaaagtaagacacacagcatatgacataagacacagtgtgaaataaatgagtttaaaaagcatatgagtcttagaaaatcttttatttaatataaaaatattctaccggtcaattg

SEQ ID NO: 637629 - DNA, 120 bp, Artificial Sequence
  ENSG00000181016_14 (sequence is synthesized)
aagaatgtattatgattctatcattttggattgatcaaaaacatttgggtttactacgatattaagcattcactttacaatactaaatagttaatgaaataaacacattttgcttaccca

SEQ ID NO: 637630 - DNA, 120 bp, Artificial Sequence
  ENSG00000181016_15 (sequence is synthesized)
agtgtttgcaagtcagtcatcatagtggcagcttccgcctgctacaggatatttatatatggaagcataccatggcaggagtgctggaaaggtggtgtcagctaacagttgcttcagcca

SEQ ID NO: 637631 - DNA, 120 bp, Artificial Sequence
  ENSG00000181016_16 (sequence is synthesized)
agtcatcatagtggcagcttccgcctgctacaggatatttatatatggaagcataccatggcaggagtgctggaaaggtggtgtcagctaacagttgcttcagccagataaggacggtgt

SEQ ID NO: 637632 - DNA, 120 bp, Artificial Sequence
  ENSG00000181016_17 (sequence is synthesized)
tccatcttaacataagtcaccaacttctaaacctggcactgggcatttgaagaataggattcgtccctactctaaggagttttcagtctatcgggaaatcaaagatgtaagcaaatagat

SEQ ID NO: 637633 - DNA, 120 bp, Artificial Sequence
  ENSG00000181016_18 (sequence is synthesized)
gtttaaatggatgtaggcttaactgattattcctataataaaagaagtttccagggaaatatcccagagcattcaattgagtcttccacccagcataggtatcccacaaccagctctgtt

SEQ ID NO: 637634 - DNA, 120 bp, Artificial Sequence
  ENSG00000181016_19 (sequence is synthesized)
ttactcctgggttactttgggaaagggtaatagaacttctatcactcttagcctttaacttctatattccctctccccacacacaaaaattcatgttctgctatttcagtgttaagacag

SEQ ID NO: 637635 - DNA, 120 bp, Artificial Sequence
  ENSG00000181019_0 (sequence is synthesized)
acacgcgactcccacaaggttgcagccggagccgcccagctcaccgagagcctagttccggccagggtcgccccggcaaccacgagcccagccaatcagcgccccggactgcaccagagc

SEQ ID NO: 637636 - DNA, 120 bp, Artificial Sequence
  ENSG00000181019_1 (sequence is synthesized)
catggtcggcagaagagcactgatcgtactggctcactcagagaggacgtccttcaactatgccatgaaggaggctgctgcagcggctttgaagaagaaaggatgggaggtggtggagtc

SEQ ID NO: 637637 - DNA, 120 bp, Artificial Sequence
  ENSG00000181019_2 (sequence is synthesized)
ggacctctatgccatgaacttcaatcccatcatttccagaaaggacatcacaggtaaactgaaggaccctgcgaactttcagtatcctgccgagtctgttctggcttataaagaaggcca

SEQ ID NO: 637638 - DNA, 120 bp, Artificial Sequence
  ENSG00000181019_3 (sequence is synthesized)
tctgagcccagatattgtggctgaacaaaagaagctggaagccgcagaccttgtgatattccagttccccctgcagtggtttggagtccctgccattctgaaaggctggtttgagcgagt

SEQ ID NO: 637639 - DNA, 120 bp, Artificial Sequence
  ENSG00000181019_4 (sequence is synthesized)
gttcataggagagtttgcttacacttacgctgccatgtatgacaaaggacccttccggagtaagaaggcagtgctttccatcaccactggtggcagtggctccatgtactctctgcaagg

SEQ ID NO: 637640 - DNA, 120 bp, Artificial Sequence
  ENSG00000181019_5 (sequence is synthesized)
gatccacggggacatgaatgtcattctctggccaattcagagtggcattctgcatttctgtggcttccaagtcttagaacctcaactgacatatagcattgggcacactccagcagacgc

SEQ ID NO: 637641 - DNA, 120 bp, Artificial Sequence
  ENSG00000181019_6 (sequence is synthesized)
ccgaattcaaatcctggaaggatggaagaaacgcctggagaatatttgggatgagacaccactgtattttgctccaagcagcctctttgacctaaacttccaggcaggattcttaatgaa

SEQ ID NO: 637642 - DNA, 120 bp, Artificial Sequence
  ENSG00000181019_7 (sequence is synthesized)
aaaagaggtacaggatgaggagaaaaacaagaaatttggcctttctgtgggccatcacttgggcaagtccatcccaactgacaaccagatcaaagctagaaaatgagattccttagcctg

SEQ ID NO: 637643 - DNA, 120 bp, Artificial Sequence
  ENSG00000181019_8 (sequence is synthesized)
gatttccttctaacatgttatcaaatctgggtatctttccaggcttccctgacttgctttagtttttaagatttgtgtttttctttttccacaaggaataaatgagagggaatcgactgt

SEQ ID NO: 637644 - DNA, 120 bp, Artificial Sequence
  ENSG00000181019_9 (sequence is synthesized)
attcgtgcatttttggatcatttttaactgattcttatgattactatcatggcatataaccaaaatccgactgggctcaagaggccacttagggaaagatgtagaaagatgctagaaaaa

SEQ ID NO: 637645 - DNA, 120 bp, Artificial Sequence
  ENSG00000181019_10 (sequence is synthesized)
gttctttaaaggcatctacacaatttaattcctctttttagggctaaagttttagggtacagtttggctaggtatcattcaactctccaatgttctattaatcacctctctgtagtttat

SEQ ID NO: 637646 - DNA, 120 bp, Artificial Sequence
  ENSG00000181019_11 (sequence is synthesized)
ggcagaagggaattgctcagagaaggaaaagactgaatctacctgccctaagggacttaacttgtttggtagttagccatctaatgcttgtttatgatatttcttgctttcaattacaaa

SEQ ID NO: 637647 - DNA, 120 bp, Artificial Sequence
  ENSG00000181019_12 (sequence is synthesized)
gcagttactaatatgcctagcacaagtaccactcttggtcagcttttgttgtttatatacagtacacagataccttgaaaggaagagctaataaatctcttctttgctgcagtcatctac

SEQ ID NO: 637648 - DNA, 120 bp, Artificial Sequence
  ENSG00000181019_13 (sequence is synthesized)
ctgggattacaggcgtgatccaccacacctggcccttgcaatcttctactttaaggtttgcagagataaaccaataaatccacaccgtacatctgcaatatgaattcaagaaaggaaata

SEQ ID NO: 637649 - DNA, 120 bp, Artificial Sequence
  ENSG00000181019_14 (sequence is synthesized)
ccgtacatctgcaatatgaattcaagaaaggaaatagtaccttcaatacttaaaaatagtcttccacaaaaaatactttatttctgatctatacaaattttcagaaggttattttcttta

SEQ ID NO: 637650 - DNA, 120 bp, Artificial Sequence
  ENSG00000181019_15 (sequence is synthesized)
tcattgctaaactgatgacttactatgggatggggtccagtcccatgaccttggggtacaattgtaaacctagagttttatcaactttggtgaacagttttggcataatagtcaatttct

SEQ ID NO: 637651 - DNA, 120 bp, Artificial Sequence
  ENSG00000181019_16 (sequence is synthesized)
acttctggaagtcatctcattccactgttggtattatataattcaaggagaatatgataaaacactgccctcttgtggtgcattgaaagaagagatgagaaatgatgaaaaggttgcctg

SEQ ID NO: 637652 - DNA, 120 bp, Artificial Sequence
  ENSG00000181019_17 (sequence is synthesized)
aaaaatgggagacagcctcttacttgccaagaaaatgaagggattggaccgagctggaaaacctcctttaccagatgctgactggcactggtggtttttgctctcgacagtatccacaat

SEQ ID NO: 637653 - DNA, 120 bp, Artificial Sequence
  ENSG00000181019_18 (sequence is synthesized)
agctgacggctgggtgtttcagtttgaaaatattttgttgccttcatcttcactgcaattttgtgtaaatttctcaaagatctgaattaaataaataaaattcatttctacagacccaca

SEQ ID NO: 637654 - DNA, 120 bp, Artificial Sequence
  ENSG00000181019_19 (sequence is synthesized)
agaaggctctcaccagacacagcccctccacctggacttctcagcctccatggctgtaagaaattctttttctttatacattgcccagcttcaggtattctgttaaaatcaagagaaaac

SEQ ID NO: 637655 - DNA, 120 bp, Artificial Sequence
  ENSG00000181019_20 (sequence is synthesized)
acatcggaaggggtgtcagggacatttgcgtgcttattgtcctagacatgtacctaattagctatgagatcttaaacagttacccactttactgcattctctgcaaataagggtgattac

SEQ ID NO: 637656 - DNA, 120 bp, Artificial Sequence
  ENSG00000181023_0 (sequence is synthesized)
ttctgtggtggttccaacctgtgataactgagaacaatacaaatagagatttgaaattcatgttgaatcatgaatcatatgtctgcatctctcaaaatctccaatagctccaaattccag

SEQ ID NO: 637657 - DNA, 120 bp, Artificial Sequence
  ENSG00000181023_1 (sequence is synthesized)
gtctctgagttcatcctgctgggattcccgggcattcacagctggcaacactggctatctctgcccctggcactactgtatctctcagcacttgctgcaaacaccctcatcctcatcatc

SEQ ID NO: 637658 - DNA, 120 bp, Artificial Sequence
  ENSG00000181023_2 (sequence is synthesized)
atctggcagaacccttctttacagcagcccatgtatattttccttggcatcctctgtatggtagacatgggtctggccactactatcatccctaagatcctggccatcttctggtttgat

SEQ ID NO: 637659 - DNA, 120 bp, Artificial Sequence
  ENSG00000181023_3 (sequence is synthesized)
gccaaggttattagcctccctgagtgctttgctcagatttatgccattcacttctttgtgggcatggagtctggtatcctactctgcatggcttttgatagatatgtggctatttgtcac

SEQ ID NO: 637660 - DNA, 120 bp, Artificial Sequence
  ENSG00000181023_4 (sequence is synthesized)
cctcttcgctatccatcaattgtcaccagttccttaatcttaaaagctaccctgttcatggtgctgagaaatggcttatttgtcactccagtgcctgtgcttgcagcacagcgtgattat

SEQ ID NO: 637661 - DNA, 120 bp, Artificial Sequence
  ENSG00000181023_5 (sequence is synthesized)
tgctccaagaatgaaattgaacactgcctgtgctctaaccttggggtcacaagcctggcttgtgatgacaggaggccaaacagcatttgccagttggttctggcatggcttggaatgggg

SEQ ID NO: 637662 - DNA, 120 bp, Artificial Sequence
  ENSG00000181023_6 (sequence is synthesized)
agtgatctaagtcttattatactgtcatatattttgattctgtactctgtacttagactgaactcagctgaagctgcagccaaggccctgagcacttgtagttcacatctcaccctcatc

SEQ ID NO: 637663 - DNA, 120 bp, Artificial Sequence
  ENSG00000181023_7 (sequence is synthesized)
cttttcttttacactattgttgtagtgatttcagtgactcatctgacagagatgaaggctactttgattccagttctacttaatgtgttgcacaacatcatccccccttccctcaaccct

SEQ ID NO: 637664 - DNA, 120 bp, Artificial Sequence
  ENSG00000181023_8 (sequence is synthesized)
gccttccaaaaggtgctgtttgcccttacaaaagaaataagatcttagagaccttctccatgatgtacatgaacctcagcttctcctaaactggatagtaaaatttcaaagaggataaat

SEQ ID NO: 637665 - DNA, 120 bp, Artificial Sequence
  ENSG00000181023_9 (sequence is synthesized)
gagtaagtgaatacctttgggattccctttttatatttgtatgtaaataattgtgaaagcttcagaaaagatacaaaaaatcacagtagcctaaaatattgacaaaagctaaatatttaa

SEQ ID NO: 637666 - DNA, 120 bp, Artificial Sequence
  ENSG00000181023_10 (sequence is synthesized)
atatatttgagaatatggaagaaatttctgccaaatcaaattggatttaaagaacttaatgattgatatctatctcttaaaataaaaatgaatataatcacacacccacaaatacacaca

SEQ ID NO: 637667 - DNA, 120 bp, Artificial Sequence
  ENSG00000181023_11 (sequence is synthesized)
cagacacacatacattcaatcagacaaatgagtgattgggacatgaatcacaggtcatgcttgcgcattgttagctgtaacttgggagctgtaacttgggagcaaagtcagtctgcctaa

SEQ ID NO: 637668 - DNA, 120 bp, Artificial Sequence
  ENSG00000181023_12 (sequence is synthesized)
acaagcattactccagtaatatgaaatacagaggtcggaaaagaaaataattcagataaagccaaatcagtcaatgatgaggatttatgtggaatatgagatgactcagcttggacagac

SEQ ID NO: 637669 - DNA, 120 bp, Artificial Sequence
  ENSG00000181023_13 (sequence is synthesized)
agaacccaaaagattcatctagctagaaggatctggtgcttacgccgtttgcctccccagatttgctgtctgccctttgtgcactgctctgtaaactggagggctgactttcacatattg

SEQ ID NO: 637670 - DNA, 120 bp, Artificial Sequence
  ENSG00000181023_14 (sequence is synthesized)
taagcccaaactcctttgtctttcggtgttcagttgaattgagccaatgtgatgcgtgacagattatagttcaagaggagacagcatttgggctatttattattctactcccagcctgct

SEQ ID NO: 637671 - DNA, 120 bp, Artificial Sequence
  ENSG00000181023_15 (sequence is synthesized)
ttgacatgagggttttcactggatatgtcccttctctggccacccacctgctacagctacagcttttatggaaatatagtaacaggcttgtcttgccttctttcttcaggccaaggggct

SEQ ID NO: 637672 - DNA, 120 bp, Artificial Sequence
  ENSG00000181023_16 (sequence is synthesized)
gataaaggcttcctgatagtagtctctgagtgcccagcatccattattttttaatatccacttgttttcttaaacaacctactactcaataccaacttcattaaattgtcttcaaactca

SEQ ID NO: 637673 - DNA, 120 bp, Artificial Sequence
  ENSG00000181026_0 (sequence is synthesized)
ccggacgccacgtgcagaccggaagagacacgcggggcttcaggctgctgccccattggaagattactccccaggcttcccttgccccaagcagtgagctgactggaatggtaccccggg

SEQ ID NO: 637674 - DNA, 120 bp, Artificial Sequence
  ENSG00000181026_1 (sequence is synthesized)
aggcccctgagtctgctcagtgcctgtgcccttccctcaccatcccaaatgccaaggatgtgcttcggaagaggcacaagagaaggagccgacagcaccagcggttcatggcccggaagg

SEQ ID NO: 637675 - DNA, 120 bp, Artificial Sequence
  ENSG00000181026_2 (sequence is synthesized)
ccttgctgcaggagcaggggctgctgagcatgcctccagaaccagggtcctccccactgcccacccctttcggggcagcgacagcaactgaagctgccagcagtgggaagcagtgtctga

SEQ ID NO: 637676 - DNA, 120 bp, Artificial Sequence
  ENSG00000181026_3 (sequence is synthesized)
gggctggatctggcagtgccccatgcagcagaaggcctgctcccgggaaagcctcagggcccttgcccagcaagtgtgtggctatcgactgtgagatggtgggcacgggaccccgagggc

SEQ ID NO: 637677 - DNA, 120 bp, Artificial Sequence
  ENSG00000181026_4 (sequence is synthesized)
gggtaagcgagctggcccgctgttccattgtgagctaccatggcaatgtcctctatgacaagtacatcaggcctgagatgcccatcgctgactaccgtacccgctggagtggcatcactc

SEQ ID NO: 637678 - DNA, 120 bp, Artificial Sequence
  ENSG00000181026_5 (sequence is synthesized)
ggcagcacatgcgcaaggctgtccccttccaggtggcccagaaagagatccttaagctcctgaagggcaaggtggtggtggggcacgcgctgcacaacgacttccaggcgctcaagtatg

SEQ ID NO: 637679 - DNA, 120 bp, Artificial Sequence
  ENSG00000181026_6 (sequence is synthesized)
tccaccctcggagccagacccgggatacgacctatgtcccaaacttcctcagcgagcccggcctccacacccgggcccgggtctctctaaaggacctggccctgcagctgctgcacaaga

SEQ ID NO: 637680 - DNA, 120 bp, Artificial Sequence
  ENSG00000181026_7 (sequence is synthesized)
agatccaggtgggccagcacgggcactcatcagtagaagatgccacgacagccatggagctctaccggctggtggaggtgcagtgggaacagcaggaggcccgcagcctctggacctgcc

SEQ ID NO: 637681 - DNA, 120 bp, Artificial Sequence
  ENSG00000181026_8 (sequence is synthesized)
ccgaggacagagaacctgacagcagcacagacatggaacagtacatggaggaccagtactggcccgatgacctggcccacggcagcagaggaggagccagggaggcacaggacagaagga

SEQ ID NO: 637682 - DNA, 120 bp, Artificial Sequence
  ENSG00000181026_9 (sequence is synthesized)
attgagaagggggcggggctccctggctgggcttccggtgtggccggtaggaagtgggggccaggagagcagcgggcactccttcctgggcagggtggggcaggatgcagtgagccagcc

SEQ ID NO: 637683 - DNA, 120 bp, Artificial Sequence
  ENSG00000181026_10 (sequence is synthesized)
ccagggccagaggagtaggggtcatctgttaccttgacaccctctgcacacagcatagccctctctctctccagggctgttggttctttcttctgactcctgtggttttgctaatggcac

SEQ ID NO: 637684 - DNA, 120 bp, Artificial Sequence
  ENSG00000181026_11 (sequence is synthesized)
tttacagactccatggagatgtcaggtggaccatcttctagggcccagcaggagtagggaatgtgccaacagactgcccaggttgccgtggccttccccaccccccagatctcctgagtc

SEQ ID NO: 637685 - DNA, 120 bp, Artificial Sequence
  ENSG00000181026_12 (sequence is synthesized)
agctcccttaccccaactcaatgacttgggggtaaagttctcttccttttgttgcctacctcttcctccactcatttgggttcagaataaacatgtcctgaagttaaagaggagttaagt

SEQ ID NO: 637686 - DNA, 120 bp, Artificial Sequence
  ENSG00000181026_13 (sequence is synthesized)
cctaaaggaggcatttcttccccacctccctgacctggaactctggctacagccattgtaggaactccgtgcctggcctgtcagctccctgctaggctacagtggaatagcagagcccac

SEQ ID NO: 637687 - DNA, 120 bp, Artificial Sequence
  ENSG00000181026_14 (sequence is synthesized)
aggcttctcgtggggagttggctccttaacatttcttggcaacagaaagccccaggcacagctcagggaggagggaaggcaggtaagctttggacgagaactggcatatttattttgacc

SEQ ID NO: 637688 - DNA, 120 bp, Artificial Sequence
  ENSG00000181026_15 (sequence is synthesized)
caaatcagggatttccccagtccacccagtactgggctcttaagcaaaagtctgagaaacaagacagtggtttgaattctggggcctttgtgtaggattgtgcctgacctttatttattt

SEQ ID NO: 637689 - DNA, 120 bp, Artificial Sequence
  ENSG00000181026_16 (sequence is synthesized)
attaacagcagggccactcgtctagggcagtggagtctgcgtgtctcctggggctggggcagggcattggcagttacgcagtggccctgaacctggtctggtgcccccgaacctggtctg

SEQ ID NO: 637690 - DNA, 120 bp, Artificial Sequence
  ENSG00000181026_17 (sequence is synthesized)
atgccccctcagctctttgacaatcactgtggctgttgggttttctcctatttctaaaaatgttctcttctttcctaagtgacagttttgaagtattggataaccaagagctcaggtcac

SEQ ID NO: 637691 - DNA, 120 bp, Artificial Sequence
  ENSG00000181026_18 (sequence is synthesized)
acagaccttggagccccatctttgcttgcagcttagctttgagatactaagcaagcgagggacttcactcttgaggctgttttttcctcatctgtaaagtggggatagtggtacggccta

SEQ ID NO: 637692 - DNA, 120 bp, Artificial Sequence
  ENSG00000181026_19 (sequence is synthesized)
cctcatagggttgtaatgagcactaaatgtgaagtgcttggcacagtgcctggcacatggtgagccacagctactgtgagtttctgtttatcccccttttttttttttaagcccattgtt

SEQ ID NO: 637693 - DNA, 120 bp, Artificial Sequence
  ENSG00000181026_20 (sequence is synthesized)
tattctttgagaatttgttgtaacttcttcaggataacacctgagtccacaggctgagcagctgtggcccagacagaactgctccggcttggctgttccagcaggtggggcgctggcctc

SEQ ID NO: 637694 - DNA, 120 bp, Artificial Sequence
  ENSG00000181026_21 (sequence is synthesized)
ggtgagggcacagcagcaaggttcacggatatccgtgtgtcttgtctgtggccaccaggcacaggtttggcttccggtcagtgtcccgacactgtgcgggaggtgacaacagagcaaagc

SEQ ID NO: 637695 - DNA, 120 bp, Artificial Sequence
  ENSG00000181026_22 (sequence is synthesized)
agcgcaggggtcagggaggtacagacactgctgaaatcacactaccccaccctcagctgaagccccacgttccacaaacttggggtcatagattgtccagtcactggctccctccctgtc

SEQ ID NO: 637696 - DNA, 120 bp, Artificial Sequence
  ENSG00000181026_23 (sequence is synthesized)
agcacagcacagaggaaggggctaactgaatcttttaccacttctggcctggctccagaactttgttctagattccttaaaagtcggtagctgatgtcaaactcaattgagcagtagctt

SEQ ID NO: 637697 - DNA, 120 bp, Artificial Sequence
  ENSG00000181026_24 (sequence is synthesized)
tgatcccttggtctgggggtcgaaggaagatggtgctgttatcagcggggaaatgtactatttaagatcagctttgttgtaaaaccatttgttctagaataaaactcaattggaaacgtg

SEQ ID NO: 637698 - DNA, 120 bp, Artificial Sequence
  ENSG00000181026_25 (sequence is synthesized)
ggtgagatccaggaccctgcaccggggcggcggggtcgggcgggctgaggccgcgtgtcccgggtcgcaggtccccgcgcgttgtttccgccccggcctgcggcggggacgcctgaactg

SEQ ID NO: 637699 - DNA, 120 bp, Artificial Sequence
  ENSG00000181026_26 (sequence is synthesized)
acgcctgaactgggctgaccctgccctaccggcccgcagaaaagcaggccgggcgccgcctgtctccagccctcgctctgctcgggggtccagggccagagggggcggcgctggtcgttg

SEQ ID NO: 637700 - DNA, 120 bp, Artificial Sequence
  ENSG00000181026_27 (sequence is synthesized)
caggtggcccagaaagaggtaagggcagggatggggacttgtttgggaggtgtggtgggctggaaagagccaccctgggtttgaatcaccactttgcttcactgggggcaagaaaccttg

SEQ ID NO: 637701 - DNA, 120 bp, Artificial Sequence
  ENSG00000181026_28 (sequence is synthesized)
ggaaagtcacctaactgctccaaacagtaggttccttctccatagaacaggggaaataaaaataaaatcctgaccttgcctccagataaggattgctggcctgttgcacaggacaatgta

SEQ ID NO: 637702 - DNA, 120 bp, Artificial Sequence
  ENSG00000181026_29 (sequence is synthesized)
gaaaggctacaccaactgtaaggtgataaatagcttacattttagagtttgctttctgttataaaagttgtacgcattgatataaaatttgtaaagcccacagtggcatcacgttcaggt

SEQ ID NO: 637703 - DNA, 120 bp, Artificial Sequence
  ENSG00000181026_30 (sequence is synthesized)
atggatgttttggcatatttccttatgttagtttcttagtgcttagaaaaaattaattagtggttgggaccacactgatgcaccaggaattcccaaacatgcttgaccttagaaacacct

SEQ ID NO: 637704 - DNA, 120 bp, Artificial Sequence
  ENSG00000181026_31 (sequence is synthesized)
aagtcctttttaacaatctaggatccttgtccccagttccctccatagagttcctgatccattaggcttggggagggctctgacccatgttccaaaaaatcatcacactgtgtagacttg

SEQ ID NO: 637705 - DNA, 120 bp, Artificial Sequence
  ENSG00000181026_32 (sequence is synthesized)
caccataaagccacagggcttaaggggaaatggagaaagggaacagtattaaaaaggccatcagtgacaccccaaaaataagatagaaacctaataaaaaggtagtccagttttacgcat

SEQ ID NO: 637706 - DNA, 120 bp, Artificial Sequence
  ENSG00000181026_33 (sequence is synthesized)
cttgtttctttttttttttttttttattccacacatcttaaatggttaagaaatgcacaatacaccaataagtatggcactttaccttgaaaaagacctgaacttgcttgtggaaagagg

SEQ ID NO: 637707 - DNA, 120 bp, Artificial Sequence
  ENSG00000181026_34 (sequence is synthesized)
agtcagaaaggttgcagcttgagtttctgtgaagtggttgaaggagagttctttgaagtcagacaggaagtgtgacaccagctgtggatgggtgtggctcatcacacaggtgaactaggg

SEQ ID NO: 637708 - DNA, 120 bp, Artificial Sequence
  ENSG00000181026_35 (sequence is synthesized)
ttgctgggagatgtttgggctgtgtgcatattgtgtatgccctcttggcttagttcagttggatgcagttttctgcgttcattcagtgtttctcaaggatgaaattatgcacaagcaaag

SEQ ID NO: 637709 - DNA, 120 bp, Artificial Sequence
  ENSG00000181026_36 (sequence is synthesized)
gtgaaatttgcattgttctcaaaatgtgtcatacatcaattgcattgagacaaatctgcattttctaaacaagccttgtaacagaaccactttttaacacttctgggttattcttgggat

SEQ ID NO: 637710 - DNA, 120 bp, Artificial Sequence
  ENSG00000181026_37 (sequence is synthesized)
taggcaaggttgggaaatactggtgtacactatctcgtgtcctactttttcacataacattgtggcccgagcattcctttgaaatgatcggaggttattttatgtatcaagcaggccaat

SEQ ID NO: 637711 - DNA, 120 bp, Artificial Sequence
  ENSG00000181026_38 (sequence is synthesized)
cagtaagagtagcaacaagaggggaggtgtgtggtgaaccctccagctccttggtcccttccattgacctggttggtggtggtcccaagagcaggaccactttttgtctgcccagactcc

SEQ ID NO: 637712 - DNA, 120 bp, Artificial Sequence
  ENSG00000181026_39 (sequence is synthesized)
gagccactgtgggttgtgcttcatctctttccacttcatggctgacttggggggaggggcagtgtggtgagtgaccagcatggtggcatgtccctactataaagtctcaatgcatcttat

SEQ ID NO: 637713 - DNA, 120 bp, Artificial Sequence
  ENSG00000181026_40 (sequence is synthesized)
ccatctgccatgaaagctgggtttggggataaacatatgttgccagcagaggtaggctgtggaggcccgcagctggtgataaggagagcccaagcccagctaagagggctagagggggtt

SEQ ID NO: 637714 - DNA, 120 bp, Artificial Sequence
  ENSG00000181026_41 (sequence is synthesized)
gctggcccatggccctgggcgtggcctccctggtgtatgaggagggccacccagcagggaagggaggtacacattgtgcaggcagccagagctgagcaagagagcaggttaagaggatga

SEQ ID NO: 637715 - DNA, 120 bp, Artificial Sequence
  ENSG00000181026_42 (sequence is synthesized)
ggaggagttggtacacagcagggcaagggggcagagtcctgaagacagggattatggcccttaatgctcataagagctgctgctatggtgtgtctaccagtgacaggcacggttctgttg

SEQ ID NO: 637716 - DNA, 120 bp, Artificial Sequence
  ENSG00000181026_43 (sequence is synthesized)
acttcacccagctggtctttattgatcacctcctgtgataagtaaataatcaataaatgtaatgctttctactacaggaaaaagataggcattaaaaaaaaagaataaatgtgacgcttt

SEQ ID NO: 637717 - DNA, 120 bp, Artificial Sequence
  ENSG00000181026_44 (sequence is synthesized)
ccttggagcatcactaagaagtccaacatggtccctgcactcacagaccttacagtgcggtgggggagagttgggtggagtgggaggcctggtgacgtcttccaggctgagaggagagcc

SEQ ID NO: 637718 - DNA, 120 bp, Artificial Sequence
  ENSG00000181026_45 (sequence is synthesized)
aacaccagcaatagagttgcttgtatctggtaacaggaagacttccatccatgacctcgtttagtccttagagccaccccacggaatgctgctggcagtgtttccctttgacaggtgcag

SEQ ID NO: 637719 - DNA, 120 bp, Artificial Sequence
  ENSG00000181026_46 (sequence is synthesized)
tccatgcatctattggccaggggttctcagggcgtgtctcctgccaacctgatggggtgtggggtgacctccctgactcctctttctgctcacagatccttaagctcctgaagggcaagg

SEQ ID NO: 637720 - DNA, 120 bp, Artificial Sequence
  ENSG00000181026_47 (sequence is synthesized)
tgccaggatagcagactttagttgttgtcgttgttccgtggactttttagcagcacaggggaccttatcgagccaggttttttcaggctgctgccccattggaagattactccccaggct

SEQ ID NO: 637721 - DNA, 120 bp, Artificial Sequence
  ENSG00000181027_0 (sequence is synthesized)
cattgctccaagatggcggcggcggcggcagcgggagcgcagctcagctgggctggaactgccctcctggaactcccccagcctacaacctaggaggtgcagggactgaggctcaggcca

SEQ ID NO: 637722 - DNA, 120 bp, Artificial Sequence
  ENSG00000181027_1 (sequence is synthesized)
aatcgcaactcagacccagtgaacccaaggcctgaagagaatttggattcatttaccttgttttgtggggactggagagacaagtaaactctcagagtaactgtcccctctgactaccat

SEQ ID NO: 637723 - DNA, 120 bp, Artificial Sequence
  ENSG00000181027_2 (sequence is synthesized)
ttctaaggatgccccggaggcccagctagccccagacttcggccccatgcggctcacccgctgccaggctgccctggcggccgccatcaccctcaaccttctggtcctcttctatgtctc

SEQ ID NO: 637724 - DNA, 120 bp, Artificial Sequence
  ENSG00000181027_3 (sequence is synthesized)
gtggctgcagcaccagcctaggaattcccgggcccgggggccccgtcgtgcctctgctgccggcccccgtgtcaccgtcctggtgcgggagttcgaggcatttgacaacgcggtgcccga

SEQ ID NO: 637725 - DNA, 120 bp, Artificial Sequence
  ENSG00000181027_4 (sequence is synthesized)
gctggtagactccttcctgcagcaagacccagcccagcccgtggtggtggcagccgacacgctcccctacccgcccctggccctgccccgcatccccaacgtgcgtctggcgctgctcca

SEQ ID NO: 637726 - DNA, 120 bp, Artificial Sequence
  ENSG00000181027_5 (sequence is synthesized)
gcccgccctggaccggccagccgcagcctcgcgcccggagacctacgtggccaccgagtttgtggccctagtacctgatggggcgcgggctgaggcacctggcctgctggagcgcatggt

SEQ ID NO: 637727 - DNA, 120 bp, Artificial Sequence
  ENSG00000181027_6 (sequence is synthesized)
ggaggcgctccgcgcaggaagcgcacgtctggtggccgccccggttgccacggccaaccctgccaggtgcctggccctgaacgtcagcctgcgagagtggaccgcccgctatggcgcagc

SEQ ID NO: 637728 - DNA, 120 bp, Artificial Sequence
  ENSG00000181027_7 (sequence is synthesized)
ccccgccgcgccccgctgcgacgccctggacggagatgctgtggtgctcctgcgcgcccgcgacctcttcaacctctcggcgcccctggcccggccggtgggcaccagcctctttctgca

SEQ ID NO: 637729 - DNA, 120 bp, Artificial Sequence
  ENSG00000181027_8 (sequence is synthesized)
tgcagaccgcccttcgcggctgggcggtgcagctgctggacttgaccttcgccgcggcgcgccagcccccgctggccacggcccacgcgcgctggaaggctgagcgcgagggacgcgctc

SEQ ID NO: 637730 - DNA, 120 bp, Artificial Sequence
  ENSG00000181027_9 (sequence is synthesized)
ggcggcgctgctccgcgcgctgggcatccgcctagtgagctgggaaggcgggcggctggagtggttcggctgcaacaaggagaccacgcgctgcttcggaaccgtggtgggcgacacgcc

SEQ ID NO: 637731 - DNA, 120 bp, Artificial Sequence
  ENSG00000181027_10 (sequence is synthesized)
cgcctacctctacgaggagcgctggacgcccccctgctgcctgcgcgcgctgcgcgagaccgcccgctatgtggtgggcgtgctggaggctgcgggcgtgcgctactggctcgagggcgg

SEQ ID NO: 637732 - DNA, 120 bp, Artificial Sequence
  ENSG00000181027_11 (sequence is synthesized)
ctcactgctgggggccgcccgccacggggacatcatcccatgggactacgacgtggacctgggcatctacttggaggacgtgggcaactgcgagcagctgcggggggcagaggccggctc

SEQ ID NO: 637733 - DNA, 120 bp, Artificial Sequence
  ENSG00000181027_12 (sequence is synthesized)
ggtggtggatgagcgcggcttcgtatgggagaaggcggtcgagggcgactttttccgcgtgcagtacagcgaaagcaaccacttgcacgtggacctgtggcccttctacccccgcaatgg

SEQ ID NO: 637734 - DNA, 120 bp, Artificial Sequence
  ENSG00000181027_13 (sequence is synthesized)
cgtcatgaccaaggacacgtggctggaccaccggcaggatgtggagtttcccgagcacttcctgcagccgctggtgcccctgccctttgccggcttcgtggcgcaggcgcctaacaacta

SEQ ID NO: 637735 - DNA, 120 bp, Artificial Sequence
  ENSG00000181027_14 (sequence is synthesized)
gtaccccaacccggcactgctgagtctgacgggaagcggctgaagccctgataacctcgcctttgtttttcgggggtctgtctggatgtggagaagctctgtgtgagcggtgaggggtgg

SEQ ID NO: 637736 - DNA, 120 bp, Artificial Sequence
  ENSG00000181027_15 (sequence is synthesized)
agggatgtcgcggagaggggaagggggaaactgaccaagaaagaaattctaaggagagcatgagagaaggctggcattggcaggaggagagcaccaggacgaggatgggaagcgacctcc

SEQ ID NO: 637737 - DNA, 120 bp, Artificial Sequence
  ENSG00000181027_16 (sequence is synthesized)
agatttatcaaatggtcatgcccactgggagccgtggatatgcgtggggacatcctgggtcatctcagtcatggagggagacggggatgtcacgccgtcccgcagggcccagcacagccc

SEQ ID NO: 637738 - DNA, 120 bp, Artificial Sequence
  ENSG00000181027_17 (sequence is synthesized)
cagacccgaaaaaagtgttctgcccaagattccgagagccctgcgctctagggcaggggcagagttttggaaacagtgcaggctctggagccagactggcgagattcaaatcctggctct

SEQ ID NO: 637739 - DNA, 120 bp, Artificial Sequence
  ENSG00000181027_18 (sequence is synthesized)
atcgcttcggagccaggtgggcctgggggggcgtcgcagtctctctgtgcctcagttgcttccaggatgcgggacccttggctgcaggggttgcttccgccactagagggcgcgccggtc

SEQ ID NO: 637740 - DNA, 120 bp, Artificial Sequence
  ENSG00000181027_19 (sequence is synthesized)
ccgctcctggtggcccactgtggctgcccgggcgacagtacgcccagggcctgtgttccatagccatctactctcttgagcctttggacttctctccaagcccctgtgggaggcggacag

SEQ ID NO: 637741 - DNA, 120 bp, Artificial Sequence
  ENSG00000181027_20 (sequence is synthesized)
cagtgaccacctccccttcttttggactgcgacctccttccctcctgggagagccctgtgacctgcatgctactcttaactgttctattcaagactgaatagaagtatttcagtcttgca

SEQ ID NO: 637742 - DNA, 120 bp, Artificial Sequence
  ENSG00000181027_21 (sequence is synthesized)
tgttctattcaagactgaatagaagtatttcagtcttgcagaggaggaaatgctcagagctccgaggtgcggctgtggtcgagaaccgggtgctgggccgggcgcgggggctcacgcctg

SEQ ID NO: 637743 - DNA, 120 bp, Artificial Sequence
  ENSG00000181027_22 (sequence is synthesized)
tgagcccaggagtctgagaccagcctcggcaacatgccaagaccccgtctctatttttaaaaaagaaaaagaaccgacttctgaatcgcagctccactcatgactaatacctcattattt

SEQ ID NO: 637744 - DNA, 120 bp, Artificial Sequence
  ENSG00000181027_23 (sequence is synthesized)
cagctgtctgcacctaattccccacttgcacggcagtgtagacaataaccatagctcacactcactgagcacctactgggtaccaggcaccattctcagtgtttcacctggatcaactaa

SEQ ID NO: 637745 - DNA, 120 bp, Artificial Sequence
  ENSG00000181027_24 (sequence is synthesized)
tgcgtccctcacctcagccctctgaagtgacagctgctattattttcattacacagatgaaaaagctgaggccagaatcgtgaagtcacttgctcaaggtcaggcagcttaggaaggggc

SEQ ID NO: 637746 - DNA, 120 bp, Artificial Sequence
  ENSG00000181027_25 (sequence is synthesized)
agatcgggggcttgaacccaggtggtcaggctctggagcccacaattgtcttacccactatgcccctctctagtcatggtccccaagaggggcttggagacccacttagcaggtgaaagc

SEQ ID NO: 637747 - DNA, 120 bp, Artificial Sequence
  ENSG00000181027_26 (sequence is synthesized)
aatggcagccttccttatttgattatgcacctaagaataaatggtatttgggcatgtattcccaatatgtgtatatttatttataaatatatacagatactattatctgtatgttagtaa

SEQ ID NO: 637748 - DNA, 120 bp, Artificial Sequence
  ENSG00000181027_27 (sequence is synthesized)
taaagcttaaattattccattttaaaattatgaatatgaatagggttttttttatgtttcttgcctcatcccaatgacttttgcacacccaggtgtgagcacccagcattcaagaccacg

SEQ ID NO: 637749 - DNA, 120 bp, Artificial Sequence
  ENSG00000181027_28 (sequence is synthesized)
attgctccaagatggcggcggcggcggcagcggaggagatgctctgctgaggggcagttgctatggttacagggcctggaccttcctccggaaggtgagaaacaggagcgcagctcagct

SEQ ID NO: 637750 - DNA, 120 bp, Artificial Sequence
  ENSG00000181027_29 (sequence is synthesized)
attgctccaagatggcggcggcggcggcagcggaggagatgctctgctgaggggcagttgctatggttacagggcctggaccttcctccggaaggagcgcagctcagctgggctggaact

SEQ ID NO: 637751 - DNA, 120 bp, Artificial Sequence
  ENSG00000181027_30 (sequence is synthesized)
actaccatttctaaggcaagccccctgtttctactcttgcgccccctgctggtttcctgccctgtctgtaagttgcatggcttttgtccgtcttttttttgtttgtttgtttgttttgag

SEQ ID NO: 637752 - DNA, 120 bp, Artificial Sequence
  ENSG00000181027_31 (sequence is synthesized)
tctgctgtattcaccacacagacgctctacttttctgacatccctcttagagccacaaagatgccattccttgccctcaggaatgctcaaggttccccccatttcctccagaattccttc

SEQ ID NO: 637753 - DNA, 120 bp, Artificial Sequence
  ENSG00000181027_32 (sequence is synthesized)
cttcttctcttcctcttctgtccagaggctctaaggactctcactcactcatcctctttcccaggggtacccctggccctgccccagtctccagacccacactcacactagccagtccac

SEQ ID NO: 637754 - DNA, 120 bp, Artificial Sequence
  ENSG00000181027_33 (sequence is synthesized)
aagccccctgtttctactcttgcgccccctgctggtttcctgccctgtctgaagggcagaaacctacaaaaagccttcatggggaaattatttgatcatctgcttggaacccagagctat

SEQ ID NO: 637755 - DNA, 120 bp, Artificial Sequence
  ENSG00000181027_34 (sequence is synthesized)
accacctgtgctggagaccggccagccaaatcttcagtctcggtggggacaaggagacagcgccatctggtgcttgagggtgtggccaatgaatgtggaggggagtgtcctaaggttggc

SEQ ID NO: 637756 - DNA, 84 bp, Artificial Sequence
  ENSG00000181027_35 (sequence is synthesized)
attgctccaagatggcggcggcggcggcagcggtaaagacggggtttctccatgttggtcaccaggcccgcctcggcctcccaa

SEQ ID NO: 637757 - DNA, 120 bp, Artificial Sequence
  ENSG00000181027_36 (sequence is synthesized)
acaggtgtgagccatcacgcccggccaggggatgttttaagaatgtctctcagaggagcgcagctcagctgggctggaactgccctcctggaactcccccagcctacaacctaggaggat

SEQ ID NO: 637758 - DNA, 120 bp, Artificial Sequence
  ENSG00000181027_37 (sequence is synthesized)
caggtgtgagccatcacgcccggccaggggatgttttaagaatgtctctcagaggtagagtgtgtctatggaaggggttgtcatggtaacagcttctgttggcttctagccctacctttt

SEQ ID NO: 637759 - DNA, 120 bp, Artificial Sequence
  ENSG00000181027_38 (sequence is synthesized)
ggcttctagccctaccttttctggacacattcatgctagagggatggttataggttgctataataactgacatccctcccattcaccccaccccactcctgagacaccccaggtggtgcc

SEQ ID NO: 637760 - DNA, 120 bp, Artificial Sequence
  ENSG00000181027_39 (sequence is synthesized)
tgacctttctcttgccacttttgtggataagatgaaattgtgctctattgtacggaaatggctgatttgggattttctggttctcctcctctcaggagcgcagctcagctgggctggaac

SEQ ID NO: 637761 - DNA, 120 bp, Artificial Sequence
  ENSG00000181029_0 (sequence is synthesized)
tcgtccgctccccggccccttccccgcgggcgtgtgggtcccgggctggggtctcggcgtccgcgatcccgagcccgctcgcttcggcccccctcaggaggctgcgaggagggtgggttt

SEQ ID NO: 637762 - DNA, 120 bp, Artificial Sequence
  ENSG00000181029_1 (sequence is synthesized)
gcttcggcccccctcaggaggctgcgaggagggtgggtttctccccagtgtagagggtggcggcggcatggaggcgcgcttcacgcgcgggaagtcggcgctgctggagcgcgcgctggc

SEQ ID NO: 637763 - DNA, 120 bp, Artificial Sequence
  ENSG00000181029_2 (sequence is synthesized)
gcggccgcgcaccgaggtgagcctgagcgccttcgcactgctgttctccgagctggtacagcactgccagagccgcgtcttctccgtggccgagctgcagtcgcgcctggccgcgctggg

SEQ ID NO: 637764 - DNA, 120 bp, Artificial Sequence
  ENSG00000181029_3 (sequence is synthesized)
gtgctaggcgcgttgctcttcgtcaagggcgccgtgtggaaggcgctcttcggcaaggaggcggacaagctggagcaggccaacgatgacgcgcgcaccttctacatcatcgagcgcgag

SEQ ID NO: 637765 - DNA, 120 bp, Artificial Sequence
  ENSG00000181029_4 (sequence is synthesized)
ccgctcatcaacacctacatctccgtgcccaaggagaacagcacgctcaactgcgccagcttcacggcgggcatcgtggaggcggtgctcacacacagcggcttccctgccaaggtcacg

SEQ ID NO: 637766 - DNA, 120 bp, Artificial Sequence
  ENSG00000181029_5 (sequence is synthesized)
gcgcactggcacaagggcaccacgctcatgatcaagttcgaggaggcagtcatcgctcgagaccgggccctggagggccgctgaccctgccggagataaaggatacagagagcccctccc

SEQ ID NO: 637767 - DNA, 120 bp, Artificial Sequence
  ENSG00000181029_6 (sequence is synthesized)
ccctgccccaggctggggagggaggccaggtccgaatgtgtttacagtagagtgggggcgggtctggccatagggttggggggttgagtgagaccaggagtggtggggagaaataaaccc

SEQ ID NO: 637768 - DNA, 120 bp, Artificial Sequence
  ENSG00000181029_7 (sequence is synthesized)
ggcaaaaggagttggtgggaaatgctggcaggttctggaatcacggttggaggctgtctgcaggctggagggggcatggggtcctgggagacgcatcaggctgagacagacgcctttaga

SEQ ID NO: 637769 - DNA, 120 bp, Artificial Sequence
  ENSG00000181029_8 (sequence is synthesized)
gacgcctttagactgggggtgggcaaactgcgcaaagtgccagatgggcaatattttatgccatgtggtctttattattattttttttatttgttgagatagagtcttgctctgtcgccc

SEQ ID NO: 637770 - DNA, 71 bp, Artificial Sequence
  ENSG00000181029_9 (sequence is synthesized)
aggctggagtgcagtggcaccatctcacctcactgcaaacctccaccttgggttcacccaccacacccggc

SEQ ID NO: 637771 - DNA, 120 bp, Artificial Sequence
  ENSG00000181029_10 (sequence is synthesized)
ccgccatgtgctcttgccccattactccgctgatgtactgaatgcaaccacagacaacatgtaaaggagtgggtgtcaccgtgtgcctagaaaacaggcagagggagattgtttgccttc

SEQ ID NO: 637772 - DNA, 86 bp, Artificial Sequence
  ENSG00000181029_11 (sequence is synthesized)
gtgtgcctagaaaacaggcagagggagattgtttgccttcttccctcatttattatatttttcagagacagggttcatctcggctt

SEQ ID NO: 637773 - DNA, 76 bp, Artificial Sequence
  ENSG00000181029_12 (sequence is synthesized)
tgcccagctaatttttaaaaaatttttgtagagatgggggctcttattaggttgcccaggctggtctcaaactctt

SEQ ID NO: 637774 - DNA, 120 bp, Artificial Sequence
  ENSG00000181029_13 (sequence is synthesized)
tctcaaactcttggcctcaagcaatccttccaccttggcctccgtaagtgctggggttacaggcgtgagccaaatcaaagtgtgttctgtagatcagcagtagcagcatcaactgggagt

SEQ ID NO: 637775 - DNA, 120 bp, Artificial Sequence
  ENSG00000181029_14 (sequence is synthesized)
agcatcaactgggagttggtccataatgcagtctcaggcccaccccagagctgctgaatctgagggtgcattttagcgaggcccccaggggattcctggggaccttagattgagatgcag

SEQ ID NO: 637776 - DNA, 72 bp, Artificial Sequence
  ENSG00000181029_15 (sequence is synthesized)
gcccccaggggattcctggggaccttagattgagatgcaggctttagggtatcagaatcaccaggaggggcc

SEQ ID NO: 637777 - DNA, 120 bp, Artificial Sequence
  ENSG00000181029_16 (sequence is synthesized)
agatgaggtttcactgtgttggccagtctggtcaatactttaaagttaattttaaagtccaggatgatacaaacacatttcccttgttaaaaaaattttaaaataagtggggtgcagtgg

SEQ ID NO: 637778 - DNA, 89 bp, Artificial Sequence
  ENSG00000181029_17 (sequence is synthesized)
atcgcttgaggccaggggttggtgtaaaagaatttgaaataaggccaggcgtggcgacttatgtctgtaatcccagcactttgagaggc

SEQ ID NO: 637779 - DNA, 63 bp, Artificial Sequence
  ENSG00000181029_18 (sequence is synthesized)
aggccgaggtgggcagatcacttgaggccggaagtttgagaccaacctggtcaacatggcaaa

SEQ ID NO: 637780 - DNA, 88 bp, Artificial Sequence
  ENSG00000181029_19 (sequence is synthesized)
cacaccactggtcttaaaaaagaaaaaaaaagtaatgtattacacctcaggcaattttcctttccctttttgttcaccacacttggtt

SEQ ID NO: 637781 - DNA, 120 bp, Artificial Sequence
  ENSG00000181029_20 (sequence is synthesized)
aggcaattttcctttccctttttgttcaccacacttggttcctgataactcctcctctcccccaaggaaagttcttccagattttttgggggaaccatgatccaatcttccctgcttcct

SEQ ID NO: 637782 - DNA, 120 bp, Artificial Sequence
  ENSG00000181029_21 (sequence is synthesized)
ttccaccgccccccagaatgtgaacagacaggtctgttcagaaaaggaactgcagggactgtcagctgggctcccctcactggttatgagaagggccaaaggggtcggtgtcacctctag

SEQ ID NO: 637783 - DNA, 120 bp, Artificial Sequence
  ENSG00000181029_22 (sequence is synthesized)
atttgtttaggatgctctgttggactgcctggtggaccagggctgagggcttggtcagggcagtctcagccatcctagcaagaggcattgagcagggtgggcttcagcacactggggaga

SEQ ID NO: 637784 - DNA, 120 bp, Artificial Sequence
  ENSG00000181029_23 (sequence is synthesized)
aggtggcgtctctaggatgaatgaaaccattgagcaaccaccacacatagccccagggctgatcctggaatagctgttggctgttggaggtggagggaggcgccgggagagggcttgggc

SEQ ID NO: 637785 - DNA, 120 bp, Artificial Sequence
  ENSG00000181029_24 (sequence is synthesized)
aggatgatagcctgaatctggaatgagggggaggcgtctagggggccagcagatgcacaggtcttggggtttggggtctggagttctggagggaggtctgggcgtctgcacagacacaga

SEQ ID NO: 637786 - DNA, 120 bp, Artificial Sequence
  ENSG00000181029_25 (sequence is synthesized)
aaccacagtcctggatgggggacggagggaggggaacatggtgtctgagaagctggatttcagagcaaaatgcaggacgctttgggctaagcagccccaggcaggtcctctgagaccctg

SEQ ID NO: 637787 - DNA, 120 bp, Artificial Sequence
  ENSG00000181029_26 (sequence is synthesized)
gcgagaggggcttccagggccggccagggcaggggccattcttctgtccagaggcggggctgtgagggatgtcagagaaatcgggagggaggaagaggggctgcgggaatttgtaagctg

SEQ ID NO: 637788 - DNA, 120 bp, Artificial Sequence
  ENSG00000181029_27 (sequence is synthesized)
ggagtgcagggcccagggtctgttcccacgccccatccccaccggccaccgagggtgagttagggggcttgaggagaagggaaaacgtttgaacaagctgtagggttatgaggctgggcc

SEQ ID NO: 637789 - DNA, 120 bp, Artificial Sequence
  ENSG00000181029_28 (sequence is synthesized)
cggggttggggcaagggaggatgaagagaaagaagagcctgtggttcggcagcttctgatcacagcagctctaacttacggtgctctgggctgcaaggaaggtcttcccctggaccctcc

SEQ ID NO: 637790 - DNA, 120 bp, Artificial Sequence
  ENSG00000181029_29 (sequence is synthesized)
aggtgggtgggtgagaggaagaggaggaggaggagccaggcaccagcccttggtgagctgggcaagcagcatcagctcatttcacaggcaggttccaaaagaagtcatgtgcccatggtc

SEQ ID NO: 637791 - DNA, 68 bp, Artificial Sequence
  ENSG00000181029_30 (sequence is synthesized)
ttcacaggcaggttccaaaagaagtcatgtgcccatggtcacacagattaattattattattattatt

SEQ ID NO: 637792 - DNA, 120 bp, Artificial Sequence
  ENSG00000181029_31 (sequence is synthesized)
acaggcgtgagccaccgcacctggctggctttttctcttttcttcttctttttttttgagacaggttctcactgtcgcccaggctgagagcaggggcacaatcctcccacctcggcctcc

SEQ ID NO: 637793 - DNA, 120 bp, Artificial Sequence
  ENSG00000181029_32 (sequence is synthesized)
aggctgagagcaggggcacaatcctcccacctcggcctcccaagcagctgggaccaagttgcccatcactacacctctagtttttgtattttttgtagagatggggcctcactatgttgc

SEQ ID NO: 637794 - DNA, 120 bp, Artificial Sequence
  ENSG00000181029_33 (sequence is synthesized)
agcagtcctcccacctcagcctcccaaagcgctgggatgacaggcatgagccactgtgcgcagctggctttggccttttatctgagctggaggaaacttctggaaagggggcagtgaaga

SEQ ID NO: 637795 - DNA, 120 bp, Artificial Sequence
  ENSG00000181029_34 (sequence is synthesized)
gaaacttctggaaagggggcagtgaagagagagccccgggcggaggtgactgctccagtcgaggcagtggcagaaggggtgagcagtgagtgattgtgagcgccgtttgacagcagagcc

SEQ ID NO: 637796 - DNA, 120 bp, Artificial Sequence
  ENSG00000181029_35 (sequence is synthesized)
cactggcatttcttatggtcttggacctggaggtgttgtcaggggaaagggaagaggtgcaatgaccccagtgttggcctgagccactggtagaggagtgtggagaggggaccctgtgct

SEQ ID NO: 637797 - DNA, 120 bp, Artificial Sequence
  ENSG00000181029_36 (sequence is synthesized)
cctggcctccctcccgtggcctccggcatgggtcgaccttggccgagcgtgaggctggtgccacctcagcctcccagaccctgagtagggttaacacctccagacccgaaatggcctccg

SEQ ID NO: 637798 - DNA, 120 bp, Artificial Sequence
  ENSG00000181029_37 (sequence is synthesized)
gttgaccgggcccactccccatcagcctgtccagccagccagcacttactgagtgccttctgtgtactaagccctgctctgggtacttccatgagtcaactcacgccctcccggcctcag

SEQ ID NO: 637799 - DNA, 120 bp, Artificial Sequence
  ENSG00000181029_38 (sequence is synthesized)
ggtgatccaccgccttcccctacagtattccaaggggccattggacctcagaggcttcatgtcctgcacattctccgtgtcatagagcaggaaaaaataaaaacgggagatcgaattcta

SEQ ID NO: 637800 - DNA, 120 bp, Artificial Sequence
  ENSG00000181031_0 (sequence is synthesized)
ggaacacctcgggtcacccccgacaacggtggtgggagggagagcggcctcctcctccctggtggggcctgtctgggtgaagcccctctgttcccgaggatcgtctgccttattgaaacc

SEQ ID NO: 637801 - DNA, 120 bp, Artificial Sequence
  ENSG00000181031_1 (sequence is synthesized)
atctaattggagatccgcagattaggctaccaagacacagctgcctccagcagaatttgtgtagtggacacttgtacgtgcactttggagacagcaagcatgaggcctgcagctgacagc

SEQ ID NO: 637802 - DNA, 120 bp, Artificial Sequence
  ENSG00000181031_2 (sequence is synthesized)
tttgagtggctgtgaacctgactatggaaaagatgtgactccccacccccagccgggtgctccgagccatggccgacaccatcttcggcagcgggaatgatcagtgggtttgccccaatg

SEQ ID NO: 637803 - DNA, 120 bp, Artificial Sequence
  ENSG00000181031_3 (sequence is synthesized)
accggcagcttgcccttcgagccaagctgcagacgggctggtccgtgcacacctaccagacggagaagcagaggaggaagcagcacctcagcccggcggaggtggaggccatcctgcagg

SEQ ID NO: 637804 - DNA, 120 bp, Artificial Sequence
  ENSG00000181031_4 (sequence is synthesized)
tcatccagagggcagagcggctcgacgtcctggagcagcagagaatcgggcggctggtggagcggctggagaccatgaggcggaatgtgatggggaacggcctgtcccagtgtctgctct

SEQ ID NO: 637805 - DNA, 120 bp, Artificial Sequence
  ENSG00000181031_5 (sequence is synthesized)
gcggggaggtgctgggcttcctgggcagctcgtcggtgttctgcaaagactgcaggaagaaagtctgcaccaaatgtgggatcgaggcctcccctggccagaagcggcccctgtggctgt

SEQ ID NO: 637806 - DNA, 120 bp, Artificial Sequence
  ENSG00000181031_6 (sequence is synthesized)
gtaagatctgcagtgagcaaagagaggtctggaagaggtcgggggcctggttctacaaagggctccccaagtatatcttgcccctgaagacccctggccgagctgatgacccccacttcc

SEQ ID NO: 637807 - DNA, 120 bp, Artificial Sequence
  ENSG00000181031_7 (sequence is synthesized)
gacctttgcccacggaaccggcagagcgagagcccagaagctctgagaccagccgcatctacacgtgggcccgaggaagagtggtttccagtgacagtgacagtgactcggatcttagct

SEQ ID NO: 637808 - DNA, 120 bp, Artificial Sequence
  ENSG00000181031_8 (sequence is synthesized)
cctccagcctagaggacagactcccatccactggggtcagggaccggaaaggcgacaaaccctggaaggagtcaggtggcagcgtggaggcccccaggatggggttcacccacccgccgg

SEQ ID NO: 637809 - DNA, 120 bp, Artificial Sequence
  ENSG00000181031_9 (sequence is synthesized)
gccacctctctgggtgccagagcagcctggccagtggtgagacggggacaggctctgctgacccgccagggggaccccgccccgggctgacccgaagggccccggtaaaagacacacctg

SEQ ID NO: 637810 - DNA, 120 bp, Artificial Sequence
  ENSG00000181031_10 (sequence is synthesized)
gacgagcccccgctgctgacgcagctccagcaggcccctccagctgcctgggctgaggtgtctggtgcctggaacagacttccctgtggaggattcctgccagaccctgcccggctcctc

SEQ ID NO: 637811 - DNA, 120 bp, Artificial Sequence
  ENSG00000181031_11 (sequence is synthesized)
ccagctcagtgcctttctgcaccccttctctcctggggagctgtctgcatccgccaccccctccaaccactgccctcagcccccgaccttatttattaccctcccctcccacacccccaa

SEQ ID NO: 637812 - DNA, 120 bp, Artificial Sequence
  ENSG00000181031_12 (sequence is synthesized)
tctacctggtgatgattttaagtttgcgcgtgtcttgggttgggctggggggtttcccacatgcagtgtcagaggggccgcccggtggggctatctccgttgctatattaatggcaagac

SEQ ID NO: 637813 - DNA, 120 bp, Artificial Sequence
  ENSG00000181031_13 (sequence is synthesized)
taaatgaaacctagggcacggcctccgaagctgcgtgtggccccttagaggtgagcatcagagccagagcagtgagggggagactcacccaccctctccctctcccttcagctctgggag

SEQ ID NO: 637814 - DNA, 120 bp, Artificial Sequence
  ENSG00000181031_14 (sequence is synthesized)
gcaggcgcagtgcccccctcccatgggctggcccaggaccgtgggtgaaacctgggtctgtttagtttctttggtttttgtatgtttgtttgtttttgacacagtctcgctttgttgccc

SEQ ID NO: 637815 - DNA, 120 bp, Artificial Sequence
  ENSG00000181031_15 (sequence is synthesized)
agccaccgcacccaatcctattaggtttctttgaatcccctcatggcctgcctggtttttgctcagcctgtcttcagcttgaggagctgggaagctctggtggatgctatgaactcactt

SEQ ID NO: 637816 - DNA, 120 bp, Artificial Sequence
  ENSG00000181031_16 (sequence is synthesized)
gctgaagagcagcgttcaggtgcatccccagccagggcacgtggctccctcagccatgaattcacttctcttcaggaggtttggcttggcatgaaaatacttcattcagagtatgggcaa

SEQ ID NO: 637817 - DNA, 120 bp, Artificial Sequence
  ENSG00000181031_17 (sequence is synthesized)
atgcttctggaaaacccttccctgaagagagagaacgtgtgtgtgtgtgtcggtgatcacaccctcccatccttcctgcctcctgccccaaaccccgggttcctgggtctggaagggcct

SEQ ID NO: 637818 - DNA, 120 bp, Artificial Sequence
  ENSG00000181031_18 (sequence is synthesized)
tctctccaagctgggagctcctgggcccccaccattcactttttgtccttgctgctggcaaacagtaaagaaactcactttccctgtggcacgttatgcttcagaattaaaacaatgaag

SEQ ID NO: 637819 - DNA, 120 bp, Artificial Sequence
  ENSG00000181031_19 (sequence is synthesized)
attaaaatttgcaccgagccagtgtgttgatcgaagaccacgattgcctgtgtttctgagatgcgtccatggaaaaatggaaaaaactgtggtgcgttgacttgctggaacccttcctaa

SEQ ID NO: 637820 - DNA, 120 bp, Artificial Sequence
  ENSG00000181031_20 (sequence is synthesized)
ttgaaattgcaggaggcggttgctccggcctgtctcaagctctgttgggtgccgatggggaaactgaggctcaggaagacagttgacttgttcctggacttctaatgtgactccccaccc

SEQ ID NO: 637821 - DNA, 120 bp, Artificial Sequence
  ENSG00000181031_21 (sequence is synthesized)
ccaagcgggtgaggagggttgaggcttctttttccctagaagcttctctgcttcatggagaggtttctcttgggctccttcaacaagcagttcccaggtgggagccgaaatcaggtttcc

SEQ ID NO: 637822 - DNA, 120 bp, Artificial Sequence
  ENSG00000181031_22 (sequence is synthesized)
tctgcaaagattctgcctgcctgggactttccagacccacatacatcacgtaaatggaagcaggcctgcgtttctgcattaaaagacaaatagcatgaatgctcgatactgcccgtccca

SEQ ID NO: 637823 - DNA, 120 bp, Artificial Sequence
  ENSG00000181031_23 (sequence is synthesized)
tgcccggcagcctgggagcacttgggcattttctgggcagagagtgctcaggggccacaggtacctacgtattattctggtcacgtttgcaatgtgactccccacccccagccgggtgct

SEQ ID NO: 637824 - DNA, 120 bp, Artificial Sequence
  ENSG00000181031_24 (sequence is synthesized)
acatttgcctgtgttttgggtcacagactggtggagcagtgattcaatctggcctactgcttaaaattcattgtcaactagtttaaatgtggagaactctcatttttaaaaaaactggag

SEQ ID NO: 637825 - DNA, 120 bp, Artificial Sequence
  ENSG00000181031_25 (sequence is synthesized)
agcctggcagccatgtgggtggggtggggggcagacatcccatagagatctagagttccaaacgaggaactggactgagatcaccccgtctcggtttgagatccacggggcccacacgtg

SEQ ID NO: 637826 - DNA, 120 bp, Artificial Sequence
  ENSG00000181031_26 (sequence is synthesized)
ccaccactgctgcctgtaagggctgttttggatacagaaaatgtgccctttctaacccaaaaaatgcttgaaatgtgtaaaagtggccagactaacagtcccaaagagggctgccctcta

SEQ ID NO: 637827 - DNA, 120 bp, Artificial Sequence
  ENSG00000181031_27 (sequence is synthesized)
agaggaagcgtcccaaatctgttcagttttagagactacgtgactggggtacgtggtggggccttaccagacatccacgaggagaatccaggccttggtttggctccagctgggcctgcc

SEQ ID NO: 637828 - DNA, 120 bp, Artificial Sequence
  ENSG00000181031_28 (sequence is synthesized)
aaactgggcacctggtgccagcttatggggccttgggcacgtggctgcccctctcgagctggtttcttcttttctgaaaggagtgatgatcacgtcgtcctctggggcttgtgatgattc

SEQ ID NO: 637829 - DNA, 120 bp, Artificial Sequence
  ENSG00000181031_29 (sequence is synthesized)
tggcctaggcacagcgcccagtgggatggcacactctgcagcagcaaatgtgcagccgttctccctccacgccgggggcagacgtgactaacagatcacagcatgctttcctacggaggc

SEQ ID NO: 637830 - DNA, 120 bp, Artificial Sequence
  ENSG00000181031_30 (sequence is synthesized)
tggaggcagcctccagccccttttcaacccagccctctgggcgccagctcagatttagcacttgggatgaagcctctcttccagccctgcaggcgccacctgcgaagcctccaggccctc

SEQ ID NO: 637831 - DNA, 120 bp, Artificial Sequence
  ENSG00000181031_31 (sequence is synthesized)
ctatggaaaaggataaaatatcctaccgcccccaggagtgaccacgtgaggctgcataatggccgtctctgtgtctgcagtgatgtctgcagtgacgaacgcccggggtggtgagctcta

SEQ ID NO: 637832 - DNA, 120 bp, Artificial Sequence
  ENSG00000181031_32 (sequence is synthesized)
agtgctggctttaccagcttctgagcccacaaatgctgttaaggagatagaagccttcttttaagtagatgcaactgtttgcaaagaagaggccctttattttattttatttatttattt

SEQ ID NO: 637833 - DNA, 120 bp, Artificial Sequence
  ENSG00000181031_33 (sequence is synthesized)
cctcgggtcacccccgacaacggtggtgggagggagagcggcctcctcctccctggtggggcctgtctgggtgaagcccctctgttcccgcctgacttcagtgaaagctcaaggtgcact

SEQ ID NO: 637834 - DNA, 120 bp, Artificial Sequence
  ENSG00000181031_34 (sequence is synthesized)
actaacctgcccaggcgagtttccctcctgcccaattaccctagttctctgaccctccaggactgccacagagcaagatcttcactgcgccttctcttcactcccagtgttctttgcatg

SEQ ID NO: 637835 - DNA, 120 bp, Artificial Sequence
  ENSG00000181031_35 (sequence is synthesized)
gcctcagcatttattggagccgctgtctgattcattttggattcatctcgtgcactgtgcaatatgcagtggctcttcagagccagcacaatggaggtgacccttctccccgtgcacctt

SEQ ID NO: 637836 - DNA, 120 bp, Artificial Sequence
  ENSG00000181031_36 (sequence is synthesized)
ccccgacaacggtggtgggagggagagcggcctcctcctccctggtggggcctgtctgggtgaagcccctctgttcccggtaggtgtttcggggtctcatggctccaaggacattggaag

SEQ ID NO: 637837 - DNA, 120 bp, Artificial Sequence
  ENSG00000181031_37 (sequence is synthesized)
gaggtgaggggaggaaggttggagaagtacctggcaggacccgcggagagccacctgggagctggagtctgggctgggccgtgcagaagctgctggcggaggcaggggtgtgggacgctg

SEQ ID NO: 637838 - DNA, 120 bp, Artificial Sequence
  ENSG00000181031_38 (sequence is synthesized)
gaaacgacagtctcatgggcccgtggggaggttaagtccagatgcagaggattcgtggatactaattatccaattcgccataatgaaggcctgaattaaggcaggagcagccaagatgga

SEQ ID NO: 637839 - DNA, 120 bp, Artificial Sequence
  ENSG00000181031_39 (sequence is synthesized)
gactctgaagacaggagttagccacgataaagctgccagcggtggagagctcactctaggggtaccaagcacccagctgattagcaaaaccacctgggaggtcacggtctcctcgttgca

SEQ ID NO: 637840 - DNA, 120 bp, Artificial Sequence
  ENSG00000181031_40 (sequence is synthesized)
gttggaaggactgttctttctccgtcgtatggtctcggcatccttgttgaaagtcagttgaccacggatgtatgggtttatttctgggctctcagttctattccagtgccacagttttca

SEQ ID NO: 637841 - DNA, 120 bp, Artificial Sequence
  ENSG00000181031_41 (sequence is synthesized)
gtaccatatgggcaggaggcatcctgctctgagggagtgtttggtccagtaggagaggtcagacacgttcaccagaaactgcgaagttctgggaagaggtaaaaacagtgtgcttatgag

SEQ ID NO: 637842 - DNA, 120 bp, Artificial Sequence
  ENSG00000181031_42 (sequence is synthesized)
ggagccttctgttttcctgtgagacgccctccagaccccagagtagttcctgagcgctgccttccgggaacttcccctcagctcaccttttgagttggagactgtttccaggatcctgtg

SEQ ID NO: 637843 - DNA, 120 bp, Artificial Sequence
  ENSG00000181031_43 (sequence is synthesized)
ttttccctttcttgtttttcacttgtgtttttctggaacccgtcctaagttcttaaaaagagtgtgtgtaagggaaactcagcgtccttatgagtttaaaaacatctgtgttctgccctc

SEQ ID NO: 637844 - DNA, 120 bp, Artificial Sequence
  ENSG00000181035_0 (sequence is synthesized)
cgcgtccgggccggtgagggggcgcggggggcgccgggggggcccaagcgtcagcggcccgcgcctgtcgggctgaactgaggaccgagtctcctgccattccgagcaggcctggtatgg

SEQ ID NO: 637845 - DNA, 120 bp, Artificial Sequence
  ENSG00000181035_1 (sequence is synthesized)
aggaccgagtctcctgccattccgagcaggcctggtatgggtaatggtgtgaaggaaggcccggtgcgattgcatgaggatgctgaggctgtcctgtcctcgtccgtctcatcaaagcgt

SEQ ID NO: 637846 - DNA, 120 bp, Artificial Sequence
  ENSG00000181035_2 (sequence is synthesized)
gaccacaggcaagtgctcagctccctgctgtctggggccctggctggtgcccttgccaaaacagcggtagctcccctggaccgaaccaaaatcatcttccaagtgtcttcaaaaagattt

SEQ ID NO: 637847 - DNA, 120 bp, Artificial Sequence
  ENSG00000181035_3 (sequence is synthesized)
tctgccaaggaggccttccgggtcctctactacacctacctcaacgagggatttctcagcttgtggcgcgggaactcggccaccatggtgcgcgtggtgccctacgccgccatccagttc

SEQ ID NO: 637848 - DNA, 120 bp, Artificial Sequence
  ENSG00000181035_4 (sequence is synthesized)
agcgcacacgaggagtacaagcgcatcctgggcagctactatggcttccgtggagaagccctgcccccttggcctcgcctcttcgccggcgcactggctggaacgacagccgcttcactg

SEQ ID NO: 637849 - DNA, 120 bp, Artificial Sequence
  ENSG00000181035_5 (sequence is synthesized)
acctaccccctggacctggtcagagcgcggatggccgtaaccccgaaggaaatgtacagcaacatctttcatgtcttcatccgcatctcgagagaagaggggctgaagactctctaccat

SEQ ID NO: 637850 - DNA, 120 bp, Artificial Sequence
  ENSG00000181035_6 (sequence is synthesized)
ggatttatgcccaccgtgctgggggtcattccctacgctggcctgagcttcttcacctatgagacgctcaagagcttgcacagagagtacagcggccgccggcagccctaccccttcgag

SEQ ID NO: 637851 - DNA, 120 bp, Artificial Sequence
  ENSG00000181035_7 (sequence is synthesized)
cgcatgatcttcggcgcctgcgctggcctcatcgggcagtcggcctcgtacccgctggatgtggtgcggcggcgcatgcagacggccggcgtcacgggctacccgcgcgcctccatcgcc

SEQ ID NO: 637852 - DNA, 120 bp, Artificial Sequence
  ENSG00000181035_8 (sequence is synthesized)
cgcacgctgcgcaccatcgtgcgggaggagggcgccgtgcgcggcctctacaaaggcttgagcatgaactgggtcaagggtcccatcgccgtgggcatcagcttcaccaccttcgacctc

SEQ ID NO: 637853 - DNA, 120 bp, Artificial Sequence
  ENSG00000181035_9 (sequence is synthesized)
atgcagatcctgctgcggcacctgcagagctaggggaccctgagctgctctcaggacggtggaccggtgacccctttgtattctgggcccatggaacggtgggggggtgcgcttgattct

SEQ ID NO: 637854 - DNA, 120 bp, Artificial Sequence
  ENSG00000181035_10 (sequence is synthesized)
acttcaggaggcacatggggcgctttatggaacgagcaggtgggcctgaggggcctgggctcagagtccacgtccaaacgcaaagctggcagccctggaagtgcagtgttggggcgatgg

SEQ ID NO: 637855 - DNA, 120 bp, Artificial Sequence
  ENSG00000181035_11 (sequence is synthesized)
tgtggggggtcccgcagctcccctcttccttcctctgcagacgctggcgctgtctgccggaggtgttgcccaaaaggccctagtggggcgtggtcagctccacctcctgatcctgtgtgt

SEQ ID NO: 637856 - DNA, 120 bp, Artificial Sequence
  ENSG00000181035_12 (sequence is synthesized)
cctccgacatgctgctgattctagtgacccctgtccccaccaggctcagagccagaccgcgcctggaccttcttgttctgactccacgtgcctgcccggcctccagggtgcgggggcgcc

SEQ ID NO: 637857 - DNA, 120 bp, Artificial Sequence
  ENSG00000181035_13 (sequence is synthesized)
tggggccagcctcgtgctcagctttggccacaaatgcagcccctggcccaccccaccctgccggccctgccttctccagtatttcccacatggccacgactcctcagtcactagagcctc

SEQ ID NO: 637858 - DNA, 120 bp, Artificial Sequence
  ENSG00000181035_14 (sequence is synthesized)
ctgctgggaacagtgtcccccagagcctcatgtctatcctagaccctgcaagcagctgggtccccaagagtgcatctccccctagagttgcctgcccatgcccacctgctttgtaacctt

SEQ ID NO: 637859 - DNA, 120 bp, Artificial Sequence
  ENSG00000181035_15 (sequence is synthesized)
cccaggagattcatgcttgctctgcacagcagggctcgaggcccaggccatgacacggaactgcctcaggtttgggtcagacctgcatcctggggcatctgctgaaatgtgagcacacaa

SEQ ID NO: 637860 - DNA, 120 bp, Artificial Sequence
  ENSG00000181035_16 (sequence is synthesized)
accacctcctttggcccagaagccccccaggcctagcatctcagtgccccaaccctctgcccagctgtggtatccagcaggtccttgggtccccacttgagcaggcacttggctgggata

SEQ ID NO: 637861 - DNA, 120 bp, Artificial Sequence
  ENSG00000181035_17 (sequence is synthesized)
tggagcaatttaaagcccacaggggttgttcagtttctatgaaatggagcatggggtgcctgctagcctcaatcccccgaagtgggagcctcatgatagagtatagcttgggggtgggag

SEQ ID NO: 637862 - DNA, 120 bp, Artificial Sequence
  ENSG00000181035_18 (sequence is synthesized)
gtgaggaaaatctgaggtacccaggggaacccccagctaactggtctctcagaggagtcccccagggcccgccagctatcacagggactcagaaacacccatttcctaatgacatggtga

SEQ ID NO: 637863 - DNA, 120 bp, Artificial Sequence
  ENSG00000181035_19 (sequence is synthesized)
gtttcttgatttcttttttttgtttgttttgttttggttttcaacttggctgaccccgggtctatgatctattcacatcgaacccctgactggtctgcctggtgccagggtgagcgtgac

SEQ ID NO: 637864 - DNA, 120 bp, Artificial Sequence
  ENSG00000181035_20 (sequence is synthesized)
cgtgagtgttgctttcgacagctggctcagcacacgctgtgtgaagggatctgagcttgttcatctccagtcgtgacttcatttcccttccttctgtcctcctcctgttcttgccttgga

SEQ ID NO: 637865 - DNA, 120 bp, Artificial Sequence
  ENSG00000181035_21 (sequence is synthesized)
cctgcaggtgtgcagaccgctctctctgccttccttgcatgtggccaccagccatccctgatcttgtccccagaggcccaggcagcctgtgatggctgtgaggggctgtcccactgtgtg

SEQ ID NO: 637866 - DNA, 120 bp, Artificial Sequence
  ENSG00000181035_22 (sequence is synthesized)
ggtatcccttacccagcacttaaacttggcaggagaggcagggcaaccctcacagggagatgggagggcacccaactcccacaagcatgcaacagcagtaggaattgggggtctgcccca

SEQ ID NO: 637867 - DNA, 120 bp, Artificial Sequence
  ENSG00000181035_23 (sequence is synthesized)
ggtgggtgagaccaaatgagtggatttggggccacaggctaggcaggagagacaaggggtaggtgggagggtcccccagtccctgctgaccccagtgtgtctccccggagatggctccta

SEQ ID NO: 637868 - DNA, 120 bp, Artificial Sequence
  ENSG00000181035_24 (sequence is synthesized)
gctgagtgggacccggcaggagttggggacagtgctgtcccccacccctgcacacagccaggccctcaggctctgcggtcactcgcctccctgctggtcactggtcttggtctggagtta

SEQ ID NO: 637869 - DNA, 120 bp, Artificial Sequence
  ENSG00000181035_25 (sequence is synthesized)
tattttgatgccatgaagacactgtttatatctaatgtttatatattttaaagatttgtgccaagagagtatatttaataaaaacttaaatgacttcttctcctgctcctggctcttctt

SEQ ID NO: 637870 - DNA, 120 bp, Artificial Sequence
  ENSG00000181035_26 (sequence is synthesized)
tggctctgaccgcccccccatcttcccccatgaacccccaaacagggttgaagtgcttttgacacatttgtgataaaagttctgaataaaagtcttgaataaagaagtttttaaatgcaa

SEQ ID NO: 637871 - DNA, 120 bp, Artificial Sequence
  ENSG00000181035_27 (sequence is synthesized)
cgtgaccacaggcaagtgctcagctccctgctgtctggggccctggctggtgcccttgccaaaacagcggtagctcccctggaccgaaccaaaatcatcttccaagagccctgccccctt

SEQ ID NO: 637872 - DNA, 120 bp, Artificial Sequence
  ENSG00000181035_28 (sequence is synthesized)
agtgctcagctccctgctgtctggggccctggctggtgcccttgccaaaacagcggtagctcccctggaccgaaccaaaatcatcttccaagtgtcttcaaaaagattttctgccaaggt

SEQ ID NO: 637873 - DNA, 120 bp, Artificial Sequence
  ENSG00000181035_29 (sequence is synthesized)
tggcaggagttaggcaggtggtctgaggagagtctcaggggtggggacaggactacctgtcttcccattcccagctctgcctggacacagcccagcctgggaactgacgggacatcccga

SEQ ID NO: 637874 - DNA, 120 bp, Artificial Sequence
  ENSG00000181035_30 (sequence is synthesized)
gtgtccttccggcagtggggtggggagactcaacagctctaaaacaaccttttcatgtttgatttattgttaaacagagagcaggtgctactttcttaataaaggaaaagataaactgta

SEQ ID NO: 637875 - DNA, 120 bp, Artificial Sequence
  ENSG00000181035_31 (sequence is synthesized)
agtacacacaggaccgtggctgcggaatgcagttgagggcatccctccccacgcagggagccagaaactgggataggaaaaggctggtggaacacccaccatctctcaggatctcgccgt

SEQ ID NO: 637876 - DNA, 120 bp, Artificial Sequence
  ENSG00000181035_32 (sequence is synthesized)
ctaccccctggacctggtcagagcgcggatggccgtaaccccgaaggaaatgtgagtccttacatcggtgatgcgcatcagccccgggggctctgtgtctcgggggctcccaggtcggaa

SEQ ID NO: 637877 - DNA, 120 bp, Artificial Sequence
  ENSG00000181035_33 (sequence is synthesized)
tccctctctctatcgggccccaggggtttgcatctgggcctccgtgtccacagggcaggcctgatgtgtcattctgcagctgttccagaaaggcagcaatttgttctcttagcctggggg

SEQ ID NO: 637878 - DNA, 120 bp, Artificial Sequence
  ENSG00000181035_34 (sequence is synthesized)
ttgttctcttagcctgggggtcactttctgcttagatcaaaccaagggtcttcattttgaactgggcacagatgcagtaaaaatatgtaagaatacggccgggcacggtggctcacgcct

SEQ ID NO: 637879 - DNA, 120 bp, Artificial Sequence
  ENSG00000181035_35 (sequence is synthesized)
gtagcggcggcggcgacgcgtccgggccggaccgagtctcctgccattccgagcaggcctggtatgggtaatggtgtgaaggaaggcccggtgcgattgcatgaggatgctgaggctgtc

SEQ ID NO: 637880 - DNA, 120 bp, Artificial Sequence
  ENSG00000181035_36 (sequence is synthesized)
gggagactcctcacccaggccctcctgagggaccccctgactctgtcacatgccctattctgtcttcagagctcctctcctttgcccgtttgtctccagacgtttctccacccccacgca

SEQ ID NO: 637881 - DNA, 120 bp, Artificial Sequence
  ENSG00000181035_37 (sequence is synthesized)
taaatcccagaggggcaggttactatgcccccagggccgtagggaaaatacgcatcattaatttatgccagcaggggggaagggaaggcagccatgtaaacctcaaaatgaggcccactc

SEQ ID NO: 637882 - DNA, 120 bp, Artificial Sequence
  ENSG00000181035_38 (sequence is synthesized)
cagagaccccatcagcttggccaggaggaagccaaacccgcctcgtgttcctcggtccccacccctgtccccgccccagcagagacgtgcgggtgctccaggctgggcctctgtgcatct

SEQ ID NO: 637883 - DNA, 120 bp, Artificial Sequence
  ENSG00000181036_0 (sequence is synthesized)
ctctgccggcttcgccctgacctgtttctgacctgtgttccctccgctgtgccagaacaggccccatgctgctctggacggctgtgctgctctttgttccctgtgttgggaaaactgtct

SEQ ID NO: 637884 - DNA, 120 bp, Artificial Sequence
  ENSG00000181036_1 (sequence is synthesized)
ggctgtacctccaagcctggccaaaccctgtgtttgaaggagatgccctgactctgcgatgtcagggatggaagaatacaccactgtctcaggtgaagttctacagagatggaaaattcc

SEQ ID NO: 637885 - DNA, 120 bp, Artificial Sequence
  ENSG00000181036_2 (sequence is synthesized)
ttcatttctctaaggaaaaccagactctgtccatgggagcagcaacagtgcagagccgtggccagtacagctgctctgggcaggtgatgtatattccacagacattcacacaaacttcag

SEQ ID NO: 637886 - DNA, 120 bp, Artificial Sequence
  ENSG00000181036_3 (sequence is synthesized)
agactgccatggttcaagtccaagagctgtttccacctcctgtgctgagtgccatcccctctcctgagccccgagagggtagcctggtgaccctgagatgtcagacaaagctgcaccccc

SEQ ID NO: 637887 - DNA, 120 bp, Artificial Sequence
  ENSG00000181036_4 (sequence is synthesized)
tgaggtcagccttgaggctccttttctccttccacaaggacggccacaccttgcaggacaggggccctcacccagaactctgcatcccgggagccaaggagggagactctgggctttact

SEQ ID NO: 637888 - DNA, 120 bp, Artificial Sequence
  ENSG00000181036_5 (sequence is synthesized)
ggtgtgaggtggcccctgagggtggccaggtccagaagcagagcccccagctggaggtcagagtgcaggctcctgtatcccgtcctgtgctcactctgcaccacgggcctgctgaccctg

SEQ ID NO: 637889 - DNA, 120 bp, Artificial Sequence
  ENSG00000181036_6 (sequence is synthesized)
ctgtgggggacatggtgcagctcctctgtgaggcacagaggggctcccctccgatcctgtattccttctaccttgatgagaagattgtggggaaccactcagctccctgtggtggaacca

SEQ ID NO: 637890 - DNA, 120 bp, Artificial Sequence
  ENSG00000181036_7 (sequence is synthesized)
cctccctcctcttcccagtgaagtcagaacaggatgctgggaactactcctgcgaggctgagaacagtgtctccagagagaggagtgagcccaagaagctgtctctgaagggttctcaag

SEQ ID NO: 637891 - DNA, 120 bp, Artificial Sequence
  ENSG00000181036_8 (sequence is synthesized)
gagcctgcttggcctgatggttattgctgctgcacttctggtttatgtgagatcctggagaaaagctgggccccttccatcccagataccacccacagctccaggtggagagcagtgccc

SEQ ID NO: 637892 - DNA, 120 bp, Artificial Sequence
  ENSG00000181036_9 (sequence is synthesized)
actatatgccaacgtgcatcaccagaaagggaaagatgaaggtgttgtctactctgtggtgcatagaacctcaaagaggagtgaagccaggtctgctgagttcaccgtggggagaaagga

SEQ ID NO: 637893 - DNA, 120 bp, Artificial Sequence
  ENSG00000181036_10 (sequence is synthesized)
cagttctatcatctgtgcggaggtgagatgcctgcagcccagtgaggtttcatccacggaggtgaatatgagaagcaggactctccaagaaccccttagcgactgtgaggaggttctctg

SEQ ID NO: 637894 - DNA, 120 bp, Artificial Sequence
  ENSG00000181036_11 (sequence is synthesized)
ctagtgatggtgttctcctatcaacacacgcccacccccagtctccagtgctcctcaggaagacagtggggtcctcaactctttctgtgggtccttcagttcccaagcccagcatcacag

SEQ ID NO: 637895 - DNA, 120 bp, Artificial Sequence
  ENSG00000181036_12 (sequence is synthesized)
agccccctgagcccttgtcctggtcaggagcacctgaaccctgggttcttttcttagcagaagaccaaccaatggaatgggaagggagatgctcccaccaacacacacacttaggttcaa

SEQ ID NO: 637896 - DNA, 120 bp, Artificial Sequence
  ENSG00000181036_13 (sequence is synthesized)
tcagtgacactggacacataagccacagatgtcttctttccatacaagcatgttagttcgccccaatatacatatatatatgaaatagtcatgtgccgcataacaacatttcagtcagtg

SEQ ID NO: 637897 - DNA, 120 bp, Artificial Sequence
  ENSG00000181036_14 (sequence is synthesized)
atagactgcatacacaacagtggtcccataagactgtaatggagtttaaaaattcctactgcctagtgatatcatagttgccttaacatcataacacaacacatttctcacgcgtttgtg

SEQ ID NO: 637898 - DNA, 120 bp, Artificial Sequence
  ENSG00000181036_15 (sequence is synthesized)
gtgatgctggtacaaacaagctacagcgccgctagtcatatacaaatatagcacatacaattatgtacagtacactatacttgataatgataataaacaactatgttactggtttatgta

SEQ ID NO: 637899 - DNA, 120 bp, Artificial Sequence
  ENSG00000181036_16 (sequence is synthesized)
acacacccacaggacctgcagctgaacgaagttgaagacaactcaggagatctgttggaaagagaacgatagaggaaaatatatgaatgttgccatctttaggccccatgctgctctgga

SEQ ID NO: 637900 - DNA, 120 bp, Artificial Sequence
  ENSG00000181036_17 (sequence is synthesized)
acacacccacaggacctgcagctgaacgaagttgaagacaactcaggagatctgttggaaagagaacgatagaggaaaatatatgaatgttgccatctttagttccctgtgttgggaaaa

SEQ ID NO: 637901 - DNA, 120 bp, Artificial Sequence
  ENSG00000181036_18 (sequence is synthesized)
aagacaactcaggagatctgttggaaagagaacgatagaggaaaatatatgaatgttgccatctttagctatagcaccacccagctcaggccacccacccaccttcggtcctgaggcctg

SEQ ID NO: 637902 - DNA, 120 bp, Artificial Sequence
  ENSG00000181036_19 (sequence is synthesized)
acccctgtctctggctgcccctcatgctgggccaatgtgtggggccccgaggtttcccaagatgttgtctcaatacccccctctccccaccatgggggacacatgtagccaggggaagga

SEQ ID NO: 637903 - DNA, 120 bp, Artificial Sequence
  ENSG00000181036_20 (sequence is synthesized)
aagaccctggaccagtccaggctcacccttcccctctatggactagaggacttcgaaggccccctctgcctctgacttccaagattccagaagggcctggctatgtgggagtcatttcag

SEQ ID NO: 637904 - DNA, 120 bp, Artificial Sequence
  ENSG00000181036_21 (sequence is synthesized)
agtttgtgggtgagggtaagaggacgggtcctagggatgaaactgcctcccatcggggtccccgggctgcagcctgagatgagtagaagctcaggcctcagcctcctggggcttcatcat

SEQ ID NO: 637905 - DNA, 120 bp, Artificial Sequence
  ENSG00000181038_0 (sequence is synthesized)
agttctgcgcgtgtgagtctctttcgccttgctccgggctttcttcgctcgcagcgcggcagggttatcaccagatctgggctttccccttcttgccgtcaggtgctacggccacgtggc

SEQ ID NO: 637906 - DNA, 120 bp, Artificial Sequence
  ENSG00000181038_1 (sequence is synthesized)
ccgcggcttcccgctcgcgcagtctggcagcccggagccttccgcggtcccccgcccgcccggggcccaacgacgccctactgggcgagcacgatttccgaggacagggggtccgggccc

SEQ ID NO: 637907 - DNA, 120 bp, Artificial Sequence
  ENSG00000181038_2 (sequence is synthesized)
agcgctttcgattctcggaggagccgggtccgggggccgacggggctgtcctggaggtccacgtcccgcaggtcctgcatctccagtatggaatgtatgtttggccctgtgctgtggtcc

SEQ ID NO: 637908 - DNA, 120 bp, Artificial Sequence
  ENSG00000181038_3 (sequence is synthesized)
tggcccagtacctttggtttcacagaagatctctgccaggcaaggccatcttagagattggagctggagtgagccttccaggaattttggctgccaaatgtggtgcagaagtaatactgt

SEQ ID NO: 637909 - DNA, 120 bp, Artificial Sequence
  ENSG00000181038_4 (sequence is synthesized)
aggtggtaggactaacatggggtcatatatcttgggatcttctggctctaccaccacaagatattatccttgcatctgatgtgttctttgaaccagaagattttgaagacattttggcta

SEQ ID NO: 637910 - DNA, 120 bp, Artificial Sequence
  ENSG00000181038_5 (sequence is synthesized)
caatatattttttgatgcacaagaatcccaaggtccaattgtggtctacttatcaagttaggagtgctgactggtcacttgaagctttactctacaaatgggatatgaaatgtgtccaca

SEQ ID NO: 637911 - DNA, 120 bp, Artificial Sequence
  ENSG00000181038_6 (sequence is synthesized)
ttcctcttgagtcttttgatgcagacaaagaagatatagcagaatctacccttccaggaagacatacagttgaaatgctggtcatttcctttgcaaaggacagtctctgaattataccta

SEQ ID NO: 637912 - DNA, 120 bp, Artificial Sequence
  ENSG00000181038_7 (sequence is synthesized)
caacctgttctgggacagtatcaatactgatgagcaacctggcacacaaactatgagcagaccacttcagcttgagaatgcagtgggtctgaagatggtcaagtctgtttgccttagatt

SEQ ID NO: 637913 - DNA, 120 bp, Artificial Sequence
  ENSG00000181038_8 (sequence is synthesized)
ttgatgtcacctagacaacacttaaactcatatgaaacaaaaattaaaatacgtattacaagtacttggattgttccttagtcattaaataggatataaattaggttgagaagggggtat

SEQ ID NO: 637914 - DNA, 120 bp, Artificial Sequence
  ENSG00000181038_9 (sequence is synthesized)
actttttatatgtaacttaagccttactctaccctacccatgcgatacataatttaagaatagaatacatctgaagcaaaacagaaaaggcatgactttaaaagaacaactttttttttt

SEQ ID NO: 637915 - DNA, 120 bp, Artificial Sequence
  ENSG00000181038_10 (sequence is synthesized)
aaaactgaaaatcatggcagaggaatcaagtgccccaaaactacttctgtgtgcatagcaattaactgccagttacgatacatggccctttaatattgaaattgaaggttaagcttttac

SEQ ID NO: 637916 - DNA, 120 bp, Artificial Sequence
  ENSG00000181038_11 (sequence is synthesized)
cttttagcagagtagattcataaggaatgtacttttgtcatgtttatagtaatgttcagttacggtacattttatacaaacccagaaagactgactctatgcttatttaaaaatgcaaga

SEQ ID NO: 637917 - DNA, 120 bp, Artificial Sequence
  ENSG00000181038_12 (sequence is synthesized)
aaaagtactaagattcccaattatttgcagttccaagtataattgtgaaatgccatctttcataacttattagattggagctggagtgagccttccaggaattttggctgccaaatgtgg

SEQ ID NO: 637918 - DNA, 120 bp, Artificial Sequence
  ENSG00000181038_13 (sequence is synthesized)
ggctgacttggctgggttcctgagggaccgggggtgcggacgctcagctgcgcagcttcctgctttaggttgacccccggagcaaaaacgtcggatatgaagcccttcggtgcattaaat

SEQ ID NO: 637919 - DNA, 120 bp, Artificial Sequence
  ENSG00000181045_0 (sequence is synthesized)
ctgtccccggcgattcctgcggacccagctgcggcgacgccaggagaccccaagctgcatcgccgagtggaagcaactagaactccagggctgtgaaagccacaggtgggggctgagcga

SEQ ID NO: 637920 - DNA, 120 bp, Artificial Sequence
  ENSG00000181045_1 (sequence is synthesized)
ggcgtggcctcaggagcggaggacccccccactctccctcgagcgccgcagtccaccgtagcgggtggagcccgccttggtgcgcagttggaaaacctcggagccccgctggatctcctg

SEQ ID NO: 637921 - DNA, 120 bp, Artificial Sequence
  ENSG00000181045_2 (sequence is synthesized)
gctgccacccgcaccccccgccagcctacgccccaccgtagagatgccttcttcggtgacggcgctgggtcaggccaggtcctctggccccgggatggccccgagcgcctgctgctgctc

SEQ ID NO: 637922 - DNA, 120 bp, Artificial Sequence
  ENSG00000181045_3 (sequence is synthesized)
ccctgcggccctgcagaggaggctgcccatcctggcgtggctgcccagctactccctgcagtggctgaagatggatttcgtcgccggcctctcagttggcctcactgccattccccaggc

SEQ ID NO: 637923 - DNA, 120 bp, Artificial Sequence
  ENSG00000181045_4 (sequence is synthesized)
gctggcctatgctgaagtggctggactcccgccccagtatggcctctactctgccttcatgggctgcttcgtgtatttcttcctgggcacctcccgggatgtgactctgggccccaccgc

SEQ ID NO: 637924 - DNA, 120 bp, Artificial Sequence
  ENSG00000181045_5 (sequence is synthesized)
cattatgtccctcctggtctccttctacaccttccatgagcccgcctacgctgtgctgctggccttcctgtccggctgcatccagctggccatgggggtcctgcgtttggggttcctgct

SEQ ID NO: 637925 - DNA, 120 bp, Artificial Sequence
  ENSG00000181045_6 (sequence is synthesized)
ggacttcatttcctaccccgtcattaaaggcttcacctctgctgctgccgtcaccatcggctttggacagatcaagaacctgctgggactacagaacatccccaggccgttcttcctgca

SEQ ID NO: 637926 - DNA, 120 bp, Artificial Sequence
  ENSG00000181045_7 (sequence is synthesized)
ggtgtaccacaccttcctcaggattgcagagaccagggtaggtgacgccgtcctggggctggtctgcatgctgctgctgctggtgctgaagctgatgcgggaccacgtgcctcccgtcca

SEQ ID NO: 637927 - DNA, 120 bp, Artificial Sequence
  ENSG00000181045_8 (sequence is synthesized)
ccccgagatgccccctggtgtgcggctcagccgtgggctggtctgggctgccacgacagctcgcaacgccctggtggtctccttcgcagccctggttgcgtactccttcgaggtgactgg

SEQ ID NO: 637928 - DNA, 120 bp, Artificial Sequence
  ENSG00000181045_9 (sequence is synthesized)
ataccagcctttcatcctaacaggggagacagctgaggggctccctccagtccggatcccgcccttctcagtgaccacagccaacgggacgatctccttcaccgagatggtgcaggacat

SEQ ID NO: 637929 - DNA, 120 bp, Artificial Sequence
  ENSG00000181045_10 (sequence is synthesized)
gggagccgggctggccgtggtgcccctgatgggcctcctggagagcattgcggtggccaaagccttcgcatctcagaataattaccgcatcgatgccaaccaggagctgctggccatcgg

SEQ ID NO: 637930 - DNA, 120 bp, Artificial Sequence
  ENSG00000181045_11 (sequence is synthesized)
tctcaccaacatgttgggctccctcgtctcctcctacccggtcacaggcagctttggacggacagccgtgaacgctcagtcgggggtgtgcaccccggcggggggcctggtgacgggagt

SEQ ID NO: 637931 - DNA, 120 bp, Artificial Sequence
  ENSG00000181045_12 (sequence is synthesized)
tgctgtctctggactacctgacctcactgttctactacatccccaagtctgccctggctgccgtcatcatcatggccgtggccccgctgttcgacaccaagatcttcaggacgctctggc

SEQ ID NO: 637932 - DNA, 120 bp, Artificial Sequence
  ENSG00000181045_13 (sequence is synthesized)
gtgttaagaggctggacctgctgcccctgtgcgtgaccttcctgctgtgcttctgggaggtgcagtacggcatcctggccggggccctggtgtctctgctcatgctcctgcactctgcag

SEQ ID NO: 637933 - DNA, 120 bp, Artificial Sequence
  ENSG00000181045_14 (sequence is synthesized)
ccaggcctgagaccaaggtgtcagaggggccggttctggtcctgcagccggccagcggcctgtccttccctgccatggaggctctgcgggaggagatcctaagccgggccctggaagtgt

SEQ ID NO: 637934 - DNA, 120 bp, Artificial Sequence
  ENSG00000181045_15 (sequence is synthesized)
ccccgccacgctgcctggtcctggagtgcacccatgtctgcagcatcgactacactgtggtgctgggactcggcgagctcctccaggacttccagaagcagggcgtcgccctggcctttg

SEQ ID NO: 637935 - DNA, 120 bp, Artificial Sequence
  ENSG00000181045_16 (sequence is synthesized)
tgggcctgcaggtccccgttctccgtgtcctgctgtccgctgacctgaaggggttccagtacttctctaccctggaagaagcagagaagcacctgaggcaggagccagggacccagccct

SEQ ID NO: 637936 - DNA, 120 bp, Artificial Sequence
  ENSG00000181045_17 (sequence is synthesized)
acaacatcagagaagactccattctggaccaaaaggttgccctgctcaaggcataatggggccacccgtgggcatccacagtttgcagggtgttccggaaggttcttgtcactgtgattg

SEQ ID NO: 637937 - DNA, 120 bp, Artificial Sequence
  ENSG00000181045_18 (sequence is synthesized)
gatgctggatgccgcctgatagacatgctggcctggctgagaaacccctgagcaggtaacccagggaagagaaggaagccaggcctggaggtccacggcagtgggagtggggctcactgg

SEQ ID NO: 637938 - DNA, 120 bp, Artificial Sequence
  ENSG00000181045_19 (sequence is synthesized)
cttcctgtgggatgactggaaaatgacctcgctgctgttccctggcatgaccctctttggaagagtggtttggagagagccttctagaatgacagactgtgcgaggaagcaggggcaggg

SEQ ID NO: 637939 - DNA, 120 bp, Artificial Sequence
  ENSG00000181045_20 (sequence is synthesized)
gtttccagcccgggctgtgcgaggcatcctggggctggcagcaccttcccggctcaccagtgccacctgcgggggagggacggggcaggcaggagtctgggaggcgggtccgctcctctt

SEQ ID NO: 637940 - DNA, 120 bp, Artificial Sequence
  ENSG00000181045_21 (sequence is synthesized)
gtctgcggcatctgtgctctccgagagaaaaccaaggtgtgtcaaatgacgtcaagtctctatttaaaaataattttgtgttttctaaatggaaaaagtgatagctttggtgattttgta

SEQ ID NO: 637941 - DNA, 120 bp, Artificial Sequence
  ENSG00000181045_22 (sequence is synthesized)
aaagtcataaatgcttattgtaaaaaatacaggaaaccacccctcaccctgtccacttgggtgatcattccagacccctccccaaacatgcatatgtacctgtccgtcagtgtgtggatg

SEQ ID NO: 637942 - DNA, 120 bp, Artificial Sequence
  ENSG00000181045_23 (sequence is synthesized)
tatgtttacagttctacataaatgggatcattttatacatggtgctctggaacccacatttttcatgcagtcatttgcagtgaattatttattgtgataataaatagcattagaatacaa

SEQ ID NO: 637943 - DNA, 120 bp, Artificial Sequence
  ENSG00000181045_24 (sequence is synthesized)
gattcctgcggacccagctgcggcgacgccaggagaccccaagctgcatcgccgagtggagccgttcgcccccctggggaggggagacccatagtgacctctcctgacacccgccgaccc

SEQ ID NO: 637944 - DNA, 120 bp, Artificial Sequence
  ENSG00000181045_25 (sequence is synthesized)
gatgagggacggggtgggccttccagtcttggcccagtccccatcttgcacacattgttggcttcctcttagagccgttcgcccccctggggaggggagacccatagtgacctctcctga

SEQ ID NO: 637945 - DNA, 120 bp, Artificial Sequence
  ENSG00000181045_26 (sequence is synthesized)
tagagaaaaacatatcactgacccagtaattgtgaagtactgtctcccacgagggtagctttgatctcctgccctagggggcgttgggagtgggcaggtggacccctgagcccctaagat

SEQ ID NO: 637946 - DNA, 120 bp, Artificial Sequence
  ENSG00000181045_27 (sequence is synthesized)
gggccccgggaataagggttgggagcagggccgggggacactgtctcagccctaggggaggtgggcggggagctggggacagatggccttggtttgggagcatagcctctgatcagcatc

SEQ ID NO: 637947 - DNA, 120 bp, Artificial Sequence
  ENSG00000181045_28 (sequence is synthesized)
agcacggtgcttgctctggaggaacctggggtttctgagagggactggggttgggggagacggtggtgggtgggtggtggagggctgtgcccttgggataagggaaaagacagctgagac

SEQ ID NO: 637948 - DNA, 120 bp, Artificial Sequence
  ENSG00000181045_29 (sequence is synthesized)
acaggctctggggtcggaaatgagagccaggagggcaccctgtctgcagtctctggggaccggagcaccagcccctcctctgggatcccctcccaagagggatttgagatccgtggaccc

SEQ ID NO: 637949 - DNA, 120 bp, Artificial Sequence
  ENSG00000181045_30 (sequence is synthesized)
tcccctcatcctctgggactgggtggagccgggaccagctcgatgtcccctcttggctggccagggttcctgctggacttcatttcctaccccgtcattaaaggcttcacctctgctgct

SEQ ID NO: 637950 - DNA, 120 bp, Artificial Sequence
  ENSG00000181045_31 (sequence is synthesized)
acggtgagtgacctgtccgcctcttctgtttgcccacgttggacgccctaacgttgttacgctgacaaggagtctgcctgccctgaccccggcgccccgtcctccactgtgaacgctccg

SEQ ID NO: 637951 - DNA, 120 bp, Artificial Sequence
  ENSG00000181045_32 (sequence is synthesized)
caccccccgccagcctacggtgcgcccgcgggcccagcttctctctgcgctgctccccgttaaattccctggggagacggaaaaaaaggcaaaggaagtcggttctccaggggccagaag

SEQ ID NO: 637952 - DNA, 120 bp, Artificial Sequence
  ENSG00000181045_33 (sequence is synthesized)
tgttgagcctaattagtcttcagacttctcaatgaggaatcgcttatcagtttcttatctgggagagttgaggatggagggacagaaggcacccaggatttgcacgggggggattcaggg

SEQ ID NO: 637953 - DNA, 120 bp, Artificial Sequence
  ENSG00000181045_34 (sequence is synthesized)
ggctggactcccgccccaggtgaggcgtctgaccctgctgccagccatatctcagaaacagtgcagaatacacagtatcaatcccagacaccatcagcgattccaggtttccagcccctg

SEQ ID NO: 637954 - DNA, 120 bp, Artificial Sequence
  ENSG00000181045_35 (sequence is synthesized)
ggccccaaggaacctttggtttacagtgtgtgacgcagattgtctctgggccgacccaggctcctatgcctgtttggcacacacagacactgagctggttatggaggggccagcgagatg

SEQ ID NO: 637955 - DNA, 81 bp, Artificial Sequence
  ENSG00000181045_36 (sequence is synthesized)
acacagacactgagctggttatggaggggccagcgagatgactcatggaggcctcaggagttcaagaccagcccgaccaaa

SEQ ID NO: 637956 - DNA, 120 bp, Artificial Sequence
  ENSG00000181061_0 (sequence is synthesized)
ggctgggacggctgtgggtggggagaagccgggaggactgggtgcgcctgcagggatcggaagccggttggggtgtgagaggttttctcgctctagggagattcttcaagcaatcactat

SEQ ID NO: 637957 - DNA, 120 bp, Artificial Sequence
  ENSG00000181061_1 (sequence is synthesized)
gtcaacagacacaggtgtttcccttccttcatatgaggaagatcagggatcaaaactcattcgaaaagctaaagaggcaccattcgtacccgttggaatagcgggttttgcagcaattgt

SEQ ID NO: 637958 - DNA, 120 bp, Artificial Sequence
  ENSG00000181061_2 (sequence is synthesized)
tgcatatggattatataaactgaagagcaggggaaatactaaaatgtccattcatctgatccacatgcgtgtggcagcccaaggctttgttgtaggagcaatgactgttggtatgggcta

SEQ ID NO: 637959 - DNA, 120 bp, Artificial Sequence
  ENSG00000181061_3 (sequence is synthesized)
ttccatgtatcgggaattctgggcaaaacctaagccttagaagaagagatgctgtcttggtcttgttggaggagcttgctttagttagatgtcttattattaaagttacctattattgtt

SEQ ID NO: 637960 - DNA, 120 bp, Artificial Sequence
  ENSG00000181061_4 (sequence is synthesized)
ggaaataaactaatttgtatgggtttagatggtaacatggcattttgaatattggcttcctttcttgcaggcttgatttgcttggtgaccgaattactagtgactagtttactaactagg

SEQ ID NO: 637961 - DNA, 120 bp, Artificial Sequence
  ENSG00000181061_5 (sequence is synthesized)
tgttgaaatgtccaccttcttaaatttttaagatgaacttagttctaaagaagataacaggccaatcctgaaggtactccctgtttgctgcagaatgtcagatattttggatgttgcata

SEQ ID NO: 637962 - DNA, 120 bp, Artificial Sequence
  ENSG00000181061_6 (sequence is synthesized)
agagtcctatttgccccagttaattcaacttttgtctgcctgttttgtggactggctggctctgttagaactctgtccaaaaagtgcatggaatataacttgtaaagcttcccacaattg

SEQ ID NO: 637963 - DNA, 120 bp, Artificial Sequence
  ENSG00000181061_7 (sequence is synthesized)
acaatatatatgcatgtgtttaaaccaaatccagaaagcttaaacaatagagctgcataatagtatttattaaagaatcacaactgtaaacatgagaataatttaaggattctagtttag

SEQ ID NO: 637964 - DNA, 120 bp, Artificial Sequence
  ENSG00000181061_8 (sequence is synthesized)
ttttttgtaattgcaaattatatttttgctgctgatatattagaataatttttaaatgtcatcttgaaatagaaatatgtattttaagcactcacgcaaaggtaaatgaacacgttttaa

SEQ ID NO: 637965 - DNA, 120 bp, Artificial Sequence
  ENSG00000181061_9 (sequence is synthesized)
atgtgtgtgttgctaattttttccataagaattgtaaacattgaactgaacaaattacctataatggatttggttaatgacttatgagcaagctggtttggccagacagtatacccaaac

SEQ ID NO: 637966 - DNA, 120 bp, Artificial Sequence
  ENSG00000181061_10 (sequence is synthesized)
ttttatataatatacagaaggctatcacacttgtgaaattctcttgtctaatctgaatttgcattccatggtgttaacatggtatatgtattgttattaaagtaagtgacccatgtcaaa

SEQ ID NO: 637967 - DNA, 120 bp, Artificial Sequence
  ENSG00000181061_11 (sequence is synthesized)
aagcgaaacaagccgggggactgcgagccagggactcgggccgcggggcgggaagaagtggggcagcgcttggccaggccgaaaggactttgggggtgggggctgggagtccgtgtctcg

SEQ ID NO: 637968 - DNA, 120 bp, Artificial Sequence
  ENSG00000181061_12 (sequence is synthesized)
aatgagggaggagaggtggagttgccggggctcaggcccggcctcgagcatgggcggatgagaggagtcgggagccgaggcctagggtccttcgggtgaggggagacggagccagcgagg

SEQ ID NO: 637969 - DNA, 120 bp, Artificial Sequence
  ENSG00000181072_0 (sequence is synthesized)
acagactagccaagtggctgagacgagtgtggggtgcgtgactctgcctgcgcgcgcgccagccccgcagctctcgccagagccttgggatcaagggagaaagagaaccggcagctggcc

SEQ ID NO: 637970 - DNA, 120 bp, Artificial Sequence
  ENSG00000181072_1 (sequence is synthesized)
tcggactctaagcggtgcgcagctccagcccgagcggatcggccctgaacccacaaaggactcctcgctccttcaagcctccaccacctcgcagccggggaggcaactggagcgaaacca

SEQ ID NO: 637971 - DNA, 120 bp, Artificial Sequence
  ENSG00000181072_2 (sequence is synthesized)
gcgacaggtttaaatgtttatttgctacttggctactgattagagaacgcaaaatgaataactcaacaaactcctctaacaatagcctggctcttacaagtccttataagacatttgaag

SEQ ID NO: 637972 - DNA, 120 bp, Artificial Sequence
  ENSG00000181072_3 (sequence is synthesized)
tggtgtttattgtcctggtggctggatccctcagtttggtgaccattatcgggaacatcctagtcatggtttccattaaagtcaaccgccacctccagaccgtcaacaattactttttat

SEQ ID NO: 637973 - DNA, 120 bp, Artificial Sequence
  ENSG00000181072_4 (sequence is synthesized)
tcagcttggcctgtgctgaccttatcataggtgttttctccatgaacttgtacaccctctacactgtgattggttactggcctttgggacctgtggtgtgtgacctttggctagccctgg

SEQ ID NO: 637974 - DNA, 120 bp, Artificial Sequence
  ENSG00000181072_5 (sequence is synthesized)
actatgtggtcagcaatgcctcagttatgaatctgctcatcatcagctttgacaggtacttctgtgtcacaaaacctctgacctacccagtcaagcggaccacaaaaatggcaggtatga

SEQ ID NO: 637975 - DNA, 120 bp, Artificial Sequence
  ENSG00000181072_6 (sequence is synthesized)
tgattgcagctgcctgggtcctctctttcatcctctgggctccagccattctcttctggcagttcattgtaggggtgagaactgtggaggatggggagtgctacattcagtttttttcca

SEQ ID NO: 637976 - DNA, 120 bp, Artificial Sequence
  ENSG00000181072_7 (sequence is synthesized)
tttggtacggctattgcagccttctatttgccagtgatcatcatgactgtgctatattggcacatatcccgagccagcaagagcaggataaagaaggacaagaaggagcctgttgccaac

SEQ ID NO: 637977 - DNA, 120 bp, Artificial Sequence
  ENSG00000181072_8 (sequence is synthesized)
caagaccccgtttctccaagtctggtacaaggaaggatagtgaagccaaacaataacaacatgcccagcagtgacgatggcctggagcacaacaaaatccagaatggcaaagcccccagg

SEQ ID NO: 637978 - DNA, 120 bp, Artificial Sequence
  ENSG00000181072_9 (sequence is synthesized)
gatcctgtgactgaaaactgtgttcagggagaggagaaggagagctccaatgactccacctcagtcagtgctgttgcctctaatatgagagatgatgaaataacccaggatgaaaacaca

SEQ ID NO: 637979 - DNA, 120 bp, Artificial Sequence
  ENSG00000181072_10 (sequence is synthesized)
gtttccacttccctgggccattccaaagatgagaactctaagcaaacatgcatcagaattggcaccaagaccccaaaaagtgactcatgtaccccaactaataccaccgtggaggtagtg

SEQ ID NO: 637980 - DNA, 120 bp, Artificial Sequence
  ENSG00000181072_11 (sequence is synthesized)
gggtcttcaggtcagaatggagatgaaaagcagaatattgtagcccgcaagattgtgaagatgactaagcagcctgcaaaaaagaagcctcctccttcccgggaaaagaaagtcaccagg

SEQ ID NO: 637981 - DNA, 120 bp, Artificial Sequence
  ENSG00000181072_12 (sequence is synthesized)
acaatcttggctattctgttggctttcatcatcacttgggccccatacaatgtcatggtgctcattaacaccttttgtgcaccttgcatccccaacactgtgtggacaattggttactgg

SEQ ID NO: 637982 - DNA, 120 bp, Artificial Sequence
  ENSG00000181072_13 (sequence is synthesized)
ctttgttacatcaacagcactatcaaccctgcctgctatgcactttgcaatgccaccttcaagaagacctttaaacaccttctcatgtgtcattataagaacataggcgctacaaggtaa

SEQ ID NO: 637983 - DNA, 120 bp, Artificial Sequence
  ENSG00000181072_14 (sequence is synthesized)
tcaagtgatcctcctgcctcagtctccaaaagcactgggaatacataggttgttagcgacatgagtacagggtctggatcttacccattcaagagtgtattctcagcacccaatgcctgg

SEQ ID NO: 637984 - DNA, 120 bp, Artificial Sequence
  ENSG00000181072_15 (sequence is synthesized)
ttgagaagaataaaagggataaacgagctcctagttttaaaatctctgccattgcactttatagtctgattacaaaacgtgcaattcaggagcccagcagtgacacacttatcacgccta

SEQ ID NO: 637985 - DNA, 120 bp, Artificial Sequence
  ENSG00000181072_16 (sequence is synthesized)
ggctccagtttgcaaaaattgcaccttataaactgtcagtattaggagcaatgagacaatgaaagaaacatgttgggatcgtggatttaagaaactatacactgtttctcataatctctt

SEQ ID NO: 637986 - DNA, 120 bp, Artificial Sequence
  ENSG00000181072_17 (sequence is synthesized)
gaagaagggcttctgattctacaattttatcagtctctgcacaagaggaataaccttgttccttttttgttacttttgttgttgttgttctcatgtgtccttaagagaaggaaatgccac

SEQ ID NO: 637987 - DNA, 120 bp, Artificial Sequence
  ENSG00000181072_18 (sequence is synthesized)
agttacaaggtaaacatggagacttaaacataaagaaataggcactatacaatggggacataaaaaaagaaaatcaaagaaggatgcagaaattgtctccggagtgttaagcatatttta

SEQ ID NO: 637988 - DNA, 120 bp, Artificial Sequence
  ENSG00000181072_19 (sequence is synthesized)
ttcttttgttacggtcctatttagaggattggaatgtaataaatgcttattttttgcctttctttttcccaccatgaagagaaagcaaacaaacagaaaccccaactaggtcacaccatt

SEQ ID NO: 637989 - DNA, 120 bp, Artificial Sequence
  ENSG00000181072_20 (sequence is synthesized)
tttcttcttgttatgccactattttgtacatccctgttctatattgtttatagggaaaacctacaggactttcactaaagctagccagagacagccatgaaaatggacgtttcacccctc

SEQ ID NO: 637990 - DNA, 76 bp, Artificial Sequence
  ENSG00000181072_21 (sequence is synthesized)
acacacgcacgaatacagacacgctctcctgctgtactaaaggcgccagggcgcaaagacctagggagcgcgcgcg

SEQ ID NO: 637991 - DNA, 120 bp, Artificial Sequence
  ENSG00000181072_22 (sequence is synthesized)
cacacactccaggctgcgggttggccagagcctggaaatcgcagatttcaccaggaaatcgccgaggtacccgaataggtgttgcctcccaaaactaattcctacttccccaagcacttt

SEQ ID NO: 637992 - DNA, 120 bp, Artificial Sequence
  ENSG00000181072_23 (sequence is synthesized)
gaaatgtttaaaccaatctgattttctcctaaatagccttttatatcaacagaatatcctacctaaaacataaacctgtttaagaaaccatcgtcactgtaaagttgaggtttcatcaaa

SEQ ID NO: 637993 - DNA, 120 bp, Artificial Sequence
  ENSG00000181072_24 (sequence is synthesized)
agtcaggtgaattttaagattaaaaaatagaagtttaggactttctatttcaacctgaatttgcctgacccatgtatgaaatgttaacttatagaaaatgaactcctgactttctcagca

SEQ ID NO: 637994 - DNA, 120 bp, Artificial Sequence
  ENSG00000181072_25 (sequence is synthesized)
gaaaggaatgctgttttatttatttggaatcctaaacaggattaacatactcacatagcaccagtgatttctgggccagtccctagagaatagaaccttctatccaatgcctgctaaagg

SEQ ID NO: 637995 - DNA, 120 bp, Artificial Sequence
  ENSG00000181072_26 (sequence is synthesized)
atgatattcaaattataaccaagtgaggatgtctgcaattatcctatgaccccatgaaaggggaaaaaacgatattttaaaaactattactgaaacaattacatattccatattcctcaa

SEQ ID NO: 637996 - DNA, 120 bp, Artificial Sequence
  ENSG00000181072_27 (sequence is synthesized)
attgtcaattctccctaacattatttaacttcaaaattctcttatcaatagaattatagtaatctttgtgacagaaatgtagtggctaactaaatagaggccaaacgagcttacagaatc

SEQ ID NO: 637997 - DNA, 120 bp, Artificial Sequence
  ENSG00000181072_28 (sequence is synthesized)
tgacagaaggaggtaggtggctgttgccatgccacatctcaccatctaattctagaccataataatcatgtcaggaactattatctaagtggtggcattatatagaatcttgccacgtag

SEQ ID NO: 637998 - DNA, 120 bp, Artificial Sequence
  ENSG00000181072_29 (sequence is synthesized)
agattttttatttggtcgtctaaataaatataggattaggattatacggattcacatacaactagttatttttatcctttatatttttcttacagtatttgctgtagttttccaatgaga

SEQ ID NO: 637999 - DNA, 120 bp, Artificial Sequence
  ENSG00000181072_30 (sequence is synthesized)
ttttctaaaaatggctcaatcaatggaaatcaaattataaacgcatttgcaaatttcatattttggattttagatttatgatatcttgttcagtaataataatgttagttacatggtaaa

SEQ ID NO: 638000 - DNA, 120 bp, Artificial Sequence
  ENSG00000181072_31 (sequence is synthesized)
tttatcaatattagaccccagcacttaaaagaattattttgtatgattagcctcatagatgccacctcaacattttggagagttaaggaggaaaaaaagcatgagggaaaaaaaaaacca

SEQ ID NO: 638001 - DNA, 120 bp, Artificial Sequence
  ENSG00000181072_32 (sequence is synthesized)
aaaaacttataagttagtaagaagcaaattgccagcagtatttatatttgacttatccttcgtaaaaacaatttcctgtttaaataacttcagtcattacccccccaaagtaatcttcca

SEQ ID NO: 638002 - DNA, 120 bp, Artificial Sequence
  ENSG00000181072_33 (sequence is synthesized)
tatttaaagcattcatttatagagattcccttacctacagttacttcaacatgcacttttacattttaaattcatatttattttcatattgtttcttcaaatgaaggaatcagttgaacg

SEQ ID NO: 638003 - DNA, 120 bp, Artificial Sequence
  ENSG00000181072_34 (sequence is synthesized)
gaaataacgtcaagccagtgggctcctcgagtttctgaaaaccagagaattgactagccaagtatttccctttttaatgtattgtattattattatgtagatttggcttcagttgggaag

SEQ ID NO: 638004 - DNA, 120 bp, Artificial Sequence
  ENSG00000181072_35 (sequence is synthesized)
aaccctttggcatccaggattcaggattcagggtctttttttgtttgctctaataatccaacgcaccatgaatcaagcttttagtctctgctgccattgtatccttccttttcctccctc

SEQ ID NO: 638005 - DNA, 120 bp, Artificial Sequence
  ENSG00000181072_36 (sequence is synthesized)
tgttattgatccttgccacagccactgcaacctcattgaaagagaaactgtcactttaaagaaagaaattgaagataggctgacaccatggaaactacgtcaaacagataagaaaaatgg

SEQ ID NO: 638006 - DNA, 120 bp, Artificial Sequence
  ENSG00000181072_37 (sequence is synthesized)
aaggaatactgaaaatgatagatgattggagagatatggagattatattcaaggatttttattaaccactgctggatttgtctatttcagtggctctcaaacagagacaattcccctctc

SEQ ID NO: 638007 - DNA, 120 bp, Artificial Sequence
  ENSG00000181072_38 (sequence is synthesized)
cccgaaaggggacacttagcaatgtgtaaagacatttttggttgccacactgggaggaatgctattggtatctagtgcatagaggctgggaatgctgctaaatagcctataatgctcagg

SEQ ID NO: 638008 - DNA, 120 bp, Artificial Sequence
  ENSG00000181072_39 (sequence is synthesized)
acattttcccccaacccctttaaacaaatattatttggctcaaaatgtcaatagttccaagattgagaaattcttgtctactttaagggatttctaaagcttgcctcttattagtgggaa

SEQ ID NO: 638009 - DNA, 120 bp, Artificial Sequence
  ENSG00000181072_40 (sequence is synthesized)
aataaccctgcattatttttagaatatcaatgcaaattcctcacctgttagaaaaaggtaatactcaccaaccatgtatcagaaaaacttttctcctgagtctggtgtatgtgtcagtca

SEQ ID NO: 638010 - DNA, 120 bp, Artificial Sequence
  ENSG00000181072_41 (sequence is synthesized)
cagattgggaactcaggccacatctacatatcaaaaatcaccagactatgcatatcgcacatcttttttccagcatcttaatgttcaattatgattgccacagatctagtcaattgaggt

SEQ ID NO: 638011 - DNA, 120 bp, Artificial Sequence
  ENSG00000181072_42 (sequence is synthesized)
tgcagtagttggccatcaaaatatttgcagttgatatgatcagtttctactggagctgcaatttttcctttcaaaaaatattaagagcctctttcagaaacaatatcatttatcttcttt

SEQ ID NO: 638012 - DNA, 120 bp, Artificial Sequence
  ENSG00000181072_43 (sequence is synthesized)
gcatttactggaaaggtgtatctgtaaggtctttgttttttctctcctcatagcaataatgtagctatcccagagtgatattataagaagaggagattaagaatatggaaaaagtctgtt

SEQ ID NO: 638013 - DNA, 120 bp, Artificial Sequence
  ENSG00000181072_44 (sequence is synthesized)
catttcttcgaaacaagaaatgattttccttttaccagttcatcattaatttaacgccagctcccaagtattagggcagagtaatcaatatgagaagccacaacgggtaagctttctgat

SEQ ID NO: 638014 - DNA, 120 bp, Artificial Sequence
  ENSG00000181072_45 (sequence is synthesized)
ttgaaatgtacaagctggatgtccaacatactcctgctctttgttcatttgcttttttgatcctgaagatctgacattgggagagatgggaattcaaaatgatggcaacaattactcagc

SEQ ID NO: 638015 - DNA, 120 bp, Artificial Sequence
  ENSG00000181072_46 (sequence is synthesized)
aatgcagtctgtttttattttctcctacttagttcattgacagtttcctcctcgccccagtttgataatatccctttcaacaaccatagtaccggtgttgcaaatagtttaggaaagcac

SEQ ID NO: 638016 - DNA, 120 bp, Artificial Sequence
  ENSG00000181072_47 (sequence is synthesized)
ccaaagctggatgaaattgtgcaaagtgtattctcagcatgtatattcaataccatgcctcttaaaaatgcttctcttaaagggtgcacgctgtagcatgaaatgtgtgcatatttaatg

SEQ ID NO: 638017 - DNA, 120 bp, Artificial Sequence
  ENSG00000181072_48 (sequence is synthesized)
gtagcatgaaatgtgtgcatatttaatgtatcttcctggaatatgctatgtgctaaatatatatatattctataaataaaataataaaatgtacaatagaaatacatatttctgtatgca

SEQ ID NO: 638018 - DNA, 120 bp, Artificial Sequence
  ENSG00000181072_49 (sequence is synthesized)
gcgacagatgcagccatggacaagacaaggagagcttcgtccctcccgcccctcgggttccttcctgctggggtctgaccgcgtcttctgtgcgtgtgggatggaggcccggctcgctcg

SEQ ID NO: 638019 - DNA, 120 bp, Artificial Sequence
  ENSG00000181072_50 (sequence is synthesized)
ggctccgagctgtcccccggctccgctttcggagcagcccttgggcgctggagaggtttcccattgcggtctccaggtcatggccaaggaggagaagcaattagaatgggggaaagggtc

SEQ ID NO: 638020 - DNA, 120 bp, Artificial Sequence
  ENSG00000181072_51 (sequence is synthesized)
ccaagacaaaggagagggaagcattctgcaatcccatcctatttgagccccgcgcaggagctggactgtccgccgtggctgggggacaaggtctcagcccgaagctcatgaggtaccaga

SEQ ID NO: 638021 - DNA, 120 bp, Artificial Sequence
  ENSG00000181072_52 (sequence is synthesized)
cagtgcctgggcttcgccacctaactcacaatgggtcctgaaccgcccgggcagtccccggggtcgtagactggggaccgctgcacccctccccgcccgcaatgtcccttggagtccgca

SEQ ID NO: 638022 - DNA, 120 bp, Artificial Sequence
  ENSG00000181072_53 (sequence is synthesized)
cctgaggtcccaggcaatcgccgctaacttgtagctctcggacacggacaggtgcggtccatgcctggtgccggtagacgcgcagaaattccacctgtgcgcgctgcccggcgcccctgg

SEQ ID NO: 638023 - DNA, 120 bp, Artificial Sequence
  ENSG00000181072_54 (sequence is synthesized)
ggcccctcacggggtaagtagagactcatctgggagaggtgaaaattccccagaattattgacacacacggcggcacaccctttgcctccgtccgcctccagcatccgcatccctttctc

SEQ ID NO: 638024 - DNA, 120 bp, Artificial Sequence
  ENSG00000181072_55 (sequence is synthesized)
tatcttcctgcccattgccgtcctcgaggctgccctgagatacagaattgtcccaggctgagtccaccgacccgccagtccctggcgatgatgccaaggctcttgcatgtacggaaatac

SEQ ID NO: 638025 - DNA, 120 bp, Artificial Sequence
  ENSG00000181072_56 (sequence is synthesized)
cagcagggaggttcgccaggggcagagaggctggaggagaacagagaattggaggtaaacgcgtaaagccagcagaactgtcggtggacatttcacccaggccgccctcccgcgtcttta

SEQ ID NO: 638026 - DNA, 120 bp, Artificial Sequence
  ENSG00000181072_57 (sequence is synthesized)
ttcaccgccacagcacgtctgtgactgcggccacccagggctccaagtctgccagcccaggcgccgcgagccaagaagagcgcggcgcctcccactcctcaagctccggaatcccccaca

SEQ ID NO: 638027 - DNA, 120 bp, Artificial Sequence
  ENSG00000181072_58 (sequence is synthesized)
tcgactttctatttccctgtcttcttttcttttttgtttgttttgcttttcctgctcttttcttagcgctgggtggcagtgggtatgcggcagccgtgtgatttgcccatcccctagtac

SEQ ID NO: 638028 - DNA, 120 bp, Artificial Sequence
  ENSG00000181072_59 (sequence is synthesized)
acgcagccagcgacacaagcacacagcgaccagtccccacgctgtgccacacaccctccagcggtccggcgcgcagcccctgctccacagcccgggacgcctgcagccaccgccagggtc

SEQ ID NO: 638029 - DNA, 120 bp, Artificial Sequence
  ENSG00000181072_60 (sequence is synthesized)
atggccatggcccacgcagggctctgcgggtggagaggggaagtcagcctagactccagagagaaaccctggggcaacccgaaaggcctgaggaaaactggaattggggttaggcatgag

SEQ ID NO: 638030 - DNA, 120 bp, Artificial Sequence
  ENSG00000181072_61 (sequence is synthesized)
ggcatgaggggagggagtctctggggaaaacgggccgggctgtgcggagccctgagggctcctgcggctgcagcgctgcaggccgcccgcgtctcgccccgccccgccgctgggcgtccc

SEQ ID NO: 638031 - DNA, 120 bp, Artificial Sequence
  ENSG00000181072_62 (sequence is synthesized)
gcccacccgcgggcggcagcttttctccatgctgcccagggaagttcgatgcctggtgctgggatgcgccagcgcttctgttcgcttctggcaatcctggcgtctcccaatgagagggct

SEQ ID NO: 638032 - DNA, 120 bp, Artificial Sequence
  ENSG00000181072_63 (sequence is synthesized)
ctcaaaatgaagcttttaataaactccagagtaaggaactcgggattgtgcggcaaaggccgcgcattgcactttgtgagcaatcggtaaatatgcgcaaccatatgataggaaatatat

SEQ ID NO: 638033 - DNA, 120 bp, Artificial Sequence
  ENSG00000181072_64 (sequence is synthesized)
gcattttcattgataagaaaaaaagagatgatggtatttttaaacagaagccacaaacaggcatacctgtgccattgttggggagctaataataaaggcactgatgatcacaggagtaag

SEQ ID NO: 638034 - DNA, 120 bp, Artificial Sequence
  ENSG00000181072_65 (sequence is synthesized)
aacaattgacttggccaagagacaattttaagctgggaactgtattcggctgcagttcagaaagtggacttttgagacttgtcaaacgaatggaagaattttgtgccaacaatgtcccag

SEQ ID NO: 638035 - DNA, 120 bp, Artificial Sequence
  ENSG00000181072_66 (sequence is synthesized)
ctttgcaggcttggcagctgaggactcagaagtaacaaattaatgccaggtgaattattattgttactactattatcaaaatgtgttccagttgcagcaatacaatggataagcaacttc

SEQ ID NO: 638036 - DNA, 120 bp, Artificial Sequence
  ENSG00000181074_0 (sequence is synthesized)
gaaagcccagacaaattttgagctatttcataacctaccagacttatcatgctaacactgaataaaacagacctaataccagcttcatttattctgaatggagtcccaggactggaagac

SEQ ID NO: 638037 - DNA, 120 bp, Artificial Sequence
  ENSG00000181074_1 (sequence is synthesized)
acacaactctggatttccttcccattctgctctatgtatgttgtggctatggtagggaattgtggactcctctacctcattcactatgaggatgccctgcacaaacccatgtactacttc

SEQ ID NO: 638038 - DNA, 120 bp, Artificial Sequence
  ENSG00000181074_2 (sequence is synthesized)
ttggccatgctttcctttactgaccttgttatgtgctctagtacaatccctaaagccctctgcatcttctggtttcatctcaaggacattggatttgatgaatgccttgtccagatgttc

SEQ ID NO: 638039 - DNA, 120 bp, Artificial Sequence
  ENSG00000181074_3 (sequence is synthesized)
ttcacccacaccttcacagggatggagtctggggtgcttatgcttatggccctggatcgctatgtggccatctgctaccccttacgctattcaactatcctcaccaatcctgtaattgca

SEQ ID NO: 638040 - DNA, 120 bp, Artificial Sequence
  ENSG00000181074_4 (sequence is synthesized)
ctgcagaggcaatatacttccccatacctactgtgaccacatgtctgtagccaaattgtcctgtggtaatgtcaaggtcaatgccatctatggtctgatggttgccctcctgatttgggg

SEQ ID NO: 638041 - DNA, 120 bp, Artificial Sequence
  ENSG00000181074_5 (sequence is synthesized)
ctttgacatactgtgtatcaccaactcctataccatgattctccgggcagtggtcagcctctcctcagcagatgctcggcagaaggcctttaatacctgcactgcccacatttgtgccat

SEQ ID NO: 638042 - DNA, 120 bp, Artificial Sequence
  ENSG00000181074_6 (sequence is synthesized)
tgttttctcctatactccagctttcttctccttcttttcccaccgctttggggaacacataatccccccttcttgccacatcattgtagccaatatttatctgctcctaccacccactat

SEQ ID NO: 638043 - DNA, 120 bp, Artificial Sequence
  ENSG00000181074_7 (sequence is synthesized)
gaaccctattgtctatggggtgaaaaccaaacagatacgagactgtgtcataaggatcctttcaggttctaaggataccaaatcctacagcatgtgaatgaacacttgccaggagtgaga

SEQ ID NO: 638044 - DNA, 120 bp, Artificial Sequence
  ENSG00000181074_8 (sequence is synthesized)
ctggaagcactgtattgatcacaaaatggagtttgttaactggtgcattctcaataagtaccttgggaatctcaacatcattggaaggcccaccaacatttctataaattttttaccttc

SEQ ID NO: 638045 - DNA, 120 bp, Artificial Sequence
  ENSG00000181085_0 (sequence is synthesized)
agtaaggccccgcgggcgtcctggccgccatgtgcaccgtagtggaccctcgcattgtccggagatacctactcaggcggcagctcgggcagggggcctatggcattgtgtggaaggcag

SEQ ID NO: 638046 - DNA, 120 bp, Artificial Sequence
  ENSG00000181085_1 (sequence is synthesized)
tggaccggaggactggtgaggtcgtggccatcaagaaaatctttgatgcttttagggataagacagatgcccagagaacattccgggaaatcacgctcctccaggagtttggggaccatc

SEQ ID NO: 638047 - DNA, 120 bp, Artificial Sequence
  ENSG00000181085_2 (sequence is synthesized)
ccaacatcatcagcctccttgacgtgatccgggcagagaacgacagggacatttacctggtgtttgagtttatggacactgacctgaacgcagtcatccggaagggcggcctgctgcagg

SEQ ID NO: 638048 - DNA, 120 bp, Artificial Sequence
  ENSG00000181085_3 (sequence is synthesized)
acgtccacgtgcgctccatcttctaccagctcctgcgggccacccggttcctccactcggggcacgttgtgcaccgggaccagaagccgtccaatgtgctcctggatgccaactgcacag

SEQ ID NO: 638049 - DNA, 120 bp, Artificial Sequence
  ENSG00000181085_4 (sequence is synthesized)
tgaagctgtgtgactttggcctggcccgctccctgggcgacctccccgaggggcctgaggaccaggccgtgacagagtacgtggccacacgctggtaccgagcaccggaggtgctgctct

SEQ ID NO: 638050 - DNA, 120 bp, Artificial Sequence
  ENSG00000181085_5 (sequence is synthesized)
cttcgcaccgatacacccttggggtggacatgtggagtctgggctgtatcctgggggagatgctgcgggggagacccctgttccccggcacgtccaccctccaccagctggagctgatcc

SEQ ID NO: 638051 - DNA, 120 bp, Artificial Sequence
  ENSG00000181085_6 (sequence is synthesized)
tggagaccatcccaccgccatctgaggaggacctcctggctctcggctcaggctgccgtgcctctgtgctgcaccagctggggtcccggccacgacagacgctggatgccctcctaccgc

SEQ ID NO: 638052 - DNA, 120 bp, Artificial Sequence
  ENSG00000181085_7 (sequence is synthesized)
gcgacccaggcactgcagcacccctacgtgcagaggttccactgccccagcgacgagtgggcacgagaggcagatgtgcggccccgggcacacgaaggggtccagctctctgtgcctgag

SEQ ID NO: 638053 - DNA, 120 bp, Artificial Sequence
  ENSG00000181085_8 (sequence is synthesized)
taccgcagccgcgtctatcagatgatcctggagtgtggaggcagcagcggcacctcgagagagaagggcccggagggtgtctccccaagccaggcacacctgcacaaacccagagccgac

SEQ ID NO: 638054 - DNA, 120 bp, Artificial Sequence
  ENSG00000181085_9 (sequence is synthesized)
cctcagctgccttctaggacacctgtgcagggtcccagacccaggccccagagcagcccaggccatgaccctgccgagcacgagtccccccgtgcagccaagaacgttcccaggcagaac

SEQ ID NO: 638055 - DNA, 120 bp, Artificial Sequence
  ENSG00000181085_10 (sequence is synthesized)
tccgctcccctgctccaaactgctctcctagggaatggggaaaggccccctggggcgaaggaagcgccccccttgacactctcgctggtgaagccaagcgggaggggagctgcgccctcc

SEQ ID NO: 638056 - DNA, 120 bp, Artificial Sequence
  ENSG00000181085_11 (sequence is synthesized)
ctgacctcccaggctgcggctcaggtggccaaccaggccctgatccggggtgactggaaccggggcggtggggtgagggtggccagcgtacaacaggtccctccccggcttcctccggag

SEQ ID NO: 638057 - DNA, 120 bp, Artificial Sequence
  ENSG00000181085_12 (sequence is synthesized)
gcccggcccggccggaggatgttcagcacctctgccttgcagggtgcccaggggggtgccagggctttgcttggaggctactcccaagcctacgggactgtctgccactcggcactgggc

SEQ ID NO: 638058 - DNA, 120 bp, Artificial Sequence
  ENSG00000181085_13 (sequence is synthesized)
cacctgcccctgctggaggggcaccatgtgtgagccgccctactcccttcacctggccctctgttcctgccccagccccttccccagacccctctccagtctcctgcaccccttagccct

SEQ ID NO: 638059 - DNA, 120 bp, Artificial Sequence
  ENSG00000181085_14 (sequence is synthesized)
ccctgctttgcctggcccgttgaagttccagggagcttgcccgggtctcctcgggggagcagatgagggccctgcccccgccccactgacttcctccaataaagtcatgtctgcccccaa

SEQ ID NO: 638060 - DNA, 120 bp, Artificial Sequence
  ENSG00000181085_15 (sequence is synthesized)
gtctatcaggtgctccggctctcgacccctatcatcccctgtctactgcaccctggaggctgcctcctatgtcagagacccccaaacgccccatgcccaggctgtgacctctgagcaccc

SEQ ID NO: 638061 - DNA, 120 bp, Artificial Sequence
  ENSG00000181085_16 (sequence is synthesized)
tttgctggccgcccacgcggagcacggcccgggccccttctgcctgtgctgccaactatgcgcagcattcggttcctgaccctggggttgacccactgaccccggggttgacccactgac

SEQ ID NO: 638062 - DNA, 120 bp, Artificial Sequence
  ENSG00000181085_17 (sequence is synthesized)
cctctgtgctgcaccagctggggtcccggtgagtgggggcacttcggtgagggtgacagggtggcctatctcaagggagcagggccaccttcctgcaagtttactggggccagtttgtac

SEQ ID NO: 638063 - DNA, 120 bp, Artificial Sequence
  ENSG00000181085_18 (sequence is synthesized)
cagttcagattctgcctgttttcaagatggcagtcccaaacccaacaactgttggccacactgaaagcaggagcccctctggtgctcctagagggtggcccagaggagctgtgccagggc

SEQ ID NO: 638064 - DNA, 120 bp, Artificial Sequence
  ENSG00000181085_19 (sequence is synthesized)
gcatctacctagacaggacagcagggtggaccccagtttggaagctgagcccccagccacgaacatggatctgaggaggggcccttgggtcgggccctggagacgacacacggcagccca

SEQ ID NO: 638065 - DNA, 120 bp, Artificial Sequence
  ENSG00000181085_20 (sequence is synthesized)
agtaaggccccgcgggcgtcctggccgccatgtgcaccgtagtggaccctcgcattgtccggagatacctactcaggcggcagctcgggcaggggagaacattccgggaaatcacgctcc

SEQ ID NO: 638066 - DNA, 120 bp, Artificial Sequence
  ENSG00000181085_21 (sequence is synthesized)
cttccagccgcctccgactctctccccaggagtttggggaccatcccaacatcatcagcctccttgacgtgatccgggcagagaacgacagggacatttacctggtgtttgagtttatgg

SEQ ID NO: 638067 - DNA, 120 bp, Artificial Sequence
  ENSG00000181085_22 (sequence is synthesized)
cagtctgcccccgtcccctcatcctcctttcccctttccccttcccccctgcttttccctcccttccccatgcttcccattgcccctccaatgtccagttcaaatctctcgaggacctca

SEQ ID NO: 638068 - DNA, 120 bp, Artificial Sequence
  ENSG00000181085_23 (sequence is synthesized)
aggcctcccctccactgcaccccctctgatggcccctttatgtgaccctcaactgtacacaggtccctccccggcttcctccggaggcccggcccggccggaggatgttcagcacctctg

SEQ ID NO: 638069 - DNA, 120 bp, Artificial Sequence
  ENSG00000181090_0 (sequence is synthesized)
ggggccacgctgcgggcccgggccatggccgccgccgatgccgaggcagttccggcgaggggggagcctcagcaggattgctgtgtgaaaaccgagctgctgggagaagagacacctatg

SEQ ID NO: 638070 - DNA, 120 bp, Artificial Sequence
  ENSG00000181090_1 (sequence is synthesized)
gctgccgatgaaggctcagcagagaaacaggcaggagaggcccacatggctgcggacggtgagaccaatgggtcttgtgaaaacagcgatgccagcagtcatgcaaatgctgcaaagcac

SEQ ID NO: 638071 - DNA, 120 bp, Artificial Sequence
  ENSG00000181090_2 (sequence is synthesized)
actcaggacagcgcaagggtcaacccccaggatggcaccaacacactaactcggatagcggaaaatggggtttcagaaagagactcagaagcggcgaagcaaaaccacgtcactgccgac

SEQ ID NO: 638072 - DNA, 120 bp, Artificial Sequence
  ENSG00000181090_3 (sequence is synthesized)
gactttgtgcagacttctgtcatcggcagcaacggatacatcttaaataagccggccctacaggcacagcccttgaggactaccagcactctggcctcttcgctgcctggccatgctgca

SEQ ID NO: 638073 - DNA, 120 bp, Artificial Sequence
  ENSG00000181090_4 (sequence is synthesized)
aaaacccttcctggaggggctggcaaaggcaggactccaagcgcttttccccagacgccagccgccccaccagccacccttggggaggggagtgctgacacagaggacaggaagctcccg

SEQ ID NO: 638074 - DNA, 120 bp, Artificial Sequence
  ENSG00000181090_5 (sequence is synthesized)
gcccctggcgccgacgtcaaggtccacagggcacgcaagaccatgccgaagtccgtcgtgggcctgcatgcagccagtaaagatcccagagaagttcgagaagctagagatcataaggaa

SEQ ID NO: 638075 - DNA, 120 bp, Artificial Sequence
  ENSG00000181090_6 (sequence is synthesized)
ccaaaagaggagatcaacaaaaacatttctgactttggacgacagcagcttttaccccccttcccatcccttcatcagtcgctacctcagaaccagtgctacatggccaccacaaaatca

SEQ ID NO: 638076 - DNA, 120 bp, Artificial Sequence
  ENSG00000181090_7 (sequence is synthesized)
cagacagcttgcttgccttttgttttagcagctgcagtatctcggaagaaaaaacgaagaatgggaacctatagcctggttcctaagaaaaagaccaaagtattaaaacagaggacggtg

SEQ ID NO: 638077 - DNA, 120 bp, Artificial Sequence
  ENSG00000181090_8 (sequence is synthesized)
attgagatgtttaagagcataactcattccactgtgggttccaagggggagaaggacctgggcgccagcagcctgcacgtgaatggggagagcctggagatggactcggatgaggacgac

SEQ ID NO: 638078 - DNA, 120 bp, Artificial Sequence
  ENSG00000181090_9 (sequence is synthesized)
tcagaggagctcgaggaggacgacggccatggtgcagagcaggcggccgcgttccccacagaggacagcaggacttccaaggagagcatgtcggaggctgatcgcgcccagaagatggac

SEQ ID NO: 638079 - DNA, 120 bp, Artificial Sequence
  ENSG00000181090_10 (sequence is synthesized)
ggggagtccgaggaggagcaggagtccgtggacaccggggaggaggaggaaggcggtgacgagtctgacctgagttcggaatccagcattaagaagaaatttctcaagaggaaaggaaag

SEQ ID NO: 638080 - DNA, 120 bp, Artificial Sequence
  ENSG00000181090_11 (sequence is synthesized)
accgacagtccctggatcaagccagccaggaaaaggaggcggagaagtagaaagaagcccagcggtgccctcggttctgagtcgtataagtcatctgcaggaagcgctgagcagacggca

SEQ ID NO: 638081 - DNA, 120 bp, Artificial Sequence
  ENSG00000181090_12 (sequence is synthesized)
ccaggagacagcacagggtacatggaagtttctctggactccctggatctccgagtcaaaggaattctgtcttcacaagcagaagggttggccaacggtccagatgtgctggagacagac

SEQ ID NO: 638082 - DNA, 120 bp, Artificial Sequence
  ENSG00000181090_13 (sequence is synthesized)
ggcctccaggaagtgcctctctgcagctgccggatggaaacaccgaagagtcgagagatcaccacactggccaacaaccagtgcatggctacagagagcgtggaccatgaattgggccgg

SEQ ID NO: 638083 - DNA, 120 bp, Artificial Sequence
  ENSG00000181090_14 (sequence is synthesized)
tgcacaaacagcgtggtcaagtatgagctgatgcgcccctccaacaaggccccgctcctcgtgctgtgtgaagaccaccggggccgcatggtgaagcaccagtgctgtcctggctgtggc

SEQ ID NO: 638084 - DNA, 120 bp, Artificial Sequence
  ENSG00000181090_15 (sequence is synthesized)
tacttctgcacagcgggtaattttatggagtgtcagcccgagagcagcatctctcaccgtttccacaaagactgtgcctctcgagtcaataacgccagctattgtccccactgtggggag

SEQ ID NO: 638085 - DNA, 120 bp, Artificial Sequence
  ENSG00000181090_16 (sequence is synthesized)
gagagctccaaggccaaagaggtgacgatagctaaagcagacaccacctcgaccgtgacaccagtccccgggcaggagaagggctcggccctggagggcagggccgacaccacaacgggc

SEQ ID NO: 638086 - DNA, 120 bp, Artificial Sequence
  ENSG00000181090_17 (sequence is synthesized)
agtgctgccgggccaccactctcggaggacgacaagctgcagggtgcagcctcccacgtgcccgagggctttgatccaacgggacctgctgggcttgggaggccaactcccggcctttcc

SEQ ID NO: 638087 - DNA, 120 bp, Artificial Sequence
  ENSG00000181090_18 (sequence is synthesized)
cagggaccagggaaggaaaccttggagagcgctctcatcgccctcgactcggaaaaacccaagaagcttcgcttccacccaaagcagctgtacttctccgccaggcaaggggagcttcag

SEQ ID NO: 638088 - DNA, 120 bp, Artificial Sequence
  ENSG00000181090_19 (sequence is synthesized)
aaggtgctcctcatgctggtggacggaattgaccccaacttcaaaatggagcaccagaataagcgctctccactgcacgccgcggcagaggctggacacgtggacatctgccacatgctg

SEQ ID NO: 638089 - DNA, 120 bp, Artificial Sequence
  ENSG00000181090_20 (sequence is synthesized)
gttcaggcgggcgctaatattgacacctgctcagaagaccagaggaccccgttgatggaagcagccgaaaacaaccatctggaagcagtgaagtacctcatcaaggctggggccctggtg

SEQ ID NO: 638090 - DNA, 120 bp, Artificial Sequence
  ENSG00000181090_21 (sequence is synthesized)
actacgaagtggtccagtacctgctttcaaatggacagatggacgtcaactgtcaggatgacggaggctggacacccatgatctgggccacagagtacaagcacgtggacctcgtgaagc

SEQ ID NO: 638091 - DNA, 120 bp, Artificial Sequence
  ENSG00000181090_22 (sequence is synthesized)
tgctgctgtccaagggctctgacatcaacatccgagacaacgaggagaacatttgcctgcactgggcggcgttctccggctgcgtggacatagccgagatcctgctggctgccaagtgcg

SEQ ID NO: 638092 - DNA, 120 bp, Artificial Sequence
  ENSG00000181090_23 (sequence is synthesized)
acctccacgccgtgaacatccacggagactcgccactgcacattgccgcccgggagaaccgctacgactgtgtcgtcctctttctttctcgggattcagatgtcaccttaaagaacaagg

SEQ ID NO: 638093 - DNA, 120 bp, Artificial Sequence
  ENSG00000181090_24 (sequence is synthesized)
aaggagagacgcccctgcagtgtgcgagcctcaactctcaggtgtggagcgctctgcagatgagcaaggctctgcaggactcggcccccgacaggcccagccccgtggagaggatagtga

SEQ ID NO: 638094 - DNA, 120 bp, Artificial Sequence
  ENSG00000181090_25 (sequence is synthesized)
gcagggacatcgctcgaggctacgagcgcatccccatcccctgtgtcaacgccgtggacagcgagccatgccccagcaactacaagtacgtctctcagaactgcgtgacgtcccccatga

SEQ ID NO: 638095 - DNA, 120 bp, Artificial Sequence
  ENSG00000181090_26 (sequence is synthesized)
acatcgacagaaatatcactcatctgcagtactgcgtgtgcatcgacgactgctcctccagcaactgcatgtgcggccagctcagcatgcgctgctggtacgacaaggatggccggctcc

SEQ ID NO: 638096 - DNA, 120 bp, Artificial Sequence
  ENSG00000181090_27 (sequence is synthesized)
tgccagagttcaacatggcggagcctcccttgatcttcgaatgcaaccacgcgtgctcctgctggaggaactgccgaaatcgcgtcgtacagaatggtctcagggcaaggctgcagctct

SEQ ID NO: 638097 - DNA, 120 bp, Artificial Sequence
  ENSG00000181090_28 (sequence is synthesized)
accggacgcgggacatgggctggggcgtgcggtccctgcaggacatcccaccaggcacctttgtctgcgagtatgttggggagctgatttcagactcagaagccgacgttcgagaggaag

SEQ ID NO: 638098 - DNA, 120 bp, Artificial Sequence
  ENSG00000181090_29 (sequence is synthesized)
attcttacctctttgatctcgacaataaggacggggaggtttactgcatcgacgcgcggttctacgggaacgtcagccggttcatcaaccaccactgcgagcccaacctggtgcccgtgc

SEQ ID NO: 638099 - DNA, 120 bp, Artificial Sequence
  ENSG00000181090_30 (sequence is synthesized)
gcgtgttcatggcccaccaggacctgcggttcccccggatcgccttcttcagcacccgcctgatcgaggccggcgagcagctcgggtttgactatggagagcgcttctgggacatcaaag

SEQ ID NO: 638100 - DNA, 120 bp, Artificial Sequence
  ENSG00000181090_31 (sequence is synthesized)
gcaagctcttcagctgccgctgcggctcccccaagtgccggcactcgagcgcggccctggcccagcgtcaggccagcgcggcccaggaggcccaggaggacggcttgcccgacaccagct

SEQ ID NO: 638101 - DNA, 120 bp, Artificial Sequence
  ENSG00000181090_32 (sequence is synthesized)
ccgcggctgccgccgaccccctatgagacgccgccggccagcggggcgctcgggagccagggaccgccgcgtcgccgattagaggacgaggaggagagattccgcacgcaaccgaaaggg

SEQ ID NO: 638102 - DNA, 120 bp, Artificial Sequence
  ENSG00000181090_33 (sequence is synthesized)
tccttcggggctgcgccgccggcttcctggaggggtcggaggtgaggctgcagcccctgcgggcgggtgtggatgcctcccagccaccttcccagacctgcggcctcaccgcgggcccag

SEQ ID NO: 638103 - DNA, 120 bp, Artificial Sequence
  ENSG00000181090_34 (sequence is synthesized)
tgcccaggctggagcgcacactttggtccgcgcgccagagacgctgggagtccgcactggcatcaccttctgagtttctgatgctgatttgtcgttgcgaagtttctcgtttcttcctct

SEQ ID NO: 638104 - DNA, 120 bp, Artificial Sequence
  ENSG00000181090_35 (sequence is synthesized)
gacctccgaggtccccgctgcaccacggggttgctctgttctcctgtccggcccagactcttctgtgtggcgccgccgaagccaccgttagcgcgagctgctccgttcgccctgcccacg

SEQ ID NO: 638105 - DNA, 120 bp, Artificial Sequence
  ENSG00000181090_36 (sequence is synthesized)
gcctgcgtggctggggccgagtcccaggggccgcacggagggcacagtctcctgtcaggctcggagaggtcaggagaccgaccccaccactaactttggagaaaatgtgggtttgctttt

SEQ ID NO: 638106 - DNA, 120 bp, Artificial Sequence
  ENSG00000181090_37 (sequence is synthesized)
taaaggaatcctatatctagtcctatatatcaaacctctaactgacgtttcttttcgaggaagtggcttggtgggtgcagcccccgccggttccgttgacgctggcaccttctgttgatt

SEQ ID NO: 638107 - DNA, 120 bp, Artificial Sequence
  ENSG00000181090_38 (sequence is synthesized)
ttttaagccacatgctatgatgaataaactgatttattttctaccattactgaacattaggacaaacacaaaataaaaaacaaaacacagacaacggtgctgattctggtgtggtttcta

SEQ ID NO: 638108 - DNA, 120 bp, Artificial Sequence
  ENSG00000181090_39 (sequence is synthesized)
ctcaccacgtgaaataaactatcaactgtataaagagaacaaagtgattttagaataaaatgcaggaaaaacttttttaaagatgttagtcttgtagcgtgaataaatttgccatcacct

SEQ ID NO: 638109 - DNA, 120 bp, Artificial Sequence
  ENSG00000181090_40 (sequence is synthesized)
tttgtgtggtggcctggcaggtcatatacttttttttggcatatacctttttaaagactgtaattagtgcagtaacagtggggttttttttgtgcaactcttctaaaaacattcataatg

SEQ ID NO: 638110 - DNA, 120 bp, Artificial Sequence
  ENSG00000181090_41 (sequence is synthesized)
cagtcatgtttatttttttctgttaaaatgtttttgacagttttaagagcagtcttttggctctgaccatttcttgttctgtttccaatgaaatcaataaaaaaaaagaagtactttaaa

SEQ ID NO: 638111 - DNA, 120 bp, Artificial Sequence
  ENSG00000181090_42 (sequence is synthesized)
tttactcagactccgacactggcgttgcttttgtctcatcccagctaggcgacgtctgcgtcagcgcctctcatctgtggcacgtgtgcccagcgggctccctatgtgacggcttttccc

SEQ ID NO: 638112 - DNA, 120 bp, Artificial Sequence
  ENSG00000181090_43 (sequence is synthesized)
acctctgagtgttcatgtcactcgctgcatgttctgccacactcggcccctctgcagagcctctcacttgtttcaaaagaactttccatagtgacaagtgagggcgcagttagcctttgg

SEQ ID NO: 638113 - DNA, 120 bp, Artificial Sequence
  ENSG00000181090_44 (sequence is synthesized)
aaccctcgactcggctcctctgtcaccagcgttctctcccacccttctttcttggttttgaactacttactgttttaaaacaaaccccattttactactgaatagcacagtgtgtttcta

SEQ ID NO: 638114 - DNA, 120 bp, Artificial Sequence
  ENSG00000181090_45 (sequence is synthesized)
ttaagatcaaaaatggaccattgtctcacataacagcaatgcttttcacatgtaacaaaaataacaatttcctgttattatttagtgcctagtccatggtcaaaggtctgttgacaaaat

SEQ ID NO: 638115 - DNA, 120 bp, Artificial Sequence
  ENSG00000181090_46 (sequence is synthesized)
catcaaccacagcagccaaaagggggaagccacccgagggtcggctgtcgggcgaacggatcagcaaagtgtcgtgtgcaaaacgcagtgacgtgtgactcagcctgagaagcagcgaag

SEQ ID NO: 638116 - DNA, 120 bp, Artificial Sequence
  ENSG00000181090_47 (sequence is synthesized)
agctctgaggaaactccagctcagcgcacagcatgaggaggacgagggaacaatagggcgttcctttgtgcctgcccttgaaacgcggtggaggccactcagtgagcccgggcagtgcca

SEQ ID NO: 638117 - DNA, 120 bp, Artificial Sequence
  ENSG00000181090_48 (sequence is synthesized)
tcgctcacgtgtccccagcagcagtggcgtctgtggggatgctgtgcactggaaattggcactgttttgggtagtggttctgagaggaactgtttaaccaggcagttccggcgagggggg

SEQ ID NO: 638118 - DNA, 120 bp, Artificial Sequence
  ENSG00000181090_49 (sequence is synthesized)
tcaacatccgagacaacgatgacggcaccatgaagagaggagccctgagccggcagaaggaagagaagagggaagcagaggagccctgagctggtggaaggctgtggcgggtaccttgga

SEQ ID NO: 638119 - DNA, 120 bp, Artificial Sequence
  ENSG00000181090_50 (sequence is synthesized)
ggaagagaggagggaagcaaaggcagagaacaaggcagaggccacccccaggtggggccacctcacccaccgcccccggagactgcgtggcggggaaggcggccctagtgtggctggtcg

SEQ ID NO: 638120 - DNA, 120 bp, Artificial Sequence
  ENSG00000181090_51 (sequence is synthesized)
gcctgcatgcctgggcagtttgcagcctgtccaggtgtcagagctgttagctctctgatgctggtggctgttcccccagaatggaagcattgattaaatttcaagtttgttatttataca

SEQ ID NO: 638121 - DNA, 120 bp, Artificial Sequence
  ENSG00000181090_52 (sequence is synthesized)
ggcatctgggtggaggcttctcatccaaaccgtacacatggagtttttccctaggtgggtgttcaagtttggccagaaaccatcgtttttatgtccgtttaagccacactgggcacttag

SEQ ID NO: 638122 - DNA, 120 bp, Artificial Sequence
  ENSG00000181090_53 (sequence is synthesized)
ctccagccgtccttctctggactgttgtctttatctggttctggtcgggcagagatttgtgtcacagactttgacaccccacccatcttagaagctcggagcagcgctgtgtgctctgcc

SEQ ID NO: 638123 - DNA, 120 bp, Artificial Sequence
  ENSG00000181090_54 (sequence is synthesized)
agacgagctgcccctggtgaaagctgggcctggcccctccagtcggaagcccctcactctccattttgctgcttatcaagaccttcgtgtgtgcgccgttgctagttccggaattgcatt

SEQ ID NO: 638124 - DNA, 120 bp, Artificial Sequence
  ENSG00000181090_55 (sequence is synthesized)
tttggagttgaaaatgttgtacttttctaggagccatttccccaggccatgtggaggtcaggtatctgctggttctggcctcactctactcctcctcctcctccccgctctgtggagagg

SEQ ID NO: 638125 - DNA, 120 bp, Artificial Sequence
  ENSG00000181090_56 (sequence is synthesized)
ggccacgctgcgggcccgggccatggccgccgccgatgccgagataggtggtcttgctctgtggccctgctggagtgcagtggtgccatcatggctcacttcagtcttgaactcctgagc

SEQ ID NO: 638126 - DNA, 120 bp, Artificial Sequence
  ENSG00000181090_57 (sequence is synthesized)
gccgtcaagggaacggcccgcaccacccccaccccaccacagacggaggcccagcgaggacggcagggtgcggggtgggtggccacacagcgaggagaaggctggcggaggctccgcacc

SEQ ID NO: 638127 - DNA, 120 bp, Artificial Sequence
  ENSG00000181090_58 (sequence is synthesized)
gccgccacaggtcactggagaaggcccctcctgcatggcgggcctgcgcccaactgcaggctccgggactgccatgcatggccgtacccggcgaggccggcgtgtcggggccttgctaac

SEQ ID NO: 638128 - DNA, 120 bp, Artificial Sequence
  ENSG00000181090_59 (sequence is synthesized)
gtccgtcgtgggcctggtaattttgtgtcttctcttgctgtttcctttttcccatctcttttgttttaataacggcaaatggactttggtgcattgaggagaagccacatgcagccagta

SEQ ID NO: 638129 - DNA, 120 bp, Artificial Sequence
  ENSG00000181090_60 (sequence is synthesized)
gcggggccacgctgcgggcccgggccatggccgccgccgatgccgagactgtgttgatcaggctggttgaactcctgggctcaagcaatcttcccgctgccatatgaatatgaatatgtg

SEQ ID NO: 638130 - DNA, 80 bp, Artificial Sequence
  ENSG00000181090_61 (sequence is synthesized)
ggatcacgagcctgggagttcgaggctgcttccggcgaggggggagcctcagcaggattgctgtgtgaaaaccgagctgc

SEQ ID NO: 638131 - DNA, 120 bp, Artificial Sequence
  ENSG00000181090_62 (sequence is synthesized)
tgtccaagggctctgacatcaacatccgagacaacagggttccagaggccagaaatgggaagtccagccacaaataaacccactaaattgataataagaaagaagatttgacacagaaaa

SEQ ID NO: 638132 - DNA, 120 bp, Artificial Sequence
  ENSG00000181090_63 (sequence is synthesized)
gcacgggcccttgccattcattgttggcacggggaggtctgcatttggaacccctcgctgcatgtaagcagaccccacctcccacctagaaacagggaccactggctgtgggcacccgct

SEQ ID NO: 638133 - DNA, 120 bp, Artificial Sequence
  ENSG00000181090_64 (sequence is synthesized)
gcctccctgcaggcacgcaggcctctctggagtgactggtcctgagctgcagtgcctcctccgtgggctgcagggcttccatgactgtatccagggggtttctacctcattccaccggag

SEQ ID NO: 638134 - DNA, 120 bp, Artificial Sequence
  ENSG00000181090_65 (sequence is synthesized)
atggtgaggacctcgtgctgttcccgaacacagccaggaaccacgccaagaggaagatgctccagcacagccttgctgtggaccaggccgcccacagggagcaggtccattcctgggggc

SEQ ID NO: 638135 - DNA, 120 bp, Artificial Sequence
  ENSG00000181090_66 (sequence is synthesized)
tgactccgcctttcagagaggcgtggctccatcttcacagcctcgtagcctcttaaaggcccagcctcaaaacctcattggggcccccagccccggtaaataaattgcattcagaccata

SEQ ID NO: 638136 - DNA, 120 bp, Artificial Sequence
  ENSG00000181090_67 (sequence is synthesized)
aactcacacttgctgatttcaaaacttactatatacggccacagtaatgaaaacagtgtgggactggcataaagacagaaatagagaccaatggaataaaataaaaagcccagaaataaa

SEQ ID NO: 638137 - DNA, 120 bp, Artificial Sequence
  ENSG00000181090_68 (sequence is synthesized)
ggaggagcagaacctgctacagcccagacttcctgccagccaaggctgctggtgcgctccgggtctggcctgggcttacgaagtttcagctcccgtgtgtgtgccattagactcgttgca

SEQ ID NO: 638138 - DNA, 120 bp, Artificial Sequence
  ENSG00000181090_69 (sequence is synthesized)
ttacctctttgatctcgacaataagatctcctcggcttagcagctgaagactgacgctgcctgatcgcatcccctaggaagccccctggatcatcacggacgccgagcttcgggtaactc

SEQ ID NO: 638139 - DNA, 120 bp, Artificial Sequence
  ENSG00000181090_70 (sequence is synthesized)
acaaatgaatcctcaggtctggaactcaggagaagactctggactgagctatggatctggaaactcctgaacagagcagtggttccaagctggagacgattttgcacctgggggacgtct

SEQ ID NO: 638140 - DNA, 120 bp, Artificial Sequence
  ENSG00000181090_71 (sequence is synthesized)
gcaaggtctggagacagtttgggttgtcacaaccgaaggagtgctatggcacttagtgggatcaggcagggatgttgttaaacactgtacagtgcacaggacagccctccccaacagagt

SEQ ID NO: 638141 - DNA, 120 bp, Artificial Sequence
  ENSG00000181090_72 (sequence is synthesized)
tcctggaccgtacatgttaatggtgctggggctgagaggccactgatggactcgtggagctggcgaggcggccctggagtctgtggcctgtgagggaagcgggaacctctgagggagtgc

SEQ ID NO: 638142 - DNA, 120 bp, Artificial Sequence
  ENSG00000181090_73 (sequence is synthesized)
agcgttcagcagcatccacccatccagccacgaggcctggcagaggggtgggagaggaggtggacctgccgtagaccccacaagcctgtcaaggagctgggacttggagtgaaaaggaga

SEQ ID NO: 638143 - DNA, 120 bp, Artificial Sequence
  ENSG00000181090_74 (sequence is synthesized)
gcgacgtggtcagaactgtgccttagaaagaccactctggacacagagagggggctggggagaggcgagggctgcatggtgctgtggctgcctgctggaatggcaggctaggccattgtg

SEQ ID NO: 638144 - DNA, 120 bp, Artificial Sequence
  ENSG00000181090_75 (sequence is synthesized)
ggcagcagtgagggaaggggtgattcgggagctggaagaggcaggacagggcaacgggctggacttgatgggtgagagaagctagtgacctttggcatgtagcaaacagttctcatgccc

SEQ ID NO: 638145 - DNA, 120 bp, Artificial Sequence
  ENSG00000181090_76 (sequence is synthesized)
tgccaccagcatcatgccagggcaggctgggctctcaccctcacagaatgtcccatgaataattatgtaactaaaagtgctgtgtgttgcaggtagcaactaaccggggctggtggcgtg

SEQ ID NO: 638146 - DNA, 120 bp, Artificial Sequence
  ENSG00000181090_77 (sequence is synthesized)
ggcagtaaaaagaatttaccaagactgttgtaggtaaagaaaggcagatttatgagagaaagtaggaaaatacgttgcaagaaagcaatgggcaatcaccaagagaggcgctggcagcaa

SEQ ID NO: 638147 - DNA, 120 bp, Artificial Sequence
  ENSG00000181090_78 (sequence is synthesized)
gagctgaaggcgtgctggggattttataggatggggcttgtgccggagagggccatgtgcagtgctgataacgcccaggttgcagggagctaacgcgtttttctatcagccgaggatctg

SEQ ID NO: 638148 - DNA, 120 bp, Artificial Sequence
  ENSG00000181090_79 (sequence is synthesized)
gtgataactgggcgtaggaagattgtgatttgtctgcacgggagggccgtgtgtcctggaccatgaagaaaggcagactcacagcttctccgctctctctgttgctttcccctggtccca

SEQ ID NO: 638149 - DNA, 120 bp, Artificial Sequence
  ENSG00000181090_80 (sequence is synthesized)
ccagtctgactcctttccctcattaggactccgcagcatggacaccatgaagggaggcagagcctgtgacaggaacgctcagccagggaggcttctctgatgagggccagagctgtccag

SEQ ID NO: 638150 - DNA, 120 bp, Artificial Sequence
  ENSG00000181090_81 (sequence is synthesized)
tatttgaacatggtttcaatgaatcctctcaatgttttgaaattgcaacttagtttcagtcgtctacaaaacctttgctcccccgtagcagcaccccctttatgttgttattatcacaaa

SEQ ID NO: 638151 - DNA, 120 bp, Artificial Sequence
  ENSG00000181090_82 (sequence is synthesized)
ttacatcttgacacactgggccaccagcaggacttataattattgtaataggcagttgtctctttaaattgcaaggcacttacagcgaaggtgcctgcatgctccctctagtcccccagg

SEQ ID NO: 638152 - DNA, 120 bp, Artificial Sequence
  ENSG00000181090_83 (sequence is synthesized)
gaagcagcccgagcccctgggaagggccaggtattaacttgccagacatcgcagctcattccaggctcccagccactcttccgtcagtggattccaattctgaaaatcggctcatgtcca

SEQ ID NO: 638153 - DNA, 120 bp, Artificial Sequence
  ENSG00000181090_84 (sequence is synthesized)
gaaacagcacgggagtgtgacttcctgctggggcagcccctcagcccctgccctctgttgactcttacatgtgaagcttcccccttgttggccactggtttcacccctcagggcaccgtg

SEQ ID NO: 638154 - DNA, 120 bp, Artificial Sequence
  ENSG00000181090_85 (sequence is synthesized)
ctctgttaccaccccctgttactgcccccaagcccctcggtggccgcctgcctcatcttccccacggggattagggagcccggctctgtagctgcgtctcccatcatcagcacaggctgc

SEQ ID NO: 638155 - DNA, 120 bp, Artificial Sequence
  ENSG00000181090_86 (sequence is synthesized)
agagggggaacccctcgactctcccaccctcagcacaggctgcagatggggaacccctcaactctcccaccctcagcacaggctgcagacggggaacccctcgactctcccaccctcagc

SEQ ID NO: 638156 - DNA, 120 bp, Artificial Sequence
  ENSG00000181090_87 (sequence is synthesized)
acaggctgcagagggggaacccctcgactctcccaccctcagcacaggctgcagacggggaacccctcgactctcccaccctcagcacaggctgcagacggggaacctcttgactctccc

SEQ ID NO: 638157 - DNA, 120 bp, Artificial Sequence
  ENSG00000181090_88 (sequence is synthesized)
accctcagcacaggctgcagacggggaatgcctcgacttcctggtgatgctggtgttctccctagggcttcctgcacacccacctccctccaccccattccttcctctaccagctgtcag

SEQ ID NO: 638158 - DNA, 120 bp, Artificial Sequence
  ENSG00000181090_89 (sequence is synthesized)
agaacttgagggtttctgcttcactgtgagctggctaccacttttttcaaggcttttaagagccattccaagttttccccacctcctgggtcctgagaaagtgccccactgcagcaaatg

SEQ ID NO: 638159 - DNA, 120 bp, Artificial Sequence
  ENSG00000181090_90 (sequence is synthesized)
cttccagacccttggtcaagctcctcactctcccatcccgggacttctcttctgccccagctgaggccatcaaccagttcttgcaattacttagctgtgcagcccctttctcccttttta

SEQ ID NO: 638160 - DNA, 120 bp, Artificial Sequence
  ENSG00000181090_91 (sequence is synthesized)
ggcttagcaccctgccccttcccgttggtctgtgctgggatttagccctcgcaattggcctggcaggcaggtgggacagctcctgaggcgagcacttgcttcctggtgagacaggtgatt

SEQ ID NO: 638161 - DNA, 120 bp, Artificial Sequence
  ENSG00000181090_92 (sequence is synthesized)
ccgtaacatctccagcacagtagatgtgctcacctttatggggcaggaggacctgtgcacttccagaggttccagaggactggagggtcctcatcgttacatctttgggacccagatttt

SEQ ID NO: 638162 - DNA, 120 bp, Artificial Sequence
  ENSG00000181090_93 (sequence is synthesized)
ccccaggggacccttactttctacctttgcagagctgacccaccggtggcccttcactctggttaagtgcctgtttacctctgtggtagaggcactccagtctcacaccgagcttggtaa

SEQ ID NO: 638163 - DNA, 120 bp, Artificial Sequence
  ENSG00000181090_94 (sequence is synthesized)
cagttctcaggatgtcggtatggggaaccagcccgctgtcctgtctttgttggtttggttgctccccactcccagtttttcaggggcctgcatcatcccaccagccacagcgctgtgctc

SEQ ID NO: 638164 - DNA, 120 bp, Artificial Sequence
  ENSG00000181090_95 (sequence is synthesized)
caccgagatattttcccaggtcatcactcatgaagctcccaccgtgtgccagggaccaccggacctcccagccaaccaggacagcagcctctgcaccctttgggtggtgggcaggacagt

SEQ ID NO: 638165 - DNA, 120 bp, Artificial Sequence
  ENSG00000181090_96 (sequence is synthesized)
cccagatcctctcctgatgccacttatgttagtccaggtcttccaagatgcagatgggataaaggtataaggatttggttagattttattagatgatgaaggctgagtgtggtggctcgt

SEQ ID NO: 638166 - DNA, 80 bp, Artificial Sequence
  ENSG00000181090_97 (sequence is synthesized)
tcacttgaaccgtctcaacaaaaacaaacaaacaaaaattagcctggcatggtggtgtgtgcctgtagtccttgctacct

SEQ ID NO: 638167 - DNA, 120 bp, Artificial Sequence
  ENSG00000181090_98 (sequence is synthesized)
accgtctcaacaaaaacaaacaaacaaaaattagcctggcatggtggtgtgtgcctgtagtccttgctacctgggaggctggaatgggagggttgcttgagtccaggaggtggaggttgc

SEQ ID NO: 638168 - DNA, 120 bp, Artificial Sequence
  ENSG00000181090_99 (sequence is synthesized)
ctaggtgatgggaatgaagccctttcaaaaaaagagagaagattttattagatgatgaagattagatattgttgttattattagagatgaagcatggaggtagctaagaaacttggaaga

SEQ ID NO: 638169 - DNA, 120 bp, Artificial Sequence
  ENSG00000181090_100 (sequence is synthesized)
gcttcagaatgtgagtagctctaacttccagagaggaagagagggaacgaaggttgactgggagtgacctagatcactaaacaacctaaggaaggttcaggaaagctgccagggagttct

SEQ ID NO: 638170 - DNA, 120 bp, Artificial Sequence
  ENSG00000181090_101 (sequence is synthesized)
tgagccaaagaagtgtggcctcagcacaaatgcagagacagattctgagcacaagagctgaggccattggtcatgacattcccatagttggaggcctatgaagcacactttcaaggaaac

SEQ ID NO: 638171 - DNA, 120 bp, Artificial Sequence
  ENSG00000181090_102 (sequence is synthesized)
tgcaactgtttaaaataacagtaatgtcctatgtgtgttttttttaaaagaaaggctgaaagttaattagctcatcatccacccgaagaagcaaaatcaacctaaaacaagaggtataaa

SEQ ID NO: 638172 - DNA, 120 bp, Artificial Sequence
  ENSG00000181090_103 (sequence is synthesized)
gagaagcactaattagatagaaactaacatgcactggagacaatcaaaccaaaactggttctttggcaacactaatcagaatggcaaccctctgggcaggtggggaagggggagcataaa

SEQ ID NO: 638173 - DNA, 79 bp, Artificial Sequence
  ENSG00000181090_104 (sequence is synthesized)
gggcaacatagcaagaccctgtctctggaaaaaatttaaaaactagctggacatggtggcatctggcttgagcctggga

SEQ ID NO: 638174 - DNA, 79 bp, Artificial Sequence
  ENSG00000181090_105 (sequence is synthesized)
gaggtgggaggctctaccactgcagtccagtctgggtgacagagcaagaccatgtctcaataaataaataaataaataa

SEQ ID NO: 638175 - DNA, 120 bp, Artificial Sequence
  ENSG00000181090_106 (sequence is synthesized)
atttaaaagataatatgaacaattttaggccaatacatttctagaaaaatataactgcactaacactgactcaagaggaaatagagaacccgaatagtcttataactcttaaagagatag

SEQ ID NO: 638176 - DNA, 120 bp, Artificial Sequence
  ENSG00000181090_107 (sequence is synthesized)
aatcagtaattaaaatcacaaacaaaacatcaggcccagtcagtgagttccactgaactttcaaaatataaattccctatagaaatgctctctaactcatttacaaggctagcataacct

SEQ ID NO: 638177 - DNA, 120 bp, Artificial Sequence
  ENSG00000181090_108 (sequence is synthesized)
ggatatccaaacctgatgagaatagtgcagtgcacagctgcaaaaagtctagacaagttattggtaaaccagatctgaattgtacgcaaagatgattatgtttgatttaccccaggaatg

SEQ ID NO: 638178 - DNA, 120 bp, Artificial Sequence
  ENSG00000181090_109 (sequence is synthesized)
acaggttggtttaactttaggaaatcagtttatgtaagccattcccttaacacatagaaggagaaaaattaggtcatttcaatgcagaaaaagcatttgacagaatttatcacctattcg

SEQ ID NO: 638179 - DNA, 120 bp, Artificial Sequence
  ENSG00000181090_110 (sequence is synthesized)
atcacctattcgtgagaaaaactcctagaaattaagactagaggggaactttgtgacctgatgaacggtatcttttgaacaaaaaaaaaaagaacaggcctggcgcagtggctcatgcct

SEQ ID NO: 638180 - DNA, 120 bp, Artificial Sequence
  ENSG00000181090_111 (sequence is synthesized)
gtcccccatgaacatcgacagaaatatcactcatctgcagtactgcgtgtgcatcgacgactgctcctccagcaactgcatgtgcggccagctcagcatgcgctgctggtacgacaaggt

SEQ ID NO: 638181 - DNA, 120 bp, Artificial Sequence
  ENSG00000181090_112 (sequence is synthesized)
gaccccagcgctgtcgtggcagcgtcgggaaggagttggaggtgagctgggtgtgacaggcaggggaggcacagcgggcaccagcacccgagtcagggtcgtgagccgaggacatggctg

SEQ ID NO: 638182 - DNA, 120 bp, Artificial Sequence
  ENSG00000181090_113 (sequence is synthesized)
cggattccctggggctggggtctgcatcctttgtggctgcctggatggtggcgggggtgggcagcgtcagcctggcttggccccaggaggaggtgctgcttatgttgtgtgtatctggta

SEQ ID NO: 638183 - DNA, 120 bp, Artificial Sequence
  ENSG00000181090_114 (sequence is synthesized)
gggctactgtgatttctctgcagttggccgcagtcaacaattgcactaagacaggaggaaaaaagtgatggggtacaagcaagaaacgtggtatttggcagttccggcgaggggggagcc

SEQ ID NO: 638184 - DNA, 120 bp, Artificial Sequence
  ENSG00000181090_115 (sequence is synthesized)
gttcacgttggtctgttttgcaaagtgagaggacttctcaagggtagtcattccatgtgcaaagccaaggggactgggaggaggagtcgcttcagagccctgctactgatgatttgtggc

SEQ ID NO: 638185 - DNA, 120 bp, Artificial Sequence
  ENSG00000181090_116 (sequence is synthesized)
aagaaaacacagcatcatcaccccattgtcctggtggctctggcactctgaaacagtcactacaggaacttccttagacgtgcccagcacagcccagccctccccgaaggacaggcagcc

SEQ ID NO: 638186 - DNA, 120 bp, Artificial Sequence
  ENSG00000181090_117 (sequence is synthesized)
cctttgtctgcgagtgagtgagtccctgggtcaccccaagcctggtgtcatttctgggacggaggcccatctgtgtctgtacttcaggaagcccctctgggagcaggcacatccctggcg

SEQ ID NO: 638187 - DNA, 120 bp, Artificial Sequence
  ENSG00000181090_118 (sequence is synthesized)
tacagcagcgtggggtgggggccacagagaccctggccccgagaaccaagctcgtgctgtcctcagtcctcttgctgctgcccgtaaccagcccaggagtgcatttaagaaggcgtggtc

SEQ ID NO: 638188 - DNA, 120 bp, Artificial Sequence
  ENSG00000181090_119 (sequence is synthesized)
cagttaggaaggcgtggtccagttaggaaggcgtggtccagcatgggcagtcatctctaggggaggaccattctgggttctcaggtaccagaccgcagacgcagagctttcggtatcgtt

SEQ ID NO: 638189 - DNA, 120 bp, Artificial Sequence
  ENSG00000181090_120 (sequence is synthesized)
atcatcatcctccggaccctcagctgaaaccccagttcaaccctgggcacacctctctaaacatgttccctgcatgttcttctggtgtgccctgctctttccctgtggctgcggagtctg

SEQ ID NO: 638190 - DNA, 120 bp, Artificial Sequence
  ENSG00000181090_121 (sequence is synthesized)
ctctttctgtcaagttacaaggggtattcagtgtcacagttttgctgagtatgccggaggctcataagtgctgtctgcatttacagtgtagcactttgatgtcaccaggccacctctgac

SEQ ID NO: 638191 - DNA, 120 bp, Artificial Sequence
  ENSG00000181090_122 (sequence is synthesized)
tgtatccttccacctgcagagacctgaggggtgtggtttcctcaccttccccagcagggctgccttcttggagtccagcagctcttcattgctgagtcatgcctggggctgagcagccag

SEQ ID NO: 638192 - DNA, 120 bp, Artificial Sequence
  ENSG00000181090_123 (sequence is synthesized)
ccaccagtgtttgttcctctgtaagccgcttgctaaatagcccctgctcatttttcttctggattttgcatcttttgaatgtagtctgacgatcttttttgtcaacgaagagttgatctg

SEQ ID NO: 638193 - DNA, 120 bp, Artificial Sequence
  ENSG00000181090_124 (sequence is synthesized)
gtcaacgaagagttgatctgttggctccagtatgaatggaggttttttccccaggtggattttgggttttttgttttgttttttattttttggggacagggtctcactctgttgcccagg

SEQ ID NO: 638194 - DNA, 120 bp, Artificial Sequence
  ENSG00000181090_125 (sequence is synthesized)
ctcctgcctcagcttcctgagtagctggggctacaggcacgtgccaccatgtccagctgatgtttttttattttttgtagagacaggatcccactgtgttgcccaggctggttgaactcc

SEQ ID NO: 638195 - DNA, 120 bp, Artificial Sequence
  ENSG00000181090_126 (sequence is synthesized)
ctgatgtttttttattttttgtagagacaggatcccactgtgttgcccaggctggttgaactcctgggcttaagtgaaccttccacctcagcttccaaaagtgctgggattacaggcgtg

SEQ ID NO: 638196 - DNA, 120 bp, Artificial Sequence
  ENSG00000181090_127 (sequence is synthesized)
tgattttgaatgaattgatgtatgctatcttctaatacttcttttatttcattcttgtatataaatatttgattcatatagaattaaaatatcaggtagggctgctcagaatgggggaag

SEQ ID NO: 638197 - DNA, 120 bp, Artificial Sequence
  ENSG00000181090_128 (sequence is synthesized)
tttatgacatattaattatatctcaataaagcttttaaaagaaaatgtgaggtaagggtcccagggcttcccttaaaatgcttaggtttcagctccacttactgactgacatttcttccc

SEQ ID NO: 638198 - DNA, 120 bp, Artificial Sequence
  ENSG00000181090_129 (sequence is synthesized)
ttctcatttacaacaccacgtttatcatgtaccatatgggatattaatttcagtctatttctcgattctctctttcgattgaggttctcatcttctagaggaactggacactgaataact

SEQ ID NO: 638199 - DNA, 120 bp, Artificial Sequence
  ENSG00000181090_130 (sequence is synthesized)
ctaggtatttgtcataaagtaaaacattaaatgactgtcaaggcacgaaaagaatcaagaaacaaaagcaaagccaagaagaaaatgtggtcagtgtaaaacagaacaagatggcaggaa

SEQ ID NO: 638200 - DNA, 120 bp, Artificial Sequence
  ENSG00000181090_131 (sequence is synthesized)
cagccttaactagatgggcactgacaatcaacagtgatagtttcgttacgtaagtggctccagagaatagagaaggataggaaaagtacgctagcccattctgagactaaaatataggct

SEQ ID NO: 638201 - DNA, 120 bp, Artificial Sequence
  ENSG00000181090_132 (sequence is synthesized)
aaaatataggctgaagtcacctaaatcctaaatacaaaagtcctaaatacattttttttttttgggactgagtctggcgctgtcacccagggtggagtgcaatggtgcgatctcggctca

SEQ ID NO: 638202 - DNA, 120 bp, Artificial Sequence
  ENSG00000181090_133 (sequence is synthesized)
atgacatattaaaataatgattgtaaggaagtagggcttaccccaggatgagagtgattcattactagaaatagattatttaaagaccaggatttactaggttaacagaataaatgagaa

SEQ ID NO: 638203 - DNA, 120 bp, Artificial Sequence
  ENSG00000181090_134 (sequence is synthesized)
aaactacacaacgtatatgtgtttttaaaaaaggcattttataaagttcagtccgctttctgttttctgaatttggggggattacattgtgattgcatgtatgacaacggtacagttgag

SEQ ID NO: 638204 - DNA, 120 bp, Artificial Sequence
  ENSG00000181090_135 (sequence is synthesized)
taatgatggaagaatgacgtacctgtgtggccaccacccagatcaaagccttgaattctggtggcactgcagaagcccactgacctcccatccccaaaagtaacccctctcctgagtgct

SEQ ID NO: 638205 - DNA, 120 bp, Artificial Sequence
  ENSG00000181090_136 (sequence is synthesized)
aaccgtgtaggatggtcgtgtttgaagtgctaactctgtaggatggtcgtgtttgaagtgctaaccctgtaggatggtcatgtttgatttcgttctttctataaatggaattacacagaa

SEQ ID NO: 638206 - DNA, 120 bp, Artificial Sequence
  ENSG00000181090_137 (sequence is synthesized)
catttaaagcagccacgaggagtgagtgagaaagcccagcccagcaggggccccgacagcccctcgagtgagttgtgctgcgtgaccagggcgggagcctgagtggattctgcgcagaac

SEQ ID NO: 638207 - DNA, 120 bp, Artificial Sequence
  ENSG00000181090_138 (sequence is synthesized)
caatcgagcagatcccaacagtgaaatcacggcagatgatgaaacacaggtctagagcttgttaaaaaggaggactgtgtagacaaagtctttgaatgaaaatggcctgttgtatttctt

SEQ ID NO: 638208 - DNA, 120 bp, Artificial Sequence
  ENSG00000181090_139 (sequence is synthesized)
ttttatgatcatggttttgtcaaggtttttcctaccttgctataaacaaagtgagtagattgaggcaggatagtcacaccaaggtgagtccagaactgcccagaactgtggtttcctgca

SEQ ID NO: 638209 - DNA, 120 bp, Artificial Sequence
  ENSG00000181090_140 (sequence is synthesized)
gggcaggccccgcaagggccgggcctcggccacctccctcctttcaccggggatcacagactcagagggttcagcacgtcccgtctctgctgcctctgggacaggaggggggatcaggca

SEQ ID NO: 638210 - DNA, 120 bp, Artificial Sequence
  ENSG00000181090_141 (sequence is synthesized)
gagcacagacggaattaatgttttctgagaatttctccagttctttttaacacgatttctttcagccctcagagcctcgtgaccatggctggccatggtgagggtctgagcaggaggctt

SEQ ID NO: 638211 - DNA, 120 bp, Artificial Sequence
  ENSG00000181090_142 (sequence is synthesized)
gttggcaccaggccgagaggcaccacatgcagtcacactgctcaggtgtctggctgccccgggcttgcatttgctgtggccgaagtcagcacgtggccattagtgtcgtctgcttcctga

SEQ ID NO: 638212 - DNA, 120 bp, Artificial Sequence
  ENSG00000181090_143 (sequence is synthesized)
ggggtgtgtcaggctgttgcttccacgagtttcctggtcttattggccagcggatccatcttcagctcgattattgcgtcttagctgcacattgtggaagtaagtgagctgtgaacagga

SEQ ID NO: 638213 - DNA, 120 bp, Artificial Sequence
  ENSG00000181090_144 (sequence is synthesized)
caaccatccgtgtagcaatgctgggcattattccaagccttttgcgtagggcgctcctccaggtccacggcagcctgtgcagcatcggccgtcgcccaggtgatacaggtgaggcccgtg

SEQ ID NO: 638214 - DNA, 120 bp, Artificial Sequence
  ENSG00000181090_145 (sequence is synthesized)
agaggggccaggtggcgcctccagactcactggcctgctgtgaggaaggcaggaatgggagccttgttccaaaggtcaggcccgaccgctgtgtcggggagcatgggcaacacccgggag

SEQ ID NO: 638215 - DNA, 120 bp, Artificial Sequence
  ENSG00000181090_146 (sequence is synthesized)
gagcgggcagagccctggaacaggccagtcagtttcgcccatggccctcaccctggtgcctgttggcgtggccggggtttctgattcagcaggtctggcctggctgggattttgcttttc

SEQ ID NO: 638216 - DNA, 120 bp, Artificial Sequence
  ENSG00000181090_147 (sequence is synthesized)
taaagtgttccccgtttctcctgatgcttctggtccagggaccacactttgagaaccactggttcgcctcctcttctccttctccgtaggtgttaaacaggatccagtggagtcagatcc

SEQ ID NO: 638217 - DNA, 120 bp, Artificial Sequence
  ENSG00000181090_148 (sequence is synthesized)
gaattacctttgttaccgagttcatgcgaacattcttcaacaggttagggctgtcgtagttctattttaatactccagtcattttctaaatattctctgttctctgggcttccctaacag

SEQ ID NO: 638218 - DNA, 120 bp, Artificial Sequence
  ENSG00000181090_149 (sequence is synthesized)
tgaggtgatgtcccaacgcttctcaggctgcgtggactccttgttcctgggttgctcaggacgctcatggagtaaggcttgcccagcgcccttccccagctgggcttggtcccctgaccg

SEQ ID NO: 638219 - DNA, 120 bp, Artificial Sequence
  ENSG00000181090_150 (sequence is synthesized)
cccagcagctgcgtctcctttccctggattctggtcttgagcatttcctccgcaaatgtgcccgagattggagaagtcaaagctcctctgagtcataagggaaagttatgcacacttaaa

SEQ ID NO: 638220 - DNA, 120 bp, Artificial Sequence
  ENSG00000181090_151 (sequence is synthesized)
tttagctgaacactcatttttatagtattgacttttttgtgacctcgataaacttggttcatggtgaaaggcagtctctgtccttggtatggtagaaaggcctggtggtgaggacccacg

SEQ ID NO: 638221 - DNA, 120 bp, Artificial Sequence
  ENSG00000181090_152 (sequence is synthesized)
ccagacagacgcgaggcagacacgggacacatgccagatgggcagacgcgaggcacgtggttctgagggctcctcagaggcccacatgccaggaccgcccagccgccctcctccagatct

SEQ ID NO: 638222 - DNA, 120 bp, Artificial Sequence
  ENSG00000181090_153 (sequence is synthesized)
acccggccaccctcccccaggcctgcccaaccaccttcccccagccctgagaaaccctcgaccgccacctcccctgccaccctcccccagccctgaggggcctgtgggctccttgtcggg

SEQ ID NO: 638223 - DNA, 120 bp, Artificial Sequence
  ENSG00000181090_154 (sequence is synthesized)
agcaggctgggctgcaggtgtcaccacagcctggtccagctataggcttctctagtattagcacctctgcccctcacagtgcctagtggcccaggcccagctctgtccccatgttacaga

SEQ ID NO: 638224 - DNA, 120 bp, Artificial Sequence
  ENSG00000181090_155 (sequence is synthesized)
tggggacaccgagccacggccaggaccagtgacttgccgaggttgtgggctggggtgctcctggctgatccccgggttcttggctccctgagagtgcgagatgccgtgtctgtgaggtgc

SEQ ID NO: 638225 - DNA, 120 bp, Artificial Sequence
  ENSG00000181090_156 (sequence is synthesized)
ctgcagcatcgaacgcttcggatacagaaccagttttcttcctcatttcagtgacgtggcaccagctggcttttgctgaccattgtggcaacaggctgaggctgtggcctgggttcacca

SEQ ID NO: 638226 - DNA, 120 bp, Artificial Sequence
  ENSG00000181090_157 (sequence is synthesized)
tgcctgcacagccttctccctaagaggccacacactcacgtggtgcctttgagaagcacttaccagaatcagggttaacagaactggaagacgtagttgtgactgggaggggaaatggaa

SEQ ID NO: 638227 - DNA, 120 bp, Artificial Sequence
  ENSG00000181090_158 (sequence is synthesized)
ctgagggggcgcaggaaggaatgttctgaggagcgccctaattgttcagagcagcccctgaagccgtcaagccagagtgtgcctgggcagccctgggccccgcgcctcagctcacacagc

SEQ ID NO: 638228 - DNA, 120 bp, Artificial Sequence
  ENSG00000181090_159 (sequence is synthesized)
cctgggggagcatctgcacccagtgctgctgtacctggcctggcttcaggggggtagaaaggggagcagagggctgggtccctccacagttgaggatttgcaaggcaaggaggccaggag

SEQ ID NO: 638229 - DNA, 120 bp, Artificial Sequence
  ENSG00000181090_160 (sequence is synthesized)
tgcaggagggtgcaggaggccccaaccagctgaagaaagcagagcaacccaggagctggcagcctcggtgaggctggagaagcccaggctgggggctgggaaggccctgggtggacagaa

SEQ ID NO: 638230 - DNA, 120 bp, Artificial Sequence
  ENSG00000181092_0 (sequence is synthesized)
attctgactgcagtctgtggttctgattccataccagaggggctcaggatgctgttgctgggagctgttctactgctattagctctgcccggtcatgaccaggaaaccacgactcaaggg

SEQ ID NO: 638231 - DNA, 120 bp, Artificial Sequence
  ENSG00000181092_1 (sequence is synthesized)
cccggagtcctgcttcccctgcccaagggggcctgcacaggttggatggcgggcatcccagggcatccgggccataatggggccccaggccgtgatggcagagatggcacccctggtgag

SEQ ID NO: 638232 - DNA, 120 bp, Artificial Sequence
  ENSG00000181092_2 (sequence is synthesized)
aagggtgagaaaggagatccaggtcttattggtcctaagggagacatcggtgaaaccggagtacccggggctgaaggtccccgaggctttccgggaatccaaggcaggaaaggagaacct

SEQ ID NO: 638233 - DNA, 120 bp, Artificial Sequence
  ENSG00000181092_3 (sequence is synthesized)
ggagaaggtgcctatgtataccgctcagcattcagtgtgggattggagacttacgttactatccccaacatgcccattcgctttaccaagatcttctacaatcagcaaaaccactatgat

SEQ ID NO: 638234 - DNA, 120 bp, Artificial Sequence
  ENSG00000181092_4 (sequence is synthesized)
ggctccactggtaaattccactgcaacattcctgggctgtactactttgcctaccacatcacagtctatatgaaggatgtgaaggtcagcctcttcaagaaggacaaggctatgctcttc

SEQ ID NO: 638235 - DNA, 120 bp, Artificial Sequence
  ENSG00000181092_5 (sequence is synthesized)
acctatgatcagtaccaggaaaataatgtggaccaggcctccggctctgtgctcctgcatctggaggtgggcgaccaagtctggctccaggtgtatggggaaggagagcgtaatggactc

SEQ ID NO: 638236 - DNA, 120 bp, Artificial Sequence
  ENSG00000181092_6 (sequence is synthesized)
tatgctgataatgacaatgactccaccttcacaggctttcttctctaccatgacaccaactgatcaccactaactcagagcctcctccaggccaaacagccccaaagtcaattaaaggct

SEQ ID NO: 638237 - DNA, 120 bp, Artificial Sequence
  ENSG00000181092_7 (sequence is synthesized)
ttcagtacggttaggaagttgattattatttagttggaggcctttagatattattcattcatttactcattcatttattcattcattcatcgagtaactttaaaaaaatcatatgctatg

SEQ ID NO: 638238 - DNA, 120 bp, Artificial Sequence
  ENSG00000181092_8 (sequence is synthesized)
ttcccagtcctggggagcttcacaaacatgaccagataactgactagaaagaagtagttgacagtgctattttgtgcccactgtctctcctgatgctcatatcaatcctataaggcacag

SEQ ID NO: 638239 - DNA, 120 bp, Artificial Sequence
  ENSG00000181092_9 (sequence is synthesized)
ggaacaagcattctcctgtttttacagattgtatcctgaggctgagagagttaagtgaatgtctaaggtcacacagtattaagtgacagtgctagaaatcaaacccagagctgtggactt

SEQ ID NO: 638240 - DNA, 120 bp, Artificial Sequence
  ENSG00000181092_10 (sequence is synthesized)
tgttcactagactgtgcccttttatagaggtacatgttctctttggagtgttggtaggtgtctgtttcccacctcacctgagagccattgaatttgccttcctcatgaattaaaacctcc

SEQ ID NO: 638241 - DNA, 120 bp, Artificial Sequence
  ENSG00000181092_11 (sequence is synthesized)
cccaagcagagcttcctcagagaaagtggttctatgatgacgtcctgtcttggaaggactactactcaatggcccctgcactactctacttcctcttacctatgtcccttctcatgcctt

SEQ ID NO: 638242 - DNA, 120 bp, Artificial Sequence
  ENSG00000181092_12 (sequence is synthesized)
tccctccaacggggaaagccaactccatctctaagtgccgaactcatccctgttcctcaaggccacctggccaggagcttctctgatgtgatatccactttttttttttttgagatggag

SEQ ID NO: 638243 - DNA, 120 bp, Artificial Sequence
  ENSG00000181092_13 (sequence is synthesized)
actctgtcacccaggctggagtacagtgacacgacctcggctcactgcagcctccttctcctgggtccaagcaattattgtgcctcagcctcccgagtagctgagacttcaggtgcattc

SEQ ID NO: 638244 - DNA, 120 bp, Artificial Sequence
  ENSG00000181092_14 (sequence is synthesized)
ttacaggcatgagccaccatgcccagtcgatatctcactttttattttgccatggatgagagtcctgggtgtgaggaacacctcccaccaggctagaggcaactgcccaggaaggactgt

SEQ ID NO: 638245 - DNA, 120 bp, Artificial Sequence
  ENSG00000181092_15 (sequence is synthesized)
ctgtgcttccgtcacctctaaatcccttgcagatccttgataaatgcctcatgaagaccaatctcttgaatcccatatctacccagaattaactccattccagtctctgcatgtaatcag

SEQ ID NO: 638246 - DNA, 120 bp, Artificial Sequence
  ENSG00000181092_16 (sequence is synthesized)
ttttatccacagaaacattttcattttaggaaatccctggttttaagtatcaatccttgttcagctggacaatatgaatcttttccactgaagttagggatgactgtgattttcagaaca

SEQ ID NO: 638247 - DNA, 120 bp, Artificial Sequence
  ENSG00000181092_17 (sequence is synthesized)
agactgggcctcctgaatttattattgttctttaagaattacaggttgaggtagttgatggtggtaaacattctctcaggagacaataactccagtgatgttcttcaaagattttagcaa

SEQ ID NO: 638248 - DNA, 120 bp, Artificial Sequence
  ENSG00000181092_18 (sequence is synthesized)
aaacagagtaaatagcattctctatcaatatataaatttaaaaaactatctttttgcttacagttttaaattctgaacaattctctcttatatgtgtattgctaatcattaaggtattat

SEQ ID NO: 638249 - DNA, 120 bp, Artificial Sequence
  ENSG00000181092_19 (sequence is synthesized)
tattgctaatcattaaggtattattttttccacatataaagctttgtctttttgttgttgttgttgtttttaagatggagtttccctctgttgccaggctagagtgcagtggcatgatct

SEQ ID NO: 638250 - DNA, 120 bp, Artificial Sequence
  ENSG00000181092_20 (sequence is synthesized)
tcctgaccttgtgatctgcccgcctccatttttgttgttattttttgagaaagatagatatgaggtttagagagggatgaagaggtgagagtaagccttgtgttagtcagaactctgtgt

SEQ ID NO: 638251 - DNA, 120 bp, Artificial Sequence
  ENSG00000181092_21 (sequence is synthesized)
agaactctgtgttgtgaatgtcattcacaacagaaaacccaaaatattatgcaaactactgtaagcaagaaaaataaaggaaaaatggaaacatttattcctttgcataatagaaattac

SEQ ID NO: 638252 - DNA, 120 bp, Artificial Sequence
  ENSG00000181092_22 (sequence is synthesized)
cagagttgttctgtctttagataaggtttgaaccaaagctcaaaacaatcaagacccttttctgtatgtccttctgttctgccttccgcagtgtaggctttaccctcaggtgctacacag

SEQ ID NO: 638253 - DNA, 120 bp, Artificial Sequence
  ENSG00000181092_23 (sequence is synthesized)
tatagttctagggtttccctcccgatatcaaaaagactgtggcctgcccagctctcgtatccccaagccacaccatctggctaaatggacatcatgttttctggtgatgcccaaagagga

SEQ ID NO: 638254 - DNA, 120 bp, Artificial Sequence
  ENSG00000181092_24 (sequence is synthesized)
gagaggaagctctctttcccagatgccccagcaagtgtaaccttgcatctcattgctctggctgagttgtgtgcctgtttctgaccaatcactgagtcaggaggatgaaatattcatatt

SEQ ID NO: 638255 - DNA, 120 bp, Artificial Sequence
  ENSG00000181092_25 (sequence is synthesized)
gacttaattgcagcttaagttaggggtatgtagaggtattttccctaaagcaaaattgggacactgttatcagaaataggagagtggatgatagatgcaaaataatacctgtccacaaca

SEQ ID NO: 638256 - DNA, 120 bp, Artificial Sequence
  ENSG00000181092_26 (sequence is synthesized)
aactcttaatgctgtgtttgagctttcatgagtttcccagagagacatagctggaaaattcctattgattttctctaaaatttcaacaagtagctaaagtctggctatgctcacagtctc

SEQ ID NO: 638257 - DNA, 120 bp, Artificial Sequence
  ENSG00000181092_27 (sequence is synthesized)
acatctggttggggtgggctccttacagaacacgctttcacagttaccctaaactctctggggcagggttattcctttgtggaaccagaggcacagagagagtcaactgaggccaaaaga

SEQ ID NO: 638258 - DNA, 120 bp, Artificial Sequence
  ENSG00000181092_28 (sequence is synthesized)
ggcctgagagaaactgaggtcaagatttcaggattaatggtcctgtgatgctttgaagtacaattgtggatttgtccaattctctttagttctgtcagcttttgcttcatatattttagc

SEQ ID NO: 638259 - DNA, 120 bp, Artificial Sequence
  ENSG00000181092_29 (sequence is synthesized)
gctctattattagatatatacatgtttagtattatgtcttattggtgcatttactctcttatcattatgtaatgtccttctttatctgtgataattttctgtgttctgaagtctactttg

SEQ ID NO: 638260 - DNA, 120 bp, Artificial Sequence
  ENSG00000181092_30 (sequence is synthesized)
tctaaaaataacatacgcactcaacttccttttctttcttccttcctttctttcttccttcctttctttctctctctctctctttccttccttccttcctccttttctttctctctctct

SEQ ID NO: 638261 - DNA, 85 bp, Artificial Sequence
  ENSG00000181092_31 (sequence is synthesized)
tctttccttccttccttcctccttttctttctctctctctctctctctctttttttgacagactctcgttctgtggcccttacct

SEQ ID NO: 638262 - DNA, 67 bp, Artificial Sequence
  ENSG00000181092_32 (sequence is synthesized)
tagctggaactacaggctcacattcgtcaggttggtttcaaactcctgactttgtgatccacccgcc

SEQ ID NO: 638263 - DNA, 120 bp, Artificial Sequence
  ENSG00000181092_33 (sequence is synthesized)
gattacaggcatgagccatcacacctggtcaactttcttttgattagtgtttttgtggtatatctttttccatcatgttactttaaatatatctatattattgtatttaaaatgtgtttc

SEQ ID NO: 638264 - DNA, 120 bp, Artificial Sequence
  ENSG00000181092_34 (sequence is synthesized)
atttaaaatgtgtttcttacagactgcatgtagttgggtataatttttatccagtctaaaaatatctgtcttttaattggtgtttagacaatttatatttaataaaattgttgaatttaa

SEQ ID NO: 638265 - DNA, 85 bp, Artificial Sequence
  ENSG00000181092_35 (sequence is synthesized)
cagaggaaactcctgacatcagggctcaggatgctgttgctgggagctgttctactgctattagctctgcccggtcatgaccagg

SEQ ID NO: 638266 - DNA, 120 bp, Artificial Sequence
  ENSG00000181104_0 (sequence is synthesized)
aaccgccccagacacagcgctcgccgagggtcgcttggaccctgatcttacccgtgggcaccctgcgctctgcctgccgcgaagaccggctccccgacccgcagaagtcaggagagaggg

SEQ ID NO: 638267 - DNA, 120 bp, Artificial Sequence
  ENSG00000181104_1 (sequence is synthesized)
tgaagcggagcagcccgaggcggggcagcctcccggagcagcgccgcgcagagcccgggacaatggggccgcggcggctgctgctggtggccgcctgcttcagtctgtgcggcccgctgt

SEQ ID NO: 638268 - DNA, 120 bp, Artificial Sequence
  ENSG00000181104_2 (sequence is synthesized)
tgtctgcccgcacccgggcccgcaggccagaatcaaaagcaacaaatgccaccttagatccccggtcatttcttctcaggaaccccaatgataaatatgaaccattttgggaggatgagg

SEQ ID NO: 638269 - DNA, 120 bp, Artificial Sequence
  ENSG00000181104_3 (sequence is synthesized)
agaaaaatgaaagtgggttaactgaatacagattagtctccatcaataaaagcagtcctcttcaaaaacaacttcctgcattcatctcagaagatgcctccggatatttgaccagctcct

SEQ ID NO: 638270 - DNA, 120 bp, Artificial Sequence
  ENSG00000181104_4 (sequence is synthesized)
ggctgacactctttgtcccatctgtgtacaccggagtgtttgtagtcagcctcccactaaacatcatggccatcgttgtgttcatcctgaaaatgaaggtcaagaagccggcggtggtgt

SEQ ID NO: 638271 - DNA, 120 bp, Artificial Sequence
  ENSG00000181104_5 (sequence is synthesized)
acatgctgcacctggccacggcagatgtgctgtttgtgtctgtgctcccctttaagatcagctattacttttccggcagtgattggcagtttgggtctgaattgtgtcgcttcgtcactg

SEQ ID NO: 638272 - DNA, 120 bp, Artificial Sequence
  ENSG00000181104_6 (sequence is synthesized)
cagcattttactgtaacatgtacgcctctatcttgctcatgacagtcataagcattgaccggtttctggctgtggtgtatcccatgcagtccctctcctggcgtactctgggaagggctt

SEQ ID NO: 638273 - DNA, 120 bp, Artificial Sequence
  ENSG00000181104_7 (sequence is synthesized)
ccttcacttgtctggccatctgggctttggccatcgcaggggtagtgcctctgctcctcaaggagcaaaccatccaggtgcccgggctcaacatcactacctgtcatgatgtgctcaatg

SEQ ID NO: 638274 - DNA, 120 bp, Artificial Sequence
  ENSG00000181104_8 (sequence is synthesized)
aaaccctgctcgaaggctactatgcctactacttctcagccttctctgctgtcttcttttttgtgccgctgatcatttccacggtctgttatgtgtctatcattcgatgtcttagctctt

SEQ ID NO: 638275 - DNA, 120 bp, Artificial Sequence
  ENSG00000181104_9 (sequence is synthesized)
ccgcagttgccaaccgcagcaagaagtcccgggctttgttcctgtcagctgctgttttctgcatcttcatcatttgcttcggacccacaaacgtcctcctgattgcgcattactcattcc

SEQ ID NO: 638276 - DNA, 120 bp, Artificial Sequence
  ENSG00000181104_10 (sequence is synthesized)
tttctcacacttccaccacagaggctgcctactttgcctacctcctctgtgtctgtgtcagcagcataagctgctgcatcgaccccctaatttactattacgcttcctctgagtgccaga

SEQ ID NO: 638277 - DNA, 120 bp, Artificial Sequence
  ENSG00000181104_11 (sequence is synthesized)
ggtacgtctacagtatcttatgctgcaaagaaagttccgatcccagcagttataacagcagtgggcagttgatggcaagtaaaatggatacctgctctagtaacctgaataacagcatat

SEQ ID NO: 638278 - DNA, 120 bp, Artificial Sequence
  ENSG00000181104_12 (sequence is synthesized)
acaaaaagctgttaacttaggaaaagggactgctgggaggttaaaaagaaaagtttataaaagtgaataacctgaggattctattagtccccacccaaactttattgattcacctcctaa

SEQ ID NO: 638279 - DNA, 120 bp, Artificial Sequence
  ENSG00000181104_13 (sequence is synthesized)
aacaacagatgtacgacttgcatacctgctttttatgggagctgtcaagcatgtatttttgtcaattaccagaaagataacaggacgagatgacggtgttattccaagggaatattgcca

SEQ ID NO: 638280 - DNA, 120 bp, Artificial Sequence
  ENSG00000181104_14 (sequence is synthesized)
atgctacagtaataaatgaatgtcacttctggatatagctaggtgacatatacatacttacatgtgtgtatatgtagatgtatgcacacacatatattatttgcagtgcagtatagaata

SEQ ID NO: 638281 - DNA, 120 bp, Artificial Sequence
  ENSG00000181104_15 (sequence is synthesized)
taaaacactctttccccgcaccccagcaattatgaaaataatctctgattccctgatttaatatgcaaagtctaggttggtagagtttagccctgaacatttcatggtgttcatcaacag

SEQ ID NO: 638282 - DNA, 120 bp, Artificial Sequence
  ENSG00000181104_16 (sequence is synthesized)
tgagagactccatagtttgggcttgtaccacttttgcaaataagtgtattttgaaattgtttgacggcaaggtttaagttattaagaggtaagacttagtactatctgtgcgtagaagtt

SEQ ID NO: 638283 - DNA, 120 bp, Artificial Sequence
  ENSG00000181104_17 (sequence is synthesized)
ctagtgttttcaattttaaacatatccaagtttgaattcctaaaattatggaaacagatgaaaagcctctgttttgatatgggtagtattttttacattttacacactgtacacataagc

SEQ ID NO: 638284 - DNA, 120 bp, Artificial Sequence
  ENSG00000181104_18 (sequence is synthesized)
caaaactgagcataagtcctctagtgaatgtaggctggctttcagagtaggctattcctgagagctgcatgtgtccgcccccgatggaggactccaggcagcagacacatgccagggcca

SEQ ID NO: 638285 - DNA, 120 bp, Artificial Sequence
  ENSG00000181104_19 (sequence is synthesized)
tgtcagacacagattggccagaaaccttcctgctgagcctcacagcagtgagactggggccactacatttgctccatcctcctgggattggctgtgaactgatcatgtttatgagaaact

SEQ ID NO: 638286 - DNA, 120 bp, Artificial Sequence
  ENSG00000181104_20 (sequence is synthesized)
ggcaaagcagaatgtgatatcctaggaggtaatgaccatgaaagacttctctacccatcttaaaaacaacgaaagaaggcatggacttctggatgcccatccactgggtgtaaacacatc

SEQ ID NO: 638287 - DNA, 120 bp, Artificial Sequence
  ENSG00000181104_21 (sequence is synthesized)
tagtagttgttctgaaatgtcagttctgatatggaagcacccattatgcgctgtggccactccaataggtgctgagtgtacagagtggaataagacagagacctgccctcaagagcaaag

SEQ ID NO: 638288 - DNA, 120 bp, Artificial Sequence
  ENSG00000181104_22 (sequence is synthesized)
tagatcatgcatagagtgtgatgtatgtgtaataaatatgtttcacacaaacaaggcctgtcagctaaagaagtttgaacatttgggttactatttcttgtggttataacttaatgaaaa

SEQ ID NO: 638289 - DNA, 120 bp, Artificial Sequence
  ENSG00000181104_23 (sequence is synthesized)
caatgcagtacaggacatatattttttaaaataagtctgatttaattgggcactatttatttacaaatgttttgctcaatagattgctcaaatcaggttttcttttaagaatcaatcatg

SEQ ID NO: 638290 - DNA, 120 bp, Artificial Sequence
  ENSG00000181104_24 (sequence is synthesized)
tcagtctgcttagaaataacagaagaaaatagaattgacattgaaatctaggaaaattattctataatttccatttacttaagacttaatgagactttaaaagcattttttaacctccta

SEQ ID NO: 638291 - DNA, 120 bp, Artificial Sequence
  ENSG00000181104_25 (sequence is synthesized)
agtatcaagtatagaaaatcttcatggaattcacaaagtaatttggaaattaggttgaaacatatctcttatcttacgaaaaaatggtagcattttaaacaaaatagaaagttgcaaggc

SEQ ID NO: 638292 - DNA, 120 bp, Artificial Sequence
  ENSG00000181104_26 (sequence is synthesized)
catagaataacttacataaaagtaatataactgtattgtaagtagaagctagcactggttttattaatttagtgactattcattttatctaaatcagtgaagatttactgtcattgttta

SEQ ID NO: 638293 - DNA, 120 bp, Artificial Sequence
  ENSG00000181104_27 (sequence is synthesized)
ttagtctgtatatattaaaatatgatatcattaatgtacttacaaaatagtatgtcactgtttttatgttcattcttaaaaacataacctgtattaataaatgtgaacatttgcttggta

SEQ ID NO: 638294 - DNA, 120 bp, Artificial Sequence
  ENSG00000181104_28 (sequence is synthesized)
tttaggtggggcgtgccacccccttcgcgggcccagccgatgcccctttggactcgatcttggagggtgcagcccgcctgccacggggtgttggatatggaggaggatggagcggaagcc

SEQ ID NO: 638295 - DNA, 120 bp, Artificial Sequence
  ENSG00000181104_29 (sequence is synthesized)
ccctgggggagcctgcagtcctgcgttgcacttgtcattgtgtttctcccaggaccacccccaaaaagaaaagctctcacgttgctccaccaataaacgtttcgatctttaaaatataaa

SEQ ID NO: 638296 - DNA, 120 bp, Artificial Sequence
  ENSG00000181135_0 (sequence is synthesized)
gtaaaagtctgggctaccggcgcggcgtagtggatgcagcatcctagtggaggacgcccctgtgttgctgaacctgtttgcatgagttgctcctgacggccctttaggatacttccatgt

SEQ ID NO: 638297 - DNA, 120 bp, Artificial Sequence
  ENSG00000181135_1 (sequence is synthesized)
ctgtagggtctagagtgacatctcctcccctcccctgacgagatctgccctccttggcactgtgcttccccagaggggtggcctcgctgttcccatggacatggcccaggagccagtgac

SEQ ID NO: 638298 - DNA, 120 bp, Artificial Sequence
  ENSG00000181135_2 (sequence is synthesized)
cttcagggacgtggccatctacttctcaagggaggagtgggcgtgtctggaacccagccagagggccctctaccgggacgtgatgctggacaacttcagcagtgtggctgctctgggatt

SEQ ID NO: 638299 - DNA, 120 bp, Artificial Sequence
  ENSG00000181135_3 (sequence is synthesized)
ttgcagccccagaccagacctcgtctctcgcctggaacagtgggaggagccgtgggttgaagaccgggagagacctgagttccaggcagtgcagaggggaccccggccaggggcaaggaa

SEQ ID NO: 638300 - DNA, 120 bp, Artificial Sequence
  ENSG00000181135_4 (sequence is synthesized)
gtctgcagaccccaagagaccttgtgatcatccagcttgggctcacaagaaaacccacgtgcggcgagaaagagccagggaaggaagcagctttaggaagggcttcaggctggacacgga

SEQ ID NO: 638301 - DNA, 120 bp, Artificial Sequence
  ENSG00000181135_5 (sequence is synthesized)
tgacgggcagcttcccagagctgctccagaaaggacagacgccaagcccacggctttcccgtgtcaggtgctcacgcagcgttgtgggcggcggccgggccgcagagagcgccggaagca

SEQ ID NO: 638302 - DNA, 120 bp, Artificial Sequence
  ENSG00000181135_6 (sequence is synthesized)
gcgcgcagtagagctgtcattcatctgcggcacgtgcgggaaggcgctcagctgccacagccggctgctcgctcaccagacggtgcacacgggaaccaaggccttcgagtgccccgagtg

SEQ ID NO: 638303 - DNA, 120 bp, Artificial Sequence
  ENSG00000181135_7 (sequence is synthesized)
cggccagaccttccggtgggcttcaaacctgcagcgccaccagaagaaccacacgcgcgagaagcccttctgctgcgaggcctgcgggcaggcgttcagcctgaaggaccgcctggctca

SEQ ID NO: 638304 - DNA, 120 bp, Artificial Sequence
  ENSG00000181135_8 (sequence is synthesized)
gcaccgcaaggtccacaccgagcacaggccctactcgtgtggcgactgtgggaaagccttcaagcagaagtccaaccttctcagacaccagctggtgcacaccggggagcggccgttcta

SEQ ID NO: 638305 - DNA, 120 bp, Artificial Sequence
  ENSG00000181135_9 (sequence is synthesized)
cggaccaaggagaacctcagccaccaccagagggtccacagcggggagaagccctacacctgtgccgagtgcggcaagtccttccggtggcccaagggcttcagcatccaccggaggctg

SEQ ID NO: 638306 - DNA, 120 bp, Artificial Sequence
  ENSG00000181135_10 (sequence is synthesized)
cacctgacgaagaggttctacgagtgcggccactgtgggaaaggcttccgtcacctggggttcttcacgcggcatcagaggactcacaggcacggggaggtgtaggggcgcccgaagagt

SEQ ID NO: 638307 - DNA, 120 bp, Artificial Sequence
  ENSG00000181135_11 (sequence is synthesized)
ggggtgctgcgcctctgcgggagtactgggtcctgagggagagctgcagtgagaagttgctcttcagcctggaaaatcaacctgaattcagagaagccttcttagtcctcagagctcccc

SEQ ID NO: 638308 - DNA, 120 bp, Artificial Sequence
  ENSG00000181135_12 (sequence is synthesized)
agtcccccgagaagtttactgggaaaactgccaggtgggagaagcagagccatgggtacgccggagatggcgggggctctggagatggcgggggctgcgccccggcgccgggcatcctgg

SEQ ID NO: 638309 - DNA, 120 bp, Artificial Sequence
  ENSG00000181135_13 (sequence is synthesized)
ggatgtgctgagagtgtgcgcgaccccggagccacgtgccaggccgggctcagaggcggagaagcctgcctggtgcccacagccgtctggctcagggactccaccctggccccgagtcgc

SEQ ID NO: 638310 - DNA, 120 bp, Artificial Sequence
  ENSG00000181135_14 (sequence is synthesized)
cgtctgctgggcctttccttcctggctctgcaccccatgctggctgcccggtctggcttcccttcttgtctctgtcttgggcgaggcagctgtgagcattgcacagaggcaaagaccctc

SEQ ID NO: 638311 - DNA, 120 bp, Artificial Sequence
  ENSG00000181135_15 (sequence is synthesized)
ctgcagcctctgcgctgggccgtagaaacaagagcctttgtaatactgaacctcattcaaggattaggagtggtggttaggtcagggccacccccagtgctgcaggaacggcctccaccc

SEQ ID NO: 638312 - DNA, 120 bp, Artificial Sequence
  ENSG00000181135_16 (sequence is synthesized)
agctctgttggtcagagcctgggtcatgcacctggagttgggagatcaagttgggtctcagggcagtgaggtggccatatccaccacatcgcatttcgtgggggaagaggtgacctcttt

SEQ ID NO: 638313 - DNA, 120 bp, Artificial Sequence
  ENSG00000181135_17 (sequence is synthesized)
gttttaaacttaaggtgtctgcttatccagccagaaataaaaatctgccagtggtgttcccaagggaagacccccgtgggaatgggtcgggacactgccgtgtttcaggttagccaatta

SEQ ID NO: 638314 - DNA, 66 bp, Artificial Sequence
  ENSG00000181135_18 (sequence is synthesized)
cagacagcgtctcagtctaacatattcaagcagtccccccacctcagcctcctgagtagctgggac

SEQ ID NO: 638315 - DNA, 120 bp, Artificial Sequence
  ENSG00000181135_19 (sequence is synthesized)
tgcatatgtgcactgccacgccccgctaattattgtattgtttatagagacaggctgggcaactgctgggctcgaacagtcctcctgcctcagcctcctagggtgttaggattacaggcg

SEQ ID NO: 638316 - DNA, 120 bp, Artificial Sequence
  ENSG00000181135_20 (sequence is synthesized)
tgagccactgtgcttggccccttgtaatatctctgtcaggttttcggtttgggttttgctggcctcattaagacagactggatagcgtctgctcttcctctgttcactaaatagcttcta

SEQ ID NO: 638317 - DNA, 120 bp, Artificial Sequence
  ENSG00000181135_21 (sequence is synthesized)
agatcagtactgtgcttccgtaggctttggtggagtttaccagggaatccagctgggtgtggtattttctgtgtgggaagggttccagttacattttcaattgccttatcagatggaagg

SEQ ID NO: 638318 - DNA, 120 bp, Artificial Sequence
  ENSG00000181135_22 (sequence is synthesized)
cttccctttcttttgtcagtttcatgatactgtgtttttcatcgagtttgtctgtttcatctcagttgctgaacctgtttgcatgagttgctcctgacggccctttaggatacttccatg

SEQ ID NO: 638319 - DNA, 120 bp, Artificial Sequence
  ENSG00000181135_23 (sequence is synthesized)
gtggatgcagcatcctagtggaggacgcccctgtggctggagtgcaatggcgcgatatcggctcgccgcaacttctgcctcctgggttcaagtgaatctcctgccccagcctcctgagca

SEQ ID NO: 638320 - DNA, 120 bp, Artificial Sequence
  ENSG00000181135_24 (sequence is synthesized)
ggataacaacttccgctcgggaagtttgtaaaagtctgggctaccggcgcggcgtagtggatgcagcatcctagtggaggacgcccctgtgatctgccctccttggcactgtgcttcccc

SEQ ID NO: 638321 - DNA, 120 bp, Artificial Sequence
  ENSG00000181135_25 (sequence is synthesized)
gagtgctgggagagctctgccgctgcctctgggcccagctcgtccaggacagtagtggggcctcccagctgagggggctcaggagctagaagttattggcttatgtagacagaggggccc

SEQ ID NO: 638322 - DNA, 120 bp, Artificial Sequence
  ENSG00000181135_26 (sequence is synthesized)
actcagcgtttctctcgggctccctggaggcagcctcatcttccttcctctgaccttgccagggccttccgtgggccttggtgtccaggcccctcccttcctgtcatctctgctttgggg

SEQ ID NO: 638323 - DNA, 120 bp, Artificial Sequence
  ENSG00000181135_27 (sequence is synthesized)
ccccagcacacacgcggggagggtctgtggcagtggcttcccaggcactgtgcccgtgtctgcctttctgccttctctcttaaggggtggggaaagaaaaagaaaattggggccaggcgc

SEQ ID NO: 638324 - DNA, 120 bp, Artificial Sequence
  ENSG00000181135_28 (sequence is synthesized)
gggaccccggccagccacccaggtgctgtccggcggaggccattggtgtgggtgtctgacctccctgtgatggccatgtggggtcccaggcctggtactgactgcacgtgagggtctcca

SEQ ID NO: 638325 - DNA, 120 bp, Artificial Sequence
  ENSG00000181135_29 (sequence is synthesized)
ccccacgaggaggtacctcagaacccaggccagatccacacaaggctctcggtcagtcccagatggaagctccagtcccaggccgtgacatgcatcagctcccacacccaggattgtccc

SEQ ID NO: 638326 - DNA, 120 bp, Artificial Sequence
  ENSG00000181135_30 (sequence is synthesized)
gctcggcgggccccgtccctgtggcccacagctcctgggtagtgctcagcacgctgcagtgaccaagggtgtgtccttcccatgggagagcagacacacagctgctctctaaattagaca

SEQ ID NO: 638327 - DNA, 120 bp, Artificial Sequence
  ENSG00000181135_31 (sequence is synthesized)
ggcattagagacgtaggggcagccacgctcctgccctgatggacactggccgggggtggggctcgaaaggcatagtgctgcaggatgacatacagctgcagctcggaggggcctgaggct

SEQ ID NO: 638328 - DNA, 120 bp, Artificial Sequence
  ENSG00000181135_32 (sequence is synthesized)
ggagtgacacttgaagcctgcacctagccacccaggtgctgtccggcggaggccattggtgtgggtgtctgacctccctgtgatggccatgtggggtcccaggcctggtactgactgcac

SEQ ID NO: 638329 - DNA, 120 bp, Artificial Sequence
  ENSG00000181135_33 (sequence is synthesized)
gtgagggtctccaggtatgtggctctgggtaggagtttgctccacgtccttgtttgcaaaactgggacagtggccatgcttccctccattaggtgagggttgctcttggggcagttgtca

SEQ ID NO: 638330 - DNA, 120 bp, Artificial Sequence
  ENSG00000181135_34 (sequence is synthesized)
gcagggttttgctttttacttacattttcagagtgggatggagcagctatgtgaacacgagccctgggaggtccccgggtatgtggagtccccgactgtggagtgtcaggttcctagggg

SEQ ID NO: 638331 - DNA, 120 bp, Artificial Sequence
  ENSG00000181135_35 (sequence is synthesized)
gtaaaagtctgggctaccggcgcggcgtagtggatgcagcatcctagtggaggacgcccctgtggccggactgcaggggtgcgatcttggctcacagcaacttccacctcccgggttcaa

SEQ ID NO: 638332 - DNA, 120 bp, Artificial Sequence
  ENSG00000181135_36 (sequence is synthesized)
ggatgcagcatcctagtggaggacgcccctgtgaggcccatctccagacacagccactcggggctctgggcttcagtgaatggatttaggggacacaaacaatcagtccaccgcagggcc

SEQ ID NO: 638333 - DNA, 120 bp, Artificial Sequence
  ENSG00000181135_37 (sequence is synthesized)
ctgggctaccggcgcggcgtagtggatgcagcatcctagtggaggacgcccctgtggtttgtcaggacccggttgcgtatcctcttgaagctggtttcttcctggccgaccccgtccgcg

SEQ ID NO: 638334 - DNA, 120 bp, Artificial Sequence
  ENSG00000181135_38 (sequence is synthesized)
atcgtgaccttagttatccctcatagacactttccacacctgtgtctccagccctatcgctccgatgagacccgagcgcttagacttgattcataacacccaaagctccccggccccagg

SEQ ID NO: 638335 - DNA, 120 bp, Artificial Sequence
  ENSG00000181135_39 (sequence is synthesized)
gtagtggatgcagcatcctagtggaggacgcccctgtgggctgtgagacccagcgtcgcggctgctgggacagaccggggaggctgcccgtgccctcggctattcgggggctgttcttca

SEQ ID NO: 638336 - DNA, 120 bp, Artificial Sequence
  ENSG00000181135_40 (sequence is synthesized)
aaagtctgggctaccggcgcggcgtagtggatgcagcatcctagtggaggacgcccctgtggtgagtgcgcccgtgtcccccgccgcccctccgtccctgggtcgtgggctgtcaaacct

SEQ ID NO: 638337 - DNA, 120 bp, Artificial Sequence
  ENSG00000181135_41 (sequence is synthesized)
gccgccgcaccacctggctggctccctgcgctcggcccgcgctttttcttgggcgccatgggttggtgcctggaccaccaggactggtcctgcacacccatgaagcgactgacccagctg

SEQ ID NO: 638338 - DNA, 120 bp, Artificial Sequence
  ENSG00000181135_42 (sequence is synthesized)
gtctgaagcaccccacgaggagccccactgcacccgcgcatctgccactggagggtctcggttgctcttggcctttaaatccctggtgagatggagaaaccgaggcaaggtacctcagaa

SEQ ID NO: 638339 - DNA, 120 bp, Artificial Sequence
  ENSG00000181135_43 (sequence is synthesized)
cccaggccagatccacacaaggctctcggtcagtcccagatggaagctccagtcccaggccgtgacatgcatcagctcccacacccaggattgtcccagagaaagcgctctgccctcccc

SEQ ID NO: 638340 - DNA, 120 bp, Artificial Sequence
  ENSG00000181135_44 (sequence is synthesized)
gtccacagcaccacgagggccataactgcactgccacacctctccagttccagagacatccctgagaggcagccatcaggggtgcccagctgaggacacgcctccttggggaccctcatt

SEQ ID NO: 638341 - DNA, 120 bp, Artificial Sequence
  ENSG00000181135_45 (sequence is synthesized)
cctgagtccatgcctccagattcacgatctcagagacaaccacatccgcaactggcacgtgtccccaccgaaggggctcaagtaagtgactggagtgaccagggtggatgggcctggagt

SEQ ID NO: 638342 - DNA, 120 bp, Artificial Sequence
  ENSG00000181135_46 (sequence is synthesized)
gggagacctggggtacctgagtctgtagcccacatccagagcaggagagaggggagacctggagtacctgtacctgtacctcagctacagtatctgagtctgtagcccacatctgaagca

SEQ ID NO: 638343 - DNA, 120 bp, Artificial Sequence
  ENSG00000181135_47 (sequence is synthesized)
ggagagaggagagggccattttggagtccaccaggtagccccagtaggacagggagaggctgtgtatgagatgggatgggtggtgggccatggctgtgacactggaggggacagggcggg

SEQ ID NO: 638344 - DNA, 120 bp, Artificial Sequence
  ENSG00000181135_48 (sequence is synthesized)
gataccttctcagactatgacactcagaggcaaggtaggatctcggcccacacaacagcacacggatggtgcccttatgggagagagcggggccatgcatggggcctgtgacagcttggg

SEQ ID NO: 638345 - DNA, 120 bp, Artificial Sequence
  ENSG00000181135_49 (sequence is synthesized)
aggtgggggccaggggagtttggtttcctgggttacggaatgctgggtgtgtgtgaagtaggaggcaccagccacactgtttcaccaggggctgtgatctgggccccacccttgtgactc

SEQ ID NO: 638346 - DNA, 120 bp, Artificial Sequence
  ENSG00000181135_50 (sequence is synthesized)
tggggcttctggatgatgacctctccccagacctcacccatgatttccccgtggattggttaaaaattcaatgcaaggtccaggtcaataatgcacccaaaataaagctgaaagttacaa

SEQ ID NO: 638347 - DNA, 120 bp, Artificial Sequence
  ENSG00000181143_0 (sequence is synthesized)
aagcgttgcacaattcccccaacctccatacatacggcagctcttctagacacaggttttcccaggtcaaatgcggggaccccagccatatctcccaccctgagaaattttggagtttca

SEQ ID NO: 638348 - DNA, 120 bp, Artificial Sequence
  ENSG00000181143_1 (sequence is synthesized)
gggagctcagaagctctgcagaggccaccctctctgaggggattcttcttagacctccatccagaggcaaatgttgacctgtccatgctgaaaccctcaggccttcctgggtcatcttct

SEQ ID NO: 638349 - DNA, 120 bp, Artificial Sequence
  ENSG00000181143_2 (sequence is synthesized)
cccacccgctccttgatgacagggagcaggagcactaaagccacaccagaaatggattcaggactgacaggagccaccttgtcacctaagacatctacaggtgcaatcgtggtgacagaa

SEQ ID NO: 638350 - DNA, 120 bp, Artificial Sequence
  ENSG00000181143_3 (sequence is synthesized)
catactctgccctttacttccccagataagaccttggccagtcctacatcttcggttgtgggaagaaccacccagtctttgggggtgatgtcctctgctctccctgagtcaacctctaga

SEQ ID NO: 638351 - DNA, 120 bp, Artificial Sequence
  ENSG00000181143_4 (sequence is synthesized)
ggaatgacacactccgagcaaagaaccagcccatcgctgagtccccaggtcaatggaactccctctaggaactaccctgctacaagcatggtttcaggattgagttccccaaggaccagg

SEQ ID NO: 638352 - DNA, 120 bp, Artificial Sequence
  ENSG00000181143_5 (sequence is synthesized)
accagttccacagaaggaaattttaccaaagaagcatctacatacacactcactgtagagaccacaagtggcccagtcactgagaagtacacagtccccactgagacctcaacaactgaa

SEQ ID NO: 638353 - DNA, 120 bp, Artificial Sequence
  ENSG00000181143_6 (sequence is synthesized)
ggtgacagcacagagaccccctgggacacaagatatattcctgtaaaaatcacatctccaatgaaaacatttgcagattcaactgcatccaaggaaaatgccccagtgtctatgactcca

SEQ ID NO: 638354 - DNA, 120 bp, Artificial Sequence
  ENSG00000181143_7 (sequence is synthesized)
gctgagaccacagttactgactcacatactccaggaaggacaaacccatcatttgggacactttattcttccttccttgacctatcacctaaagggaccccaaattccagaggtgaaaca

SEQ ID NO: 638355 - DNA, 120 bp, Artificial Sequence
  ENSG00000181143_8 (sequence is synthesized)
agcctggaactgattctatcaaccactggatatcccttctcctctcctgaacctggctctgcaggacacagcagaataagtaccagtgcgcctttgtcatcatctgcttcagttctcgat

SEQ ID NO: 638356 - DNA, 120 bp, Artificial Sequence
  ENSG00000181143_9 (sequence is synthesized)
aataaaatatcagagaccagcatattctcaggccagagtctcacctcccctctgtctcctggggtgcccgaggccagagccagcacaatgcccaactcagctatccctttttccatgaca

SEQ ID NO: 638357 - DNA, 120 bp, Artificial Sequence
  ENSG00000181143_10 (sequence is synthesized)
ctaagcaatgcagaaacaagtgccgaaagggtcagaagcacaatttcctctctggggactccatcaatatccacaaagcagacagcagagactatccttaccttccatgccttcgctgag

SEQ ID NO: 638358 - DNA, 120 bp, Artificial Sequence
  ENSG00000181143_11 (sequence is synthesized)
accatggatatacccagcacccacatagccaagactttggcttcagaatggttgggaagtccaggtacccttggtggcaccagcacttcagcgctgacaaccacatctccatctaccact

SEQ ID NO: 638359 - DNA, 120 bp, Artificial Sequence
  ENSG00000181143_12 (sequence is synthesized)
ttagtctcagaggagaccaacacccatcactccacgagtggaaaggaaacagaaggaactttgaatacatctatgactccacttgagacctctgctcctggagaagagtccgaaatgact

SEQ ID NO: 638360 - DNA, 120 bp, Artificial Sequence
  ENSG00000181143_13 (sequence is synthesized)
gccaccttggtccccactctaggttttacaactcttgacagcaagatcagaagtccatctcaggtctcttcatcccacccaacaagagagctcagaaccacaggcagcacctctgggagg

SEQ ID NO: 638361 - DNA, 120 bp, Artificial Sequence
  ENSG00000181143_14 (sequence is synthesized)
cagagttccagcacagctgcccacgggagctctgacatcctgagggcaaccacttccagcacctcaaaagcatcatcatggaccagtgaaagcacagctcagcaatttagtgaaccccag

SEQ ID NO: 638362 - DNA, 120 bp, Artificial Sequence
  ENSG00000181143_15 (sequence is synthesized)
cacacacagtgggtggagacaagtcctagcatgaaaacagagagacccccagcatcaaccagtgtggcagcccctatcaccacttctgttccctcagtggtctctggcttcaccaccctg

SEQ ID NO: 638363 - DNA, 120 bp, Artificial Sequence
  ENSG00000181143_16 (sequence is synthesized)
aagaccagctccacaaaagggatttggcttgaagaaacatctgcagacacactcatcggagaatccacagctggcccaaccacccatcagtttgctgttcccactgggatttcaatgaca

SEQ ID NO: 638364 - DNA, 120 bp, Artificial Sequence
  ENSG00000181143_17 (sequence is synthesized)
ggaggcagcagcaccaggggaagccagggcacaacccacctactcaccagagccacagcatcatctgagacatccgcagatttgactctggccacgaacggtgtcccagtctccgtgtct

SEQ ID NO: 638365 - DNA, 120 bp, Artificial Sequence
  ENSG00000181143_18 (sequence is synthesized)
ccagcagtgagcaagacggctgctggctcaagtcctccaggagggacaaagccatcatatacaatggtttcttctgtcatccctgagacatcatctctacagtcctcagctttcagggaa

SEQ ID NO: 638366 - DNA, 120 bp, Artificial Sequence
  ENSG00000181143_19 (sequence is synthesized)
ggaaccagcctgggactgactccattaaacactagacatcccttctcttcccctgaaccagactctgcaggacacaccaagataagcaccagcattcctctgttgtcatctgcttcagtt

SEQ ID NO: 638367 - DNA, 120 bp, Artificial Sequence
  ENSG00000181143_20 (sequence is synthesized)
cttgaggataaagtgtcagcgaccagcacattctcacaccacaaagccacctcatctattaccacagggactcctgaaatctcaacaaagacaaagcccagctcagccgttctttcctcc

SEQ ID NO: 638368 - DNA, 120 bp, Artificial Sequence
  ENSG00000181143_21 (sequence is synthesized)
atgaccctaagcaatgcagcaacaagtcctgaaagagtcagaaatgcaacttcccctctgactcatccatctccatcaggggaagagacagcagggagtgtcctcactctcagcacctct

SEQ ID NO: 638369 - DNA, 120 bp, Artificial Sequence
  ENSG00000181143_22 (sequence is synthesized)
gctgagactacagactcacctaacatccacccaactgggacactgacttcagaatcgtcagagagtcctagcactctcagcctcccaagtgtctctggagtcaaaaccacattttcttca

SEQ ID NO: 638370 - DNA, 120 bp, Artificial Sequence
  ENSG00000181143_23 (sequence is synthesized)
tctactccttccactcatctatttactagtggagaagaaacagaggaaacttcgaatccatctgtgtctcaacctgagacttctgtttccagagtaaggaccaccttggccagcacctct

SEQ ID NO: 638371 - DNA, 120 bp, Artificial Sequence
  ENSG00000181143_24 (sequence is synthesized)
gtccctaccccagtattccccaccatggacacctggcctacacgttcagctcagttctcttcatcccacctagtgagtgagctcagagctacgagcagtacctcagttacaaactcaact

SEQ ID NO: 638372 - DNA, 120 bp, Artificial Sequence
  ENSG00000181143_25 (sequence is synthesized)
ggttcagctcttcctaaaatatctcacctcactgggacggcaacaatgtcacagaccaatagagacacgtttaatgactctgctgcaccccaaagcacaacttggccagagactagtccc

SEQ ID NO: 638373 - DNA, 120 bp, Artificial Sequence
  ENSG00000181143_26 (sequence is synthesized)
agattcaagacagggttaccttcagcaacaaccactgtttcaacctctgccacttctctctctgctactgtaatggtctctaaattcacttctccagcaactagttccatggaagcaact

SEQ ID NO: 638374 - DNA, 120 bp, Artificial Sequence
  ENSG00000181143_27 (sequence is synthesized)
tctatcagggaaccatcaacaaccatcctcacaacagagaccacgaatggcccaggctctatggctgtggcttctaccaacatcccaattggaaagggctacattactgaaggaagattg

SEQ ID NO: 638375 - DNA, 120 bp, Artificial Sequence
  ENSG00000181143_28 (sequence is synthesized)
gacacaagccatctgcccattggaaccacagcttcctctgagacatctatggattttaccatggccaaagaaagtgtctcaatgtcagtatctccatctcagtccatggatgctgctggc

SEQ ID NO: 638376 - DNA, 120 bp, Artificial Sequence
  ENSG00000181143_29 (sequence is synthesized)
tcaagcactccaggaaggacaagccaattcgttgacacattttctgatgatgtctatcatttaacatccagagaaattacaatacctagagatggaacaagctcagctctgactccacaa

SEQ ID NO: 638377 - DNA, 120 bp, Artificial Sequence
  ENSG00000181143_30 (sequence is synthesized)
atgactgcaactcaccctccatctcctgatcctggctctgctagaagcacctggcttggcatcttgtcctcatctccttcttctcctactcccaaagtcacaatgagctccacattttca

SEQ ID NO: 638378 - DNA, 120 bp, Artificial Sequence
  ENSG00000181143_31 (sequence is synthesized)
actcagagagtcaccacaagcatgataatggacacagttgaaactagtcggtggaacatgcccaacttaccttccacgacttccttgacaccaagtaatattccaacaagtggtgccata

SEQ ID NO: 638379 - DNA, 120 bp, Artificial Sequence
  ENSG00000181143_32 (sequence is synthesized)
ggaaaaagcaccctggttcccttggacactccatctccagccacatcattggaggcatcagaagggggacttccaaccctcagcacctaccctgaatcaacaaacacacccagcatccac

SEQ ID NO: 638380 - DNA, 120 bp, Artificial Sequence
  ENSG00000181143_33 (sequence is synthesized)
ctcggagcacacgctagttcagaaagtccaagcaccatcaaacttaccatggcttcagtagtaaaacctggctcttacacacctctcaccttcccctcaatagagacccacattcatgta

SEQ ID NO: 638381 - DNA, 120 bp, Artificial Sequence
  ENSG00000181143_34 (sequence is synthesized)
tcaacagccagaatggcttactcttctgggtcttcacctgagatgacagctcctggagagactaacactggtagtacctgggaccccaccacctacatcaccactacggatcctaaggat

SEQ ID NO: 638382 - DNA, 120 bp, Artificial Sequence
  ENSG00000181143_35 (sequence is synthesized)
acaagttcagctcaggtctctacaccccactcagtgaggacactcagaaccacagaaaaccatccaaagacagagtccgccaccccagctgcttactctggaagtcctaaaatctcaagt

SEQ ID NO: 638383 - DNA, 120 bp, Artificial Sequence
  ENSG00000181143_36 (sequence is synthesized)
tcacccaatctcaccagtccggccacaaaagcatggaccatcacagacacaactgaacactccactcaattacattacacaaaattggcagaaaaatcatctggatttgagacacagtca

SEQ ID NO: 638384 - DNA, 120 bp, Artificial Sequence
  ENSG00000181143_37 (sequence is synthesized)
gctccaggacctgtctctgtagtaatccctacctcccctaccattggaagcagcacattggaactaacttctgatgtcccaggggaacccctggtccttgctcccagtgagcagaccaca

SEQ ID NO: 638385 - DNA, 120 bp, Artificial Sequence
  ENSG00000181143_38 (sequence is synthesized)
atcactctccccatggcaacatggctgagtaccagtttgacagaggaaatggcttcaacagaccttgatatttcaagtccaagttcacccatgagtacatttgctatttttccacctatg

SEQ ID NO: 638386 - DNA, 120 bp, Artificial Sequence
  ENSG00000181143_39 (sequence is synthesized)
tccacaccttctcatgaactttcaaagtcagaggcagataccagtgccattagaaatacagattcaacaacgttggatcagcacctaggaatcaggagtttgggcagaactggggactta

SEQ ID NO: 638387 - DNA, 120 bp, Artificial Sequence
  ENSG00000181143_40 (sequence is synthesized)
acaactgttcctatcaccccactgacaaccacgtggaccagtgtgattgaacactcaacacaagcacaggacaccctttctgcaacgatgagtcctactcacgtgacacagtcactcaaa

SEQ ID NO: 638388 - DNA, 120 bp, Artificial Sequence
  ENSG00000181143_41 (sequence is synthesized)
gatcaaacatctataccagcctcagcatccccttcccatcttactgaagtctaccctgagctcgggacacaagggagaagctcctctgaggcaaccactttttggaaaccatctacagac

SEQ ID NO: 638389 - DNA, 120 bp, Artificial Sequence
  ENSG00000181143_42 (sequence is synthesized)
acactgtccagagagattgagactggcccaacaaacattcaatccactccacccatggacaacacaacaacagggagcagtagtagtggagtcaccctgggcatagcccaccttcccata

SEQ ID NO: 638390 - DNA, 120 bp, Artificial Sequence
  ENSG00000181143_43 (sequence is synthesized)
ggaacatcctccccagctgagacatccacaaacatggcactggaaagaagaagttctacagccactgtctctatggctgggacaatgggactccttgttactagtgctccaggaagaagc

SEQ ID NO: 638391 - DNA, 120 bp, Artificial Sequence
  ENSG00000181143_44 (sequence is synthesized)
atcagccagtcattaggaagagtttcctctgtcctttctgagtcaactactgaaggagtcacagattctagtaagggaagcagcccaaggctgaacacacagggaaatacagctctctcc

SEQ ID NO: 638392 - DNA, 120 bp, Artificial Sequence
  ENSG00000181143_45 (sequence is synthesized)
tcctctcttgaacccagctatgctgaaggaagccagatgagcacaagcatccctctaacctcatctcctacaactcctgatgtggaattcatagggggcagcacattttggaccaaggag

SEQ ID NO: 638393 - DNA, 120 bp, Artificial Sequence
  ENSG00000181143_46 (sequence is synthesized)
gtcaccacagttatgacctcagacatctccaagtcttcagcaaggacagagtccagctcagctacccttatgtccacagctttgggaagcactgaaaatacaggaaaagaaaaactcaga

SEQ ID NO: 638394 - DNA, 120 bp, Artificial Sequence
  ENSG00000181143_47 (sequence is synthesized)
actgcctctatggatcttccatctccaactccatcaatggaggtgacaccatggatttctctcactctcagtaatgcccccaataccacagattcacttgacctcagccatggggtgcac

SEQ ID NO: 638395 - DNA, 120 bp, Artificial Sequence
  ENSG00000181143_48 (sequence is synthesized)
accagctctgcagggactttggccactgacaggtcattgaatactggtgtcactagagcctccagattggaaaacggctctgatacctcttctaagtccctgtctatgggaaacagcact

SEQ ID NO: 638396 - DNA, 120 bp, Artificial Sequence
  ENSG00000181143_49 (sequence is synthesized)
cacacttccatgacttacacagagaagagtgaagtgtcttcttcaatccatccccgacctgagacctcagctcctggagcagagaccactttgacttccactcctggaaacagggccata

SEQ ID NO: 638397 - DNA, 120 bp, Artificial Sequence
  ENSG00000181143_50 (sequence is synthesized)
agcttaacattgcctttttcatccattccagtggaagaagtcatttctacaggcataacctcaggaccagacatcaactcagcacccatgacacattctcccatcaccccaccaacaatt

SEQ ID NO: 638398 - DNA, 120 bp, Artificial Sequence
  ENSG00000181143_51 (sequence is synthesized)
gtatggaccagtacaggcacaattgaacagtccactcaaccactacatgcagtttcttcagaaaaagtttctgtgcagacacagtcaactccatatgtcaactctgtggcagtgtctgct

SEQ ID NO: 638399 - DNA, 120 bp, Artificial Sequence
  ENSG00000181143_52 (sequence is synthesized)
tcccctacccatgagaattcagtctcttctggaagcagcacatcctctccatattcctcagcctcacttgaatccttggattccacaatcagtaggaggaatgcaatcacttcctggcta

SEQ ID NO: 638400 - DNA, 120 bp, Artificial Sequence
  ENSG00000181143_53 (sequence is synthesized)
tgggacctcactacatctctccccactacaacttggccaagtactagtttatctgaggcactgtcctcaggccattctggggtttcaaacccaagttcaactacgactgaatttccactc

SEQ ID NO: 638401 - DNA, 120 bp, Artificial Sequence
  ENSG00000181143_54 (sequence is synthesized)
ttttcagctgcatccacatctgctgctaagcaaagaaatccagaaacagagacccatggtccccagaatacagccgcgagtactttgaacactgatgcatcctcggtcacaggtctttct

SEQ ID NO: 638402 - DNA, 120 bp, Artificial Sequence
  ENSG00000181143_55 (sequence is synthesized)
gagactcctgtgggggcaagtatcagctctgaagtccctcttccaatggccataacttctagatcagatgtttctggccttacatctgagagtactgctaacccgagtttaggcacagcc

SEQ ID NO: 638403 - DNA, 120 bp, Artificial Sequence
  ENSG00000181143_56 (sequence is synthesized)
tcttcagcagggaccaaattaactaggacaatatccctgcccacttcagagtctttggtttcctttagaatgaacaaggatccatggacagtgtcaatccctttggggtcccatccaact

SEQ ID NO: 638404 - DNA, 120 bp, Artificial Sequence
  ENSG00000181143_57 (sequence is synthesized)
actaatacagaaacaagcatcccagtaaacagcgcaggtccacctggcttgtccacagtagcatcagatgtaattgacacaccttcagatggggctgagagtattcccactgtctccttt

SEQ ID NO: 638405 - DNA, 120 bp, Artificial Sequence
  ENSG00000181143_58 (sequence is synthesized)
tccccctcccctgatactgaagtgacaactatctcacatttcccagaaaagacaactcattcatttagaaccatttcatctctcactcatgagttgacttcaagagtgacacctattcct

SEQ ID NO: 638406 - DNA, 120 bp, Artificial Sequence
  ENSG00000181143_59 (sequence is synthesized)
ggggattggatgagttcagctatgtctacaaagcccacaggagccagtccctccattacactgggagagagaaggacaatcacctctgctgctccaaccacttcccccatagttctcact

SEQ ID NO: 638407 - DNA, 120 bp, Artificial Sequence
  ENSG00000181143_60 (sequence is synthesized)
gctagtttcacagagaccagcacagtttcactggataatgaaactacagtaaaaacctcagatatccttgacgcacggaaaacaaatgagctcccctcagatagcagttcttcttctgat

SEQ ID NO: 638408 - DNA, 120 bp, Artificial Sequence
  ENSG00000181143_61 (sequence is synthesized)
ctgatcaacacctccatagcttcttcaactatggatgtcactaaaacagcctccatcagtcccactagcatctcaggaatgacagcaagttcctccccatctctcttctcttcagataga

SEQ ID NO: 638409 - DNA, 120 bp, Artificial Sequence
  ENSG00000181143_62 (sequence is synthesized)
ccccaggttcccacatctacaacagagacaaatacagccacctctccatctgtttccagtaacacctattctcttgatgggggctccaatgtgggtggcactccatccactttaccaccc

SEQ ID NO: 638410 - DNA, 120 bp, Artificial Sequence
  ENSG00000181143_63 (sequence is synthesized)
tttacaatcacccaccctgtcgagacaagctcggccctattagcctggtctagaccagtaagaactttcagcaccatggtcagcactgacactgcctccggagaaaatcctacctctagc

SEQ ID NO: 638411 - DNA, 120 bp, Artificial Sequence
  ENSG00000181143_64 (sequence is synthesized)
aattctgtggtgacttctgttccagcaccaggtacatggaccagtgtaggcagtactactgacttacctgccatgggctttctcaagacaagtcctgcaggagaggcacactcacttcta

SEQ ID NO: 638412 - DNA, 120 bp, Artificial Sequence
  ENSG00000181143_65 (sequence is synthesized)
gcatcaactattgaaccagccactgccttcactccccatctctcagcagcagtggtcactggatccagtgctacatcagaagccagtcttctcactacgagtgaaagcaaagccattcat

SEQ ID NO: 638413 - DNA, 120 bp, Artificial Sequence
  ENSG00000181143_66 (sequence is synthesized)
tcttcaccacagaccccaactacacccacctctggagcaaactgggaaacttcagctactcctgagagccttttggtagtcactgagacttcagacacaacacttacctcaaagattttg

SEQ ID NO: 638414 - DNA, 120 bp, Artificial Sequence
  ENSG00000181143_67 (sequence is synthesized)
gtcacagataccatcttgttttcaactgtgtccacgccaccttctaaatttccaagtacggggactctgtctggagcttccttccctactttactcccggacactccagccatccctctc

SEQ ID NO: 638415 - DNA, 120 bp, Artificial Sequence
  ENSG00000181143_68 (sequence is synthesized)
actgccactgagccaacaagttcattagctacatcctttgattccaccccactggtgactatagcttcggatagtcttggcacagtcccagagactaccctgaccatgtcagagacctca

SEQ ID NO: 638416 - DNA, 120 bp, Artificial Sequence
  ENSG00000181143_69 (sequence is synthesized)
aatggtgatgcactggttcttaagacagtaagtaacccagataggagcatccctggaatcactatccaaggagtaacagaaagtccactccatccttcttccacttccccctctaagatt

SEQ ID NO: 638417 - DNA, 120 bp, Artificial Sequence
  ENSG00000181143_70 (sequence is synthesized)
gttgctccacggaatacaacctatgaaggttcgatcacagtggcactttctactttgcctgcgggaactactggttcccttgtattcagtcagagttctgaaaactcagagacaacggct

SEQ ID NO: 638418 - DNA, 120 bp, Artificial Sequence
  ENSG00000181143_71 (sequence is synthesized)
ttggtagactcatcagctgggcttgagagggcatctgtgatgccactaaccacaggaagccagggtatggctagctctggaggaatcagaagtgggtccactcactcaactggaaccaaa

SEQ ID NO: 638419 - DNA, 120 bp, Artificial Sequence
  ENSG00000181143_72 (sequence is synthesized)
acattttcttctctccctctgaccatgaacccaggtgaggttacagccatgtctgaaatcaccacgaacagactgacagctactcaatcaacagcacccaaagggatacctgtgaagccc

SEQ ID NO: 638420 - DNA, 120 bp, Artificial Sequence
  ENSG00000181143_73 (sequence is synthesized)
accagtgctgagtcaggcctcctaacacctgtctctgcctcctcaagcccatcaaaggcctttgcctcactgactacagctcccccaacttgggggatcccacagtctaccttgacattt

SEQ ID NO: 638421 - DNA, 120 bp, Artificial Sequence
  ENSG00000181143_74 (sequence is synthesized)
gagttttctgaggtcccaagtttggatactaagtccgcttctttaccaactcctggacagtccctgaacaccattccagactcagatgcaagcacagcatcttcctcactgtccaagtct

SEQ ID NO: 638422 - DNA, 120 bp, Artificial Sequence
  ENSG00000181143_75 (sequence is synthesized)
ccagaaaaaaacccaagggcaaggatgatgacttccacaaaggccataagtgcaagctcatttcaatcaacaggttttactgaaacccctgagggatctgcctccccttctatggcaggg

SEQ ID NO: 638423 - DNA, 120 bp, Artificial Sequence
  ENSG00000181143_76 (sequence is synthesized)
catgaacccagagtccccacttcaggaacaggggaccctagatatgcctcagagagcatgtcttatccagacccaagcaaggcatcatcagctatgacatcgacctctcttgcatcaaaa

SEQ ID NO: 638424 - DNA, 120 bp, Artificial Sequence
  ENSG00000181143_77 (sequence is synthesized)
ctcacaactctcttcagcacaggtcaagcagcaaggtctggttctagttcctctcccataagcctatccactgagaaagaaacaagcttcctttcccccactgcatccacctccagaaag

SEQ ID NO: 638425 - DNA, 120 bp, Artificial Sequence
  ENSG00000181143_78 (sequence is synthesized)
acttcactatttcttgggccttccatggcaaggcagcccaacatattggtgcatcttcagacttcagctctgacactttctccaacatccactctaaatatgtcccaggaggagcctcct

SEQ ID NO: 638426 - DNA, 120 bp, Artificial Sequence
  ENSG00000181143_79 (sequence is synthesized)
gagttaacctcaagccagaccattgcagaagaagagggaacaacagctgaaacacagacgttaaccttcacaccatctgagaccccaacatccttgttacctgtctcttctcccacagaa

SEQ ID NO: 638427 - DNA, 120 bp, Artificial Sequence
  ENSG00000181143_80 (sequence is synthesized)
cccacagccagaagaaagagttctccagaaacatgggcaagctctatttcagttcctgccaagacctccttggttgaaacaactgatggaacgctagtgaccaccataaagatgtcaagc

SEQ ID NO: 638428 - DNA, 120 bp, Artificial Sequence
  ENSG00000181143_81 (sequence is synthesized)
caggcagcacaaggaaattccacgtggcctgccccagcagaggagacggggagcagtccagcaggcacatccccaggaagcccagaaatgtctaccactctcaaaatcatgagctccaag

SEQ ID NO: 638429 - DNA, 120 bp, Artificial Sequence
  ENSG00000181143_82 (sequence is synthesized)
gaacccagcatcagcccagagatcaggtccactgtgagaaattctccttggaagactccagaaacaactgttcccatggagaccacagtggaaccagtcacccttcagtccacagcccta

SEQ ID NO: 638430 - DNA, 120 bp, Artificial Sequence
  ENSG00000181143_83 (sequence is synthesized)
ggaagtggcagcaccagcatctctcacctgcccacaggaaccacatcaccaaccaagtcaccaacagaaaatatgttggctacagaaagggtctccctctccccatccccacctgaggct

SEQ ID NO: 638431 - DNA, 120 bp, Artificial Sequence
  ENSG00000181143_84 (sequence is synthesized)
tggaccaacctttattctggaactccaggagggaccaggcagtcactggccacaatgtcctctgtctccctagagtcaccaactgctagaagcatcacagggactggtcagcaaagcagt

SEQ ID NO: 638432 - DNA, 120 bp, Artificial Sequence
  ENSG00000181143_85 (sequence is synthesized)
ccagaactggtttcaaagacaactggaatggaattctctatgtggcatggctctactggagggaccacaggggacacacatgtctctctgagcacatcttccaatatccttgaagaccct

SEQ ID NO: 638433 - DNA, 120 bp, Artificial Sequence
  ENSG00000181143_86 (sequence is synthesized)
gtaaccagcccaaactctgtgagctcattgacagataaatccaaacataaaaccgagacatgggtaagcaccacagccattccctccactgtcctgaataataagataatggcagctgaa

SEQ ID NO: 638434 - DNA, 120 bp, Artificial Sequence
  ENSG00000181143_87 (sequence is synthesized)
caacagacaagtcgatctgtggatgaggcttattcatcaactagttcttggtcagatcagacatctgggagtgacatcacccttggtgcatctcctgatgtcacaaacacattatacatc

SEQ ID NO: 638435 - DNA, 120 bp, Artificial Sequence
  ENSG00000181143_88 (sequence is synthesized)
acctccacagcacaaaccacctcactagtgtctctgccctctggagaccaaggcattacaagcctcaccaatccctcaggaggaaaaacaagctctgcgtcatctgtcacatctccttca

SEQ ID NO: 638436 - DNA, 120 bp, Artificial Sequence
  ENSG00000181143_89 (sequence is synthesized)
atagggcttgagactctgagggccaatgtaagtgcagtgaaaagtgacattgcccctactgctgggcatctatctcagacttcatctcctgcggaagtgagcatcctggacgtaaccaca

SEQ ID NO: 638437 - DNA, 120 bp, Artificial Sequence
  ENSG00000181143_90 (sequence is synthesized)
gctcctactccaggtatctccaccaccatcaccaccatgggaaccaactcaatctcaactaccacacccaacccagaagtgggtatgagtaccatggacagcaccccggccacagagagg

SEQ ID NO: 638438 - DNA, 120 bp, Artificial Sequence
  ENSG00000181143_91 (sequence is synthesized)
cgcacaacttctacagaacacccttccacctggtcttccacagctgcatcagattcctggactgtcacagacatgacttcaaacttgaaagttgcaagatctcctggaacaatttccaca

SEQ ID NO: 638439 - DNA, 120 bp, Artificial Sequence
  ENSG00000181143_92 (sequence is synthesized)
atgcatacaacttcattcttagcctcaagcactgaattagactccatgtctactccccatggccgtataactgtcattggaaccagcctggtcactccatcctctgatgcttcagctgta

SEQ ID NO: 638440 - DNA, 120 bp, Artificial Sequence
  ENSG00000181143_93 (sequence is synthesized)
aagacagagaccagtacaagtgaaagaacattgagtccttcagacacaactgcatctactcccatctcaactttttctcgtgtccagaggatgagcatctcagttcctgacattttaagt

SEQ ID NO: 638441 - DNA, 120 bp, Artificial Sequence
  ENSG00000181143_94 (sequence is synthesized)
acaagttggactcccagtagtacagaagcagaagatgtgcctgtttcaatggtttctacagatcatgctagtacaaagactgacccaaatacgcccctgtccacttttctgtttgattct

SEQ ID NO: 638442 - DNA, 120 bp, Artificial Sequence
  ENSG00000181143_95 (sequence is synthesized)
ctgtccactcttgactgggacactgggagatctctgtcatcagccacagccactacctcagctcctcagggggccacaactccccaggaactcactttggaaaccatgatcagcccagct

SEQ ID NO: 638443 - DNA, 120 bp, Artificial Sequence
  ENSG00000181143_96 (sequence is synthesized)
acctcacagttgcccttctctatagggcacattacaagtgcagtcacaccagctgcaatggcaaggagctctggagttactttttcaagaccagatcccacaagcaaaaaggcagagcag

SEQ ID NO: 638444 - DNA, 120 bp, Artificial Sequence
  ENSG00000181143_97 (sequence is synthesized)
acttccactcagcttcccaccaccacttctgcacatccagggcaggtgcccagatcagcagcaacaactctggatgtgatcccacacacagcaaaaactccagatgcaacttttcagaga

SEQ ID NO: 638445 - DNA, 120 bp, Artificial Sequence
  ENSG00000181143_98 (sequence is synthesized)
caagggcagacagctcttacaacagaggcaagagctacatctgactcctggaatgagaaagaaaaatcaaccccaagtgcaccttggatcactgagatgatgaattctgtctcagaagat

SEQ ID NO: 638446 - DNA, 120 bp, Artificial Sequence
  ENSG00000181143_99 (sequence is synthesized)
accatcaaggaggttaccagctcctccagtgtattaaggaccctgaatacgctggacataaacttggaatctgggacgacttcatccccaagttggaaaagcagcccatatgagagaatt

SEQ ID NO: 638447 - DNA, 120 bp, Artificial Sequence
  ENSG00000181143_100 (sequence is synthesized)
gccccttctgagtccaccacagacaaagaggcaattcacccttctacaaacacagtagagaccacaggctgggtcacaagttccgaacatgcttctcattccactatcccagcccactca

SEQ ID NO: 638448 - DNA, 120 bp, Artificial Sequence
  ENSG00000181143_101 (sequence is synthesized)
gcgtcatccaaactcacatctccagtggttacaacctccaccagggaacaagcaatagtttctatgtcaacaaccacatggccagagtctacaagggctagaacagagcctaattccttc

SEQ ID NO: 638449 - DNA, 120 bp, Artificial Sequence
  ENSG00000181143_102 (sequence is synthesized)
ttgactattgaactgagggacgtcagcccttacatggacaccagctcaaccacacaaacaagtattatctcttccccaggttccactgcgatcaccaaggggcctagaacagaaattacc

SEQ ID NO: 638450 - DNA, 120 bp, Artificial Sequence
  ENSG00000181143_103 (sequence is synthesized)
tcctctaagagaatatccagctcattccttgcccagtctatgaggtcgtcagacagcccctcagaagccatcaccaggctgtctaactttcctgccatgacagaatctggaggaatgatc

SEQ ID NO: 638451 - DNA, 120 bp, Artificial Sequence
  ENSG00000181143_104 (sequence is synthesized)
cttgctatgcaaacaagtccacctggcgctacatcactaagtgcacctactttggatacatcagccacagcctcctggacagggactccactggctacgactcagagatttacatactca

SEQ ID NO: 638452 - DNA, 120 bp, Artificial Sequence
  ENSG00000181143_105 (sequence is synthesized)
gagaagaccactctctttagcaaaggtcctgaggatacatcacagccaagccctccctctgtggaagaaaccagctcttcctcttccctggtacctatccatgctacaacctcgccttcc

SEQ ID NO: 638453 - DNA, 120 bp, Artificial Sequence
  ENSG00000181143_106 (sequence is synthesized)
aatattttgttgacatcacaagggcacagtccctcctctactccacctgtgacctcagttttcttgtctgagacctctggcctggggaagaccacagacatgtcgaggataagcttggaa

SEQ ID NO: 638454 - DNA, 120 bp, Artificial Sequence
  ENSG00000181143_107 (sequence is synthesized)
cctggcacaagtttacctcccaatttgagcagtacagcaggtgaggcgttatccacttatgaagcctccagagatacaaaggcaattcatcattctgcagacacagcagtgacgaatatg

SEQ ID NO: 638455 - DNA, 120 bp, Artificial Sequence
  ENSG00000181143_108 (sequence is synthesized)
gaggcaaccagttctgaatattctcctatcccaggccatacaaagccatccaaagccacatctccattggttacctcccacatcatgggggacatcacttcttccacatcagtatttggc

SEQ ID NO: 638456 - DNA, 120 bp, Artificial Sequence
  ENSG00000181143_109 (sequence is synthesized)
tcctccgagaccacagagattgagacagtgtcctctgtgaaccagggacttcaggagagaagcacatcccaggtggccagctctgctacagagacaagcactgtcattacccatgtgtct

SEQ ID NO: 638457 - DNA, 120 bp, Artificial Sequence
  ENSG00000181143_110 (sequence is synthesized)
agtggtgatgctactactcatgtcaccaagacacaagccactttctctagcggaacatccatctcaagccctcatcagtttataacttctaccaacacatttacagatgtgagcaccaac

SEQ ID NO: 638458 - DNA, 120 bp, Artificial Sequence
  ENSG00000181143_111 (sequence is synthesized)
ccctccacctctctgataatgacagaatcttcaggagtgaccatcaccacccaaacaggtcctactggagctgcaacacagggtccatatctcttggacacatcaaccatgccttacttg

SEQ ID NO: 638459 - DNA, 120 bp, Artificial Sequence
  ENSG00000181143_112 (sequence is synthesized)
acagagactccattagctgtgactccagattttatgcaatcagagaagaccactctcataagcaaaggtcccaaggatgtgtcctggacaagccctccctctgtggcagaaaccagctat

SEQ ID NO: 638460 - DNA, 120 bp, Artificial Sequence
  ENSG00000181143_113 (sequence is synthesized)
ccctcttccctgacacctttcttggtcacaaccatacctcctgccacttccacgttacaagggcaacatacatcctctcctgtttctgcgacttcagttcttacctctggactggtgaag

SEQ ID NO: 638461 - DNA, 120 bp, Artificial Sequence
  ENSG00000181143_114 (sequence is synthesized)
accacagatatgttgaacacaagcatggaacctgtgaccaattcacctcaaaatttgaacaatccatcaaatgagatactggccactttggcagccaccacagatatagagactattcat

SEQ ID NO: 638462 - DNA, 120 bp, Artificial Sequence
  ENSG00000181143_115 (sequence is synthesized)
ccttccataaacaaagcagtgaccaatatggggactgccagttcagcacatgtactgcattccactctcccagtcagctcagaaccatctacagccacatctccaatggttcctgcctcc

SEQ ID NO: 638463 - DNA, 120 bp, Artificial Sequence
  ENSG00000181143_116 (sequence is synthesized)
agcatgggggacgctcttgcttctatatcaatacctggttctgagaccacagacattgagggagagccaacatcctccctgactgctggacgaaaagagaacagcaccctccaggagatg

SEQ ID NO: 638464 - DNA, 120 bp, Artificial Sequence
  ENSG00000181143_117 (sequence is synthesized)
aactcaactacagagtcaaacatcatcctctccaatgtgtctgtgggggctattactgaagccacaaaaatggaagtcccctcttttgatgcaacattcataccaactcctgctcagtca

SEQ ID NO: 638465 - DNA, 120 bp, Artificial Sequence
  ENSG00000181143_118 (sequence is synthesized)
acaaagttcccagatattttctcagtagccagcagtagactttcaaactctcctcccatgacaatatctacccacatgaccaccacccagacagggtcttctggagctacatcaaagatt

SEQ ID NO: 638466 - DNA, 120 bp, Artificial Sequence
  ENSG00000181143_119 (sequence is synthesized)
ccacttgccttagacacatcaaccttggaaacctcagcagggactccatcagtggtgactgaggggtttgcccactcaaaaataaccactgcaatgaacaatgatgtcaaggacgtgtca

SEQ ID NO: 638467 - DNA, 120 bp, Artificial Sequence
  ENSG00000181143_120 (sequence is synthesized)
cagacaaaccctccctttcaggatgaagccagctctccctcttctcaagcacctgtccttgtcacaaccttaccttcttctgttgctttcacaccgcaatggcacagtacctcctctcct

SEQ ID NO: 638468 - DNA, 120 bp, Artificial Sequence
  ENSG00000181143_121 (sequence is synthesized)
gtttctatgtcctcagttcttacttcttcactggtaaagaccgcaggcaaggtggatacaagcttagaaacagtgaccagttcacctcaaagtatgagcaacactttggatgacatatcg

SEQ ID NO: 638469 - DNA, 120 bp, Artificial Sequence
  ENSG00000181143_122 (sequence is synthesized)
gtcacttcagcagccaccacagatatagagacaacgcatccttccataaacacagtagttaccaatgtggggaccaccggttcagcatttgaatcacattctactgtctcagcttaccca

SEQ ID NO: 638470 - DNA, 120 bp, Artificial Sequence
  ENSG00000181143_123 (sequence is synthesized)
gagccatctaaagtcacatctccaaatgttaccacctccaccatggaagacaccacaatttccagatcaatacctaaatcctctaagactacaagaactgagactgagacaacttcctcc

SEQ ID NO: 638471 - DNA, 120 bp, Artificial Sequence
  ENSG00000181143_124 (sequence is synthesized)
ctgactcctaaactgagggagaccagcatctcccaggagatcacctcgtccacagagacaagcactgttccttacaaagagctcactggtgccactaccgaggtatccaggacagatgtc

SEQ ID NO: 638472 - DNA, 120 bp, Artificial Sequence
  ENSG00000181143_125 (sequence is synthesized)
acttcctctagcagtacatccttccctggccctgatcagtccacagtgtcactagacatctccacagaaaccaacaccaggctgtctacctccccaataatgacagaatctgcagaaata

SEQ ID NO: 638473 - DNA, 120 bp, Artificial Sequence
  ENSG00000181143_126 (sequence is synthesized)
accatcaccacccaaacaggtcctcatggggctacatcacaggatacttttaccatggacccatcaaatacaaccccccaggcagggatccactcagctatgactcatggattttcacaa

SEQ ID NO: 638474 - DNA, 120 bp, Artificial Sequence
  ENSG00000181143_127 (sequence is synthesized)
ttggatgtgaccactcttatgagcagaattccacaggatgtatcatggacaagtcctccctctgtggataaaaccagctccccctcttcctttctgtcctcacctgcaatgaccacacct

SEQ ID NO: 638475 - DNA, 120 bp, Artificial Sequence
  ENSG00000181143_128 (sequence is synthesized)
tccctgatttcttctaccttaccagaggataagctctcctctcctatgacttcacttctcacctctggcctagtgaagattacagacatattacgtacacgcttggaacctgtgaccagc

SEQ ID NO: 638476 - DNA, 120 bp, Artificial Sequence
  ENSG00000181143_129 (sequence is synthesized)
tcacttccaaatttcagcagcacctcagataagatactggccacttctaaagacagtaaagacacaaaggaaatttttccttctataaacacagaagagaccaatgtgaaagccaacaac

SEQ ID NO: 638477 - DNA, 120 bp, Artificial Sequence
  ENSG00000181143_130 (sequence is synthesized)
tctggacatgaatcccattcccctgcactggctgactcagagacacccaaagccacaactcaaatggttatcaccaccactgtgggagatccagctccttccacatcaatgccagtgcat

SEQ ID NO: 638478 - DNA, 120 bp, Artificial Sequence
  ENSG00000181143_131 (sequence is synthesized)
ggttcctctgagactacaaacattaagagagagccaacatatttcttgactcctagactgagagagaccagtacctctcaggagtccagctttcccacggacacaagttttctactttcc

SEQ ID NO: 638479 - DNA, 120 bp, Artificial Sequence
  ENSG00000181143_132 (sequence is synthesized)
aaagtccccactggtactattactgaggtctccagtacaggggtcaactcttctagcaaaatttccaccccagaccatgataagtccacagtgccacctgacaccttcacaggagagatc

SEQ ID NO: 638480 - DNA, 120 bp, Artificial Sequence
  ENSG00000181143_133 (sequence is synthesized)
cccagggtcttcacctcctctattaagacaaaatctgcagaaatgacgatcaccacccaagcaagtcctcctgagtctgcatcgcacagtacccttcccttggacacatcaaccacactt

SEQ ID NO: 638481 - DNA, 120 bp, Artificial Sequence
  ENSG00000181143_134 (sequence is synthesized)
tcccagggagggactcattcaactgtgactcagggattcccatactcagaggtgaccactctcatgggcatgggtcctgggaatgtgtcatggatgacaactccccctgtggaagaaacc

SEQ ID NO: 638482 - DNA, 120 bp, Artificial Sequence
  ENSG00000181143_135 (sequence is synthesized)
agctctgtgtcttccctgatgtcttcacctgccatgacatccccttctcctgtttcctccacatcaccacagagcatcccctcctctcctcttcctgtgactgcacttcctacttctgtt

SEQ ID NO: 638483 - DNA, 120 bp, Artificial Sequence
  ENSG00000181143_136 (sequence is synthesized)
ctggtgacaaccacagatgtgttgggcacaacaagcccagagtctgtaaccagttcacctccaaatttgagcagcatcactcatgagagaccggccacttacaaagacactgcacacaca

SEQ ID NO: 638484 - DNA, 120 bp, Artificial Sequence
  ENSG00000181143_137 (sequence is synthesized)
gaagccgccatgcatcattccacaaacaccgcagtgaccaatgtagggacttccgggtctggacataaatcacaatcctctgtcctagctgactcagagacatcgaaagccacacctctg

SEQ ID NO: 638485 - DNA, 120 bp, Artificial Sequence
  ENSG00000181143_138 (sequence is synthesized)
atgagtaccacctccaccctgggggacacaagtgtttccacatcaactcctaatatctctcagactaaccaaattcaaacagagccaacagcatccctgagccctagactgagggagagc

SEQ ID NO: 638486 - DNA, 120 bp, Artificial Sequence
  ENSG00000181143_139 (sequence is synthesized)
agcacgtctgagaagaccagctcaacaacagagacaaatactgccttttcttatgtgcccacaggtgctattactcaggcctccagaacagaaatctcctctagcagaacatccatctca

SEQ ID NO: 638487 - DNA, 120 bp, Artificial Sequence
  ENSG00000181143_140 (sequence is synthesized)
gaccttgatcggcccacaatagcacccgacatctccacaggaatgatcaccaggctcttcacctcccccatcatgacaaaatctgcagaaatgaccgtcaccactcaaacaactactcct

SEQ ID NO: 638488 - DNA, 120 bp, Artificial Sequence
  ENSG00000181143_141 (sequence is synthesized)
ggggctacatcacagggtatccttccctgggacacatcaaccacacttttccagggagggactcattcaaccgtgtctcagggattcccacactcagagataaccactcttcggagcaga

SEQ ID NO: 638489 - DNA, 120 bp, Artificial Sequence
  ENSG00000181143_142 (sequence is synthesized)
acccctggagatgtgtcatggatgacaactccccctgtggaagaaaccagctctgggttttccctgatgtcaccttccatgacatccccttctcctgtttcctccacatcaccagagagc

SEQ ID NO: 638490 - DNA, 120 bp, Artificial Sequence
  ENSG00000181143_143 (sequence is synthesized)
atcccctcctctcctctccctgtgactgcacttcttacttctgttctggtgacaaccacaaatgtattgggcacaacaagcccagagcccgtaacgagttcacctccaaatttaagcagc

SEQ ID NO: 638491 - DNA, 120 bp, Artificial Sequence
  ENSG00000181143_144 (sequence is synthesized)
cccacacaggagagactgaccacttacaaagacactgcgcacacagaagccatgcatgcttccatgcatacaaacactgcagtggccaacgtggggacctccatttctggacatgaatca

SEQ ID NO: 638492 - DNA, 120 bp, Artificial Sequence
  ENSG00000181143_145 (sequence is synthesized)
caatcttctgtcccagctgattcacacacatccaaagccacatctccaatgggtatcaccttcgccatgggggatacaagtgtttctacatcaactcctgccttctttgagactagaatt

SEQ ID NO: 638493 - DNA, 120 bp, Artificial Sequence
  ENSG00000181143_146 (sequence is synthesized)
cagactgaatcaacatcctctttgattcctggattaagggacaccaggacgtctgaggagatcaacactgtgacagagaccagcactgtcctttcagaagtgcccactactactactact

SEQ ID NO: 638494 - DNA, 120 bp, Artificial Sequence
  ENSG00000181143_147 (sequence is synthesized)
gaggtctccaggacagaagttatcacttccagcagaacaaccatctcagggcctgatcattccaaaatgtcaccctacatctccacagaaaccatcaccaggctctccacttttcctttt

SEQ ID NO: 638495 - DNA, 120 bp, Artificial Sequence
  ENSG00000181143_148 (sequence is synthesized)
gtaacaggatccacagaaatggccatcaccaaccaaacaggtcctatagggactatctcacaggctacccttaccctggacacatcaagcacagcttcctgggaagggactcactcacct

SEQ ID NO: 638496 - DNA, 120 bp, Artificial Sequence
  ENSG00000181143_149 (sequence is synthesized)
gtgactcagagatttccacactcagaggagaccactactatgagcagaagtactaagggcgtgtcatggcaaagccctccctctgtggaagaaaccagttctccttcttccccagtgcct

SEQ ID NO: 638497 - DNA, 120 bp, Artificial Sequence
  ENSG00000181143_150 (sequence is synthesized)
ttacctgcaataacctcacattcatctctttattccgcagtatcaggaagtagccccacttctgctctccctgtgacttcccttctcacctctggcaggaggaagaccatagacatgttg

SEQ ID NO: 638498 - DNA, 120 bp, Artificial Sequence
  ENSG00000181143_151 (sequence is synthesized)
gacacacactcagaacttgtgaccagctccttaccaagtgcaagtagcttctcaggtgagatactcacttctgaagcctccacaaatacagagacaattcacttttcagagaacacagca

SEQ ID NO: 638499 - DNA, 120 bp, Artificial Sequence
  ENSG00000181143_152 (sequence is synthesized)
gaaaccaatatggggaccaccaattctatgcataaactacattcctctgtctcaatccactcccagccatccggacacacacctccaaaggttactggatctatgatggaggacgctatt

SEQ ID NO: 638500 - DNA, 120 bp, Artificial Sequence
  ENSG00000181143_153 (sequence is synthesized)
gtttccacatcaacacctggttctcctgagactaaaaatgttgacagagactcaacatcccctctgactcctgaactgaaagaggacagcaccgccctggtgatgaactcaactacagag

SEQ ID NO: 638501 - DNA, 120 bp, Artificial Sequence
  ENSG00000181143_154 (sequence is synthesized)
tcaaacactgttttctccagtgtgtccctggatgctgctactgaggtctccagggcagaagtcacctactatgatcctacattcatgccagcttctgctcagtcaacaaagtccccagac

SEQ ID NO: 638502 - DNA, 120 bp, Artificial Sequence
  ENSG00000181143_155 (sequence is synthesized)
atttcacctgaagccagcagcagtcattctaactctcctcccttgacaatatctacacacaagaccatcgccacacaaacaggtccttctggggtgacatctcttggccaactgaccctg

SEQ ID NO: 638503 - DNA, 120 bp, Artificial Sequence
  ENSG00000181143_156 (sequence is synthesized)
gacacatcaaccatagccacctcagcaggaactccatcagccagaactcaggattttgtagattcagaaacaaccagtgtcatgaacaatgatctcaatgatgtgttgaagacaagccct

SEQ ID NO: 638504 - DNA, 120 bp, Artificial Sequence
  ENSG00000181143_157 (sequence is synthesized)
ttctctgcagaagaagccaactctctctcttctcaggcacctctccttgtgacaacctcaccttctcctgtaacttccacattgcaagagcacagtacctcctctcttgtttctgtgacc

SEQ ID NO: 638505 - DNA, 120 bp, Artificial Sequence
  ENSG00000181143_158 (sequence is synthesized)
tcagtacccacccctacactggcgaagatcacagacatggacacaaacttagaacctgtgactcgttcacctcaaaatttaaggaacaccttggccacttcagaagccaccacagataca

SEQ ID NO: 638506 - DNA, 120 bp, Artificial Sequence
  ENSG00000181143_159 (sequence is synthesized)
cacacaatgcatccttctataaacacagcagtggccaatgtggggaccaccagttcaccaaatgaattctattttactgtctcacctgactcagacccatataaagccacatccgcagta

SEQ ID NO: 638507 - DNA, 120 bp, Artificial Sequence
  ENSG00000181143_160 (sequence is synthesized)
gttatcacttccacctcgggggactcaatagtttccacatcaatgcctagatcctctgcgatgaaaaagattgagtctgagacaactttctccctgatatttagactgagggagactagc

SEQ ID NO: 638508 - DNA, 120 bp, Artificial Sequence
  ENSG00000181143_161 (sequence is synthesized)
acctcccagaaaattggctcatcctcagacacaagcacggtctttgacaaagcattcactgctgctactactgaggtctccagaacagaactcacctcctctagcagaacatccatccaa

SEQ ID NO: 638509 - DNA, 120 bp, Artificial Sequence
  ENSG00000181143_162 (sequence is synthesized)
ggcactgaaaagcccacaatgtcaccggacacctccacaagatctgtcaccatgctttctacttttgctggcctgacaaaatccgaagaaaggaccattgccacccaaacaggtcctcat

SEQ ID NO: 638510 - DNA, 120 bp, Artificial Sequence
  ENSG00000181143_163 (sequence is synthesized)
agggcgacatcacagggtacccttacctgggacacatcaatcacaacctcacaggcagggacccactcagctatgactcatggattttcacaattagatttgtccactcttacgagtaga

SEQ ID NO: 638511 - DNA, 120 bp, Artificial Sequence
  ENSG00000181143_164 (sequence is synthesized)
gttcctgagtacatatcagggacaagcccaccctctgtggaaaaaaccagctcttcctcttcccttctgtctttaccagcaataacctcaccgtcccctgtacctactacattaccagaa

SEQ ID NO: 638512 - DNA, 120 bp, Artificial Sequence
  ENSG00000181143_165 (sequence is synthesized)
agtaggccgtcttctcctgttcatctgacttcactccccacctctggcctagtgaagaccacagatatgctggcatctgtggccagtttacctccaaacttgggcagcacctcacataag

SEQ ID NO: 638513 - DNA, 120 bp, Artificial Sequence
  ENSG00000181143_166 (sequence is synthesized)
ataccgactacttcagaagacattaaagatacagagaaaatgtatccttccacaaacatagcagtaaccaatgtggggaccaccacttctgaaaaggaatcttattcgtctgtcccagcc

SEQ ID NO: 638514 - DNA, 120 bp, Artificial Sequence
  ENSG00000181143_167 (sequence is synthesized)
tactcagaaccacccaaagtcacctctccaatggttacctctttcaacataagggacaccattgtttccacatccatgcctggctcctctgagattacaaggattgagatggagtcaaca

SEQ ID NO: 638515 - DNA, 120 bp, Artificial Sequence
  ENSG00000181143_168 (sequence is synthesized)
ttctccctggctcatgggctgaagggaaccagcacctcccaggaccccatcgtatccacagagaaaagtgctgtccttcacaagttgaccactggtgctactgagacctctaggacagaa

SEQ ID NO: 638516 - DNA, 120 bp, Artificial Sequence
  ENSG00000181143_169 (sequence is synthesized)
gttgcctcttctagaagaacatccattccaggccctgatcattccacagagtcaccagacatctccactgaagtgatccccagcctgcctatctcccttggcattacagaatcttcaaat

SEQ ID NO: 638517 - DNA, 120 bp, Artificial Sequence
  ENSG00000181143_170 (sequence is synthesized)
atgaccatcatcactcgaacaggtcctcctcttggctctacatcacagggcacatttaccttggacacaccaactacatcctccagggcaggaacacactcgatggcgactcaggaattt

SEQ ID NO: 638518 - DNA, 120 bp, Artificial Sequence
  ENSG00000181143_171 (sequence is synthesized)
ccacactcagaaatgaccactgtcatgaacaaggaccctgagattctatcatggacaatccctccttctatagagaaaaccagcttctcctcttccctgatgccttcaccagccatgact

SEQ ID NO: 638519 - DNA, 120 bp, Artificial Sequence
  ENSG00000181143_172 (sequence is synthesized)
tcacctcctgtttcctcaacattaccaaagaccattcacaccactccttctcctatgacctcactgctcacccctagcctagtgatgaccacagacacattgggcacaagcccagaacct

SEQ ID NO: 638520 - DNA, 120 bp, Artificial Sequence
  ENSG00000181143_173 (sequence is synthesized)
acaaccagttcacctccaaatttgagcagtacctcacatgagatactgacaacagatgaagacaccacagctatagaagccatgcatccttccacaagcacagcagcgactaatgtggaa

SEQ ID NO: 638521 - DNA, 120 bp, Artificial Sequence
  ENSG00000181143_174 (sequence is synthesized)
accaccagttctggacatgggtcacaatcctctgtcctagctgactcagaaaaaaccaaggccacagctccaatggataccacctccaccatggggcatacaactgtttccacatcaatg

SEQ ID NO: 638522 - DNA, 120 bp, Artificial Sequence
  ENSG00000181143_175 (sequence is synthesized)
tctgtttcctctgagactacaaaaattaagagagagtcaacatattccttgactcctggactgagagagaccagcatttcccaaaatgccagcttttccactgacacaagtattgttctt

SEQ ID NO: 638523 - DNA, 120 bp, Artificial Sequence
  ENSG00000181143_176 (sequence is synthesized)
tcagaagtccccactggtactactgctgaggtctccaggacagaagtcacctcctctggtagaacatccatccctggcccttctcagtccacagttttgccagaaatatccacaagaaca

SEQ ID NO: 638524 - DNA, 120 bp, Artificial Sequence
  ENSG00000181143_177 (sequence is synthesized)
atgacaaggctctttgcctcgcccaccatgacagaatcagcagaaatgaccatccccactcaaacaggtccttctgggtctacctcacaggatacccttaccttggacacatccaccaca

SEQ ID NO: 638525 - DNA, 120 bp, Artificial Sequence
  ENSG00000181143_178 (sequence is synthesized)
aagtcccaggcaaagactcattcaactttgactcagagatttccacactcagagatgaccactctcatgagcagaggtcctggagatatgtcatggcaaagctctccctctctggaaaat

SEQ ID NO: 638526 - DNA, 120 bp, Artificial Sequence
  ENSG00000181143_179 (sequence is synthesized)
cccagctctctcccttccctgctgtctttacctgccacaacctcacctcctcccatttcctccacattaccagtgactatctcctcctctcctcttcctgtgacttcacttctcacctct

SEQ ID NO: 638527 - DNA, 120 bp, Artificial Sequence
  ENSG00000181143_180 (sequence is synthesized)
agcccggtaacgaccacagacatgttacacacaagcccagaacttgtaaccagttcacctccaaagctgagccacacttcagatgagagactgaccactggcaaggacaccacaaataca

SEQ ID NO: 638528 - DNA, 120 bp, Artificial Sequence
  ENSG00000181143_181 (sequence is synthesized)
gaagctgtgcatccttccacaaacacagcagcgtccaatgtggagattcccagctctggacatgaatccccttcctctgccttagctgactcagagacatccaaagccacatcaccaatg

SEQ ID NO: 638529 - DNA, 120 bp, Artificial Sequence
  ENSG00000181143_182 (sequence is synthesized)
aggaggatacaactgttgccatatcaacccctcacttcttggagactagcagaattcagaaagagtcaatttcctccctgagccctaaattgagggagacaggcagttctgtggagacaa

SEQ ID NO: 638530 - DNA, 120 bp, Artificial Sequence
  ENSG00000181143_183 (sequence is synthesized)
gctcagccatagagacaagtgctgtcctttctgaagtgtccattggtgctactactgagatctccaggacagaagtcacctcctctagcagaacatccatctctggttctgctgagtcca

SEQ ID NO: 638531 - DNA, 120 bp, Artificial Sequence
  ENSG00000181143_184 (sequence is synthesized)
caatgttgccagaaatatccaccacaagaaaaatcattaagttccctacttcccccatcctggcagaatcatcagaaatgaccatcaagacccaaacaagtcctcctgggtctacatcag

SEQ ID NO: 638532 - DNA, 120 bp, Artificial Sequence
  ENSG00000181143_185 (sequence is synthesized)
agagtacctttacattagacacatcaaccactccctccttggtaataacccattcgactatgactcagagattgccacactcagagataaccactcttgtgagtagaggtgctggggatg

SEQ ID NO: 638533 - DNA, 120 bp, Artificial Sequence
  ENSG00000181143_186 (sequence is synthesized)
tgccacggcccagctctctccctgtggaagaaacaagccctccatcttcccagctgtctttatctgccatgatctcaccttctcctgtttcttccacattaccagcaagtagccactcct

SEQ ID NO: 638534 - DNA, 120 bp, Artificial Sequence
  ENSG00000181143_187 (sequence is synthesized)
cttctgcttctgtgacttcacttctcacaccaggccaagtgaagactactgaggtgttggacgcaagtgcagaacctgaaaccagttcacctccaagtttgagcagcacctcagttgaaa

SEQ ID NO: 638535 - DNA, 120 bp, Artificial Sequence
  ENSG00000181143_188 (sequence is synthesized)
tactggccacctctgaagtcaccacagatacggagaaaattcatcctttctcaaacacggcagtaaccaaagttggaacttccagttctggacatgaatccccttcctctgtcctacctg

SEQ ID NO: 638536 - DNA, 120 bp, Artificial Sequence
  ENSG00000181143_189 (sequence is synthesized)
actcagagacaaccaaagccacatcggcaatgggtaccatctccattatgggggatacaagtgtttctacattaactcctgccttatctaacactaggaaaattcagtcagagccagctt

SEQ ID NO: 638537 - DNA, 120 bp, Artificial Sequence
  ENSG00000181143_190 (sequence is synthesized)
cctcactgaccaccagattgagggagaccagcacctctgaagagaccagcttagccacagaagcaaacactgttctttctaaagtgtccactggtgctactactgaggtctccaggacag

SEQ ID NO: 638538 - DNA, 120 bp, Artificial Sequence
  ENSG00000181143_191 (sequence is synthesized)
aagccatctcctttagcagaacatccatgtcaggccctgagcagtccacaatgtcacaagacatctccataggaaccatccccaggatttctgcctcctctgtcctgacagaatctgcaa

SEQ ID NO: 638539 - DNA, 120 bp, Artificial Sequence
  ENSG00000181143_192 (sequence is synthesized)
aaatgaccatcacaacccaaacaggtccttcggagtctacactagaaagtacccttaatttgaacacagcaaccacaccctcttgggtggaaacccactctatagtaattcagggatttc

SEQ ID NO: 638540 - DNA, 120 bp, Artificial Sequence
  ENSG00000181143_193 (sequence is synthesized)
cacacccagagatgaccacttccatgggcagaggtcctggaggtgtgtcatggcctagccctccctttgtgaaagaaaccagccctccatcctccccgctgtctttacctgccgtgacct

SEQ ID NO: 638541 - DNA, 120 bp, Artificial Sequence
  ENSG00000181143_194 (sequence is synthesized)
cacctcatcctgtttccaccacattcctagcacatatccccccctctccccttcctgtgacttcacttctcacctctggcccggcgacaaccacagatatcttgggtacaagcacagaac

SEQ ID NO: 638542 - DNA, 120 bp, Artificial Sequence
  ENSG00000181143_195 (sequence is synthesized)
ctggaaccagttcatcttcaagtttgagcaccacctcccatgagagactgaccacttacaaagacactgcacatacagaagccgtgcatccttccacaaacacaggagggaccaatgtgg

SEQ ID NO: 638543 - DNA, 120 bp, Artificial Sequence
  ENSG00000181143_196 (sequence is synthesized)
caaccaccagctctggatataaatcacagtcctctgtcctagctgactcatctccaatgtgtaccacctccaccatgggggatacaagtgttctcacatcaactcctgccttccttgaga

SEQ ID NO: 638544 - DNA, 120 bp, Artificial Sequence
  ENSG00000181143_197 (sequence is synthesized)
ctaggaggattcagacagagctagcttcctccctgacccctggattgagggagtccagcggctctgaagggaccagctcaggcaccaagatgagcactgtcctctctaaagtgcccactg

SEQ ID NO: 638545 - DNA, 120 bp, Artificial Sequence
  ENSG00000181143_198 (sequence is synthesized)
gtgctactactgagatctccaaggaagacgtcacctccatcccaggtcccgctcaatccacaatatcaccagacatctccacaagaaccgtcagctggttctctacatcccctgtcatga

SEQ ID NO: 638546 - DNA, 120 bp, Artificial Sequence
  ENSG00000181143_199 (sequence is synthesized)
cagaatcagcagaaataaccatgaacacccatacaagtcctttaggggccacaacacaaggcaccagtactttggacacgtcaagcacaacctctttgacaatgacacactcaactatat

SEQ ID NO: 638547 - DNA, 120 bp, Artificial Sequence
  ENSG00000181143_200 (sequence is synthesized)
ctcaaggattttcacactcacagatgagcactcttatgaggaggggtcctgaggatgtatcatggatgagccctccccttctggaaaaaactagaccttccttttctctgatgtcttcac

SEQ ID NO: 638548 - DNA, 120 bp, Artificial Sequence
  ENSG00000181143_201 (sequence is synthesized)
cagccacaacttcaccttctcctgtttcctccacattaccagagagcatctcttcctctcctcttcctgtgacttcactcctcacgtctggcttggcaaaaactacagatatgttgcaca

SEQ ID NO: 638549 - DNA, 120 bp, Artificial Sequence
  ENSG00000181143_202 (sequence is synthesized)
aaagctcagaacctgtaaccaactcacctgcaaatttgagcagcacctcagttgaaatactggccacctctgaagtcaccacagatacagagaaaactcatccttcttcaaacagaacag

SEQ ID NO: 638550 - DNA, 120 bp, Artificial Sequence
  ENSG00000181143_203 (sequence is synthesized)
tgaccgatgtggggacctccagttctggacatgaatccacttcctttgtcctagctgactcacagacatccaaagtcacatctccaatggttattacctccaccatggaggatacgagtg

SEQ ID NO: 638551 - DNA, 120 bp, Artificial Sequence
  ENSG00000181143_204 (sequence is synthesized)
tctccacatcaactcctggcttttttgagactagcagaattcagacagaaccaacatcctccctgacccttggactgagaaagaccagcagctctgaggggaccagcttagccacagaga

SEQ ID NO: 638552 - DNA, 120 bp, Artificial Sequence
  ENSG00000181143_205 (sequence is synthesized)
tgagcactgtcctttctggagtgcccactggtgccactgctgaagtctccaggacagaagtcacctcctctagcagaacatccatctcaggctttgctcagctcacagtgtcaccagaga

SEQ ID NO: 638553 - DNA, 120 bp, Artificial Sequence
  ENSG00000181143_206 (sequence is synthesized)
cttccacagaaaccatcaccagactccctacctccagcataatgacagaatcagcagaaatgatgatcaagacacaaacagatcctcctgggtctacaccagagagtactcatactgtgg

SEQ ID NO: 638554 - DNA, 120 bp, Artificial Sequence
  ENSG00000181143_207 (sequence is synthesized)
acatatcaacaacacccaactgggtagaaacccactcgactgtgactcagagattttcacactcagagatgaccactcttgtgagcagaagccctggtgatatgttatggcctagtcaat

SEQ ID NO: 638555 - DNA, 120 bp, Artificial Sequence
  ENSG00000181143_208 (sequence is synthesized)
cctctgtggaagaaaccagctctgcctcttccctgctgtctctgcctgccacgacctcaccttctcctgtttcctctacattagtagaggatttcccttccgcttctcttcctgtgactt

SEQ ID NO: 638556 - DNA, 120 bp, Artificial Sequence
  ENSG00000181143_209 (sequence is synthesized)
ctcttctcaaccctggcctggtgataaccacagacaggatgggcataagcagagaacctggaaccagttccacttcaaatttgagcagcacctcccatgagagactgaccactttggaag

SEQ ID NO: 638557 - DNA, 120 bp, Artificial Sequence
  ENSG00000181143_210 (sequence is synthesized)
acactgtagatacagaagacatgcagccttccacacacacagcagtgaccaacgtgaggacctccatttctggacatgaatcacaatcttctgtcctatctgactcagagacacccaaag

SEQ ID NO: 638558 - DNA, 120 bp, Artificial Sequence
  ENSG00000181143_211 (sequence is synthesized)
ccacatctccaatgggtaccacctacaccatgggggaaacgagtgtttccatatccacttctgacttctttgagaccagcagaattcagatagaaccaacatcctccctgacttctggat

SEQ ID NO: 638559 - DNA, 120 bp, Artificial Sequence
  ENSG00000181143_212 (sequence is synthesized)
tgagggagaccagcagctctgagaggatcagctcagccacagagggaagcactgtcctttctgaagtgcccagtggtgctaccactgaggtctccaggacagaagtgatatcctctaggg

SEQ ID NO: 638560 - DNA, 120 bp, Artificial Sequence
  ENSG00000181143_213 (sequence is synthesized)
gaacatccatgtcagggcctgatcagttcaccatatcaccagacatctctactgaagcgatcaccaggctttctacttcccccattatgacagaatcagcagaaagtgccatcactattg

SEQ ID NO: 638561 - DNA, 120 bp, Artificial Sequence
  ENSG00000181143_214 (sequence is synthesized)
agacaggttctcctggggctacatcagagggtaccctcaccttggacacctcaacaacaaccttttggtcagggacccactcaactgcatctccaggattttcacactcagagatgacca

SEQ ID NO: 638562 - DNA, 120 bp, Artificial Sequence
  ENSG00000181143_215 (sequence is synthesized)
ctcttatgagtagaactcctggagatgtgccatggccgagccttccctctgtggaagaagccagctctgtctcttcctcactgtcttcacctgccatgacctcaacttcttttttctcca

SEQ ID NO: 638563 - DNA, 120 bp, Artificial Sequence
  ENSG00000181143_216 (sequence is synthesized)
cattaccagagagcatctcctcctctcctcatcctgtgactgcacttctcacccttggcccagtgaagaccacagacatgttgcgcacaagctcagaacctgaaaccagttcacctccaa

SEQ ID NO: 638564 - DNA, 120 bp, Artificial Sequence
  ENSG00000181143_217 (sequence is synthesized)
atttgagcagcacctcagctgaaatattagccacgtctgaagtcaccaaagatagagagaaaattcatccctcctcaaacacacctgtagtcaatgtagggactgtgatttataaacatc

SEQ ID NO: 638565 - DNA, 120 bp, Artificial Sequence
  ENSG00000181143_218 (sequence is synthesized)
tatccccttcctctgttttggctgacttagtgacaacaaaacccacatctccaatggctaccacctccactctggggaatacaagtgtttccacatcaactcctgccttcccagaaacta

SEQ ID NO: 638566 - DNA, 120 bp, Artificial Sequence
  ENSG00000181143_219 (sequence is synthesized)
tgatgacacagccaacttcctccctgacttctggattaagggagatcagtacctctcaagagaccagctcagcaacagagagaagtgcttctctttctggaatgcccactggtgctacta

SEQ ID NO: 638567 - DNA, 120 bp, Artificial Sequence
  ENSG00000181143_220 (sequence is synthesized)
ctaaggtctccagaacagaagccctctccttaggcagaacatccaccccaggtcctgctcaatccacaatatcaccagaaatctccacggaaaccatcactagaatttctactcccctca

SEQ ID NO: 638568 - DNA, 120 bp, Artificial Sequence
  ENSG00000181143_221 (sequence is synthesized)
ccacgacaggatcagcagaaatgaccatcacccccaaaacaggtcattctggggcatcctcacaaggtacctttaccttggacacatcaagcagagcctcctggccaggaactcactcag

SEQ ID NO: 638569 - DNA, 120 bp, Artificial Sequence
  ENSG00000181143_222 (sequence is synthesized)
ctgcaactcacagatctccacactcagggatgaccactcctatgagcagaggtcctgaggatgtgtcatggccaagccgcccatcagtggaaaaaactagccctccatcttccctggtgt

SEQ ID NO: 638570 - DNA, 120 bp, Artificial Sequence
  ENSG00000181143_223 (sequence is synthesized)
ctttatctgcagtaacctcaccttcgccactttattccacaccatctgagagtagccactcatctcctctccgggtgacttctcttttcacccctgtcatgatgaagaccacagacatgt

SEQ ID NO: 638571 - DNA, 120 bp, Artificial Sequence
  ENSG00000181143_224 (sequence is synthesized)
tggacacaagcttggaacctgtgaccacttcacctcccagtatgaatatcacctcagatgagagtctggccacttctaaagccaccatggagacagaggcaattcagctttcagaaaaca

SEQ ID NO: 638572 - DNA, 120 bp, Artificial Sequence
  ENSG00000181143_225 (sequence is synthesized)
cagctgtgactcagatgggcaccatcagcgctagacaagaattctattcctcttatccaggcctcccagagccatccaaagtgacatctccagtggtcacctcttccaccataaaagaca

SEQ ID NO: 638573 - DNA, 120 bp, Artificial Sequence
  ENSG00000181143_226 (sequence is synthesized)
ttgtttctacaaccatacctgcttcctctgagataacaagaattgagatggagtcaacatccaccctgacccccacaccaagggagaccagcacctcccaggagatccactcagccacaa

SEQ ID NO: 638574 - DNA, 120 bp, Artificial Sequence
  ENSG00000181143_227 (sequence is synthesized)
agccaagcactgttccttacaaggcactcactagtgccacgattgaggactccatgacacaagtcatgtcctctagcagaggacctagccctgatcagtccacaatgtcacaagacatat

SEQ ID NO: 638575 - DNA, 120 bp, Artificial Sequence
  ENSG00000181143_228 (sequence is synthesized)
ccactgaagtgatcaccaggctctctacctcccccatcaagacagaatctacagaaatgaccattaccacccaaacaggttctcctggggctacatcaaggggtacccttaccttggaca

SEQ ID NO: 638576 - DNA, 120 bp, Artificial Sequence
  ENSG00000181143_229 (sequence is synthesized)
cttcaacaacttttatgtcagggacccactcaactgcatctcaaggattttcacactcacagatgaccgctcttatgagtagaactcctggagatgtgccatggctaagccatccctctg

SEQ ID NO: 638577 - DNA, 120 bp, Artificial Sequence
  ENSG00000181143_230 (sequence is synthesized)
tggaagaagccagctctgcctctttctcactgtcttcacctgtcatgacctcatcttctcccgtttcttccacattaccagacagcatccactcttcttcgcttcctgtgacatcacttc

SEQ ID NO: 638578 - DNA, 120 bp, Artificial Sequence
  ENSG00000181143_231 (sequence is synthesized)
tcacctcagggctggtgaagaccacagagctgttgggcacaagctcagaacctgaaaccagttcacccccaaatttgagcagcacctcagctgaaatactggccatcactgaagtcacta

SEQ ID NO: 638579 - DNA, 120 bp, Artificial Sequence
  ENSG00000181143_232 (sequence is synthesized)
cagatacagagaaactggagatgaccaatgtggtaacctcaggttatacacatgaatctccttcctctgtcctagctgactcagtgacaacaaaggccacatcttcaatgggtatcacct

SEQ ID NO: 638580 - DNA, 120 bp, Artificial Sequence
  ENSG00000181143_233 (sequence is synthesized)
accccacaggagatacaaatgttctcacatcaacccctgccttctctgacaccagtaggattcaaacaaagtcaaagctctcactgactcctgggttgatggagaccagcatctctgaag

SEQ ID NO: 638581 - DNA, 120 bp, Artificial Sequence
  ENSG00000181143_234 (sequence is synthesized)
agaccagctctgccacagaaaaaagcactgtcctttctagtgtgcccactggtgctactactgaggtctccaggacagaagccatctcttctagcagaacatccatcccaggccctgctc

SEQ ID NO: 638582 - DNA, 120 bp, Artificial Sequence
  ENSG00000181143_235 (sequence is synthesized)
aatccacaatgtcatcagacacctccatggaaaccatcactagaatttctacccccctcacaaggaaagaatcaacagacatggccatcacccccaaaacaggtccttctggggctacct

SEQ ID NO: 638583 - DNA, 120 bp, Artificial Sequence
  ENSG00000181143_236 (sequence is synthesized)
cgcagggtacctttaccttggactcatcaagcacagcctcctggccaggaactcactcagctacaactcagagatttccacagtcagtggtgacaactcctatgagcagaggtcctgagg

SEQ ID NO: 638584 - DNA, 120 bp, Artificial Sequence
  ENSG00000181143_237 (sequence is synthesized)
atgtgtcatggccaagcccgctgtctgtggaaaaaaacagccctccatcttccctggtatcttcatcttcagtaacctcaccttcgccactttattccacaccatctgggagtagccact

SEQ ID NO: 638585 - DNA, 120 bp, Artificial Sequence
  ENSG00000181143_238 (sequence is synthesized)
cctctcctgtccctgtcacttctcttttcacctctatcatgatgaaggccacagacatgttggatgcaagtttggaacctgagaccacttcagctcccaatatgaatatcacctcagatg

SEQ ID NO: 638586 - DNA, 120 bp, Artificial Sequence
  ENSG00000181143_239 (sequence is synthesized)
agagtctggccgcttctaaagccaccacggagacagaggcaattcacgtttttgaaaatacagcagcgtcccatgtggaaaccaccagtgctacagaggaactctattcctcttccccag

SEQ ID NO: 638587 - DNA, 120 bp, Artificial Sequence
  ENSG00000181143_240 (sequence is synthesized)
gcttctcagagccaacaaaagtgatatctccagtggtcacctcttcctctataagagacaacatggtttccacaacaatgcctggctcctctggcattacaaggattgagatagagtcaa

SEQ ID NO: 638588 - DNA, 120 bp, Artificial Sequence
  ENSG00000181143_241 (sequence is synthesized)
tgtcatctctgacccctggactgagggagaccagaacctcccaggacatcacctcatccacagagacaagcactgtcctttacaagatgccctctggtgccactcctgaggtctccagga

SEQ ID NO: 638589 - DNA, 120 bp, Artificial Sequence
  ENSG00000181143_242 (sequence is synthesized)
cagaagttatgccctctagcagaacatccattcctggccctgctcagtccacaatgtcactagacatctccgatgaagttgtcaccaggctgtctacctctcccatcatgacagaatctg

SEQ ID NO: 638590 - DNA, 120 bp, Artificial Sequence
  ENSG00000181143_243 (sequence is synthesized)
cagaaataaccatcaccacccaaacaggttattctctggctacatcccaggttacccttcccttgggcacctcaatgacctttttgtcagggacccactcaactatgtctcaaggacttt

SEQ ID NO: 638591 - DNA, 120 bp, Artificial Sequence
  ENSG00000181143_244 (sequence is synthesized)
cacactcagagatgaccaatcttatgagcaggggtcctgaaagtctgtcatggacgagccctcgctttgtggaaacaactagatcttcctcttctctgacatcattacctctcacgacct

SEQ ID NO: 638592 - DNA, 120 bp, Artificial Sequence
  ENSG00000181143_245 (sequence is synthesized)
cactttctcctgtgtcctccacattactagacagtagcccctcctctcctcttcctgtgacttcacttatcctcccaggcctggtgaagactacagaagtgttggatacaagctcagagc

SEQ ID NO: 638593 - DNA, 120 bp, Artificial Sequence
  ENSG00000181143_246 (sequence is synthesized)
ctaaaaccagttcatctccaaatttgagcagcacctcagttgaaataccggccacctctgaaatcatgacagatacagagaaaattcatccttcctcaaacacagcggtggccaaagtga

SEQ ID NO: 638594 - DNA, 120 bp, Artificial Sequence
  ENSG00000181143_247 (sequence is synthesized)
ggacctccagttctgttcatgaatctcattcctctgtcctagctgactcagaaacaaccataaccataccttcaatgggtatcacctccgctgtggacgataccactgttttcacatcaa

SEQ ID NO: 638595 - DNA, 120 bp, Artificial Sequence
  ENSG00000181143_248 (sequence is synthesized)
atcctgccttctctgagactaggaggattccgacagagccaacattctcattgactcctggattcagggagactagcacctctgaagagaccacctcaatcacagaaacaagtgcagtcc

SEQ ID NO: 638596 - DNA, 120 bp, Artificial Sequence
  ENSG00000181143_249 (sequence is synthesized)
tttatggagtgcccactagtgctactactgaagtctccatgacagaaatcatgtcctctaatagaatacacatccctgactctgatcagtccacgatgtctccagacatcatcactgaag

SEQ ID NO: 638597 - DNA, 120 bp, Artificial Sequence
  ENSG00000181143_250 (sequence is synthesized)
tgatcaccaggctctcttcctcatccatgatgtcagaatcaacacaaatgaccatcaccacccaaaaaagttctcctggggctacagcacagagtactcttaccttggccacaacaacag

SEQ ID NO: 638598 - DNA, 120 bp, Artificial Sequence
  ENSG00000181143_251 (sequence is synthesized)
cccccttggcaaggacccactcaactgttcctcctagatttttacactcagagatgacaactcttatgagtaggagtcctgaaaatccatcatggaagagctctctctttgtggaaaaaa

SEQ ID NO: 638599 - DNA, 120 bp, Artificial Sequence
  ENSG00000181143_252 (sequence is synthesized)
ctagctcttcatcttctctgttgtccttacctgtcacgacctcaccttctgtttcttccacattaccgcagagtatcccttcctcctctttttctgtgacttcactcctcaccccaggca

SEQ ID NO: 638600 - DNA, 120 bp, Artificial Sequence
  ENSG00000181143_253 (sequence is synthesized)
tggtgaagactacagacacaagcacagaacctggaaccagtttatctccaaatctgagtggcacctcagttgaaatactggctgcctctgaagtcaccacagatacagagaaaattcatc

SEQ ID NO: 638601 - DNA, 120 bp, Artificial Sequence
  ENSG00000181143_254 (sequence is synthesized)
cttcttcaagcatggcagtgaccaatgtgggaaccaccagttctggacatgaactatattcctctgtttcaatccactcggagccatccaaggctacatacccagtgggtactccctctt

SEQ ID NO: 638602 - DNA, 120 bp, Artificial Sequence
  ENSG00000181143_255 (sequence is synthesized)
ccatggctgaaacctctatttccacatcaatgcctgctaattttgagaccacaggatttgaggctgagccattttctcatttgacttctggatttaggaagacaaacatgtccctggaca

SEQ ID NO: 638603 - DNA, 120 bp, Artificial Sequence
  ENSG00000181143_256 (sequence is synthesized)
ccagctcagtcacaccaacaaatacaccttcttctcctgggtccactcaccttttacagagttccaagactgatttcacctcttctgcaaaaacatcatccccagactggcctccagcct

SEQ ID NO: 638604 - DNA, 120 bp, Artificial Sequence
  ENSG00000181143_257 (sequence is synthesized)
cacagtatactgaaattccagtggacataatcaccccctttaatgcttctccatctattacggagtccactgggataacctccttcccagaatccaggtttactatgtctgtaacagaaa

SEQ ID NO: 638605 - DNA, 120 bp, Artificial Sequence
  ENSG00000181143_258 (sequence is synthesized)
gtactcatcatctgagtacagatttgctgccttcagctgagactatttccactggcacagtgatgccttctctatcagaggccatgacttcatttgccaccactggagttccacgagcca

SEQ ID NO: 638606 - DNA, 120 bp, Artificial Sequence
  ENSG00000181143_259 (sequence is synthesized)
tctcaggttcaggtagtccattctctaggacagagtcaggccctggggatgctactctgtccaccattgcagagagcctgccttcatccactcctgtgccattctcctcttcaaccttca

SEQ ID NO: 638607 - DNA, 120 bp, Artificial Sequence
  ENSG00000181143_260 (sequence is synthesized)
ctaccactgattcttcaaccatcccagccctccatgagataacttcctcttcagctaccccatatagagtggacaccagtcttgggacagagagcagcactactgaaggacgcttggtta

SEQ ID NO: 638608 - DNA, 120 bp, Artificial Sequence
  ENSG00000181143_261 (sequence is synthesized)
tggtcagtactttggacacttcaagccaaccaggcaggacatcttcatcacccattttggataccagaatgacagagagcgttgagctgggaacagtgacaagtgcttatcaagttcctt

SEQ ID NO: 638609 - DNA, 120 bp, Artificial Sequence
  ENSG00000181143_262 (sequence is synthesized)
cactctcaacacggttgacaagaactgatggcattatggaacacatcacaaaaatacccaatgaagcagcacacagaggtaccataagaccagtcaaaggccctcagacatccacttcgc

SEQ ID NO: 638610 - DNA, 120 bp, Artificial Sequence
  ENSG00000181143_263 (sequence is synthesized)
ctgccagtcctaaaggactacacacaggagggacaaaaagaatggagaccaccaccacagctctgaagaccaccaccacagctctgaagaccacttccagagccaccttgaccaccagtg

SEQ ID NO: 638611 - DNA, 120 bp, Artificial Sequence
  ENSG00000181143_264 (sequence is synthesized)
tctatactcccactttgggaacactgactcccctcaatgcatcaatgcaaatggccagcacaatccccacagaaatgatgatcacaaccccatatgttttccctgatgttccagaaacga

SEQ ID NO: 638612 - DNA, 120 bp, Artificial Sequence
  ENSG00000181143_265 (sequence is synthesized)
catcctcattggctaccagcctgggagcagaaaccagcacagctcttcccaggacaaccccatctgttttcaatagagaatcagagaccacagcctcactggtctctcgttctggggcag

SEQ ID NO: 638613 - DNA, 120 bp, Artificial Sequence
  ENSG00000181143_266 (sequence is synthesized)
agagaagtccggttattcaaactctagatgtttcttctagtgagccagatacaacagcttcatgggttatccatcctgcagagaccatcccaactgtttccaagacaacccccaattttt

SEQ ID NO: 638614 - DNA, 120 bp, Artificial Sequence
  ENSG00000181143_267 (sequence is synthesized)
tccacagtgaattagacactgtatcttccacagccaccagtcatggggcagacgtcagctcagccattccaacaaatatctcacctagtgaactagatgcactgaccccactggtcacta

SEQ ID NO: 638615 - DNA, 120 bp, Artificial Sequence
  ENSG00000181143_268 (sequence is synthesized)
tttcggggacagatactagtacaacattcccaacactgactaagtccccacatgaaacagagacaagaaccacatggctcactcatcctgcagagaccagctcaactattcccagaacaa

SEQ ID NO: 638616 - DNA, 120 bp, Artificial Sequence
  ENSG00000181143_269 (sequence is synthesized)
tccccaatttttctcatcatgaatcagatgccacaccttcaatagccaccagtcctggggcagaaaccagttcagctattccaattatgactgtctcacctggtgcagaagatctggtga

SEQ ID NO: 638617 - DNA, 120 bp, Artificial Sequence
  ENSG00000181143_270 (sequence is synthesized)
cctcacaggtcactagttctgggacagacagaaatatgactattccaactttgactctttctcctggtgaaccaaagacgatagcctcattagtcacccatcctgaagcacagacaagtt

SEQ ID NO: 638618 - DNA, 120 bp, Artificial Sequence
  ENSG00000181143_271 (sequence is synthesized)
cggccattccaacttcaactatctcgcctgctgtatcacggttggtgacctcaatggtcaccagtttggcggcaaagacaagtacaactaatcgagctctgacaaactcccctggtgaac

SEQ ID NO: 638619 - DNA, 120 bp, Artificial Sequence
  ENSG00000181143_272 (sequence is synthesized)
cagctacaacagtttcattggtcacgcatcctgcacagaccagcccaacagttccctggacaacttccatttttttccatagtaaatcagacaccacaccttcaatgaccaccagtcatg

SEQ ID NO: 638620 - DNA, 120 bp, Artificial Sequence
  ENSG00000181143_273 (sequence is synthesized)
gggcagaatccagttcagctgttccaactccaactgtttcaactgaggtaccaggagtagtgacccctttggtcaccagttctagggcagtgatcagtacaactattccaattctgactc

SEQ ID NO: 638621 - DNA, 120 bp, Artificial Sequence
  ENSG00000181143_274 (sequence is synthesized)
tttctcctggtgaaccagagaccacaccttcaatggccaccagtcatggggaagaagccagttctgctattccaactccaactgtttcacctggggtaccaggagtggtgacctctctgg

SEQ ID NO: 638622 - DNA, 120 bp, Artificial Sequence
  ENSG00000181143_275 (sequence is synthesized)
tcactagttctagggcagtgactagtacaactattccaattctgactttttctcttggtgaaccagagaccacaccttcaatggccaccagtcatgggacagaagctggctcagctgttc

SEQ ID NO: 638623 - DNA, 120 bp, Artificial Sequence
  ENSG00000181143_276 (sequence is synthesized)
caactgttttacctgaggtaccaggaatggtgacctctctggttgctagttctagggcagtaaccagtacaactcttccaactctgactctttctcctggtgaaccagagaccacacctt

SEQ ID NO: 638624 - DNA, 120 bp, Artificial Sequence
  ENSG00000181143_277 (sequence is synthesized)
caatggccaccagtcatggggcagaagccagctcaactgttccaactgtttcacctgaggtaccaggagtggtgacctctctggtcactagttctagtggagtaaacagtacaagtattc

SEQ ID NO: 638625 - DNA, 120 bp, Artificial Sequence
  ENSG00000181143_278 (sequence is synthesized)
caactctgattctttctcctggtgaactagaaaccacaccttcaatggccaccagtcatggggcagaagccagctcagctgttccaactccaactgtttcacctggggtatcaggagtgg

SEQ ID NO: 638626 - DNA, 120 bp, Artificial Sequence
  ENSG00000181143_279 (sequence is synthesized)
tgacccctctggtcactagttccagggcagtgaccagtacaactattccaattctaactctttcttctagtgagccagagaccacaccttcaatggccaccagtcatggggtagaagcca

SEQ ID NO: 638627 - DNA, 120 bp, Artificial Sequence
  ENSG00000181143_280 (sequence is synthesized)
gctcagctgttctaactgtttcacctgaggtaccaggaatggtgacctctctggtcactagttctagagcagtaaccagtacaactattccaactctgactatttcttctgatgaaccag

SEQ ID NO: 638628 - DNA, 120 bp, Artificial Sequence
  ENSG00000181143_281 (sequence is synthesized)
agaccacaacttcattggtcacccattctgaggcaaagatgatttcagccattccaactttagctgtctcccctactgtacaagggctggtgacttcactggtcactagttctgggtcag

SEQ ID NO: 638629 - DNA, 120 bp, Artificial Sequence
  ENSG00000181143_282 (sequence is synthesized)
agaccagtgcgttttcaaatctaactgttgcctcaagtcaaccagagaccatagactcatgggtcgctcatcctgggacagaagcaagttctgttgttccaactttgactgtctccactg

SEQ ID NO: 638630 - DNA, 120 bp, Artificial Sequence
  ENSG00000181143_283 (sequence is synthesized)
gtgagccgtttacaaatatctcattggtcacccatcctgcagagagtagctcaactcttcccaggacaacctcaaggttttcccacagtgaattagacactatgccttctacagtcacca

SEQ ID NO: 638631 - DNA, 120 bp, Artificial Sequence
  ENSG00000181143_284 (sequence is synthesized)
gtcctgaggcagaatccagctcagccatttcaacaactatttcacctggtataccaggtgtgctgacatcactggtcactagctctgggagagacatcagtgcaacttttccaacagtgc

SEQ ID NO: 638632 - DNA, 120 bp, Artificial Sequence
  ENSG00000181143_285 (sequence is synthesized)
ctgagtccccacatgaatcagaggcaacagcctcatgggttactcatcctgcagtcaccagcacaacagttcccaggacaacccctaattattctcatagtgaaccagacaccacaccat

SEQ ID NO: 638633 - DNA, 120 bp, Artificial Sequence
  ENSG00000181143_286 (sequence is synthesized)
caatagccaccagtcctggggcagaagccacttcagattttccaacaataactgtctcacctgatgtaccagatatggtaacctcacaggtcactagttctgggacagacaccagtataa

SEQ ID NO: 638634 - DNA, 120 bp, Artificial Sequence
  ENSG00000181143_287 (sequence is synthesized)
ctattccaactctgactctttcttctggtgagccagagaccacaacctcatttatcacctattctgagacacacacaagttcagccattccaactctccctgtctcccctggtgcatcaa

SEQ ID NO: 638635 - DNA, 120 bp, Artificial Sequence
  ENSG00000181143_288 (sequence is synthesized)
agatgctgacctcactggtcatcagttctgggacagacagcactacaactttcccaacactgacggagaccccatatgaaccagagacaacagccatacagctcattcatcctgcagaga

SEQ ID NO: 638636 - DNA, 120 bp, Artificial Sequence
  ENSG00000181143_289 (sequence is synthesized)
ccaacacaatggttcccaggacaactcccaagttttcccatagtaagtcagacaccacactcccagtagccatcaccagtcctgggccagaagccagttcagctgtttcaacgacaacta

SEQ ID NO: 638637 - DNA, 120 bp, Artificial Sequence
  ENSG00000181143_290 (sequence is synthesized)
tctcacctgatatgtcagatctggtgacctcactggtccctagttctgggacagacaccagtacaaccttcccaacattgagtgagaccccatatgaaccagagactacagccacgtggc

SEQ ID NO: 638638 - DNA, 120 bp, Artificial Sequence
  ENSG00000181143_291 (sequence is synthesized)
tcactcatcctgcagaaaccagcacaacggtttctgggacaattcccaacttttcccataggggatcagacactgcaccctcaatggtcaccagtcctggagtagacacgaggtcaggtg

SEQ ID NO: 638639 - DNA, 120 bp, Artificial Sequence
  ENSG00000181143_292 (sequence is synthesized)
ttccaactacaaccatcccacccagtataccaggggtagtgacctcacaggtcactagttctgcaacagacactagtacagctattccaactttgactccttctcctggtgaaccagaga

SEQ ID NO: 638640 - DNA, 120 bp, Artificial Sequence
  ENSG00000181143_293 (sequence is synthesized)
ccacagcctcatcagctacccatcctgggacacagactggcttcactgttccaattcggactgttccctctagtgagccagatacaatggcttcctgggtcactcatcctccacagacca

SEQ ID NO: 638641 - DNA, 120 bp, Artificial Sequence
  ENSG00000181143_294 (sequence is synthesized)
gcacacctgtttccagaacaacctccagtttttcccatagtagtccagatgccacacctgtaatggccaccagtcctaggacagaagccagttcagctgtactgacaacaatctcacctg

SEQ ID NO: 638642 - DNA, 120 bp, Artificial Sequence
  ENSG00000181143_295 (sequence is synthesized)
gtgcaccagagatggtgacttcacagatcactagttctggggcagcaaccagtacaactgttccaactttgactcattctcctggtatgccagagaccacagccttattgagcacccatc

SEQ ID NO: 638643 - DNA, 120 bp, Artificial Sequence
  ENSG00000181143_296 (sequence is synthesized)
ccagaacagagacaagtaaaacatttcctgcttcaactgtgtttcctcaagtatcagagaccacagcctcactcaccattagacctggtgcagagactagcacagctctcccaactcaga

SEQ ID NO: 638644 - DNA, 120 bp, Artificial Sequence
  ENSG00000181143_297 (sequence is synthesized)
caacatcctctctcttcaccctacttgtaactggaaccagcagagttgatctaagtccaactgcttcacctggtgtttctgcaaaaacagccccactttccacccatccagggacagaaa

SEQ ID NO: 638645 - DNA, 120 bp, Artificial Sequence
  ENSG00000181143_298 (sequence is synthesized)
ccagcacaatgattccaacttcaactctttcccttggtttactagagactacaggcttactggccaccagctcttcagcagagaccagcacgagtactctaactctgactgtttcccctg

SEQ ID NO: 638646 - DNA, 120 bp, Artificial Sequence
  ENSG00000181143_299 (sequence is synthesized)
ctgtctctgggctttccagtgcctctataacaactgataagccccaaactgtgacctcctggaacacagaaacctcaccatctgtaacttcagttggacccccagaattttccaggactg

SEQ ID NO: 638647 - DNA, 120 bp, Artificial Sequence
  ENSG00000181143_300 (sequence is synthesized)
tcacaggcaccactatgaccttgataccatcagagatgccaacaccacctaaaaccagtcatggagaaggagtgagtccaaccactatcttgagaactacaatggttgaagccactaatt

SEQ ID NO: 638648 - DNA, 120 bp, Artificial Sequence
  ENSG00000181143_301 (sequence is synthesized)
tagctaccacaggttccagtcccactgtggccaagacaacaaccaccttcaatacactggctggaagcctctttactcctctgaccacacctgggatgtccaccttggcctctgagagtg

SEQ ID NO: 638649 - DNA, 120 bp, Artificial Sequence
  ENSG00000181143_302 (sequence is synthesized)
tgacctcaagaacaagttataaccatcggtcctggatctccaccaccagcagttataaccgtcggtactggacccctgccaccagcactccagtgacttctacattctccccagggattt

SEQ ID NO: 638650 - DNA, 120 bp, Artificial Sequence
  ENSG00000181143_303 (sequence is synthesized)
ccacatcctccatccccagctccacagcagccacagtcccattcatggtgccattcaccctcaacttcaccatcaccaacctgcagtacgaggaggacatgcggcaccctggttccagga

SEQ ID NO: 638651 - DNA, 120 bp, Artificial Sequence
  ENSG00000181143_304 (sequence is synthesized)
agttcaacgccacagagagagaactgcagggtctgctcaaacccttgttcaggaatagcagtctggaatacctctattcaggctgcagactagcctcactcaggccagagaaggatagct

SEQ ID NO: 638652 - DNA, 120 bp, Artificial Sequence
  ENSG00000181143_305 (sequence is synthesized)
cagccacggcagtggatgccatctgcacacatcgccctgaccctgaagacctcggactggacagagagcgactgtactgggagctgagcaatctgacaaatggcatccaggagctgggcc

SEQ ID NO: 638653 - DNA, 120 bp, Artificial Sequence
  ENSG00000181143_306 (sequence is synthesized)
cctacaccctggaccggaacagtctctatgtcaatggtttcacccatcgaagctctatgcccaccaccagcactcctgggacctccacagtggatgtgggaacctcagggactccatcct

SEQ ID NO: 638654 - DNA, 120 bp, Artificial Sequence
  ENSG00000181143_307 (sequence is synthesized)
ccagccccagccccacgactgctggccctctcctgatgccgttcaccctcaacttcaccatcaccaacctgcagtacgaggaggacatgcgtcgcactggctccaggaagttcaacacca

SEQ ID NO: 638655 - DNA, 120 bp, Artificial Sequence
  ENSG00000181143_308 (sequence is synthesized)
tggagagtgtcctgcagggtctgctcaagcccttgttcaagaacaccagtgttggccctctgtactctggctgcagattgaccttgctcaggcccgagaaagatggggcagccactggag

SEQ ID NO: 638656 - DNA, 120 bp, Artificial Sequence
  ENSG00000181143_309 (sequence is synthesized)
tggatgccatctgcacccaccgccttgaccccaaaagccctggactcaacagggagcagctgtactgggagctaagcaaactgaccaatgacattgaagagctgggcccctacaccctgg

SEQ ID NO: 638657 - DNA, 120 bp, Artificial Sequence
  ENSG00000181143_310 (sequence is synthesized)
acaggaacagtctctatgtcaatggtttcacccatcagagctctgtgtccaccaccagcactcctgggacctccacagtggatctcagaacctcagggactccatcctccctctccagcc

SEQ ID NO: 638658 - DNA, 120 bp, Artificial Sequence
  ENSG00000181143_311 (sequence is synthesized)
ccacaattatggctgctggccctctcctggtaccattcaccctcaacttcaccatcaccaacctgcagtatggggaggacatgggtcaccctggctccaggaagttcaacaccacagaga

SEQ ID NO: 638659 - DNA, 120 bp, Artificial Sequence
  ENSG00000181143_312 (sequence is synthesized)
gggtcctgcagggtctgcttggtcccatattcaagaacaccagtgttggccctctgtactctggctgcagactgacctctctcaggtctgagaaggatggagcagccactggagtggatg

SEQ ID NO: 638660 - DNA, 120 bp, Artificial Sequence
  ENSG00000181143_313 (sequence is synthesized)
ccatctgcatccatcatcttgaccccaaaagccctggactcaacagagagcggctgtactgggagctgagccaactgaccaatggcatcaaagagctgggcccctacaccctggacagga

SEQ ID NO: 638661 - DNA, 120 bp, Artificial Sequence
  ENSG00000181143_314 (sequence is synthesized)
acagtctctatgtcaatggtttcacccatcggacctctgtgcccaccagcagcactcctgggacctccacagtggaccttggaacctcagggactccattctccctcccaagccccgcaa

SEQ ID NO: 638662 - DNA, 120 bp, Artificial Sequence
  ENSG00000181143_315 (sequence is synthesized)
ctgctggccctctcctggtgctgttcaccctcaacttcaccatcaccaacctgaagtatgaggaggacatgcatcgccctggctccaggaagttcaacaccactgagagggtcctgcaga

SEQ ID NO: 638663 - DNA, 120 bp, Artificial Sequence
  ENSG00000181143_316 (sequence is synthesized)
ctctgcttggtcctatgttcaagaacaccagtgttggccttctgtactctggctgcagactgaccttgctcaggtccgagaaggatggagcagccactggagtggatgccatctgcaccc

SEQ ID NO: 638664 - DNA, 120 bp, Artificial Sequence
  ENSG00000181143_317 (sequence is synthesized)
accgtcttgaccccaaaagccctggagtggacagggagcagctatactgggagctgagccagctgaccaatggcatcaaagagctgggcccctacaccctggacaggaacagtctctatg

SEQ ID NO: 638665 - DNA, 120 bp, Artificial Sequence
  ENSG00000181143_318 (sequence is synthesized)
tcaatggtttcacccattggatccctgtgcccaccagcagcactcctgggacctccacagtggaccttgggtcagggactccatcctccctccccagccccacaactgctggccctctcc

SEQ ID NO: 638666 - DNA, 120 bp, Artificial Sequence
  ENSG00000181143_319 (sequence is synthesized)
tggtgccgttcaccctcaacttcaccatcaccaacctgaagtacgaggaggacatgcattgccctggctccaggaagttcaacaccacagagagagtcctgcagagtctgcttggtccca

SEQ ID NO: 638667 - DNA, 120 bp, Artificial Sequence
  ENSG00000181143_320 (sequence is synthesized)
tgttcaagaacaccagtgttggccctctgtactctggctgcagactgaccttgctcaggtccgagaaggatggagcagccactggagtggatgccatctgcacccaccgtcttgacccca

SEQ ID NO: 638668 - DNA, 120 bp, Artificial Sequence
  ENSG00000181143_321 (sequence is synthesized)
aaagccctggagtggacagggagcagctatactgggagctgagccagctgaccaatggcatcaaagagctgggtccctacaccctggacagaaacagtctctatgtcaatggtttcaccc

SEQ ID NO: 638669 - DNA, 120 bp, Artificial Sequence
  ENSG00000181143_322 (sequence is synthesized)
atcagacctctgcgcccaacaccagcactcctgggacctccacagtggaccttgggacctcagggactccatcctccctccccagccctacatctgctggccctctcctggtgccattca

SEQ ID NO: 638670 - DNA, 120 bp, Artificial Sequence
  ENSG00000181143_323 (sequence is synthesized)
ccctcaacttcaccatcaccaacctgcagtacgaggaggacatgcatcacccaggctccaggaagttcaacaccacggagcgggtcctgcagggtctgcttggtcccatgttcaagaaca

SEQ ID NO: 638671 - DNA, 120 bp, Artificial Sequence
  ENSG00000181143_324 (sequence is synthesized)
ccagtgtcggccttctgtactctggctgcagactgaccttgctcaggcctgagaagaatggggcagccactggaatggatgccatctgcagccaccgtcttgaccccaaaagccctggac

SEQ ID NO: 638672 - DNA, 120 bp, Artificial Sequence
  ENSG00000181143_325 (sequence is synthesized)
tcaacagagagcagctgtactgggagctgagccagctgacccatggcatcaaagagctgggcccctacaccctggacaggaacagtctctatgtcaatggtttcacccatcggagctctg

SEQ ID NO: 638673 - DNA, 120 bp, Artificial Sequence
  ENSG00000181143_326 (sequence is synthesized)
tggcccccaccagcactcctgggacctccacagtggaccttgggacctcagggactccatcctccctccccagccccacaacagctgttcctctcctggtgccgttcaccctcaacttta

SEQ ID NO: 638674 - DNA, 120 bp, Artificial Sequence
  ENSG00000181143_327 (sequence is synthesized)
ccatcaccaatctgcagtatggggaggacatgcgtcaccctggctccaggaagttcaacaccacagagagggtcctgcagggtctgcttggtcccttgttcaagaactccagtgtcggcc

SEQ ID NO: 638675 - DNA, 120 bp, Artificial Sequence
  ENSG00000181143_328 (sequence is synthesized)
ctctgtactctggctgcagactgatctctctcaggtctgagaaggatggggcagccactggagtggatgccatctgcacccaccaccttaaccctcaaagccctggactggacagggagc

SEQ ID NO: 638676 - DNA, 120 bp, Artificial Sequence
  ENSG00000181143_329 (sequence is synthesized)
agctgtactggcagctgagccagatgaccaatggcatcaaagagctgggcccctacaccctggaccggaacagtctctacgtcaatggtttcacccatcggagctctgggctcaccacca

SEQ ID NO: 638677 - DNA, 120 bp, Artificial Sequence
  ENSG00000181143_330 (sequence is synthesized)
gcactccttggacttccacagttgaccttggaacctcagggactccatcccccgtccccagccccacaaccaccggccctctcctggtgccattcacactcaacttcaccatcactaacc

SEQ ID NO: 638678 - DNA, 120 bp, Artificial Sequence
  ENSG00000181143_331 (sequence is synthesized)
tacagtatgaggagaacatgggtcaccctggctccaggaagttcaacatcacggagagtgttctgcagggtctgctcaagcccttgttcaagagcaccagtgttggccctctgtattctg

SEQ ID NO: 638679 - DNA, 120 bp, Artificial Sequence
  ENSG00000181143_332 (sequence is synthesized)
gctgcagactgaccttgctcaggcctgagaaggatggagtagccaccagagtggacgccatctgcacccaccgccctgaccccaaaatccctgggctagacagacagcagctatactggg

SEQ ID NO: 638680 - DNA, 120 bp, Artificial Sequence
  ENSG00000181143_333 (sequence is synthesized)
agctgagccagctgacccacagcatcactgagctgggaccctacaccctggatagggacagtctctatgtcaatggtttcacccagcggagctctgtgcccaccaccagcactcctggga

SEQ ID NO: 638681 - DNA, 120 bp, Artificial Sequence
  ENSG00000181143_334 (sequence is synthesized)
ctttcacagtacagccggaaacctctgagactccatcatccctccctggccccacagccactggccctgtcctgctgccattcaccctcaattttaccatcactaacctgcagtatgagg

SEQ ID NO: 638682 - DNA, 120 bp, Artificial Sequence
  ENSG00000181143_335 (sequence is synthesized)
aggacatgcgtcgccctggctccaggaagttcaacaccacggagagggtccttcagggtctgcttatgcccttgttcaagaacaccagtgtcagctctctgtactctggttgcagactga

SEQ ID NO: 638683 - DNA, 120 bp, Artificial Sequence
  ENSG00000181143_336 (sequence is synthesized)
ccttgctcaggcctgagaaggatggggcagccaccagagtggatgctgtctgcacccatcgtcctgaccccaaaagccctggactggacagagagcggctgtactggaagctgagccagc

SEQ ID NO: 638684 - DNA, 120 bp, Artificial Sequence
  ENSG00000181143_337 (sequence is synthesized)
tgacccacggcatcactgagctgggcccctacaccctggacaggcacagtctctatgtcaatggtttcacccatcagagctctatgacgaccaccagaactcctgatacctccacaatgc

SEQ ID NO: 638685 - DNA, 120 bp, Artificial Sequence
  ENSG00000181143_338 (sequence is synthesized)
acctggcaacctcgagaactccagcctccctgtctggacccatgaccgccagccctctcctggtgctattcacaattaacttcaccatcactaacctgcggtatgaggagaacatgcatc

SEQ ID NO: 638686 - DNA, 120 bp, Artificial Sequence
  ENSG00000181143_339 (sequence is synthesized)
accctggctctagaaagtttaacaccacggagagagtccttcagggtctgctcaggcctgtgttcaagaacaccagtgttggccctctgtactctggctgcagactgaccttgctcaggc

SEQ ID NO: 638687 - DNA, 120 bp, Artificial Sequence
  ENSG00000181143_340 (sequence is synthesized)
ccaagaaggatggggcagccaccaaagtggatgccatctgcacctaccgccctgatcccaaaagccctggactggacagagagcagctatactgggagctgagccagctgacccacagca

SEQ ID NO: 638688 - DNA, 120 bp, Artificial Sequence
  ENSG00000181143_341 (sequence is synthesized)
tcactgagctgggcccctacaccctggacagggacagtctctatgtcaatggtttcacacagcggagctctgtgcccaccactagcattcctgggacccccacagtggacctgggaacat

SEQ ID NO: 638689 - DNA, 120 bp, Artificial Sequence
  ENSG00000181143_342 (sequence is synthesized)
ctgggactccagtttctaaacctggtccctcggctgccagccctctcctggtgctattcactctcaacttcaccatcaccaacctgcggtatgaggagaacatgcagcaccctggctcca

SEQ ID NO: 638690 - DNA, 120 bp, Artificial Sequence
  ENSG00000181143_343 (sequence is synthesized)
ggaagttcaacaccacggagagggtccttcagggcctgctcaggtccctgttcaagagcaccagtgttggccctctgtactctggctgcagactgactttgctcaggcctgaaaaggatg

SEQ ID NO: 638691 - DNA, 120 bp, Artificial Sequence
  ENSG00000181143_344 (sequence is synthesized)
ggacagccactggagtggatgccatctgcacccaccaccctgaccccaaaagccctaggctggacagagagcagctgtattgggagctgagccagctgacccacaatatcactgagctgg

SEQ ID NO: 638692 - DNA, 120 bp, Artificial Sequence
  ENSG00000181143_345 (sequence is synthesized)
gcccctatgccctggacaacgacagcctctttgtcaatggtttcactcatcggagctctgtgtccaccaccagcactcctgggacccccacagtgtatctgggagcatctaagactccag

SEQ ID NO: 638693 - DNA, 120 bp, Artificial Sequence
  ENSG00000181143_346 (sequence is synthesized)
cctcgatatttggcccttcagctgccagccatctcctgatactattcaccctcaacttcaccatcactaacctgcggtatgaggagaacatgtggcctggctccaggaagttcaacacta

SEQ ID NO: 638694 - DNA, 120 bp, Artificial Sequence
  ENSG00000181143_347 (sequence is synthesized)
cagagagggtccttcagggcctgctaaggcccttgttcaagaacaccagtgttggccctctgtactctggctgcaggctgaccttgctcaggccagagaaagatggggaagccaccggag

SEQ ID NO: 638695 - DNA, 120 bp, Artificial Sequence
  ENSG00000181143_348 (sequence is synthesized)
tggatgccatctgcacccaccgccctgaccccacaggccctgggctggacagagagcagctgtatttggagctgagccagctgacccacagcatcactgagctgggcccctacacactgg

SEQ ID NO: 638696 - DNA, 120 bp, Artificial Sequence
  ENSG00000181143_349 (sequence is synthesized)
acagggacagtctctatgtcaatggtttcacccatcggagctctgtacccaccaccagcaccggggtggtcagcgaggagccattcacactgaacttcaccatcaacaacctgcgctaca

SEQ ID NO: 638697 - DNA, 120 bp, Artificial Sequence
  ENSG00000181143_350 (sequence is synthesized)
tggcggacatgggccaacccggctccctcaagttcaacatcacagacaacgtcatgcagcacctgctcagtcctttgttccagaggagcagcctgggtgcacggtacacaggctgcaggg

SEQ ID NO: 638698 - DNA, 120 bp, Artificial Sequence
  ENSG00000181143_351 (sequence is synthesized)
tcatcgcactaaggtctgtgaagaacggtgctgagacacgggtggacctcctctgcacctacctgcagcccctcagcggcccaggtctgcctatcaagcaggtgttccatgagctgagcc

SEQ ID NO: 638699 - DNA, 120 bp, Artificial Sequence
  ENSG00000181143_352 (sequence is synthesized)
agcagacccatggcatcacccggctgggcccctactctctggacaaagacagcctctaccttaacggttacaatgaacctggtccagatgagcctcctacaactcccaagccagccacca

SEQ ID NO: 638700 - DNA, 120 bp, Artificial Sequence
  ENSG00000181143_353 (sequence is synthesized)
cattcctgcctcctctgtcagaagccacaacagccatggggtaccacctgaagaccctcacactcaacttcaccatctccaatctccagtattcaccagatatgggcaagggctcagcta

SEQ ID NO: 638701 - DNA, 120 bp, Artificial Sequence
  ENSG00000181143_354 (sequence is synthesized)
cattcaactccaccgagggggtccttcagcacctgctcagacccttgttccagaagagcagcatgggccccttctacttgggttgccaactgatctccctcaggcctgagaaggatgggg

SEQ ID NO: 638702 - DNA, 120 bp, Artificial Sequence
  ENSG00000181143_355 (sequence is synthesized)
cagccactggtgtggacaccacctgcacctaccaccctgaccctgtgggccccgggctggacatacagcagctttactgggagctgagtcagctgacccatggtgtcacccaactgggct

SEQ ID NO: 638703 - DNA, 120 bp, Artificial Sequence
  ENSG00000181143_356 (sequence is synthesized)
tctatgtcctggacagggatagcctcttcatcaatggctatgcaccccagaatttatcaatccggggcgagtaccagataaatttccacattgtcaactggaacctcagtaatccagacc

SEQ ID NO: 638704 - DNA, 120 bp, Artificial Sequence
  ENSG00000181143_357 (sequence is synthesized)
ccacatcctcagagtacatcaccctgctgagggacatccaggacaaggtcaccacactctacaaaggcagtcaactacatgacacattccgcttctgcctggtcaccaacttgacgatgg

SEQ ID NO: 638705 - DNA, 120 bp, Artificial Sequence
  ENSG00000181143_358 (sequence is synthesized)
actccgtgttggtcactgtcaaggcattgttctcctccaatttggaccccagcctggtggagcaagtctttctagataagaccctgaatgcctcattccattggctgggctccacctacc

SEQ ID NO: 638706 - DNA, 120 bp, Artificial Sequence
  ENSG00000181143_359 (sequence is synthesized)
agttggtggacatccatgtgacagaaatggagtcatcagtttatcaaccaacaagcagctccagcacccagcacttctacctgaatttcaccatcaccaacctaccatattcccaggaca

SEQ ID NO: 638707 - DNA, 120 bp, Artificial Sequence
  ENSG00000181143_360 (sequence is synthesized)
aagcccagccaggcaccaccaattaccagaggaacaaaaggaatattgaggatgcgctcaaccaactcttccgaaacagcagcatcaagagttatttttctgactgtcaagtttcaacat

SEQ ID NO: 638708 - DNA, 120 bp, Artificial Sequence
  ENSG00000181143_361 (sequence is synthesized)
tcaggtctgtccccaacaggcaccacaccggggtggactccctgtgtaacttctcgccactggctcggagagtagacagagttgccatctatgaggaatttctgcggatgacccggaatg

SEQ ID NO: 638709 - DNA, 120 bp, Artificial Sequence
  ENSG00000181143_362 (sequence is synthesized)
gtacccagctgcagaacttcaccctggacaggagcagtgtccttgtggatgggtattctcccaacagaaatgagcccttaactgggaattctgaccttcccttctgggctgtcatcctca

SEQ ID NO: 638710 - DNA, 120 bp, Artificial Sequence
  ENSG00000181143_363 (sequence is synthesized)
tcggcttggcaggactcctgggagtcatcacatgcctgatctgcggtgtcctggtgaccacccgccggcggaagaaggaaggagaatacaacgtccagcaacagtgcccaggctactacc

SEQ ID NO: 638711 - DNA, 120 bp, Artificial Sequence
  ENSG00000181143_364 (sequence is synthesized)
agtcacacctagacctggaggatctgcaatgactggaacttgccggtgcctggggtgcctttcccccagccagggtccaaagaagcttggctggggcagaaataaaccatattggtcgga

SEQ ID NO: 638712 - DNA, 120 bp, Artificial Sequence
  ENSG00000181143_365 (sequence is synthesized)
ctccctcaggctatgcaccccagaatttatcaatccggggcgagtaccagataaatttccacattgtcaactggaacctcagtaatccagaccccacatcctcagagtacatcaccctgc

SEQ ID NO: 638713 - DNA, 120 bp, Artificial Sequence
  ENSG00000181163_0 (sequence is synthesized)
agtgcgcgtgctcggtgggagcccgcggagtacctggaaggaggtgggggcgaggtagaaaggagtggggttgaaaagcgcttgcgcaggacggctacggtacgggggtgggagggcttc

SEQ ID NO: 638714 - DNA, 120 bp, Artificial Sequence
  ENSG00000181163_1 (sequence is synthesized)
ggagcacgcgcgcggaggcgggacttgggaagcgctcgcgagatcttcagggtctatatataagcgcggggagcctgcgtcctttccctggtgtgattccgtcctgcgcggttgttctct

SEQ ID NO: 638715 - DNA, 120 bp, Artificial Sequence
  ENSG00000181163_2 (sequence is synthesized)
ggagcagcgttcttttatctccgtccgccttctctcctacctaagtgcgtgccgccacccgatggaagattcgatggacatggacatgagccccctgaggccccagaactatcttttcgg

SEQ ID NO: 638716 - DNA, 120 bp, Artificial Sequence
  ENSG00000181163_3 (sequence is synthesized)
ttaaggtggataatgatgaaaatgagcaccagttatctttaagaacggtcagtttaggggctggtgcaaaggatgagttgcacattgttgaagcagaggcaatgaattacgaaggcagtc

SEQ ID NO: 638717 - DNA, 74 bp, Artificial Sequence
  ENSG00000181163_4 (sequence is synthesized)
ggtttcccttgggggctttgaaataacaccaccagtggtcttaaggttgaagtgtggttcagggccagtgcata

SEQ ID NO: 638718 - DNA, 66 bp, Artificial Sequence
  ENSG00000181163_5 (sequence is synthesized)
gatgtgaaactcttaagtatatctggaaagcggtctgcccctggaggtggtagcaaggttccacag

SEQ ID NO: 638719 - DNA, 120 bp, Artificial Sequence
  ENSG00000181163_6 (sequence is synthesized)
aaagcggtctgcccctggaggtggtagcaaggttccacagaaaaaagtaaaacttgctgctgatgaagatgatgacgatgatgatgaagaggatgatgatgaagatgatgatgatgatga

SEQ ID NO: 638720 - DNA, 83 bp, Artificial Sequence
  ENSG00000181163_7 (sequence is synthesized)
tggaaaagactcaaaaccatgaaacaggaaaaaactcctaaaacaccaaaaggacctagttctgtagaagacattaaagcaaa

SEQ ID NO: 638721 - DNA, 120 bp, Artificial Sequence
  ENSG00000181163_8 (sequence is synthesized)
caaaaatgcaagcaagtatagaaaaaggtggttctcttcccaaagtggaagccaaattcatcaattatgtgaagaattgcttccggatgactgaccaagaggctattcaagatctctggc

SEQ ID NO: 638722 - DNA, 120 bp, Artificial Sequence
  ENSG00000181163_9 (sequence is synthesized)
agtggaggaagtctctttaagaaaatagtttaaacaatttgttaaaaaattttccgtcttatttcatttctgtaacagttgatatctggctgtcctttttataatgcagagtgagaactt

SEQ ID NO: 638723 - DNA, 85 bp, Artificial Sequence
  ENSG00000181163_10 (sequence is synthesized)
taacagttgatatctggctgtcctttttataatgcagagtgagaactttccctaccgtgtttgataaatgttgtccaggttctat

SEQ ID NO: 638724 - DNA, 120 bp, Artificial Sequence
  ENSG00000181163_11 (sequence is synthesized)
tgtatggaatgttatgataggacatagtagtagcggtggtcagacatggaaatggtggggagacaaaaatatacatgtgaaataaaactcagtattttaataaagtagcacggtttctat

SEQ ID NO: 638725 - DNA, 120 bp, Artificial Sequence
  ENSG00000181163_12 (sequence is synthesized)
tgacttatttaactgctttatactttgtcaaagaaataattaatgtagttaggaatggcaaatagtcttgtaaaattctatgagaatgtccctgccctccccttcaatattctctctgga

SEQ ID NO: 638726 - DNA, 120 bp, Artificial Sequence
  ENSG00000181163_13 (sequence is synthesized)
gctaaccactttttcatcataaggatttagtgctgtgttcccacctcctgatgatagttaacaattattataactatgcaacatgtttccaaatgttccattagacctcctatctgccta

SEQ ID NO: 638727 - DNA, 120 bp, Artificial Sequence
  ENSG00000181163_14 (sequence is synthesized)
gggcgatgtccttgctaatttggagactgattcagtccccttttggcccccaagttacgtaaagataaggactttggagatgttttctcaggaaggacagagctgaaaaacaaagttcct

SEQ ID NO: 638728 - DNA, 120 bp, Artificial Sequence
  ENSG00000181163_15 (sequence is synthesized)
gtttgttttggtttaatatacttgcctggttcgtggtatgaattttttcaaaaatttcttataaaacatttataatcgtgtctgtggtgatttttgcatatgcaaaattaaatatgcctt

SEQ ID NO: 638729 - DNA, 120 bp, Artificial Sequence
  ENSG00000181163_16 (sequence is synthesized)
attttccattatgcaaggaacgtagtgcactggttgcaagataacattctgaccttccatgttaaaatagatcagtgaaaaccctttgcctattctggttgtaagatatgctagagaacc

SEQ ID NO: 638730 - DNA, 120 bp, Artificial Sequence
  ENSG00000181163_17 (sequence is synthesized)
caactttgaaaatgtctgtacagccaacggtaagggcacttacatactttggatgttgtgtcaaggtttaattctgttttaaggtaggtttggtgtcatttagttgtgccaaggagatag

SEQ ID NO: 638731 - DNA, 120 bp, Artificial Sequence
  ENSG00000181163_18 (sequence is synthesized)
cactggagttcgatggtcaactcttgaacatgggggcttctgctgctacttttatcagaggtggaaaaacaggttcactggtttgttgatttggcttatgtgtttgcctgtaatgtttat

SEQ ID NO: 638732 - DNA, 120 bp, Artificial Sequence
  ENSG00000181163_19 (sequence is synthesized)
tgttcattttcttcacatgtttagtgatgaaaaatttctcccttctaggtttcccttgggggctttgaaataacaccaccagtggtcttaaggttgaagtgtggttcagggccagtgcat

SEQ ID NO: 638733 - DNA, 120 bp, Artificial Sequence
  ENSG00000181163_20 (sequence is synthesized)
acagtcctgggcactacatgtaaattaagcccaaagatggggagaaaggaaaaggagagacaaatatagtccatactgagtgtcatcaacaatccagactgaagtcttctattttaatct

SEQ ID NO: 638734 - DNA, 120 bp, Artificial Sequence
  ENSG00000181163_21 (sequence is synthesized)
caatccccttttctgatttgccacccatgcctcttcaggctggaaacaatctcttggttccctaaagcactttcttctgactgctgtgattcagtgaaccttgccctttgctttctatta

SEQ ID NO: 638735 - DNA, 120 bp, Artificial Sequence
  ENSG00000181163_22 (sequence is synthesized)
cttgtgcatttgcctcacctgacaatgttttaaatcgcctttgtatctccttagctgctcaataaatatttgaatgcatcaattaagaatgtatgtgacaataattttgaaatggaaatt

SEQ ID NO: 638736 - DNA, 120 bp, Artificial Sequence
  ENSG00000181163_23 (sequence is synthesized)
gtgaggtttattttactaggttattggaggcagttaagtttcttaatgctatacctgattctgccaaagtcccttggacatttgaaaaccttttcaatcttttaaaaatgcataaaagat

SEQ ID NO: 638737 - DNA, 120 bp, Artificial Sequence
  ENSG00000181163_24 (sequence is synthesized)
acttagagggaaaggtattaattaaatttagtaaaaacaaatatattcaatgctttaaattccaaagtagtgataaatacaaacatttcaagatatttgcaatagtaatgttttgaaatt

SEQ ID NO: 638738 - DNA, 120 bp, Artificial Sequence
  ENSG00000181163_25 (sequence is synthesized)
ttggttacaaagtcacaggtcttgccaatactgttgtagtttcttgcctatatccgtaatttgaaggaaatggtgagagtgattagagaagtgtaattactgtaattttttcccctattg

SEQ ID NO: 638739 - DNA, 120 bp, Artificial Sequence
  ENSG00000181163_26 (sequence is synthesized)
ggcaaatctgtttgaatagagatactagccatgctgcccaatagggctttctggccctgaaaaagatacggagtattcttggaaagttgaagggaaaaagaataaactgatccatgtagt

SEQ ID NO: 638740 - DNA, 120 bp, Artificial Sequence
  ENSG00000181163_27 (sequence is synthesized)
agcatgcagattattgaggaattttctaaaggtatctctctcggtgtatttctctacttacctgtaataatgcttttgtcttaatagggtggttctcttcccaaagtggaagccaaattc

SEQ ID NO: 638741 - DNA, 120 bp, Artificial Sequence
  ENSG00000181163_28 (sequence is synthesized)
ttgtattatagcttttagtttggtgatagaacagctcttgttcatgagtacgtatcttttcttttaaaagaaaaaagtaaaacttgctgctgatgaagatgatgacgatgatgatgaaga

SEQ ID NO: 638742 - DNA, 120 bp, Artificial Sequence
  ENSG00000181163_29 (sequence is synthesized)
gtgtagtaggctataccatctaggtttgtataagcacattcttatgattgtacaaagatgaaattgtctaacaacacatttctcagaacctagccctgtggttaagtgacgcatggctgc

SEQ ID NO: 638743 - DNA, 120 bp, Artificial Sequence
  ENSG00000181191_0 (sequence is synthesized)
acaatcacttccgccgccgcagtcgccgcccgccccgctgctgtctggcgggggaggagctcgggaccgggagcagcggctctggcggtcgtggcggtcggagatccgagagctctgctt

SEQ ID NO: 638744 - DNA, 120 bp, Artificial Sequence
  ENSG00000181191_1 (sequence is synthesized)
ctctgaaaagcgtgtggctttctggacttggtctacacctgacagtcactggaatgctactccaggccttagaagaaagtgaaactaattttaaaggccccttattctttctgttacctg

SEQ ID NO: 638745 - DNA, 120 bp, Artificial Sequence
  ENSG00000181191_2 (sequence is synthesized)
cctgctgaagtgaaaataaatctccctgctcctttattctaaactgattttactttcccatctcaaaaacgtgtgcagggagcaggagccctcctacccgagccccagctgtattggaaa

SEQ ID NO: 638746 - DNA, 120 bp, Artificial Sequence
  ENSG00000181191_3 (sequence is synthesized)
ccctcctaagtcagagtgatgggtcaggaatctagcaagcctgtatggcccaatccaacaggagggtatcagtccaatacaggtaggaggtatggaagaaggcatgcttatgtcagtttc

SEQ ID NO: 638747 - DNA, 120 bp, Artificial Sequence
  ENSG00000181191_4 (sequence is synthesized)
aggccacccacgagccagcgggaaaggattgccagccagagaaagacgaactccgaagtcccaatgcacagatcagcccccagtcaaaccaccaagaggagccgatcgccattttccact

SEQ ID NO: 638748 - DNA, 120 bp, Artificial Sequence
  ENSG00000181191_5 (sequence is synthesized)
actcgtcgtagttgggacgacagcgagagttcgggaaccaacctgaatattgataatgaggactattccaggtatccgccaagagagtacagagcttcgggtagcagaagaggaatggcc

SEQ ID NO: 638749 - DNA, 120 bp, Artificial Sequence
  ENSG00000181191_6 (sequence is synthesized)
tatggacatattgactcttatggggcagatgatagtgaggaggagggggctgggcctgttgagcgaccgccagtgagagggaaaactggcaagtttaaagatgataagctgtatgaccca

SEQ ID NO: 638750 - DNA, 120 bp, Artificial Sequence
  ENSG00000181191_7 (sequence is synthesized)
gagaaaggggcaaggtctttggctgggccacctccacatttctctagttttagccgtgatgtgagagaggagcgagacaagttagacccagtccctgcagcaagatgctcagctagcaga

SEQ ID NO: 638751 - DNA, 120 bp, Artificial Sequence
  ENSG00000181191_8 (sequence is synthesized)
gctgacttcctgccacaaagtagtgtggcctcacagtcgtcttctgaaggcaagctggctacaaaaggtgacagctcggagagggagagaagggagcaaaatttacctgcacgtcccagc

SEQ ID NO: 638752 - DNA, 120 bp, Artificial Sequence
  ENSG00000181191_9 (sequence is synthesized)
agggctcctgtgagtatttgtggtggtggggaaaacacctcaaagagtgcagaggaacctgtggtcaggcccaaaatcagaaacctggcaagtccaaactgcgtgaaaccaaaaattttt

SEQ ID NO: 638753 - DNA, 120 bp, Artificial Sequence
  ENSG00000181191_10 (sequence is synthesized)
tttgatactgatgatgatgacgatatgccacacagtacttccaggtggagggataccgccaatgacaatgagggccactcggatggcctggcaagaagagggagaggcgagagttcaagt

SEQ ID NO: 638754 - DNA, 120 bp, Artificial Sequence
  ENSG00000181191_11 (sequence is synthesized)
acagtgatgattactacaaatactgcgacgaagactctgacagtgacaaagagtggattgctgctctgcgtcggaaatatcgaagccgagagcaaaccctgtcctccagtggcgaaagct

SEQ ID NO: 638755 - DNA, 120 bp, Artificial Sequence
  ENSG00000181191_12 (sequence is synthesized)
gggagactctgccggggaaagaagagcgggaacctccacaggctaaggtgagtgccagcactggcaccagccctggccccggtgctagtgccagtgccggggctggcgccggggccagtg

SEQ ID NO: 638756 - DNA, 120 bp, Artificial Sequence
  ENSG00000181191_13 (sequence is synthesized)
ctggcagcaatggcagcaattaccttgaagaagttcgagaaccatctcttcaggaagagcaggcatccctggaagaaggagaaattccttggctccagtaccatgagaatgacagtagca

SEQ ID NO: 638757 - DNA, 120 bp, Artificial Sequence
  ENSG00000181191_14 (sequence is synthesized)
gtgagggggataatgattctggtcacgagttgatgcaacctggggtattcatgctggatggaaacaacaaccttgaagatgactccagtgtgagcgaagacctagaagtggattggagcc

SEQ ID NO: 638758 - DNA, 120 bp, Artificial Sequence
  ENSG00000181191_15 (sequence is synthesized)
tctttgatggatttgcagatgggttaggagtggctgaagccatttcctatgtggaccctcagttcctcacctacatggcacttgaagaacgcctggcccaggcaatggaaactgcccttg

SEQ ID NO: 638759 - DNA, 120 bp, Artificial Sequence
  ENSG00000181191_16 (sequence is synthesized)
cgcacttggagtctctcgcagtggatgtagaggtggccaatccaccagcaagcaaggagagcattgacgctcttcccgagatcctggtcactgaagatcatggcgcagttggtcaggaga

SEQ ID NO: 638760 - DNA, 120 bp, Artificial Sequence
  ENSG00000181191_17 (sequence is synthesized)
tgtgctgccccatctgctgtagcgaatatgtgaagggggaggtggcaactgagctgccgtgccaccactatttccacaagccgtgtgtgtccatctggcttcagaagtcaggcacctgcc

SEQ ID NO: 638761 - DNA, 120 bp, Artificial Sequence
  ENSG00000181191_18 (sequence is synthesized)
ccgtgtgccgctgcatgttccctcccccactctaaagaccaaggccgtttactcctggtctgattattttccccatctgaaatccacaatactgcaggagccctcttgaaattaacaatg

SEQ ID NO: 638762 - DNA, 120 bp, Artificial Sequence
  ENSG00000181191_19 (sequence is synthesized)
gaaataaaaccaatcagtcagttagcctaaacctattgattcctcgtgattatttccaatgtgaaaacagttgtgtatgattgcattaaaaatcatatcatcttttagaggttagaaaag

SEQ ID NO: 638763 - DNA, 120 bp, Artificial Sequence
  ENSG00000181191_20 (sequence is synthesized)
ggaaaactaaactttctaaatgctacttgagattgcagtaagaagatacgttttctaacctgaaagttaaatcgcatttgttttcttcagtagaatgggaatgtgttgctgttacttgta

SEQ ID NO: 638764 - DNA, 120 bp, Artificial Sequence
  ENSG00000181191_21 (sequence is synthesized)
atgtcaagtttatctgttaaatatgtccaaaaggcaaaatcatttttgttgcatgttatgggtcgatgttcctgtaattgcagtgccgtaaaagcttattaaagttgttcttttggtttt

SEQ ID NO: 638765 - DNA, 120 bp, Artificial Sequence
  ENSG00000181191_22 (sequence is synthesized)
aggatgtgatgtagtaacgtaattactctcacattggacttaatcagaaagaatttgcagattttattttatttattaaaaaaccagaaggcaatatagctaaatgtttaacattagtta

SEQ ID NO: 638766 - DNA, 120 bp, Artificial Sequence
  ENSG00000181191_23 (sequence is synthesized)
aagctgggtgtttgtgacatttttcgctgtccttttctgtatccttgacgatttcatcatttaagatgaaataatgctttcgggcccaccctgatttgtggagagcagctgccgcccccg

SEQ ID NO: 638767 - DNA, 120 bp, Artificial Sequence
  ENSG00000181191_24 (sequence is synthesized)
gagcagcggctctggcggtcgtggcggtcggagatccgagagctctgcttctctgaaaagcgtgtggctttctggacttgggagcaggagccctcctacccgagccccagctgtattgga

SEQ ID NO: 638768 - DNA, 120 bp, Artificial Sequence
  ENSG00000181192_0 (sequence is synthesized)
gacgagtcccggatttaccagggccggtgggatcccctcgggctcccgccttagcatgctggccgggacatctggtgaacatggcctctgctactgcggcagcagcacgacggggcctcg

SEQ ID NO: 638769 - DNA, 120 bp, Artificial Sequence
  ENSG00000181192_1 (sequence is synthesized)
gccgggctctccctctcttctggcgtggctaccagaccgagcggggcgtttacggctaccggccgaggaagcccgagagccgcgagccccagggcgccctggagcgccccccagttgatc

SEQ ID NO: 638770 - DNA, 120 bp, Artificial Sequence
  ENSG00000181192_2 (sequence is synthesized)
atggccttgccaggttggtgacagtatattgtgagcatggtcataaagctgccaaaatcaaccccctcttcaccggacaagccctgctggagaatgtgcctgaaatccaagccctggtgc

SEQ ID NO: 638771 - DNA, 120 bp, Artificial Sequence
  ENSG00000181192_3 (sequence is synthesized)
agacactgcagggacccttccacacggcaggattattgaacatggggaaggaagaggcctcacttgaggaagtgttagtctatctcaatcaaatctactgtgggcagatttctattgaaa

SEQ ID NO: 638772 - DNA, 120 bp, Artificial Sequence
  ENSG00000181192_4 (sequence is synthesized)
cctcccaacttcagagccaggatgagaaagactggtttgccaagcggtttgaggaactgcaaaaggagacgtttaccacagaagagcgaaaacatctgtcgaaactaatgctggaatctc

SEQ ID NO: 638773 - DNA, 120 bp, Artificial Sequence
  ENSG00000181192_5 (sequence is synthesized)
aggagtttgaccactttctggccaccaagttctcgacagtgaagcgatatggaggcgaaggggctgaaagcatgatgggctttttccacgagctgctgaaaatgtcggcctacagcggga

SEQ ID NO: 638774 - DNA, 120 bp, Artificial Sequence
  ENSG00000181192_6 (sequence is synthesized)
tcactgatgtcattattgggatgccccatagagggaggctgaatttattgacaggccttctgcagttccctccagagctgatgttccgtaaaatgcgaggcttaagtgaatttccagaga

SEQ ID NO: 638775 - DNA, 120 bp, Artificial Sequence
  ENSG00000181192_7 (sequence is synthesized)
atttctcagccactggagacgtcctgtctcacctgacctcctctgtggacctgtactttggggcgcaccatcccctccatgtgacaatgttgcccaatccctcgcacctggaggccgtca

SEQ ID NO: 638776 - DNA, 120 bp, Artificial Sequence
  ENSG00000181192_8 (sequence is synthesized)
accccgtggccgtgggcaaaactcgcggcaggcagcagtctcgccaagacggcgattactctccagacaactcagcccagccgggggacagggtcatttgcttacaggtccatggtgatg

SEQ ID NO: 638777 - DNA, 120 bp, Artificial Sequence
  ENSG00000181192_9 (sequence is synthesized)
cttctttctgtggtcaagggattgttcctgaaacattcacgctgtccaatctcccacatttcagaattggtgggagtgtgcatttgattgttaataaccagctgggttacaccactccag

SEQ ID NO: 638778 - DNA, 120 bp, Artificial Sequence
  ENSG00000181192_10 (sequence is synthesized)
ctgaaagaggaaggtcttctttatactgcagtgatattgggaagcttgtgggctgtgccatcatccatgtcaatggagacagcccagaggaagtggtccgtgccacacgactggcttttg

SEQ ID NO: 638779 - DNA, 120 bp, Artificial Sequence
  ENSG00000181192_11 (sequence is synthesized)
aataccaacgccagttccgcaaggatgtgattattgatctgttgtgctacaggcagtggggccacaatgagctggatgagccattctacaccaaccccatcatgtacaaaatcatcagag

SEQ ID NO: 638780 - DNA, 120 bp, Artificial Sequence
  ENSG00000181192_12 (sequence is synthesized)
ctcgaaagagcattccagacacatatgcagagcacctcattgctggcggactcatgacgcaggaggaggtgtctgaaataaaatcctcctactatgccaagttgaatgatcacttaaata

SEQ ID NO: 638781 - DNA, 120 bp, Artificial Sequence
  ENSG00000181192_13 (sequence is synthesized)
acatggcccactacaggccccctgccctgaacctgcaggcccactggcagggcctggctcagccagaagcgcaaatcaccacctggagtacaggtgtgcccctcgacctcctgcggtttg

SEQ ID NO: 638782 - DNA, 120 bp, Artificial Sequence
  ENSG00000181192_14 (sequence is synthesized)
ttggcatgaagtctgtagaggtgccaagagagctgcagatgcacagtcacctgctgaagacacatgttcagtccagaatggagaagatgatggacggaatcaagctagactgggccaccg

SEQ ID NO: 638783 - DNA, 120 bp, Artificial Sequence
  ENSG00000181192_15 (sequence is synthesized)
cggaagctcttgccttgggttctttacttgctcaaggttttaatgttcgtctaagtggccaagatgttggtcgtggaactttcagtcagaggcatgcaatcgtggtttgccaggagacgg

SEQ ID NO: 638784 - DNA, 120 bp, Artificial Sequence
  ENSG00000181192_16 (sequence is synthesized)
atgacacctacatccccctgaaccatatggacccaaatcagaaggggtttctagaggtcagcaacagcccactgtcagaagaggccgtcctgggatttgaatatgggatgagcattgaga

SEQ ID NO: 638785 - DNA, 120 bp, Artificial Sequence
  ENSG00000181192_17 (sequence is synthesized)
gcccaaagttactgcccctgtgggaggcacagtttggcgatttcttcaatggtgcccagatcatctttgacacattcatctctggaggagaggccaagtggctcctacaaagcggcatcg

SEQ ID NO: 638786 - DNA, 120 bp, Artificial Sequence
  ENSG00000181192_18 (sequence is synthesized)
tcatcctccttccacatggctacgatggggctgggccagaccactcatcctgtcgaatagagcgtttcctgcagatgtgtgacagtgcggaagagggggtggacggagacactgtgaaca

SEQ ID NO: 638787 - DNA, 120 bp, Artificial Sequence
  ENSG00000181192_19 (sequence is synthesized)
tgtttgtggttcacccaacaactcctgcacagtatttccacttgcttaggagacagatggtccggaacttcagaaaaccactcattgttgcttcccctaagatgttactcaggctcccgg

SEQ ID NO: 638788 - DNA, 120 bp, Artificial Sequence
  ENSG00000181192_20 (sequence is synthesized)
cagccgtgtcaactcttcaagaaatggcaccaggaacaacatttaacccggtcattggtgattcatctgtggatccaaaaaaggttaagaccctcgtgttctgctccggcaaacatttct

SEQ ID NO: 638789 - DNA, 120 bp, Artificial Sequence
  ENSG00000181192_21 (sequence is synthesized)
acaaagagaatctctgggggccaagaagcatgactttgccatcatccgagtagaggaactctgccccttcccgttggattctttacagcaagagatgagcaaatacaaacatgttaaaga

SEQ ID NO: 638790 - DNA, 120 bp, Artificial Sequence
  ENSG00000181192_22 (sequence is synthesized)
tcatatttggagtcaggaggaacctcagaacatgggtccgtggtcgtttgtttctccaaggtttgaaaagcagctggcctgcaagctccgtctggtgggccggccccctttgccagtacc

SEQ ID NO: 638791 - DNA, 120 bp, Artificial Sequence
  ENSG00000181192_23 (sequence is synthesized)
cgctgtaggaattggcacagttcacttgcaccagcatgaagatatcctcgccaagaccttcgcttgatgatgacttttgaagaaacactatttctctttaagaaaatggccattaaggcc

SEQ ID NO: 638792 - DNA, 64 bp, Artificial Sequence
  ENSG00000181192_24 (sequence is synthesized)
cccgcctctactaaaaatacaaaaaatagccgggtgtggtggtgggcacctgtgatcccagctt

SEQ ID NO: 638793 - DNA, 120 bp, Artificial Sequence
  ENSG00000181192_25 (sequence is synthesized)
tgctgtccagcctgggtgacagagcaagactgcgtttcaaaaaaaaaaaaaaaaaaacccattaaaagaggcctccttcctccactctctcaacccctctgttgggtaacatgaaaagac

SEQ ID NO: 638794 - DNA, 120 bp, Artificial Sequence
  ENSG00000181192_26 (sequence is synthesized)
tgtattcctctaagatgttgggattgatatacgtgatttaatctgcaataggtggaataaccaggggaactggttatgaatatgtgaatgcaaccagcaaatttatccttgaaggtgtga

SEQ ID NO: 638795 - DNA, 120 bp, Artificial Sequence
  ENSG00000181192_27 (sequence is synthesized)
tatgtgaatgcaaccagcaaatttatccttgaaggtgtgatggtagaaataggaaaacaacaaaagaaaaacaataacaaaaaaagaaagtgtgatggctgggtgcagtggctcacgcct

SEQ ID NO: 638796 - DNA, 82 bp, Artificial Sequence
  ENSG00000181192_28 (sequence is synthesized)
aagaccagcctggtcaacgtggtgaaacgccgtttctactaaaaatatgaaaattagttgggtgtggtggcatgcgcttgta

SEQ ID NO: 638797 - DNA, 84 bp, Artificial Sequence
  ENSG00000181192_29 (sequence is synthesized)
gtgagccgaaatggcgccactgttaaattaaaaggaaagtatgatagtgttatggattttagctctgagtgagctggaaaacta

SEQ ID NO: 638798 - DNA, 120 bp, Artificial Sequence
  ENSG00000181192_30 (sequence is synthesized)
tagtgttatggattttagctctgagtgagctggaaaactaggtcattatctagatgatttcagacttgaccctaattgaccatatatgaccaggaaacacttctgagtttacagctccgt

SEQ ID NO: 638799 - DNA, 120 bp, Artificial Sequence
  ENSG00000181192_31 (sequence is synthesized)
ggagatgacctcaacactgcctcttgatttgtttgatgcatgtcactttcattaattttccccctcctttttgaaagtcctgtggcagtactaatattttcattttatgtaatctctggt

SEQ ID NO: 638800 - DNA, 120 bp, Artificial Sequence
  ENSG00000181192_32 (sequence is synthesized)
gctgctttccagtcactgtatgaagtgtctccccaacactagcaaatctaggtcctactaaatacaaatctctgggtggatgatcttctagtactgtatttttaaattaaggagttttag

SEQ ID NO: 638801 - DNA, 120 bp, Artificial Sequence
  ENSG00000181192_33 (sequence is synthesized)
ttataatgaaattgatttgtagtctgttttgccgtaaacttgtttttctttaaattgttcttacagtgatatcttactatttttaactgtctggggtttctgatatggggatttcagccc

SEQ ID NO: 638802 - DNA, 120 bp, Artificial Sequence
  ENSG00000181192_34 (sequence is synthesized)
ctggttaatcagtcttgtccctacaagtccctgatgcagtatgtttatttgtgatgtttaaagaacatttcttggctgggcgctgcggcttgcgcctgtaatctcagcactttgggaggc

SEQ ID NO: 638803 - DNA, 120 bp, Artificial Sequence
  ENSG00000181192_35 (sequence is synthesized)
aataaataaatagaaagagagagagaggaaaaaaaaagaaaagaacacttctttatttgagggactttcccaacaccaggtgcttggggatttcttagagatcaccaaccgactccctca

SEQ ID NO: 638804 - DNA, 120 bp, Artificial Sequence
  ENSG00000181192_36 (sequence is synthesized)
ctgtgaaattaaaccaagtactggaaacgtaactaaacagcgaaccatgtagcttcacctgactcagtgctgggggcctctaccatctactgtgcttgtgtcatgatgctttttctctga

SEQ ID NO: 638805 - DNA, 120 bp, Artificial Sequence
  ENSG00000181192_37 (sequence is synthesized)
agtggtgtgggaagtaccaggggactggcagaagcccaggccctctctacttttaccagcaactgatcatgtctttcagaatccatgtacatataggctgttctagccacagtggtagat

SEQ ID NO: 638806 - DNA, 120 bp, Artificial Sequence
  ENSG00000181192_38 (sequence is synthesized)
ttatgattcacatccgaaagtgtgccttagttatcaatttaacatttctctagtattcatatcccttttcttaccatatacctcagtgtatccttcctgtgtcaagccttataaatcatg

SEQ ID NO: 638807 - DNA, 120 bp, Artificial Sequence
  ENSG00000181192_39 (sequence is synthesized)
taatttagtgccactcatgtaaatcagtaaaatcacaaaggtctatttaatgaaaacgatttaccaatgttgtttttttttaacaagaaaaaaaataaaagcacattgtcattttttttc

SEQ ID NO: 638808 - DNA, 120 bp, Artificial Sequence
  ENSG00000181192_40 (sequence is synthesized)
ggtcgtttgtttctccaaggtttgaaaagcagctggcctgcaaggtaatcacacgttttctctggtagtgttttgtgttttgtgtgcatgttgtttttcttttctttctttctttctttt

SEQ ID NO: 638809 - DNA, 120 bp, Artificial Sequence
  ENSG00000181195_0 (sequence is synthesized)
cggcgagggtcctgccgagggaccccgttctgcgcccaggcaggctcgaagcacgcgtccctctctcctcgcagtccatggcgcggttcctgacactttgcacttggctgctgttgctcg

SEQ ID NO: 638810 - DNA, 120 bp, Artificial Sequence
  ENSG00000181195_1 (sequence is synthesized)
gccccgggctcctggcgaccgtgcgggccgaatgcagccaggattgcgcgacgtgcagctaccgcctagtgcgcccggccgacatcaacttcctggcttgcgtaatggaatgtgaaggta

SEQ ID NO: 638811 - DNA, 120 bp, Artificial Sequence
  ENSG00000181195_2 (sequence is synthesized)
aactgccttctctgaaaatttgggaaacctgcaaggagctcctgcagctgtccaaaccagagcttcctcaagatggcaccagcaccctcagagaaaatagcaaaccggaagaaagccatt

SEQ ID NO: 638812 - DNA, 120 bp, Artificial Sequence
  ENSG00000181195_3 (sequence is synthesized)
tgctagccaaaaggtatgggggcttcatgaaaaggtatggaggcttcatgaagaaaatggatgagctttatcccatggagccagaagaagaggccaatggaagtgagatcctcgccaagc

SEQ ID NO: 638813 - DNA, 120 bp, Artificial Sequence
  ENSG00000181195_4 (sequence is synthesized)
ggcagtgataatgaggaagaagtgagcaagagatatgggggcttcatgagaggcttaaagagaagcccccaactggaagatgaagccaaagagctgcagaagcgatatgggggcttcatg

SEQ ID NO: 638814 - DNA, 120 bp, Artificial Sequence
  ENSG00000181195_5 (sequence is synthesized)
agaagagtaggtcgcccagagtggtggatggactaccagaaacggtatggaggtttcctgaagcgctttgccgaggctctgccctccgacgaagaaggcgaaagttactccaaagaagtt

SEQ ID NO: 638815 - DNA, 120 bp, Artificial Sequence
  ENSG00000181195_6 (sequence is synthesized)
cctgaaatggaaaaaagatacggaggatttatgagattttaatatcttttcccactagtggccccaggccccagcaagcctccctccatcctccagtgggaaactgttgatggtgtttta

SEQ ID NO: 638816 - DNA, 120 bp, Artificial Sequence
  ENSG00000181195_7 (sequence is synthesized)
ttgtcatgtgttgcttgccttgtatagttgacttcattgtctggataactatacaacctgaaaactgtcatttcaggttctgtgctctttttggagtctttaagctcagtattagtctat

SEQ ID NO: 638817 - DNA, 120 bp, Artificial Sequence
  ENSG00000181195_8 (sequence is synthesized)
tgcagctatctcgttttcatgctaaaatagtttttgttatcttgtctcttatttttgacaaacatcaataaatgcttacttgtatatagagataataaacctattaccccaagtgcataa

SEQ ID NO: 638818 - DNA, 120 bp, Artificial Sequence
  ENSG00000181195_9 (sequence is synthesized)
gggacggcgaggcaggcgctcagagccccgcagcctggcccgtgaccccgcagagacgctgaggaccgcgacgagtcgtgtctgaacccggcttttccaattggcctgctccatccgaac

SEQ ID NO: 638819 - DNA, 120 bp, Artificial Sequence
  ENSG00000181195_10 (sequence is synthesized)
aacttcctgaagcacccccgcatagatcaattcattcattcaacaaatgaatatttgatggaagaggctccagatggagggaagagccagtgcaatgcctcaaaatggagacatggtgta

SEQ ID NO: 638820 - DNA, 120 bp, Artificial Sequence
  ENSG00000181195_11 (sequence is synthesized)
ttattctcaatatgatagaaaatgattcaaggctgagagcaggagagtggcaggatatactgacttatttaaatctcactgtctcccacaaagaacaagttttatctctcctcatgctcc

SEQ ID NO: 638821 - DNA, 120 bp, Artificial Sequence
  ENSG00000181195_12 (sequence is synthesized)
tgagagaagaatgtactgcttatctaccatcatttctgcatccatcgaaacatctgggtttacctgaaaagaaattatataaaactttcagtgttttctaataaaaatgcaatgaataca

SEQ ID NO: 638822 - DNA, 120 bp, Artificial Sequence
  ENSG00000181195_13 (sequence is synthesized)
gacggtgaggccctacgtccgccagcacacccgggcccgcttctccccgacgcccgccctcctcacacttgccttcttctcttccctctagagtcgtgtctgaacccggcttttccaatt

SEQ ID NO: 638823 - DNA, 120 bp, Artificial Sequence
  ENSG00000181195_14 (sequence is synthesized)
tctctccggaatcttgccctgggccgcggacgcccaggaaaagagccgggtgccccaggcagcctcgcgttgggggcgaccgcgccatcccgggaaccgcgaggcgatctgagtcgcctc

SEQ ID NO: 638824 - DNA, 120 bp, Artificial Sequence
  ENSG00000181195_15 (sequence is synthesized)
cacgtctacctaaaagctgtcggccgggagggcggggccccagaaaggagcattcctgcgggcttttgctcgacgatcccctgctgaggctgtcgcggcgagggtcctgccgagggaccc

SEQ ID NO: 638825 - DNA, 120 bp, Artificial Sequence
  ENSG00000181195_16 (sequence is synthesized)
aaaaaatagataataagcaaccatcaataaaaatagtcttatagaaaggcattttgcataataactgatttgcattggaccctacatttagggttgttattgtctcaatgacaaaaggtt

SEQ ID NO: 638826 - DNA, 120 bp, Artificial Sequence
  ENSG00000181195_17 (sequence is synthesized)
tacttagtgactgtctcgctagaattacaacattctgggattttggctcggatgcaaaagacatgtgagaaacgaggttgcctagccaaaattatgtagtgaaatcaatgtaacaaatat

SEQ ID NO: 638827 - DNA, 120 bp, Artificial Sequence
  ENSG00000181195_18 (sequence is synthesized)
ttactgagcttctaccatgagaaagacacttatgattggtactgtggtggatgcagagatgagcaggcgtgctatggctgatgtccagatagaatttcccatctaatgtgatcttgacca

SEQ ID NO: 638828 - DNA, 120 bp, Artificial Sequence
  ENSG00000181195_19 (sequence is synthesized)
tatggcggttcgcaccgggtcggagccgcagcggcgcgagcccgtggtgacctgggtgtctcagctgttcctggaacactgactgaagtcctgccctggctcttagcttcggggatccgc

SEQ ID NO: 638829 - DNA, 120 bp, Artificial Sequence
  ENSG00000181195_20 (sequence is synthesized)
gactatctggggaccggtaagggtagcggtgtcgccgcacaaaccaagtttgttttaaccctgggaattcgggaaccccgagaagtcctctgttcagcacctcggatagcactgggttct

SEQ ID NO: 638830 - DNA, 120 bp, Artificial Sequence
  ENSG00000181195_21 (sequence is synthesized)
ctcctgggctgtcagaaggaagatggctgtcaccacaactcctaacatatcccagctaagggcccctccacacgcagtcatcttcccatctttcccacaaataatgtaattttttgttag

SEQ ID NO: 638831 - DNA, 120 bp, Artificial Sequence
  ENSG00000181195_22 (sequence is synthesized)
tgacatttcggtgcctttctttagatttatgttccccagctctcttaacctcaggtccctcattccctaccctcacctgtaaataggagagagcaaagggatggaaaaggggtacgggga

SEQ ID NO: 638832 - DNA, 120 bp, Artificial Sequence
  ENSG00000181215_0 (sequence is synthesized)
ccacccgcgtgcggcacgcgccggccgcctgcccggatcgcggccaccagtgccgcggcctctcgactcccgccccgccgagccgcgcgcgcgactgccatcctcctcaattgcttttta

SEQ ID NO: 638833 - DNA, 120 bp, Artificial Sequence
  ENSG00000181215_1 (sequence is synthesized)
gctttttacgattttttttgtgcatgcattcattttctgttccgttttgtcctttttaaggcggtggcggcggcgacagcggcgtaagctcgcagcggggagggggcggccggaggatgc

SEQ ID NO: 638834 - DNA, 120 bp, Artificial Sequence
  ENSG00000181215_2 (sequence is synthesized)
ggcgcggggctgcgctcgctacgtccgctgctgctgcccggctcgggcctgagcgccgagcaggatcccaagtgatggtggtttcctcggagggcgagctgagtcctgcgcgactggtta

SEQ ID NO: 638835 - DNA, 120 bp, Artificial Sequence
  ENSG00000181215_3 (sequence is synthesized)
gcacggtggagctggtagccacgcctgctggctggcgtgcgtgaacaggtgtggaccgcaggatctcagcactctgacccaaggggaagcatgtcgaagaaaggccggagcaagggcgag

SEQ ID NO: 638836 - DNA, 120 bp, Artificial Sequence
  ENSG00000181215_4 (sequence is synthesized)
aagcccgagatggagacggacgcggtgcagatggccaacgaggagctgcgggccaagctgaccagcattcagatcgagttccagcaggaaaaaagcaaggtgggcaaactgcgcgagcgg

SEQ ID NO: 638837 - DNA, 120 bp, Artificial Sequence
  ENSG00000181215_5 (sequence is synthesized)
ctgcaggaggcgaagctggagcgcgagcaggagcagcgacggcacacggcctacatttcggagctcaaggccaagctgcatgaggagaagaccaaggagctgcaggcgctgcgcgagggg

SEQ ID NO: 638838 - DNA, 120 bp, Artificial Sequence
  ENSG00000181215_6 (sequence is synthesized)
ctcatccggcagcacgagcaggaggcggcgcgcaccgccaagatcaaggagggcgagctgcagcggctgcaggccacgctgaacgtgctgcgcgacggcgcggccgacaaggtcaagacg

SEQ ID NO: 638839 - DNA, 120 bp, Artificial Sequence
  ENSG00000181215_7 (sequence is synthesized)
gcgctgctgaccgaggcgcgcgaggaggcgcgcagggccttcgatggagagcgcctgcggctgcagcaggagatcctggagctcaaggcagcgcgcaagcaggcagaggaggcgctcagt

SEQ ID NO: 638840 - DNA, 120 bp, Artificial Sequence
  ENSG00000181215_8 (sequence is synthesized)
aactgcatgcaggctgacaagaccaaggcagccgacctgcgtgccgcctaccaggcgcaccaagacgaggtgcaccgcatcaagcgcgagtgcgagcgcgacatccgcaggctgatggat

SEQ ID NO: 638841 - DNA, 120 bp, Artificial Sequence
  ENSG00000181215_9 (sequence is synthesized)
gagatcaaagggaaagaccgtgtgattctggccttggagaaggaacttggcgtgcaggctgggcagacccagaagctgcttctgcagaaagaggctttggatgagcagctggttcaggtc

SEQ ID NO: 638842 - DNA, 120 bp, Artificial Sequence
  ENSG00000181215_10 (sequence is synthesized)
aaggaggccgagcggcaccacagtagtccaaagagagagctcccgcccgggatcggggacatggtggagctcatgggcgtccaggatcaacatatggacgagcgagatgtgaggcgattt

SEQ ID NO: 638843 - DNA, 120 bp, Artificial Sequence
  ENSG00000181215_11 (sequence is synthesized)
caactaaaaattgctgaactgaattcagtgatacggaagctggaagacagaaatacgctgttggcagatgagaggaatgaactgctgaaacgctcacgagagaccgaggttcagctgaag

SEQ ID NO: 638844 - DNA, 120 bp, Artificial Sequence
  ENSG00000181215_12 (sequence is synthesized)
cccctggtggagaagaacaagcggatgaacaagaagaatgaggatctgttgcagagtatccagaggatggaggagaaaatcaagaacctcacgcgggaaaacgtggaaatgaaagaaaag

SEQ ID NO: 638845 - DNA, 120 bp, Artificial Sequence
  ENSG00000181215_13 (sequence is synthesized)
ctgtcagcgcaggcgtctctgaagcggcatacctccttgaatgacctcagcctgacgagggatgagcaggagatcgagttcctgaggctgcaggtgctggagcagcagcacgtcattgac

SEQ ID NO: 638846 - DNA, 120 bp, Artificial Sequence
  ENSG00000181215_14 (sequence is synthesized)
gacctctcactggagagagaacggctgttgcgctccaaaaggcatcgagggaaaagtctgaaaccgcccaagaagcatgttgtggagacattttttggatttgatgaggagtctgtggac

SEQ ID NO: 638847 - DNA, 120 bp, Artificial Sequence
  ENSG00000181215_15 (sequence is synthesized)
tcagaaacgttgtccgaaacatcctacaacacagacaggacagacaggaccccagccacgcccgaagaagacttggacgatgccacagcccgagaggaggctgacctgcgcttctgccag

SEQ ID NO: 638848 - DNA, 120 bp, Artificial Sequence
  ENSG00000181215_16 (sequence is synthesized)
ctgacccgggagtaccaggccctgcaacgcgcctacgccctgctccaggagcaggtgggaggcacgctggacgctgagagggaggcccggactcgggagcagctacaagctgatctgctg

SEQ ID NO: 638849 - DNA, 120 bp, Artificial Sequence
  ENSG00000181215_17 (sequence is synthesized)
aggtgtcaggccaaaatcgaagatttggagaagttactggttgagaagggacaggattccaagtgggttgaagagaagcagctgctcatcagaacaaaccaagacttgctggaaaagatt

SEQ ID NO: 638850 - DNA, 120 bp, Artificial Sequence
  ENSG00000181215_18 (sequence is synthesized)
tacagactggaaatggaagagaaccagctgaagaatgaaatgcaagacgccaaggatcagaacgagctgttagaattcagagtgctagaactcgaagagagagagaggaggtcgccagca

SEQ ID NO: 638851 - DNA, 120 bp, Artificial Sequence
  ENSG00000181215_19 (sequence is synthesized)
tttaacctccaaatcaccaccttccccgagaaccacagcagcgctctccagctgttctgtcaccaggaaggagttaaggatgtgaatgtttctgaacttatgaagaaattagatatcctt

SEQ ID NO: 638852 - DNA, 120 bp, Artificial Sequence
  ENSG00000181215_20 (sequence is synthesized)
ggcgataacgggaatttgagaaatgaagaacaggttgcaataatccaagctggaactgtgcttgccctgtgtgaaaagtggctgaagcaaatagaggggaccgaggccgccctgacccag

SEQ ID NO: 638853 - DNA, 120 bp, Artificial Sequence
  ENSG00000181215_21 (sequence is synthesized)
aagatgctggacctggagaaggagaaggacctgttcagcaggcagaagggctacctggaagaggagctcgactaccggaagcaagcccttgaccaggcttacctgaaaatccaagacctg

SEQ ID NO: 638854 - DNA, 120 bp, Artificial Sequence
  ENSG00000181215_22 (sequence is synthesized)
gaggccacactgtacacagcgctgcagcaggagccggggcggagggccggtgaggcgctgagcgagggccagcgggaggacctgcaggctgctgtggaaaaggtgcgcaggcagatcctc

SEQ ID NO: 638855 - DNA, 120 bp, Artificial Sequence
  ENSG00000181215_23 (sequence is synthesized)
aggcagagccgcgagttcgacagccagatcctgcgggagcgcatggagctgctgcagcaggcccagcagagaatccgagaactggaggacaaactggagtttcagaagcggcacctgaaa

SEQ ID NO: 638856 - DNA, 120 bp, Artificial Sequence
  ENSG00000181215_24 (sequence is synthesized)
gaactggaggaaaagtttttgttcctttttttgtttttctcactagcattcattctgtggccttgatgacttcagtgagccaagaactcgggatagaaaaagaatttatggaataaactg

SEQ ID NO: 638857 - DNA, 120 bp, Artificial Sequence
  ENSG00000181215_25 (sequence is synthesized)
agtccctacggcaaccccaaccccactcaaaccaaattcaacagcgaaacaagctactcaaagtccagagactgcaaacagaatttatgtatatttgacaatagctttaaggggaagcct

SEQ ID NO: 638858 - DNA, 120 bp, Artificial Sequence
  ENSG00000181215_26 (sequence is synthesized)
ttggacgcacggctgggtcctggccagcccaagccgtaaggactctgcagggacgatggggattttgtcaaacttggaaccacatccatgtcccagctctggcactttgaaggcccaagg

SEQ ID NO: 638859 - DNA, 120 bp, Artificial Sequence
  ENSG00000181215_27 (sequence is synthesized)
gggcagagacctgaatgccaggaaactaagtgcaattaccagaaaccaagggatcggcagccaccgcactgtctggggacaggcccgagtcctcgtccccacgccagatgcctccccagt

SEQ ID NO: 638860 - DNA, 120 bp, Artificial Sequence
  ENSG00000181215_28 (sequence is synthesized)
ccgcagtgtgcatgtccagctggacccggctgggtgccgtctctgccctatgtacataaatctccacgaaccgtgctgtgttcgtcctggagtttgtctgccggagcgacttgcaagtgt

SEQ ID NO: 638861 - DNA, 120 bp, Artificial Sequence
  ENSG00000181215_29 (sequence is synthesized)
ccttgtaatgtgaaccccagttcaagtcctggtcagcaaaacctctgaatctgtgcacagctggatgtagcagctggcagccagagagagagggcaggaccctgatgagtggctggagcc

SEQ ID NO: 638862 - DNA, 120 bp, Artificial Sequence
  ENSG00000181215_30 (sequence is synthesized)
ttgcccatcatggagaagccgacctcagggaccccagatttctgaagggaggccgagggctctgtcactcttgtaggtgtgacacggcaaaagtcccagagcatgactgtccctgggacc

SEQ ID NO: 638863 - DNA, 120 bp, Artificial Sequence
  ENSG00000181215_31 (sequence is synthesized)
aggtggactgaggactgatagagcagacatgaccaccaaccaggccacacttgggcctgcgttgcaccttgatcgtaatttgcaaggggctgccgaggaagagatgctgaagcacctgca

SEQ ID NO: 638864 - DNA, 120 bp, Artificial Sequence
  ENSG00000181215_32 (sequence is synthesized)
ggaactaggttatttccatagtggtcccgagaccaggtcctgctctcaccaccgcggggaggaagtgagatcttcctgccttgggaggccacccctggatggagctgggagagctgtcag

SEQ ID NO: 638865 - DNA, 120 bp, Artificial Sequence
  ENSG00000181215_33 (sequence is synthesized)
ggtgttggaggcctcgctggagagtgggtggagtggagcagccacagagagctggacgccagctggggatggtcagcccaggaggaaattccccaagttcctttctgatgatgttcctgt

SEQ ID NO: 638866 - DNA, 120 bp, Artificial Sequence
  ENSG00000181215_34 (sequence is synthesized)
tgttattctaggctgggtggggtggaggcatctccagaagaagccacctgctcacaggatgcctctcccaaacttctgcgcgggaagacgtttggaattagaatggatgaagtgaaatag

SEQ ID NO: 638867 - DNA, 120 bp, Artificial Sequence
  ENSG00000181215_35 (sequence is synthesized)
aagactgaatgtgacgaggaggctggctgtgtctgcatgggaagagccggctgaaggccaggccgggccatcctcagctggctgcaggtggacgggctcaggccctgctcatcaggtaga

SEQ ID NO: 638868 - DNA, 120 bp, Artificial Sequence
  ENSG00000181215_36 (sequence is synthesized)
aggaacggttctgtggtctctggtgaggaggacctttggacaaaagggaaaggactgaaatgtaggcagttgagggaactcatggggtgagggcaacagaggagctagaagttctcagaa

SEQ ID NO: 638869 - DNA, 120 bp, Artificial Sequence
  ENSG00000181215_37 (sequence is synthesized)
ggccagatccatggatggagaaggacacggtgccctgcacagaaggggccctgccagccagggagggctgctcacaccacatcccaggatccatctctaagcagacatgcaccgggatgg

SEQ ID NO: 638870 - DNA, 120 bp, Artificial Sequence
  ENSG00000181215_38 (sequence is synthesized)
cccagtattacccattctcttttgaaatcaaaaccccaaagcacccactggctcagcctctgtgacttaccaacacctggtgatgaaatatgaacaaactgatgtcggttgaaaacacag

SEQ ID NO: 638871 - DNA, 120 bp, Artificial Sequence
  ENSG00000181215_39 (sequence is synthesized)
gcatcttagcagcccaggggcgatgggagtgtggggtcgcacagtgagtgaaaacaaaggcacgcttactctttccggccgggaagcacaggaggcgtcgctgtgctcgcttctgcgggc

SEQ ID NO: 638872 - DNA, 120 bp, Artificial Sequence
  ENSG00000181215_40 (sequence is synthesized)
agaagtctaggggcacccatgggtctctggaatgtcggtccagcacccttgcagccgctgcaggagtgcggtcctcatacctgcttgtccccgtccttcagcgggtgaagggcagtgtct

SEQ ID NO: 638873 - DNA, 120 bp, Artificial Sequence
  ENSG00000181215_41 (sequence is synthesized)
gtgtctgctgggctctcccactcagatcatgcgaccaaaatggccttggctttgaggtcagacccatttgtccctgccagcccggcctcttcctgctgtattgcactggcaatgtccttg

SEQ ID NO: 638874 - DNA, 120 bp, Artificial Sequence
  ENSG00000181215_42 (sequence is synthesized)
ccgctctgaggaatggtagtgatagttcccatgtgtggccttgggagaggtctgagctggacggttagacccgcaggctcccacaggccaccgtggctgctggtgggagacatagcatct

SEQ ID NO: 638875 - DNA, 120 bp, Artificial Sequence
  ENSG00000181215_43 (sequence is synthesized)
gctgttctctccttgggagctgtcctcggaggagtccatgtggccggcccgggcccaggacccgttctcttttgccctccgggaggcggcgcaggaggaagcatgaggctcacactggca

SEQ ID NO: 638876 - DNA, 120 bp, Artificial Sequence
  ENSG00000181215_44 (sequence is synthesized)
ggatattttcctgaacaatctgaagtcacaaacaccaccttgaaatctccgggaagtcaatgttgcaaactcacttaattttattattaagtcttgccccatgaaatatttctgagatgg

SEQ ID NO: 638877 - DNA, 120 bp, Artificial Sequence
  ENSG00000181215_45 (sequence is synthesized)
agccaacagccaagggacggactgaggagagtttcagctacgtcatcagagcccccagcagtgaggggttcgacataatgaacgttgatgtgaagattgacacatcctggatattccagg

SEQ ID NO: 638878 - DNA, 120 bp, Artificial Sequence
  ENSG00000181215_46 (sequence is synthesized)
acatggaagatagtgctgaggagcgggaatgtcttcaggaagaagcagctggccgcccagacatggatatgggtgcgctcaggaggcagctggagtcctccgagcagaagctgtcagcag

SEQ ID NO: 638879 - DNA, 120 bp, Artificial Sequence
  ENSG00000181215_47 (sequence is synthesized)
cagaggacaagtacgtgacatcggagtccgggctgagaagcagaattcaggagctggagctgtcagaaaggaaactcctccggaaggtggaccagctgagcacccacgtggcccaggaga

SEQ ID NO: 638880 - DNA, 120 bp, Artificial Sequence
  ENSG00000181215_48 (sequence is synthesized)
gaagcgcctggctccaggcccaggagaagctggcggcgctgcagggggagctggccagccagatccgggaggagagcgtggccaggcggcagcagtggcggctgcggcggttgcaggagc

SEQ ID NO: 638881 - DNA, 80 bp, Artificial Sequence
  ENSG00000181215_49 (sequence is synthesized)
ggttgcggcgcaaggacgaggcactggggcagcaggcggcggccctggagcgctgccggcggacccagcggcgccagctg

SEQ ID NO: 638882 - DNA, 120 bp, Artificial Sequence
  ENSG00000181215_50 (sequence is synthesized)
ggcctcctgctggcccagtgggacaccgcggccccaggctcccagggcgccaccgaggcggctgcggaactgcgcgccctgcaggcgagggcagagcgcagcgagcgcgagcgggaagag

SEQ ID NO: 638883 - DNA, 120 bp, Artificial Sequence
  ENSG00000181215_51 (sequence is synthesized)
aggagcaccgggccaccgagcgccagctccgcgggcagctggaggagctgcgctgctgcatctatgggctgaagctgtcagagattggcctgcagggccaggtggaggacctcgcccagc

SEQ ID NO: 638884 - DNA, 120 bp, Artificial Sequence
  ENSG00000181215_52 (sequence is synthesized)
aaaaccagtgcctgcgagaggagctgggagcccaggcccctattggtcactgcagcctggatgctctgggctgtgttcagggtgactcactgcccctgcccagggaggaggccctggacc

SEQ ID NO: 638885 - DNA, 120 bp, Artificial Sequence
  ENSG00000181215_53 (sequence is synthesized)
cctgcagaagccaagactggcggaactccctgcggtccaatgatgcacccagacaaagggccccagcaggccagtccccagaggggccctgcacctggagccgcatcaggcctggacggg

SEQ ID NO: 638886 - DNA, 120 bp, Artificial Sequence
  ENSG00000181215_54 (sequence is synthesized)
cctcttctgttttggctccaggcccggagaccacaagcgagctccccagagacctggccggatccaaccgtgaacagcttactctggcagagcccagcttggatgaacagattcttctcc

SEQ ID NO: 638887 - DNA, 120 bp, Artificial Sequence
  ENSG00000181215_55 (sequence is synthesized)
tggtctgtggctgcccaccagaggagtgcttggacgagtcactcctccgcatggacctggcctggatttcagagaatctagcagctgacccagctgcagaagcctttctcctggtgcaga

SEQ ID NO: 638888 - DNA, 120 bp, Artificial Sequence
  ENSG00000181215_56 (sequence is synthesized)
catccgcactccctctctgggggccggctggggactccgcttcttggcgaccactgctgctccaggaggttccctcagatggacaaaaaatccaagaagagttggccaccaggtccccgc

SEQ ID NO: 638889 - DNA, 120 bp, Artificial Sequence
  ENSG00000181215_57 (sequence is synthesized)
ctcctcccaaagccacaggacacccaggctgggattgtcaccagacaagaggccgcggtgcctccctcttccacgaggccccctacatttcaaatcacccatttctgaaaaaacacccca

SEQ ID NO: 638890 - DNA, 120 bp, Artificial Sequence
  ENSG00000181215_58 (sequence is synthesized)
aggatctgaaagacacttggaacaatggaggaggaagccttgcggggagaactgaagaggggaaggcaagggggactttgggcaggaaggggaaaaaccttggtgacaagtaccagctaa

SEQ ID NO: 638891 - DNA, 120 bp, Artificial Sequence
  ENSG00000181215_59 (sequence is synthesized)
gtcaggaaagccatcagaacctgagcttggagaatggggctggagctgcagaggacgtgcaggatcagaatggggcttcagagactaaggccgccacctgccgccctgggtcctggcagg

SEQ ID NO: 638892 - DNA, 120 bp, Artificial Sequence
  ENSG00000181215_60 (sequence is synthesized)
agtttttgatgcctcttctacagggggaggcctcagtatcaaaggagggtcccgaatccctgagcaggagggaaagggtggaaggatacgtctggggtctccgaggaggactgtcatcag

SEQ ID NO: 638893 - DNA, 120 bp, Artificial Sequence
  ENSG00000181215_61 (sequence is synthesized)
agaatgaggaagtggcacccccagccaccttctccagggctcatgagaccaaagagccatggccaacagacagtcagctcctcgcagggaaagtcagagccactgggaggacagctaggg

SEQ ID NO: 638894 - DNA, 120 bp, Artificial Sequence
  ENSG00000181215_62 (sequence is synthesized)
gcaaggaggaaaaccaagtgtggcttggaaatgctctgcttctgcaaggaggaagcctggaggacaaagggctagaggaagaggatgagatgccgcatcaagaagcatccggtctggggt

SEQ ID NO: 638895 - DNA, 120 bp, Artificial Sequence
  ENSG00000181215_63 (sequence is synthesized)
gcaggggtgcccccgaggagcctgactcccaggaacatgagagcaaggaaatgcttttctttgcaggagagacaggtttgccactgtttcccagatttgccttatcagttgaaggggccg

SEQ ID NO: 638896 - DNA, 120 bp, Artificial Sequence
  ENSG00000181215_64 (sequence is synthesized)
aacccactgatcatggtcatccacaggctgtgagcaaaggacacaacaggtgtgcactcacaatcgatgagcttgcacaggacgtggaggcttgtttccagcagctgtccaccctgcagc

SEQ ID NO: 638897 - DNA, 120 bp, Artificial Sequence
  ENSG00000181215_65 (sequence is synthesized)
cgggcagcaggggctggcagtgctcagcctctgcatgtaggggagagaactggagctttgctcagaagtggcacagtggctgggagagagctcactctcagcaggtttggggaaattggg

SEQ ID NO: 638898 - DNA, 120 bp, Artificial Sequence
  ENSG00000181215_66 (sequence is synthesized)
gtatttgttctaatgaagaagcgaagtctaaagagagtggtgaaggtgataagccgggaaagaccacggccctgggcaccagcgaagttcctggtaacccagggacactgcctcattggg

SEQ ID NO: 638899 - DNA, 120 bp, Artificial Sequence
  ENSG00000181215_67 (sequence is synthesized)
atgaagccagcccaaaccctccacaggggcctgctgagccctggggtgccctcgagagagtgaggagcaggtttcatcagctcatttctggattgaagaaacagagaagccagattttac

SEQ ID NO: 638900 - DNA, 120 bp, Artificial Sequence
  ENSG00000181215_68 (sequence is synthesized)
atgacaacaccaaacttcacggagaccaagagaggttccatgaaagagtgtgcgcccttgaaagagagagagagagagaggtgacaaaaatatccaggctcgagcgggataaccacaggc

SEQ ID NO: 638901 - DNA, 120 bp, Artificial Sequence
  ENSG00000181215_69 (sequence is synthesized)
tggtaggggacatctctcagttaaagaaagaactggatcaatatttacaggcaatctctgaccttgaagactgcaatgggaagagttactgcaaaattttggagcttgaagaggaaaatg

SEQ ID NO: 638902 - DNA, 120 bp, Artificial Sequence
  ENSG00000181215_70 (sequence is synthesized)
aaacactgaaagggaatctgggccaactccagaaagccacgtctgagagtgtcaggaaatccaaagacacgatggagcaagtcaccctggaaaactggaagctccagacactgatctcgg

SEQ ID NO: 638903 - DNA, 120 bp, Artificial Sequence
  ENSG00000181215_71 (sequence is synthesized)
agcttggcgtcagttataaagagctgataaaggatatcgtgctaggaatagaagacatgatccgggccttaagtggggagaacgagcaccttctacgcagggtccatgtcctggagaggg

SEQ ID NO: 638904 - DNA, 120 bp, Artificial Sequence
  ENSG00000181215_72 (sequence is synthesized)
aagtcaccttgcagaggagcacggatcaggggcgtttggtgaggggaagggagcacctccagggaaaagccaagatgcacgctctagacaaagaggtgcaggtgactccactcacaggac

SEQ ID NO: 638905 - DNA, 120 bp, Artificial Sequence
  ENSG00000181215_73 (sequence is synthesized)
agctgctttcaagagcctgtgggccacccttggaggaggaaatgagtctggctgcagggcagacaggaccttccacaggcaccgggaattccagacgcggtgctgattctccccctccat

SEQ ID NO: 638906 - DNA, 120 bp, Artificial Sequence
  ENSG00000181215_74 (sequence is synthesized)
cgctggtctggagaaacactggtgtagccaatgccctgcaaggaaatgtcagtggagcagaagtgaaagaagcacatttggagaaagaggagaagaggcccaggtgttctgtggctcagg

SEQ ID NO: 638907 - DNA, 120 bp, Artificial Sequence
  ENSG00000181215_75 (sequence is synthesized)
ggcaagctctgagctccctgagcaatggccccatgctccgggactcagaggccgaggttactgaggaggatcccaggctgcgggcccagcagctccatcaccgggtgctgaccctgcagt

SEQ ID NO: 638908 - DNA, 120 bp, Artificial Sequence
  ENSG00000181215_76 (sequence is synthesized)
gccagctcagggaccagggcgctgcccaccaggcgtctctggacgaggccacccgcctccaggaggagctccaggccaagcttgaagaacttcagaaaaagcaacatgaagcaaagttgg

SEQ ID NO: 638909 - DNA, 120 bp, Artificial Sequence
  ENSG00000181215_77 (sequence is synthesized)
cagtgactcccctgaaggccaagatagcttccctcgtccggaagtgccgggagaggaaccgcctgatcacccacctgctgcaggagctgcacagacatgggctggggaacctcctgctct

SEQ ID NO: 638910 - DNA, 120 bp, Artificial Sequence
  ENSG00000181215_78 (sequence is synthesized)
ccgagctggcgcagaacatgctcaacgacgtggcactggctgagtacacggccaccttcctggctccgggagtcccagagacaagccaccacctggacgtcaagtctgagatgacggcag

SEQ ID NO: 638911 - DNA, 120 bp, Artificial Sequence
  ENSG00000181215_79 (sequence is synthesized)
ctttaagagctcagacatacctcttgaatcctgaaatggacagtgtcctccaaagctcattgtcttcagagtcctggcctattcccgagccggagtggccagcacagacagcccaactgg

SEQ ID NO: 638912 - DNA, 120 bp, Artificial Sequence
  ENSG00000181215_80 (sequence is synthesized)
attctctgaagctccctctgtccttggtgtccacgcttgatcctggaacgtgcctggcagcggtcactgtggaaccaggtctccccgcacaacgtctgcaagaaaaaggcggaatgccct

SEQ ID NO: 638913 - DNA, 120 bp, Artificial Sequence
  ENSG00000181215_81 (sequence is synthesized)
gtcctgccctccaagtcgataacgtcccagcaccctctgagctcctgagcccagcaaggatcctggcttttcaccaagagcttagacaaagcatttgcagcaattcccaggtccataaat

SEQ ID NO: 638914 - DNA, 120 bp, Artificial Sequence
  ENSG00000181215_82 (sequence is synthesized)
caccgctggagttagaaatgtaatagggccactcattctccggagccatttcatagactccataaatatttgaagcagaaccttcagagagtgctttaagaaattggtagcaatcagagc

SEQ ID NO: 638915 - DNA, 120 bp, Artificial Sequence
  ENSG00000181215_83 (sequence is synthesized)
cctcatttagtggcaagtggttttgccttcggctttgggattttgtgttcattgtcagagcttgagagaaacgctggcctgtgcctggcaaattctgaggagtttggctttggcaatgtc

SEQ ID NO: 638916 - DNA, 120 bp, Artificial Sequence
  ENSG00000181215_84 (sequence is synthesized)
aaggcagcataggaaatatttactgtaccaaaacctattgaatgattggtccagaggttctcaactgggcacagttttagccccccagggaaaatctggccatgtctggagacatttttg

SEQ ID NO: 638917 - DNA, 120 bp, Artificial Sequence
  ENSG00000181215_85 (sequence is synthesized)
gttgtcacagctgggacactgctactggcatctggtgggtagaggccagggatgctatgaaatgtcctacaatacccaggccagcctcctacagcaaagaattacagcccgagggtcgcc

SEQ ID NO: 638918 - DNA, 120 bp, Artificial Sequence
  ENSG00000181215_86 (sequence is synthesized)
agtgctgaggtcgagagtccaggacggatctcatagctcccaacaagatcagccatggagaattgttttgttttgttttttctctgcccccggggtccttcccatgttttaaaagatttt

SEQ ID NO: 638919 - DNA, 120 bp, Artificial Sequence
  ENSG00000181215_87 (sequence is synthesized)
ttgtctactaagtgaaacgcctaagtcaccatatattttacatttaaaaacattaaaactaaccagaactttctaatcagtccatccactccaaaaacgtctgttgatatccactggatg

SEQ ID NO: 638920 - DNA, 120 bp, Artificial Sequence
  ENSG00000181215_88 (sequence is synthesized)
ccaggcaatgtggcatgaaggagaagagacaagtcaatgttgatcctggcgccggggacctcacaggacaatgggagagatactcctgtgagtaaatcagcacgcacgcaagtgtcacat

SEQ ID NO: 638921 - DNA, 120 bp, Artificial Sequence
  ENSG00000181215_89 (sequence is synthesized)
gtgccctgagcaacgggatgaaggtaagggtccgttctacttggcttgggacaactggaagtcagccacaaaggaatggctgggcagtgtccggtgggtgaggtgggaagggtgctgctg

SEQ ID NO: 638922 - DNA, 120 bp, Artificial Sequence
  ENSG00000181215_90 (sequence is synthesized)
tacgagggaacgcatgtgcaaaggccctgaggcataaaactgaactgtggatgtgcccctggaggggaagtgggcaaagcatgctcttgtcaagccagctgcaagcagtcactgcatcgt

SEQ ID NO: 638923 - DNA, 120 bp, Artificial Sequence
  ENSG00000181215_91 (sequence is synthesized)
tcccatccagcaccccttccttccaccgagaacagagactcgtgccccgaatcaggtgggcgacccaggagaagagcacttctatcctgagggcagccccccaaaaagagagtctagggg

SEQ ID NO: 638924 - DNA, 120 bp, Artificial Sequence
  ENSG00000181215_92 (sequence is synthesized)
gcttggacgacacacaccagaccctgacccaggctcacccaccagagatgtcacctctctctttgggaaggggctgaggaggggcttaagggaaaggccaaagccgctacctgtccaatt

SEQ ID NO: 638925 - DNA, 120 bp, Artificial Sequence
  ENSG00000181215_93 (sequence is synthesized)
ctgtcctctcctggaagtgactgtcccttcatggaaggacaaacaaggacaaggacaaggaactgacggctccccaggaagtgtcaaagtgtatagatttattttaacgtagtttagctt

SEQ ID NO: 638926 - DNA, 120 bp, Artificial Sequence
  ENSG00000181215_94 (sequence is synthesized)
tttgtttgaaatgaaaattacacagagttcccgtagactcttccccgggcttcccttgatgttaacatctcatgtgacttatgttgtacaattatagaaactagtgggttttatttcgag

SEQ ID NO: 638927 - DNA, 120 bp, Artificial Sequence
  ENSG00000181215_95 (sequence is synthesized)
gaaaattggggagccattgagacgtaagaaaggcagcctcagcacattgagttccaccctttaaattcgtttatggggttttctgatgggttagcacattcatccatgtattcctggatt

SEQ ID NO: 638928 - DNA, 120 bp, Artificial Sequence
  ENSG00000181215_96 (sequence is synthesized)
gatttacccacagatctgtctatttatttatttattcaatatgcatttagtgactgctgtgcgagtgtctggctggatgctgctggggaagaagtgaagatgatgctgtccacctaggtt

SEQ ID NO: 638929 - DNA, 120 bp, Artificial Sequence
  ENSG00000181215_97 (sequence is synthesized)
ttcagggacccccctggagaccctgtggccccgttaccacccctcaagaatccccagattggaaaccactgcggtgatccctttgttggttcaaccaccccagggcttccctataatttc

SEQ ID NO: 638930 - DNA, 120 bp, Artificial Sequence
  ENSG00000181215_98 (sequence is synthesized)
caagcaggaagtgacctgcagcactggtttggtgatccgccttctgcctccctctgtattttgggacaatgtcattagctttgagcatcaggaacatgacagagagaggacagaaacccg

SEQ ID NO: 638931 - DNA, 120 bp, Artificial Sequence
  ENSG00000181215_99 (sequence is synthesized)
gtgcagccgaggacagccagctgagcccttgctgagccagcgagatgcagcgtggtgccaccacatctggtctccaggagtcccaggagctcagacgtccgtcgtcttgtgacttcatgc

SEQ ID NO: 638932 - DNA, 120 bp, Artificial Sequence
  ENSG00000181215_100 (sequence is synthesized)
tcccctctgccgcgctcacgtgctgggcctgggcagaaaggcaacccaggaaatccattaaagcaagccaagacgacctttgcagcgtaacccaacgattccctaataaatcatgtttcc

SEQ ID NO: 638933 - DNA, 120 bp, Artificial Sequence
  ENSG00000181215_101 (sequence is synthesized)
agtacaggatggcggactcccctcgcctggtctgtagaccccagcatttggaagggcacatggtggctccttgccacccatcagatgctccaggggcaggacctgctctggcaacccagt

SEQ ID NO: 638934 - DNA, 120 bp, Artificial Sequence
  ENSG00000181215_102 (sequence is synthesized)
aggttcactttggtagaacctctgtggactccttagttcttccaggttgaatcctgggcagaaatcacatgaaagctgtgaagcacagacatcagtttagaaattgtgtactttcccgct

SEQ ID NO: 638935 - DNA, 120 bp, Artificial Sequence
  ENSG00000181215_103 (sequence is synthesized)
gaatcccaaatgcacaataactgtacaccttgcggttgcatgaatctacaaggtctcctatgcgccctcattcataaactcaaggctgagaatgttggcaggccaagtcctgcccctccc

SEQ ID NO: 638936 - DNA, 120 bp, Artificial Sequence
  ENSG00000181215_104 (sequence is synthesized)
cggagtgagctgccttggttcacacgggagtggtccagcgacaggacccgacacctcccctccggaagctcttcagcaggacctgcctcgggtcctggggcagctatcctccggggcctg

SEQ ID NO: 638937 - DNA, 120 bp, Artificial Sequence
  ENSG00000181215_105 (sequence is synthesized)
cctgcagtgaaaccatcagtccgtggagatgttcactggattcctgaccagttgtgggtcgggctcaaccctccctctgggttttcaggatttgtaatgatcgctccatttgtgtaaaat

SEQ ID NO: 638938 - DNA, 120 bp, Artificial Sequence
  ENSG00000181215_106 (sequence is synthesized)
aggccggcattttctcttgttactgagatgtatttttctatgtgagttaaatgtataatttgtgtaattttgtacattaaaatgtatgctttttcacaattaaagggtttttttcccttc

SEQ ID NO: 638939 - DNA, 120 bp, Artificial Sequence
  ENSG00000181215_107 (sequence is synthesized)
cacaggagctggtctcaggctgccccacaggcagggaatgactacgagtgaccctgaggcctctggagaccagccagacggtccagcctggctctgcagcagaaaacaatttgtcacacg

SEQ ID NO: 638940 - DNA, 120 bp, Artificial Sequence
  ENSG00000181215_108 (sequence is synthesized)
gactgtcagcaaacaacaatggcggacttccctggaggcggagccctaaaccctgcgaggaaggaagacagcacaggggcaaacatagcaagctggaaaatatttacatccttctcaact

SEQ ID NO: 638941 - DNA, 120 bp, Artificial Sequence
  ENSG00000181215_109 (sequence is synthesized)
gaccgacagagcagaggtggcctatgatttacaatcctttccagtgagccaaattataagccaagcaaccatcttcctgtctcaagtcactaatagggaatacttctactctgtatgata

SEQ ID NO: 638942 - DNA, 120 bp, Artificial Sequence
  ENSG00000181215_110 (sequence is synthesized)
ccaacctggggacccaagagatggctgttgactgtaagaagcccatatttaatgccatgtgagtgacaggaagccgggtctggagtcccaaggacctgtcggctctgctgctcctacgct

SEQ ID NO: 638943 - DNA, 120 bp, Artificial Sequence
  ENSG00000181215_111 (sequence is synthesized)
gggtcgccgtgcacaaataacttaccttcttccaacatcctcttcttcgtctgtttgagggtcatatgcctacttgacagttttgctctgacaaccaaatgagctaatggctggaaaagc

SEQ ID NO: 638944 - DNA, 120 bp, Artificial Sequence
  ENSG00000181215_112 (sequence is synthesized)
acctgaacactgtaagattctttccaagtgtcaggatccttgttgtgtttgtaaaatgcagttccttcgacttaggtatttcactgacggttgtctcggagtgcactctgccataaggac

SEQ ID NO: 638945 - DNA, 120 bp, Artificial Sequence
  ENSG00000181215_113 (sequence is synthesized)
tcattgatttaccattctgcgtagcttccatccaagatgggtgatgaggggatgataggatgatggttttaaaaaatcactgtagtagttatcttgatattatagagctgctgaagaagc

SEQ ID NO: 638946 - DNA, 120 bp, Artificial Sequence
  ENSG00000181215_114 (sequence is synthesized)
ttgggctaggatggagttcccaacctgcacaaaaagttgtatgcatgtgaactctttcctagggagaaggagcatggatttcatcagatttgcaaataagattggtagacaagcacccta

SEQ ID NO: 638947 - DNA, 120 bp, Artificial Sequence
  ENSG00000181215_115 (sequence is synthesized)
gtagccaagcacccctagtctcggcagaaaggactctgtccggaaatccagagacggactctgcctccaacttgctggcgactttaaggctgtcccttggcctctatccgccccagctcc

SEQ ID NO: 638948 - DNA, 120 bp, Artificial Sequence
  ENSG00000181215_116 (sequence is synthesized)
ttatctgtaaaatgggtgtggcacagtcttccagtggctgagttcctactgaggggcaggctctggccagacaggaagcttccacacccagccttcttgcttccagagtaagcgaagagc

SEQ ID NO: 638949 - DNA, 120 bp, Artificial Sequence
  ENSG00000181215_117 (sequence is synthesized)
tcttcttctctcaacttgtgtccatgagttgcgcccaactgaccacagcaccccaaagtgcccaggcatgcagcctcatttcagctccttttgctctgcagttaaagagcatcacggccc

SEQ ID NO: 638950 - DNA, 120 bp, Artificial Sequence
  ENSG00000181215_118 (sequence is synthesized)
agttgctgtgcttggacccagggagtctgcttcctctgacaccatttccctgtaaactgcagggctgtgaggcccgcttacactggcggccaggggcctgacagggacctgtgaaatctc

SEQ ID NO: 638951 - DNA, 120 bp, Artificial Sequence
  ENSG00000181215_119 (sequence is synthesized)
agcatcgcccaggaagatgcagtgaaaatccagctgttgagcggggaaacgtcagtgagccacatgttttcttgccctggctgctgtgagacagtgggtggtgactggaagtcagatctg

SEQ ID NO: 638952 - DNA, 120 bp, Artificial Sequence
  ENSG00000181215_120 (sequence is synthesized)
agaccttagagagtttccagtccacagcgggtactggcagcccttgggccagatttggcccacaaatgtatcatgtttggcttacatttactttttttataattgtgaatgagctctgtg

SEQ ID NO: 638953 - DNA, 120 bp, Artificial Sequence
  ENSG00000181215_121 (sequence is synthesized)
ccactgagctggatacttaaaaatggttaagaaggtatgtttctctaaaactctaaaacgtatcttcttaatcatttttaagtatccatttcagtggcacagagtgcattcacattgtgg

SEQ ID NO: 638954 - DNA, 120 bp, Artificial Sequence
  ENSG00000181215_122 (sequence is synthesized)
tgcaaccatcaccatcatccatctccagaaccttttcatcttgcaaaattagaaacaccatattcatgaaagattcactcctcatttccctgtcccacagctgctggcacccacccttct

SEQ ID NO: 638955 - DNA, 120 bp, Artificial Sequence
  ENSG00000181215_123 (sequence is synthesized)
acttcctatctctatgaatttgaccactctaggacctcatgtgagtggaatcatacagtctttgtcctttcatgactagtttatatcacttagcacaatgttttcgaggttcatgtggca

SEQ ID NO: 638956 - DNA, 120 bp, Artificial Sequence
  ENSG00000181215_124 (sequence is synthesized)
cctttttaaggctgaataatattccaatgtgtggatgtaccacattttgtttatcattcacgcattgagggaccttagggtggcttccacctttttggctactgtgagtattgctcctat

SEQ ID NO: 638957 - DNA, 120 bp, Artificial Sequence
  ENSG00000181215_125 (sequence is synthesized)
actgtgagtattgctcctatgaacacaggtgtacaaatgcctatgttgcattttttaatattggagttagcaagtgacatttaaaaaccaagagatttcatatacaaatctggatttctg

SEQ ID NO: 638958 - DNA, 120 bp, Artificial Sequence
  ENSG00000181215_126 (sequence is synthesized)
gcttctcttggaaaatcagtgtatctgacagcatcgggcttccatcttcctggccacagtcagaggtgaatgaagccagctcgctccctcccccactgagaggcaccccactcagtggac

SEQ ID NO: 638959 - DNA, 120 bp, Artificial Sequence
  ENSG00000181215_127 (sequence is synthesized)
tgcagggcccccactcctttctcctccactcactgaaaaagctgcctggtttccacaggctatggcttggtgacacctcgtctgctcagcacccatcatgttatgggtgaaaatgcagag

SEQ ID NO: 638960 - DNA, 120 bp, Artificial Sequence
  ENSG00000181215_128 (sequence is synthesized)
gcccagggaggaagggtggctggggcccgaggtctcacaggccaggaagtgatacaactgctgaaatgcaggaagggcctgcaactgggcattgcaaagccttgattctacttccagctc

SEQ ID NO: 638961 - DNA, 120 bp, Artificial Sequence
  ENSG00000181215_129 (sequence is synthesized)
tgctacctgcttgtcccaggtccctgggacaaagcccttaaactttctgaacctaaatttcctctttggaggaaaatgggagaaatggaaccttctattgcagcctcgtgaagtattgtg

SEQ ID NO: 638962 - DNA, 120 bp, Artificial Sequence
  ENSG00000181215_130 (sequence is synthesized)
aagacagaggagatgttgtgcattgaccattgaatgcaattgggatgggaaggggtgttactaaaagcacaggccatgtcaggcaacctagcgtctggggatctgttttctcatttgcaa

SEQ ID NO: 638963 - DNA, 120 bp, Artificial Sequence
  ENSG00000181215_131 (sequence is synthesized)
gacaggaaaaggggccacacctttccccactgggctattacaaggattaactgaggcagggaaagaaaagaaaagcatccggcagagggcttggcacccagcagatgcttcacaaatgct

SEQ ID NO: 638964 - DNA, 120 bp, Artificial Sequence
  ENSG00000181215_132 (sequence is synthesized)
acttcttaacaagtaaggtcacgtccaagggttccaaatcctcttcctgcagtacacaacccaggaagagatgtaacatcatgggaacaaccagcttcagagtctattggcctgatttca

SEQ ID NO: 638965 - DNA, 120 bp, Artificial Sequence
  ENSG00000181215_133 (sequence is synthesized)
aaacctaagcttgacgcattagccactgagggcactgggcaggtgagcccatctctctgatctgcaaactcttccattgtttagtggggaaaatatcactgtccttgacagcacaggggg

SEQ ID NO: 638966 - DNA, 120 bp, Artificial Sequence
  ENSG00000181215_134 (sequence is synthesized)
aaatgagaaatggaaggtgctctgcacatagtagacattcaatagagtctaattcctttccttgccttccccagcagagatctgttttctaggttaaaaagacggcatgttttccaaata

SEQ ID NO: 638967 - DNA, 120 bp, Artificial Sequence
  ENSG00000181215_135 (sequence is synthesized)
tcttcaaaaaagggaacaaggaaaagtgtggtttccagcttcccactgaggtttgtcagtcaccaggtttcattcactcattcaaggaacaagcactgattgagcaccactaagcgccag

SEQ ID NO: 638968 - DNA, 120 bp, Artificial Sequence
  ENSG00000181215_136 (sequence is synthesized)
gcaccacagtaggccctggggttctgggagagaacagagtaggccaaattgctgccctggtgggtgggcttccgcgtaagtctgctcagtcgctccatgagtactcattaagggcctctt

SEQ ID NO: 638969 - DNA, 120 bp, Artificial Sequence
  ENSG00000181215_137 (sequence is synthesized)
ctgagctgcctttccaagggccttggctttacctggaaggctcatctgttgctgtctgtgtgattcctgcatatctggacctcacccacttctctggcagtaccagagaatatacctgtc

SEQ ID NO: 638970 - DNA, 120 bp, Artificial Sequence
  ENSG00000181215_138 (sequence is synthesized)
ttgggccccagacctttagacagcatggtgatcctgccagcctgtgctgcttcggttatcccctcagtcatttccagggtccctgggcaaggccaatggagcactcctggggtgaacagt

SEQ ID NO: 638971 - DNA, 120 bp, Artificial Sequence
  ENSG00000181215_139 (sequence is synthesized)
ccatcccactgcacacaggacaccctgtgggccaggtgtgggccccggagagccttgcctcttagtttacctttaggctttgaatgaaatgggaatacggatggaaagccctttgtaaac

SEQ ID NO: 638972 - DNA, 120 bp, Artificial Sequence
  ENSG00000181215_140 (sequence is synthesized)
tcttaagatctacatgtatatacaggattggtgttatttgactttcttctagagagatgacagagaccacccgatgtaggagaaacaggttagggtttaagaccagaatagctaggctgc

SEQ ID NO: 638973 - DNA, 120 bp, Artificial Sequence
  ENSG00000181215_141 (sequence is synthesized)
aatctgggttctgcaagttattggctccgagactagggaaagtggcctcccctccccagtttacttgctgggcaaatggagataataagatacacacctcggcacctactgtgcgcaata

SEQ ID NO: 638974 - DNA, 120 bp, Artificial Sequence
  ENSG00000181215_142 (sequence is synthesized)
atggaaaaactggatgggaaggcattttgcagaattacatgttgtgcatatactttactcatgtcattaatataatgcacatttattatacacctactgtgtgccattatgaacaaggtg

SEQ ID NO: 638975 - DNA, 120 bp, Artificial Sequence
  ENSG00000181215_143 (sequence is synthesized)
atctgtcatatgacaatttggaagaaagtccacaggctaaggcagagaagaaatacttgtcagatggttgtactgcacattcatagattatgattagcaacagccagctagttggcatag

SEQ ID NO: 638976 - DNA, 120 bp, Artificial Sequence
  ENSG00000181215_144 (sequence is synthesized)
caacgtttccccatgaactgctaggcactgttcttaaaataggtatgtcggaggtgtggcggcagtggggacacgctgaggtagtgtggtttgatcgctctgcagaccaatgggctgcaa

SEQ ID NO: 638977 - DNA, 120 bp, Artificial Sequence
  ENSG00000181215_145 (sequence is synthesized)
caaatgcaagacatacaaatggtgacacacatggtgacatacagagggtgacacacatgggctgtgtgctcagagtggccctgccattgcccttcccaggcaagccagcaggtcagtgat

SEQ ID NO: 638978 - DNA, 120 bp, Artificial Sequence
  ENSG00000181215_146 (sequence is synthesized)
taaggtgacagatccggaaacatccattgttggagctggagacagcctcagacttcatctagtgtaagcatccttctcctccccattttacaggcgaggaaactgattcccagatgaggt

SEQ ID NO: 638979 - DNA, 120 bp, Artificial Sequence
  ENSG00000181215_147 (sequence is synthesized)
taactgacatctgcggtccagtgacaaagccacttgactgcaaatgggactgaacgtggttcggatgtcattatgcagtattctccaaccgtgccatggggcaggctctgctgattcaga

SEQ ID NO: 638980 - DNA, 120 bp, Artificial Sequence
  ENSG00000181215_148 (sequence is synthesized)
attttaggtcttggtctgatgcaattagttttctactgggttgcaatctatatggcatcatctagtgatagatgttagtttaaggaattctttcattttgtgtggaattcatgcctgcat

SEQ ID NO: 638981 - DNA, 120 bp, Artificial Sequence
  ENSG00000181215_149 (sequence is synthesized)
ttcgccctggggaagccctgaatcccaggatatcttggaaactcacctactttttggctagacttacatgattgatctttaaatccacccttccgtagccttccttacctagtttctcgg

SEQ ID NO: 638982 - DNA, 120 bp, Artificial Sequence
  ENSG00000181215_150 (sequence is synthesized)
tgtgaaatcaagcaccaaagctggtcaaaggtttttgaattgctttggaatgagattattatatgagtttagttacccatcattggagagaacagggaacgcaagtccttttacagctgg

SEQ ID NO: 638983 - DNA, 120 bp, Artificial Sequence
  ENSG00000181215_151 (sequence is synthesized)
ggtcctttctatttgttttactcagcaatttattgagtaaacttttataaacttgagaggggcttttcatcttcaggctggtgagcttcttttaagagattcacagttcccctttggttc

SEQ ID NO: 638984 - DNA, 120 bp, Artificial Sequence
  ENSG00000181215_152 (sequence is synthesized)
cagggtgaaattctaggtctgaaacgtgaaaccttctgagaactcagccaacttctgagaatagggtgcgagacatttctgacatattttagacacaacctgtttttctctgttgagaca

SEQ ID NO: 638985 - DNA, 120 bp, Artificial Sequence
  ENSG00000181215_153 (sequence is synthesized)
gtgtcatgtggtcggaagggctctgggctgggagtccaggcagggtaagaggggctgcagccctgccacttaccccctccaggtcatttgaaggatgtaaagaccgcattctgtactgat

SEQ ID NO: 638986 - DNA, 120 bp, Artificial Sequence
  ENSG00000181215_154 (sequence is synthesized)
gattcttcaccctggttgcatgttggactcacctgcagagctttttaaaacactgatgcccaagcctctctccaggccactgaaatcaagttgtattgggtggggccctgggcagagatc

SEQ ID NO: 638987 - DNA, 120 bp, Artificial Sequence
  ENSG00000181215_155 (sequence is synthesized)
tatttgaaaagctccccagtgattctaatgggcagctgggggagaaccatgggaatacagtcacatagtctctttccactcccccattccctgtgctatttaagttctaaaatgctattg

SEQ ID NO: 638988 - DNA, 120 bp, Artificial Sequence
  ENSG00000181215_156 (sequence is synthesized)
tgggtttcttctgtgctagactcatatttatttatgctcctagctaggaaagaaatgtgtcctcagagtctacaggaggaaacttctcatctctggagaatttttgaccatgagttggct

SEQ ID NO: 638989 - DNA, 120 bp, Artificial Sequence
  ENSG00000181215_157 (sequence is synthesized)
ttgtaactctaccctcagagggccttttaaacagctggtggttcttaaagaaatgaaatgcatgatgtgttactgctttgagctccgctgtggcagagcctggagctgagctcttggtga

SEQ ID NO: 638990 - DNA, 120 bp, Artificial Sequence
  ENSG00000181215_158 (sequence is synthesized)
ctggtcactgcacaattccatgaaagttcagataatataattgggtggtaaatgacacactaaatgaatctcttgggtgcagttgtttgcatcctaaactccagaatatgcagaaagaga

SEQ ID NO: 638991 - DNA, 120 bp, Artificial Sequence
  ENSG00000181215_159 (sequence is synthesized)
tattctgtgatagatatatctgccagttgggtaagcaaacaaaagtagatttgtcttcggcatgtgcaccaatggcaaactgcattcctacctagctttgaaataaattattggaagttc

SEQ ID NO: 638992 - DNA, 120 bp, Artificial Sequence
  ENSG00000181215_160 (sequence is synthesized)
tctggtgccttaaggtggtgtagaaggaaaagatccctggggtttgttaatgtatttagtcctcttctctgtgttatgggaatttctaaaaacagataatttgtacgttggacctaaaac

SEQ ID NO: 638993 - DNA, 120 bp, Artificial Sequence
  ENSG00000181215_161 (sequence is synthesized)
tgctttcaagaactcagtagacttgggattgaaggattgggttttctctttcccatgtgaacttccctaaatcctactctggcttcagaaagcacagctcctatacaagtctgacttctg

SEQ ID NO: 638994 - DNA, 120 bp, Artificial Sequence
  ENSG00000181215_162 (sequence is synthesized)
catttttagtgtaaatgtaatgtattgagtaatggaaagactaatggaagaattgatagctcaaaaatgagttttttccaacaccatttttttttgtctctgaaaacaccagcaggctgt

SEQ ID NO: 638995 - DNA, 120 bp, Artificial Sequence
  ENSG00000181215_163 (sequence is synthesized)
gtccaagcatgggctgatgatccctttatgtgatgatagaacaagggaggagagagacaaattaatgggattgttaaaaatggctgaaaacttgatactaactttgagtcagtattttct

SEQ ID NO: 638996 - DNA, 120 bp, Artificial Sequence
  ENSG00000181215_164 (sequence is synthesized)
ttttaaagtcgtgtaatacaatatttgtagataggacattgaaagtgatgggggaaataaatgtctatgcagtgacgttatagccattaattctttagtggaaaaggacaaggtctgtac

SEQ ID NO: 638997 - DNA, 120 bp, Artificial Sequence
  ENSG00000181215_165 (sequence is synthesized)
ctaacagcagtaggagagtgagttttggggccagacacgcgacggctctgctgccgactaactgtgcaagcttggacagggtacctacctctcttaacctcaaagtcctccatggaaaca

SEQ ID NO: 638998 - DNA, 120 bp, Artificial Sequence
  ENSG00000181215_166 (sequence is synthesized)
gtgggtaaggtgtgaagattaaagaaatagcacgcttcttaaagcactcagcatgtcagtggatgttgggagccttccctcacccctttgaaaatgggctctgcacaaacacattttggt

SEQ ID NO: 638999 - DNA, 120 bp, Artificial Sequence
  ENSG00000181215_167 (sequence is synthesized)
gggaggctggggtctatcctaccaacctgagttgggggaataagatgatctcttccacagttcgggtttgcacaaccagcttttgcaggtgaggcagggaagaggcatgagtgtcattgg

SEQ ID NO: 639000 - DNA, 120 bp, Artificial Sequence
  ENSG00000181215_168 (sequence is synthesized)
gaataaatgcttttcttggtactcaaatccactttgcacaaataattaaatgatttcctttataatcatgtagtgatttctgattgctgctttgacagatgaccatgaacccattgcctt

SEQ ID NO: 639001 - DNA, 120 bp, Artificial Sequence
  ENSG00000181218_0 (sequence is synthesized)
ctcttgtttttagtctcgcttttcggttgccgttgtcttttttccttgactcggaaatgtccggtcgtggtaagcagggtggcaaggcgcgcgccaaggctaagtcgcgctcgtcgcgcg

SEQ ID NO: 639002 - DNA, 120 bp, Artificial Sequence
  ENSG00000181218_1 (sequence is synthesized)
cggggctgcagttccccgtgggccgcgtgcaccggttgctccgcaagggcaactattcggagcgcgtgggcgccggcgccccggtctatctggccgcggtgctcgagtacttgactgccg

SEQ ID NO: 639003 - DNA, 120 bp, Artificial Sequence
  ENSG00000181218_2 (sequence is synthesized)
agatcctggagcttgccggcaacgcggcgcgcgacaacaagaagacgcgcatcatcccgcgccacctgcagctggccatccgcaacgacgaggagctcaacaagctgctgggccgcgtga

SEQ ID NO: 639004 - DNA, 120 bp, Artificial Sequence
  ENSG00000181218_3 (sequence is synthesized)
gacggagagccaccacaaggccaagggcaagtgaggccgcccgccgcccccggggcccctttgatggacataaaggctcttttcagagccacctactatctcgagaaaagagccgcactg

SEQ ID NO: 639005 - DNA, 120 bp, Artificial Sequence
  ENSG00000181218_4 (sequence is synthesized)
atcctgcagttctttataggccggaggcctgatcaccctaggctcatgaatgagcgcagtggccatggggaagggcgcaacgggaaccgagaccctggggactgattgggctgcatactt

SEQ ID NO: 639006 - DNA, 120 bp, Artificial Sequence
  ENSG00000181218_5 (sequence is synthesized)
gcgaggtgggcaacgtgttctgttaacaacagggaaccctcgtccacaggtggccaccccttgctcttgagtcccacccaaaacctctagtagggttttaataacgctcaccgtaaaggt

SEQ ID NO: 639007 - DNA, 120 bp, Artificial Sequence
  ENSG00000181218_6 (sequence is synthesized)
gtcttcataattactagtgacaagttctcttgactctagcaaggttcccgtgtggtcatcaagtacagaatgcaatttcttaatgatttatctgatattaaaagtatttatgatctctaa

SEQ ID NO: 639008 - DNA, 80 bp, Artificial Sequence
  ENSG00000181220_0 (sequence is synthesized)
gtggggctgtgcggccgcgctgcctccaggaagcctcacgggccttcgtctgccgggccgcggcgccggctcccaggatg

SEQ ID NO: 639009 - DNA, 80 bp, Artificial Sequence
  ENSG00000181220_1 (sequence is synthesized)
gcgggcggcgcggcgcaggggcagccagcgaggagcggcggcagaggaaaggccaggcaggcgccgcctgcggagagcac

SEQ ID NO: 639010 - DNA, 120 bp, Artificial Sequence
  ENSG00000181220_2 (sequence is synthesized)
gacgacgacttcctccgggccgggcgggacagcgcagggccatggccgaggcggtcgcggctccgatttctccgtggacgatggcagccacgattcaggccatggagaggaagattgaat

SEQ ID NO: 639011 - DNA, 120 bp, Artificial Sequence
  ENSG00000181220_3 (sequence is synthesized)
cgcaggctgctcgcctgctttccctagaaggtcgaaccgggatggccgagaagaagctggctgattgcgagaagacagccgtggagttcgggaaccagctggagggcaagtgggccgtgc

SEQ ID NO: 639012 - DNA, 120 bp, Artificial Sequence
  ENSG00000181220_4 (sequence is synthesized)
tggggaccctgctgcaggagtacgggctgctgcagaggcggctggagaacgtggagaacctgctgcgcaacaggaacttctggatcctgcggctgcccccgggcagcaagggggagtccc

SEQ ID NO: 639013 - DNA, 120 bp, Artificial Sequence
  ENSG00000181220_5 (sequence is synthesized)
ctaaggtgcccgtgacctttgatgatgtggccgtgtatttctccgagcaggagtggggcaagctggaggactggcagaaggagctctacaagcacgtgatgaggggcaactacgagacgc

SEQ ID NO: 639014 - DNA, 120 bp, Artificial Sequence
  ENSG00000181220_6 (sequence is synthesized)
tggtctccctggactacgccatctccaagcccgaggtcctctcccagattgaacaagggaaggagccctgcaactggcgccgccctggccccaagattccagatgttcctgtggacccca

SEQ ID NO: 639015 - DNA, 120 bp, Artificial Sequence
  ENSG00000181220_7 (sequence is synthesized)
gtccaggctcggggcccccagttcccgccccagacctcttgatgcagatcaagcaggagggtgagctccagctccaggagcagcaggccctgggcgtggaggcgtgggcagccgggcagc

SEQ ID NO: 639016 - DNA, 120 bp, Artificial Sequence
  ENSG00000181220_8 (sequence is synthesized)
cagatattggggaggagccctggggcctcagccagctggattccggagcaggagacatctccacggatgccacctctggtgtccattccaacttttccaccaccatcccgcccacctcct

SEQ ID NO: 639017 - DNA, 120 bp, Artificial Sequence
  ENSG00000181220_9 (sequence is synthesized)
ggcaaacggatctccctccccaccatccctcttcagcatgctcggacgggaccctgaagctcaacacagcagcctccacggaagatgtaaaaattgtaataaaaacagaagtccaggaag

SEQ ID NO: 639018 - DNA, 120 bp, Artificial Sequence
  ENSG00000181220_10 (sequence is synthesized)
aggaggtggtggccacacccgtacatcctactgacctagaggctcacgggaccctgtttggaccaggccaagccacacggttcttccctagtcctgcccaggaaggagcctgggaaagcc

SEQ ID NO: 639019 - DNA, 120 bp, Artificial Sequence
  ENSG00000181220_11 (sequence is synthesized)
agggcagctccttccccagccaggaccctgtgctggggctgcgagagcccgcccggcctgagagggacatgggtgagctcagtcctgctgtggcccaggaggagacccctcctggggact

SEQ ID NO: 639020 - DNA, 120 bp, Artificial Sequence
  ENSG00000181220_12 (sequence is synthesized)
ggctcttcggaggggtccggtggggctggaatttccggtgtaaaccgccagtgggcctgaacccgaggacggggcccgaggggcttccttactcctccccggacaacggagaggccatct

SEQ ID NO: 639021 - DNA, 120 bp, Artificial Sequence
  ENSG00000181220_13 (sequence is synthesized)
tggaccccagccaggccccaaggccattcaacgaaccctgtaaataccctggccggaccaaaggctttggccacaagccagggctgaagaagcaccccgcggcgccccccgggggccggc

SEQ ID NO: 639022 - DNA, 120 bp, Artificial Sequence
  ENSG00000181220_14 (sequence is synthesized)
ccttcacctgcgccacgtgtgggaagagcttccagctgcaagtcagcctgagcgcgcaccagcgcagctgtggggcgcccgacgggtcgggcccgggcacaggcggtggcggcagcggca

SEQ ID NO: 639023 - DNA, 120 bp, Artificial Sequence
  ENSG00000181220_15 (sequence is synthesized)
gtggcggcggcggtggcggcagcggtgggggcagcgcacgggatggcagcgcccttcggtgtggggagtgcggccgttgcttcacgcgccccgcgcacctcatccgccatcgcatgctgc

SEQ ID NO: 639024 - DNA, 120 bp, Artificial Sequence
  ENSG00000181220_16 (sequence is synthesized)
caccgtctgcggcaaaagcttcatccgcaaggaccacctccgcaagcaccagcgcaaccatgcagcgggcgccaagaccccggcccgaggccagccactcccgacgccgcccgcacctcc

SEQ ID NO: 639025 - DNA, 120 bp, Artificial Sequence
  ENSG00000181220_17 (sequence is synthesized)
tgatcccttcaagagccccgcctccaaaggacctttggcctccacagaccttgtgaccgactggacttgtggcctcagcgtcctgggacccaccgatggcggggacatgtgagcgcctcc

SEQ ID NO: 639026 - DNA, 120 bp, Artificial Sequence
  ENSG00000181220_18 (sequence is synthesized)
agccccatagcccctgccggccgcacgtgtaaaaagccccgtgtgcaggcagcagggcggcgtggaagcttcaggcagacgcgggacggggagaaccaaatgtccaagttgctgaactga

SEQ ID NO: 639027 - DNA, 120 bp, Artificial Sequence
  ENSG00000181220_19 (sequence is synthesized)
tgatcactggagaaagagaaactatccaccaggacagctgccacctctaaaccaagtagaattctctgtgaaatgggagcgccgtagaattttaagtaatttaattgcaaacctgttttg

SEQ ID NO: 639028 - DNA, 120 bp, Artificial Sequence
  ENSG00000181220_20 (sequence is synthesized)
ttgttttttgtttttttttaattcttgaggaaaaagctggaaaatagtaatagggctatttaaattttgtaggtacttttggttttcagggcgtgcatttctgtcactatctcactgagt

SEQ ID NO: 639029 - DNA, 120 bp, Artificial Sequence
  ENSG00000181220_21 (sequence is synthesized)
gagtctgatagtgtgttggaaggttggccagttggggacccctggcccactgactcctggggatggggtcctgtgtgtgcccctgctctgcccagttgggctgagtgggcctagcgcacc

SEQ ID NO: 639030 - DNA, 120 bp, Artificial Sequence
  ENSG00000181220_22 (sequence is synthesized)
aagcccctgggcagtgagggccattgggtcccttggagcacacctcagtgcagcaggaaggacccctccgggagtagcggttgcatttcccagcttgcctctcctgaaaaggccccccaa

SEQ ID NO: 639031 - DNA, 120 bp, Artificial Sequence
  ENSG00000181220_23 (sequence is synthesized)
aagtgctggccccaacttttctctattttgggccatctgtggtacccgtcccaagggcacttggtggtgtcccctagtgtgtgactccctggcctcataaggacgagttgtctgaaatcc

SEQ ID NO: 639032 - DNA, 120 bp, Artificial Sequence
  ENSG00000181220_24 (sequence is synthesized)
cagcgttaggtctggggagatggagaagctgaaactggggagctgcaccacaaacgtctagctctcagcagagctgggagcaaagcctggccgcccaccccaacctggggctgcctccca

SEQ ID NO: 639033 - DNA, 120 bp, Artificial Sequence
  ENSG00000181220_25 (sequence is synthesized)
ctccgtgagatgcttctgtctcctgttcactttgtgtggtagtttcttattttcaaaatgcatctcatttgatcattactgtgaccttgggaagcagcaggacagggatttctttttaga

SEQ ID NO: 639034 - DNA, 120 bp, Artificial Sequence
  ENSG00000181220_26 (sequence is synthesized)
ggtgcaaactgctcagaggggacacacctcagcctctcactgtgggtacacgtggcgtgccatgagtggggaagagcaacaggcgagatgcctcattctactggaacatcactgtgggtg

SEQ ID NO: 639035 - DNA, 120 bp, Artificial Sequence
  ENSG00000181220_27 (sequence is synthesized)
aacagagatttccaggttttccctcttaaaatatttgtcccacaccgacaagagtccagtcaccaggcctcaaaggaacttctgcttgtagcagccgcctcccctgtgccccagcctcct

SEQ ID NO: 639036 - DNA, 120 bp, Artificial Sequence
  ENSG00000181220_28 (sequence is synthesized)
taatgtgtgcactctcagagggcacagctcgcgaggctgggtttgggggccaagtggcttgttcattccagcatctaacatcataaaggtgggcccagatttcttgattcgaccacagtg

SEQ ID NO: 639037 - DNA, 120 bp, Artificial Sequence
  ENSG00000181220_29 (sequence is synthesized)
ctgttcctaccacacaaatatccattcctgttttgttgaagcagccactggtcctcttgtttcccctgcagacggagggacctggcagtgcccattcattcagccccctcatgcatactt

SEQ ID NO: 639038 - DNA, 120 bp, Artificial Sequence
  ENSG00000181220_30 (sequence is synthesized)
ttattaggcgatagactagttaagaaaattgtttctatgtactgtatattttgtacctgtttacacttctaatattgatataactgatattttgaaaaataagagaaaacatcctgttaa

SEQ ID NO: 639039 - DNA, 120 bp, Artificial Sequence
  ENSG00000181220_31 (sequence is synthesized)
aataaaacctaaccagcaccaaggcagtttgttgggttccattcctaggcatgtgtctttgtcactgatgcccccaaacatgccctccaaggggctgtctggtcagctttcttagtgccc

SEQ ID NO: 639040 - DNA, 120 bp, Artificial Sequence
  ENSG00000181220_32 (sequence is synthesized)
tcagcgtctcagatttccctggagccagtcagcacctttgaaagttaagggaaggacaggtggacacaggagaaaaaccaaattcctaaagtgaagacctgctgggtcatttgactaggg

SEQ ID NO: 639041 - DNA, 120 bp, Artificial Sequence
  ENSG00000181220_33 (sequence is synthesized)
agaccacatctctgcaaggctcgacccctgattcctccagaagacccgcccttgaccgtcccacctgccttggttttccctttcgtctgacactgagaaaggtggtggtccgcagaggcc

SEQ ID NO: 639042 - DNA, 120 bp, Artificial Sequence
  ENSG00000181220_34 (sequence is synthesized)
ctcctgtgcgccacttgtgtgaaattaaatgcatcccccatgttcgtcatctcatctcagtcagatttgcactttcctaagggcagaagcatgttccgggctggccgctttgccagtcgt

SEQ ID NO: 639043 - DNA, 120 bp, Artificial Sequence
  ENSG00000181220_35 (sequence is synthesized)
catcgggacattgacagtttagctctacagatgcatttttaagaatcttctaggcgtcaaggacagtgctgaacactagaggacagaaagatggctgagaacagatactattgggctgga

SEQ ID NO: 639044 - DNA, 120 bp, Artificial Sequence
  ENSG00000181220_36 (sequence is synthesized)
aaagagggttacaacccgtgcgcgtccccagcttcctagcctgggtgggaggttctgggtgggtgggtttcgttgtatttacaccatgtgtggaggcttccctcacttccacagcatcat

SEQ ID NO: 639045 - DNA, 120 bp, Artificial Sequence
  ENSG00000181220_37 (sequence is synthesized)
tcaatgagagtaaagaggggctggaaatacgctggttgctggtaagaccctgtaacactctctagctgcaccgtatgatgttcagcagcatccgtggcctctacccaccagtagacaaga

SEQ ID NO: 639046 - DNA, 120 bp, Artificial Sequence
  ENSG00000181220_38 (sequence is synthesized)
tgagtagacacaaactccactgtccatcctgagcctgttggcagggatctgtgtggcgtttatccctgtcccctttgtctgagaagccaggactcccagctcatcccttgccacatttgg

SEQ ID NO: 639047 - DNA, 120 bp, Artificial Sequence
  ENSG00000181220_39 (sequence is synthesized)
cctgacccatccccttgtgagacctcacctccccttctcctcacctcctgcacatccctccactgagccttgtgggactcagggctcagcagacccgccaggtcctgagtgttccctgct

SEQ ID NO: 639048 - DNA, 120 bp, Artificial Sequence
  ENSG00000181220_40 (sequence is synthesized)
cggactgagctccaggggactgcagccctctgagtgcttgtcatcctcttccctgcctctgtcttgagcccaggcccactgggacagggtcctcacccctcagattgtgcctctgccagc

SEQ ID NO: 639049 - DNA, 120 bp, Artificial Sequence
  ENSG00000181220_41 (sequence is synthesized)
ctcaatccctctctagagaccttgcctttgggtcccaggccttgtctttttgctacttctgcagaccttccctctcttctcaacactcttcctgccctcagtcttggccatggcagcctc

SEQ ID NO: 639050 - DNA, 120 bp, Artificial Sequence
  ENSG00000181220_42 (sequence is synthesized)
cttgttgattgtcctgtgcccccccaacccatcccacagccatccgtgactgtgacgacagtgactttaccatacccaccatctccatctccagcacaccactccctggccgcctcctgc

SEQ ID NO: 639051 - DNA, 120 bp, Artificial Sequence
  ENSG00000181220_43 (sequence is synthesized)
cgtcccttcaattccgtctggtgtcctgattccagcagttttccagtccttcaagacctgcaagccatcgaccctgctgccttttcactgccctgactcatcctcatttccctccatgcc

SEQ ID NO: 639052 - DNA, 120 bp, Artificial Sequence
  ENSG00000181220_44 (sequence is synthesized)
caccattgtggtccccccttacacacaccctcagcactcttgcccctgttttgttcattgtatccacttagtgaaatccatcggtgttctgcacctgcagccaagcagctgcacgtggct

SEQ ID NO: 639053 - DNA, 120 bp, Artificial Sequence
  ENSG00000181220_45 (sequence is synthesized)
gcagagaaccaggtaagctggctgctggtgtcacgtgacattcatgaccagcgacttcagtgggcgctctgccacacagtcacaccgtgtctccttagcccaggggccagcaaactgtgg

SEQ ID NO: 639054 - DNA, 120 bp, Artificial Sequence
  ENSG00000181220_46 (sequence is synthesized)
ctgagggccaaacctagctcatctgtttctgtatggtgcacagctgagaacagttttatattttaacccgttttttaaaagagaaacgcaccactcacacagccctctccacgccatctg

SEQ ID NO: 639055 - DNA, 120 bp, Artificial Sequence
  ENSG00000181220_47 (sequence is synthesized)
gcccccttctctgccttcacttctgtgactgctaaactgtcaaccctccagccaaagccccacttcgatctggcaccagatcccacctcatgccatcttctcaagggcaatacaagcaat

SEQ ID NO: 639056 - DNA, 120 bp, Artificial Sequence
  ENSG00000181220_48 (sequence is synthesized)
cctgccttgacctctaccccggcagccactgcccgcttgtctgttcccctttgtggcagagcccttggggacatctgcgcttgctgtctcctgcaccttcccccccactctgttacccct

SEQ ID NO: 639057 - DNA, 120 bp, Artificial Sequence
  ENSG00000181220_49 (sequence is synthesized)
tccaccaaaacctctccaacctcggttaccagggccctccgtggtcctgaatggtctgtcttcttacttggccttgtcccctctactctgccacgtaggcccgtcatctcctgccagccc

SEQ ID NO: 639058 - DNA, 120 bp, Artificial Sequence
  ENSG00000181220_50 (sequence is synthesized)
ctctcctcctgccctgatcccccagtcttgcctcagcccagcagagtaatcccttttagacccaagtcctggctttccatctgacccgcaccgtcagctcaccacctccacttttctctc

SEQ ID NO: 639059 - DNA, 120 bp, Artificial Sequence
  ENSG00000181220_51 (sequence is synthesized)
actctgcccagctgcagagtgctgttccctggtgctgttccctccgccctgtgccagggccttcgcagtgccctctactgggaatcctcctcaggcaggtcccacctgcaggcctttcgt

SEQ ID NO: 639060 - DNA, 120 bp, Artificial Sequence
  ENSG00000181220_52 (sequence is synthesized)
gtcatcggcactgcaggccctccccacccaggactccaggcctactttcctgctttgggtcttccgtgttagacagtgtcacataatatatatgtttcctatttatagattcatcgtatg

SEQ ID NO: 639061 - DNA, 120 bp, Artificial Sequence
  ENSG00000181220_53 (sequence is synthesized)
tcaggtctcctccattagaatgtcaatttcaaaagtataaaaatttttacctgtttaatcattttaggaacctagagtattgcctagtacagagtaggaattcaataactatttgctgaa

SEQ ID NO: 639062 - DNA, 88 bp, Artificial Sequence
  ENSG00000181220_54 (sequence is synthesized)
tgtatttctgatagcatttaaattcctttttaggtctcccaggcctccctaggaattttctgtttattctttctatccacattttaaa

SEQ ID NO: 639063 - DNA, 120 bp, Artificial Sequence
  ENSG00000181220_55 (sequence is synthesized)
ctaggaattttctgtttattctttctatccacattttaaaacgtctgctgtgtactttggtagctgtaaacaatatataatacggttttttgtgttctgaaaaattacatagatgtcatt

SEQ ID NO: 639064 - DNA, 120 bp, Artificial Sequence
  ENSG00000181220_56 (sequence is synthesized)
atatttatcactcattattctgtatttcagacttatccatgttgatacatgtagatcaagttcattccttttaacagatgcttaatattccagaagcaactatattgtaacttattttcc

SEQ ID NO: 639065 - DNA, 120 bp, Artificial Sequence
  ENSG00000181220_57 (sequence is synthesized)
attcctccactgattggcacttaagctttttctgattgttcactctcacaagcaatactgtagtgagcgttcttgcgcctgtttttttgtggccctgtggggatgctgctccagggagta

SEQ ID NO: 639066 - DNA, 120 bp, Artificial Sequence
  ENSG00000181220_58 (sequence is synthesized)
gacccagcggtggcctcaccacgtcgtaggcttgatttcatctcttccgttactgtatggccctccccaggggtacccagtgccagcgggtgctcctagaacttgcttcctaacgtctgc

SEQ ID NO: 639067 - DNA, 120 bp, Artificial Sequence
  ENSG00000181220_59 (sequence is synthesized)
ccagtttccataattacatttttgccgacctgatgggggtgagatggcctctcgtttcaacttgtattttcccccttaagttgcacgccctttttatacgattatttggctgcttctcca

SEQ ID NO: 639068 - DNA, 120 bp, Artificial Sequence
  ENSG00000181220_60 (sequence is synthesized)
gtgagttgtcttctgtttttctattgagatattcttcattttcttcttgattcagggcttctttgtatgtgttctagatacaaatcctttgtctattatttgtgttacaaacattttctc

SEQ ID NO: 639069 - DNA, 120 bp, Artificial Sequence
  ENSG00000181220_61 (sequence is synthesized)
cgtgtcggtggcaggtctttaacgttgtagttcttgtatggaagttttcactgttgaaagagtcaaacatgtcagtcttttcctttatgatctgtgctttttctgtagtgagatatcctt

SEQ ID NO: 639070 - DNA, 120 bp, Artificial Sequence
  ENSG00000181220_62 (sequence is synthesized)
gcttacctcactcaaggtcagaaagatactcttctctattttttttataaatttttaaaagttttgcttttcaaatttaagtctttaatttatctagaattaaaatttgtgtagcttgca

SEQ ID NO: 639071 - DNA, 120 bp, Artificial Sequence
  ENSG00000181220_63 (sequence is synthesized)
agggagggtttcagttttttctcccacaacgatggtctcattttccaacaaagtttgctgaatgtgttagcttttctccactgatttgtgatgcgattctgtcctgagctggtttctgca

SEQ ID NO: 639072 - DNA, 120 bp, Artificial Sequence
  ENSG00000181220_64 (sequence is synthesized)
tgtgcacaagtctgtttctgggtgcttgcttctgtgtcattggtctctttgtcagtctctgcaccaacagcttgctcttttagcttcataataagccttgatatctagtagactaatcct

SEQ ID NO: 639073 - DNA, 120 bp, Artificial Sequence
  ENSG00000181220_65 (sequence is synthesized)
tctctgcttgttcttcaaaaaactgtcttggctattcttggatatttgttcttttatatgaattttgggatctgtatgtcaagttcctaagaaaatcctgttggaaatttgattggaatt

SEQ ID NO: 639074 - DNA, 120 bp, Artificial Sequence
  ENSG00000181220_66 (sequence is synthesized)
gcattgactttacagtctaatttctggagaattgctctcatgacaacattagcctttctactcattggaacactcatttattgaaggcttctatgtgcttgaataagattttacagtttt

SEQ ID NO: 639075 - DNA, 120 bp, Artificial Sequence
  ENSG00000181220_67 (sequence is synthesized)
cttctgatagttgtttttcattataaatgggatttttacagtttattagatgtattagttatttcaggtgtacaggtatgctgttgacttttgtttattaaaaaaaatcttgctctcatg

SEQ ID NO: 639076 - DNA, 120 bp, Artificial Sequence
  ENSG00000181222_0 (sequence is synthesized)
ccaccttcccctcctccggctttttcctcccaactcggggaggtccttcccggtggccgccctgacgaggtctgagcacctaggcggaggcggcgcaggctttttgtagtgaggtttgcg

SEQ ID NO: 639077 - DNA, 120 bp, Artificial Sequence
  ENSG00000181222_1 (sequence is synthesized)
cctgcgcagcgcgcctgcctccgccatgcacgggggtggccccccctcgggggacagcgcatgcccgctgcgcaccatcaagagagtccagttcggagtcctgagtccggatgaactgaa

SEQ ID NO: 639078 - DNA, 120 bp, Artificial Sequence
  ENSG00000181222_2 (sequence is synthesized)
gcgaatgtctgtgacggagggtggcatcaaatacccagagacgactgagggaggccgccccaagcttggggggctgatggacccgaggcagggggtgattgagcggactggccgctgcca

SEQ ID NO: 639079 - DNA, 120 bp, Artificial Sequence
  ENSG00000181222_3 (sequence is synthesized)
aacatgtgcaggaaacatgacagagtgtcctggccactttggccacattgaactggccaagcctgtgtttcacgtgggcttcctggtgaagacaatgaaagttttgcgctgtgtctgctt

SEQ ID NO: 639080 - DNA, 120 bp, Artificial Sequence
  ENSG00000181222_4 (sequence is synthesized)
cttctgctccaaactgcttgtggactctaacaacccaaagatcaaggatatcctggctaagtccaagggacagcccaagaagcggctcacacatgtctacgacctttgcaagggcaaaaa

SEQ ID NO: 639081 - DNA, 120 bp, Artificial Sequence
  ENSG00000181222_5 (sequence is synthesized)
catatgcgagggtggggaggagatggacaacaagttcggtgtggaacaacctgagggtgacgaggatctgaccaaagaaaagggccatggtggctgtgggcggtaccagcccaggatccg

SEQ ID NO: 639082 - DNA, 120 bp, Artificial Sequence
  ENSG00000181222_6 (sequence is synthesized)
gcgttctggcctagagctgtatgcggaatggaagcacgttaatgaggactctcaggagaagaagatcctgctgagtccagagcgagtgcatgagatcttcaaacgcatctcagatgagga

SEQ ID NO: 639083 - DNA, 120 bp, Artificial Sequence
  ENSG00000181222_7 (sequence is synthesized)
gtgttttgtgctgggcatggagccccgctatgcacggccagagtggatgattgtcacagtgctgcctgtgcccccgctctccgtgcggcctgctgttgtgatgcagggctctgcccgtaa

SEQ ID NO: 639084 - DNA, 120 bp, Artificial Sequence
  ENSG00000181222_8 (sequence is synthesized)
aacaatcagctgcggcgcaatgagcagaacggcgcagcggcccatgtcattgcagaggatgtgaagctcctccagttccatgtggccaccatggtggacaatgagctgcctggcttgccc

SEQ ID NO: 639085 - DNA, 120 bp, Artificial Sequence
  ENSG00000181222_9 (sequence is synthesized)
cgtgccatgcagaagtctgggcgtcccctcaagtccctgaagcagcggttgaagggcaaggaaggccgggtgcgagggaacctgatgggcaaaagagtggacttctcggcccgtactgtc

SEQ ID NO: 639086 - DNA, 120 bp, Artificial Sequence
  ENSG00000181222_10 (sequence is synthesized)
atcacccccgaccccaacctctccattgaccaggttggcgtgccccgctccattgctgccaacatgacctttgcggagattgtcacccccttcaacattgacagacttcaagaactagtg

SEQ ID NO: 639087 - DNA, 120 bp, Artificial Sequence
  ENSG00000181222_11 (sequence is synthesized)
cgcagggggaacagccagtacccaggcgccaagtacatcatccgagacaatggtgatcgcattgacttgcgtttccaccccaagcccagtgaccttcacctgcagaccggctataaggtg

SEQ ID NO: 639088 - DNA, 120 bp, Artificial Sequence
  ENSG00000181222_12 (sequence is synthesized)
gaacggcacatgtgtgatggggacattgttatcttcaaccggcagccaactctgcacaaaatgtccatgatggggcatcgggtccgcattctcccatggtctacctttcgcttgaatctt

SEQ ID NO: 639089 - DNA, 120 bp, Artificial Sequence
  ENSG00000181222_13 (sequence is synthesized)
agtgtgacaactccgtacaatgcagactttgacggggatgagatgaacttgcacctgccacagtctctggagacgcgagcagagatccaggagctggccatggttcctcgcatgattgtc

SEQ ID NO: 639090 - DNA, 120 bp, Artificial Sequence
  ENSG00000181222_14 (sequence is synthesized)
accccccagagcaatcggcctgtcatgggtattgtgcaggacacactcacagcagtgcgcaaattcaccaagagagacgtcttcctggagcgggtgtgtggtccaaatggaaacctggct

SEQ ID NO: 639091 - DNA, 120 bp, Artificial Sequence
  ENSG00000181222_15 (sequence is synthesized)
taagtgggcagtggggctctggggtgcaaggtggaggctagagaggaagagctgtgttttttttcctgacttacccagcagtggtctgtgagattgtcttttctggtgggcgaacaaaaa

SEQ ID NO: 639092 - DNA, 120 bp, Artificial Sequence
  ENSG00000181222_16 (sequence is synthesized)
gggggttaggaaaactcaggccaaaaaggtgtaaggcgttaattccccatttaattccttaaaatttcatgtaataccaggtattgcctgtaaaggaaagataaagggaaaaataagtaa

SEQ ID NO: 639093 - DNA, 120 bp, Artificial Sequence
  ENSG00000181222_17 (sequence is synthesized)
tgatgcgggtgctgagtgagaaggacgtggaccccgtacgcaccacgtccaatgacattgtggagatcttcacggtgctgggcattgaagccgtgcggaaggccctggagcgggagctgt

SEQ ID NO: 639094 - DNA, 120 bp, Artificial Sequence
  ENSG00000181222_18 (sequence is synthesized)
accacgtcatctcctttgatggctcctatgtcaattaccgacacttggctctcttgtgtgataccatgacctgtcgtggccacttgatggccatcacccgacacggagtcaaccgccagg

SEQ ID NO: 639095 - DNA, 120 bp, Artificial Sequence
  ENSG00000181222_19 (sequence is synthesized)
acaggaccactcatgaagtgttcctttgaggaaacggtggacgtgcttatggaagcagccgcacacggtgagagtgaccccatgaagggggtctctgagaatatcatgctgggccagctg

SEQ ID NO: 639096 - DNA, 120 bp, Artificial Sequence
  ENSG00000181222_20 (sequence is synthesized)
gctccggccggcactggctgctttgacctcctgcttgatgcagagaagtgcaagtatggcatggagatccccaccaatatccccggcctgggggctgctggacgtgagtatgaggcccca

SEQ ID NO: 639097 - DNA, 120 bp, Artificial Sequence
  ENSG00000181222_21 (sequence is synthesized)
gctgcggtacctgcttgcgtcggcgaggcgggggggcaggccatgggtgcaagggtgtcaccagtccatgattgctgttcttgctcctcacgatttcctgtgttcctctttgcagccacc

SEQ ID NO: 639098 - DNA, 120 bp, Artificial Sequence
  ENSG00000181222_22 (sequence is synthesized)
caggctggtctcaaactcctgagcttaagtgacgtgcccgcctcagcctcccaaagtgcttggattataggtgtgagccactgcactggacttgcaaaggactttaggtccattgtcctt

SEQ ID NO: 639099 - DNA, 120 bp, Artificial Sequence
  ENSG00000181222_23 (sequence is synthesized)
acgtgggatgggaaggtcccacagccggccatcctaaagccccggcccctgtggacaggcaagcaaatcttctccctcatcatacctggtcacatcaattgtatccgtacccacagcacc

SEQ ID NO: 639100 - DNA, 120 bp, Artificial Sequence
  ENSG00000181222_24 (sequence is synthesized)
tataaagcagatgcagaggggtgggcctgtactcaggtcccagtggcagtccttgggcctgaatttttctctgtccaggattcttgcctccaaaccactgtacttggtcggctgtgcacc

SEQ ID NO: 639101 - DNA, 120 bp, Artificial Sequence
  ENSG00000181222_25 (sequence is synthesized)
tttgggaaccttacagtgcgttttgtggggaccaaggtcccagagcccacctgtccactagctaccccttgcacttccaggttccgctttgattataccaatgagagggccctgcggcgc

SEQ ID NO: 639102 - DNA, 120 bp, Artificial Sequence
  ENSG00000181222_26 (sequence is synthesized)
atttgagcggatgcgggaggatcgggaggtgctcagggtcatcttcccaactggagacagcaaggtcgtcctcccctgtaacctgctgcggatgatctggaatgctcagaaaatcttcca

SEQ ID NO: 639103 - DNA, 120 bp, Artificial Sequence
  ENSG00000181222_27 (sequence is synthesized)
catcaacccacgccttccctccgacctgcaccccatcaaagtggtggagggagtcaaggaattgagcaagaagctggtgattgtgaatggggatgacccactaagtcgacaggcccagga

SEQ ID NO: 639104 - DNA, 120 bp, Artificial Sequence
  ENSG00000181222_28 (sequence is synthesized)
gctcagaagcgccgagagcgcggccgggacggttggagaagaaggcggctcccggaagggggagagacaaactgccgtaacctctgccgttcaggaacccggttacttatttattcgtta

SEQ ID NO: 639105 - DNA, 120 bp, Artificial Sequence
  ENSG00000181222_29 (sequence is synthesized)
ccctttttcttcttcctcccccaaaaaccttttccttttcccttctttttttttcctttttgggagctgaaaaatttccggtaagggaaagaagggctcctttcgctccttatttccccg

SEQ ID NO: 639106 - DNA, 120 bp, Artificial Sequence
  ENSG00000181222_30 (sequence is synthesized)
gtggtggtggagaatggggagctgatcatgggcatcctgtgtaagaagtctctgggcacgtcagctggctccctggtccacatctcctacctagagatgggtcatgacatcactcgcctc

SEQ ID NO: 639107 - DNA, 120 bp, Artificial Sequence
  ENSG00000181222_31 (sequence is synthesized)
ttctactccaacattcagactgtcattaacaactggctcctcatcgagggtcatactattggcattggggactccattgctgattctaagacttaccaggacattcagaacactattaag

SEQ ID NO: 639108 - DNA, 120 bp, Artificial Sequence
  ENSG00000181222_32 (sequence is synthesized)
aaggccaagcaggacgtaatagaggtcatcgagaaggcacacaacaatgagctggagcccaccccagggaacactctgcggcagacgtttgagaatcaggtgaaccgcattcttaacgat

SEQ ID NO: 639109 - DNA, 120 bp, Artificial Sequence
  ENSG00000181222_33 (sequence is synthesized)
gcccgagacaagactggctcctctgctcagaaatccctgtctgaatacaataacttcaagtctatggtcgtgtccggagctaaaggttccaagattaacatctcccaggtcattgctgtc

SEQ ID NO: 639110 - DNA, 120 bp, Artificial Sequence
  ENSG00000181222_34 (sequence is synthesized)
gttggacagcagaacgtcgagggcaagcggattccatttggcttcaagcaccggactctgcctcacttcatcaaggatgactacgggcctgagagccgtggctttgtggagaactcctac

SEQ ID NO: 639111 - DNA, 120 bp, Artificial Sequence
  ENSG00000181222_35 (sequence is synthesized)
ctagccggcctcacacccactgagttctttttccacgccatggggggtcgtgaggggctcattgacacggctgtcaagactgctgagactggatacatccagcggcggctgatcaagtcc

SEQ ID NO: 639112 - DNA, 120 bp, Artificial Sequence
  ENSG00000181222_36 (sequence is synthesized)
atggagtcagtgatggtgaagtacgacgcgactgtgcggaactccatcaaccaggtggtgcagctgcgctacggcgaagacggcctggcaggcgagagcgttgagttccagaacctggct

SEQ ID NO: 639113 - DNA, 120 bp, Artificial Sequence
  ENSG00000181222_37 (sequence is synthesized)
cacgctgctcttcaacatccacctgcggtccacgttgtgttcccgccgcatggcagaggagtttcggctcagtggggaggccttcgactggctgcttggggagattgagtccaagttcaa

SEQ ID NO: 639114 - DNA, 120 bp, Artificial Sequence
  ENSG00000181222_38 (sequence is synthesized)
ccaagccattgcgcatcccggggaaatggtgggggctctggctgcgcagtcccttggagaacctgccacccagatgaccttgaataccttccactatgctggtgtgtctgccaagaatgt

SEQ ID NO: 639115 - DNA, 120 bp, Artificial Sequence
  ENSG00000181222_39 (sequence is synthesized)
gacgctgggtgtgccccgacttaaggagctcatcaacatttccaagaagccaaagactccttcgcttactgtcttcctgttgggccagtccgctcgagatgctgagagagccaaggatat

SEQ ID NO: 639116 - DNA, 120 bp, Artificial Sequence
  ENSG00000181222_40 (sequence is synthesized)
tctgtgccgtctggagcatacaacgttgaggaaggtgactgccaacacagccatctactatgaccccaacccccagagcacggtggtggcagaggatcaggaatgggtgaatgtctacta

SEQ ID NO: 639117 - DNA, 120 bp, Artificial Sequence
  ENSG00000181222_41 (sequence is synthesized)
tgaaatgcctgactttgatgtggcccgaatctccccctggctgttgcgggtggagctggatcggaagcacatgactgaccggaagctcaccatggagcagattgctgaaaagatcaatgc

SEQ ID NO: 639118 - DNA, 120 bp, Artificial Sequence
  ENSG00000181222_42 (sequence is synthesized)
tggttttggtgacgacttgaactgcatctttaatgatgacaatgcagagaagctggtgctccgtattcgcatcatgaacagcgatgagaacaagatgcaagaggaggaagaggtggtgga

SEQ ID NO: 639119 - DNA, 120 bp, Artificial Sequence
  ENSG00000181222_43 (sequence is synthesized)
caagatggatgatgatgtcttcctgcgctgcatcgagtccaacatgctgacagatatgaccctgcagggcatcgagcagatcagcaaggtgtacatgcacttgccacagacagacaacaa

SEQ ID NO: 639120 - DNA, 120 bp, Artificial Sequence
  ENSG00000181222_44 (sequence is synthesized)
gacaccttggaaccagggtgcaacccctgcctatggcgcctggtcccccagtgttgggagtggaatgaccccaggggcagccggcttctctcccagtgctgcgtcagatgccagcggctt

SEQ ID NO: 639121 - DNA, 120 bp, Artificial Sequence
  ENSG00000181222_45 (sequence is synthesized)
cagcccaggttactcccctgcctggtctcccacaccgggctccccggggtccccaggtccctcaagcccctacatcccttcaccaggtggtgccatgtctcccagctactcgccaacgtc

SEQ ID NO: 639122 - DNA, 120 bp, Artificial Sequence
  ENSG00000181222_46 (sequence is synthesized)
acctgcctacgagccccgctctcctgggggctacacaccccagagtccctcttattcccccacttcaccctcctactcccctacctctccatcctattctccaaccagtcccaactatag

SEQ ID NO: 639123 - DNA, 120 bp, Artificial Sequence
  ENSG00000181222_47 (sequence is synthesized)
tcccacatcacccagctattcgccaacgtcacccagctactcaccgacctctcccagctactcacccacctctcccagctactcgcccacctctcccagctactcgcccacctctcccag

SEQ ID NO: 639124 - DNA, 120 bp, Artificial Sequence
  ENSG00000181222_48 (sequence is synthesized)
ctactcacccacttcccctagctactcgcccacttcccctagctactcgccaacgtctcccagctactcgccgacatctcccagctactcgccaacttcacccagctattctcccacttc

SEQ ID NO: 639125 - DNA, 120 bp, Artificial Sequence
  ENSG00000181222_49 (sequence is synthesized)
tcccagctactcacctacctctccaagctattcacccacctcccccagctactcacccacttccccaagttactcacccaccagcccgaactattctccaaccagtcccaattacacccc

SEQ ID NO: 639126 - DNA, 120 bp, Artificial Sequence
  ENSG00000181222_50 (sequence is synthesized)
aacatcacccagctacagcccgacatcacccagctattcacctactagtcccaactacacacctaccagccctaactacagcccaacctctccaagctactctccaacatcacccagcta

SEQ ID NO: 639127 - DNA, 120 bp, Artificial Sequence
  ENSG00000181222_51 (sequence is synthesized)
ttccccgacctcaccaagttactccccttccagcccacgatacacaccacagtctccaacctataccccaagctcacccagctacagccccagctcgcccagctacagcccaacctcaca

SEQ ID NO: 639128 - DNA, 120 bp, Artificial Sequence
  ENSG00000181222_52 (sequence is synthesized)
caagtacaccccaaccagtccttcttacagtcccagctccccagagtataccccaacctctcccaagtactcacctaccagtcccaaatattcacccacctctcccaagtactcgcctac

SEQ ID NO: 639129 - DNA, 120 bp, Artificial Sequence
  ENSG00000181222_53 (sequence is synthesized)
cagtcccacctattcacccaccaccccaaaatactccccaacatctcctacttattccccaacctctccagtctacaccccaacctctcccaagtactcacctactagccccacttactc

SEQ ID NO: 639130 - DNA, 120 bp, Artificial Sequence
  ENSG00000181222_54 (sequence is synthesized)
gcccacttcccccaagtactcgcccaccagccccacctactcgcccacctcccccaaaggctcaacctactctcccacttcccctggttactcgcccaccagccccacctacagtctcac

SEQ ID NO: 639131 - DNA, 120 bp, Artificial Sequence
  ENSG00000181222_55 (sequence is synthesized)
aagcccggctatcagcccggatgacagtgacgaggagaactgagggcacgtggggtgcggcagcgggctagggcccagggcagcttgcccgtgctgctgtgcagttcttgcctccctcac

SEQ ID NO: 639132 - DNA, 120 bp, Artificial Sequence
  ENSG00000181222_56 (sequence is synthesized)
ggggcgtcacccccagcccagctccgttgtacataaatgccttgtggcagagctcccggtgaacttctggatcccgtttctgatgcagactcttgtcttgttctccacttgtgctgttag

SEQ ID NO: 639133 - DNA, 120 bp, Artificial Sequence
  ENSG00000181222_57 (sequence is synthesized)
aactcactggcccagtggtgttctcactcctaccccacccaccccctgcctgtccccaaattgaagatccttccttgcctgtggcttgatgcggggcgggtaaagggtattttaacttag

SEQ ID NO: 639134 - DNA, 120 bp, Artificial Sequence
  ENSG00000181222_58 (sequence is synthesized)
gggtagttcctgctgtgagtggttacagctgatcctcgggaagaacaaagctaaagctgccttttgtctgttattttatttttttgaagtttaaataaagtttactaattttgaccaaaa

SEQ ID NO: 639135 - DNA, 120 bp, Artificial Sequence
  ENSG00000181222_59 (sequence is synthesized)
ctgttgacttctgtggtttccaagagcagcccacttctgtccacaacctacagaataggttctgtaggttctgtcccacctaataatagctctcattcatggagagactgcttgtacctt

SEQ ID NO: 639136 - DNA, 120 bp, Artificial Sequence
  ENSG00000181222_60 (sequence is synthesized)
taggccatctgagtctgtctcgttcattgggatccagacttgactgtcttgttaaaggctgttgctgcccaggtgtgcagggagctgttggtctctggcattcagggtgggggtggtata

SEQ ID NO: 639137 - DNA, 120 bp, Artificial Sequence
  ENSG00000181222_61 (sequence is synthesized)
aacccggggcagcttgcatatggcagggaagagggatccgtggaggaacagtgcagaaggctttatgttcagaatctctcttgcttttcttctagactgagttccttgagattggtgaat

SEQ ID NO: 639138 - DNA, 77 bp, Artificial Sequence
  ENSG00000181222_62 (sequence is synthesized)
gaagtcagcgtgtcacatgtataaaacgcatgaatcacgttagagaccaaagaaaagaagatgcaatcaacattgag

SEQ ID NO: 639139 - DNA, 81 bp, Artificial Sequence
  ENSG00000181222_63 (sequence is synthesized)
agttcgagaccagcctgaccaacatggagtaaccccgtctctactaaaaataaaaattagccgggcatggtggtcaagagt

SEQ ID NO: 639140 - DNA, 120 bp, Artificial Sequence
  ENSG00000181234_0 (sequence is synthesized)
atgcgctccgagggtgcggcccccgggccggcggcgccgctgtgcggggcgctgagcctgctgctgggcgcgctgctgggcaaagtgatagagggtcacggggtcacagacaacatacag

SEQ ID NO: 639141 - DNA, 120 bp, Artificial Sequence
  ENSG00000181234_1 (sequence is synthesized)
agattctcctcactgccaccttacctacctgtgagctaccacatcctcagagcagagacctccttcttcctcaaggaagccaaccaggacctgctgcggaactccagcctgcaggcgagg

SEQ ID NO: 639142 - DNA, 120 bp, Artificial Sequence
  ENSG00000181234_2 (sequence is synthesized)
gtggagtccttctttacctacaaaaccaggcagcccccagtgctcaatgccagctatggacccttttctgtggagaaggttgtgcctctggacttgatgttgacttcaaactttttaggt

SEQ ID NO: 639143 - DNA, 120 bp, Artificial Sequence
  ENSG00000181234_3 (sequence is synthesized)
ccaaccaataagtttagttttgattggaaactaaaagcccacatcctgcgggacaaagtctacctgagccggcccaaagtgcaggttcttttccacatcatgggcagagactgggatgac

SEQ ID NO: 639144 - DNA, 120 bp, Artificial Sequence
  ENSG00000181234_4 (sequence is synthesized)
cacggcgccggggagaagctgccatgcctgagggtctttgctttccgagaaaccagagaggtgcggggcagctgccggctgaagggggacctggggctgtgtgtggctgagctggagctc

SEQ ID NO: 639145 - DNA, 120 bp, Artificial Sequence
  ENSG00000181234_5 (sequence is synthesized)
ctgtccagctggttcagtgccccgacggtgggtgccgggaggaagaagtccatggaccagccggaggggacccctgtggagctctactacaccgtgcacccaggaaacgagcgaggggac

SEQ ID NO: 639146 - DNA, 120 bp, Artificial Sequence
  ENSG00000181234_6 (sequence is synthesized)
tgtgccgggggtgacttcaggaagggcaacgccatccgtccaggaaaggatgggctggaggaaaccacgtcccacctgcagaggatcggcaccgtcggcctttaccgggcccaggacagc

SEQ ID NO: 639147 - DNA, 120 bp, Artificial Sequence
  ENSG00000181234_7 (sequence is synthesized)
gcccagctcagcgagctgcgtttggatggtaacgtggtcatctggctgccttccaggccagtcaagcagggagaggtggtcacggcctatgtcaccatctcgagcaattcctctgtggac

SEQ ID NO: 639148 - DNA, 120 bp, Artificial Sequence
  ENSG00000181234_8 (sequence is synthesized)
ctcttcatcttgagagccaaggtgaagaagggggtgaacatcctgagtgctcagacccgtgagccccggcagtggggcgtcaagcaggaggtgggcagcggcggaaagcacgtgacggcc

SEQ ID NO: 639149 - DNA, 120 bp, Artificial Sequence
  ENSG00000181234_9 (sequence is synthesized)
accgtggcctgccagcgcctggggcccagcccacgcaacaggagcagcagtttattcaatgaggttgtgcagatgaactttgaaatagccagtttcagcagcctttcagggactcagccc

SEQ ID NO: 639150 - DNA, 120 bp, Artificial Sequence
  ENSG00000181234_10 (sequence is synthesized)
atcacgtggcaggtggagtacccacggaaggggaccacagacatcgccgtgtccgagatctttgtcagccagaaggacctggtgggcatcgttcccttggctatggacactgaaattctg

SEQ ID NO: 639151 - DNA, 120 bp, Artificial Sequence
  ENSG00000181234_11 (sequence is synthesized)
aacaccgccgtactcacaggaaagacagttgccatgcctatcaaggtggtctctgtggaggagaacagtgccgtgatggacatctcagagtcggtggagtgcaagtccacagacgaggac

SEQ ID NO: 639152 - DNA, 120 bp, Artificial Sequence
  ENSG00000181234_12 (sequence is synthesized)
gttatcaaagtgtctgagcgctgtgactacatctttgtcaatggcaaagagatcaaaggaaagatggatgcggtggtgaacttcacataccagtacctgagcgcccccctgtgtgtcacc

SEQ ID NO: 639153 - DNA, 120 bp, Artificial Sequence
  ENSG00000181234_13 (sequence is synthesized)
gtgtgggtgccccggctgcccctgcagatcgaggtctctgacacggagctcagccagataaagggctggagggtccccattgtgaccaataagaggcccactcgtgagagcgaggatgag

SEQ ID NO: 639154 - DNA, 120 bp, Artificial Sequence
  ENSG00000181234_14 (sequence is synthesized)
gacgaggaggagcggcggggccggggctgcgcactgcaataccagcacgccaccgtgcgggtcctcacccagtttgtgtctgagggcgccggtccatggggccagccgaactacctgctt

SEQ ID NO: 639155 - DNA, 120 bp, Artificial Sequence
  ENSG00000181234_15 (sequence is synthesized)
agtcctaactggcagttcgacatcactcacctggtggcagacttcatgaagctggaggaacctcacgtggccaccctccaggacagccgggtcctggttgggcgagaggttgggatgacg

SEQ ID NO: 639156 - DNA, 120 bp, Artificial Sequence
  ENSG00000181234_16 (sequence is synthesized)
accatccaggtgttgtctccactgtctgactccatcctggcagagaagacaataaccgtgctagatgacaaagtatcggtgacagacttggccatccagctcgtggctgggctgtctgtc

SEQ ID NO: 639157 - DNA, 120 bp, Artificial Sequence
  ENSG00000181234_17 (sequence is synthesized)
gccctttaccccaacgcagaaaacagcaaggccgtaacagctgtggtcacagctgaggaggtgctgcggacccccaaacaggaggctgtattcagcacgtggctgcagttcagtgatggc

SEQ ID NO: 639158 - DNA, 120 bp, Artificial Sequence
  ENSG00000181234_18 (sequence is synthesized)
tctgtgacgcccctggacatctacgacaccaaggacttctccctggcagccacctcccaggacgaggctgtcgtgtcagtcccccagccccgctctcccaggtggcccgttgtggtggcc

SEQ ID NO: 639159 - DNA, 120 bp, Artificial Sequence
  ENSG00000181234_19 (sequence is synthesized)
gaaggggaaggccagggcccactgatccgagtggacatgacgatcgccgaggcctgccagaaatctaaacgcaagagcatcctggctgtgggcgtcggcaacgtcagggtcaagttcgga

SEQ ID NO: 639160 - DNA, 120 bp, Artificial Sequence
  ENSG00000181234_20 (sequence is synthesized)
ggggactatgaggaagatgagatcaagaaccacgccagcgaccgccggcagaagggccagcaccatgagcgcacaggccaagatgggcacctctatggcagctctcccgtggagcgtgag

SEQ ID NO: 639161 - DNA, 120 bp, Artificial Sequence
  ENSG00000181234_21 (sequence is synthesized)
gaaggggctctccgaagagccactaccacggccaggtccctgctggacaacaaagtggtgaagaacagtcgggcagacgggggcaggctggcaggagaggggcagctgcagaacatcccc

SEQ ID NO: 639162 - DNA, 120 bp, Artificial Sequence
  ENSG00000181234_22 (sequence is synthesized)
attgacttcaccaacttccctgcccacgtggacctccccaaggccgggagtgggctggaggaaaacgacctggtgcagactccgcggggcctgagtgatctggagatagggatgtacgcc

SEQ ID NO: 639163 - DNA, 120 bp, Artificial Sequence
  ENSG00000181234_23 (sequence is synthesized)
ctcctgggggtgttctgcctggccatcctcgtcttcctgatcaactgcgccacctttgccctgaagtacaggcacaagcaagtgcccctggaaggtcaggcctccatgacccactctcac

SEQ ID NO: 639164 - DNA, 120 bp, Artificial Sequence
  ENSG00000181234_24 (sequence is synthesized)
gactgggtgtggcttggcaatgaggccgaactcctggagagcatgggggatgcgccgccgccccaggacgagcacaccaccatcatagaccgcggaccgggggcctgcgaggagagcaac

SEQ ID NO: 639165 - DNA, 120 bp, Artificial Sequence
  ENSG00000181234_25 (sequence is synthesized)
catctcctgctcaatggtggctcccacaagcacgtgcagagccagattcacaggtcagccgactccggggggcggcagggcagagaacagaagcaggaccccctgcactcgcccacctcc

SEQ ID NO: 639166 - DNA, 120 bp, Artificial Sequence
  ENSG00000181234_26 (sequence is synthesized)
aagaggaagaaggtgaaatttaccacctttaccaccatccccccggacgacagctgccccacggtgaactccatcgtcagcagcaatgatgaggacatcaaatgggtgtgtcaagacgtg

SEQ ID NO: 639167 - DNA, 120 bp, Artificial Sequence
  ENSG00000181234_27 (sequence is synthesized)
gctgtgggtgcccccaaggaacttagaaactatctggagaaactcaaagataaggcttaggcccctctagccaaagggccctgcccagatgccttccttgtactggaaactggcccaagt

SEQ ID NO: 639168 - DNA, 120 bp, Artificial Sequence
  ENSG00000181234_28 (sequence is synthesized)
ggggcagaaggcgttgtcagtggggttaagaagggacggtcccagggtccatgctagaccagttggaaagttttgaagtcaggaaaagacgtttttgtatcaagggatttttagcagtta

SEQ ID NO: 639169 - DNA, 120 bp, Artificial Sequence
  ENSG00000181234_29 (sequence is synthesized)
atggtggtggatttttaaaggtcaggggaataaagtctggggcatggggagtgcagaccaagttactgaactgcacaggcaaaattaggaaggttattttatgagtcaaaacatactaca

SEQ ID NO: 639170 - DNA, 120 bp, Artificial Sequence
  ENSG00000181234_30 (sequence is synthesized)
gacaagctaccaaaaattatttgttaaaaaatgcaacaagacaaataaaaagagaaataatcatctgtttatatttctaataaaggagcaaaatataaaaataggacctgctaagagaca

SEQ ID NO: 639171 - DNA, 120 bp, Artificial Sequence
  ENSG00000181234_31 (sequence is synthesized)
ttttccattctaattcacgattcacttttccaaggacagccttcaactgtcaccacacagctgggggggagtcatttcttaacaagggatgcctcttgggatagaactagggagttttaa

SEQ ID NO: 639172 - DNA, 120 bp, Artificial Sequence
  ENSG00000181234_32 (sequence is synthesized)
atctttacttgatcatcttttattttcttttccactttttccttttttctctctctctgtgtcctagacttccattgcatttatatttaatgtttatttctgagaatcaagcagtatatt

SEQ ID NO: 639173 - DNA, 120 bp, Artificial Sequence
  ENSG00000181234_33 (sequence is synthesized)
tttcctaaatgaaacataaattatattcctattcattagataggttcctaggaacaatgccaattaatccattgtttaagtagtaacttgaatgtttttctatatccctccagctttgtt

SEQ ID NO: 639174 - DNA, 120 bp, Artificial Sequence
  ENSG00000181234_34 (sequence is synthesized)
gatagtggcgggttttgtacaattggagggagccctcagagccttctgggggaggagaggaactgtccttaatccatcaccactaccatagggcaaagccagcaggtgtggccctgtgag

SEQ ID NO: 639175 - DNA, 120 bp, Artificial Sequence
  ENSG00000181234_35 (sequence is synthesized)
gggctgtacagacgggatgtggccaggagaacagagccccacctggaccacctgacccctcgggattccacccctgtcatcgtggggatgttcctatatgggagaaagttgggttaaatc

SEQ ID NO: 639176 - DNA, 120 bp, Artificial Sequence
  ENSG00000181234_36 (sequence is synthesized)
aaaaaagaggccacgcccaggtgtaatcagagccaacctggtgggcttggtctatcacaagacataactgatgctgaacatgaacaaagataaaaactgtttggagggtttttgagttgt

SEQ ID NO: 639177 - DNA, 120 bp, Artificial Sequence
  ENSG00000181234_37 (sequence is synthesized)
ttttcttatgttgttgggtggggtataccagcataaactctaaagataaaatctatgttagattgtcaatcaactgtgtttttgaacagcataattgtgtagcagcacattgcaaaaatg

SEQ ID NO: 639178 - DNA, 120 bp, Artificial Sequence
  ENSG00000181234_38 (sequence is synthesized)
cattcatccaaagcgacacatgtggcaacgtagaccacgccagtgaaataagccccttcgtgatcacctgactccagttctccgtgtgctccattggctgcggctgcaggaggaagatgc

SEQ ID NO: 639179 - DNA, 120 bp, Artificial Sequence
  ENSG00000181234_39 (sequence is synthesized)
ctgacagccctcatgctctccgcaggggggcgctcacaaagatgccaggggtgtttattgtgtttatttttttaattactaaaatcagtagctaagaaagggtccttgaagcctcctaac

SEQ ID NO: 639180 - DNA, 120 bp, Artificial Sequence
  ENSG00000181234_40 (sequence is synthesized)
ctgggttggacctttgaaaaatatatttgtagcacatattatagatggaaagaagaagatatttatttatacctgtgatgccaattgtcattaaaaggcttttcatggcttgacaagtca

SEQ ID NO: 639181 - DNA, 120 bp, Artificial Sequence
  ENSG00000181240_0 (sequence is synthesized)
actcccgcatggtagctggagcagcaaacaactgcttagggatttgaagccaggtgtcctaacttcctccatgggcgctcagcctggggaacctcagaacacttgctctaggatccagac

SEQ ID NO: 639182 - DNA, 120 bp, Artificial Sequence
  ENSG00000181240_1 (sequence is synthesized)
actgtttaggagggtcaagaccttactcatcaaagccccgcctcccccccaacctccgcctccacccccatcctggaaccctggctgtacacacgtgtatgggtacgcgtttggccacat

SEQ ID NO: 639183 - DNA, 120 bp, Artificial Sequence
  ENSG00000181240_2 (sequence is synthesized)
gcatgacaacaaccttgaacatctcccgtcacagcaggtactggacacaggagagcagctgatggtccccgtggaagtcctggaagtggataacaaggaggccttgtggaagtttctact

SEQ ID NO: 639184 - DNA, 120 bp, Artificial Sequence
  ENSG00000181240_3 (sequence is synthesized)
ctcaggagctatggccggggcggtgtctcgcacgggcacggcacctctggacagagccaaggtgtacatgcaggtctactcctccaagacgaacttcaccaacctgctgggggggctaca

SEQ ID NO: 639185 - DNA, 120 bp, Artificial Sequence
  ENSG00000181240_4 (sequence is synthesized)
gagcatggtccaggagggcggcttccgctccctgtggcggggcaacggcatcaacgtgctcaagattgctcctgagtatgccatcaagttctccgtattcgagcagtgcaagaattactt

SEQ ID NO: 639186 - DNA, 120 bp, Artificial Sequence
  ENSG00000181240_5 (sequence is synthesized)
ctgtggaatacaagggtccccgcccttccaggagcgtctccttgctggctccctggctgtggccatctcccagaccctcatcaaccccatggaggtgctgaagacgcggttgaccttgcg

SEQ ID NO: 639187 - DNA, 120 bp, Artificial Sequence
  ENSG00000181240_6 (sequence is synthesized)
tgctcggcatcatcccctatgcctgcaccgacctggctgtctatgagatgctccagtgcttctgggtgaagtcaggcagggatatgggggaccccagtggcctggtcagtctgtcgtctg

SEQ ID NO: 639188 - DNA, 120 bp, Artificial Sequence
  ENSG00000181240_7 (sequence is synthesized)
tgacgctatccacgacctgtggccagatggccagctacccactgactctggtgcgcaccaggatgcaggcccaagataccgtggagggctcaaatcccaccatgcgcggagtcctccagc

SEQ ID NO: 639189 - DNA, 120 bp, Artificial Sequence
  ENSG00000181240_8 (sequence is synthesized)
ggatcctggcccagcagggctggctagggctgtaccgaggcatgacccccacgctactgaaggtcttaccagcaggtggcatcagctatgtggtgtacgaagccatgaagaaaaccctgg

SEQ ID NO: 639190 - DNA, 120 bp, Artificial Sequence
  ENSG00000181240_9 (sequence is synthesized)
gcatataggctgtgagctggacgacacagcctaggcagaaatgggacaggaggacctgatgacccctggccccaaagagccctcgaggcctcaaggttcaggccctggggcagtttttgg

SEQ ID NO: 639191 - DNA, 120 bp, Artificial Sequence
  ENSG00000181240_10 (sequence is synthesized)
tggcaaaagcaggctgggggtgggggtggggctctgggtcagaagattcctgaagctggggttggtggtgggtggaggggggcagtgctgggtcagaaaactcctgggactccctcccca

SEQ ID NO: 639192 - DNA, 120 bp, Artificial Sequence
  ENSG00000181240_11 (sequence is synthesized)
gggtgcagcctgagacaagaaacgtggactccagtctggccccttgtgggtcgtcctggctccagggcgaaatggtgaacatgtcacacaacaaggaataaagagatggtttttgctgaa

SEQ ID NO: 639193 - DNA, 120 bp, Artificial Sequence
  ENSG00000181264_0 (sequence is synthesized)
ctcttgacccccccgccagagaaggaggaccctcccgcgccctttcggagcgtcggtggcccggctccggctctgcgctccatcctcccagccagcaggtgcccccagacccccggctcc

SEQ ID NO: 639194 - DNA, 120 bp, Artificial Sequence
  ENSG00000181264_1 (sequence is synthesized)
tcctccgccgccgtcacagcctcgtcctccgcctctggctcctccgcttcctgttgccgcgatccgggccgggagctgcgggcgcccgggcgcccgaggcttcccggtgcgctccgccag

SEQ ID NO: 639195 - DNA, 120 bp, Artificial Sequence
  ENSG00000181264_2 (sequence is synthesized)
gatggcattagctctgtgtctgcaggtgctgtgcagcctgtgtggctggctctcgctctatatttctttctgccacctgaataagcaccgaagctatgagtggagctgccgcctggtcac

SEQ ID NO: 639196 - DNA, 120 bp, Artificial Sequence
  ENSG00000181264_3 (sequence is synthesized)
cttcacccatggagtcctctctataggcctctccgcttatattggcttcattgatggcccatggccttttacccacccaggctcacccaatacacctctccaagttcatgtcctgtgtct

SEQ ID NO: 639197 - DNA, 120 bp, Artificial Sequence
  ENSG00000181264_4 (sequence is synthesized)
caccttgggctacttcatcttcgacttgggctggtgcgtctactttcagtctgagggtgccttgatgctggctcatcacacattgagtatcttgggcattatcatggcccttgtgcttgg

SEQ ID NO: 639198 - DNA, 120 bp, Artificial Sequence
  ENSG00000181264_5 (sequence is synthesized)
ggagtctggcacagaggtcaatgcagtcctctttggaagtgagcttaccaaccccttgctacagatgcgctggtttctccgggaaacagggcactatcacagtttcactggagatgtagt

SEQ ID NO: 639199 - DNA, 120 bp, Artificial Sequence
  ENSG00000181264_6 (sequence is synthesized)
ggacttcctctttgtggctctgttcacaggagtgaggattggtgtgggagcttgcctccttttctgtgaaatggtctcccccacgcctaagtggtttgtgaaggctgggggagtagcgat

SEQ ID NO: 639200 - DNA, 120 bp, Artificial Sequence
  ENSG00000181264_7 (sequence is synthesized)
gtatgctgtgtcttggtgtttcatgtttagcatctggcgctttgcatggaggaagagcatcaagaagtaccatgcttggagaagcaggcggagtgaggaacggcagctgaaacacaacgg

SEQ ID NO: 639201 - DNA, 120 bp, Artificial Sequence
  ENSG00000181264_8 (sequence is synthesized)
acatctcaaaatacactagccaaggcttgctccagattatggattgggttaagtcagccatgggaaccaggttggaaatatgactgttacataattacacttataacaaacttaggtttc

SEQ ID NO: 639202 - DNA, 120 bp, Artificial Sequence
  ENSG00000181264_9 (sequence is synthesized)
aataaagggctaaatgtattgatcaatttggtcagtcttcaagccgagcatataccagtattaaaacactaacttctacagtagcacagttgtagaaagtgagaatactccatggtagtt

SEQ ID NO: 639203 - DNA, 120 bp, Artificial Sequence
  ENSG00000181264_10 (sequence is synthesized)
gggaataagtgagaactgtgaagtgagtacaactggcatttgttttcatttgtggtgaccctgggtcctcctgtccctgggaggtttgatgttcaggcagtttagaaaggaactcgaaaa

SEQ ID NO: 639204 - DNA, 120 bp, Artificial Sequence
  ENSG00000181264_11 (sequence is synthesized)
agattagtgctatttcttgttcctttgagaagtaactctttcaataaacacttatttctgctttccatatagcaatttatctaagtttaccccatttactataaagtgaggggcttacag

SEQ ID NO: 639205 - DNA, 120 bp, Artificial Sequence
  ENSG00000181264_12 (sequence is synthesized)
gaagagacacgcctttgacattctgaacattagatcggggaattgggtcgcttaaacagaggggcataggagggtgagagtgaaactggcagtgagggggagggctacttactgaacctc

SEQ ID NO: 639206 - DNA, 120 bp, Artificial Sequence
  ENSG00000181264_13 (sequence is synthesized)
ctataccaactgtgccagaggtgcccaagaccactgccaggttctgtaattctctgggaagactcagtggactcagcatatagtcttacttatagttttgatttattatagtgaaaagat

SEQ ID NO: 639207 - DNA, 120 bp, Artificial Sequence
  ENSG00000181264_14 (sequence is synthesized)
acaaagaaaaatcggtaaaaggaaaaggcacctgagacaaagtctagggtaaagcaagcacaagtttccagagtcctctcccaatggaatcacacaggatgcacttaattcccctagcag

SEQ ID NO: 639208 - DNA, 120 bp, Artificial Sequence
  ENSG00000181264_15 (sequence is synthesized)
tgatttgttacgacatgtgaatgagttgtctactggacaaggtcactacagactcagtgcccaaagtttttactgaggacaggtcatctaggcaggctttccctggcagatagcaaaatt

SEQ ID NO: 639209 - DNA, 120 bp, Artificial Sequence
  ENSG00000181264_16 (sequence is synthesized)
caagactctcaaaaggaaagcaggtgttcagcataagccatattgtttgcacaagcagttcagacacagtaagccagtcttatcagttaattgtgggagcccctccaaaatctaagttcc

SEQ ID NO: 639210 - DNA, 120 bp, Artificial Sequence
  ENSG00000181264_17 (sequence is synthesized)
tatgttaactcttttctgcacaaaacctatagagttagggctttggatctgagatgaatgaagtgtgggtagatttactgagtcctgttatatgggttctgccctaccaggaaaactatg

SEQ ID NO: 639211 - DNA, 120 bp, Artificial Sequence
  ENSG00000181264_18 (sequence is synthesized)
ccagttctcagggcttttgtgcattaatctcctaggcatttgaggctatgactaaattccatagggatttatcatgtggattccactgtgcttgagatggcagtttagatttcagctctg

SEQ ID NO: 639212 - DNA, 120 bp, Artificial Sequence
  ENSG00000181264_19 (sequence is synthesized)
ctgtacatattgcaaactagagccaaagactttaaagtgtgtactggcctcagggggatgaggttaatttttttttttcattttagatactttcccttttagtactcctcctacttttct

SEQ ID NO: 639213 - DNA, 120 bp, Artificial Sequence
  ENSG00000181264_20 (sequence is synthesized)
tatttttactaaaaaggtaccactctatgaacaaactaataaaacaaggccagtcttggaaggaaaaaaataataattcttagtgtgacagtctccaagagaagcaagaatataagctta

SEQ ID NO: 639214 - DNA, 120 bp, Artificial Sequence
  ENSG00000181264_21 (sequence is synthesized)
gaacaaggggttaagaatccagaattcctgggttcttttaactaattttgctactcacttgccactttggagagctactcactcactttggataggttacttgtttcttctttgcctgag

SEQ ID NO: 639215 - DNA, 120 bp, Artificial Sequence
  ENSG00000181264_22 (sequence is synthesized)
tttaaacctattgtgaatgaatgaaataccctgtagtatatttcataaatacattatgtggcattttattaatggaggtctttaatgtagggcttttatggaaatatgaagtatttatgt

SEQ ID NO: 639216 - DNA, 120 bp, Artificial Sequence
  ENSG00000181264_23 (sequence is synthesized)
atttattgattatttatttttaccatgttattgaagtcaatggtgtttgattagctcagtgggtgagcaagcatatggtgctactggagtcaaggctggtcagtaggaagcatcagtcca

SEQ ID NO: 639217 - DNA, 77 bp, Artificial Sequence
  ENSG00000181264_24 (sequence is synthesized)
ctactggagtcaaggctggtcagtaggaagcatcagtccattccatggccactggtaatctaacgtaatgaatggtg

SEQ ID NO: 639218 - DNA, 120 bp, Artificial Sequence
  ENSG00000181264_25 (sequence is synthesized)
cttgaaaatgaaaaatggtcttggccacagaaaccaggtatgagggagtggttggaatggtataaagtcatcactgttagggaaacagtaactttaaatgcatgttaacagtgggtcttt

SEQ ID NO: 639219 - DNA, 120 bp, Artificial Sequence
  ENSG00000181264_26 (sequence is synthesized)
aaaaatgaatgtcatttggttaaagagttttgctgggcattgagataatctgacagcatctccacttcctgttttttttcttaatctccactttttttttttctatgatgagcgccccta

SEQ ID NO: 639220 - DNA, 120 bp, Artificial Sequence
  ENSG00000181264_27 (sequence is synthesized)
aaatgctggtaagcttctttccaacaaaattgcggtcaaagtaggatgctggggaatgctgattttagcaaaagcttgtagaaaagagtggcctggcacatgagcttaaaaaaaagaaaa

SEQ ID NO: 639221 - DNA, 120 bp, Artificial Sequence
  ENSG00000181264_28 (sequence is synthesized)
aaagctggctcttgaattttggcacagtgcaacctgttccataccagacaaatgaacaggcttaatctggtaccaattctttttctctcttactcctcagaagtgaagggactgcagatc

SEQ ID NO: 639222 - DNA, 120 bp, Artificial Sequence
  ENSG00000181264_29 (sequence is synthesized)
ttgttgttttggggacactttcatggaactgtatgtaggtttttttgaatggtgagaaatctgaataattggtaaggggaagggaatccctcatttcagcttttcttgatgttgttacta

SEQ ID NO: 639223 - DNA, 120 bp, Artificial Sequence
  ENSG00000181264_30 (sequence is synthesized)
ataactatgaaaaaacttctgagagaacaatgtgaactgaagatgactcagcagttaagacaatgctaagttctgaaaccacaggtaaatgaagggctaattaatgtgtggtatacttgg

SEQ ID NO: 639224 - DNA, 120 bp, Artificial Sequence
  ENSG00000181264_31 (sequence is synthesized)
acaaaatgaagtactcatttgcactggattactgtgtaatgataacgaacactgttcaagaacgatttatatttccataagatttgtactaaattttataaaagtaaaacaactttttat

SEQ ID NO: 639225 - DNA, 120 bp, Artificial Sequence
  ENSG00000181264_32 (sequence is synthesized)
aggtcagtcatcgctagagggttattattgacatttactcatcataaaatgtgatgtcagcctaccagctcggagtgcagttcctggtttccagtttacaacattgaccagttgctaaca

SEQ ID NO: 639226 - DNA, 120 bp, Artificial Sequence
  ENSG00000181264_33 (sequence is synthesized)
aagattcttggccgtgtagataaggaaaataagataaggcaatatttttgaactattctataatagaaatgaggatatatacacaaaatgacccagtgctgttttcttagggtgcatcct

SEQ ID NO: 639227 - DNA, 120 bp, Artificial Sequence
  ENSG00000181273_0 (sequence is synthesized)
ttctgggtccttctcttggtcatttctagacttttactagccatgacactaggaaacagcactgaagtcactgaattctatcttctgggatttggtgcccagcatgagttttggtgtatc

SEQ ID NO: 639228 - DNA, 120 bp, Artificial Sequence
  ENSG00000181273_1 (sequence is synthesized)
ctcttcattgtattccttctcatctatgtgacctccataatgggtaatagtggaataatcttactcatcaacacagattccagatttcaaacactcacgtacttttttctacaacatttg

SEQ ID NO: 639229 - DNA, 120 bp, Artificial Sequence
  ENSG00000181273_2 (sequence is synthesized)
gcttttgttgatatctgttacacttctgctatcactcccaagatgctccaaagcttcacagaagaaaagaatttgatgttatttcagggctgtgtgatacaattcttagtttatgcaaca

SEQ ID NO: 639230 - DNA, 120 bp, Artificial Sequence
  ENSG00000181273_3 (sequence is synthesized)
tttgcaaccagtgactgttatctcctggctatgatggcagtggatccttatgttgccatctgtaagccccttcactatactgtaatcatgtcccgaacagtctgcatccgtttggtagct

SEQ ID NO: 639231 - DNA, 120 bp, Artificial Sequence
  ENSG00000181273_4 (sequence is synthesized)
caaacaggttttacatgttcactgtccttctgcaagtccaatagcatcaatcactttttctgtgatgttccccctattcttgctctttcatgctccaatgttgacatcaacatcatgcta

SEQ ID NO: 639232 - DNA, 120 bp, Artificial Sequence
  ENSG00000181273_5 (sequence is synthesized)
cttgttgtctttgtgggatctaacttgatattcactgggttggtcgtcatcttttcctacatctacatcatggccaccatcctgaaaatgtcttctagtgcaggaaggaaaaaatccttc

SEQ ID NO: 639233 - DNA, 120 bp, Artificial Sequence
  ENSG00000181273_6 (sequence is synthesized)
tcaacatgtgcttcccacctgaccgcagtcaccattttctatgggacactctcttacatgtatttgcagtctcattctaataattcccaggaaaatatgaaagtggcctttatattttat

SEQ ID NO: 639234 - DNA, 120 bp, Artificial Sequence
  ENSG00000181273_7 (sequence is synthesized)
ggcacagttattcccatgttaaatcctttaatctatagcttgagaaataaggaagtaaaagaagctttaaaagtgatagggaaaaagttattttaaatcagccccagttgttaacattca

SEQ ID NO: 639235 - DNA, 120 bp, Artificial Sequence
  ENSG00000181274_0 (sequence is synthesized)
ctgcaggcgcgtggctcgagtgcctggcgggctccggcttccgcgtccgcccctgctccggcttcgcccgcagctccgcgcccgcgggcaaccaagcccccagcgaagcccgcacagctc

SEQ ID NO: 639236 - DNA, 120 bp, Artificial Sequence
  ENSG00000181274_1 (sequence is synthesized)
gaagcccgcacagctccgggtgccaggacggggggccatgccgtgccggagggaggaggaagaggaagccggcgaggaggcggagggggaggaagaggaggacgacagcttcctcctgct

SEQ ID NO: 639237 - DNA, 120 bp, Artificial Sequence
  ENSG00000181274_2 (sequence is synthesized)
gcagcagtcggtgacgctgggcagctcgggcgaggtggaccggctggtggcccagatcggcgagacgctgcagctggacgcggcgcaggacagcccggcctcgccgtgcgcgcccccggg

SEQ ID NO: 639238 - DNA, 80 bp, Artificial Sequence
  ENSG00000181274_3 (sequence is synthesized)
cggacaaggcccggcccccggcggtgccgctgctgctgccgcccgcttcggctgagacggtgggcccggcgccctctggg

SEQ ID NO: 639239 - DNA, 80 bp, Artificial Sequence
  ENSG00000181274_4 (sequence is synthesized)
tggggccctgcgctgcgccctaggggaccgcggccgcgtgcgcggacgcgctgcgccctactgcgtggcggaggtcgccg

SEQ ID NO: 639240 - DNA, 120 bp, Artificial Sequence
  ENSG00000181274_5 (sequence is synthesized)
gctcagggacgcggtcacctcccgccgcttgcagcagcgccgatggacccaagccggggcacgcgccggcgacgacgacccgcatcggctcctccagcagctcgtgctctcgggaaacct

SEQ ID NO: 639241 - DNA, 120 bp, Artificial Sequence
  ENSG00000181274_6 (sequence is synthesized)
catcaaggaagccgtgcggagactccaacgagccgtcgccgcggttgcagccacgggccccgcaagcgcccctgggcccgggggaggccgcagcggacctgaccgcattgccctgcagcc

SEQ ID NO: 639242 - DNA, 120 bp, Artificial Sequence
  ENSG00000181274_7 (sequence is synthesized)
ctcaggctccttgctctgacgcaggcctcctggaggaggaagtggaggccgctgcgtagacccaacagcgtccagttcctactaactctgagctgaagccgacgtcgccagcctgggagc

SEQ ID NO: 639243 - DNA, 120 bp, Artificial Sequence
  ENSG00000181274_8 (sequence is synthesized)
gaccactttggctgcggggaggcgcgtggggagagatctcaaccagagaagttaccagccgcggcgaggccgtcggagaaaacttaagcgtggagaaatgtatgcgccagggtgcttccg

SEQ ID NO: 639244 - DNA, 120 bp, Artificial Sequence
  ENSG00000181274_9 (sequence is synthesized)
tgcatcgacttgtacctcacttagcccttgggggcgtcgtgagcttggattgtttaaggagggctcaggggtaggaatcgcgatggctttataacaatacttgaaaactaacgacacgca

SEQ ID NO: 639245 - DNA, 120 bp, Artificial Sequence
  ENSG00000181274_10 (sequence is synthesized)
tacattttcttattttctggtggaggagcttagtaagtggtgctacaattgctgtgcaaagaaattccagaggggagaagaatgtaaaagtttggtggtgggtggcttggcattgcccct

SEQ ID NO: 639246 - DNA, 120 bp, Artificial Sequence
  ENSG00000181274_11 (sequence is synthesized)
ttttcccaccgattcggtggctggtgaaggtgggagatgtgaactccaattaagggactggagagaggtgaagaattttgcaggtgggagatttggatttgaatgtggacttgtaaatga

SEQ ID NO: 639247 - DNA, 120 bp, Artificial Sequence
  ENSG00000181274_12 (sequence is synthesized)
cttgaccttgccatctgtgttcaaggtcacggtttgctgtggggttcctgggagagcttactcaccccggagtcttttctttctcttgctccaagaagagccctgttggtgctttaccac

SEQ ID NO: 639248 - DNA, 120 bp, Artificial Sequence
  ENSG00000181274_13 (sequence is synthesized)
cgcttggagtctcccgaggacacaaacaggcagagagggacgtgtagggagagttctttcctgttttctgtgctttcctttttacaggactcccggaaggccactcatggccatgccagg

SEQ ID NO: 639249 - DNA, 120 bp, Artificial Sequence
  ENSG00000181274_14 (sequence is synthesized)
agctttctcagaaacagtcataaacgatctcttgagtctctttcttgtcctcccagctgagctttcttattccaccctttctggtgtctataggaatgcatgagagaccctggacgtttt

SEQ ID NO: 639250 - DNA, 120 bp, Artificial Sequence
  ENSG00000181274_15 (sequence is synthesized)
tctgctctcttctggccctccatggagtcatgggcctcggcctcggcggctcctcaccctcacaatttatttcctcctcccgtgccagcccttcttttgtgtctgaaaccggttttaaaa

SEQ ID NO: 639251 - DNA, 120 bp, Artificial Sequence
  ENSG00000181274_16 (sequence is synthesized)
tgtgactctcccagagaagaagccgctggctgtatgaaacttgacggcgcttttgtaaggtgccacccccaaactttaaggtagctaaaccaatttttaaaagattcaatggcttgttca

SEQ ID NO: 639252 - DNA, 120 bp, Artificial Sequence
  ENSG00000181274_17 (sequence is synthesized)
tcctccagatgtagctattgatgtacacttcgcaacggagtgtctgaaattgtggtggtcctgatttataggatttcataattaaaatgtctgctgaataaatttggcttttgttttgga

SEQ ID NO: 639253 - DNA, 120 bp, Artificial Sequence
  ENSG00000181284_0 (sequence is synthesized)
gtggccacgtgggcatcaggaagaagtaacctgttgaatctatttctgctccccacccttactgcttcccataagggggaagccgcagactaataagcctcttccaaaaaagaggtaaag

SEQ ID NO: 639254 - DNA, 120 bp, Artificial Sequence
  ENSG00000181284_1 (sequence is synthesized)
ggaggtagacaaggggcggcagcggaggctggctactgcattccgtaggaggagccaacagttactttttacctgctgagtccggtgaaccagttcatgggggcggggacctgcctatga

SEQ ID NO: 639255 - DNA, 120 bp, Artificial Sequence
  ENSG00000181284_2 (sequence is synthesized)
gaaaagggccaggatagaagagcccaaagcgatagaaccgcatggcttccgcagtctgggggagtgccccctggtggggcccgccgcccccggccccagctcggccgctcacggacatcg

SEQ ID NO: 639256 - DNA, 120 bp, Artificial Sequence
  ENSG00000181284_3 (sequence is synthesized)
acttctgctccggggcgcagctgcaggaattgacccagctgatccaggagctgggtgtgcaggagagctggagtgacgggcccaagccgggagccgatctcctccgggccaaggactttg

SEQ ID NO: 639257 - DNA, 120 bp, Artificial Sequence
  ENSG00000181284_4 (sequence is synthesized)
tcttctctttgcttggtctagttcaccgccgggaccctcgctttcctccccaggcagagctcttgctgcttcgtggtgggattcgcgagggctccctggatctggggcatgcacccctgg

SEQ ID NO: 639258 - DNA, 120 bp, Artificial Sequence
  ENSG00000181284_5 (sequence is synthesized)
gtccctacgcccggggacctcactacgatgccggcttcacactcctagtgcccatgttttcactggacggcactgaactgcaactggacctggaatcctgttacgcacaggtctgcctcc

SEQ ID NO: 639259 - DNA, 120 bp, Artificial Sequence
  ENSG00000181284_6 (sequence is synthesized)
cagagatggtgtgcggaacccccatccgggagatgtggcaggattgcttaggacccccagtcccaggagcacgtgattcgatccaccgaacggagagcgaagaaagttccaaggactggc

SEQ ID NO: 639260 - DNA, 120 bp, Artificial Sequence
  ENSG00000181284_7 (sequence is synthesized)
aaagctctgtagaccagccgcacagctacgtcactgagcacgaggcgccggtgtctttggaaaaatcgcctagtgacgtttcagcgtccgagtcgcctcagcatgacgtcgtcgaccttg

SEQ ID NO: 639261 - DNA, 120 bp, Artificial Sequence
  ENSG00000181284_8 (sequence is synthesized)
agtcccaaagccgtcggaggctcgggaagcgtggcccacattatgttccgcccaggtggctgcctggttctttgctacgctggcggcggtcgccgagtctctgatccctgtcccgggtgc

SEQ ID NO: 639262 - DNA, 120 bp, Artificial Sequence
  ENSG00000181284_9 (sequence is synthesized)
tccgcgtctggtgcacgcagctcgccacgcgggtttcaccaccgtcctcctggctacccctgagccccctcgccgcctcctgctcttcgacctgatcccagtggtgtccgtggcgggctg

SEQ ID NO: 639263 - DNA, 120 bp, Artificial Sequence
  ENSG00000181284_10 (sequence is synthesized)
gcccgagggggctcggagccactcgtgggccggtccgctggcctctgagtcggcttccttctacctggtgcccggtggcggcaccgagcggccgtgcgcctccgcctggcagctctgttt

SEQ ID NO: 639264 - DNA, 120 bp, Artificial Sequence
  ENSG00000181284_11 (sequence is synthesized)
ctctgttttgcccgccaggagctggcgctcaaagcgcgcataccagcgccgctgctgcaggcgcacgcggcggcccaggcgctactgcgcccgctggtggccgggacccgggcggcggcg

SEQ ID NO: 639265 - DNA, 120 bp, Artificial Sequence
  ENSG00000181284_12 (sequence is synthesized)
cctgcggacgctgctgtactgggcgtgcgagcggctgcctgcgctctacctggcgcggccagaaaatgcgggcgcctgctgcctcgggctgctagacgagctcggccgagtgctcgaggc

SEQ ID NO: 639266 - DNA, 120 bp, Artificial Sequence
  ENSG00000181284_13 (sequence is synthesized)
cgggacgttgcctcactattttctgaacggccgacagctccgtacgggggacgactccgctgcgctgctcggagaattggcccggctccgcggggacccggcccgggccctccgtgccgc

SEQ ID NO: 639267 - DNA, 120 bp, Artificial Sequence
  ENSG00000181284_14 (sequence is synthesized)
ggtggaggaggccaaagtggcccgcaaggggggcggtttggcgggcgtggggggcggggcccattaaagacgctgttcctaccagtggaaagtgcctctgtgggcgagcgggacgtgggg

SEQ ID NO: 639268 - DNA, 120 bp, Artificial Sequence
  ENSG00000181284_15 (sequence is synthesized)
ggccctgctcgcccctcgccagggggactgactgtgtgccctgggcctgaagccccccttctggaagacctccctgttggttcctcctctacgcccacccgcctgcccccgcacaagttg

SEQ ID NO: 639269 - DNA, 120 bp, Artificial Sequence
  ENSG00000181284_16 (sequence is synthesized)
gaggtatttatttgttcattttgaggactaaatttagaacccatcatctacagacccatttgtaggttgtgtctggggcactcgctcggcctcaggaagagggaagaacggggacgactt

SEQ ID NO: 639270 - DNA, 120 bp, Artificial Sequence
  ENSG00000181291_0 (sequence is synthesized)
agcccagcctggggccaagtcgtcgtcgactgttgctctctcggacccctcccgcccccgcctcggccatggccccggggatgtcgggccgcggcggcgccgccctgctctgcctctcag

SEQ ID NO: 639271 - DNA, 120 bp, Artificial Sequence
  ENSG00000181291_1 (sequence is synthesized)
cgctactcgcccacgcctctggccgctcccacccggccagccccagcccgccggggccgcaggccagcccggtgctgccagtcagctaccgcctgtcgcacacgcggctggccttcttcc

SEQ ID NO: 639272 - DNA, 120 bp, Artificial Sequence
  ENSG00000181291_2 (sequence is synthesized)
tgcgggaggcgcggcccccgtcacccgcggtcgccaacagctctctgcagcgctccgagcccttcgtggtgttccagaccaaggagctgccggtcctcaacgtctctctggggcccttca

SEQ ID NO: 639273 - DNA, 120 bp, Artificial Sequence
  ENSG00000181291_3 (sequence is synthesized)
gcaccagccaggtggtggcgcgggagctcctgcagccgtccagcaccctggacatccccgagcgcctgacggtgaactggaaggtgcgggccttcatcgtccgctcgcacgtgcccgcct

SEQ ID NO: 639274 - DNA, 120 bp, Artificial Sequence
  ENSG00000181291_4 (sequence is synthesized)
cgcagcccgtggtccaggtgctgttctacgtagccggccgggactgggacgacttcggcgtcaccgagcggctgccctgtgtccgcctgcatgccttccgggatgcccgggaagtcaaga

SEQ ID NO: 639275 - DNA, 120 bp, Artificial Sequence
  ENSG00000181291_5 (sequence is synthesized)
agtcaagagctcctgccgcctcagcgggggcctggccacttgtctggtgcgggcagagctgcccctggcctggttcgggcccccagcccccgctgcgccacccacggcccgccgcaagtc

SEQ ID NO: 639276 - DNA, 120 bp, Artificial Sequence
  ENSG00000181291_6 (sequence is synthesized)
cgcaagtccccggacgggctggagcccgaggcgacgggggagagccagcaggccgagctctactacacgctccacgcccctgatgcgtcggggggctgcgggggctcccgccggggggcc

SEQ ID NO: 639277 - DNA, 120 bp, Artificial Sequence
  ENSG00000181291_7 (sequence is synthesized)
cccgagcggaaagccctacccagcaccccctgctgcgcatcgggagcatcagcctgttccgcccgccccccaggaggaccctgcaggagcacaggctggacagcaacctgatgatccgcc

SEQ ID NO: 639278 - DNA, 120 bp, Artificial Sequence
  ENSG00000181291_8 (sequence is synthesized)
tgccagaccggcccctcaagcccggggaagtgctcagcatcctcctctatctggcccccaactcctcctcgccctccagccccagcgtggagcacttcacactcagggtgaaggccaaga

SEQ ID NO: 639279 - DNA, 120 bp, Artificial Sequence
  ENSG00000181291_9 (sequence is synthesized)
agggtgtgacccttttaggtaccaagtcacggagtggccagtggcatgtgacctcggagctgctgactggggcaaagcactcaacagccaccgtggatgtggcctgggctcagagcacac

SEQ ID NO: 639280 - DNA, 120 bp, Artificial Sequence
  ENSG00000181291_10 (sequence is synthesized)
ccctgccccccagggagggccagggccccttggagatcttgcagctggactttgaaatggagaacttcaccagccagtcagtcaagcggaggatcatgtggcacattgactaccgtggcc

SEQ ID NO: 639281 - DNA, 120 bp, Artificial Sequence
  ENSG00000181291_11 (sequence is synthesized)
acggcgccctgcctgacctggagcgggcagtcactgagctgacggtcattcagcgggatgtgcaagccatcctgcccctggccatggacacagagatcatcaacacggccattctgactg

SEQ ID NO: 639282 - DNA, 120 bp, Artificial Sequence
  ENSG00000181291_12 (sequence is synthesized)
gccggacagtggccatccctgtcaaggtcattgccatcgaggtgaatggcctcgtcctggacatctccgccctagtggaatgcgagtctgacaatgaagacatcatcaaggtatccagca

SEQ ID NO: 639283 - DNA, 120 bp, Artificial Sequence
  ENSG00000181291_13 (sequence is synthesized)
gctgtgactacgtgtttgtgagtggaaaagagtctcgagggtccatgaacgccagggtcaccttccgctacgacgtcctcaatgctcccctggaaatgacagtctgggtccccaagctgc

SEQ ID NO: 639284 - DNA, 120 bp, Artificial Sequence
  ENSG00000181291_14 (sequence is synthesized)
ccttgcacattgagctctcagatgcccgcctcagccaagtgaagggctggagggtacctatcctccccgaccggaggtcagtccgggaaagcgaggatgaggatgaggaggaggaggagc

SEQ ID NO: 639285 - DNA, 120 bp, Artificial Sequence
  ENSG00000181291_15 (sequence is synthesized)
ggcggcagagtgcaagccgtggctgcaccctgcagtaccagcatgccaccctgcaggtcttcacccagttccacacgacatcatccgagggcactgaccaggtggtcaccatgttaggcc

SEQ ID NO: 639286 - DNA, 120 bp, Artificial Sequence
  ENSG00000181291_16 (sequence is synthesized)
cggactggctggtggaggtcaccgacctagtcagtgacttcatgcgggtgggcgatccccgagtggcacacatggtggacagcagcacgctggcaggactggagccaggcaccaccccct

SEQ ID NO: 639287 - DNA, 120 bp, Artificial Sequence
  ENSG00000181291_17 (sequence is synthesized)
ttaaggtggtgtctccgctgacggaggctgtgctcggggagacgctgctgacggtgactgaggagaaggtcagcatcacacagcttcaggcccaggtggtggccagcctggccctctccc

SEQ ID NO: 639288 - DNA, 120 bp, Artificial Sequence
  ENSG00000181291_18 (sequence is synthesized)
ttgagcttcctcaagcaggaagccctactgagcctctggctctcctacagtgatggcaccacagccccactctccctctacagcccacgagactatggactgctagtgagcagcctggat

SEQ ID NO: 639289 - DNA, 120 bp, Artificial Sequence
  ENSG00000181291_19 (sequence is synthesized)
gagcatgtggccactgtgacccaggaccgggccttccctctggtagtggctgaggccgaggggtcaggggagctgcttcgcgcagagctaaccatcgctgagagctgccagaaaaccaaa

SEQ ID NO: 639290 - DNA, 120 bp, Artificial Sequence
  ENSG00000181291_20 (sequence is synthesized)
cgcaagagtgtgctcgccacgacccctgtgggcctgcgggtgcactttgggagggacgaggaggaccccacttatgactacccgggccccagccaaccagggcccggcgggggcgaggac

SEQ ID NO: 639291 - DNA, 120 bp, Artificial Sequence
  ENSG00000181291_21 (sequence is synthesized)
gaggcccggggagctggcccgccgggctctgcgctacccgcaccggaggctccaggcccgggcaccgccagccccgtcgtgccacccacagaagacttcctgccgctgcccaccggcttc

SEQ ID NO: 639292 - DNA, 120 bp, Artificial Sequence
  ENSG00000181291_22 (sequence is synthesized)
ctgcaggtgccacggggtctgacagacctggagatcggcatgtacgcgctgctgggcgtcttctgcctcgccatcctcgtcttcctcatcaactgcatcgtttttgtgctgcgctaccgg

SEQ ID NO: 639293 - DNA, 120 bp, Artificial Sequence
  ENSG00000181291_23 (sequence is synthesized)
cacaagcgcatcccgcccgagggccagaccagcatggaccactctcaccactgggtgttcctgggcaacgggcagccgctgcgggtgcaaggagagctgtcgccgccagcaggcaacccg

SEQ ID NO: 639294 - DNA, 120 bp, Artificial Sequence
  ENSG00000181291_24 (sequence is synthesized)
ctggaaaccgtgcccgccttctgccacggcgaccaccacagcagcggcagctcgcagaccagcgtccagagccaggtgcacggcaggggcgacggctcctcgggcggctcagcccgagac

SEQ ID NO: 639295 - DNA, 120 bp, Artificial Sequence
  ENSG00000181291_25 (sequence is synthesized)
caagccgaggaccccgccagctcgcccacctccaagcgcaagcgggtcaagttcaccaccttcaccacgctgccgtcagaggagctggcctatgactcggtgcccgcgggcgaagaggac

SEQ ID NO: 639296 - DNA, 120 bp, Artificial Sequence
  ENSG00000181291_26 (sequence is synthesized)
gaggaggaggaagaggacctgggttggggctgcccggatgtggcgggccccacgcggcccactgcacccccggacctgcacaattacatgcgcagaatcaaagagattgcatagaggcgc

SEQ ID NO: 639297 - DNA, 120 bp, Artificial Sequence
  ENSG00000181291_27 (sequence is synthesized)
cagccggagtagcagggacccccccccccaacggggtcagctcggggtaggacacagccgggaccccggttcacactgactctgggcggctgaattgattttgtactccctgcccctgca

SEQ ID NO: 639298 - DNA, 120 bp, Artificial Sequence
  ENSG00000181291_28 (sequence is synthesized)
gcttggctccgtgcggagcgggccgcctcagtgtctgggccttccctcgcctcacgccattaccctcttctgccccctgcaggtggagggctcttcctccagtggctcgtaaggaggaaa

SEQ ID NO: 639299 - DNA, 120 bp, Artificial Sequence
  ENSG00000181291_29 (sequence is synthesized)
gcaaccccagcctctgttctgccctttccaaacctcctcccatcttaagcaaccccctgccccaagagtgaggcaaggaggtccagcttggggtcaggtgggcccacgctgtgtcccggg

SEQ ID NO: 639300 - DNA, 120 bp, Artificial Sequence
  ENSG00000181291_30 (sequence is synthesized)
cccgcctcccgtcccccgtgtcgtccccctgtgcagggggttctgtgggggtcttgtgtcacaggctgcacaaagactttcctcaaactaatattcagggatttctgtcctgcagggtgg

SEQ ID NO: 639301 - DNA, 120 bp, Artificial Sequence
  ENSG00000181291_31 (sequence is synthesized)
ggaggtggcagctgcctgccctgccaaggatcttgctgtggacgaaatatctgggggttagggggacagttgtagcatctgctggcattcgggtgcctcccaggacctgggagctgactc

SEQ ID NO: 639302 - DNA, 120 bp, Artificial Sequence
  ENSG00000181291_32 (sequence is synthesized)
tacagagaggtctggtgccaagccaggcaccttcctgagttctcaggactcccacctctgccccaagggctttgggcagggacctaaaggggaaagagtcctggatccatctctagccaa

SEQ ID NO: 639303 - DNA, 120 bp, Artificial Sequence
  ENSG00000181291_33 (sequence is synthesized)
atcacaccccagagccagaggcctggggacctccttgccttccccgtcccccacagcaaggtcaacactactacgccttagccacccgtcaccctgctgactgcgacttccctctgcagc

SEQ ID NO: 639304 - DNA, 120 bp, Artificial Sequence
  ENSG00000181291_34 (sequence is synthesized)
acagggcaggcagccacctatgccccacaagacggaacccgggaggggagtagagggcaccagggaatgctgtgagggacttcagggtgggcaaatgcagaagggagccagtgtcgcccc

SEQ ID NO: 639305 - DNA, 120 bp, Artificial Sequence
  ENSG00000181291_35 (sequence is synthesized)
taccccatcccacagccatttttctctcgggttctacccaccactgtgtcggatttttcttaaataaatggaagcggtcagactggaggtgggggcagcagctcccatgaacagagagta

SEQ ID NO: 639306 - DNA, 120 bp, Artificial Sequence
  ENSG00000181291_36 (sequence is synthesized)
gcgcgccaagctcggcgcccgcttctgcccgggtgggcgctgaatcccggacggaggaggagggcgggcgagcgcgagtgtgtgtgtctctctcgagtcatttacggcggagcagccggc

SEQ ID NO: 639307 - DNA, 120 bp, Artificial Sequence
  ENSG00000181291_37 (sequence is synthesized)
gcgagcgccgaggaggcggcgacggcggcggcggctgcttcgtgcaactgtggcttcccccacctcctcttcctttttgctcctcgattcttcttcttcccccacacacgtccatgggga

SEQ ID NO: 639308 - DNA, 120 bp, Artificial Sequence
  ENSG00000181291_38 (sequence is synthesized)
gccggctcccctgccagcacctcctctcctctcggccccgtaggcaccagctgccgcttccctggccgcaagctgcgcaggtgccggctgccctggcccctggcgccgcgcccgcgtctc

SEQ ID NO: 639309 - DNA, 120 bp, Artificial Sequence
  ENSG00000181291_39 (sequence is synthesized)
accgcccgcagcccggactggcgcggcgatccgctcgcccaaactgactcggagggagcgggagccgatgcccggcagcatcgagacagcgggcgaacgggcgtccggggacagggtggg

SEQ ID NO: 639310 - DNA, 120 bp, Artificial Sequence
  ENSG00000181291_40 (sequence is synthesized)
ggcggcggggaggaggcgtcggagactctgaaccccagaaaagttcaaggtttgtgcaggttcccccagggaaggcgaggagcgaggcggggcagcgcgcctctctgccgagacagcgag

SEQ ID NO: 639311 - DNA, 120 bp, Artificial Sequence
  ENSG00000181291_41 (sequence is synthesized)
accttagcggggtggcccggagctgccgtgagctgcaggagcccctctgcatcttacagcgtttatggtcatcaagctggagtcgacgtcctgggcaggaagggctcggggcagggcgca

SEQ ID NO: 639312 - DNA, 120 bp, Artificial Sequence
  ENSG00000181291_42 (sequence is synthesized)
ttagccggctttctcgctccctcgcttctccaagccccatctacatggggcagcccgttctggccgcgccacccttgccccagccgccgagcggctgcctgggcaggaggcgctgagccg

SEQ ID NO: 639313 - DNA, 120 bp, Artificial Sequence
  ENSG00000181291_43 (sequence is synthesized)
gcctgtgtggagcctgggccctgatccagactggagaaagcgcgctggagcggaggagcgagccttgcgaggggacaaacatctggccgcccgcctcgggcatccggtctgggcgtcgcc

SEQ ID NO: 639314 - DNA, 120 bp, Artificial Sequence
  ENSG00000181291_44 (sequence is synthesized)
tagggtggtggcgaccggcgtcgccagtttcagcaccgcacggaaacttttccttctccagatggattaaagttgtctggattttctctttctttgagaaagacagcattcatttgcacc

SEQ ID NO: 639315 - DNA, 120 bp, Artificial Sequence
  ENSG00000181291_45 (sequence is synthesized)
tgacctgggatttttatgctgggctgctgcaggggcttggaggaagaaagcggcgctatccatgtgcggttactaccgaaaccgaggaaactggggattgcgttggaagtcggcaccctc

SEQ ID NO: 639316 - DNA, 120 bp, Artificial Sequence
  ENSG00000181291_46 (sequence is synthesized)
gagtgagttcggattcgagctgggccgtgaggccgggagattcagcactgggctctaggtagcccccgggacgcccgcggccaccgggctccggactgcacgtgcagctccccccgcgcc

SEQ ID NO: 639317 - DNA, 120 bp, Artificial Sequence
  ENSG00000181291_47 (sequence is synthesized)
tcgcagatcctgcagggggcaccagctgggggaggtggaggctcctcccgcccggagctgcgcccccaccggctccgagggtgtagccgccagcgcctgggacgccccctccccgcaaag

SEQ ID NO: 639318 - DNA, 120 bp, Artificial Sequence
  ENSG00000181291_48 (sequence is synthesized)
gcctggctcctgtgagcccccgaccctctcatgacctctggacactggttcctggttgcagacctgaggcagagctgcgaagtcctgcctcccagcctgcctcacccttcaggcccctct

SEQ ID NO: 639319 - DNA, 120 bp, Artificial Sequence
  ENSG00000181315_0 (sequence is synthesized)
ggggctgcgccggcctcttcccagccagcttgaaagggtttgcgtagccggccttgtgggcccttgaagcgctctgttaaagcgctctgtgggcggcctggccccaactcctctagtcta

SEQ ID NO: 639320 - DNA, 120 bp, Artificial Sequence
  ENSG00000181315_1 (sequence is synthesized)
ggcgcacgaagggagttgctcctaggtcttgtccgtgccgggttcgcttttctttccttcccgaagcctggcccttagatctactatcgcagagtctgcggccgccaggaagcccagatt

SEQ ID NO: 639321 - DNA, 120 bp, Artificial Sequence
  ENSG00000181315_2 (sequence is synthesized)
cgagtgtccggagagtaaccggaagtgctgtccccaggcctaggggcggcgccggcggctgccagggagaggcaagaattgagtgttgtgaatagttctgaactagagaccttttgaaac

SEQ ID NO: 639322 - DNA, 120 bp, Artificial Sequence
  ENSG00000181315_3 (sequence is synthesized)
caaaaggaagatggtcttgagtctttcttgttacgaatgctatcttctttgagaagtcaaattgtcaggatcaggaatgtatgttttcttccatctggattctagggttggaaataccaa

SEQ ID NO: 639323 - DNA, 120 bp, Artificial Sequence
  ENSG00000181315_4 (sequence is synthesized)
gtaaggaattaacatatatgatgctggaaacttgtagaggctcatgattgaaaggcctgaaacagatgtatcttccaagttcttatcaagaaaatgactgtgagggcaacgatgggtcaa

SEQ ID NO: 639324 - DNA, 120 bp, Artificial Sequence
  ENSG00000181315_5 (sequence is synthesized)
gaagaccagcggaaaactccctaggagagagccatagaaaatgtacacttcagaagagaaatgtaatcagagaactcaaaaaaggaaaatatataatgtatgccctcggaagggtaaaaa

SEQ ID NO: 639325 - DNA, 120 bp, Artificial Sequence
  ENSG00000181315_6 (sequence is synthesized)
gatttttattcatatgcatgagattattcagatagatggtcatatataccagtgccttgaatgcaagcaaaacttctgtgaaaacttagctcttattatgtgtgagagaacccatactgg

SEQ ID NO: 639326 - DNA, 120 bp, Artificial Sequence
  ENSG00000181315_7 (sequence is synthesized)
ggagaaaccttataaatgtgatatgtgtgagaaaacctttgtccaaagctcagatcttacttcacaccagaggatccacaattacgagaaaccttataaatgtagcaaatgtgagaagag

SEQ ID NO: 639327 - DNA, 120 bp, Artificial Sequence
  ENSG00000181315_8 (sequence is synthesized)
cttttggcatcacttagcgctttcaggacatcagagaacacatgcaggtaaaaaattctatacatgtgacatttgtggcaagaattttggtcagagttctgatctgcttgtccaccagcg

SEQ ID NO: 639328 - DNA, 120 bp, Artificial Sequence
  ENSG00000181315_9 (sequence is synthesized)
aagccatactggcgagaaaccatatctatgtagtgagtgtgacaaatgcttcagtagaagtacaaacctcataaggcatcgaagaactcacacaggtgagaaaccatttaagtgtctcga

SEQ ID NO: 639329 - DNA, 120 bp, Artificial Sequence
  ENSG00000181315_10 (sequence is synthesized)
gtgtgaaaaagcttttagtgggaaatcagatcttattagccaccagagaactcacactggggaaaggccctacaaatgtaataagtgtgagaaaagttaccgacaccgttcagccttcat

SEQ ID NO: 639330 - DNA, 120 bp, Artificial Sequence
  ENSG00000181315_11 (sequence is synthesized)
tgtacataaaagagttcatactggggagaagccctataagtgtggtgcctgtgaaaaatgctttggccagaaatcagaccttatcgtgcaccagagagtccacacaggtgagaagccgta

SEQ ID NO: 639331 - DNA, 120 bp, Artificial Sequence
  ENSG00000181315_12 (sequence is synthesized)
taaatgcctggaatgtatgagaagttttactcggagtgccaacctaattaggcaccaggcaactcacactcacacttttaaatgccttgaatatgaaaaaagctttaactgtagctcaga

SEQ ID NO: 639332 - DNA, 120 bp, Artificial Sequence
  ENSG00000181315_13 (sequence is synthesized)
tcttattgtacatcagagaattcacatggaagagaaaccacatcagtggtctgcgtgtgagagtggcttcctcctaggaatggactttgttgcccaacagaaaatgagaactcaaacaga

SEQ ID NO: 639333 - DNA, 120 bp, Artificial Sequence
  ENSG00000181315_14 (sequence is synthesized)
ggagctacactataaatacactgtatgtgataaaagcttccaccagagttcagcccttcttcaacatcagacagtacacattggtgaaaaaccgtttgtctgtaatgtgagtgaaaaagg

SEQ ID NO: 639334 - DNA, 120 bp, Artificial Sequence
  ENSG00000181315_15 (sequence is synthesized)
tcttgagcttagccctccccatgcgtcagaagcctcacagatgtcttgaccaggcgagaagctgtaataccaatattaaaaattatttatgtatcagagaactcattaagatgaggacaa

SEQ ID NO: 639335 - DNA, 120 bp, Artificial Sequence
  ENSG00000181315_16 (sequence is synthesized)
atctcagactttgctcagagctcagaattcagtggggaccagagagcctgcaattggaaatatgagaaattctttgcccagagagctgccctaacagaacacttcatcctcactccaacg

SEQ ID NO: 639336 - DNA, 120 bp, Artificial Sequence
  ENSG00000181315_17 (sequence is synthesized)
agaaatctacagatgcccagaggttttgaaaacttaccgtctgagctcaaatttgatcactcacaagaggattcatacaagtgggaaaccttagaaatgcactgagtgtgagagagcttt

SEQ ID NO: 639337 - DNA, 120 bp, Artificial Sequence
  ENSG00000181315_18 (sequence is synthesized)
ctactaatgctcagcccttctcgttgtaagagaattcacaccggagaacaactttttaaatgccttcagtgtcagttgtgctgcagacagtatgaacatctcattggacctcagaaaacc

SEQ ID NO: 639338 - DNA, 120 bp, Artificial Sequence
  ENSG00000181315_19 (sequence is synthesized)
caccctggggagaagccccagcaagtgtgaaaaaagcttctaacaaaactctgacttacccatcagagaagccatactggtgaaaaattgtatatttgtcttaagtatggcaaaagcatt

SEQ ID NO: 639339 - DNA, 120 bp, Artificial Sequence
  ENSG00000181315_20 (sequence is synthesized)
cttacttgggtttgcacccaaaaaaaaaaacccaatctgaggaaagactgcaagtgtctgaatgaagagtgcttgtcaatgatcaactcttgtggtacatcagggaactcacataggtga

SEQ ID NO: 639340 - DNA, 120 bp, Artificial Sequence
  ENSG00000181315_21 (sequence is synthesized)
aaaaacccatacttaccttgagtctgagaaaacctttggtagaagctcctgtcttatcaggccccaaaaaacctgttctgcagtgagagatttaattgtgggtgagaatctatgtacata

SEQ ID NO: 639341 - DNA, 120 bp, Artificial Sequence
  ENSG00000181315_22 (sequence is synthesized)
taatatgtatgagaagactgttctcatagttagttgactcatatggtagagaggactttacatgaaatcagtatgaaaatagttttttagatacccagaagcttgttctgggagaagcta

SEQ ID NO: 639342 - DNA, 120 bp, Artificial Sequence
  ENSG00000181315_23 (sequence is synthesized)
gggtgggtcagagtagacctgatgggtaactcaggtaaagatgcttttcttttatctgaactacttaatgattgctttacttttactttttaaaaaattcagaaatccaataaaggaaag

SEQ ID NO: 639343 - DNA, 120 bp, Artificial Sequence
  ENSG00000181315_24 (sequence is synthesized)
gacggtaaccttatgatagaaggtgtggcatgtgttactgttgggggaaaggagtatattgactttgccttggttgatatttttatgcttgtctaggatgggactagagtgttgatagta

SEQ ID NO: 639344 - DNA, 120 bp, Artificial Sequence
  ENSG00000181315_25 (sequence is synthesized)
acatggcagccttttgctggcagtgaaatgaacttaagaagctagggagtagctatcctagatcaaaactctcctaatagtttttcctttgcaggaccaatcttataaagaaacagcata

SEQ ID NO: 639345 - DNA, 120 bp, Artificial Sequence
  ENSG00000181315_26 (sequence is synthesized)
ctcagctttttacttagtgtcagttgaggcatactctcaaaagttttttcccctaaaatatctttcaagttattactggtatttgaaatttcaagtttagaaattcatttctttttaact

SEQ ID NO: 639346 - DNA, 120 bp, Artificial Sequence
  ENSG00000181315_27 (sequence is synthesized)
caaagtgcaaatttcatataatgattatgatggttttagtgtccatatttttgtggcttcacttatcatctctttcagcagtagctacccacagtcagctcctagtaaaatggctacagg

SEQ ID NO: 639347 - DNA, 120 bp, Artificial Sequence
  ENSG00000181315_28 (sequence is synthesized)
aaaactgaaagaaaagtttaagcctgagtaggcatagagtaaaaaatgcataatgatgcattattaatataagagtaaggctttttttattttgagtatcctaactccaaacctagtgtt

SEQ ID NO: 639348 - DNA, 120 bp, Artificial Sequence
  ENSG00000181315_29 (sequence is synthesized)
cttttcactccattatcctgctgtttatagcaaatcaagacccataatgatacgtctttcatttatttcagttctgccaaggaaagagaaaataccttttaatcccagggaaaggattgc

SEQ ID NO: 639349 - DNA, 120 bp, Artificial Sequence
  ENSG00000181315_30 (sequence is synthesized)
aatcaccacattataaggtatatggcgtggaatgcagaattctaaatactagaagggaaaagtagttggcagattcatcagaggcttaaggataagtacttgtttccaatttaaaagtat

SEQ ID NO: 639350 - DNA, 120 bp, Artificial Sequence
  ENSG00000181315_31 (sequence is synthesized)
aattaggattgtctttaatgttctctagaaatactataattaatctagagatctatcaatggtcacatctcagtttttttcttccctgagattcaaagacgtgtaataccaatacttcag

SEQ ID NO: 639351 - DNA, 120 bp, Artificial Sequence
  ENSG00000181315_32 (sequence is synthesized)
attcctatagtatttgggactttgtagactagtgaatagatactttgttgctagtccaaatcctctgattttggtttgatttgtcctagcagatccctgaacttcagagagtattgccat

SEQ ID NO: 639352 - DNA, 120 bp, Artificial Sequence
  ENSG00000181315_33 (sequence is synthesized)
ttggattcatggagttggcgaactgctacactgctaccttgtgtatggctctaagctttgatcctaatgactggttgatgatcatgataatattagggccagtgaatatagctcatagtg

SEQ ID NO: 639353 - DNA, 120 bp, Artificial Sequence
  ENSG00000181315_34 (sequence is synthesized)
ataataaggattctagggtatttttttttcttttagaaaaagatcctggaagtttatttgatctgacatgtttttgtaatatttagaaatagctcttgtatcataaaaagttgcccagta

SEQ ID NO: 639354 - DNA, 120 bp, Artificial Sequence
  ENSG00000181315_35 (sequence is synthesized)
taagacacacaagatgtattttttttctctggtgaaaatcatgcctatcactagtatatgtttgacatttgtagtatacttaaaatagtattgggtgtgaggcatggtggtgatgaaaag

SEQ ID NO: 639355 - DNA, 120 bp, Artificial Sequence
  ENSG00000181315_36 (sequence is synthesized)
tagtccttacggctacttgttagtcattagagagaacatggagaaggggtcaaagttggtatcattaacagggcaatgacttgacccttctttcaactgatcttactggtagttgtctct

SEQ ID NO: 639356 - DNA, 120 bp, Artificial Sequence
  ENSG00000181315_37 (sequence is synthesized)
agtttttaagtaaattaatgatggaccatcccccaaacagagaactatgggggtatgaaacaaggctgaaggcttttaaccatgggagaaaaaggtgttggtattattcatatagcataa

SEQ ID NO: 639357 - DNA, 120 bp, Artificial Sequence
  ENSG00000181315_38 (sequence is synthesized)
cctgaggttggagaggaccacttgggagcctgtaaccaaaactagaaggtaacttctgggatggacggaggttcccttgaagcagtgccaacctaaatctacctcaggtaagtagttaga

SEQ ID NO: 639358 - DNA, 120 bp, Artificial Sequence
  ENSG00000181315_39 (sequence is synthesized)
ttaactttttcaagatttcagaccaaacaagacaacttgtattcagttgatgtattcctatgctttaatgtttttgtttgcccttaattattaaataaacatttgttctgaaaaactcca

SEQ ID NO: 639359 - DNA, 120 bp, Artificial Sequence
  ENSG00000181315_40 (sequence is synthesized)
attcctcctgtttaactgaaattttgtatcctttgaccaatttcttcccaaccctgctatgtctcagcctctggtaaccaccattttaccatctgtttctatcagttagactgttttata

SEQ ID NO: 639360 - DNA, 120 bp, Artificial Sequence
  ENSG00000181322_0 (sequence is synthesized)
aggtcaacatcagcacccaagagctttgggaggaaatgctcagttccaaaggactaactgttgttgatgtctatcaaggctggtgtggcccctgcaaacctgtggtgagcctcttccaga

SEQ ID NO: 639361 - DNA, 120 bp, Artificial Sequence
  ENSG00000181322_1 (sequence is synthesized)
agatgaggatcgaggtcggcctggaccttctgcactttgcattagcagaggcagatcgtcttgatgtcctcgaaaagtacagagggaagtgcgagccaacctttctgttttatgcaatta

SEQ ID NO: 639362 - DNA, 120 bp, Artificial Sequence
  ENSG00000181322_2 (sequence is synthesized)
aagatgaggctctttctgatgaagatgaatgtgtttcccatggaaagaataatggtgaagatgaggacatggtttcatcagagaggacctgtaccttggccatcattaaaccagatgcag

SEQ ID NO: 639363 - DNA, 120 bp, Artificial Sequence
  ENSG00000181322_3 (sequence is synthesized)
tggcccatggaaagactgatgagattatcatgaagattcaggaagctgggtttgaaattctaacaaatgaagagagaaccatgacagaggcagaagtgcgacttttctaccaacacaaag

SEQ ID NO: 639364 - DNA, 120 bp, Artificial Sequence
  ENSG00000181322_4 (sequence is synthesized)
ctggagaggaggcatttgagaagctggtacatcacatgtgcagtggaccaagccacctcctgatcctcaccaggactgagggcttcgaggacgtggtcactacctggcgaaccgtcatgg

SEQ ID NO: 639365 - DNA, 120 bp, Artificial Sequence
  ENSG00000181322_5 (sequence is synthesized)
gcccccgtgaccccaatgtggccaggagggagcagccagaaagtctccgagctcagtacggcacagaaatgcccttcaatgccgtccatggaagccgggacagagaagatgctgacagag

SEQ ID NO: 639366 - DNA, 120 bp, Artificial Sequence
  ENSG00000181322_6 (sequence is synthesized)
aactggcattgctcttccccagtttgaaattttcagacaaagatacagaagcccctcagggtgagtccagtacacagccaaggttgaagatcactgacctagactaaaatgagaggattc

SEQ ID NO: 639367 - DNA, 120 bp, Artificial Sequence
  ENSG00000181322_7 (sequence is synthesized)
agaagtctgaccttagaacatgagagagtggaaaacctcaggatgtttcagccaaacaagaagagaagaaaatattgttgaaattaacaatgatcagggaaaatatcatctattaagaac

SEQ ID NO: 639368 - DNA, 120 bp, Artificial Sequence
  ENSG00000181322_8 (sequence is synthesized)
attttagctgtagattaggaatggtaatttttatctggtgttttagtttccaaaacatttacatattgatctactcctcgccctagaccaaacctaattccattcttactgatatgcaca

SEQ ID NO: 639369 - DNA, 120 bp, Artificial Sequence
  ENSG00000181322_9 (sequence is synthesized)
atcactctctgtcctcattgtcacctctagcccctaaattcctccctttctcagtctacctactctttgtgactccctcatatcttttccccctggcatggatgtcctgctcagacactc

SEQ ID NO: 639370 - DNA, 120 bp, Artificial Sequence
  ENSG00000181322_10 (sequence is synthesized)
cacttagaagacagtttccctttttcactgtcctcccaccattcattactcctcctccagataccaactgctgatgttgctctagaaaaaccaccaaacatgactgttctttccgtgtaa

SEQ ID NO: 639371 - DNA, 120 bp, Artificial Sequence
  ENSG00000181322_11 (sequence is synthesized)
gctatcccacctcagcggcaccctcactgctggtgaccagccttgtaaccccctggagatgcccatgttccttatggtagctacctcttacttcaaattcttctgcctccctcatgctcg

SEQ ID NO: 639372 - DNA, 120 bp, Artificial Sequence
  ENSG00000181322_12 (sequence is synthesized)
cagccactctgtgcccacctcatcttcgtagggaccttgattttggggacacacattgcaacttcccacttctgacgaaaggtctccatgcttttgctgttttctttactcttgtcaagg

SEQ ID NO: 639373 - DNA, 120 bp, Artificial Sequence
  ENSG00000181322_13 (sequence is synthesized)
ttgggtacttcaagctcaaagcctatctaccttgatccaaaaactacctttccataatgttctcacatctttactctgtcctacctctcattttcaatcctgtttaaaagacgtttaagt

SEQ ID NO: 639374 - DNA, 120 bp, Artificial Sequence
  ENSG00000181322_14 (sequence is synthesized)
gtccaaactttaacctcttgaagctagtcctctccccactttccatctttaaatgggcatatatacaataaaggctctgtccatctccatctcttatatataacaatactgtgacttaaa

SEQ ID NO: 639375 - DNA, 120 bp, Artificial Sequence
  ENSG00000181322_15 (sequence is synthesized)
aaccaactcagtattggaaattttctaaagttctgtcctagagttctttcctgacctctagctccatacttctgattgcctaataaatatgacatggatgttcagtggaacttcccatct

SEQ ID NO: 639376 - DNA, 120 bp, Artificial Sequence
  ENSG00000181322_16 (sequence is synthesized)
ggctttcctggcaggcctggcgggggggccaggttgccatgacgaccgcggctaggtcgcggcagactcgagccatgggcagcaggaagaaggaaattgccctgcaggctggaatgcagc

SEQ ID NO: 639377 - DNA, 120 bp, Artificial Sequence
  ENSG00000181322_17 (sequence is synthesized)
gccatgacgaccgcggctaggtcgcggcagactcggttggtgactccgggcgcgtcgaagatcttgtacctgtcgttcgcagtggctcactttcccagtaatccataagaacagcaggga

SEQ ID NO: 639378 - DNA, 120 bp, Artificial Sequence
  ENSG00000181322_18 (sequence is synthesized)
taacagggtcccatgtcgtttttttgtcagaattcctcgactggcgaccctgtgcccgacaggctgcaccgcgcccggcgcactgactccggcctctgcgcgcgccccctggccggctcc

SEQ ID NO: 639379 - DNA, 120 bp, Artificial Sequence
  ENSG00000181322_19 (sequence is synthesized)
ggggtggggagggggcttcgcagatccccagaaaaccgcccggcgagccacgagcccgtggactgcaggctccgcttcctcgcggggtgttcactttgtatcagtgtgctgatttgccgc

SEQ ID NO: 639380 - DNA, 120 bp, Artificial Sequence
  ENSG00000181322_20 (sequence is synthesized)
cagttagaagcaccttaaaaaggggccgggggccgtaggaggggggcttgtctgaaggaggctctgggcttgctgatccacgcagcggtttgtcgcgaggctgcgggggaacggcccacg

SEQ ID NO: 639381 - DNA, 120 bp, Artificial Sequence
  ENSG00000181322_21 (sequence is synthesized)
gaaattttcagacaaagatacagaagcccctcagggcggtgaggctgaagcaacagcggggcccactgaggcgctttgctttcctgaggatgtggattgagatggctgtgctgctcttcc

SEQ ID NO: 639382 - DNA, 120 bp, Artificial Sequence
  ENSG00000181322_22 (sequence is synthesized)
agagcacgtgaccaggggtctactgcacaaaacagacctccggaatcggaacttactcttttgagtaccaatactttttggtttagctgtcttttgtagacaatgaaaataatatggctg

SEQ ID NO: 639383 - DNA, 120 bp, Artificial Sequence
  ENSG00000181322_23 (sequence is synthesized)
cagggtaagtcatcaaggcagacttggtctttattaaatcatagatacaaggaatttgtaactatgtgcttgagtgtgtgggggattgataatttttggtaactaagtcttcaacctaat

SEQ ID NO: 639384 - DNA, 120 bp, Artificial Sequence
  ENSG00000181322_24 (sequence is synthesized)
acagtcctgttctgaaaatacaggtcattatataacttgattatcaatactaaactgttttgtgttctcatagagcaacagtgttgctttttaatacctcattaaattttttgctgctta

SEQ ID NO: 639385 - DNA, 120 bp, Artificial Sequence
  ENSG00000181322_25 (sequence is synthesized)
ccaagagctttgggaggaaatgctcagttccaaaggactaactggcactaaaggagaatgcattggaaggaatacagggatctcttggaactcaaaggatggaaggagagccaggcatca

SEQ ID NO: 639386 - DNA, 120 bp, Artificial Sequence
  ENSG00000181322_26 (sequence is synthesized)
atttgttgcacttagcaatttacccagaaacttagtgctttacaacaacaaacattgattatcccagtttctgtgggtcaggagtccaggtatagcttagttggatacctctggctcaga

SEQ ID NO: 639387 - DNA, 120 bp, Artificial Sequence
  ENSG00000181322_27 (sequence is synthesized)
gtgtctcaccacggtagttaaggtatcagacgggatctcaaggctcaacgaggagcagatttgcttccaagttcttttgtgtggctgttggcagacctaagaagatccacttccaagctc

SEQ ID NO: 639388 - DNA, 120 bp, Artificial Sequence
  ENSG00000181322_28 (sequence is synthesized)
actcatgaggctgtggttgttgatgtctatcaaggctggtgtggcccctgcaaacctgtggtgagcctcttccagaagatgaggatcgaggtcggcctggaccttctgcactttgcatta

SEQ ID NO: 639389 - DNA, 120 bp, Artificial Sequence
  ENSG00000181323_0 (sequence is synthesized)
agtggacactgtcggcacggtgggctgggggcgtaagggccccggtggtcctagggaccccatggccatggttgagcggccgaggcccgagtgggcctcgtatcacaactgcaacagcaa

SEQ ID NO: 639390 - DNA, 120 bp, Artificial Sequence
  ENSG00000181323_1 (sequence is synthesized)
cagctgccaggacctgggcaactctgtcctgttgctgctgggcctcatcatctgcattaacattagcatcaatatagtgaccctgctctggagccgattccgtggtgtcttataccaagt

SEQ ID NO: 639391 - DNA, 120 bp, Artificial Sequence
  ENSG00000181323_2 (sequence is synthesized)
gttccatgataccatttgtgagaaagaagctcccaagtcatcattactcagaaagcagacccagccccctaagaagcagagttctcctgcagtccatcttcggtgcaccatggaccctgt

SEQ ID NO: 639392 - DNA, 120 bp, Artificial Sequence
  ENSG00000181323_3 (sequence is synthesized)
gatgatgactgtgtccccgcccccagctcaccgccatcgccgtcgaggctctcccacacgctgtgctcactgcccagtagcttgggctcctgacactgatgacgagaagcctcatcagta

SEQ ID NO: 639393 - DNA, 120 bp, Artificial Sequence
  ENSG00000181323_4 (sequence is synthesized)
actcaggggacctgggttccctggtctcaggatgccccagagtcccctccccagaccatccgcttccagcctaccgtagaggaaaggcccctcaaaacaggcatatggtccgagctgggc

SEQ ID NO: 639394 - DNA, 120 bp, Artificial Sequence
  ENSG00000181323_5 (sequence is synthesized)
ctaagggcctatgtgtatcctgtgaaccccccacctcccagccctgaggctcctagccacaagaacggtggggagggggcggtgccagaggcagaggcggctcagtaccagcctgtccca

SEQ ID NO: 639395 - DNA, 120 bp, Artificial Sequence
  ENSG00000181323_6 (sequence is synthesized)
gctcccaccctgggcccagcagtcatccctgaattttcccggcaccgctcctcaggccgaatagtgtatgatgcccgggacatgagacggcggcttcgggaactgacccgggaggtggag

SEQ ID NO: 639396 - DNA, 120 bp, Artificial Sequence
  ENSG00000181323_7 (sequence is synthesized)
gccctgtccggctgctaccccctagcctctggatccagcactgccgaggagacaagcaagaattgggtgtaccgttccctaactgggaggtgactggaaaaaaataaaaaggagagagga

SEQ ID NO: 639397 - DNA, 120 bp, Artificial Sequence
  ENSG00000181333_0 (sequence is synthesized)
gagttacatccacaaatgcctcggaagcagccagctggctgcatctttctcctcacattcctgggtctgtctgggctggttggcacagttaccagaacgtactacattgggattgtggaa

SEQ ID NO: 639398 - DNA, 120 bp, Artificial Sequence
  ENSG00000181333_1 (sequence is synthesized)
gaatactggaactatgtaccccaagggaagaatgttattactgggaaaagtttcacagaagacaaacttgcaaccttatttctcgaaagagggcccaacaggataggcagtatttacaaa

SEQ ID NO: 639399 - DNA, 120 bp, Artificial Sequence
  ENSG00000181333_2 (sequence is synthesized)
aaggctgtttacagacgcttcacggatggaacctactccatagagatccccaaacctccctggcttggattcctgggccccatcttgagggccgaagtgggtgatgtgattgtcattcat

SEQ ID NO: 639400 - DNA, 120 bp, Artificial Sequence
  ENSG00000181333_3 (sequence is synthesized)
ttaaagaactttgcttctcgaccttactctctgcatccacatggcgttttctacaacaaagattcagaaggagccctatacccagatggaacatctggaaggaacaaaaatgatgacatg

SEQ ID NO: 639401 - DNA, 120 bp, Artificial Sequence
  ENSG00000181333_4 (sequence is synthesized)
gttcctcctgggaaaaactacacctacgtctggccggtgagagaagaatatgcacctactccagccgatgccaactgcctgacctgggtgtaccattcgcacatcgacgccccaaaggac

SEQ ID NO: 639402 - DNA, 120 bp, Artificial Sequence
  ENSG00000181333_5 (sequence is synthesized)
atctgctctgggctaattgggcccctgctggtctgcaaggaaggtatcctgaatagatattcagggacacggaatgatgtggatcgagagtttgttataatgtttactcttgtggatgag

SEQ ID NO: 639403 - DNA, 120 bp, Artificial Sequence
  ENSG00000181333_6 (sequence is synthesized)
aatcaaagctggtacctcaatgaaaatatcaaacatttctgcaccaaccctgattcagttgacaagaaagatgctgttttccagaggagtaacaaaatgcatgccctcaatggatacctc

SEQ ID NO: 639404 - DNA, 120 bp, Artificial Sequence
  ENSG00000181333_7 (sequence is synthesized)
ttcggaaacttcccggagcctgatatgtgtgttggagaatctgtgtcctggcacctatttggaatggggaatgaaatagacatccattctatctatttctatggtaacaccttcatcagc

SEQ ID NO: 639405 - DNA, 120 bp, Artificial Sequence
  ENSG00000181333_8 (sequence is synthesized)
agagggcatcggactgatgtcgtcaacctgttcccagccaccttccttacaacagaaatgatagccgagaatcctgggaagtggatgataacctgccaggtcagcgaccacctacaagct

SEQ ID NO: 639406 - DNA, 120 bp, Artificial Sequence
  ENSG00000181333_9 (sequence is synthesized)
ggtatgctggggcaatacaatgttgataactgcaaaagtgatattttctaccccaagatgaagggtcaacagaggcgctactttatagcagctgaaaaaattctttgggattatgctcct

SEQ ID NO: 639407 - DNA, 120 bp, Artificial Sequence
  ENSG00000181333_10 (sequence is synthesized)
caaggctataacaaattcagtggtcttcctctaaacgcctctggcagtgactctgatctctacttcacacaaggggacaacagaataggaggaaaatactggaaggttcggtatactgaa

SEQ ID NO: 639408 - DNA, 120 bp, Artificial Sequence
  ENSG00000181333_11 (sequence is synthesized)
tttgttgatgcaacttttactaaaagaaagagactctctgctgaagaagcccatcttggaattcttggcccagtcatcaaggcagaggtgggtgataccctgttagtgacctttgccaac

SEQ ID NO: 639409 - DNA, 120 bp, Artificial Sequence
  ENSG00000181333_12 (sequence is synthesized)
aaagccgacaaggtctatagcattttaccccatggtgtgatctatgacaaggcatctgatgcagccccaaacctagatggatttgtgaaaccaggggcgcatgttaaaccaggtgaaacc

SEQ ID NO: 639410 - DNA, 120 bp, Artificial Sequence
  ENSG00000181333_13 (sequence is synthesized)
ttcacatacaagtggacagtgcctgagagcgtaagcccaactgctggtgatcctccctgtctgacctatctttacttctcagcagttgatccaattaaggacaccagctctggcctggta

SEQ ID NO: 639411 - DNA, 120 bp, Artificial Sequence
  ENSG00000181333_14 (sequence is synthesized)
gggcctttgctagtctgtaaaaagggcgtcctcaatgctgatgggacacagaaaggaatagacaaggagttttacctactgttcacagtctttgatgagaatctgagcagatattttgat

SEQ ID NO: 639412 - DNA, 120 bp, Artificial Sequence
  ENSG00000181333_15 (sequence is synthesized)
gaaaacattcagaagtttatctggcatcccttcagcattgacaaagaagataaagagtttgtgaaatccaaccgaatgcatgctgttaacggctacatgtatggcaaccagccaggctta

SEQ ID NO: 639413 - DNA, 120 bp, Artificial Sequence
  ENSG00000181333_16 (sequence is synthesized)
aacatgtgtaaaagggatagagtttcctggcatctgattggattgggcactgacactgacatgcatggaattgtttttcaagggaacaccatccacctacgagggactcaccgagactcc

SEQ ID NO: 639414 - DNA, 120 bp, Artificial Sequence
  ENSG00000181333_17 (sequence is synthesized)
ctggccctgtttccccacatggccacaacagcattcatgcagccagaccatgcaggtatttttagggtgttttgtgccaccatgccccacctctcgagaggcatgggtcagatctatgag

SEQ ID NO: 639415 - DNA, 120 bp, Artificial Sequence
  ENSG00000181333_18 (sequence is synthesized)
gtcagcagctgtgacaacagggacccttctgagcagcggtacgggatgataagaactttttacatcgccgctgaagaagtagaatgggattatgcccctaacaaaaactgggagttcgaa

SEQ ID NO: 639416 - DNA, 120 bp, Artificial Sequence
  ENSG00000181333_19 (sequence is synthesized)
aagcagcacgtggacgcaagaggggaaagacatggagatatatttatgaaccgcactgaaaattggattggctctcagtacaagaaggtggtttacagggaatatacggatggagaattt

SEQ ID NO: 639417 - DNA, 120 bp, Artificial Sequence
  ENSG00000181333_20 (sequence is synthesized)
gtggagatcaaagcccgaccaccacgagaggagcacttagaactcctgggcccaatgattcatgctgaggtgggcaacaccgtcctgatcatatttaagaacaaagccagtaggccctac

SEQ ID NO: 639418 - DNA, 120 bp, Artificial Sequence
  ENSG00000181333_21 (sequence is synthesized)
tccatctcagcccagggtgtggaggagatggatagtggaaagcaattccaagtgcccatgacaaaaccaggagaagtaaaaacttatagatggaatatccctaaaagatccggtccaggg

SEQ ID NO: 639419 - DNA, 120 bp, Artificial Sequence
  ENSG00000181333_22 (sequence is synthesized)
ccttctgatcccaattgtattccatgggtttactattcaacagtaaactttgtgaaggatacgtatagtggtttgatgggtcctctgattacatgccgaaaaggagtcttgaatgaaaag

SEQ ID NO: 639420 - DNA, 120 bp, Artificial Sequence
  ENSG00000181333_23 (sequence is synthesized)
ggaagaagaagtgacgttgattatgaatttgctctcttgtttttggtatttaatgagaatgaatcctggtatctggatgacaatattaagaagtatctcaacaaagatccacgagatttt

SEQ ID NO: 639421 - DNA, 120 bp, Artificial Sequence
  ENSG00000181333_24 (sequence is synthesized)
gaaagatttttgggaatctccatggcctcataatgaacgaagatacaatgacaaactggtatttgttagggataggaagtgaagtggacatacataccatccattatcatgctgagagct

SEQ ID NO: 639422 - DNA, 120 bp, Artificial Sequence
  ENSG00000181333_25 (sequence is synthesized)
ttcttttcaaaatagataaatcttaccgagaagatgtgtatgatctctttcctgggacattccaaaccattgaactgtttgcagatcacccagggacatggctgctacactgtcatgtgt

SEQ ID NO: 639423 - DNA, 120 bp, Artificial Sequence
  ENSG00000181333_26 (sequence is synthesized)
ctgaccacatccatgctggcatggagacaacctacacggtccttcgtaacatagacaacaggattccttactccaccacatctcctggagtggcatctcacccagccacggtgccatcta

SEQ ID NO: 639424 - DNA, 120 bp, Artificial Sequence
  ENSG00000181333_27 (sequence is synthesized)
acgaacgacctggcaaagagcagctctatttctttggcaagaatctgggtccaacaggagccaaggcagccttggtcatccttttcatcattggactcctccttctaatcaccacggtga

SEQ ID NO: 639425 - DNA, 120 bp, Artificial Sequence
  ENSG00000181333_28 (sequence is synthesized)
ttctctccctcagactctgctctgcaatgaagcagacagattaccagcaagtccagtcctgtgctctccccacggatgctctgtgaaccatctggtctccctcaacaggaaagggtgatg

SEQ ID NO: 639426 - DNA, 120 bp, Artificial Sequence
  ENSG00000181333_29 (sequence is synthesized)
tcccacagctggccagatggcagccaacagggaaactggaccaaggcatcactcaccaaggaaggttgacactgtatcctggatcagccttctgatcctctcaaacatcatccaaagcaa

SEQ ID NO: 639427 - DNA, 120 bp, Artificial Sequence
  ENSG00000181333_30 (sequence is synthesized)
tttgcttttatttatttatttttaaatgggctgcgaataatcctcaggtataaaacacagaaaaaggagaatgggcatggctgagaatgtcaactcttagtctattctttggttggattc

SEQ ID NO: 639428 - DNA, 120 bp, Artificial Sequence
  ENSG00000181333_31 (sequence is synthesized)
actgaataggagacactctgaaagatatctttatattccatcttttataattcttgaacagtgctttcttagctaaccaccaaagtttctaggtgaacagcttctagaaaaagttagagt

SEQ ID NO: 639429 - DNA, 120 bp, Artificial Sequence
  ENSG00000181333_32 (sequence is synthesized)
gcctcagacatttaactggaagggcactactttttcaacattgttgcataacatgcatcccttggttctgtggaaaatatctttcttaggagttcttggcaatgtctaagtcagtgtctg

SEQ ID NO: 639430 - DNA, 120 bp, Artificial Sequence
  ENSG00000181333_33 (sequence is synthesized)
ctgatagaattagaccaaataaattttttggaggctttaaccagctctcctggccttttcctctttgatataaatagcctgtgcagtgcttgttttaaaaagcaaagttatacgtttttt

SEQ ID NO: 639431 - DNA, 120 bp, Artificial Sequence
  ENSG00000181333_34 (sequence is synthesized)
aaaaaattgctgctgtttttattcaaacctgtagaaatacttgaatgtttacaactcacttcatgttacatgtttttacaatatgtttctgtggcaatgtttgtactttcaaaaatcaag

SEQ ID NO: 639432 - DNA, 120 bp, Artificial Sequence
  ENSG00000181333_35 (sequence is synthesized)
tagagaaattgtatttctactgcagactgtgggagggctgaaatctgtaaaagaacatgttaggctctccctttatgaatcagggactccctgagagtttagagcaagctttctatcagg

SEQ ID NO: 639433 - DNA, 120 bp, Artificial Sequence
  ENSG00000181333_36 (sequence is synthesized)
gagggaagctttgcaggaggcaagtctgggcttgaatttggagtctgatttttcattcagttagagggaatctttacaagtcctcatcttctatgaaattataacattctcattgtatga

SEQ ID NO: 639434 - DNA, 120 bp, Artificial Sequence
  ENSG00000181333_37 (sequence is synthesized)
gaaacatcaggaggaatttatcaatgtaggtgactagataggagaagggacctctaaatatcctagattctatggcttttaaagacatacctcttcatggaaggagaaaaaaggaaaagg

SEQ ID NO: 639435 - DNA, 120 bp, Artificial Sequence
  ENSG00000181333_38 (sequence is synthesized)
aaaggtgagaaaaagataatcttggtggcagattctcttaaaccattaaaccagctttgaaaattaataaataatttccaaggttcaaatgcaaaaaaattattgaacaactaaactcaa

SEQ ID NO: 639436 - DNA, 120 bp, Artificial Sequence
  ENSG00000181333_39 (sequence is synthesized)
cccattatgaggcaatctacactgtccatacctatgcttagacagtaggtgtaagattgataaaagtaacattgtttattacaagactgagaaattgcttttagctctgggcgagatgcc

SEQ ID NO: 639437 - DNA, 120 bp, Artificial Sequence
  ENSG00000181333_40 (sequence is synthesized)
ctgagattccaatgccaatgctagatgagtgatactggtatgcctgccttagcagtgggtaatttgaatgtcaaagtgagtgacaaggacctaagaaatattctggtggagggacctttc

SEQ ID NO: 639438 - DNA, 120 bp, Artificial Sequence
  ENSG00000181333_41 (sequence is synthesized)
acactgtctcatcttcatcttcatgaggggaaatgggtaattggatagaagctatagtcttaacataaaaggggatgcaaatgctaatagttctgttcatagtttgcttgaatgtcatat

SEQ ID NO: 639439 - DNA, 120 bp, Artificial Sequence
  ENSG00000181333_42 (sequence is synthesized)
caaacagcatacacaaaagattttgaatttcaatctgctaaccattgacaatgtgatttcatagtacatgttctacagttttcatacatgtgtaggctgcataatttcataattatggta

SEQ ID NO: 639440 - DNA, 120 bp, Artificial Sequence
  ENSG00000181333_43 (sequence is synthesized)
aatgccttatttattacccaccttagtaagacaagttgttcagttgtttttttttcttttcagtttatttttttaatgaaaacaaaaccacaaagtagtttgattgcatcatttatcatt

SEQ ID NO: 639441 - DNA, 120 bp, Artificial Sequence
  ENSG00000181333_44 (sequence is synthesized)
ttaataaagtgtcacataaggtggctatttgcatggttattttcacttaaaattatctatcactgaactaggggaggtggttaaagtggaattaatttttagatatttaggggctatgac

SEQ ID NO: 639442 - DNA, 120 bp, Artificial Sequence
  ENSG00000181333_45 (sequence is synthesized)
tatgccaatgacacttgttagaggaaatgaaacaaaatagtgtatctccacaaataatatgacttctcaaacattgtttcctcaaacataactacactccttgttctcagcctcactctt

SEQ ID NO: 639443 - DNA, 120 bp, Artificial Sequence
  ENSG00000181333_46 (sequence is synthesized)
gagaaaatcaactctgccttcacttacacacatatttcttcctattacaatacacgtgtccctgctcctagcaggacagtctcttcatttgactttgggtctcattgcttcttgctttct

SEQ ID NO: 639444 - DNA, 120 bp, Artificial Sequence
  ENSG00000181333_47 (sequence is synthesized)
caagacttcattcccttgggtatccatttttcctcctgcatctttctatgaaaccatcagcaatgtccgccattaaaaacagaaagcaatgtgctgtcttatttaactctataaccccct

SEQ ID NO: 639445 - DNA, 80 bp, Artificial Sequence
  ENSG00000181350_0 (sequence is synthesized)
gccgacagccgcccgcccgcccgcccccgcgacgcccgcgcgcaacagttcccccaaagttgcagcccgggaggcgagcg

SEQ ID NO: 639446 - DNA, 80 bp, Artificial Sequence
  ENSG00000181350_1 (sequence is synthesized)
gcctcgcggcccagagcggagagtcccggcgggcggcggcggcatgggcacccggcagaccaagggcagcctggcggaga

SEQ ID NO: 639447 - DNA, 120 bp, Artificial Sequence
  ENSG00000181350_2 (sequence is synthesized)
gccggacttctgggcgtcgctgctgctgcgcgccggggacaaggcggggcgcgcgggcgcggggatgcccccctaccaccggcgagtcggcatggtccaggagctgctgcggatggtgcg

SEQ ID NO: 639448 - DNA, 120 bp, Artificial Sequence
  ENSG00000181350_3 (sequence is synthesized)
ccagggccggcgggaggaggcggggacgctgctgcagcacctgcgccaggacctgggcatggagtcgacctcgctagacgacgttctgtatcgctacgccagcttccggaacctggtgga

SEQ ID NO: 639449 - DNA, 120 bp, Artificial Sequence
  ENSG00000181350_4 (sequence is synthesized)
ccccatcacacacgacctcatcatcagcctggcacgctacatccactgtcccaagccgcctcaaggctgtcctggccggaagccccccagacaacacagtggacctgtcgggaatcccac

SEQ ID NO: 639450 - DNA, 120 bp, Artificial Sequence
  ENSG00000181350_5 (sequence is synthesized)
tgacctcccgagacctggagcgggtgaccagctacctacagcgctgtggggagcaggtagacagcgtggagctgggcttcacaggcctcacggacgacatggtcctgcagctgctgccag

SEQ ID NO: 639451 - DNA, 120 bp, Artificial Sequence
  ENSG00000181350_6 (sequence is synthesized)
cactcagcaccctgccccgcctcaccacactggcactcaatggcaaccggttgacccgggccgtgctgcgcgacctcactgacatccttaaggatcccagcaagttccccaatgtcacgt

SEQ ID NO: 639452 - DNA, 120 bp, Artificial Sequence
  ENSG00000181350_7 (sequence is synthesized)
ggattgacctgggcaacaacgtggacatcttctccttgccccagcccttcctgctcagcctgcgcaagcgctccccaaagcagggccacctacccaccatcctggagctgggtgagggcc

SEQ ID NO: 639453 - DNA, 120 bp, Artificial Sequence
  ENSG00000181350_8 (sequence is synthesized)
caggcagtggggaggaggtccgggaagggacagtaggccaggaggaccctggagggggccctgtggcacctgccgaagaccaccatgagggcaaggagactgtagctgcagctcagacgt

SEQ ID NO: 639454 - DNA, 120 bp, Artificial Sequence
  ENSG00000181350_9 (sequence is synthesized)
gacatggaagtgaagggcctcaccagggagtccttgttgggtagaatgggcaaggcaggcaggggagggcgcttctcctatcaggtgggttaaggatattgccaaaaattggcctgggcc

SEQ ID NO: 639455 - DNA, 120 bp, Artificial Sequence
  ENSG00000181350_10 (sequence is synthesized)
acccacctacagaaaggcaaaccatatcatctggggaaggggatttgtgttaaaacttcccgttggtcctctgcatctgccccctatcccattatctgccatttggttcttaagtcatcc

SEQ ID NO: 639456 - DNA, 120 bp, Artificial Sequence
  ENSG00000181350_11 (sequence is synthesized)
ctctcagctcagctcatggccttccccaaagacttgtggaaatgggcacatggctggaggtactgtaagcctgagccattgtgaacaccaagagctttcccccagaaaaagaatacagta

SEQ ID NO: 639457 - DNA, 120 bp, Artificial Sequence
  ENSG00000181350_12 (sequence is synthesized)
gggcccctacatgtactgcattacatttttcatttaggggaacaagctccaaccagaggaatgtgtccccactcaaggaaggtgggaatctttagcaaaattcctgtaactcctggttgc

SEQ ID NO: 639458 - DNA, 120 bp, Artificial Sequence
  ENSG00000181350_13 (sequence is synthesized)
ccgagaccccagttccatctatgctaggggtggactgaacgtggcctacctccttatggagacccagccctatttctgaggcccaccttgattctaggcatctgcccataggaccagcta

SEQ ID NO: 639459 - DNA, 120 bp, Artificial Sequence
  ENSG00000181350_14 (sequence is synthesized)
tcgctatatcctttgacagagcagcctacgatgccatgtggtagtgctcaggacagacatggtgcccatgcatacaggcataaagtcctgttcagaaatcccctatccaccttccctacc

SEQ ID NO: 639460 - DNA, 120 bp, Artificial Sequence
  ENSG00000181350_15 (sequence is synthesized)
cactgctggctgaaaaactaccagacttctatgtgggctctgatgtccttagcatgcagggtaagtgacaaacctggcttccttcttgtcacttgccagtatgacttcactgacctagac

SEQ ID NO: 639461 - DNA, 120 bp, Artificial Sequence
  ENSG00000181350_16 (sequence is synthesized)
aggccgtaagaactctttccccataactcttaagtaatccaccaacacattccagaaaaccgactgcagaaggtgggctttaaaaccttaaaaacctaggacaatgaaggagtccaatcc

SEQ ID NO: 639462 - DNA, 120 bp, Artificial Sequence
  ENSG00000181350_17 (sequence is synthesized)
cttggcagatccaacaagatggctggggagagggagaaacaaactggaggctcccaaaggaacctaacttagcaaaggttctcatcttataccctccccttacccaaatactgtcctact

SEQ ID NO: 639463 - DNA, 120 bp, Artificial Sequence
  ENSG00000181350_18 (sequence is synthesized)
gaaagggccctaccagttaagggatctcttctaaataacaggcaacccctagatccaagtagttcagtccaggaagactgggagccaatcactcttgaaccttgtgggcaaacagtatgg

SEQ ID NO: 639464 - DNA, 120 bp, Artificial Sequence
  ENSG00000181350_19 (sequence is synthesized)
gggaggaccctcttgacaggccttggtaggcaagattccaacacaggaagacagcaagatggggcctagagtatggggccctacatgctgttaaggttgtggttaggaatggtgcaatgc

SEQ ID NO: 639465 - DNA, 120 bp, Artificial Sequence
  ENSG00000181350_20 (sequence is synthesized)
tgcaggagctggaacaaagctacaccaaggaacagagcacagagcagcaggggccgaaattgaggaggccttaaatgctttgagcttttgccttcagtctaaagctgtagaatagggggt

SEQ ID NO: 639466 - DNA, 120 bp, Artificial Sequence
  ENSG00000181350_21 (sequence is synthesized)
taagagcttaggctgaccacagggaagtttacaagctagagcgaatatctggactgctaatatctgacaacagtaggcgaaatttactttttcttcaaatacacattttcaagaattgac

SEQ ID NO: 639467 - DNA, 120 bp, Artificial Sequence
  ENSG00000181350_22 (sequence is synthesized)
tggagaagctgtgccggcagctgacataccacctcagcccccactcccagtggaggcggcaccgggggctggtgaaaaggaagccacaggcctgcctcaaggctgtcctggccggaagcc

SEQ ID NO: 639468 - DNA, 120 bp, Artificial Sequence
  ENSG00000181350_23 (sequence is synthesized)
ccagcttaaagaactttgcccaccaacataaccaatttatgaaagtcaattcattaaaaggtatagaacctcttgttgggcatgatggcaagggacaaagctacaacttggcctgtgcct

SEQ ID NO: 639469 - DNA, 120 bp, Artificial Sequence
  ENSG00000181350_24 (sequence is synthesized)
ttggaagctgaggcaggaggaccatctgagcccaggagcctgagaccagcctgggcaacatagagaatccgtctcaacaaaaaaaaaattttagccaggtgtgctgtgagctgtagtccc

SEQ ID NO: 639470 - DNA, 120 bp, Artificial Sequence
  ENSG00000181350_25 (sequence is synthesized)
tcccagctacaaggtgggaggattgcttaggcctgggtgattgaggatgcaatgagctgtgattgtgccaccacactccagcctgggcaatacagcaagactgtctcaaaaaaaaaaaaa

SEQ ID NO: 639471 - DNA, 120 bp, Artificial Sequence
  ENSG00000181350_26 (sequence is synthesized)
gacattggggagtggcagggatcatggtgagtcttggccagggggtcagcaggcacttggctccagccaacttttgtccgatctcctggaatccagacttacataaatctgtttttcaat

SEQ ID NO: 639472 - DNA, 120 bp, Artificial Sequence
  ENSG00000181350_27 (sequence is synthesized)
gctagcaactaattcacaaaaactaaaaccatcctgcagatctgtttgcagccactgctgtctgcctagggtgcccaccctaggccagcagagcagggcctcccccagctcagcctgggg

SEQ ID NO: 639473 - DNA, 120 bp, Artificial Sequence
  ENSG00000181350_28 (sequence is synthesized)
gagctgggctcttacccgggagacaggaagcctgggggctgagactggtgcacccagccactcagggccctaccacccatggttgcctctgcaggaaggcgatgcactgggcgccatgga

SEQ ID NO: 639474 - DNA, 120 bp, Artificial Sequence
  ENSG00000181350_29 (sequence is synthesized)
gaagctgtgccggcagctgacataccacctcagcccccactcccagtggaggcggcaccgggggctggtgaaaaggaagccacaggcctggtccctgcaggctggggaaggaagggctgt

SEQ ID NO: 639475 - DNA, 120 bp, Artificial Sequence
  ENSG00000181350_30 (sequence is synthesized)
ccccctccctcatggagaagaaagaactctggtgcctccttctgttctggacccgccccccacccccacccacaactaggagatggatcctggagaggcgcattcccaggtggatgaaca

SEQ ID NO: 639476 - DNA, 120 bp, Artificial Sequence
  ENSG00000181371_0 (sequence is synthesized)
ttcctttcttccaccgaaggaaattatgagaagaaactgcacgttggtgactgagttcattctcctgggactgaccagtcgccgggaattacaaattctcctcttcacgctgtttctggc

SEQ ID NO: 639477 - DNA, 120 bp, Artificial Sequence
  ENSG00000181371_1 (sequence is synthesized)
catttacatggtcacggtggcagggaaccttggcatgattgtcctcatccaggccaacgcctggctccacatgcccatgtactttttcctgagccacttatccttcgtggatctgtgctt

SEQ ID NO: 639478 - DNA, 120 bp, Artificial Sequence
  ENSG00000181371_2 (sequence is synthesized)
ctcttccaatgtgactccaaagatgctggagattttcctttcagagaagaaaagcatttcctatcctgcctgtcttgtgcagtgttacctttttatcgccttggtccatgttgagatcta

SEQ ID NO: 639479 - DNA, 120 bp, Artificial Sequence
  ENSG00000181371_3 (sequence is synthesized)
catcctggctgtgatggcctttgaccggtacatggccatctgcaaccctctgctttatggcagcagaatgtccaagagtgtgtgctccttcctcatcacggtgccttatgtgtatggagc

SEQ ID NO: 639480 - DNA, 120 bp, Artificial Sequence
  ENSG00000181371_4 (sequence is synthesized)
accactgattaagctggcttgttctgacacctacaacaaggagttgtcaatgtttattgtggctggctggaacctttctttttctctcttcatcatatgtatttcctacctttacatttt

SEQ ID NO: 639481 - DNA, 120 bp, Artificial Sequence
  ENSG00000181371_5 (sequence is synthesized)
ccctgctattttaaagattcgctctacagagggcaggcaaaaagctttttctacctgtggctcccatctgacagctgtcactatattctatgcaacccttttcttcatgtatctcagacc

SEQ ID NO: 639482 - DNA, 120 bp, Artificial Sequence
  ENSG00000181371_6 (sequence is synthesized)
cccctcaaaggaatctgttgaacagggtaaaatggtagctgtattttataccacagtaatccctatgctgaaccttataatttatagccttagaaataaaaatgtaaaagaagcattaat

SEQ ID NO: 639483 - DNA, 120 bp, Artificial Sequence
  ENSG00000181371_7 (sequence is synthesized)
caaagagctgtcaatgaagatatacttttcttaaaaatcagtattcttttggtttctaaagcccttcctagacttttttctttagctgagaaatatagtgcatcaatggagaacattgca

SEQ ID NO: 639484 - DNA, 120 bp, Artificial Sequence
  ENSG00000181374_0 (sequence is synthesized)
agagaggcaaagaaacattgtgaaatctccaactcttaaccttcaacatgaaagtctctgcagtgcttctgtgcctgctgctcatgacagcagctttcaacccccagggacttgctcagc

SEQ ID NO: 639485 - DNA, 120 bp, Artificial Sequence
  ENSG00000181374_1 (sequence is synthesized)
cagatgcactcaacgtcccatctacttgctgcttcacatttagcagtaagaagatctccttgcagaggctgaagagctatgtgatcaccaccagcaggtgtccccagaaggctgtcatct

SEQ ID NO: 639486 - DNA, 120 bp, Artificial Sequence
  ENSG00000181374_2 (sequence is synthesized)
tcagaaccaaactgggcaaggagatctgtgctgacccaaaggagaagtgggtccagaattatatgaaacacctgggccggaaagctcacaccctgaagacttgaactctgctacccctac

SEQ ID NO: 639487 - DNA, 120 bp, Artificial Sequence
  ENSG00000181374_3 (sequence is synthesized)
ggttttgtgattcaaaatgtactatgtgttaagtaatattggctattatttgacttgttgctggtttggagtttatttgagtattgctgatcttttctaaagcaaggccttgagcaagta

SEQ ID NO: 639488 - DNA, 120 bp, Artificial Sequence
  ENSG00000181374_4 (sequence is synthesized)
ggttgctgtctctaagcccccttcccttccactatgagctgctggcagtgggtttgtattcggttcccaggggttgagagcatgcctgtgggagtcatggacatgaagggatgctgcaat

SEQ ID NO: 639489 - DNA, 120 bp, Artificial Sequence
  ENSG00000181374_5 (sequence is synthesized)
gtaggaaggagagctctttgtgaatgtgaggtgttgctaaatatgttattgtggaaagatgaatgcaatagtaggactgctgacattttgcagaaaatacattttatttaaaatctccta

SEQ ID NO: 639490 - DNA, 120 bp, Artificial Sequence
  ENSG00000181378_0 (sequence is synthesized)
atctatggagacggcaatatggaggcgatcttacatttctttgatttcatctgaacgtccagttcacaattggagtgatgtttaccttaaccggttgtagactggtggagaaaacccaga

SEQ ID NO: 639491 - DNA, 120 bp, Artificial Sequence
  ENSG00000181378_1 (sequence is synthesized)
aggtggagaatccatcagtctcatttgcctcttctttcccccttattcctcttctcctaagaggcaagagtgttcagaagaaacaagcagagagtaaaagccagataaagctccatactc

SEQ ID NO: 639492 - DNA, 120 bp, Artificial Sequence
  ENSG00000181378_2 (sequence is synthesized)
agagtgctccctttggactgtgtcccaaggacatgatgctcacccaggctccaagctccgtcgtgaggtccaggaacagcaggaaccacaccgtgaactctggtggatcctgcctgagtg

SEQ ID NO: 639493 - DNA, 120 bp, Artificial Sequence
  ENSG00000181378_3 (sequence is synthesized)
ccagcacagtggccatccctgccatcaacgacagcagtgcagccatgagtgcctgcagcaccatcagcgcccagcccgcaagctccatggacactcagatgcactccccaaagaagcagg

SEQ ID NO: 639494 - DNA, 120 bp, Artificial Sequence
  ENSG00000181378_4 (sequence is synthesized)
agagagtgaacaagagggtcatctggggcattgaggtggctgaggagctgcattggaaaggctgggagctaggaaaggagaccacaaggaatctggttctgaaaaatcgatccttgaaac

SEQ ID NO: 639495 - DNA, 120 bp, Artificial Sequence
  ENSG00000181378_5 (sequence is synthesized)
tccagaagatgaagtacaggccccccaagaccaagttcttcttcacggtcatccctcagcccatcttcctgagcccaggcataaccctcacgctccccatcgtcttccggcctctggagg

SEQ ID NO: 639496 - DNA, 120 bp, Artificial Sequence
  ENSG00000181378_6 (sequence is synthesized)
cgaaggagtacatggaccagctgtggtttgagaaagcggaggggatgttctgtgtcggcctacgggccaccctgccctgccacaggctgatctgccgcccaccatccctgcagctgccca

SEQ ID NO: 639497 - DNA, 120 bp, Artificial Sequence
  ENSG00000181378_7 (sequence is synthesized)
tgtgtgctgtgggagatacgactgaggcctttttctgcctggataatgtgggggacctgcccaccttcttcacctgggagttctccagcccattccagatgctgcccgccacggggctcc

SEQ ID NO: 639498 - DNA, 120 bp, Artificial Sequence
  ENSG00000181378_8 (sequence is synthesized)
tggagccaggccaggcctctcagatcaaggtgacctttcagccccttacagccgtcatctacgaggtgcaggccacgtgctggtacggggcgggcagccggcagaggagcagcatccagc

SEQ ID NO: 639499 - DNA, 120 bp, Artificial Sequence
  ENSG00000181378_9 (sequence is synthesized)
tgcaggctgtggccaagtgcgcccagctgctggtgagcataaagcacaagtgcccggaggaccaggatgccgagggcttccagaagctgttgtactttggctctgttgctgtgggctgca

SEQ ID NO: 639500 - DNA, 120 bp, Artificial Sequence
  ENSG00000181378_10 (sequence is synthesized)
cctcggagaggcagatcaggctacacaacccgtcggcggtaaatgcccccttcaggattgaaatttccccggatgaactggccgaagaccaggccttctcatgccccacggcccatggca

SEQ ID NO: 639501 - DNA, 120 bp, Artificial Sequence
  ENSG00000181378_11 (sequence is synthesized)
tcgtgcttccgggagagaagaaatgtgtgtcggtgttcttccaccccaagactctggacaccagaactgtggactactgctccatcatgccttctggctgtgcctccaagaccctgctta

SEQ ID NO: 639502 - DNA, 120 bp, Artificial Sequence
  ENSG00000181378_12 (sequence is synthesized)
aagtcgttggtttctgtagaggccctgctgtgtccctgcagcactactgtgtcaacttcagctgggtcaaccttggggagcgctccgagcagcccctgtggattgagaaccaatcggact

SEQ ID NO: 639503 - DNA, 120 bp, Artificial Sequence
  ENSG00000181378_13 (sequence is synthesized)
gcacggcccacttccagtttgccatcgactgcttggagagtgtctttaccatcaggcctgcctttgggacgctggtgggcaaggcccgtatgaccctgcactgtgccttccagcccactc

SEQ ID NO: 639504 - DNA, 120 bp, Artificial Sequence
  ENSG00000181378_14 (sequence is synthesized)
accccatcatctgctttcggcgtgtggcctgtctcatccaccaccaggacccactgttcctggacctgatggggacctgccactcggacagcaccaagccagccatcctgaagcctcagc

SEQ ID NO: 639505 - DNA, 120 bp, Artificial Sequence
  ENSG00000181378_15 (sequence is synthesized)
acctcacctggtaccgcacacacctggcccggggcctgacgctctacccccctgacatcctggatgccatgctgaaggagaagaagctggcacaggaccagaacggggctctcatgattc

SEQ ID NO: 639506 - DNA, 120 bp, Artificial Sequence
  ENSG00000181378_16 (sequence is synthesized)
ccatccaggatctggaggacatgccggccccgcagtacccttatatcccccccatgaccgagttcttcttcgacggcaccagcgacataaccatcttccccccgcccatcagtgtagagc

SEQ ID NO: 639507 - DNA, 120 bp, Artificial Sequence
  ENSG00000181378_17 (sequence is synthesized)
ctgtcgaggtagacttcggtgcctgcccagggcctgaggcccccaaccctgtacccctgtgcctgatgaaccacaccaagggcaagatcatggtggtctggacgcgaaggtctgactgcc

SEQ ID NO: 639508 - DNA, 120 bp, Artificial Sequence
  ENSG00000181378_18 (sequence is synthesized)
ccttctgggtgactccagagagctgcgacgtgcccccactcaagtccatggccatgcgcctgcacttccagccgcctcaccccaactgcctttacacggtggagctcgaagccttcgcca

SEQ ID NO: 639509 - DNA, 120 bp, Artificial Sequence
  ENSG00000181378_19 (sequence is synthesized)
tctataaggtcctgcagagctacagtaatattgaggaggactgcaccatgtgcccatcctggtgcctgacggtgcgggcacgaggccacagctatttcgctggctttgagcaccacatcc

SEQ ID NO: 639510 - DNA, 120 bp, Artificial Sequence
  ENSG00000181378_20 (sequence is synthesized)
cccagtattccctagatgtccccaagctatttccagcagtgtcctccggtgagcccacctaccgcagcctgctcctggtcaacaaagactgcaagctgctgaccttcagcctggcccccc

SEQ ID NO: 639511 - DNA, 120 bp, Artificial Sequence
  ENSG00000181378_21 (sequence is synthesized)
agagaggctcagacgtcatccttcggcccacttcgggccttgtggcacccggggcccaccagatcatcctcatctgcacctaccctgagggcagctcctggaagcagcacactttctatc

SEQ ID NO: 639512 - DNA, 120 bp, Artificial Sequence
  ENSG00000181378_22 (sequence is synthesized)
tgcagtgcaatgcttccccccagtatctcaaggaggtgagcatgtacagccgggaggagccactgcagctgaagctggacacccacaaaagcctctacttcaagcccacctgggtgggct

SEQ ID NO: 639513 - DNA, 120 bp, Artificial Sequence
  ENSG00000181378_23 (sequence is synthesized)
gctcctccaccagccccttcaccttccgcaacccctcgcgtctgcccctgcagttcgagtggagggtctctgagcagcatcgaaagctgctggctgtccagccctccagggggctaatcc

SEQ ID NO: 639514 - DNA, 120 bp, Artificial Sequence
  ENSG00000181378_24 (sequence is synthesized)
aagtggggatgtgggtctgggaagccggcctgtccccaaatgccaaccccgctgccaccacccactacatgctccggctggtgggcgttgggctcaccagcagcctctctgcaaaggaaa

SEQ ID NO: 639515 - DNA, 120 bp, Artificial Sequence
  ENSG00000181378_25 (sequence is synthesized)
aggagctggcctttgggaatgtgctggtgaacagcaagcagtccaggttccttgtcctcctgaatgacggcaactgcaccctctattaccgcctctacctggagcagggcagccctgagg

SEQ ID NO: 639516 - DNA, 120 bp, Artificial Sequence
  ENSG00000181378_26 (sequence is synthesized)
ccgttgacaaccaccccctcgctctgcagctggaccgaacagaggggagcatgccaccccggtcccaggacaccatctgcctgactgcctgtcccaagcagcggtcccagtactcctgga

SEQ ID NO: 639517 - DNA, 120 bp, Artificial Sequence
  ENSG00000181378_27 (sequence is synthesized)
ccatcacctactctctcctttcccacagagataacaaggctggggagaagcaggagctgtgctgcgtctccctggtggccgtgtaccccttgctttccatcctggatgtcagctccatgg

SEQ ID NO: 639518 - DNA, 120 bp, Artificial Sequence
  ENSG00000181378_28 (sequence is synthesized)
gcagtgctgagggtatcacccggaagcacctgtggcgcctcttctctctggacctgcttaacagttacttggagcgtgaccccaccccctgtgagctcacctacaaggtgcccacccggc

SEQ ID NO: 639519 - DNA, 120 bp, Artificial Sequence
  ENSG00000181378_29 (sequence is synthesized)
acagcatgagccagatcccccccgtcctcacccctttaaggcttgacttcaatttcggggccgcaccattcaaggccccaccttccgtggtattcctggccctgaagaacagcggagtgg

SEQ ID NO: 639520 - DNA, 120 bp, Artificial Sequence
  ENSG00000181378_30 (sequence is synthesized)
tgtccctggactgggccttcctccttccaagtgaccagcggattgacgtggagctctgggcagagcaagcagagttgaattccactgagctccaccagatgcgcgtgcaggacaattgcc

SEQ ID NO: 639521 - DNA, 120 bp, Artificial Sequence
  ENSG00000181378_31 (sequence is synthesized)
tcttctccatcagccccaaggctgggagcctgagtcctgggcaggagcagatggtggagttaaaatacagccacctgttcatcggtactgatcacctcccagtgctcttcaaggtgtccc

SEQ ID NO: 639522 - DNA, 120 bp, Artificial Sequence
  ENSG00000181378_32 (sequence is synthesized)
atggccgggagatcctgctaaatttcataggtgtgacagtgaagccggagcagaagtatgtgcacttcacctctactacccaccagttcatccccattcccattggtgacacgctacccc

SEQ ID NO: 639523 - DNA, 120 bp, Artificial Sequence
  ENSG00000181378_33 (sequence is synthesized)
cacggcagatttatgagctgtataatggtggctcagtgcccgtgacatatgaggtccagaccgatgtcctgtcacaggttcaggaaaaaaattttgatcaccccatcttttgctgcctca

SEQ ID NO: 639524 - DNA, 120 bp, Artificial Sequence
  ENSG00000181378_34 (sequence is synthesized)
accccaaaggggagatccagccaggcagcactgcccgggtcttgtggatcttctcacctatcgaggccaagacctacacggtggacgtgcccatacacatcctgggatggaactcggccc

SEQ ID NO: 639525 - DNA, 120 bp, Artificial Sequence
  ENSG00000181378_35 (sequence is synthesized)
tcatccacttccagggagtgggctacaacccccatatgatgggggacacagccccattccacaacatctcctcgtgggacaacagttccatacactctaggctggtggtgcctggacaga

SEQ ID NO: 639526 - DNA, 120 bp, Artificial Sequence
  ENSG00000181378_36 (sequence is synthesized)
atgtcttcctgtcccagtctcatatttccctgggaaacatacctgtgcagagcaagtgcagccgcctgctcttcctcaacaacatctccaagaacgaggaaattgccttctcctggcagc

SEQ ID NO: 639527 - DNA, 120 bp, Artificial Sequence
  ENSG00000181378_37 (sequence is synthesized)
caagtcctctagattttggggaggtgtctgtgagtcccatgataggggtggtggctcctgaagagacggtcccatttgtggtgaccttgagggcctctgtgcatgccagcttctacagtg

SEQ ID NO: 639528 - DNA, 120 bp, Artificial Sequence
  ENSG00000181378_38 (sequence is synthesized)
cagacctggtatgcaagctgtactcgcagcagctcatgaggcagtatcacaaggagctgcaggagtggaaggacgagaaggtgcggcaggaagtggagttcaccatcaccgacatgaaag

SEQ ID NO: 639529 - DNA, 120 bp, Artificial Sequence
  ENSG00000181378_39 (sequence is synthesized)
tgaagaagagaacatgctgcacagcctgtgaacctgcgaggaagtacaagacactgcctcccatcaagaaccagcagtctgtcagccggcctgccagctggaaactgcagaccccaaagg

SEQ ID NO: 639530 - DNA, 120 bp, Artificial Sequence
  ENSG00000181378_40 (sequence is synthesized)
aggaggtgtcctggccctgcccccagccaccctcgccaggcatgctctgcctgggccttactgcccgagcccatgccaccgactactttctggctaacttcttctcagagtttccctgcc

SEQ ID NO: 639531 - DNA, 120 bp, Artificial Sequence
  ENSG00000181378_41 (sequence is synthesized)
actttttgcaccgggagctgccaaagaggaaggcccccagggaagagtcagagacttctgaggaaaaatcccctaacaagtggggccctgtttccaagcagaagaagcagctcctggttg

SEQ ID NO: 639532 - DNA, 120 bp, Artificial Sequence
  ENSG00000181378_42 (sequence is synthesized)
acattctcaccacaataatcaggggcctgctggaagacaagaacttccatgaggctgtggaccaaagcctggtggagcaggtgccgtacttccgccaattctggaatgagcagtcaacta

SEQ ID NO: 639533 - DNA, 120 bp, Artificial Sequence
  ENSG00000181378_43 (sequence is synthesized)
agttcatggaccagaaaaacagcctgtacttaatgccaatcctgcctgtaccctccagcagctgggaggatgggaagggcaagcagccgaaggaagacagaccagagcactatccagggt

SEQ ID NO: 639534 - DNA, 120 bp, Artificial Sequence
  ENSG00000181378_44 (sequence is synthesized)
tgggaaagaaggaagagggggaggaggagaagggtgaagaggaagaagaagagttggaggaggaagaggaggaagaagaggagacagaagaggaggagttgggcaaggaggagatagagg

SEQ ID NO: 639535 - DNA, 120 bp, Artificial Sequence
  ENSG00000181378_45 (sequence is synthesized)
agaaggaggaggagagggatgagaaggaagagaaagtgagctgggcgggcatcgggcccacaccacagcctgagtcccaggagtccatgcaatggcagtggcaacagcagctgaatgtca

SEQ ID NO: 639536 - DNA, 120 bp, Artificial Sequence
  ENSG00000181378_46 (sequence is synthesized)
tggtgaaggaggagcaagaacaggacgagaaggaggccatcagaaggctcccggccttcgccaacctgcaggaggcgctgctggagaacatgatccagaacatcctggtggaggcgagcc

SEQ ID NO: 639537 - DNA, 120 bp, Artificial Sequence
  ENSG00000181378_47 (sequence is synthesized)
gcggggaggtggtactcacctcgcggccacgcgtcatcgccctgccgccgttctgcgtgcccaggagtctgaccccggacacgctgctgccgacgcagcaagcagaggtactccacccgg

SEQ ID NO: 639538 - DNA, 120 bp, Artificial Sequence
  ENSG00000181378_48 (sequence is synthesized)
tggtgccacttcctaccgaccttccgtaaatgcccgcgcccagcctctccgacatgccgctaggggtcacgcctggccccctctccaccgccagtaaaagcatctagtcttttttctgta

SEQ ID NO: 639539 - DNA, 120 bp, Artificial Sequence
  ENSG00000181378_49 (sequence is synthesized)
atctatggagacggcaatatggaggcgatcttacatttctttgatttcatctgaacgtccagttcacaattggagaggcaagagtgttcagaagaaacaagcagagagtaaaagccagat

SEQ ID NO: 639540 - DNA, 120 bp, Artificial Sequence
  ENSG00000181378_50 (sequence is synthesized)
gcgtgccaggctttctcttggctggacagtgacccctatgagtttgtctcctccaaagctcctggcctagctcggcccatctgattttctcattcttatgtaagtctcccctcccctcca

SEQ ID NO: 639541 - DNA, 120 bp, Artificial Sequence
  ENSG00000181378_51 (sequence is synthesized)
agggagaactcagctgagatcaagctgtttgggaaaactgggtgcacagggagatactccctggggctcctggctaggaggcctcctagcttctctactagtccttgaattaagaagtgg

SEQ ID NO: 639542 - DNA, 120 bp, Artificial Sequence
  ENSG00000181378_52 (sequence is synthesized)
tcactctaaaggagctttgagcgggcaggaagctgggcctagagacaaagtcagcagcaccagataattgtgatggaaagggcttctgactcagcttccctgggtcgggaactccgagtg

SEQ ID NO: 639543 - DNA, 120 bp, Artificial Sequence
  ENSG00000181378_53 (sequence is synthesized)
ccggctgtccccagccctgctgttctggccccagatgcgtggtgccccctcctcatccgttagtcctgcccatcccttccttcttgactctgcccaccccactgcccttgcccagaggcc

SEQ ID NO: 639544 - DNA, 120 bp, Artificial Sequence
  ENSG00000181378_54 (sequence is synthesized)
ggagacaagtgcctagaggctgaaggagaacaagagctgcactctcttgcccgtggtggcctggctgcttgctgtctgtgaagagtggacctcacattgacggctgtggaggccagggtg

SEQ ID NO: 639545 - DNA, 120 bp, Artificial Sequence
  ENSG00000181378_55 (sequence is synthesized)
gacacggtgataggctcagaagcggtgggactgccctgatggagcctgggcatagtggccttaataacttaacaaatgagacacattcactgggcatctgctgcatgccaggacctgcgc

SEQ ID NO: 639546 - DNA, 120 bp, Artificial Sequence
  ENSG00000181378_56 (sequence is synthesized)
tttacaagtcttttctcctccaatcctgtgggaaactcctctctagactctttcatggacagggaggctgagggtcagcaaggttaaggactcagcgaagaccattcagccatgaatgga

SEQ ID NO: 639547 - DNA, 120 bp, Artificial Sequence
  ENSG00000181378_57 (sequence is synthesized)
cagagccaggttcaaagctgaatttgtccagtccagagcccttgcctaccccagttagtcagcaagaagactgagttgcttctacatagtacgcactgcctcgttgctggagcccgcctg

SEQ ID NO: 639548 - DNA, 120 bp, Artificial Sequence
  ENSG00000181378_58 (sequence is synthesized)
acggagccccagcttagtggaggctgggcctgaatgggggcaagttgagggtctctggtggggaaggacagggacctgctgccggggacagagctgcccccgagggtcctggctgagggg

SEQ ID NO: 639549 - DNA, 120 bp, Artificial Sequence
  ENSG00000181378_59 (sequence is synthesized)
cttttctcccccagaggctcagaacttgtgcccagcaaacatcctgcttccatgcatggacttttcctccctccaccatgtgcctttgtttcctagtaaactccttttgatgacttccaa

SEQ ID NO: 639550 - DNA, 120 bp, Artificial Sequence
  ENSG00000181378_60 (sequence is synthesized)
gggacaggagcagcccctgctgaggattctgaagagctccttccctgctcctaggaggcggggccaccttgcctcagcctgggtgtctgctgccccctggtggccctgtggggaatcatc

SEQ ID NO: 639551 - DNA, 120 bp, Artificial Sequence
  ENSG00000181378_61 (sequence is synthesized)
cgtgactacctggagatcccagtcccactggcatccagtgatgctggagttctgctcaggctgccagggctctgggcctgtagcctggccctgagagtaccacctcccttcagtggaact

SEQ ID NO: 639552 - DNA, 120 bp, Artificial Sequence
  ENSG00000181378_62 (sequence is synthesized)
gcggtcaagatcagggtcacttaccagctatgtgaccttgggcaagttccttaatgtctctgagtcctgatcttttcatctctaaacttgggaccacgtccgatcttttgaggaggcttt

SEQ ID NO: 639553 - DNA, 120 bp, Artificial Sequence
  ENSG00000181378_63 (sequence is synthesized)
ccaaagtggaggctttggttgcccccgtcctaatgctctggcagtggggtgatgttgaggtttgtaggaataaggttgtagatgcctggctctgctgaggttcagcctgtcagatattta

SEQ ID NO: 639554 - DNA, 120 bp, Artificial Sequence
  ENSG00000181378_64 (sequence is synthesized)
ggttacaggctctagacctgcacagtccagtacagccactgacagccacacgtggctactgagcttttaatatgtggctggtcccaattgagacgtgccgtgagtgtaaaatgcaccctg

SEQ ID NO: 639555 - DNA, 120 bp, Artificial Sequence
  ENSG00000181378_65 (sequence is synthesized)
cctggatttcaagacttagtatgaaaagaatgtaaaatacctcgttactaattttatattggttatatgttaaagtgataagattttagatctgttgggttaaataaaatatactattaa

SEQ ID NO: 639556 - DNA, 120 bp, Artificial Sequence
  ENSG00000181378_66 (sequence is synthesized)
atctatggagacggcaatatggaggcgatcttacatttctttgatttcatctgaacgtccagttcacaattggaggcaagagtgttcagaagaaacaagcagagagtaaaagccagataa

SEQ ID NO: 639557 - DNA, 120 bp, Artificial Sequence
  ENSG00000181378_67 (sequence is synthesized)
ggaaaacagacatgtatgcatacatagcatctggcatatacatagcatctggcatatatacaaatatatgtgccacatatatttgcatatgatttcagctacagtcatcgaggatccctc

SEQ ID NO: 639558 - DNA, 120 bp, Artificial Sequence
  ENSG00000181378_68 (sequence is synthesized)
agcagtgccaagtgtggccatggaggggcctagtggggtgggccttgtccccaagtccctctttggagtgccttccctgagggtgagtccctgggctcccaggcaaagccctggatctcg

SEQ ID NO: 639559 - DNA, 120 bp, Artificial Sequence
  ENSG00000181378_69 (sequence is synthesized)
tgtacagcctcattcctcatggtgccaggtagcacctgttgccagagctgggaagcagaccctctcctccatgacaaggatggccatgagagtctcctccctcagcctctctttctcatg

SEQ ID NO: 639560 - DNA, 120 bp, Artificial Sequence
  ENSG00000181378_70 (sequence is synthesized)
taagggatcaaggacccagtgccacagccttgagccccgaaagcaggctctcttcaaaacaaaacaaaacaaacaaaaaaaacctttaacatgccatataaaagccagtgagtgtttaaa

SEQ ID NO: 639561 - DNA, 120 bp, Artificial Sequence
  ENSG00000181378_71 (sequence is synthesized)
atacgtgcagtatgaataattatgcagctataatccattatttttcattgtggtatagtgtcccaatgtgtgcctgtaccataatgtattcatccagaatgaaggaagtttgggctgttt

SEQ ID NO: 639562 - DNA, 120 bp, Artificial Sequence
  ENSG00000181378_72 (sequence is synthesized)
ctatttgggactgttggcattcgtgtatatgtgtccagttacataagtacaagagtttttctggggaataccaggtactatgaaggctcacgtgattttggagtcttatgaaggtttttt

SEQ ID NO: 639563 - DNA, 120 bp, Artificial Sequence
  ENSG00000181378_73 (sequence is synthesized)
ttttttttttcctgcgtagttgttaaattggtgaccttgcgggatggaaccttctattccaccaccttgctccaccttctgtcttttctggggaatagacgcaggagtagaattgcggag

SEQ ID NO: 639564 - DNA, 120 bp, Artificial Sequence
  ENSG00000181378_74 (sequence is synthesized)
gcttgggccatgtacctgttcacttgctgtagataaaccaaactatttcccaaagtgcatggatttctttagacacccaccagcagcattagagagttcccattcctccacatccttacc

SEQ ID NO: 639565 - DNA, 120 bp, Artificial Sequence
  ENSG00000181378_75 (sequence is synthesized)
tttttgtaggttattgacactttgcatttcttcatgtgtgaaatttatgatcaagtctgtggccatttttctcttacattatcttgtcttttttctttttggtataagttcttatcccaa

SEQ ID NO: 639566 - DNA, 120 bp, Artificial Sequence
  ENSG00000181378_76 (sequence is synthesized)
ttacaaactctttgccagttatgcgttgtggatatcttctctcatcttatgatttgtctttactccctttattgtgtcttttgaagaataaaagttcaaagttgaattttaaaggtatca

SEQ ID NO: 639567 - DNA, 120 bp, Artificial Sequence
  ENSG00000181378_77 (sequence is synthesized)
actttatcagtctttttattttatgattggtgcttttttatgcttctcctaagaagtccttctctacccctaggtcattaagatattttcctctagtatcttctaaagactttatatttt

SEQ ID NO: 639568 - DNA, 120 bp, Artificial Sequence
  ENSG00000181378_78 (sequence is synthesized)
tgccttttatatttgtcttttgtctatatggaattgatttttatgaatagtaagtcttgatagctggtagtatacgtcctcctacttaattcttcttcaagattgtcttggctattcttg

SEQ ID NO: 639569 - DNA, 120 bp, Artificial Sequence
  ENSG00000181378_79 (sequence is synthesized)
gccctccctttgatctcttacataaatattcaaatcagcttatcatacatgcacataaaacacttcttgagattttgattgggatttaattggacctatagatgaatatgaggagaaatg

SEQ ID NO: 639570 - DNA, 120 bp, Artificial Sequence
  ENSG00000181378_80 (sequence is synthesized)
atatcattataatattgagtcttttactccatgaacatgggctatttctgtattcattaggttatctttcctgtctctcaatagagtgtaaagttttctccatagacatttagcacatcc

SEQ ID NO: 639571 - DNA, 120 bp, Artificial Sequence
  ENSG00000181378_81 (sequence is synthesized)
tttagcacatccttagttagatttattcataagtattttatatttttgctgttgttatatatgacatattttttagttgttttatttctgtttgttgctagtttttaaaatgtcattttt

SEQ ID NO: 639572 - DNA, 120 bp, Artificial Sequence
  ENSG00000181378_82 (sequence is synthesized)
tgttcagtgatcttggcaaatcctcttattctaataatttatttgttaattttcttgttttttcatgcacacatttgtattttaaatggaaaatgacatttttttttctttctagtcctt

SEQ ID NO: 639573 - DNA, 120 bp, Artificial Sequence
  ENSG00000181378_83 (sequence is synthesized)
acacctttggctttccttactgcattgttaaatagaaaagtgttgaacagaagtggttatagaggcatctttgttttgtttatcatctcagagtaaaggactgcaatgtttcactattaa

SEQ ID NO: 639574 - DNA, 120 bp, Artificial Sequence
  ENSG00000181381_0 (sequence is synthesized)
agagcgcccagtccgacgccaggctctgcgctcggtctcctctgctccacctcctccccgcggggcgtgcagctccgaagctctttggacctagcaggttcggcggccgggaggtgccat

SEQ ID NO: 639575 - DNA, 120 bp, Artificial Sequence
  ENSG00000181381_1 (sequence is synthesized)
tcacatcaaatgtagccattttagaggtgtcaaaataaatcagccatatttaataaattccagctctactcttctaccctgtagcccaagaagcagcaacgatggggtcaaaggatcatg

SEQ ID NO: 639576 - DNA, 120 bp, Artificial Sequence
  ENSG00000181381_2 (sequence is synthesized)
cagtatttttcagggaaatgacacagttaattttgaatgaaatgccaaaagctgggtattccagcatattaaatgattttgtggaatctaatttttttgtgattgatggagattccttgc

SEQ ID NO: 639577 - DNA, 120 bp, Artificial Sequence
  ENSG00000181381_3 (sequence is synthesized)
ttgtcacatgcctgggtgtaaaatcattcaagtggggacagaatctccactttttctatctggttgaatgctatcttgtggatcttctgagtaacggaggacaattcaccatagttttct

SEQ ID NO: 639578 - DNA, 120 bp, Artificial Sequence
  ENSG00000181381_4 (sequence is synthesized)
ttaaggatgctgaatatgcatattttgattttcctgaacttctttcattgaggaccgctttaattctccaccttcaacacaatactaacattgatgtgcaaacggagttttctggatgct

SEQ ID NO: 639579 - DNA, 120 bp, Artificial Sequence
  ENSG00000181381_5 (sequence is synthesized)
tatcacaagattggaagttattcttggaacagcattacccgtattttctgatagtttcagaggaaggcctgagtgatttacaaacgtacctttttaacttcctaatcatacattcctggg

SEQ ID NO: 639580 - DNA, 120 bp, Artificial Sequence
  ENSG00000181381_6 (sequence is synthesized)
gaatgaaagtcaatgttgtgctttcatcagggcatgaatctgatactctcagattttatgcatatactatggaaagcacagacagaaaccaaactttttccaaggagaatgaaacagtga

SEQ ID NO: 639581 - DNA, 120 bp, Artificial Sequence
  ENSG00000181381_7 (sequence is synthesized)
ttcagagtgcatataaaagcctcatacaacacttggaagaaataagggttttagtattagcaactcattttgaacatttgaaatggaatgatatgatggaagaggcgtatcagactctat

SEQ ID NO: 639582 - DNA, 120 bp, Artificial Sequence
  ENSG00000181381_8 (sequence is synthesized)
ttctgcttcagcacctatggtcagaaggatcggacatccagcgtgttctctgtgtcacttcatgttcactatccttgagaatgtaccatcgtgtcttagtgcacagtaattgcctatccc

SEQ ID NO: 639583 - DNA, 120 bp, Artificial Sequence
  ENSG00000181381_9 (sequence is synthesized)
tgcaggaggtggaagatttctgcagactgcgttgcctctgtgtggcttttcaactccacttacccctttctcagagagcttgttctcgagtcatcacatgctcttggattaggaacagtg

SEQ ID NO: 639584 - DNA, 120 bp, Artificial Sequence
  ENSG00000181381_10 (sequence is synthesized)
attctttcttaaaaatgaacaagtggtgtgaatatttcattttaagcaacttaaacgtttttggatgctggaatctgaatttaaatcatgtttctgacttgtatgatgagcaattgttaa

SEQ ID NO: 639585 - DNA, 120 bp, Artificial Sequence
  ENSG00000181381_11 (sequence is synthesized)
agaatatagccttctactatgaatttgaaagtactcaagaaccacatttgaatttgggagattccattaggagggattatgaagacctgtggaatgttgtgtcacacctggttaaagaat

SEQ ID NO: 639586 - DNA, 120 bp, Artificial Sequence
  ENSG00000181381_12 (sequence is synthesized)
ttaacgttggaaagtcttttcctctgagaacaacaagaagacattttcttagacaagagaaatcggtcattcaagaaatctccttggaaaagatgcctagtgtgggctttattccaatga

SEQ ID NO: 639587 - DNA, 120 bp, Artificial Sequence
  ENSG00000181381_13 (sequence is synthesized)
catctgctgtaattgatgagtttgttggagatatgatgaaggatttgcctattctaaagagtgatgatccggttgttccttcactgtttaaacaaaagacatctgatgaacttttgcact

SEQ ID NO: 639588 - DNA, 120 bp, Artificial Sequence
  ENSG00000181381_14 (sequence is synthesized)
ggcatgctcaaagactccttagtgacgactatgacaggatcaaatgtcatgttgatgaacaatctagagatcctcatgttcttgatttcctgaaaaagattcaggattatcagcaatttt

SEQ ID NO: 639589 - DNA, 120 bp, Artificial Sequence
  ENSG00000181381_15 (sequence is synthesized)
atgggaaatcgttagaatcaatctctacgaaagtcattgtgactcaaactactcggccaaaggaggattccagtggtgccagtggtgaaatattacagaataccaaaccccaccaaatta

SEQ ID NO: 639590 - DNA, 120 bp, Artificial Sequence
  ENSG00000181381_16 (sequence is synthesized)
ccaaaaagagtaagaaaaagtcatttctcaaagaagatcagaacaaagctcagcaaaacgatgatctgctgttttctattgaagaggagatgaagaacaatttacattctggaataagga

SEQ ID NO: 639591 - DNA, 120 bp, Artificial Sequence
  ENSG00000181381_17 (sequence is synthesized)
aattggaagattatttgacatcatgtgcaagtaattcagtgaaatttggagttgaaatgttaggattaattgcctgctttaaagcatggaaaaaacattgccgaggtgaaggcaaaattt

SEQ ID NO: 639592 - DNA, 120 bp, Artificial Sequence
  ENSG00000181381_18 (sequence is synthesized)
cgaaagatttaagtatagctgttcaaatgatgaaaaggattcattcactcctggagagatacccagaaattttggaagcagaacatcatcaatatatagctaaatgccttaaatatttag

SEQ ID NO: 639593 - DNA, 120 bp, Artificial Sequence
  ENSG00000181381_19 (sequence is synthesized)
gctttaatgatctggcaaactctttggatccaactctgataggagatgacaaaaataagaagaaatattcgattgacattggaccagctcggtttcaactgcaatacatgggccattact

SEQ ID NO: 639594 - DNA, 120 bp, Artificial Sequence
  ENSG00000181381_20 (sequence is synthesized)
tgataagagatgaaagaaaagatcgggatcccagggtccaggattttattcccaacgcatggcagcaggaactcctggatgtggtagataagaatgagtcagcagtgattgttgccccaa

SEQ ID NO: 639595 - DNA, 120 bp, Artificial Sequence
  ENSG00000181381_21 (sequence is synthesized)
cgtcctcaggcaaaacctatgcttcctactactgcatggagaaagtgctgagggagagcgatgtcggggtggttgtgtacgttgcacccgcaaagtcccttgttggtcaagtggctgcaa

SEQ ID NO: 639596 - DNA, 120 bp, Artificial Sequence
  ENSG00000181381_22 (sequence is synthesized)
ctgttgagaatcgttttactaaaacgttgcctgccggcagaactctatgcggtgcttttacaagagattattgtcacaatgtactaaactgtcaggtacttattacagtgccggaatgtt

SEQ ID NO: 639597 - DNA, 120 bp, Artificial Sequence
  ENSG00000181381_23 (sequence is synthesized)
ttgaaatcctgttgcttgctcctcatcgccaaaaatgggtggaaaggatcagatatgttatatttgatgaggtccattatcttggcagagaagttggagcaaaattttgggagctcctcc

SEQ ID NO: 639598 - DNA, 120 bp, Artificial Sequence
  ENSG00000181381_24 (sequence is synthesized)
ttgtcattattcgatgtccctttttggttctttcagctaccataaataacccaaatcttctcaccaagtggctgcaatcagtaaaacagtactggaaacaggcagacaagattatggaag

SEQ ID NO: 639599 - DNA, 120 bp, Artificial Sequence
  ENSG00000181381_25 (sequence is synthesized)
agaaatgtatttctgaaaaacaggctgacaaatgtctcaactttctccaagaccattcatataaaaatcaatcatatgaagttagacttgtgctctgtggagagagatacaatgatttag

SEQ ID NO: 639600 - DNA, 120 bp, Artificial Sequence
  ENSG00000181381_26 (sequence is synthesized)
agaagcatatatgttcagtaaaacatgatgatgtttattttgatcattttcatccctgtgctgcgctaacgacagatattattgaaaagtatggattcccacctgatcttaccctcaccc

SEQ ID NO: 639601 - DNA, 120 bp, Artificial Sequence
  ENSG00000181381_27 (sequence is synthesized)
ctcaagaaagcatccagctttatgataccatggctcaagtctgggaaacttggcccagggctcaggaattgtgtccagaggaattcattctttttaagaataagatagtcattaagaagt

SEQ ID NO: 639602 - DNA, 120 bp, Artificial Sequence
  ENSG00000181381_28 (sequence is synthesized)
agaattgacaaattggattaaaaatggccaagtgaagaaggtcaaaagagtactgaagaaccttagtccggattcattgtctagttcaaaagatatggtgaaaatgtttcctcttcttgt

SEQ ID NO: 639603 - DNA, 120 bp, Artificial Sequence
  ENSG00000181381_29 (sequence is synthesized)
tgaaaagttaagacaaatggataagttgcctgcaatattttttttgtttaagaatgatgatgtgggaaaaagagctggaagtgtgtgcacttttctggagaagacagagacaaaaagcca

SEQ ID NO: 639604 - DNA, 120 bp, Artificial Sequence
  ENSG00000181381_30 (sequence is synthesized)
tccccacactgaatgtcatagttatgtctttgcaatagatgaagtacttgaaaaagtgaggaagacacagaaaaggatcactaaaaaaaacccaaagaaggctgaaaaactggaaagaaa

SEQ ID NO: 639605 - DNA, 120 bp, Artificial Sequence
  ENSG00000181381_31 (sequence is synthesized)
aaaagtgtatagagctgaatatattaatttcctggagaatctgaagattctggaaatttctgaggactgcacgtatgctgatgtcaaagccctacacactgaaattaccaggaataaaga

SEQ ID NO: 639606 - DNA, 120 bp, Artificial Sequence
  ENSG00000181381_32 (sequence is synthesized)
ctcaactttggagagggtattaccgcgagtgcgatttacaagacacggcaaagaactgaaggctttagcacaaagggggattggatatcatcacagcagcatgtattttaaagaaaaaga

SEQ ID NO: 639607 - DNA, 120 bp, Artificial Sequence
  ENSG00000181381_33 (sequence is synthesized)
gtttgttgagatactctttgtaaaagggcttattagggtagtgacagctactgaaacacttgccttagggatccacatgccatgcaaatctgttgtttttgcccaagactcagtctatct

SEQ ID NO: 639608 - DNA, 120 bp, Artificial Sequence
  ENSG00000181381_34 (sequence is synthesized)
ggatgctttaaattacagacagatgtctggtcgtgctggaagaagaggtcaagacctgcttggaaatgtgtatttctttgatatcccattgcccaaaataaaaagactccttgcatccag

SEQ ID NO: 639609 - DNA, 120 bp, Artificial Sequence
  ENSG00000181381_35 (sequence is synthesized)
tgttcctgagctgagaggacagttccctctcagcataaccctggtcctgcgactcatgctgctggcttccaagggagatgacccagaggatgccaaggcaaaggtgttgtcagtgctaaa

SEQ ID NO: 639610 - DNA, 120 bp, Artificial Sequence
  ENSG00000181381_36 (sequence is synthesized)
gcattcattgctgtcttttaagagacgaagagccatggagactttgaaactttactttttgttttccttgcagctccttatcaaagaggactatttaaataaaaagggtaatccaaagaa

SEQ ID NO: 639611 - DNA, 120 bp, Artificial Sequence
  ENSG00000181381_37 (sequence is synthesized)
atttgcaggacttgcatcatatttgcatggtcatgaaccttcaaatcttgtttttgtaaattttctcaagagaggccttttccataatctctgtaagccagcctggaaaggctcacaaca

SEQ ID NO: 639612 - DNA, 120 bp, Artificial Sequence
  ENSG00000181381_38 (sequence is synthesized)
attttcccaagatgtgatggaaaagctcgtgttagtattggcaaatttgtttggaagaaaatatattccagcaaaattccaaaatgctaatttaagtttttctcagtcaaaggtgatcct

SEQ ID NO: 639613 - DNA, 120 bp, Artificial Sequence
  ENSG00000181381_39 (sequence is synthesized)
tgccgaactcccggaggattttaaagctgctttatatgagtataacctggcagtaatgaaggattttgcctccttcctgctgattgcttccaagtcggtgaacatgaaaaaagagcatca

SEQ ID NO: 639614 - DNA, 120 bp, Artificial Sequence
  ENSG00000181381_40 (sequence is synthesized)
actccctttgtcaagaatcaaattcacaggtaaagaatgtgaagactcccaactcgtgtctcacttgatgagctgcaagaaaggaagagtagccatttcaccatttgtttgtctttcggg

SEQ ID NO: 639615 - DNA, 120 bp, Artificial Sequence
  ENSG00000181381_41 (sequence is synthesized)
gaacacagataatgatttgcttcgaccagagactatcaaccaggtcatcctgcgcacagtcggtgttagtggcactcaggctcctctgctgtggccatggaaattagataaccgaggaag

SEQ ID NO: 639616 - DNA, 120 bp, Artificial Sequence
  ENSG00000181381_42 (sequence is synthesized)
gagaatgccactaaatgcatatgtgctcaatttctataaacacaactgcttgacaagattagaccaaaaaaatgggatgcgtatgggacagcttttaaagtgtttgaaagattttgcatt

SEQ ID NO: 639617 - DNA, 120 bp, Artificial Sequence
  ENSG00000181381_43 (sequence is synthesized)
caacattcaggctatcagtgactccttgagtgaactatgtgaaaataagcgtgacaatgtagtcctggcatttaaacaattgagtcaaaccttttatgagaaacttcaagaaatgcaaat

SEQ ID NO: 639618 - DNA, 120 bp, Artificial Sequence
  ENSG00000181381_44 (sequence is synthesized)
tcaaatgagtcaaaatcatttagaataacaccatggaaaactttcaagtctgattatgtggtatttatccctttgcaaggagagatataattaagcttacacaatgaaatggaaaaaatg

SEQ ID NO: 639619 - DNA, 120 bp, Artificial Sequence
  ENSG00000181381_45 (sequence is synthesized)
tttgtcttggagtcaaacagaattaaactcagatatcagctctgctattttctaactgaatgactttaagttatgtaatatatctgagctttaacttcatttttggcaaaaccggagtaa

SEQ ID NO: 639620 - DNA, 120 bp, Artificial Sequence
  ENSG00000181381_46 (sequence is synthesized)
aaatgaatacctctagttgttttgaggattaaatgagataatgtaagaaaagtgattgggattgggtggtgacttaatgaacggtagtggtttttttagtagttaatgtatagcaaaatt

SEQ ID NO: 639621 - DNA, 120 bp, Artificial Sequence
  ENSG00000181381_47 (sequence is synthesized)
agtttcacattgtcaagttttcaatacatccccaagttaattgaattttaaattaatgatcaataaatcacaaaggacccaaatcaattctgaacaacaatttagttatgtaagaagact

SEQ ID NO: 639622 - DNA, 120 bp, Artificial Sequence
  ENSG00000181381_48 (sequence is synthesized)
tctgagattacaagaaactcactgctgtggactggatgtttgtgccctcccctccaaaatttttatattgaaattctaaccctcaatgtgatggtattaggagatgataggtcatgaggg

SEQ ID NO: 639623 - DNA, 120 bp, Artificial Sequence
  ENSG00000181381_49 (sequence is synthesized)
tggagctccttggatgtaattagtgcctttaacagagagacaagagagcttgttctccaatctctgctcactaccactggatgatacaatgggaagatggccatctgcagaccaagaagc

SEQ ID NO: 639624 - DNA, 120 bp, Artificial Sequence
  ENSG00000181381_50 (sequence is synthesized)
aagccctcaacagaactgaatctacttacaccatgatcttgaactttccagcctccaggattgtgagaaatacatgtttgttgtttagccatctagtctgtggttttctgttgaagcagt

SEQ ID NO: 639625 - DNA, 120 bp, Artificial Sequence
  ENSG00000181381_51 (sequence is synthesized)
ctgaattgactaaaacagtcacttggagtagttataaaccactttcctgttgaaagcagaacatgctgattcaactgttttgttcaatagcaatgatagattttgtttaagtcccctaca

SEQ ID NO: 639626 - DNA, 120 bp, Artificial Sequence
  ENSG00000181381_52 (sequence is synthesized)
ctttcttatttctaaatgatcaagagtacacttcctggcagtgattaaggagtgtgtatctaacagaaaaaatatatataccctgtgaacccgaatatggaattcagattgtttctgccc

SEQ ID NO: 639627 - DNA, 120 bp, Artificial Sequence
  ENSG00000181381_53 (sequence is synthesized)
tcagtatcatacttaaaaaacaagcatacaaacaaacataagggaacaaacagcaaccataacaaaaacaaacctttaaaggtgcgtttttgctgtgataaatgaatacggtactctgaa

SEQ ID NO: 639628 - DNA, 120 bp, Artificial Sequence
  ENSG00000181381_54 (sequence is synthesized)
ggagaaaaaagtttctcaaatgagcttaaactgcaagtgatttaaaaattagagaatataattcttaaagctattgaaagtttcaaccagaaaacctcaagtgaattttgtatgtaaatg

SEQ ID NO: 639629 - DNA, 120 bp, Artificial Sequence
  ENSG00000181381_55 (sequence is synthesized)
aaatcttgaatgtaagttctgtgattctttaagcaaacaattagctgaaaacttggtattgttgtagtttatgtagtaagtgacttggcacccatcagaaaataaagggcattaaattga

SEQ ID NO: 639630 - DNA, 120 bp, Artificial Sequence
  ENSG00000181381_56 (sequence is synthesized)
tctgactttgagccaggacttgaagcagacactatggctcatgcagaaaagaaacttcttcccacaagactgccagcgaaattttgcagactcaagatgttcggagagtttggacaatca

SEQ ID NO: 639631 - DNA, 120 bp, Artificial Sequence
  ENSG00000181381_57 (sequence is synthesized)
tcacagtttttggacgcctatctgagaccatcttctgtgaagtttattcagctcataagtgtgaataaaaaattgctaaatgtgaactcaaagagacagtgcagttttacatctgagtcc

SEQ ID NO: 639632 - DNA, 120 bp, Artificial Sequence
  ENSG00000181381_58 (sequence is synthesized)
caccaggaaacaaggatcacggagcatgtgagaaaatggtaattgagaaggctgatcaaggaacacactaaaattggaggcatgaaacacttgcagaattgtcccaatggtccatctggg

SEQ ID NO: 639633 - DNA, 120 bp, Artificial Sequence
  ENSG00000181381_59 (sequence is synthesized)
gatcctgggaacaagtgtctttcaagccacgaccagtctttctacttcttcctcatactttgtatctggcttgtgtacatgtcacagaatcaggtactaaaacaagaggtgatacagaaa

SEQ ID NO: 639634 - DNA, 120 bp, Artificial Sequence
  ENSG00000181381_60 (sequence is synthesized)
taagctatcccaaatatagcattaagtgaaacaaacacatcgtatactagttattatatccggaagtttgctaaagctgccataacaaaatattatagagtggtggcttaaacaacagaa

SEQ ID NO: 639635 - DNA, 120 bp, Artificial Sequence
  ENSG00000181381_61 (sequence is synthesized)
tttcaccctccccctttgataatggtcaaattatctctttaataattttttttgtggtttttacctatgcctctcaatttcattatgattaatacaatagaatgcttaactgggagtgca

SEQ ID NO: 639636 - DNA, 120 bp, Artificial Sequence
  ENSG00000181381_62 (sequence is synthesized)
tttggcagataaattaactgccatggacagaccactattaaagtttgagttaattcttttatgtttatgtttttatactttttaattaagaaatgttgttctctttaggatgcgtatggg

SEQ ID NO: 639637 - DNA, 120 bp, Artificial Sequence
  ENSG00000181381_63 (sequence is synthesized)
cgtcagagaattattaatataatacgttacagttgtgacattttatcatagtgatcgtttaatatctttgaacactgaaatgacttgtgtaatacctttgaaatatgattatctctgtgt

SEQ ID NO: 639638 - DNA, 120 bp, Artificial Sequence
  ENSG00000181381_64 (sequence is synthesized)
gtgattttgtttgttttgcaatgattatcccaatttaatgtgctaaagttctataagtgactcttccttgctcagtgtgaatgtcagcctcttattttatttcactctattatcctggat

SEQ ID NO: 639639 - DNA, 70 bp, Artificial Sequence
  ENSG00000181381_65 (sequence is synthesized)
gacaattcaccatagttttctttaagatggagtttcgctctttttgcacaggctgaagtgcaatgactct

SEQ ID NO: 639640 - DNA, 120 bp, Artificial Sequence
  ENSG00000181381_66 (sequence is synthesized)
tgcgttgtgtggaaggtgtcttgctttccctttgccttccgccataattagctcagccatccaggtgaaggtacagagatagatgatcccagtttgacatgcagtgctcttggtaattct

SEQ ID NO: 639641 - DNA, 120 bp, Artificial Sequence
  ENSG00000181381_67 (sequence is synthesized)
atgccggtgtgatagacacagaagatgaaatagactaaaaagacccactaatactgctgttaatgagtgaagaggaaatgaggtaaacaccaacgccattaaagtggttctactttacgt

SEQ ID NO: 639642 - DNA, 120 bp, Artificial Sequence
  ENSG00000181381_68 (sequence is synthesized)
actagttattatatccggaagtttgcattttatatgcctcatggagatacttagcgatattcagcaaccttgcaaatggagtggtctctgccagacagctactaacagctgtagaacaat

SEQ ID NO: 639643 - DNA, 120 bp, Artificial Sequence
  ENSG00000181381_69 (sequence is synthesized)
ttcagaagctgcttacccaagaagtctaatgtggaaggacatggctgtcactgcctggggaagcaaataggaaagaatatgacaaaggaggaaatcagctgttggaccaaagaatttaaa

SEQ ID NO: 639644 - DNA, 120 bp, Artificial Sequence
  ENSG00000181381_70 (sequence is synthesized)
gtccgacgccaggctctgcgctcggtctcctctgctccacctcctccccgcggggcgtgcagctccgaagctctttggacctagcaggttcggcggccgggtttgctaaagctgccataa

SEQ ID NO: 639645 - DNA, 120 bp, Artificial Sequence
  ENSG00000181381_71 (sequence is synthesized)
gggtttcatcatattggtcaggctggtgtcgaacacctgacctgaggcaatccacccgccttggtctcccaaagttctagaacttttaataaatagaattttacagtatgaactctttgt

SEQ ID NO: 639646 - DNA, 120 bp, Artificial Sequence
  ENSG00000181381_72 (sequence is synthesized)
tgaactctttgtataaacctttcattcaacataatatttttgagaggcatccattttgttgtgtgcagtggtattttgttccttttatcacttttgagtaaggttttattgtagaaatgt

SEQ ID NO: 639647 - DNA, 120 bp, Artificial Sequence
  ENSG00000181381_73 (sequence is synthesized)
gccacggtttgtttacccattttcttgttgagtggacactttcctgttgagcaatctctttcaatatcttgcctagatgaataaagctactatgtgcattcacatgcaagtcttcgtgtg

SEQ ID NO: 639648 - DNA, 120 bp, Artificial Sequence
  ENSG00000181381_74 (sequence is synthesized)
gacgtaagtttttattttccttgtgcatgtatctgtggttgaaatatatgttttataaaactgccaaagcttttcctaaggtagttgtgcccctttacactcactccagcaatgaataac

SEQ ID NO: 639649 - DNA, 120 bp, Artificial Sequence
  ENSG00000181381_75 (sequence is synthesized)
agttctggtgccctgtgtagttgcaaacatttgtatttggtcagtccagccattctggtggatgtgtagtgttatgtccctgtgttttaattggtatttatcaaatggctaatgatgttg

SEQ ID NO: 639650 - DNA, 120 bp, Artificial Sequence
  ENSG00000181381_76 (sequence is synthesized)
agtgcttattgttcatttgtatactatgacttgtgaagcatctgctcgtatcttttgaccattttaaattgggttctttatctttttaatattgagttgtagtagttcttgatatattct

SEQ ID NO: 639651 - DNA, 120 bp, Artificial Sequence
  ENSG00000181381_77 (sequence is synthesized)
gtatacaacctcttgtcatgtatattattgcaaatatattttcccagtctgtggcttgtcacttcattttgagacagagtctcgctctgtcacgtaggctggagtgcagtggcgcaatct

SEQ ID NO: 639652 - DNA, 68 bp, Artificial Sequence
  ENSG00000181381_78 (sequence is synthesized)
attctcctgcctcagcctcctaagtacttggaactacaggcatgtcgtgttagcaggatggtctcaat

SEQ ID NO: 639653 - DNA, 63 bp, Artificial Sequence
  ENSG00000181381_79 (sequence is synthesized)
ttgtatttttagtagacatggggtttcatcgtgttagcaggatggtctcaatctccggacctc

SEQ ID NO: 639654 - DNA, 120 bp, Artificial Sequence
  ENSG00000181381_80 (sequence is synthesized)
ttttcttagtactatctttggatgaccagatattttaattttggtgaaatctaacttattattctttaatggttattgtgcctgtatcctgataagaatcattgcctatctcttagtcac

SEQ ID NO: 639655 - DNA, 120 bp, Artificial Sequence
  ENSG00000181381_81 (sequence is synthesized)
aaagatattttcctatatttattaataattctagaagtatgtagtttcagcttttgcattttggtctatgatatttcttgaattaatttttgtgtgtttgtggtgtgaatgggggattga

SEQ ID NO: 639656 - DNA, 120 bp, Artificial Sequence
  ENSG00000181381_82 (sequence is synthesized)
ggttgatttgttccagcatccattgttgagaacatttttcttccaccagtggattgctttggtttcttcatcaaaaaatcaaatgattatatatgtgtaggtccatttctgggctttcta

SEQ ID NO: 639657 - DNA, 120 bp, Artificial Sequence
  ENSG00000181381_83 (sequence is synthesized)
ctatgttccatcaaaggatttaacaaattaccagtaccacaatgtcctgatttgtgtaattttatagtaaatcttgaagcccactttgttcttctttgtttaactttggctattctaggt

SEQ ID NO: 639658 - DNA, 120 bp, Artificial Sequence
  ENSG00000181381_84 (sequence is synthesized)
tctctgcatttccacacgaattttagaatcagcttgccaatttctatttaaaaagaacgatgggattttaatgatattcattaaatttgtagaccaatatagtctttcagttagtgaaca

SEQ ID NO: 639659 - DNA, 120 bp, Artificial Sequence
  ENSG00000181381_85 (sequence is synthesized)
caatatgtatctctgttttttaagatctctaatttgttttatcagttttgtagtcttcagtgtggaggcgttgcacatcttttgctaaatctatttcaagatatttcatgttttgatctt

SEQ ID NO: 639660 - DNA, 120 bp, Artificial Sequence
  ENSG00000181381_86 (sequence is synthesized)
accgtaaattgaatttttaaaaataattttttagtttttgctgcttgtatatagaagtagaattgatttttgtttgttaactggtatcctgcaatcttattaaaacaacttattaatttc

SEQ ID NO: 639661 - DNA, 120 bp, Artificial Sequence
  ENSG00000181381_87 (sequence is synthesized)
ttcatgaccttttaggatgttgctgtttcaactttaaaagccatattttccttttctcaagtatagctatagaccatatcaccttttaccatgttctgttatgaaaaacaggaagtccct

SEQ ID NO: 639662 - DNA, 120 bp, Artificial Sequence
  ENSG00000181381_88 (sequence is synthesized)
gagctggaatttttcagtctttctctttttcatgtagagagcaaagtttctcttaagggacttttgtttccttcagaattatggtctccttttttctcttccttgccaaaatcactagtt

SEQ ID NO: 639663 - DNA, 120 bp, Artificial Sequence
  ENSG00000181381_89 (sequence is synthesized)
tggaagaaatccaacatcatttatttactatggaccacaatgagagtggaactactttgttatcctgccctgatgacttagcattatctcctaggacagaataaaatatactttctctgt

SEQ ID NO: 639664 - DNA, 120 bp, Artificial Sequence
  ENSG00000181381_90 (sequence is synthesized)
catcttcctgtcttcttctgagccctccacaaaattccaacctctgtccactatgcagttccaaaatcgcttccacattttcagatatctttatagcagtgccccactcctcagtatcaa

SEQ ID NO: 639665 - DNA, 120 bp, Artificial Sequence
  ENSG00000181381_91 (sequence is synthesized)
atagcagtgccccactcctcagtatcaacttcctgtattagttcattctcacgctgctatacagagacacttgagactgggtaatttataaagaaaagacattttattggcttatggttc

SEQ ID NO: 639666 - DNA, 120 bp, Artificial Sequence
  ENSG00000181381_92 (sequence is synthesized)
tgcaggctgtacaggaagcataagtagcttctgcttctgggtaggcctcaggaaactttcaatcatgtcagaaagtgaagcagaagtaggccgtgtgttacatgcatggctggagcagga

SEQ ID NO: 639667 - DNA, 81 bp, Artificial Sequence
  ENSG00000181381_93 (sequence is synthesized)
atcatgagaacagcaccagaggggaaattcacctccatgatccaatcacctccaatcaggccccacctccaacactgggga

SEQ ID NO: 639668 - DNA, 120 bp, Artificial Sequence
  ENSG00000181381_94 (sequence is synthesized)
caacactggggattacaatttgacatgaaatttgggtgatgacacagatccaaatatttccattctgttgactgcaatctacctaattccattaggtttaatgggataactcaagattca

SEQ ID NO: 639669 - DNA, 120 bp, Artificial Sequence
  ENSG00000181381_95 (sequence is synthesized)
actcaagattcagaacaatataattactctatttacctttagaatggcctaagacaactaatcttgtaagccggattggctttcatacttcattttttcaggccactattggtcaccact

SEQ ID NO: 639670 - DNA, 120 bp, Artificial Sequence
  ENSG00000181381_96 (sequence is synthesized)
gtttcagggatttagcagattatttgccagtctgggttatgtataacagttctgctttatatgatgtatttaattcaaggaagcatgtgccatgtgaagatacaatcaaagagataatat

SEQ ID NO: 639671 - DNA, 120 bp, Artificial Sequence
  ENSG00000181381_97 (sequence is synthesized)
atcaaagagataatatgaaatcaaatgaaatttactttcacgtaagatctggtaaccttatctatatagtatgtatgtgtactatttattacatatcagtatttacaaatactgtttaaa

SEQ ID NO: 639672 - DNA, 120 bp, Artificial Sequence
  ENSG00000181392_0 (sequence is synthesized)
agacctgtcctgggcctctcctgcagcctcaggcccgggtgactccagcggaggagctctgggacacccttgtctagggaagaggtcttactggctgccctcacctgactttgtgtcccc

SEQ ID NO: 639673 - DNA, 120 bp, Artificial Sequence
  ENSG00000181392_1 (sequence is synthesized)
aggcccccagccatggccctgtccctgcctctgggccctagacttggctcagagcccctcaaccacccaccgggagcacctagagaggcggacattgttggatgcaccgtctgccccgcg

SEQ ID NO: 639674 - DNA, 120 bp, Artificial Sequence
  ENSG00000181392_2 (sequence is synthesized)
tccggagaggagagcacgagcccagagcaggcccagaccctgggacaggactccttgggccctcctgagcacttccagggtgggccaaggggcaatgagcctgccgctcaccccccgaga

SEQ ID NO: 639675 - DNA, 120 bp, Artificial Sequence
  ENSG00000181392_3 (sequence is synthesized)
tggtcaacaccctcttcctacgaggacccagctgggggcaaacactgtgagcaccccatttctggcctggaggtactagaggctgagcagaacagcctgcacctgtgcctgctggggctg

SEQ ID NO: 639676 - DNA, 120 bp, Artificial Sequence
  ENSG00000181392_4 (sequence is synthesized)
ggccgccggctgcaggacctggagcaaggcctggggcactgggcattggcccagagtgggatggtgcagctgcaggccctccaggtggacctacgaggggcagctgagcgtgtggaggcg

SEQ ID NO: 639677 - DNA, 120 bp, Artificial Sequence
  ENSG00000181392_5 (sequence is synthesized)
ctggagcagatcctgcgggccctgggagcttaccgagactccatcttccggcggctctggcagctgcaggcccagctggtcagctacagcctggtgttcgaggaggccaacacgctggac

SEQ ID NO: 639678 - DNA, 120 bp, Artificial Sequence
  ENSG00000181392_6 (sequence is synthesized)
caggacttggaggtcgagggagactcggactggccaggacctggtggggtctgggggccctgggcacccagtagcctccccacttccacagagttggagtgggatccggcgggggacatt

SEQ ID NO: 639679 - DNA, 120 bp, Artificial Sequence
  ENSG00000181392_7 (sequence is synthesized)
gggggccttgggcccttgggacaaaagacagcccggacactaggagtgccctgtgagctgtgtggccagagggggccccagggcaggggacaaggccttgaggaagcagacacctctcac

SEQ ID NO: 639680 - DNA, 120 bp, Artificial Sequence
  ENSG00000181392_8 (sequence is synthesized)
tcccgacaggacatgctggagtctggcctcggccaccagaaacgcttagcacgtcaccaaagacactccctgctccggaagcctcaggacaagaagaggcaagcatctcctcatctccag

SEQ ID NO: 639681 - DNA, 120 bp, Artificial Sequence
  ENSG00000181392_9 (sequence is synthesized)
gatgtgaggctggaggggaatccaggggcccccgatcctgcatccaggcagcctctgaccttcctccttatcctcttcctcctcttcctcctcctggtgggtgccatgtttctcctgccc

SEQ ID NO: 639682 - DNA, 120 bp, Artificial Sequence
  ENSG00000181392_10 (sequence is synthesized)
gcgtcaggaggcccctgctgctctcatgcccgaatacccaggacaccctacctggtgctcagctatgtcaatggtcttcccccagtctgatgtgtgtaataaatggtcactgtcaaagga

SEQ ID NO: 639683 - DNA, 120 bp, Artificial Sequence
  ENSG00000181392_11 (sequence is synthesized)
agaggcggacattgttggatgcaccgtctgccccgcgtccggagaggagagcacgaggtgggggccggggctttggaagcttgttcccaaaagggtaggcgtggtggcaggggccatgtg

SEQ ID NO: 639684 - DNA, 120 bp, Artificial Sequence
  ENSG00000181392_12 (sequence is synthesized)
agggtaggaggtgccatggctgtgatcgcctggggacataggagaggccaccagggttggggtgacggtaggctgaaaagtgaggtgtcgagactcacccagtcaccgccccctgcctcc

SEQ ID NO: 639685 - DNA, 120 bp, Artificial Sequence
  ENSG00000181392_13 (sequence is synthesized)
cctcttcctacgaggacccagctgggggcaaacactgtgaggaagcagacacctctcactcccgacaggacatgctggagtctggcctcggccaccagaaacgcttagcacgtcaccaaa

SEQ ID NO: 639686 - DNA, 120 bp, Artificial Sequence
  ENSG00000181392_14 (sequence is synthesized)
cgtctgtctctgtctacatcctcaagccccatctcaaattcactcctatcctgaggcccccagatgatgccccactcacctcctgactgtcccagtctctcctgaagtgccacctcttca

SEQ ID NO: 639687 - DNA, 120 bp, Artificial Sequence
  ENSG00000181392_15 (sequence is synthesized)
gggaggcctgtcgtgacctccaaacatgagcactcctatcttcttactttatttcctaacagcactcaccacagcttgactttgtacatttacttatttttaaaaatttttatttatttt

SEQ ID NO: 639688 - DNA, 120 bp, Artificial Sequence
  ENSG00000181392_16 (sequence is synthesized)
gggattacaggcataagccactgtaccaggcctcatttacttattaatttatggtctctctcctgtcaaatataagctccacggaggccaggaatttgcctatttccatccccactgtgt

SEQ ID NO: 639689 - DNA, 120 bp, Artificial Sequence
  ENSG00000181392_17 (sequence is synthesized)
tccccactgtgtcctcagctcctagaacagttcctggcttgtaacagaaactcattacacatttattgaatgaatgaataaataattctctcctctcttggtttctttggctctgccttt

SEQ ID NO: 639690 - DNA, 120 bp, Artificial Sequence
  ENSG00000181392_18 (sequence is synthesized)
gtctgtcctgtgagatctctctgctcccccagaatctcatctctatgacatccctatcctggccctcccccaaccacgtttttctttgttgctggttctccaggaagcagacacctctca

SEQ ID NO: 639691 - DNA, 120 bp, Artificial Sequence
  ENSG00000181396_0 (sequence is synthesized)
cctgcctcgcgctccctgttacggcgttcgtccccgggcctggcgcccgcgtccggcccggctccgcggcggcctggtccgatggctcctcagcggagggccgcaaccaaggcgcccgag

SEQ ID NO: 639692 - DNA, 120 bp, Artificial Sequence
  ENSG00000181396_1 (sequence is synthesized)
ccgcaaccaaggcgcccgagggcaacggagcggccgagcgccggaaccggagcagcaccaagaaggaccgagccccgcgggaggtgcagaggctgtggcagaggccgtggctaaggaccg

SEQ ID NO: 639693 - DNA, 120 bp, Artificial Sequence
  ENSG00000181396_2 (sequence is synthesized)
cgggcctgggggctggctttgtgctcaccgcactcctgctctggagcagcttgggggccgacgacggggtcgcagaggtcctggcccgccgtggcgaggtcgtggcagggagattcatcg

SEQ ID NO: 639694 - DNA, 120 bp, Artificial Sequence
  ENSG00000181396_3 (sequence is synthesized)
aggtgccctgctctgaggactacgacagtcaccgcaggttcgaaggctgcactccccgaaagtgcggcagaggtgtcaccgatgtcgtcatcaccagggaggaagcggagcggattcgca

SEQ ID NO: 639695 - DNA, 120 bp, Artificial Sequence
  ENSG00000181396_4 (sequence is synthesized)
gcgtagctgaaaaggggctctccctgggaggatctgacggaggggcatccattctggacttgcactcaggggccctgtctgtcgggaagcactttgtgaacctgtacagatacttcgggg

SEQ ID NO: 639696 - DNA, 120 bp, Artificial Sequence
  ENSG00000181396_5 (sequence is synthesized)
ataaaatacagaacatcttctcagaggaggacttccggttataccgggaggtgcggcagaaggtccagctcaccattgctgaggcttttggcatcagcgcatcctcgctgcatctgacca

SEQ ID NO: 639697 - DNA, 120 bp, Artificial Sequence
  ENSG00000181396_6 (sequence is synthesized)
agcccaccttcttctcccgcataaacagcacggaagcgcggacggcgcacgacgagtactggcatgcgcacgtggacaaggtgacctacggctccttcgactacacctcgctgctgtacc

SEQ ID NO: 639698 - DNA, 120 bp, Artificial Sequence
  ENSG00000181396_7 (sequence is synthesized)
tctccaactacctggaggacttcggcggagggcggttcatgttcatggaggagggtgccaacaagacggtggagccgagagctggtcgcgtctccttcttcacctcggggtccgagaacc

SEQ ID NO: 639699 - DNA, 120 bp, Artificial Sequence
  ENSG00000181396_8 (sequence is synthesized)
tacaccgcgtggagaaggtccactggggcacccgttacgccatcaccatcgccttcagctgcaaccccgaccatggcatcgaggacccagcgttcccgtagccagcagccgggccaaggt

SEQ ID NO: 639700 - DNA, 120 bp, Artificial Sequence
  ENSG00000181396_9 (sequence is synthesized)
aacttcaggagggcccgtgtggaggcagccgcgccagtcgtgcacccacccccacgtccacccgctcctgttgcacagagtgccttaggaattctctgattttgatttgctgacgtgtta

SEQ ID NO: 639701 - DNA, 120 bp, Artificial Sequence
  ENSG00000181396_10 (sequence is synthesized)
atcttttcatctgtgagtaaatgaagggaaccagcttttcacttctccagcatcatgtgtgcttgggctgtaggcctgggagcctgaggtggaggccaggaaagggacccagcaggacgg

SEQ ID NO: 639702 - DNA, 120 bp, Artificial Sequence
  ENSG00000181396_11 (sequence is synthesized)
ggcacaagtccccatctgtgaatggacgggactcatccacccaggttcagcaaccccccgggactcgtccaggttcagcaaccccccggcccatcaaagactggctaaagcatcagccat

SEQ ID NO: 639703 - DNA, 120 bp, Artificial Sequence
  ENSG00000181396_12 (sequence is synthesized)
aaatggggacaaacgtggggccagcagcttctgttcggggtctcggcatcagcaaaccgcagcagctttggagaagggtccgtgagtggcggctctggaggcagcaacggggtcctttgg

SEQ ID NO: 639704 - DNA, 120 bp, Artificial Sequence
  ENSG00000181396_13 (sequence is synthesized)
ggtgggtgggagttctgctggattcaggtggaggtgaacatctgccgttcccacagccctgcgtgcacccccaatgctgctggcccacaaatcaccgtgggccacggccccaccacacca

SEQ ID NO: 639705 - DNA, 120 bp, Artificial Sequence
  ENSG00000181396_14 (sequence is synthesized)
ggcttggccctgtcagcggccagcatcccaagggccagggtccgagtgtcctcaccaaggaggctcttggcgtcgctgtgccggctcccatgggccttctgctgggtcgagggtaggtct

SEQ ID NO: 639706 - DNA, 80 bp, Artificial Sequence
  ENSG00000181396_15 (sequence is synthesized)
ccggctcccatgggccttctgctgggtcgagggtaggtctcctcctccccctttgccctggcattaaactgatggtgcgg

SEQ ID NO: 639707 - DNA, 120 bp, Artificial Sequence
  ENSG00000181396_16 (sequence is synthesized)
ctccatcttaaaaatataaaaataaagtggtggtcagaggagccccgaatagaccagttgtggagaggcctgggtggggtggctggcagggagggcaggccaagcccagtttctgcccac

SEQ ID NO: 639708 - DNA, 120 bp, Artificial Sequence
  ENSG00000181396_17 (sequence is synthesized)
agtcacctcgaggtgactgtccagggctttgggcaccttcccgggagggggacggccgcccaccctgagtggtgttggaagctgggctctcctggatgccctgacccagctgcctgggga

SEQ ID NO: 639709 - DNA, 120 bp, Artificial Sequence
  ENSG00000181396_18 (sequence is synthesized)
gagccctgggcccctcctccctcagcacctcctccctcagcccctcctgcctcggtccctcctcccttagcctgtctggcatagatccatgttccctagcccctggcacaggtgcctctg

SEQ ID NO: 639710 - DNA, 120 bp, Artificial Sequence
  ENSG00000181396_19 (sequence is synthesized)
actggaggaggccccacctgtggcccgggagctgctctgggggttgataaagggcagcattattgggtcctgggaaggagcgggcgtgaggccagctgaggcatggtgacccctgggaag

SEQ ID NO: 639711 - DNA, 120 bp, Artificial Sequence
  ENSG00000181396_20 (sequence is synthesized)
gagcgggcgtgaggccagctgaggcatggtgacccctgggaaggagcgggcgtgaggccagctgaggcatggtgacccctgggaaggagcgggcgtgaggccagctgaggcatggtgacc

SEQ ID NO: 639712 - DNA, 120 bp, Artificial Sequence
  ENSG00000181396_21 (sequence is synthesized)
cctgggaaggagcgggcgtgaggccagctgaggcatggtgacccctgggtacgggggacttgggggccgcaccttggtttgcccagggcccctcctgcaccacgggccacatgcggagga

SEQ ID NO: 639713 - DNA, 120 bp, Artificial Sequence
  ENSG00000181396_22 (sequence is synthesized)
cggcgtgggataggctccctgggtccacagcttctgcccgtgtatggggaaccctccttggtcagggctgcaggctctgggcagatggggcaggaaccctgaggctcccgcgccctccca

SEQ ID NO: 639714 - DNA, 120 bp, Artificial Sequence
  ENSG00000181396_23 (sequence is synthesized)
tggcctctgatgtgggacactggagcgaggcacgattctgaaggactccatggatctgggaggatgaggcccacctccggttggtggccaaagccgtccttgcggggccggctgcttcac

SEQ ID NO: 639715 - DNA, 120 bp, Artificial Sequence
  ENSG00000181396_24 (sequence is synthesized)
ggacactctccgggtcgggctggtgggccccatcgtgggtgggaagtcgcctgagcctgggccgcccttgagcttctcccagtcttgactttccagagggtccgtggctgtggtcatggt

SEQ ID NO: 639716 - DNA, 120 bp, Artificial Sequence
  ENSG00000181396_25 (sequence is synthesized)
cggggcaggtggaaaatgctgcatggaaacctgatcctgtcaccttggagtaaatgatgatgtcgccggcttctcgccacgtctaaaggataaatgcatttgaagaaagtgggtgttggg

SEQ ID NO: 639717 - DNA, 120 bp, Artificial Sequence
  ENSG00000181396_26 (sequence is synthesized)
tttgttatgggttaaagtgcttttgaaataagtaaattattagtttgattttcattcttggctacttacactattcatgataatcacagagatacttggacaaagaaatatatttgggca

SEQ ID NO: 639718 - DNA, 62 bp, Artificial Sequence
  ENSG00000181396_27 (sequence is synthesized)
taatcacagagatacttggacaaagaaatatatttgggcaaaagcaagaatttccttctttt

SEQ ID NO: 639719 - DNA, 120 bp, Artificial Sequence
  ENSG00000181396_28 (sequence is synthesized)
cagcactttgggaggccaaggtaggaagatcacttgagcccaggagttggagacccatctgtgcaacatagtgagacgctgtctgtacaagaaacttttaaaaaatgtagctgggcgtgg

SEQ ID NO: 639720 - DNA, 120 bp, Artificial Sequence
  ENSG00000181396_29 (sequence is synthesized)
cgctgtctgtacaagaaacttttaaaaaatgtagctgggcgtggcagtgtgctcctgtggtcccagctactcggagctgaggcaggacgactgcttgagcccaggaggtcgaggctacag

SEQ ID NO: 639721 - DNA, 120 bp, Artificial Sequence
  ENSG00000181396_30 (sequence is synthesized)
gacggctccactgcattccagcctgggagacagcaagatactgtctcaaaaaaaaatttatcattgaagcctgggcattttaaaaaaataaaaaggtgggaaaatacgtgggcacagcag

SEQ ID NO: 639722 - DNA, 120 bp, Artificial Sequence
  ENSG00000181396_31 (sequence is synthesized)
tgaatcctcacaccctgggctttgcccaagaagtgctcgtgaacctgatgaaagtgtcgggtgtggccgacgtgaggctgttccaggagccacgaggggtgattggttccgctagaaggt

SEQ ID NO: 639723 - DNA, 120 bp, Artificial Sequence
  ENSG00000181396_32 (sequence is synthesized)
tccagggaggaactggagtctcaggtgtgtcctctgatgagtgatctatttttaagtaaaagtgtttcattaaagtcaaagatgattattcctttcaaaataaagaatctaggagggcga

SEQ ID NO: 639724 - DNA, 120 bp, Artificial Sequence
  ENSG00000181396_33 (sequence is synthesized)
cacagctcacgaggctcagctgtcctccatccttccccctgtcctttggtgcctctgtttgcaagatgtgcagaaacaccagagggccagaggagaccctccttttactgaatgctggca

SEQ ID NO: 639725 - DNA, 120 bp, Artificial Sequence
  ENSG00000181396_34 (sequence is synthesized)
gcctcctgagaaccacgtctgccagcagtagagagcagagagtgtggacgagcatgggcgactgaggtcccaaatggcgcgagccgctgggccctcctgcttgtgccgatgtctcagcct

SEQ ID NO: 639726 - DNA, 120 bp, Artificial Sequence
  ENSG00000181396_35 (sequence is synthesized)
cgattgaagctggaagaaaccaaggacaatgtgtcctttaaaagtgtaaggttagaaggtgccctgactccagccgacctggaaaaggacgtgtcctgcatatctggaggtggcccacac

SEQ ID NO: 639727 - DNA, 120 bp, Artificial Sequence
  ENSG00000181396_36 (sequence is synthesized)
ggtccgggaaagatcggctgccttgcctgcatcccagggcgcttcccggcctccattaagaggtgaccattgcatccacgtgatttcttttgctccactatttccaggcacagtgcaact

SEQ ID NO: 639728 - DNA, 120 bp, Artificial Sequence
  ENSG00000181396_37 (sequence is synthesized)
gactccctcttgaagctagaatgccctgcacacccgggatggacttctctcccctttcaaagatcgagtgaagtttgcaaatgtgaaaggaaggaattgcatttccagtggtaacctttg

SEQ ID NO: 639729 - DNA, 120 bp, Artificial Sequence
  ENSG00000181396_38 (sequence is synthesized)
aaggggaatgaaattgtcacaggacgtcaggagccacgtgggggagcccggtgtcctctgagtctcaacgccccttgcttcccacttggtgacggtcgatggctgtgtccagcggtgaac

SEQ ID NO: 639730 - DNA, 120 bp, Artificial Sequence
  ENSG00000181396_39 (sequence is synthesized)
gctttaccacaggactctacggtggggtaggcagcgccacttcaatgtgaagacaaatgaactggcgtctcttgagataggcccctgcctccaggacctctcaggccccgggccctggtt

SEQ ID NO: 639731 - DNA, 120 bp, Artificial Sequence
  ENSG00000181396_40 (sequence is synthesized)
actgccgtggaagctgcctgttcagacgtcatctctatcaccccttgaagggagacagagaggtgtttgcgagttggatgttttatcttgtctttcctgattctttgttagaacaccccc

SEQ ID NO: 639732 - DNA, 120 bp, Artificial Sequence
  ENSG00000181396_41 (sequence is synthesized)
agggcttggtttttgttctcaacctgtgattagaaataagatcctaaagtgtcagatctggaaggcccatgagagctgaggagatcaaatgcccggagctcgggagatcagatgacctgg

SEQ ID NO: 639733 - DNA, 120 bp, Artificial Sequence
  ENSG00000181396_42 (sequence is synthesized)
ggtgtctggagccagtggtggcctcatctgcagcatcttcctctgtcctgcccaccacagagtccctgctggccccggggggcccctcctccgccacagggcccctgagcattgctgcgt

SEQ ID NO: 639734 - DNA, 120 bp, Artificial Sequence
  ENSG00000181396_43 (sequence is synthesized)
ttgtttctccagctcctccttcctgcagaagcagttcccagaggggcaatttctccagcctgcctggttggttgtgttgattggttatagttgctctttcaggtgaccgcagaccctctg

SEQ ID NO: 639735 - DNA, 120 bp, Artificial Sequence
  ENSG00000181396_44 (sequence is synthesized)
ccgagagctggggaagggtttggacgtccagcctctgcaagcaggagcccagcctgtctgccctcaccccagaagtcccagtcacagcagttttgtgggaaaatgaaaaactcacagagc

SEQ ID NO: 639736 - DNA, 120 bp, Artificial Sequence
  ENSG00000181396_45 (sequence is synthesized)
acaagacaggcgttttcttgagaagtcaagcagctgaagcctcctgggactcgaaattacacaactttttagcatattttgatcttagtcattttaagcatgataaatacttgagtcaaa

SEQ ID NO: 639737 - DNA, 120 bp, Artificial Sequence
  ENSG00000181396_46 (sequence is synthesized)
aggaggacttccggttataccgcacggaagcgcggacggcgcacgacgagtactggcatgcgcacgtggacaaggtgagcgcgcccgtgggcagggtgagcgtgcccgtggacaaggtga

SEQ ID NO: 639738 - DNA, 120 bp, Artificial Sequence
  ENSG00000181396_47 (sequence is synthesized)
tgctggtgcgaaggctggagtcaggtgtcctccggggactcaccacccgcccgagaggggagagacacatgcgattctggaagctgagagcattgcttattgttgattccttggttgccg

SEQ ID NO: 639739 - DNA, 120 bp, Artificial Sequence
  ENSG00000181396_48 (sequence is synthesized)
tgcaccgcacaaagcgcatgcacgctggagagctgtggttgtgtgtgtctgaaattcacatttgaccgggcgtattagccagttctggccctgattccctggaagggcatgcgccggtgg

SEQ ID NO: 639740 - DNA, 120 bp, Artificial Sequence
  ENSG00000181404_0 (sequence is synthesized)
ctattctaggcacttcacaaaactggactcatacgatatctgtagttttgcgtctggcttctctattgaattcttaaaggggggtgggaactaagcagatcacaagggagctgcccacag

SEQ ID NO: 639741 - DNA, 120 bp, Artificial Sequence
  ENSG00000181404_1 (sequence is synthesized)
aggtaaagacaaggtcaggcaccatgactcctgtgaggatgcagcactccctggcaggtcagacctatgccgtgcccttcatccagccagacctgcggcgagaggaggccgtccagcaga

SEQ ID NO: 639742 - DNA, 120 bp, Artificial Sequence
  ENSG00000181404_2 (sequence is synthesized)
tggcggatgccctgcagtacctgcagaaggtctctggagacatcttcagcaggatctcccagcaggtagagcagagccggagccaggtgcaggccattggagagaaggtctccttggccc

SEQ ID NO: 639743 - DNA, 120 bp, Artificial Sequence
  ENSG00000181404_3 (sequence is synthesized)
aggccaagattgagaagatcaagggcagcaagaaggccatcaaggtgttctccagtgccaagtaccctgctccagggcgcctgcaggaatatggctccatcttcacgggcgcccaggacc

SEQ ID NO: 639744 - DNA, 120 bp, Artificial Sequence
  ENSG00000181404_4 (sequence is synthesized)
ctggcctgcagagacgcccccgccacaggatccagagcaagcaccgccccctggacgagcgggccctgcaggagaagctgaaggactttcctgtgtgcgtgagcaccaagccggagcccg

SEQ ID NO: 639745 - DNA, 120 bp, Artificial Sequence
  ENSG00000181404_5 (sequence is synthesized)
aggacgatgcagaagagggacttgggggtcttcccagcaacatcagctctgtcagctccttgctgctcttcaacaccaccgagaacctgtacaagaagtatgtcttcctggaccccctgg

SEQ ID NO: 639746 - DNA, 120 bp, Artificial Sequence
  ENSG00000181404_6 (sequence is synthesized)
ctggtgctgtaacaaagacccatgtgatgctgggggcagagacagaggagaagctgtttgatgcccccttgtccatcagcaagagagagcagctggaacagcaggtcccagagaactact

SEQ ID NO: 639747 - DNA, 120 bp, Artificial Sequence
  ENSG00000181404_7 (sequence is synthesized)
caacgacctcatgtacagtgccgacctgggccccggcattgccccctctgcccctggcaccattccagaactgcccaccttccacactgaggtagccgagcctctcaaggtagacctaca

SEQ ID NO: 639748 - DNA, 120 bp, Artificial Sequence
  ENSG00000181404_8 (sequence is synthesized)
agatggggtactaacaccacccccaccgcccccaccaccacccccagctcctgaggtgctggccagtgcacccccactcccaccctcaaccgcggcccctgtaggccaaggcgccaggca

SEQ ID NO: 639749 - DNA, 120 bp, Artificial Sequence
  ENSG00000181404_9 (sequence is synthesized)
ggacgacagcagcagcagcgcatctccttcagtccagggagctcccagggaagtggtcgacccctccggtggctgggccactctgctagagtccatccgccaagctgggggcatcggcaa

SEQ ID NO: 639750 - DNA, 120 bp, Artificial Sequence
  ENSG00000181404_10 (sequence is synthesized)
ggccaagctgcgcagcatgaaggagcgaaagctggagaagcagcagcagaaggagcaggagcaagtgagagccacgagccaaggtgggcacttgatgtcggatctcttcaacaagctggt

SEQ ID NO: 639751 - DNA, 120 bp, Artificial Sequence
  ENSG00000181404_11 (sequence is synthesized)
catgaggcgcaagggcatctctgggaaaggacctggggctggtgaggggcccggaggagcctttgtccgcgtgtcagactccatccctcctttgccgccaccgcagcagccacaggcaga

SEQ ID NO: 639752 - DNA, 120 bp, Artificial Sequence
  ENSG00000181404_12 (sequence is synthesized)
ggaggacgaggacgactgggaatcgtagggggctccatgacaccttcccccccagacccagacttgggccgttgctctgacatggacacagccaggacaagctgctcagacctgcttccc

SEQ ID NO: 639753 - DNA, 120 bp, Artificial Sequence
  ENSG00000181404_13 (sequence is synthesized)
tgggagggggtgacggaaccagcagtgtgtggagaccagcttcaaggagcggaaggctggcttgaggccacacagctggggcggggacttgtctgcctgtacttcatggggggacggctc

SEQ ID NO: 639754 - DNA, 120 bp, Artificial Sequence
  ENSG00000181404_14 (sequence is synthesized)
cacccagcctgcgccactgtgttcttaagaggcttccagagaaaacggcacaccaatcaataaagaactgagcagaaaccaacagtgtgcttttaataaaggatctctagctgtgcagga

SEQ ID NO: 639755 - DNA, 120 bp, Artificial Sequence
  ENSG00000181404_15 (sequence is synthesized)
gcactcccagggagacgggacgggcctggcgccggagaggagcccgcactctgcacgaagtctcgccgcccgccggctgttttctggcggagggtgcgccccggagggcggcgagcgcgg

SEQ ID NO: 639756 - DNA, 120 bp, Artificial Sequence
  ENSG00000181404_16 (sequence is synthesized)
gtggaggcgtcgccggggtcgggccagcaggctctgggatcgggcttgtgggacaccccgacaattggacgactgattattggacagaatggcgtcttgtcgacacctgcggtctcctgc

SEQ ID NO: 639757 - DNA, 120 bp, Artificial Sequence
  ENSG00000181404_17 (sequence is synthesized)
ttggagtgaagtttaatgttgccaatggagggcagacttcttggaggaagtgaaatttgaactgcgatgtgaagaatgagcaggagttagtgaggtgaagatgagagaaggagtgttgca

SEQ ID NO: 639758 - DNA, 120 bp, Artificial Sequence
  ENSG00000181404_18 (sequence is synthesized)
aacacaggcaccatgactcctgtgaggatgcagcactccctggcaggtcagacctatgccgtgcccttcatccagccagacctgcggcgagaggaggccgtccagcagatggcggatgcc

SEQ ID NO: 639759 - DNA, 120 bp, Artificial Sequence
  ENSG00000181408_0 (sequence is synthesized)
tctttccccacaggctgagctggttgcccacaggggcccccgccccatctcagggagtgtccacccagccctgagcccgtcgtgaggggtcagagatggcgctgacccccgagtccccga

SEQ ID NO: 639760 - DNA, 120 bp, Artificial Sequence
  ENSG00000181408_1 (sequence is synthesized)
gcagcttccctgggctggccgccactggcagctctgtgccggagccgcctggcggccccaacgcaaccctcaacagctcctgggccagcccgaccgagcccagctccctggaggacctgg

SEQ ID NO: 639761 - DNA, 120 bp, Artificial Sequence
  ENSG00000181408_2 (sequence is synthesized)
tggccacgggcaccattgggactctgctgtcggccatgggcgtggtgggcgtggtgggcaacgcctacacgctggtggtcacctgccgctccctgcgtgcggtggcctccatgtacgtct

SEQ ID NO: 639762 - DNA, 120 bp, Artificial Sequence
  ENSG00000181408_3 (sequence is synthesized)
acgtggtcaacctggcgctggccgacctgctgtacctgctcagcatccccttcatcgtggccacctacgtcaccaaggagtggcacttcggggacgtgggctgccgcgtgctcttcggcc

SEQ ID NO: 639763 - DNA, 120 bp, Artificial Sequence
  ENSG00000181408_4 (sequence is synthesized)
tggacttcctgaccatgcacgccagcatcttcacgctgaccgtcatgagcagcgagcgctacgctgcggtgctgcggccgctggacaccgtgcagcgccccaagggctaccgcaagctgc

SEQ ID NO: 639764 - DNA, 120 bp, Artificial Sequence
  ENSG00000181408_5 (sequence is synthesized)
gctgcccgtgatgctggccatgcggctggtgcgccggggtcccaagagcctgtgcctgcccgcctggggcccgcgcgcccaccgcgcctacctgacgctgctcttcgccaccagcatcgc

SEQ ID NO: 639765 - DNA, 120 bp, Artificial Sequence
  ENSG00000181408_6 (sequence is synthesized)
tgacgctgctcttcgccaccagcatcgcggggcccgggctgctcatcgggctgctctacgcgcgcctggcccgcgcctaccgccgctcgcagcgcgcctccttcaagcgggcccggcggc

SEQ ID NO: 639766 - DNA, 120 bp, Artificial Sequence
  ENSG00000181408_7 (sequence is synthesized)
gggcatcgtgctgctcttctgggcctgcttcctgcccttctggctgtggcagctgctcgcccagtaccaccaggccccgctggcgccgcggacggcgcgcatcgtcaactacctgaccac

SEQ ID NO: 639767 - DNA, 120 bp, Artificial Sequence
  ENSG00000181408_8 (sequence is synthesized)
ctgcctcacctacggcaacagctgcgccaaccccttcctctacacgctgctcaccaggaactaccgcgaccacctgcgcggccgcgtgcggggcccgggcagcgggggaggccgggggcc

SEQ ID NO: 639768 - DNA, 120 bp, Artificial Sequence
  ENSG00000181408_9 (sequence is synthesized)
cgttccctccctgcagccccgcgcccgcttccagcgctgttcgggccgctccctgtcttcctgcagcccacagcccactgacagcctcgtgctggccccagcggccccggcccgacctgc

SEQ ID NO: 639769 - DNA, 120 bp, Artificial Sequence
  ENSG00000181408_10 (sequence is synthesized)
gcccgagggtcccagggccccggcgtgagcacgcggaggggcggctggagtccaggcggggacgcgccccaaagccccagccactcccgggagcccccccaactcccaaatcacaggccc

SEQ ID NO: 639770 - DNA, 120 bp, Artificial Sequence
  ENSG00000181409_0 (sequence is synthesized)
ccgctgggtgatgcggcggctcgggccggggccgcgggcgtcctgagcgcagcgccctcccgggatgcccgccggccgctggcccggccatgtcgtcgtccttcttcaaccccagcttcg

SEQ ID NO: 639771 - DNA, 120 bp, Artificial Sequence
  ENSG00000181409_1 (sequence is synthesized)
cttcttcaaccccagcttcgccttcagctcgcacttcgaccccgacggcgccccgctcagcgagctgtcctggccatcctccctcgccgtggtggctgtgtctttctccgggctcttcgc

SEQ ID NO: 639772 - DNA, 120 bp, Artificial Sequence
  ENSG00000181409_2 (sequence is synthesized)
cgtcatcgtcctcatgctggcctgcctgtgctgtaagaagggcggtatcgggttcaaggagtttgagaatgcggagggggacgagtacgcagccgacctggcgcagggctccccggccac

SEQ ID NO: 639773 - DNA, 120 bp, Artificial Sequence
  ENSG00000181409_3 (sequence is synthesized)
ggcagcacagaacgggcccgacgtgtacgtcctgccactcacggaggtctccttgcccatggccaagcagcctgggcgctcagtgcagctcctcaagtccacagacgtgggccggcacag

SEQ ID NO: 639774 - DNA, 120 bp, Artificial Sequence
  ENSG00000181409_4 (sequence is synthesized)
cctcctgtacctgaaggaaatcggccgtggctggttcgggaaggtgttcctgggggaggtgaactctggcatcagcagtgcccaggtggtggtgaaggagctgcaggctagtgccagcgt

SEQ ID NO: 639775 - DNA, 120 bp, Artificial Sequence
  ENSG00000181409_5 (sequence is synthesized)
gcaggagcagatgcagttcctggaggaggtgcagccctacagggccctgaagcacagcaacctgctccagtgcctggcccagtgcgccgaggtgacgccctacctgctggtgatggagtt

SEQ ID NO: 639776 - DNA, 120 bp, Artificial Sequence
  ENSG00000181409_6 (sequence is synthesized)
ctgcccactgggggacctcaagggctacctgcggagctgccgggtggcggagtccatggctcccgacccccggaccctgcagcgcatggcctgtgaggtggcctgtggcgtcctgcacct

SEQ ID NO: 639777 - DNA, 120 bp, Artificial Sequence
  ENSG00000181409_7 (sequence is synthesized)
tcatcgcaacaatttcgtgcacagcgacctggccctgcggaactgcctgctcacggctgacctgacggtgaagattggtgactatggcctggctcactgcaagtacagagaggactactt

SEQ ID NO: 639778 - DNA, 120 bp, Artificial Sequence
  ENSG00000181409_8 (sequence is synthesized)
cgtgactgccgaccagctgtgggtgcctctgcgctggatcgcgccagagctggtggacgaggtgcatagcaacctgctcgtcgtggaccagaccaagagcgggaatgtgtggtccctggg

SEQ ID NO: 639779 - DNA, 120 bp, Artificial Sequence
  ENSG00000181409_9 (sequence is synthesized)
cgtgaccatctgggagctctttgagctgggcacgcagccctatccccagcactcggaccagcaggtgctggcgtacacggtccgggagcagcagctcaagctgcccaagccccagctgca

SEQ ID NO: 639780 - DNA, 120 bp, Artificial Sequence
  ENSG00000181409_10 (sequence is synthesized)
gctgaccctgtcggaccgctggtacgaggtgatgcagttctgctggctgcagcccgagcagcggcccacagccgaggaggtgcacctgctgctgtcctacctgtgtgccaagggcgccac

SEQ ID NO: 639781 - DNA, 120 bp, Artificial Sequence
  ENSG00000181409_11 (sequence is synthesized)
ctacctgtgtgccaagggcgccaccgaagcagaggaggagtttgaacggcgctggcgctctctgcggcccggcgggggcggcgtggggcccgggcccggtgcggcggggcccatgctggg

SEQ ID NO: 639782 - DNA, 120 bp, Artificial Sequence
  ENSG00000181409_12 (sequence is synthesized)
ctcgtccttcccgctgctggagcagttcgcgggcgacggcttccacgcggacggcgacgacgtgctgacggtgaccgagaccagccgaggcctcaattttgagtacaagtgggaggcggg

SEQ ID NO: 639783 - DNA, 120 bp, Artificial Sequence
  ENSG00000181409_13 (sequence is synthesized)
cacgctgagccctggccgcaccgcacgcctgcaggagctgtgcgcccccgacggcgcgcccccgggcgtggttccggtgctcagcgcgcacagcccgtcgctgggcagcgagtacttcat

SEQ ID NO: 639784 - DNA, 120 bp, Artificial Sequence
  ENSG00000181409_14 (sequence is synthesized)
gtcgctgggcagcgagtacttcatccgcctagaggaggccgcacccgccgccggccacgaccctgactgcgccggctgcgcccccagtccacctgccaccgcggaccaggacgacgactc

SEQ ID NO: 639785 - DNA, 120 bp, Artificial Sequence
  ENSG00000181409_15 (sequence is synthesized)
tgacggcagcaccgccgcctcgctggccatggagccgctgctgggccacgggccacccgtcgacgtcccctggggccgcggcgaccactaccctcgcagaagcttggcgcgggacccgct

SEQ ID NO: 639786 - DNA, 120 bp, Artificial Sequence
  ENSG00000181409_16 (sequence is synthesized)
ctgcccctcacgctctccctcgccctcggcggggcccctgagtctggcggagggaggagcggaggatgcagactggggcgtggccgccttctgtcctgccttcttcgaggacccactggg

SEQ ID NO: 639787 - DNA, 120 bp, Artificial Sequence
  ENSG00000181409_17 (sequence is synthesized)
cacgtcccctttggggagctcaggggcgcccccgctgccgctgactggcgaggatgagctagaggaggtgggagcgcggagggccgcccagcgcgggcactggcgctccaacgtgtcagc

SEQ ID NO: 639788 - DNA, 120 bp, Artificial Sequence
  ENSG00000181409_18 (sequence is synthesized)
caacaacaacagcggcagccgctgtccagagtcctgggaccccgtctctgcgggcggccacgctgagggctgccccagtccaaagcagaccccacgggcctcccccgagccggggtaccc

SEQ ID NO: 639789 - DNA, 120 bp, Artificial Sequence
  ENSG00000181409_19 (sequence is synthesized)
tggagagcctctgcttgggctccaggcagcctctgcccaggagccaggctgctgccccggcctccctcatctatgctctgcccagggcctggcacctgctccctgcctggttacaccctc

SEQ ID NO: 639790 - DNA, 120 bp, Artificial Sequence
  ENSG00000181409_20 (sequence is synthesized)
ctggacagagacagccagtagtgggggtgaccacccgcaggcagagcccaagcttgccacggaggctgagggcactaccggaccccgcctgccccttccttccgtcccctccccatccca

SEQ ID NO: 639791 - DNA, 120 bp, Artificial Sequence
  ENSG00000181409_21 (sequence is synthesized)
gactctcccacgcctgctactggtggcgaggtgtctgccatcaagctggcttctgccctgaatggcagcagcagctctcccgaggtggaggcacccagcagtgaggatgaggacacggcc

SEQ ID NO: 639792 - DNA, 120 bp, Artificial Sequence
  ENSG00000181409_22 (sequence is synthesized)
gaggccacctcaggcatcttcaccgacacgtccagcgacggcctgcaggccaggaggccggatgtggtgccagccttccgctctctgcagaagcaggtggggacccccgactccctggac

SEQ ID NO: 639793 - DNA, 120 bp, Artificial Sequence
  ENSG00000181409_23 (sequence is synthesized)
tccctggacatcccgtcctcagccagtgatggtggctatgaggtcttcagcccgtcggccactggcccctctggagggcagccgcgagcgctggacagtggctatgacaccgagaactat

SEQ ID NO: 639794 - DNA, 120 bp, Artificial Sequence
  ENSG00000181409_24 (sequence is synthesized)
gagtcccctgagtttgtgctcaaggaggcgcaggaagggtgtgagccccaggcctttgcggagctggcctcagagggtgagggccccgggcccgagacacggctctccacctccctcagt

SEQ ID NO: 639795 - DNA, 120 bp, Artificial Sequence
  ENSG00000181409_25 (sequence is synthesized)
ggcctcaacgagaagaatccctaccgagactctgcctacttctcagacctcgaggctgaggccgaggccacctcaggcccagagaagaagtgcggcggggaccgagcccccgggccagag

SEQ ID NO: 639796 - DNA, 120 bp, Artificial Sequence
  ENSG00000181409_26 (sequence is synthesized)
ctgggcctgccgagcactgggcagccgtctgagcaggtctgtctcaggcctggggtttccggggaggcacaaggctctggccccggggaggtgctgcccccactgctgcagcttgaaggg

SEQ ID NO: 639797 - DNA, 120 bp, Artificial Sequence
  ENSG00000181409_27 (sequence is synthesized)
tcctccccagagcccagcacctgcccctcgggcctggtcccagagcctccggagccccaaggcccagccaaggtgcggcctgggcccagccccagctgctcccagtttttcctgctgacc

SEQ ID NO: 639798 - DNA, 120 bp, Artificial Sequence
  ENSG00000181409_28 (sequence is synthesized)
ccggttccgctgagatcagaaggcaacagctctgagttccaggggcccccaggactgttgtcagggccggccccacaaaagcggatggggggcccaggcacccccagagccccactccgc

SEQ ID NO: 639799 - DNA, 120 bp, Artificial Sequence
  ENSG00000181409_29 (sequence is synthesized)
ctggctctgcccggcctccctgcggccttggagggccggccggaggaggaggaggaggacagtgaggacagcgacgagtctgacgaggagctccgctgctacagcgtccaggagcctagc

SEQ ID NO: 639800 - DNA, 120 bp, Artificial Sequence
  ENSG00000181409_30 (sequence is synthesized)
gaggacagcgaagaggaggcgccggcggtgcccgtggtggtggctgagagccagagcgcgcgcaacctgcgcagcctgctcaagatgcccagcctgctgtccgagaccttctgcgaggac

SEQ ID NO: 639801 - DNA, 120 bp, Artificial Sequence
  ENSG00000181409_31 (sequence is synthesized)
ctggaacgcaagaagaaggccgtgtccttcttcgacgacgtcaccgtctacctctttgaccaggaaagccccacccgggagctcggggagcccttcccgggcgccaaggaatcgccccct

SEQ ID NO: 639802 - DNA, 120 bp, Artificial Sequence
  ENSG00000181409_32 (sequence is synthesized)
acgttccttagggggagccccggctctcccagcgcccccaaccggccgcagcaggctgatggctccccaaatggctccacagcggaagagggtggtgggttcgcgtgggacgacgacttc

SEQ ID NO: 639803 - DNA, 120 bp, Artificial Sequence
  ENSG00000181409_33 (sequence is synthesized)
ccgctgatgacggccaaggcagccttcgccatggccctagacccggccgcacccgccccggctgcgcccacgcccacgcccgctcccttctcgcgcttcacggtgtcgcccgcgcccacg

SEQ ID NO: 639804 - DNA, 120 bp, Artificial Sequence
  ENSG00000181409_34 (sequence is synthesized)
tcccgcttctccatcacgcacgtgtctgactcggacgccgagtccaagagaggacctgaagctggtgccgggggtgagagtaaagaggcttgagacctgggcagctcctgcccctcaagg

SEQ ID NO: 639805 - DNA, 120 bp, Artificial Sequence
  ENSG00000181409_35 (sequence is synthesized)
ctggcgtcaccggagcccctgccaggcagcagcgaggatggtgaccgagaaggtggggaccacgtcctggtggctgttggcagcagattcaggtgcctctgccccacgcggtgtcctgga

SEQ ID NO: 639806 - DNA, 120 bp, Artificial Sequence
  ENSG00000181409_36 (sequence is synthesized)
gaagcccgtgggatgagaggccctggatggtagatcggccatgctccgccccagaggcagaattcgtctgggcttttaggcttgctgctagcccctgggggcgcctggagccacagtggg

SEQ ID NO: 639807 - DNA, 120 bp, Artificial Sequence
  ENSG00000181409_37 (sequence is synthesized)
tgtctgtacacacatacacactcaaaaggggccagtgcccctgggcacggcggcccccaccctctgccctgcctgcctggcctcggaggacccgcatgccccatccggcagctcctccgg

SEQ ID NO: 639808 - DNA, 120 bp, Artificial Sequence
  ENSG00000181409_38 (sequence is synthesized)
tgtgctcacaggacacttaaaccaggacgaggcatggccccgagacactggcaggtttgtgagcctcttcccaccccctgtgcccccacccttgcctggttcctggtggctcagggcaag

SEQ ID NO: 639809 - DNA, 120 bp, Artificial Sequence
  ENSG00000181409_39 (sequence is synthesized)
gagtggccctgggcgcccgtgtcggtcctgtttccgctgcccttatctcaaagtccgtggctgtttccccttcactgactcagctagacccgtaagcccacccttcccacagggaacagg

SEQ ID NO: 639810 - DNA, 120 bp, Artificial Sequence
  ENSG00000181409_40 (sequence is synthesized)
ctgctcccacctgggtcccgctgtggccacggtgggcagcccaaaagatcaggggtggaggggcttccaggctgtactcctgccccgtgggccccgttctagaggtgcccttggcaggac

SEQ ID NO: 639811 - DNA, 120 bp, Artificial Sequence
  ENSG00000181409_41 (sequence is synthesized)
cgtgcaggcagctcccctctgtggggcagtatctggtcctgtgccccagctgccaaaggagagtgggggccatgccccgcagtcagtgttggggggctcctacctacagggagagggatg

SEQ ID NO: 639812 - DNA, 120 bp, Artificial Sequence
  ENSG00000181409_42 (sequence is synthesized)
gtggggaaggggtggagctgggggcagggcagcacagggaatatttttgtaactaactaactgctgtggttggagcgaatggaagttgggtgattttaagttattgttgccaaagagatg

SEQ ID NO: 639813 - DNA, 120 bp, Artificial Sequence
  ENSG00000181409_43 (sequence is synthesized)
taaagtttattgttgcttcgcagggggatttgttttgtgttttgtttgaggcttagaacgctggtgcaatgttttcttgttccttgttttttaagagaaatgaagctaagacaaaagaaa

SEQ ID NO: 639814 - DNA, 120 bp, Artificial Sequence
  ENSG00000181409_44 (sequence is synthesized)
gatgccagcccttcctggggccaggaggaagctgcccctctcctctcctccccactgtcctcggcacaccccggtggaggggatggtgttctggccctactgtgtgtgggggcgcagggg

SEQ ID NO: 639815 - DNA, 120 bp, Artificial Sequence
  ENSG00000181409_45 (sequence is synthesized)
tagcgccctgcaggtctcccttcctgcaggccgagttggcctggtagggacgggtgaagaatggacctacaggcctctccaggacagcctcctccctgcccttctgagggcaatgtctgt

SEQ ID NO: 639816 - DNA, 120 bp, Artificial Sequence
  ENSG00000181409_46 (sequence is synthesized)
ctgtccctgggcccagggtggaaggcggaggcaggagagttgagcacagctgggcttccctgcaccctccgctggccagctctcaactgccctcctggcccgccaactctacagcttcct

SEQ ID NO: 639817 - DNA, 120 bp, Artificial Sequence
  ENSG00000181409_47 (sequence is synthesized)
gtccccggggtgtgagtggctgtaggcgggagtgagctctgctggagacacctccccagccaggtaagggctgttgtcaccagtgcagctcaccacactgtatttcacctaacaaacaaa

SEQ ID NO: 639818 - DNA, 120 bp, Artificial Sequence
  ENSG00000181409_48 (sequence is synthesized)
caaacagtatggaagagcacaaatctgctaatgaagttttaaaacccccaattccagcagagctccccagtgcctgcaggagtcagcggaggtgggggggggaggtccacccaggagtcc

SEQ ID NO: 639819 - DNA, 120 bp, Artificial Sequence
  ENSG00000181409_49 (sequence is synthesized)
tggggcagaccccggaagcggggaagcccccacctgccagcgggcactctgctggtgaccccgcatagcacctgacagctggcctttggccgcaggagcgagctgggaggccctggcagc

SEQ ID NO: 639820 - DNA, 120 bp, Artificial Sequence
  ENSG00000181409_50 (sequence is synthesized)
ttgggtaaggaggagggctggggcctgcccgaggcaggaggggcctggggaggcccttgtgacattgccagtgggagtgaggggcccaggagagccccaccgaggggcatggggagggac

SEQ ID NO: 639821 - DNA, 120 bp, Artificial Sequence
  ENSG00000181409_51 (sequence is synthesized)
caggccccacactccaggtgtagctgccggacctgcagggaattacgtgcttacgggaagttcatcttccagccagggtgcgggcgctcccatccccgtgctcccggccttctggccctt

SEQ ID NO: 639822 - DNA, 120 bp, Artificial Sequence
  ENSG00000181409_52 (sequence is synthesized)
gggcggacagatcacacctggtgcaggagaagcctgtttattaggcaggagaagcagcagggcagccaggctcccctcccagccaccagctggccaaatgtcctcccttaactcaggggt

SEQ ID NO: 639823 - DNA, 120 bp, Artificial Sequence
  ENSG00000181409_53 (sequence is synthesized)
acccaaggctccatggccatgtgaccagaggcgtgtaccctcaagaggcggcccctcagccctgggcagcccagccactgggtctcgcccttcaggggcctgcgccccactctgcccggc

SEQ ID NO: 639824 - DNA, 120 bp, Artificial Sequence
  ENSG00000181409_54 (sequence is synthesized)
cctgcctagaacagctgggatccagtccaggccagactcaagtggggcaagaccaggcagccggggcctggatgttctctacacaggaacgcacagatgatgacagaacaggctacatgg

SEQ ID NO: 639825 - DNA, 120 bp, Artificial Sequence
  ENSG00000181409_55 (sequence is synthesized)
gaagggcgggggaagccaccagatgggcagcactgcagatgtggccatcagctgaggaggggggcagacctgtcgttggtcactgtcggcttcagctggacgtgggcaaagggattcctg

SEQ ID NO: 639826 - DNA, 120 bp, Artificial Sequence
  ENSG00000181409_56 (sequence is synthesized)
aaagagaaaaacgtggttttaatttttagggcggaagccatgggtgaattgtgccacctgggctgcccgatgccccagggattccccagtgctggatgcctacggtccgatctcagggca

SEQ ID NO: 639827 - DNA, 120 bp, Artificial Sequence
  ENSG00000181409_57 (sequence is synthesized)
cagagctcacagacaatatacgctgctttgcggggcagggaggaccaggcgctgtctgcaaggctgcctgacccccaagtccactatgtgccctagacaaggcagggtgcccccaccccg

SEQ ID NO: 639828 - DNA, 120 bp, Artificial Sequence
  ENSG00000181409_58 (sequence is synthesized)
atccatcaccctcccagcagtgtgggctgggcagggcagggcggggtggggcggggcaggccagccacaacctcccagtgaggggcggacatcaccactgaggctggggattcaagacag

SEQ ID NO: 639829 - DNA, 120 bp, Artificial Sequence
  ENSG00000181409_59 (sequence is synthesized)
gcctgaaccgggcacacaccagtttggtggctcccccaccaggccaggcccacacccagggacacagcgtggcagagcgtccagcccagccctggcatgggggcatccagagaaggcagg

SEQ ID NO: 639830 - DNA, 120 bp, Artificial Sequence
  ENSG00000181409_60 (sequence is synthesized)
ttaggctcacggctcccgcagggctgcagatggacacccatgggccctgcagagcagctggccatcccctgggccagacagtggttcacctgctgtgggctcagccacctgtcccccgag

SEQ ID NO: 639831 - DNA, 120 bp, Artificial Sequence
  ENSG00000181409_61 (sequence is synthesized)
gggtgccgcgccctcccccatatccccggggccacagctgatgcacaaatacgactcaagacaagaagttgaaatggaacaagatgagcacggatgagagggatgcctgagcctttctct

SEQ ID NO: 639832 - DNA, 120 bp, Artificial Sequence
  ENSG00000181409_62 (sequence is synthesized)
ttggagtccccacccccggaggggacagcacaggacaggatgggggatgtcaggcagctccaagggtgacagcacagatggcacgtggacatgaagacgcagcagggacgggactgtgct

SEQ ID NO: 639833 - DNA, 120 bp, Artificial Sequence
  ENSG00000181409_63 (sequence is synthesized)
ctggcaaagctgtgcttggactctggagccattacctggagcagaatcacctctggcacagctgggtccacaagagcccgggcagccgggaacaaccctggggacgggcaggcagactcc

SEQ ID NO: 639834 - DNA, 120 bp, Artificial Sequence
  ENSG00000181409_64 (sequence is synthesized)
gtccagctacccgggaagaggcacaggcagccggaagcaaaccctggggtgggcaggcagggttccgtccagctgcccaggaagaggcacagggcagaggcagctccctaagctttcctg

SEQ ID NO: 639835 - DNA, 120 bp, Artificial Sequence
  ENSG00000181409_65 (sequence is synthesized)
aggactttgtgttttctaagaacttgaaacactacagactgagtttttaagagaataaagtacgtggaagagactgacaggtctgcggaaggctcccagactcccagatggcgtctaagc

SEQ ID NO: 639836 - DNA, 120 bp, Artificial Sequence
  ENSG00000181409_66 (sequence is synthesized)
attggcaccctgctgaaaggatcttttgatctactctcaacgtgctggagcctcagggtctgctggatccccggcttttttcagctttgatcggtgcagctttgcccttcctggggcctg

SEQ ID NO: 639837 - DNA, 120 bp, Artificial Sequence
  ENSG00000181409_67 (sequence is synthesized)
ggtaggggctgcctaggggcccgctggtgaggattccacctccatcactgatgtctgcccatgccctgtctgcctgccaggctagacccactcctaaggaagtgctctgtggcccgagtt

SEQ ID NO: 639838 - DNA, 120 bp, Artificial Sequence
  ENSG00000181409_68 (sequence is synthesized)
cctccgcaggcccagggtccggagggagctctggggagattagaaatggggctggctgggcatagtggctcctgcctagaatcccagcactctgagaggccaaagcaggaggaaccactt

SEQ ID NO: 639839 - DNA, 90 bp, Artificial Sequence
  ENSG00000181409_69 (sequence is synthesized)
ttaggcaggtgcgggagagtggtgcatgcctgtggtcccagctccatggggggctgaagtgggaggatcgcttgaacccaggagggcgag

SEQ ID NO: 639840 - DNA, 120 bp, Artificial Sequence
  ENSG00000181409_70 (sequence is synthesized)
gagagtggtgcatgcctgtggtcccagctccatggggggctgaagtgggaggatcgcttgaacccaggagggcgaggcagtagtgagctgtgttcccaccactgcactccagcctgggtg

SEQ ID NO: 639841 - DNA, 120 bp, Artificial Sequence
  ENSG00000181409_71 (sequence is synthesized)
aaaaaaaagtgggttcccagagaagggtcctagatctggcccagaccacagccgagggcagtgcagccgcgtggttctcactcctgccccgaatcacagccgattctcatcagaaagtca

SEQ ID NO: 639842 - DNA, 120 bp, Artificial Sequence
  ENSG00000181409_72 (sequence is synthesized)
gtggcaaaggcacatcgcttgcctggaccccacggggagctgcaggggtaggaagccctccactggtgcaggcctgttctctaacctgcatttttctcttcttgtctcccagaacagtgg

SEQ ID NO: 639843 - DNA, 120 bp, Artificial Sequence
  ENSG00000181409_73 (sequence is synthesized)
gaccaggtggagcgtgctgaaccatccacactgggtggctctgaggaccctggggctggggctgcaaatgctgtgtccaatctcagcctgacgggggcaggggggtcggcggggatgggg

SEQ ID NO: 639844 - DNA, 120 bp, Artificial Sequence
  ENSG00000181409_74 (sequence is synthesized)
agagcgcaggccagagcccaaggctggctgggacagcaggcccacaaggaggggctgggcgtccctatttccccaccctggcccccaccccccagctgtctgggaaagacgcgcccagga

SEQ ID NO: 639845 - DNA, 120 bp, Artificial Sequence
  ENSG00000181409_75 (sequence is synthesized)
ggccggcggggagctcgctgtgctgagtgggggcctaactgagccaatagaatatgacaaagtctgcagcccaaggccactgcaaggtcaccacacgttagccacagacattggtccctg

SEQ ID NO: 639846 - DNA, 120 bp, Artificial Sequence
  ENSG00000181409_76 (sequence is synthesized)
ccggaggacacgtgccaggccccacctcctgcaggacatggccctgggcagcgattgccacgaactacccaatgacaccaccagcacctctccagccagcaaaggaaagtcaccagacgt

SEQ ID NO: 639847 - DNA, 120 bp, Artificial Sequence
  ENSG00000181409_77 (sequence is synthesized)
gtccaagagcggaggaccctgaggagggcctgcgtcatgtgtgggggagctgttgggcgggcagggcgctggcctcagaatgcagaggcctgggctctgtctcctcacagagagcctccc

SEQ ID NO: 639848 - DNA, 120 bp, Artificial Sequence
  ENSG00000181409_78 (sequence is synthesized)
ctcagaggcccctaagcaaggccgcaggggagaccggtggcttttctaatttttaaattgtattattattttgagacagggtcttgctctgtcttccgggctggaatgcagtggtgcaat

SEQ ID NO: 639849 - DNA, 84 bp, Artificial Sequence
  ENSG00000181409_79 (sequence is synthesized)
acgcgtgccaccatgcctggctaatttttaacttttttttttgtcaagatgggggtctccctaggttgcccaggctgatctcga

SEQ ID NO: 639850 - DNA, 120 bp, Artificial Sequence
  ENSG00000181409_80 (sequence is synthesized)
ctggctaatttttaacttttttttttgtcaagatgggggtctccctaggttgcccaggctgatctcgaacccctgggctcaagagatcctctcgcctcagcctccctaagtgctgggatt

SEQ ID NO: 639851 - DNA, 120 bp, Artificial Sequence
  ENSG00000181409_81 (sequence is synthesized)
gcggcagcttcaccaatgacttgaatgtgaagcagaaggattccgagaagaaacggagccgtcacaaatgcatttcgaccagttgggtgactccagacccagagccgggcggacagcacc

SEQ ID NO: 639852 - DNA, 120 bp, Artificial Sequence
  ENSG00000181409_82 (sequence is synthesized)
tgttttctgtcttctcgcgtcagctgtttcttcgtgtcttcagaaggtgggcccttctggaatcgggtccagcgtgggcgcttgggcctccgctgacgagtatggacagcggccagggac

SEQ ID NO: 639853 - DNA, 120 bp, Artificial Sequence
  ENSG00000181409_83 (sequence is synthesized)
gctcgcccctccactctcattccaaggcccccttcccagggcccaaagctggggcatgacagggtggcaatgggattggggagtctcttggccaactgcaagtggctttcgacaccccca

SEQ ID NO: 639854 - DNA, 120 bp, Artificial Sequence
  ENSG00000181409_84 (sequence is synthesized)
atcccagctgagttgtcagaccaggcagactgcgtggccgggaaactggcccctggcactgtggagtggtgctggggctgagcaccactgccccaccggcactgctacccagggtctctg

SEQ ID NO: 639855 - DNA, 120 bp, Artificial Sequence
  ENSG00000181409_85 (sequence is synthesized)
ccctccaagggacgtggtccctgacagaggctgtgccagcctcatctttgagccttcaccccttccaagcctcaccaggtaagggcagttcagccccctcagctcagagggacctggggg

SEQ ID NO: 639856 - DNA, 120 bp, Artificial Sequence
  ENSG00000181409_86 (sequence is synthesized)
agtgggggggtctggaggcctcccagaaacagcgtctcggaagggaggaagatggaggcggaaggcaaggtggtggccagggccaacccagagcatctccatccagtccccaaagttcag

SEQ ID NO: 639857 - DNA, 120 bp, Artificial Sequence
  ENSG00000181409_87 (sequence is synthesized)
gagcatttttctacctaatcttccagaatttgttgccgaaaatcaacaacagaaaggcagtgaaagaagacagatccatgatctgcctgtggcctggctgcccgtgggccaggatgcctg

SEQ ID NO: 639858 - DNA, 120 bp, Artificial Sequence
  ENSG00000181409_88 (sequence is synthesized)
ctgtgaccaccagggagacacagggaccaacgtcctttgtgaaggatgcaggcactggctttgcagagccgccctcctagcaacttggggatggaagggtggtgggaagcaggacccgcc

SEQ ID NO: 639859 - DNA, 120 bp, Artificial Sequence
  ENSG00000181409_89 (sequence is synthesized)
cagacacaggtgtaggcgattggaaggtgtgggcaagggccccctatgagggcagagggcctgctcctggacaccctggcacatcccaaatatacaccaggcaccaggggagtggcccac

SEQ ID NO: 639860 - DNA, 120 bp, Artificial Sequence
  ENSG00000181409_90 (sequence is synthesized)
tcaacccgtgaggaaatggactcagacccggactccagagtcccactggaattggacccataatggccctgtggtccccggagtgagcgtcagctcaaacctggacccagcagccctcca

SEQ ID NO: 639861 - DNA, 120 bp, Artificial Sequence
  ENSG00000181409_91 (sequence is synthesized)
ggtctgcagatccacactagggatggagccagtgtcttgggtccacgttgtggggcttgggggacagaagaggcaaggtcagactaacagcacagcccggtccccagtgggcccaacacc

SEQ ID NO: 639862 - DNA, 120 bp, Artificial Sequence
  ENSG00000181409_92 (sequence is synthesized)
tggctccagtgcctatggagctccccagggttctccccaggaccctgacctccagtccccacaaggctgtcagccccaaaggcacacacacccgaaggagcccaagctggcgctgcgagt

SEQ ID NO: 639863 - DNA, 120 bp, Artificial Sequence
  ENSG00000181409_93 (sequence is synthesized)
caggcgggaaaggcccgggctgcagctgcttgccggggtcaccctttgactataattgaagcgcccagcagggcaggagaggaccacacagaaggtcagggccagagccacacccagcag

SEQ ID NO: 639864 - DNA, 120 bp, Artificial Sequence
  ENSG00000181409_94 (sequence is synthesized)
tgagaggagccccgggcacagccagccagagcccacaagcttccgggaggggagaaagataccatgaacccaaggaggggacccagtagagaaggcccagcacccagagtgagaggcagg

SEQ ID NO: 639865 - DNA, 120 bp, Artificial Sequence
  ENSG00000181409_95 (sequence is synthesized)
ctcagtggacccctggccccgccatgcagccgggccctccccacccaggctgcgtgactgaggccagagggcccgtggagaaccactggagaggccagtgactgcacgagaacgccaggc

SEQ ID NO: 639866 - DNA, 120 bp, Artificial Sequence
  ENSG00000181409_96 (sequence is synthesized)
aacttactaactctagtcaggcggctcagaatctggccacttccacatcggcgctgcaaggaaacacaaggctcagttggaggcagcatggggtctgaggactcgggggtgcagaggagg

SEQ ID NO: 639867 - DNA, 120 bp, Artificial Sequence
  ENSG00000181409_97 (sequence is synthesized)
ggggaccacgggcgagctgccaggagacctagaaccctggagcactcggagtcggcacacagctggggctctggctctccctggacggcgcctgcggagcctgcctcacttgcgggcctg

SEQ ID NO: 639868 - DNA, 120 bp, Artificial Sequence
  ENSG00000181409_98 (sequence is synthesized)
gagggagccaggagcctgcctcagctgcagacggccccccgcagagcccgggcagagtgagcgactgtcactggggccagcaccgtgtgcaagcccaggttatctagcaggcgactgagt

SEQ ID NO: 639869 - DNA, 120 bp, Artificial Sequence
  ENSG00000181409_99 (sequence is synthesized)
gccgagaaaatacctggcagaggtgggcacaaggcggggcccccacggcaaagacgcacgccgggaaccggaaggaggtccatacccaactcgtgcaataaataaaacttttattcaaac

SEQ ID NO: 639870 - DNA, 120 bp, Artificial Sequence
  ENSG00000181409_100 (sequence is synthesized)
agcctcttgctcagccacactgcctgcctggtgcagcccatgtgacgggtcgagctccgggccctgctgtccctggccgggctatcccagtggcttcaggcaccttctccagacctaccc

SEQ ID NO: 639871 - DNA, 120 bp, Artificial Sequence
  ENSG00000181409_101 (sequence is synthesized)
agaaagatgcccggatggatcctgcagctccgtggcttttctgggaagcagcggcccctgctctcaagagaccctggctcctgatggtggccccaaggttgccagctggtgctagggact

SEQ ID NO: 639872 - DNA, 120 bp, Artificial Sequence
  ENSG00000181409_102 (sequence is synthesized)
caggacagtttcccagaaaaggccaagcgggcagcccctccaggggccgggtgaggaagctggggggtgcggaggccacactgggtccctgaaccccctgcttggttacagtgcagctcc

SEQ ID NO: 639873 - DNA, 120 bp, Artificial Sequence
  ENSG00000181409_103 (sequence is synthesized)
ggcagtggagaggaagccttcagtccagcccagccctgggggacacggcccccctccaggaactgctgggtgctggccactgtgcagggcacgaggctgctctgggcagctgctgtccct

SEQ ID NO: 639874 - DNA, 120 bp, Artificial Sequence
  ENSG00000181409_104 (sequence is synthesized)
cagctggggacctcaagggctacctgcggagctgccgggtggcggagtccatggctcccgacccccggaccctgcagcgcatggcctgtgaggtggcctgtggcgtcctgcaccttcatc

SEQ ID NO: 639875 - DNA, 120 bp, Artificial Sequence
  ENSG00000181409_105 (sequence is synthesized)
attccagcaccagtgtgcccctgggaagtcctgcctccacactgggctccctcctgggatttggggacctgcgctgggctccctggtggggagctgtgctgagggaaggggctgggcagg

SEQ ID NO: 639876 - DNA, 120 bp, Artificial Sequence
  ENSG00000181409_106 (sequence is synthesized)
ccagatctcggaggggcaggccctgggccccagcacaaaccggcctccgcctgtgggctggcgtcccccgcgtggtcgtgactccgtggctgcctccagggcacagacggcgccccgctc

SEQ ID NO: 639877 - DNA, 120 bp, Artificial Sequence
  ENSG00000181418_0 (sequence is synthesized)
ctgcagtgggcgccggctccctgggctgggagggggctcctggggcgggtgggagggtggggggccggggtggggtggggcaggatgctggatggcccactgttctccgaggggcctgac

SEQ ID NO: 639878 - DNA, 120 bp, Artificial Sequence
  ENSG00000181418_1 (sequence is synthesized)
tgacagcccccgggagctccaggatgaggagtctggcagctgcctctgggtgcagaagtccaagctattggtgatagaagtgaagactatttcctgtcattatagtcgccgcgccccttc

SEQ ID NO: 639879 - DNA, 120 bp, Artificial Sequence
  ENSG00000181418_2 (sequence is synthesized)
tcgacagcccatggacttccaggccagccactgggctcgcgggttccagaaccgcacgtgtgggccgcgcccgggatccccacagccgccgccccgccggccctgggcctccagggtgct

SEQ ID NO: 639880 - DNA, 120 bp, Artificial Sequence
  ENSG00000181418_3 (sequence is synthesized)
gcaggaggcgaccaactggcgggcggggcccctggccgaggtccgagctcgggagcaagagaaaaggaaagcggcgtcgcaggagcgggaggccaaggagaccgagcgaaaaaggcgcaa

SEQ ID NO: 639881 - DNA, 120 bp, Artificial Sequence
  ENSG00000181418_4 (sequence is synthesized)
ggagaccgagcgaaaaaggcgcaaggctggtggggcccgacggagccccccgggtcgaccccgcccggagccccgcaacgcccctcgggtggcccagctggcagggctccctgctccctt

SEQ ID NO: 639882 - DNA, 120 bp, Artificial Sequence
  ENSG00000181418_5 (sequence is synthesized)
cgagcgccccgtccatccgcgcagccgcagagcgacccagggtcggcgtgggcggggccctggggaggtcggcggcccgggcccccaagctacgaggctcacctgctgctgagaggttct

SEQ ID NO: 639883 - DNA, 120 bp, Artificial Sequence
  ENSG00000181418_6 (sequence is synthesized)
ttctgccgggaccgccccacgacgccgctgggaccggccgccaccctacgtggctccaccttcttacgaaggcccccataggaccttggggactaagagaggccccgggaactctcaggt

SEQ ID NO: 639884 - DNA, 120 bp, Artificial Sequence
  ENSG00000181418_7 (sequence is synthesized)
gcccacttcatcagccccagctgcgactccagccaggacagacggagggcgcacaaagaagaggctggatcctcggatctaccgggacgtcctcggggcttggggtctccgacaggggca

SEQ ID NO: 639885 - DNA, 120 bp, Artificial Sequence
  ENSG00000181418_8 (sequence is synthesized)
aggtctcttggggggatccccaggctgtggagcggccagagcaaggccagagcccggcaagggggtcgtggagaaaagcctggggctggctgctgctgacctgaacagtggtagcgacag

SEQ ID NO: 639886 - DNA, 120 bp, Artificial Sequence
  ENSG00000181418_9 (sequence is synthesized)
ccatccccaagccaaagctacagggagcgcaggcaccgagatagctcctgcggggtctgcaactgcggctccctgtgccccgcatcccgctcccagatccaggcaccacctcaagggctc

SEQ ID NO: 639887 - DNA, 120 bp, Artificial Sequence
  ENSG00000181418_10 (sequence is synthesized)
gagggaagggaaagaaggagaacagatctggtttcccaaatgctggattccctcccctaaaaagcagccgccccgccatagccagacactccccagaccctgggctcccggaggcaccgg

SEQ ID NO: 639888 - DNA, 120 bp, Artificial Sequence
  ENSG00000181418_11 (sequence is synthesized)
atggagagaatctctgggtcttggagagggggcaggaccggagaccctggagggttggaaggcgacccgccgtgcccacaccttgccccgcagttcccagggcctgtcccgtggggaagg

SEQ ID NO: 639889 - DNA, 120 bp, Artificial Sequence
  ENSG00000181418_12 (sequence is synthesized)
cgtctttgtcattgacgccacgtgcgtagtgatacgatcccaatatgttccaaccccccgaacccagcaggtgcagcttttgccctctggggtgacacgcgtggtgggggattcccccag

SEQ ID NO: 639890 - DNA, 120 bp, Artificial Sequence
  ENSG00000181418_13 (sequence is synthesized)
ccaatcgaagcccggcaaggaggagggtgaaggggccacggtctttccttccccttgtcaaaagcggctgtcgagcagtcgccttttacaccagcccggcgggggccgcgggggcgaagc

SEQ ID NO: 639891 - DNA, 120 bp, Artificial Sequence
  ENSG00000181418_14 (sequence is synthesized)
tgagggcgggaggccgggggactccacactggaggagcgcactttccgcatcttggggctcccggcccccgaagtaaacctgcgggacgcccccacgcagccaggtagcccagagcacca

SEQ ID NO: 639892 - DNA, 120 bp, Artificial Sequence
  ENSG00000181418_15 (sequence is synthesized)
ccccagggccctacgccggggccctgcgagaagccgtgtcccgtatccgccgccacacagcccctgactcggacacggacgaagctgaggagctcagcgtccatagcggctcctctgatg

SEQ ID NO: 639893 - DNA, 120 bp, Artificial Sequence
  ENSG00000181418_16 (sequence is synthesized)
gaagcgacacagaagccccgggcgcctcctggcggaatgagaggaccctgcccgaggttggaaacagttcgccagaggaagatgggaagacagcggaactgagcgacagtgtcggggaga

SEQ ID NO: 639894 - DNA, 120 bp, Artificial Sequence
  ENSG00000181418_17 (sequence is synthesized)
tcctagatgtcataagccaaaccgaggaggtcctcttcggggtgagggacatcagagggacccaacagggaaataggaagaggcagtgagaggccccttcttgtatttgtgtccccaacg

SEQ ID NO: 639895 - DNA, 120 bp, Artificial Sequence
  ENSG00000181418_18 (sequence is synthesized)
catccatccttgggtccactggtccccattcttccccacagacttcctttgcttctcttttccttgtatctttacccatacctgttctcatccttgaaatataaatgaaaggaagggaag

SEQ ID NO: 639896 - DNA, 120 bp, Artificial Sequence
  ENSG00000181418_19 (sequence is synthesized)
catatgcccattaatgattttgtttcaggagaggtgagaatgagcagatttaattaatgtctgttatgttcagggcacaagggtgagctcttcgcaggggctgatgcactgggtgtggag

SEQ ID NO: 639897 - DNA, 120 bp, Artificial Sequence
  ENSG00000181418_20 (sequence is synthesized)
ctgagcagagaggcctaaccaggatcaggcaggagggcagggatggtggcagccataggagggcagggtagggtagggcctctgaggaggagggaaaaagtgaaggagaggctttggacc

SEQ ID NO: 639898 - DNA, 120 bp, Artificial Sequence
  ENSG00000181418_21 (sequence is synthesized)
tggtgacagagtgatcagatgacagaggggttcttgggagaagaggcataggtccagcaacaaccaacaaagcagaaggagggctcaccttggtgtcacaagtcttggatttcaatccca

SEQ ID NO: 639899 - DNA, 120 bp, Artificial Sequence
  ENSG00000181418_22 (sequence is synthesized)
actctgccactgagttgctggttgactgaggccagtcactttccctctccaggcctccaggcctcctggtatataaaatgatggtattctaaggtccatccttccgtctctgacattttg

SEQ ID NO: 639900 - DNA, 120 bp, Artificial Sequence
  ENSG00000181418_23 (sequence is synthesized)
agatctttggaaaggactctatctcatcctcccctcgacaagccaagaatgagaattgggaataagtgaacagagtttgagggtttctgggcggcctccgtgtcacccaaagtcatgatc

SEQ ID NO: 639901 - DNA, 120 bp, Artificial Sequence
  ENSG00000181418_24 (sequence is synthesized)
aattcaggagactgcccaaggcttgcagaagaggtaagggagtgaggcactcctatcccagtctcccaggtttggttgagggctccccaaggcagggcaagatagcggccctgtcactga

SEQ ID NO: 639902 - DNA, 120 bp, Artificial Sequence
  ENSG00000181418_25 (sequence is synthesized)
ccctggcctgtggtggtctgagctggggagggaaggacaccaatgaatcagcttgggacctctttaggccttccccttttcctccaccccgatgctccttagtgatgctctgaggcgtgg

SEQ ID NO: 639903 - DNA, 120 bp, Artificial Sequence
  ENSG00000181418_26 (sequence is synthesized)
ccacgatctccctcccaggtggtatcgcccacctgaaaaaatcctgagaatttctcccatcttggcctcttccagaaaccggccaggcaaggaaagaggccggtcaccagaagccagcag

SEQ ID NO: 639904 - DNA, 120 bp, Artificial Sequence
  ENSG00000181418_27 (sequence is synthesized)
gcgtggggtgtgatactctctatagccactacagggcgcgcgcaggtcgcggatctccccagttgctaatcccggctctgccactcaatcctatccctagttcccgagcgcgggtccccc

SEQ ID NO: 639905 - DNA, 120 bp, Artificial Sequence
  ENSG00000181418_28 (sequence is synthesized)
gccttgcagtctccagccgtgcggggccgggagcaggcctccggcctcccagacttctagagcccgccgggcccatctttgtactcatccaccccagccggcttgggactcagacaccga

SEQ ID NO: 639906 - DNA, 120 bp, Artificial Sequence
  ENSG00000181418_29 (sequence is synthesized)
agtctttttttttttctctccgatccttggacacctcctctgtctgccatttattagccatgtgaacttggccacatcacttcacctccctgagcctcagtttcctcatctgtcaaatgg

SEQ ID NO: 639907 - DNA, 120 bp, Artificial Sequence
  ENSG00000181418_30 (sequence is synthesized)
gggtttataaacacctacctcgcagggttgttgtgaggatttaatgcgataatgtatgtaaagcgccttgcacactgcctggcacacagtaggcgctcaataaatctaagcttcccttta

SEQ ID NO: 639908 - DNA, 120 bp, Artificial Sequence
  ENSG00000181433_0 (sequence is synthesized)
ctgcacagcaacataagcagaggaatgcagaaccttctcacccagcgggatgaaatcgcctggactatctgcagatgcaggcttctccacttcaaacgagtcaaccaactccacctgaag

SEQ ID NO: 639909 - DNA, 120 bp, Artificial Sequence
  ENSG00000181433_1 (sequence is synthesized)
aacttcatgctgctgcctatgtgtttacaaatgatgggcagcaaatgaggagtgatgaagtaaatctggttgcaacagggcatcaaagcaaaaagaaacattccagaaaatccaagagac

SEQ ID NO: 639910 - DNA, 120 bp, Artificial Sequence
  ENSG00000181433_2 (sequence is synthesized)
actcttcatctaagagaaggaagagtatgtcctcgtggttagacaaacaggaagatgctgcagtcactcacagcatttgtgaagagaggataaataacggccaaccagtagctgataatg

SEQ ID NO: 639911 - DNA, 120 bp, Artificial Sequence
  ENSG00000181433_3 (sequence is synthesized)
tcttgtcaactgctccaccatggcctgatgctaccatcgctcacaatatccgtgaagagaggatggaaaatggccaatctcgaactgacaaagtcttgtcaactgctccaccacagcttg

SEQ ID NO: 639912 - DNA, 120 bp, Artificial Sequence
  ENSG00000181433_4 (sequence is synthesized)
ttcatatggctgcagctggtattccatccatgagtaccagggatctgcattctaccgtcactcacaatatccgtgaagagagaatggaaaatggccaaccccaacctgataacgtcttgt

SEQ ID NO: 639913 - DNA, 120 bp, Artificial Sequence
  ENSG00000181433_5 (sequence is synthesized)
caactggtcccacagggcttattaatatggcagcaactcctattccagccatgagtgccagagatctctatgctacagtcactcacaatgtctgtgaacagaagatggaaaatgtccaac

SEQ ID NO: 639914 - DNA, 120 bp, Artificial Sequence
  ENSG00000181433_6 (sequence is synthesized)
cagcacctgataacgtgttgttgactcttcgaccacggcgtattaatatgacagacactggtatttcacccatgagtaccagggatccatatgctaccatcacttacaatgtccctgagg

SEQ ID NO: 639915 - DNA, 120 bp, Artificial Sequence
  ENSG00000181433_7 (sequence is synthesized)
agaagatggaaaagggccaaccccaacctgataacatcttgtcaactgcttcaacagggcttattaatgtggcaggagctggtactccagccatcagcaccaatggcctgtattccaccg

SEQ ID NO: 639916 - DNA, 120 bp, Artificial Sequence
  ENSG00000181433_8 (sequence is synthesized)
tccctcacaatgtctgtgaagagaagatggaaaatgaccaaccgcaacctaataacgtattgtcaactgttcaaccagtgattatttatttgacagcaactggtattccgggcatgaata

SEQ ID NO: 639917 - DNA, 120 bp, Artificial Sequence
  ENSG00000181433_9 (sequence is synthesized)
ccagggatcagtatgctaccatcactcacaatgtctgtgaagagagagtggtaaataaccaaccactacctagtaacgccttgtcaactgttctaccagggcttgcttatttggcaacag

SEQ ID NO: 639918 - DNA, 120 bp, Artificial Sequence
  ENSG00000181433_10 (sequence is synthesized)
ctgatatgccagccatgagtaccagggatcagcatgctaccatcattcacaatctgcgtgaagagaagaaagataacagccaaccaacccctgataacgtcttgtcagctgttacaccag

SEQ ID NO: 639919 - DNA, 120 bp, Artificial Sequence
  ENSG00000181433_11 (sequence is synthesized)
agcttattaacttggcaggagctggtattccacccatgagtaccagggatcagtatgctaccgtcaatcaccatgtccatgaagcaaggatggaaaatggccaacgaaaacaggataacg

SEQ ID NO: 639920 - DNA, 120 bp, Artificial Sequence
  ENSG00000181433_12 (sequence is synthesized)
tgtatgctaccattactcacagtgttcgtgaagagaagatggaaagtggcaaaccccaaactgataaggtcatatcaaatgatgcaccacagcttggtcatatggctgcaggtggtattc

SEQ ID NO: 639921 - DNA, 120 bp, Artificial Sequence
  ENSG00000181433_13 (sequence is synthesized)
catccatgagtaccaaggatctgtatgctaccgtcactcaaaatgtccatgaagagaggatggaaaataaccaaccacaacctagttatgacttgtcaactgttctaccaggacttactt

SEQ ID NO: 639922 - DNA, 120 bp, Artificial Sequence
  ENSG00000181433_14 (sequence is synthesized)
atttgacagtagctggtattccggccatgagtaccagggatcagtatgctaccgtcactcacaatgtccatgaagagaagattaaaaatggccaagcagcatccgataatgtcttctcga

SEQ ID NO: 639923 - DNA, 120 bp, Artificial Sequence
  ENSG00000181433_15 (sequence is synthesized)
ctgttccaccagcatttattaatatggcagcaactggtgtttcatccatgagtaccagggatcagtatgctgcagtcactcacaacatccgtgaagagaagataaataacagccaaccag

SEQ ID NO: 639924 - DNA, 120 bp, Artificial Sequence
  ENSG00000181433_16 (sequence is synthesized)
cacctggtaacatcttgtcaactgctcctccatggcttcgtcatatggcagcagctggaatttcatccacgattaccagggatctgtatgtcaccgccactcacagtgtccatgaggaga

SEQ ID NO: 639925 - DNA, 120 bp, Artificial Sequence
  ENSG00000181433_17 (sequence is synthesized)
agatgacaaatggccaacaggcacctgataactccttgtcaacggttccacctggttgtattaatctgtcaggagctggtatttcatgcagaagtaccagggatctgtatgctactgtca

SEQ ID NO: 639926 - DNA, 120 bp, Artificial Sequence
  ENSG00000181433_18 (sequence is synthesized)
ttcacgatatccaggaggaggagatggaaaatgatcaaacccctcctgatggcttcctgtcaaattctgattcaccagagctgataaatatgacaggacattgtatgccacccaatgcat

SEQ ID NO: 639927 - DNA, 120 bp, Artificial Sequence
  ENSG00000181433_19 (sequence is synthesized)
tggattctttctctcacgacttcacaagtctcagcaaagatgagctgctttacaaacctgatagtaatgaatttgcggtaggcaccaaaaactacagtgtctctgcaggtgacccaccag

SEQ ID NO: 639928 - DNA, 120 bp, Artificial Sequence
  ENSG00000181433_20 (sequence is synthesized)
ttacagtaatgtctttggtggaaactgtgccaaatacaccacaaatatctcctgccatggcaaagaaaattaatgatgatataaaatatcaattaatgaaagaagttcgaaggtttgggc

SEQ ID NO: 639929 - DNA, 120 bp, Artificial Sequence
  ENSG00000181433_21 (sequence is synthesized)
aaaattatgaaagaattttcattttgcttgaagaggtacaaggatctatgaaagtcaagagacaatttgttgaatttaccatcaaggaagcagcaaggtttaaaaaagttgtcttaattc

SEQ ID NO: 639930 - DNA, 120 bp, Artificial Sequence
  ENSG00000181433_22 (sequence is synthesized)
agcaactcgagaaggcgcttaaagaaatagattcccactgccatctcagaaaagttaagcacatgagaaaaagataattgtgttagtgcaaagaccaaggagaaacaaggacatatgctg

SEQ ID NO: 639931 - DNA, 120 bp, Artificial Sequence
  ENSG00000181433_23 (sequence is synthesized)
taggatggaacaggttattgctgaagctccctataatcctgaaatgaagagaattcccttccagaagctacgaaaaagggagctgtttaaatttaataaatctctgttagtaaaagctgc

SEQ ID NO: 639932 - DNA, 120 bp, Artificial Sequence
  ENSG00000181444_0 (sequence is synthesized)
cttggcacccttccccgcagcccgagtgcctgtcctccccagcctcctcgccctcctccaccccctctcccatcaccctcccctcccctcccctcccctcccccgtcctgagctcccact

SEQ ID NO: 639933 - DNA, 120 bp, Artificial Sequence
  ENSG00000181444_1 (sequence is synthesized)
tccacacctactccaggctcggagccttaggaccatcacctgcccacctaagcccacggtgctccctcctgggaccccactcctgaaaccccctgcccctgcctcccccagcccggtgcg

SEQ ID NO: 639934 - DNA, 120 bp, Artificial Sequence
  ENSG00000181444_2 (sequence is synthesized)
ccggggctctccgcccgctccctcggtccctcctcccttgcaggcgccgtttcccggcttcgactccccgcgcgtctatccctctcctccccgcgaagtttcggggctgtcagtctgtca

SEQ ID NO: 639935 - DNA, 120 bp, Artificial Sequence
  ENSG00000181444_3 (sequence is synthesized)
gtctgtcagtctttcaggccgtcagcacccgagctgcaggcggcgagcgccattgtgagcagagccggcggggcaggaggcccgggcgcctgggtccccgcggcgcgggcggagcggccg

SEQ ID NO: 639936 - DNA, 120 bp, Artificial Sequence
  ENSG00000181444_4 (sequence is synthesized)
ggttctgtggcctgatccccaggaggagctactctgggttaccatgagagagaccttggaggccctcagctccctgggattctctgtgggacagccagagatggccccccaaagtgagcc

SEQ ID NO: 639937 - DNA, 120 bp, Artificial Sequence
  ENSG00000181444_5 (sequence is synthesized)
cagggaaggatcccataatgcccaggagcagatgtcctcttctagggaagagagagcactgggggtgtgctcagggcacgaggcccctacaccggaggaaggtgcccacacagaacaagc

SEQ ID NO: 639938 - DNA, 120 bp, Artificial Sequence
  ENSG00000181444_6 (sequence is synthesized)
cgaggctccctgcagaggccaggcgtgctcagcacagaaggctcagcctgtgggtacctgcccaggagaggagtggatgattcggaaggtgaaggtggaggacgaagatcaggaggcaga

SEQ ID NO: 639939 - DNA, 120 bp, Artificial Sequence
  ENSG00000181444_7 (sequence is synthesized)
agaggaggtcgaatggccccagcatctatcgttacttcccagcccctttcccgcgcctgacctggggcatctggctgccgcgtacaaactggagccaggggccccgggggcactgagtgg

SEQ ID NO: 639940 - DNA, 120 bp, Artificial Sequence
  ENSG00000181444_8 (sequence is synthesized)
gctcgcgctgtctgggtggggtccgatgccggagaagccctacggctgcggggagtgtgagcggcgcttccgggaccagctgacgttgcgactgcaccagcggctgcaccggggcgaggg

SEQ ID NO: 639941 - DNA, 120 bp, Artificial Sequence
  ENSG00000181444_9 (sequence is synthesized)
cccctgcgcctgcccggactgcggccgcagcttcacgcagcgcgcccacatgctactgcatcagcgcagccaccgcggcgagcggcctttcccgtgctccgagtgcgacaagcgcttcag

SEQ ID NO: 639942 - DNA, 120 bp, Artificial Sequence
  ENSG00000181444_10 (sequence is synthesized)
caagaaggcccatctgacccgccacctgcgcacgcacacgggcgagcggccctacccgtgcgcggagtgcggcaagcgcttcagccagaagatccacctgggctcgcaccaaaagaccca

SEQ ID NO: 639943 - DNA, 120 bp, Artificial Sequence
  ENSG00000181444_11 (sequence is synthesized)
atacgggcgagaggccctaccagtgcgcacagtgcgcacgcagcttcacgcacaagcagcacttggtgcggcaccaaagggtgcaccagacggccggcccggccaggccctctcccgact

SEQ ID NO: 639944 - DNA, 120 bp, Artificial Sequence
  ENSG00000181444_12 (sequence is synthesized)
cgtccgcttctcctcattccactgccccgtccccgaccccatcctttcccgggccaaagcctttcgcgtgctccgactgcggcttgagcttcggctggaaaaagaacctcgccacgcacc

SEQ ID NO: 639945 - DNA, 120 bp, Artificial Sequence
  ENSG00000181444_13 (sequence is synthesized)
agtgtctgcaccgcagcgagggtcgcccctttgggtgcgatgagtgcgcactgggcgccaccgtggatgcccccgccgccaagcccctggccagcgcgcctggcggaccgggctgcggcc

SEQ ID NO: 639946 - DNA, 120 bp, Artificial Sequence
  ENSG00000181444_14 (sequence is synthesized)
caggatccgatcccgtggtgccccagcgcgccccctcgggcgagcggtccttcttctgcccggactgcgggcgcggcttctcccatgggcagcacctggcgcggcacccgcgcgtgcaca

SEQ ID NO: 639947 - DNA, 120 bp, Artificial Sequence
  ENSG00000181444_15 (sequence is synthesized)
cgggcgaacggcccttcgcctgcacgcagtgtgaccgccgcttcggctcgcggcctaatctggtcgcccactccagggcccacagcggcgccaggcctttcgcctgcgctcagtgcggcc

SEQ ID NO: 639948 - DNA, 120 bp, Artificial Sequence
  ENSG00000181444_16 (sequence is synthesized)
gccgcttcagccgcaagtcgcacctgggccgccaccaggcggtgcacactggcagccgcccccacgcctgcgccgtctgcgcccgcagcttcagctccaaaaccaacctagtccgccacc

SEQ ID NO: 639949 - DNA, 120 bp, Artificial Sequence
  ENSG00000181444_17 (sequence is synthesized)
aggcgatccacacaggctcccgccccttctcctgcccgcagtgcggaaagagcttcagccgcaagacccacctggtgcggcaccagctcattcacggcgaagccgcccacgcggccccgg

SEQ ID NO: 639950 - DNA, 120 bp, Artificial Sequence
  ENSG00000181444_18 (sequence is synthesized)
acgccgcccttgcggccccagcctggtccgctccccccgaggtggcgccgcccccgctcttcttctgagcctagttctcacgaggaccctttcttgcccacagtttcgagaggcccgtgc

SEQ ID NO: 639951 - DNA, 120 bp, Artificial Sequence
  ENSG00000181444_19 (sequence is synthesized)
catgagaccgcctggggtgagcaaggcgacctgggctgctgcccgaaggtttggccgccgcgggacacctgtttccttcccgcagtgtctgcgtccgcacagcatacccagctcggacct

SEQ ID NO: 639952 - DNA, 120 bp, Artificial Sequence
  ENSG00000181444_20 (sequence is synthesized)
cctaggacagagactcagcgaacccttgctgggaaccgctgagctgaagttcttggaaggctcccacccaggtgccccgttggaaagcagatatttcccggacccagcgcggcctcaacc

SEQ ID NO: 639953 - DNA, 120 bp, Artificial Sequence
  ENSG00000181444_21 (sequence is synthesized)
agggcaggaaagagtggttatttatgtacttaaagtttcattaaagttaaaatcggaaagttctggggctgctaaatgaattgggggagggaacacctgactctccttagccactgtccc

SEQ ID NO: 639954 - DNA, 120 bp, Artificial Sequence
  ENSG00000181444_22 (sequence is synthesized)
acctccatccacacacagaccacccccctccacttccccttctgtcctgggtgagttacatttagccagctgctgttaattggttctcccaaataaaaatgtaatatatttattcactaa

SEQ ID NO: 639955 - DNA, 120 bp, Artificial Sequence
  ENSG00000181449_0 (sequence is synthesized)
gatggttgtctattaacttgttcaaaaaagtatcaggagttgtcaaggcagagaagagagtgtttgcaaaagggggaaagtagtttgctgcctctttaagactaggactgagagaaagaa

SEQ ID NO: 639956 - DNA, 120 bp, Artificial Sequence
  ENSG00000181449_1 (sequence is synthesized)
gaggagagagaaagaaagggagagaagtttgagccccaggcttaagcctttccaaaaaataataataacaatcatcggcggcggcaggatcggccagaggaggagggaagcgcttttttt

SEQ ID NO: 639957 - DNA, 120 bp, Artificial Sequence
  ENSG00000181449_2 (sequence is synthesized)
gatcctgattccagtttgcctctctctttttttcccccaaattattcttcgcctgattttcctcgcggagccctgcgctcccgacacccccgcccgcctcccctcctcctctccccccgc

SEQ ID NO: 639958 - DNA, 120 bp, Artificial Sequence
  ENSG00000181449_3 (sequence is synthesized)
cccccaaagtcccggccgggccgagggtcggcggccgccggcgggccgggcccgcgcacagcgcccgcatgtacaacatgatggagacggagctgaagccgccgggcccgcagcaaactt

SEQ ID NO: 639959 - DNA, 120 bp, Artificial Sequence
  ENSG00000181449_4 (sequence is synthesized)
gcaaacttcggggggcggcggcggcaactccaccgcggcggcggccggcggcaaccagaaaaacagcccggaccgcgtcaagcggcccatgaatgccttcatggtgtggtcccgcgggca

SEQ ID NO: 639960 - DNA, 120 bp, Artificial Sequence
  ENSG00000181449_5 (sequence is synthesized)
gcggcgcaagatggcccaggagaaccccaagatgcacaactcggagatcagcaagcgcctgggcgccgagtggaaacttttgtcggagacggagaagcggccgttcatcgacgaggctaa

SEQ ID NO: 639961 - DNA, 120 bp, Artificial Sequence
  ENSG00000181449_6 (sequence is synthesized)
gcggctgcgagcgctgcacatgaaggagcacccggattataaataccggccccggcggaaaaccaagacgctcatgaagaaggataagtacacgctgcccggcgggctgctggcccccgg

SEQ ID NO: 639962 - DNA, 120 bp, Artificial Sequence
  ENSG00000181449_7 (sequence is synthesized)
cggcaatagcatggcgagcggggtcggggtgggcgccggcctgggcgcgggcgtgaaccagcgcatggacagttacgcgcacatgaacggctggagcaacggcagctacagcatgatgca

SEQ ID NO: 639963 - DNA, 120 bp, Artificial Sequence
  ENSG00000181449_8 (sequence is synthesized)
ggaccagctgggctacccgcagcacccgggcctcaatgcgcacggcgcagcgcagatgcagcccatgcaccgctacgacgtgagcgccctgcagtacaactccatgaccagctcgcagac

SEQ ID NO: 639964 - DNA, 120 bp, Artificial Sequence
  ENSG00000181449_9 (sequence is synthesized)
ctacatgaacggctcgcccacctacagcatgtcctactcgcagcagggcacccctggcatggctcttggctccatgggttcggtggtcaagtccgaggccagctccagcccccctgtggt

SEQ ID NO: 639965 - DNA, 120 bp, Artificial Sequence
  ENSG00000181449_10 (sequence is synthesized)
cacatgtcccagcactaccagagcggcccggtgcccggcacggccattaacggcacactgcccctctcacacatgtgagggccggacagcgaactggaggggggagaaattttcaaagaa

SEQ ID NO: 639966 - DNA, 120 bp, Artificial Sequence
  ENSG00000181449_11 (sequence is synthesized)
aaacgagggaaatgggaggggtgcaaaagaggagagtaagaaacagcatggagaaaacccggtacgctcaaaaagaaaaaggaaaaaaaaaaatcccatcacccacagcaaatgacagct

SEQ ID NO: 639967 - DNA, 120 bp, Artificial Sequence
  ENSG00000181449_12 (sequence is synthesized)
gcaaaagagaacaccaatcccatccacactcacgcaaaaaccgcgatgccgacaagaaaacttttatgagagagatcctggacttctttttgggggactatttttgtacagagaaaacct

SEQ ID NO: 639968 - DNA, 120 bp, Artificial Sequence
  ENSG00000181449_13 (sequence is synthesized)
ggggagggtggggagggcgggggaatggaccttgtatagatctggaggaaagaaagctacgaaaaactttttaaaagttctagtggtacggtaggagctttgcaggaagtttgcaaaagt

SEQ ID NO: 639969 - DNA, 120 bp, Artificial Sequence
  ENSG00000181449_14 (sequence is synthesized)
ctttaccaataatatttagagctagtctccaagcgacgaaaaaaatgttttaatatttgcaagcaacttttgtacagtatttatcgagataaacatggcaatcaaaatgtccattgttta

SEQ ID NO: 639970 - DNA, 120 bp, Artificial Sequence
  ENSG00000181449_15 (sequence is synthesized)
taagctgagaatttgccaatatttttcaaggagaggcttcttgctgaattttgattctgcagctgaaatttaggacagttgcaaacgtgaaaagaagaaaattattcaaatttggacatt

SEQ ID NO: 639971 - DNA, 120 bp, Artificial Sequence
  ENSG00000181449_16 (sequence is synthesized)
ttaattgtttaaaaattgtacaaaaggaaaaaattagaataagtactggcgaaccatctctgtggtcttgtttaaaaagggcaaaagttttagactgtactaaattttataacttactgt

SEQ ID NO: 639972 - DNA, 120 bp, Artificial Sequence
  ENSG00000181449_17 (sequence is synthesized)
taaaagcaaaaatggccatgcaggttgacaccgttggtaatttataatagcttttgttcgatcccaactttccattttgttcagataaaaaaaaccatgaaattactgtgtttgaaatat

SEQ ID NO: 639973 - DNA, 120 bp, Artificial Sequence
  ENSG00000181449_18 (sequence is synthesized)
tttcttatggtttgtaatatttctgtaaatttattgtgatattttaaggttttcccccctttattttccgtagttgtattttaaaagattcggctctgtattatttgaatcagtctgccg

SEQ ID NO: 639974 - DNA, 120 bp, Artificial Sequence
  ENSG00000181449_19 (sequence is synthesized)
agaatccatgtatatatttgaactaatatcatccttataacaggtacattttcaacttaagtttttactccattatgcacagtttgagataaataaatttttgaaatatggacactgaaa

SEQ ID NO: 639975 - DNA, 120 bp, Artificial Sequence
  ENSG00000181450_0 (sequence is synthesized)
ctttgtcttgtgctccagctggagctttggtcccgtattctcggctatttatccccagctgcgggaggccctggtgactctgctgctgcagtgtctggtttccctgtgacctgcaggtac

SEQ ID NO: 639976 - DNA, 120 bp, Artificial Sequence
  ENSG00000181450_1 (sequence is synthesized)
tgggagttacatagctaagatgccaggacaccccgaaagccggaaaacgggactactggcattcagtgatgtggtcatagaattctctccagaggagtgggcatgcctggaccctgccca

SEQ ID NO: 639977 - DNA, 120 bp, Artificial Sequence
  ENSG00000181450_2 (sequence is synthesized)
gcgaaatttgtatagggatgtgatgttcgagaactacagaaacctggtctccctgggacttccaggactatgttaaaatagaagcattgataatgggcacaatatcactttgcattggtg

SEQ ID NO: 639978 - DNA, 120 bp, Artificial Sequence
  ENSG00000181450_3 (sequence is synthesized)
tctgtgcatttgaaggagcaaacacctctaccagtttttataaactggtttatacagctattttatcttattccattcaagaccttttgccagagcaggatatgaaagatttatgccaaa

SEQ ID NO: 639979 - DNA, 120 bp, Artificial Sequence
  ENSG00000181450_4 (sequence is synthesized)
aagtgacactgacaagacatagaagctggggccttgacaatttgcacttagtgaaagactggagaactgtgaatgaaggtaaggggcagaaagaatattgcaatagacttactcaatgtt

SEQ ID NO: 639980 - DNA, 120 bp, Artificial Sequence
  ENSG00000181450_5 (sequence is synthesized)
catcaactaaaagcaaaatctttcaatgtattgaatgtggcagaaattttagctggaggtcaatccttactgaacataagagaattcatactggagagaagccatacaaatgtgaagaat

SEQ ID NO: 639981 - DNA, 78 bp, Artificial Sequence
  ENSG00000181450_6 (sequence is synthesized)
agaattcatactggagagaagccatacaaatgtgaagaatgtggcaaagttttcaatcgatgttcaaacctaacaaac

SEQ ID NO: 639982 - DNA, 120 bp, Artificial Sequence
  ENSG00000181450_7 (sequence is synthesized)
tactggagagaaaccctacaaatgtgatgaatgtgacaaagtttttaattggtggtcacaactaactagccataagaaaattcatagtggagagaaaccatacccatgtgaagaatgtgg

SEQ ID NO: 639983 - DNA, 87 bp, Artificial Sequence
  ENSG00000181450_8 (sequence is synthesized)
actagccataagaaaattcatagtggagagaaaccatacccatgtgaagaatgtggcaaagcctttacccagttctcaaaccttaca

SEQ ID NO: 639984 - DNA, 66 bp, Artificial Sequence
  ENSG00000181450_9 (sequence is synthesized)
agaaaccttacaagtgtgaagaatgtggcaacgtttttaatgagtgctcacacctaactagacata

SEQ ID NO: 639985 - DNA, 120 bp, Artificial Sequence
  ENSG00000181450_10 (sequence is synthesized)
aatgtgaagaatgtggcaaagcctttacacagtttgcaagccttactcgtcataaaagaattcatactggagaaaaaccctaccaatgtgaagaatgtggcaaaacttttaatcggtgtt

SEQ ID NO: 639986 - DNA, 66 bp, Artificial Sequence
  ENSG00000181450_11 (sequence is synthesized)
ggagaaaaaccctaccaatgtgaagaatgtggcaaaacttttaatcggtgttcacacctaagtaga

SEQ ID NO: 639987 - DNA, 120 bp, Artificial Sequence
  ENSG00000181450_12 (sequence is synthesized)
ttcatactggagagaaaccctacaaatgcaaagaatgtggcaaagcgtttaacaagttctcaagccttactcaacataggagaattcatactggagtgaaaccctacaaatgtgaagaat

SEQ ID NO: 639988 - DNA, 77 bp, Artificial Sequence
  ENSG00000181450_13 (sequence is synthesized)
agaattcatactggagtgaaaccctacaaatgtgaagaatgtgggaaagtttttaaacagtgctctcacctaactag

SEQ ID NO: 639989 - DNA, 120 bp, Artificial Sequence
  ENSG00000181450_14 (sequence is synthesized)
tgaagaatgtggcaaagcctttaaccagttctcaagccttactcgtcataaaagaattcatactggagagaaacgctacaaatgtaaagaatgtggaaaaggtttttaccaatcctcaat

SEQ ID NO: 639990 - DNA, 120 bp, Artificial Sequence
  ENSG00000181450_15 (sequence is synthesized)
aatgtaaagaatgtggaaaaggtttttaccaatcctcaatccatagtaagtataagagaatttatactggagaggaacctgacaaatgtaaaaaatgtggcagtctttaaaaactgcttc

SEQ ID NO: 639991 - DNA, 120 bp, Artificial Sequence
  ENSG00000181450_16 (sequence is synthesized)
attatacatggcttcactaatttcatactgaataaaagtggtatgagcataatgactgtttaaggatgtttcacaaaatgtaagcttcagagtgcacaacactatactgaatgaaattta

SEQ ID NO: 639992 - DNA, 120 bp, Artificial Sequence
  ENSG00000181450_17 (sequence is synthesized)
taaatataaaagattacaatatctttatttcaaagatcttcctgtaaacagaatctgtactagaggaaaaacccttaaacaattattcagactttattcaactttagaggattttacggg

SEQ ID NO: 639993 - DNA, 120 bp, Artificial Sequence
  ENSG00000181450_18 (sequence is synthesized)
ggcaaaaaacctcctacaaatgtggaaaaacattttttcaagatatatgccttagaaaacaccagagtttatagtatagtagaatatattttacagatacagtgaatacaaacaaatgtc

SEQ ID NO: 639994 - DNA, 120 bp, Artificial Sequence
  ENSG00000181450_19 (sequence is synthesized)
caaaattaagtctaaataaaacattacataatttactgtagaaagtactaaggcactaacagtttcagatgttactttaaagcagtgttgattgtcgagaataattcaaagttaaaatag

SEQ ID NO: 639995 - DNA, 120 bp, Artificial Sequence
  ENSG00000181450_20 (sequence is synthesized)
aagttaaaatagataatttagttgtatgtaaatttaaatgaatcaagagatgatgtctttttgaagcacagttacattcatgttatacttttttgcattaaaagtttttatatttttgat

SEQ ID NO: 639996 - DNA, 120 bp, Artificial Sequence
  ENSG00000181450_21 (sequence is synthesized)
tattgatataattcatatctcaaataacttgatttttattatatttattgtttatgttaaagtatgtggtcagttgttgctgcataagagctatgagaagttcttctatattagatgacc

SEQ ID NO: 639997 - DNA, 120 bp, Artificial Sequence
  ENSG00000181450_22 (sequence is synthesized)
atcatttatatgctttttcatgaatgattaagggcaccgaaatgtaacatttataaggaaaatctaagtagaaatgctttttgttgatgtataacagtgttttaagtaacacattaggta

SEQ ID NO: 639998 - DNA, 120 bp, Artificial Sequence
  ENSG00000181450_23 (sequence is synthesized)
ttcagagaagtattttgcattatagtaatagggaaacattttgaatttcagtagtaaattgttttatgagttgcacattaagataatacagtagcttttgaaatgttatttttagaatgc

SEQ ID NO: 639999 - DNA, 120 bp, Artificial Sequence
  ENSG00000181450_24 (sequence is synthesized)
aatttcttttcataaaacaaaattatttttaatgtgttaagaatattttgcattgaatgaagtatatcttgccacaataattaacctataccaccttacccaaagttgtaggtaacagat

SEQ ID NO: 640000 - DNA, 120 bp, Artificial Sequence
  ENSG00000181450_25 (sequence is synthesized)
agtaacaatacactactgggtaacagtgaaaggacacctctagtaatctcttttcccagtggcttttaatttcaaacaacttggggaggttttttttatgtgatatgctttggttttttt

SEQ ID NO: 640001 - DNA, 120 bp, Artificial Sequence
  ENSG00000181450_26 (sequence is synthesized)
gtgccttacctcatgttgaaatgtgttcccccatgttggaggcggggtctagtggaaggtgtttaggtcatgggtgtagattactcatgaatggattggtgttcttaccactgcagttag

SEQ ID NO: 640002 - DNA, 120 bp, Artificial Sequence
  ENSG00000181450_27 (sequence is synthesized)
tgtgttctctgttagttcatgtgaaagctggttgttaaaaacaaaaacaaacaaacaaaaaactgatattcctcttgctttgtcttttgccatgatacccctttgccttttattatgcat

SEQ ID NO: 640003 - DNA, 120 bp, Artificial Sequence
  ENSG00000181450_28 (sequence is synthesized)
aaaagcttcctgaggcctcatcagaagttaagcagatgttgatgtcatgcttgtatagccaacagaactgaggctaataaacctcttttctgtattaatttgccagtgttaagtattccc

SEQ ID NO: 640004 - DNA, 120 bp, Artificial Sequence
  ENSG00000181450_29 (sequence is synthesized)
ttctagcagcacaaaatggactaacatcccataggttatatttttatttttttcttttgtaaatactggacaatgatactcttatataatcttcagtataaccattataattgcccacta

SEQ ID NO: 640005 - DNA, 120 bp, Artificial Sequence
  ENSG00000181450_30 (sequence is synthesized)
taaaggagtataatgaaaggccatgtattttgaatcacgaatgactatttacaaaatgtcatactacgtttttctttgagcctgtgacccctctggcctgtaaaaacacatacatacatt

SEQ ID NO: 640006 - DNA, 120 bp, Artificial Sequence
  ENSG00000181450_31 (sequence is synthesized)
tagttttgattaacatggagttaattttataagtctgtcactctaaacataagtgttagctttaagagaattacagagcatgtaattgtgtttgagtgtaggtgtgtacttttttgagaa

SEQ ID NO: 640007 - DNA, 120 bp, Artificial Sequence
  ENSG00000181450_32 (sequence is synthesized)
gaaaacaaaaatattggaacaaaatataatttaaaaagtattggtaatttactagcaaactaggaatctcaaagattctgaaagtaaatatttattctctgctttgtattgaatttactt

SEQ ID NO: 640008 - DNA, 120 bp, Artificial Sequence
  ENSG00000181450_33 (sequence is synthesized)
ctgtaaaatcttatggctgctggctcagaatcttctcatgcaaatcctgtttttttcttgtctgttgatcatactaaacctaatgtatagttttctcattccaaagttcatgaaattttc

SEQ ID NO: 640009 - DNA, 120 bp, Artificial Sequence
  ENSG00000181450_34 (sequence is synthesized)
agttcatgaaattttctctatattcctgagaaattctaagaataactttcataaaatgtattgatgttcacaagataattttaagatgtaattctacaatatgtgtgttactacatttta

SEQ ID NO: 640010 - DNA, 120 bp, Artificial Sequence
  ENSG00000181450_35 (sequence is synthesized)
accctattttggccaatttttacttggtttttgtttccattttaatattttacataattgaatttttttcactttattgagccattttgtttagatgtacactgggaaggcttcataatt

SEQ ID NO: 640011 - DNA, 120 bp, Artificial Sequence
  ENSG00000181450_36 (sequence is synthesized)
cacaaagttgttttgacatataaatgaggtgaacaaacacaggaaagtgctaggtttcctgggggtataatagatgctctataattagcagtaaatattcttgtttaagtcactttttgg

SEQ ID NO: 640012 - DNA, 120 bp, Artificial Sequence
  ENSG00000181450_37 (sequence is synthesized)
ctacaagtaagagattagaaatattcagcataaagagatggcattaactctgcatgtaaagaaaacacatgtatacccaggctgtacaactgcctctgaaattaagaggaattgtgttta

SEQ ID NO: 640013 - DNA, 120 bp, Artificial Sequence
  ENSG00000181450_38 (sequence is synthesized)
tttcatagttatctctggtacttcactgttattttattttcacccccaactatgcgtcaatcatagccctttcccttctttgcttattatggctacagatttctcactgttctctgcagc

SEQ ID NO: 640014 - DNA, 120 bp, Artificial Sequence
  ENSG00000181450_39 (sequence is synthesized)
ccatgtaatttcatacagtattttgtaggttgtgataaggaatttgaaatttttaatatagtgaaaaattggatttaactggagagtttgaggacatttttaagttagaaatgcaccatt

SEQ ID NO: 640015 - DNA, 120 bp, Artificial Sequence
  ENSG00000181450_40 (sequence is synthesized)
tgaatcatttaattggcataattgggatgtactctacacagtttataggattaaattactgagttagtaatgtttgtatgaaagaaatgttattagattctaccacaaaatatagtaaac

SEQ ID NO: 640016 - DNA, 120 bp, Artificial Sequence
  ENSG00000181450_41 (sequence is synthesized)
atgaaatcagttagaataggtaaagcattaataatggtaggctatatatcataatcactatataaagaaacatcagaatttggaaaccccttaagcaaaaatatatcttagaaatcttaa

SEQ ID NO: 640017 - DNA, 120 bp, Artificial Sequence
  ENSG00000181450_42 (sequence is synthesized)
ggacacttaatggcaagcaaaaaagtttaaatttagttttttataaattacatatagcacaatttatgtgtacatgtagaatcttttagtttttagtgtttatgtaatatattagacaat

SEQ ID NO: 640018 - DNA, 120 bp, Artificial Sequence
  ENSG00000181450_43 (sequence is synthesized)
aataaacatttacatttatgtttacatttatatttaatttttcaaatttaatttaaatttctaaatgcttctgtggatttaaattttggaataatcttttcttccccattgatactggaa

SEQ ID NO: 640019 - DNA, 120 bp, Artificial Sequence
  ENSG00000181450_44 (sequence is synthesized)
tcttgggaagtttcttactcatatcacaatatgttttatttaaatggatgcagcttacattgcagagtttatataaataatcacataacaagccaattccttagtcattttctgtattaa

SEQ ID NO: 640020 - DNA, 120 bp, Artificial Sequence
  ENSG00000181450_45 (sequence is synthesized)
aaaactcagagatctagagagcttttggattgaaatatttccttggtgattttggatgcaaacctgatttctgtgttcacaccatggccagagatgggactgttagcaccacctgcttct

SEQ ID NO: 640021 - DNA, 120 bp, Artificial Sequence
  ENSG00000181450_46 (sequence is synthesized)
ttaatgtcgtccatatgatcagcatcagcaccagaaactccaggtgtcccaaacttaaagtgaaagccatagagtcctttggtgactcccatgttctgtgctggttctagaacatgctgg

SEQ ID NO: 640022 - DNA, 120 bp, Artificial Sequence
  ENSG00000181450_47 (sequence is synthesized)
taaatatcagagtttctatgcttatggctgataagtagacatttttaaaaatcataaaaactgtattttctatatagttcagctaagtttatgaaaaagatgcagactcagtatttggag

SEQ ID NO: 640023 - DNA, 120 bp, Artificial Sequence
  ENSG00000181450_48 (sequence is synthesized)
cattgctatcgctccatgatgtgtttaaaaattatttttaaattgacaaaattttatatctacatatatatatatcttgtaacacatgatgtttgaaatgcttaattctagccaattaaa

SEQ ID NO: 640024 - DNA, 120 bp, Artificial Sequence
  ENSG00000181450_49 (sequence is synthesized)
aatgctttacctcaatagttatttttattgtgagaaaggtcaacatggtcttggcacttaaaaaaaaaaaaacaatatattctcaataactgtattcactctgcactacaataggtctct

SEQ ID NO: 640025 - DNA, 120 bp, Artificial Sequence
  ENSG00000181450_50 (sequence is synthesized)
tgaactaattcctcctagctaacaggcattgtttatcatttaacagataattctctaagcccccttctcctaaaacttcagcatctcttaaccttctttctagtctctacttttatgaga

SEQ ID NO: 640026 - DNA, 120 bp, Artificial Sequence
  ENSG00000181450_51 (sequence is synthesized)
tcaacttgtttagattccacgtgagtgagaccatgaggtattcatctttctgtgttctgctccattggtctatttatctgtttttaatgccagtattggactgtttcagttactgtagct

SEQ ID NO: 640027 - DNA, 120 bp, Artificial Sequence
  ENSG00000181450_52 (sequence is synthesized)
ttgcagtatatttgactgtcaagtagtgcagtgcttccaaccttcagagtcttttactgtactatatgaatttttgtgttttttttgtgaaaaattttattgatattttgatagacatta

SEQ ID NO: 640028 - DNA, 120 bp, Artificial Sequence
  ENSG00000181450_53 (sequence is synthesized)
tgttaaatatatacatcattttgtgtaacatagactttttagcaatattaatttggccaatttatgaataagggataacttttcatttatttatgtttaattttatacctcagttttctt

SEQ ID NO: 640029 - DNA, 120 bp, Artificial Sequence
  ENSG00000181450_54 (sequence is synthesized)
tagcttttaatgtagagatctttaacatttttgaataattttatttggaagtaaactttctgtaactattgcaggtgtcaattgttttctttatttctttttcagatagtttgttgttag

SEQ ID NO: 640030 - DNA, 120 bp, Artificial Sequence
  ENSG00000181450_55 (sequence is synthesized)
tgtatagaaatgctactgacccttatatcttgattttgtatcctgcaactttagtgaatttattctaagtatttttaaagttttctatttataagactatgatatctgcaaacagggaca

SEQ ID NO: 640031 - DNA, 120 bp, Artificial Sequence
  ENSG00000181450_56 (sequence is synthesized)
attattttctttctttccaatttggttgtctttggttttgttttctaatttctctggcctggaaattcagtagcatgttaaataagagtgatgaagttagatatatttgccttactataa

SEQ ID NO: 640032 - DNA, 120 bp, Artificial Sequence
  ENSG00000181450_57 (sequence is synthesized)
ctcttagaaaaaaggcttacaacttttgaaggtttagcatgatgtcagatgtccatttgtcatatatggcctttattggcttgaggtatgtatgttctatatgtaatttgttttgagatt

SEQ ID NO: 640033 - DNA, 120 bp, Artificial Sequence
  ENSG00000181450_58 (sequence is synthesized)
ttgtcataaagtaatgttgaattttctaaaattctttttctgcattcacttaaaagttataattggttctgagatccttcatctttctcagaatctaggaggatgcatctgtacctagag

SEQ ID NO: 640034 - DNA, 120 bp, Artificial Sequence
  ENSG00000181450_59 (sequence is synthesized)
gaggacacaaaggcatcatatgttacattctcgtgacatataatgtctactgcttataatgtctactgtgagtttctgactccccaaatgaaattgaggcccagaaactttcaactgctt

SEQ ID NO: 640035 - DNA, 120 bp, Artificial Sequence
  ENSG00000181450_60 (sequence is synthesized)
tgttcgttgaataatgccaagtgtctggaaatgtgactattcagattaaatgcttaatgtgtgtgtgttgactaaataaatctcaaccagaaccttctcagatattttgttgaacgtggg

SEQ ID NO: 640036 - DNA, 120 bp, Artificial Sequence
  ENSG00000181450_61 (sequence is synthesized)
ttttgttgttttgttttgttttgtttttgttgttgttgttgttgttgtttaccagcaggggacccctgttttgtctatgtcaagaacaaagaccaggcaaaagaaatgtcaagccgcatt

SEQ ID NO: 640037 - DNA, 120 bp, Artificial Sequence
  ENSG00000181450_62 (sequence is synthesized)
tcaagccgcatttacaaatgcaaaaatggacttgtttttgatatgcttttcccaacaataagggacatgagtcattggggcatgttacagagagtttcagtaaaattcagaaaaaaataa

SEQ ID NO: 640038 - DNA, 120 bp, Artificial Sequence
  ENSG00000181450_63 (sequence is synthesized)
taaatatgaacagccacagcatgcccagaagcctttttatggagccaggcatggttgacctgctttccatgtctcaaaacattagtccctacaagaaccctatgaggtttatcttctttt

SEQ ID NO: 640039 - DNA, 120 bp, Artificial Sequence
  ENSG00000181450_64 (sequence is synthesized)
cacccattttgagagaagaaaagttcagctcagagagctgcaggaacattggggacatctccaagtcacagccaataggtggcagtcatcagtgtgtcttggaagggacaaacattgagc

SEQ ID NO: 640040 - DNA, 120 bp, Artificial Sequence
  ENSG00000181450_65 (sequence is synthesized)
ttctgaacagctactccagaaactatggtgctgtggtgaagtcctggttaggagcctaggaaaatggtgaaggaaaagatggtcccagcctgcaaagctgaagtcaggaacccaccagga

SEQ ID NO: 640041 - DNA, 120 bp, Artificial Sequence
  ENSG00000181450_66 (sequence is synthesized)
tctcccttctccctagcctggtggtccacatcatgcagatttactctagattcagcttagactcatttttatactactcgggggacaaggagggaactacagtcagtaacagcagcatga

SEQ ID NO: 640042 - DNA, 120 bp, Artificial Sequence
  ENSG00000181450_67 (sequence is synthesized)
gcctcaggtgctttggggattgaaattcagaccaggaaattccaatacatcagtgcatgtggaggacatgagtatttaaggagaaggttctaggcttccgaagtaaaattggatgtggag

SEQ ID NO: 640043 - DNA, 120 bp, Artificial Sequence
  ENSG00000181450_68 (sequence is synthesized)
gttggggattgattcaaacattaatactttcaagcgtttctatggtatttgtcagctgtggagcaacagcacacatctgtattaatagcctgtgttaagagattactgtgaatcctgaaa

SEQ ID NO: 640044 - DNA, 120 bp, Artificial Sequence
  ENSG00000181450_69 (sequence is synthesized)
aacatcctcattgtagagatgagaaaacacaggcttttgcacatccaatgtctccttaaagcatgtggttcagaattgagaacgtgcagagtgagagtggtatgaattttcctgtaagct

SEQ ID NO: 640045 - DNA, 120 bp, Artificial Sequence
  ENSG00000181450_70 (sequence is synthesized)
acctgaagttctgtttgctgtcatgtggaagaaaagagccttggagaagttttatttttttctgtttggaaagaatacacagagcaagatgatttacaataaaccttttgacctaacgca

SEQ ID NO: 640046 - DNA, 120 bp, Artificial Sequence
  ENSG00000181450_71 (sequence is synthesized)
atgttgcccaggctggtcttgaactccttccctcaagtgattcttctgcctaatcctcccaaagttcttagattacagggactactggcattcagtgatgtggtcatagaattctctcca

SEQ ID NO: 640047 - DNA, 120 bp, Artificial Sequence
  ENSG00000181450_72 (sequence is synthesized)
ctgcctcttgagttcatggttcaccacttccagcctggtgacttggtgctgattaaaacttggaaagaagacaagctccacccaagttgggaagctccctatcaagtgctcctgaccact

SEQ ID NO: 640048 - DNA, 120 bp, Artificial Sequence
  ENSG00000181450_73 (sequence is synthesized)
aagatggctggatgtgcaaacagctgaacaaaggtggactcactacactcaagtcaagggactggtaaaagggaccccagaaggcaaggaaaaagaccagtggaaagtgcatgggtcacc

SEQ ID NO: 640049 - DNA, 120 bp, Artificial Sequence
  ENSG00000181458_0 (sequence is synthesized)
gaagcacatctggacagctgtgcggcctcctcgcgggccgacgtcagccgagcacgtcccccacgtcctctccttctcgccacttattatttattcgttttcccaaagaagcgactaggg

SEQ ID NO: 640050 - DNA, 120 bp, Artificial Sequence
  ENSG00000181458_1 (sequence is synthesized)
acccaagtttaaaaattcctccccccacccaatgcgagacgtggccagatcccatccaacacacggtttaattttcatggggctctgggatcaaaagaacagaaacagcaacaacaaaag

SEQ ID NO: 640051 - DNA, 120 bp, Artificial Sequence
  ENSG00000181458_2 (sequence is synthesized)
cccagccgctgtctgattttaagctggcaaagtgggaaaaataaagtgttgagtaaacagaccaagttggatcatggggaatttcagaggtcatgccctccctggaaccttcttttttat

SEQ ID NO: 640052 - DNA, 120 bp, Artificial Sequence
  ENSG00000181458_3 (sequence is synthesized)
tattggtctttggtggtgtacaaagagtattctgaagtatatctgcaaaaagcaaaagcgaacctgctatcttggttccaaaacattattctatcgattggaaattttggagggaattac

SEQ ID NO: 640053 - DNA, 120 bp, Artificial Sequence
  ENSG00000181458_4 (sequence is synthesized)
aatagttggcatggctttaactggcatggctggggagcagtttattcctggagggccccatctgatgttatatgactataaacaaggtcactggaatcaactcctgggctggcatcattt

SEQ ID NO: 640054 - DNA, 120 bp, Artificial Sequence
  ENSG00000181458_5 (sequence is synthesized)
caccatgtatttcttctttgggctgttgggtgtggcagatatcttatgtttcaccatcagttcacttcctgtgtccttaaccaagttaatgttgtcaaatgccttatttgtggaggcctt

SEQ ID NO: 640055 - DNA, 120 bp, Artificial Sequence
  ENSG00000181458_6 (sequence is synthesized)
tacaaccacactcatggccgggaaatgctggacatctttgtgcaccagctgctggttttggtcgtctttctgacaggcctcgttgccttcctagagttccttgttcggaacaatgtactt

SEQ ID NO: 640056 - DNA, 120 bp, Artificial Sequence
  ENSG00000181458_7 (sequence is synthesized)
ctggagctattgcggtcaagtctcattctgcttcaggggagctggttctttcagattggatttgtcctgtatccccccagtggaggtcctgcatgggatctgatggatcatgaaaatatt

SEQ ID NO: 640057 - DNA, 120 bp, Artificial Sequence
  ENSG00000181458_8 (sequence is synthesized)
ttgtttctcaccatatgcttttgttggcattatgcagtaaccattgtcatcgttggaatgaattatgctttcattacctggttggttaaatctagacttaagaggctctgctcctcagaa

SEQ ID NO: 640058 - DNA, 120 bp, Artificial Sequence
  ENSG00000181458_9 (sequence is synthesized)
gttggacttctgaaaaatgctgaacgagaacaagaatcagaagaagaaatgtgactttgatgagcttccagtttttctagataaaccttttcttttttacattgttcttggttttgtttc

SEQ ID NO: 640059 - DNA, 120 bp, Artificial Sequence
  ENSG00000181458_10 (sequence is synthesized)
tcgatcttttgtttggagaacagctggctaaggatgactctaagtgtactgtttgcatttccaatttggttaaagtatttgaatttaaatattttctttttagctttgaaaatattttgg

SEQ ID NO: 640060 - DNA, 120 bp, Artificial Sequence
  ENSG00000181458_11 (sequence is synthesized)
gtgatactttcattttgcacatcatgcacatcatggtattcaggggctagagtgatttttttccagattatctaaagttggatgcccacactatgaaagaaatatttgttttatttgcct

SEQ ID NO: 640061 - DNA, 120 bp, Artificial Sequence
  ENSG00000181458_12 (sequence is synthesized)
tatagatatgctcaaggttactgggcttgctactatttgtaactccttgaccatggaattatacttgtttatcttgttgctgcaatgagaaataaatgaatgtatgtattttggtgcaga

SEQ ID NO: 640062 - DNA, 120 bp, Artificial Sequence
  ENSG00000181458_13 (sequence is synthesized)
tgggaaaaataaagtgttgagtaaacagaccaagttggggtgctatgggccaggtttctgaagttgggtggaggtggaggccaccggcagtgagtacaacgcccaggggaagcatgtgag

SEQ ID NO: 640063 - DNA, 120 bp, Artificial Sequence
  ENSG00000181458_14 (sequence is synthesized)
tgggaggaagaaaagagagttttctggagctgttgcaatgtgtatgctggtgaaatctacttgagcattaagcagtatctcccagcattgttagctactgagtggcacatcttcagtacg

SEQ ID NO: 640064 - DNA, 120 bp, Artificial Sequence
  ENSG00000181458_15 (sequence is synthesized)
catgattcgtgggggactcaggcagaggtaaaagtgtgaaacttttcagcattacctaagaagcaaaggctcaattttggctgcttcattcttatctcttctgccacagttctaacgtgc

SEQ ID NO: 640065 - DNA, 120 bp, Artificial Sequence
  ENSG00000181458_16 (sequence is synthesized)
cctcatgtcagctcccctccagagccaaaagaagactactgtctcttcctgtttcaaaacgcttcatacccctaatgggcctcttatccacttatagtactctggatactggacactcca

SEQ ID NO: 640066 - DNA, 120 bp, Artificial Sequence
  ENSG00000181458_17 (sequence is synthesized)
ttttttattttccaaccttcccctctacccccaacacataatatcctaatctttgtgaccatgcagttccctccacctggcatattcacattaaatgcacgtcttttctatgaaaacttc

SEQ ID NO: 640067 - DNA, 120 bp, Artificial Sequence
  ENSG00000181458_18 (sequence is synthesized)
tgtggtgactctagctcttgctcatctccctttaagagtttttgttttttttttcaaatacaccacaaaagattttattatgaaaaacatatgggtaaaatgtagcaactatgcggttta

SEQ ID NO: 640068 - DNA, 120 bp, Artificial Sequence
  ENSG00000181458_19 (sequence is synthesized)
caaaatgttctattattgcataaaactatctttggtctatcaccttctaaaacttcttacactctttcttggtgttaggtcaaatctgcaaatgctttatctgttctccatatcattaga

SEQ ID NO: 640069 - DNA, 120 bp, Artificial Sequence
  ENSG00000181458_20 (sequence is synthesized)
gctccatcttccacaaatattttaagatagaccttccctccacaatcattactcccacagtcttaatgtaaccagtgaacatggacagcagccgtccaatatacattcacattatcaaaa

SEQ ID NO: 640070 - DNA, 120 bp, Artificial Sequence
  ENSG00000181458_21 (sequence is synthesized)
catgatggaagctgtagatatgcctaaatgtccacgtgagtacatattttttctagtagagtccttgattcttttttttaattttttttgccaacaagtattgtttactgcacatatata

SEQ ID NO: 640071 - DNA, 120 bp, Artificial Sequence
  ENSG00000181458_22 (sequence is synthesized)
aagatgatttaatattgaaaaatttattaattaaatgcaccctaatgataggtccagtttcttatgattaagaaacaccataaggtgatcttaatagctacttaagaaacattcgataca

SEQ ID NO: 640072 - DNA, 120 bp, Artificial Sequence
  ENSG00000181458_23 (sequence is synthesized)
tcttaatagctacttaagaaacattcgatacaatttaaactgatttgtttacctcttagaaaacaagaatgaagtttttgtatgataagcaatattctttttttaaaaattttattatta

SEQ ID NO: 640073 - DNA, 120 bp, Artificial Sequence
  ENSG00000181458_24 (sequence is synthesized)
aatttttacagcccgtcgtcttcaccatgcattttaacaattgggatctctcctgtgatgttcactattaggtcatgtgggttggttaaatctagacttaagaggctctgctcctcagaa

SEQ ID NO: 640074 - DNA, 120 bp, Artificial Sequence
  ENSG00000181458_25 (sequence is synthesized)
taaagtgttgagtaaacagaccaagttggttctaacgtgcctgatctactgagaccaaggatgaccaatgactcagaagggaaaatgggatttaaacacccaaagatcatggggaatttc

SEQ ID NO: 640075 - DNA, 120 bp, Artificial Sequence
  ENSG00000181467_0 (sequence is synthesized)
agtagaggctgtgggagagagcgcgatgggccgcggcggtgggcgcacgttccgcggggactcatgccacgcgcgtcccggcccgacgcgcaattagcagccacctccgcagcccgccgc

SEQ ID NO: 640076 - DNA, 120 bp, Artificial Sequence
  ENSG00000181467_1 (sequence is synthesized)
caccgcctccctgccctcccgggctgccgcagctaggagctccagccgtcgcctcgcgcaggctgcgggcattgtcctctcggttcgccgcccgggctgctgctgccgccgcggactgct

SEQ ID NO: 640077 - DNA, 120 bp, Artificial Sequence
  ENSG00000181467_2 (sequence is synthesized)
gcggggcccggacccgcaccccagggatacgctgccgccgccgccggccggcccggcgcccggcctccgttcggtggtttccgccctgcgttctctgggttgctctctcctgggtttttc

SEQ ID NO: 640078 - DNA, 120 bp, Artificial Sequence
  ENSG00000181467_3 (sequence is synthesized)
ctgcgtagctgaggaaggggaagagaagtccagccgccaagcccagccttccccggcgcgcagccccgacggggccgcggcaggcgcggcgagagcgctgacggagccatgagagagtac

SEQ ID NO: 640079 - DNA, 120 bp, Artificial Sequence
  ENSG00000181467_4 (sequence is synthesized)
aaagtggtggtgctgggctcgggcggcgtgggcaagtccgcgctcaccgtgcagttcgtgacgggctccttcatcgagaagtacgacccgaccatcgaagacttttaccgcaaggagatt

SEQ ID NO: 640080 - DNA, 120 bp, Artificial Sequence
  ENSG00000181467_5 (sequence is synthesized)
gaggtggactcgtcgccgtcggtgctggagatcctggatacggcgggcaccgagcagttcgcgtccatgcgggacctgtacatcaagaacggccagggcttcatcctggtctacagcctc

SEQ ID NO: 640081 - DNA, 120 bp, Artificial Sequence
  ENSG00000181467_6 (sequence is synthesized)
gtcaaccagcagagcttccaggacatcaagcccatgcgggaccagatcatccgcgtgaagcggtacgagcgcgtgcccatgatcctggtgggcaacaaggtggacctggagggtgagcgc

SEQ ID NO: 640082 - DNA, 120 bp, Artificial Sequence
  ENSG00000181467_7 (sequence is synthesized)
gaggtctcgtacggggagggcaaggccctggctgaggagtggagctgccccttcatggagacgtcggccaaaaacaaagcctcggtagacgagctatttgccgagatcgtgcggcagatg

SEQ ID NO: 640083 - DNA, 120 bp, Artificial Sequence
  ENSG00000181467_8 (sequence is synthesized)
aactacgcggcgcagcccaacggcgatgagggctgctgctcggcctgcgtgatcctctgaggcggccaccgcgcgccggccgcgctctgcgcacaaaagccaaacgcatccgactctcta

SEQ ID NO: 640084 - DNA, 120 bp, Artificial Sequence
  ENSG00000181467_9 (sequence is synthesized)
aatgtgatttatttcttgctttgagattggagaccactttgcattggccagggtgtcttgggagcccggctggcctccgcggccggcgtcccctgcctccaccctgtgcccgagggggtg

SEQ ID NO: 640085 - DNA, 120 bp, Artificial Sequence
  ENSG00000181467_10 (sequence is synthesized)
tccggtcctgcccatccgatactctggtggaaatgtggctctttgcagcatgtacgtttctccctgattttggttgatgcatatttccccgtttaagtagccgttagggcgcagtatcgg

SEQ ID NO: 640086 - DNA, 120 bp, Artificial Sequence
  ENSG00000181467_11 (sequence is synthesized)
tcggcagcttgacacccaccaagcaaaagtttcagcctggaaaaaaaatgggggggaagggtggatgaaaaggagggagagaaggtggaaatggtttttttttttttttttctattttct

SEQ ID NO: 640087 - DNA, 120 bp, Artificial Sequence
  ENSG00000181467_12 (sequence is synthesized)
ttttttttttttttttttttggtcaacagccgtttttctagttccaagttttaaatacatggaaggaagtccgggagaaccatatgaaggagcaggaggagaggaagaaactttttttcc

SEQ ID NO: 640088 - DNA, 120 bp, Artificial Sequence
  ENSG00000181467_13 (sequence is synthesized)
ttcttttccaggagtagctggaaattaagatcgggttccttttctgccagcttggaagggcaaccccatgactgattgcgattctgaggatgtctatgcaaagttggattcttgttacag

SEQ ID NO: 640089 - DNA, 120 bp, Artificial Sequence
  ENSG00000181467_14 (sequence is synthesized)
tgtatccaatctgaagtattgcacatctgaactgggactgttaacactgatgccaatacagtgtggggtgccagaaagtgtctgctgatatttgtggaaaaaaaatctattttgtttacc

SEQ ID NO: 640090 - DNA, 120 bp, Artificial Sequence
  ENSG00000181467_15 (sequence is synthesized)
tactgtatcaaaggggagtctgggggagaatggtagtattttttttttttatcagctgtgaaaaaaatgttacagatctgcacattttcgtgtgtactatggtgtgtgtgtgtatgtgtg

SEQ ID NO: 640091 - DNA, 120 bp, Artificial Sequence
  ENSG00000181467_16 (sequence is synthesized)
tggtgtgtgtgtgttttaagtttagccttttgtttttgttttttggttggcagtaaccgattttaatgactagcttttaaaaatacagtacaaagactttgtaaatgtgattcagggccc

SEQ ID NO: 640092 - DNA, 120 bp, Artificial Sequence
  ENSG00000181467_17 (sequence is synthesized)
ccagcacccctgtgtctgcagagtgccttcaaaactcagctgttccagccggtgccaacctgtgaacttcccaccatatcccagaatctgctattccccaaaccacttcccagtttcctt

SEQ ID NO: 640093 - DNA, 120 bp, Artificial Sequence
  ENSG00000181467_18 (sequence is synthesized)
tcagtaatctttctgaaggagccaggacaatagggcctgttgtttagtgaatttctttattattttcagcctttaaaatgtaatttccatctcttgcaatgaatttgtttcccttttttt

SEQ ID NO: 640094 - DNA, 120 bp, Artificial Sequence
  ENSG00000181467_19 (sequence is synthesized)
tgcttcattttgtttaaattttcaggtatttagctcccctttcatattatttttaaattttttaattacctgttgtagggtgttcctccagaagcaaagagcaaaattttactgttgtga

SEQ ID NO: 640095 - DNA, 120 bp, Artificial Sequence
  ENSG00000181467_20 (sequence is synthesized)
tgtaccaattctaactaattgtaatttttaatttcatgcgtttaatcattgtctcttcattttaagacttttaatacaaatgtcatttttaaagaaacaaacccaaaactattgtttgtg

SEQ ID NO: 640096 - DNA, 120 bp, Artificial Sequence
  ENSG00000181467_21 (sequence is synthesized)
tttctgtgtttcatattcagtgatttaatacagtatcatggctgaggtggatggggcaggtgcatgatactcttcagagctatttgtgaaattttaaagacagaagtgtctcagtgacaa

SEQ ID NO: 640097 - DNA, 120 bp, Artificial Sequence
  ENSG00000181467_22 (sequence is synthesized)
gttggatgacactactcccaactttttaaatttggagaaaaccatcaaggtcgaggaagccctgggtatggccattaccatctgattagaagatgaacaggtattttgaatctgatctga

SEQ ID NO: 640098 - DNA, 120 bp, Artificial Sequence
  ENSG00000181467_23 (sequence is synthesized)
catggaacagtttacctcattgtaggtagggaacaagagaacccatctattaaaattgccttagatctgggaaagtaaccatccttctggcaaagtaggatggcacttttaagtttttct

SEQ ID NO: 640099 - DNA, 120 bp, Artificial Sequence
  ENSG00000181467_24 (sequence is synthesized)
tccttttttccctctgtttatattgcacatcaagtcaaaaacatgtttgggaaagatggttttcaattctgaagttatacctagtgatgttttttgcagtacatttgaatggattgtaga

SEQ ID NO: 640100 - DNA, 120 bp, Artificial Sequence
  ENSG00000181467_25 (sequence is synthesized)
cactgcctcaacccttttgaggttttgatttggaaatagatttaaaagaaaacaggctaagataatatccttgttctcatttacaccctgcagtttggaccacatttgacctcataagtt

SEQ ID NO: 640101 - DNA, 120 bp, Artificial Sequence
  ENSG00000181467_26 (sequence is synthesized)
tttccttttaacagtaggaggcagtgtgagctttttattttttatttttcttaaggtggtcttagtaatataacatgttcatacatatcaagagagtacttggtataccttaggtctatg

SEQ ID NO: 640102 - DNA, 120 bp, Artificial Sequence
  ENSG00000181467_27 (sequence is synthesized)
aagtgtagctgaaatctgaagagtcttgacaaagggatttacacccttgacaaaaccaaaagaaattaacaggccacaggtttctttaaagctgtgttaacatatcttgccttaaaatgt

SEQ ID NO: 640103 - DNA, 120 bp, Artificial Sequence
  ENSG00000181467_28 (sequence is synthesized)
gtgtgtgtgtttttgctttgcttttttttttttgcccaagaggcatctcagtactccagcaatggaggaagaatagagaattttgcctggcaatggtcctactgccattttttttttccc

SEQ ID NO: 640104 - DNA, 120 bp, Artificial Sequence
  ENSG00000181467_29 (sequence is synthesized)
actctgatctcacttaagtttgatatcaaacacaattgggaggcaatagtatcaatatcctaaatgtagaaattaaaagatactgtataattttatgcctttgcaaagattcgttcttgt

SEQ ID NO: 640105 - DNA, 120 bp, Artificial Sequence
  ENSG00000181467_30 (sequence is synthesized)
atttgaataaattcagttgctaaagtagatccaaagtgttaaaaatgctgaagtcatgtcaagtactgtctggagggtttttttaagaaaaggcatttggcatttaactgtctcttgttt

SEQ ID NO: 640106 - DNA, 120 bp, Artificial Sequence
  ENSG00000181467_31 (sequence is synthesized)
tatttttaagtttttggaaaccttttgacataaaatgctgccaagtatctaagaaatgtatatactgacagaagatatttgaaagtggaaaattggaaatgaaatatgttgctgggtgcg

SEQ ID NO: 640107 - DNA, 120 bp, Artificial Sequence
  ENSG00000181467_32 (sequence is synthesized)
ttaatcacctccgcccaggatttagtcacttgcaggacctctttatagtctaggatggcagagcagaagattttaatatgcttttattaagtgatgtaaaataaatgctttttggattat

SEQ ID NO: 640108 - DNA, 120 bp, Artificial Sequence
  ENSG00000181467_33 (sequence is synthesized)
caatgaaagcaattttatgtgtgcctgaagcaagaaaatagcgtttttggttttatctcatattttcttggcaaaattgagagaaattaggaacactgctatttttttcttaaaaatgtt

SEQ ID NO: 640109 - DNA, 120 bp, Artificial Sequence
  ENSG00000181467_34 (sequence is synthesized)
tttaagaatatgttcgtttctttgactattaagaaccccttgtggtattagtgtgtgaagagataagggcatttgtttcaatgaaaaagttagtgttaaaggaagtgagtcagggagggc

SEQ ID NO: 640110 - DNA, 120 bp, Artificial Sequence
  ENSG00000181467_35 (sequence is synthesized)
agtttgttgtaaggcaatcacctgtcaaaacagaaattgggtgggaaaggagtctttatcttggggagcaaaagctgacttttaaacttgacccctgctgtttttaaacagcttttcctt

SEQ ID NO: 640111 - DNA, 120 bp, Artificial Sequence
  ENSG00000181467_36 (sequence is synthesized)
ttggtctctgacagtcaatccaggttttatgttatttcaaaagggttatttttgtcctccttttttaatagcttcaggaaagttaaaggtatcatcttaggtctaacactctagtctttg

SEQ ID NO: 640112 - DNA, 120 bp, Artificial Sequence
  ENSG00000181467_37 (sequence is synthesized)
agagttacggttctttcgtagaacaatttccatgttgttaactgttgtagacttaattgaatcacattttgggaccagatgtatttggggatagaattctttaaatgtatgggacttcat

SEQ ID NO: 640113 - DNA, 120 bp, Artificial Sequence
  ENSG00000181467_38 (sequence is synthesized)
gcttcctgattatgtaatatttcctgtggttgggaatcctagaatgcctgatctattttatctgttcaggtagttttgttattgtaccctcttttgggtcatattctagtatttctcaca

SEQ ID NO: 640114 - DNA, 120 bp, Artificial Sequence
  ENSG00000181467_39 (sequence is synthesized)
gggggtatgagaaacagaaagctatatgtagcagctggtcttgagaagtagaagcatcttaactgtcataagagcatagattttttgtttttcacaacagctggaataagttcctgcatt

SEQ ID NO: 640115 - DNA, 120 bp, Artificial Sequence
  ENSG00000181467_40 (sequence is synthesized)
ataagtataaagggaaccgagatttaatttggagatcatcactgttaaaacgataccagacatttgtcacagtgtcttatttggggaaagtttgctaatatacattttgtctgtgaaaat

SEQ ID NO: 640116 - DNA, 120 bp, Artificial Sequence
  ENSG00000181467_41 (sequence is synthesized)
atagtaaattttaaaatactaatataatgtggtattcttgattacagtattttatgcagactattaggaatgattcagtgcatttaactgaacacagagctagttctaggtgagtgagat

SEQ ID NO: 640117 - DNA, 120 bp, Artificial Sequence
  ENSG00000181467_42 (sequence is synthesized)
ctttatctattaactggattttgaaggtttgagaaggctatggggatcatctggttgaaaggttctcaaacttgaccatatatcaaaatcacctggagcttaaaacatgtactgctggga

SEQ ID NO: 640118 - DNA, 120 bp, Artificial Sequence
  ENSG00000181467_43 (sequence is synthesized)
ccctcctccagtttcttacccagtgggtctcgggtagggtctcaattttcatttctaacaagtttccaagtgattgtgttattgctgttccagggaccacactttgaaaaccagtgatct

SEQ ID NO: 640119 - DNA, 120 bp, Artificial Sequence
  ENSG00000181467_44 (sequence is synthesized)
agactgaactccaaatgagtactatactgacagccacctagatattgagagacacagacttcagactcatgtcacacattttggagtgctgtctactacagttagagaataatctctatt

SEQ ID NO: 640120 - DNA, 120 bp, Artificial Sequence
  ENSG00000181467_45 (sequence is synthesized)
gaaatctaagctaaagaggacatataccatttatactaagactaactgttgtgtgtgaaatagaataaacattgcaggtagtttttgatcattttcacattattacaggaacattttgac

SEQ ID NO: 640121 - DNA, 120 bp, Artificial Sequence
  ENSG00000181467_46 (sequence is synthesized)
tatggttttcaatgttaattcagaagttgactttaaatgaaaatgtggttagaatagaggcaaagcctaagtgatcagaatcaacattccccttctccccaacctaggggaaaaaaaatt

SEQ ID NO: 640122 - DNA, 120 bp, Artificial Sequence
  ENSG00000181467_47 (sequence is synthesized)
tgaaaagtatgtcttcaataaaaggggacactttatttgtcttctcttcaacattaaaaaacaaagattttaagttttcatggcaagggttctaaaaatcattgtgccagagaatttaaa

SEQ ID NO: 640123 - DNA, 120 bp, Artificial Sequence
  ENSG00000181467_48 (sequence is synthesized)
tcttcatatcatggtaagcacatgcgtatgtctgtgactcagtttcttagccagacttccaggtgttagttaattccttctcatttagttctactgtaatccattctgggaaaatgcata

SEQ ID NO: 640124 - DNA, 120 bp, Artificial Sequence
  ENSG00000181467_49 (sequence is synthesized)
ccacaaaactgtgtatcttgcagcttctttcgttatgcatcttaattccctcagaaggtcccagaactttatgttaaagatctgggtttttaaagacaatttgggggccttctaaagaaa

SEQ ID NO: 640125 - DNA, 120 bp, Artificial Sequence
  ENSG00000181467_50 (sequence is synthesized)
caatagtagatctaattacaagtagtggattgcttacttcaaatttctcttttacaatttagaaagtttagtaccagtttatagactgagggagtagtagctactatttagatgctgaga

SEQ ID NO: 640126 - DNA, 120 bp, Artificial Sequence
  ENSG00000181467_51 (sequence is synthesized)
ataatattatcatgcttgggtggggaagaaaggcccttactcaaatctccattttcatttttaatgcttcctggacttcagttattttcttgcttttgcctcaagaataataaatatttt

SEQ ID NO: 640127 - DNA, 120 bp, Artificial Sequence
  ENSG00000181467_52 (sequence is synthesized)
tggttaaaattttttttgttcaaccctgttgttgttactgttattttcatagcacagtagtctacagctctctatagtagcttaatagctatttgctgaatgaatggaacatggagtgtt

SEQ ID NO: 640128 - DNA, 120 bp, Artificial Sequence
  ENSG00000181467_53 (sequence is synthesized)
acatctgaaactattctattagaaggtgaaaagtgttgattgaagaatggtaggattttatcttccctacccatgatagatttattaagattgtctttggagctatgtcttccattccaa

SEQ ID NO: 640129 - DNA, 120 bp, Artificial Sequence
  ENSG00000181467_54 (sequence is synthesized)
ctatacagaaataaacttttttaaagtttagtttgcccatctgataaaggaacattcctgtatgctattctaaggttcattttcaacaaaagttacagacatttatggttgatagtttga

SEQ ID NO: 640130 - DNA, 120 bp, Artificial Sequence
  ENSG00000181467_55 (sequence is synthesized)
gatctatgacagttttagggagctccatattcaaaaggctattgctggtgatagtacaatgaaacactgacttcagtatatttttatcttggctttcattttacggttatttctactact

SEQ ID NO: 640131 - DNA, 120 bp, Artificial Sequence
  ENSG00000181467_56 (sequence is synthesized)
gttaatatggactaatacttgattttgtgaacctgttttaattttagggttatatttatgttggaataatatattttaaaagtgtcctatactatgaatttatttgccatatataagaca

SEQ ID NO: 640132 - DNA, 120 bp, Artificial Sequence
  ENSG00000181467_57 (sequence is synthesized)
atcagaattatctggtagtttattctaatcctggttaataatcattaggactaaactatttacattaaagaaggaaaaaacaatgagatgataattttttttttctttgagacggagtct

SEQ ID NO: 640133 - DNA, 79 bp, Artificial Sequence
  ENSG00000181467_58 (sequence is synthesized)
agtagctgggactacgggcgccctcatttcaccatactggccaggctggtcgtgaactcctgaccttgtgatctgccca

SEQ ID NO: 640134 - DNA, 60 bp, Artificial Sequence
  ENSG00000181467_59 (sequence is synthesized)
ggcgttcaggatggtcttgaacttctgaccttgtgctccacccacctcagcctcccaaga

SEQ ID NO: 640135 - DNA, 83 bp, Artificial Sequence
  ENSG00000181467_60 (sequence is synthesized)
tagagatggggtttcactacgttggtcaggatggtcttgaacttctgaccttgtgctccacccacctcagcctcccaagagat

SEQ ID NO: 640136 - DNA, 84 bp, Artificial Sequence
  ENSG00000181467_61 (sequence is synthesized)
gagatcttccctcctcagccctccagccaggagtgacaatttctaaagccttaattagtgaaatggtttgttttgagaagcaga

SEQ ID NO: 640137 - DNA, 120 bp, Artificial Sequence
  ENSG00000181467_62 (sequence is synthesized)
aaagccttaattagtgaaatggtttgttttgagaagcagaaatgactaagtggtatagacatgcaggaaaagcaaaatgggccttatggctattgaaattatgagtgttgatctgttcta

SEQ ID NO: 640138 - DNA, 120 bp, Artificial Sequence
  ENSG00000181467_63 (sequence is synthesized)
taaattggaggagacagctatttgcattctttcttatccagttgactaaacttactcattttaaaatgaattatcttgcaaaattatgtgaggttaagtttgtcagaggattgaaaacgt

SEQ ID NO: 640139 - DNA, 120 bp, Artificial Sequence
  ENSG00000181467_64 (sequence is synthesized)
ggttggtttatttgtggtaattgtgaaaaattgcaaaggtagcaaaattttttaaaaaatggaaaagagaaagattattgatgccttgtgaatacaggtgtccccaaaaggcctgagacc

SEQ ID NO: 640140 - DNA, 120 bp, Artificial Sequence
  ENSG00000181467_65 (sequence is synthesized)
aaccttaattatcaagaatatggttgcagtggaaattggtaaacagctgaaattgattcattgattattcaacacttattgagcacatactactattattaatagctgtactgcgagcgc

SEQ ID NO: 640141 - DNA, 120 bp, Artificial Sequence
  ENSG00000181467_66 (sequence is synthesized)
taatacttaaaagaggaagtcaggtgaaggcgcaacagctttatgctctttttcactataatctgtgaaatagtgtatattaaacaataatagtatatggaaaagcacatctacatgtgt

SEQ ID NO: 640142 - DNA, 120 bp, Artificial Sequence
  ENSG00000181467_67 (sequence is synthesized)
catcagttataatactgtggggctgtttggcagacaatagagtagataaatttattgaacattgggcctttgaaaggtatgtggaaattgtaaataaaaatggattccatgaatttcaaa

SEQ ID NO: 640143 - DNA, 120 bp, Artificial Sequence
  ENSG00000181472_0 (sequence is synthesized)
cggagacaccgaccgcggcggcagcagcagcagcagcagcgagaggcagaggcggcggcggcggggaggacagcacggccgaggctgcccagaggcgcctcctccacaccccccgccgca

SEQ ID NO: 640144 - DNA, 120 bp, Artificial Sequence
  ENSG00000181472_1 (sequence is synthesized)
cgcagcagcaccggcgacagattttttaaaaaatggatttggccaaccatggacttattctactgcaacagttaaacgctcagcgagagtttggtttcctgtgtgactgcacggttgcaa

SEQ ID NO: 640145 - DNA, 120 bp, Artificial Sequence
  ENSG00000181472_2 (sequence is synthesized)
tcggcgatgtatacttcaaggcacacaaatcagttcttgcttcattctccaattactttaagatgttgtttgtccatcagaccagtgagtgtgtccgcttgaaaccaactgacatacagc

SEQ ID NO: 640146 - DNA, 120 bp, Artificial Sequence
  ENSG00000181472_3 (sequence is synthesized)
ccgacatcttcagctatctcttacacttgatgtacactgggaagatggcgcctcagctcatcgacccggttcgattagaacagggcatcaagtttctgcacgcctacccgctcattcagg

SEQ ID NO: 640147 - DNA, 120 bp, Artificial Sequence
  ENSG00000181472_4 (sequence is synthesized)
aagccagcctcgccagccagggagccttttctcaccctgaccaagttttcccactggcttcttcattgtatggcattcagattgcagatcatcagttgagacaagccaccaagattgctt

SEQ ID NO: 640148 - DNA, 120 bp, Artificial Sequence
  ENSG00000181472_5 (sequence is synthesized)
cagcacctgaaaaactcgggcgagatccacggccacagacctccaggataagccaggagcaggtccctgaggcctcacagctctcccagctgacttcaaatctggcccaggtgaatcgga

SEQ ID NO: 640149 - DNA, 120 bp, Artificial Sequence
  ENSG00000181472_6 (sequence is synthesized)
caaatatgactccctcagaccccctgcagacctcgctgtctccagaacttgtttccactcctgttcctccccctcctcccggggaggagaccaatctggaagcatcttcctccgatgagc

SEQ ID NO: 640150 - DNA, 120 bp, Artificial Sequence
  ENSG00000181472_7 (sequence is synthesized)
agcctgcgtccctcacaatagcccacgtcaagccaagcatcatgaagaggaatgggagctttccaaagtactatgcctgccacctgtgtggacggcgcttcactctccggagcagcttac

SEQ ID NO: 640151 - DNA, 120 bp, Artificial Sequence
  ENSG00000181472_8 (sequence is synthesized)
gtgaacacctccagatccacacaggagtacctttcacatctagccaacagggagaaagtcgcgtccccctgactctctgtagcaatgcagctgacctcgggaaagatgccatggaagtgc

SEQ ID NO: 640152 - DNA, 120 bp, Artificial Sequence
  ENSG00000181472_9 (sequence is synthesized)
ctgaagccgggatgataagtgacagtgagctgcagcacatctctgattctcccatcatcgatgggcagcagcagtcggaaaccccacccccctcagacattgctgacattgacaacctgg

SEQ ID NO: 640153 - DNA, 120 bp, Artificial Sequence
  ENSG00000181472_10 (sequence is synthesized)
agcaggccgaccaggagagggaggtgaagaggcggaagtacgagtgcacaatatgtggacgcaaatttatccagaaaagccactggagggaacacatgtacatacacaccgggaagcctt

SEQ ID NO: 640154 - DNA, 120 bp, Artificial Sequence
  ENSG00000181472_11 (sequence is synthesized)
tcaagtgcagcacttgtgacaaaagcttttgcagggccaaccaggctgcccgccacgtgtgcctcaaccagagcatcgacacttacaccatggtggacaaacagactctggaactctgca

SEQ ID NO: 640155 - DNA, 120 bp, Artificial Sequence
  ENSG00000181472_12 (sequence is synthesized)
taaacattcatgccaaaaccagaactcggatgtttttgccctagacgaagggcgatccattctcctgggcagtggggactcggaagtaacggagcctgaccacccagtgttagcttccat

SEQ ID NO: 640156 - DNA, 120 bp, Artificial Sequence
  ENSG00000181472_13 (sequence is synthesized)
caaaaaggaacaagaaaccgtcttactagactgaatgtcacttatctttttaaaaaactctcatttttacaaagactatcttccctcccttccctgaattcagaactgtagttctccatg

SEQ ID NO: 640157 - DNA, 120 bp, Artificial Sequence
  ENSG00000181472_14 (sequence is synthesized)
gcatgatacaaacaggtccttgttctcttctcctcttccccttttccacatcccagccccacctctgtaaaggctttgtgcattataaacctggaatgtatcgactttctttcaggggat

SEQ ID NO: 640158 - DNA, 120 bp, Artificial Sequence
  ENSG00000181472_15 (sequence is synthesized)
attggaaagataatggtcattatacttataaactcaaattttgagaggttttagattattcagaagcatacttggaactaatgaagggtatataataaaacaactggaatccaatttggt

SEQ ID NO: 640159 - DNA, 120 bp, Artificial Sequence
  ENSG00000181472_16 (sequence is synthesized)
aagctaaaattatgactttccctgggtaaaaagtcttctcagaaaaacaatgtcagaaaataacagcgtgctgcttagaaatacggctgggctctgtactatgcaaaatctagaaagtgt

SEQ ID NO: 640160 - DNA, 120 bp, Artificial Sequence
  ENSG00000181472_17 (sequence is synthesized)
ggggaaactttaaacccaagaaaacgttcttagtattcatcctccaggtgtcttacttcagaatgcatcctttgagattatgtccacttaagagaaatcatcagttaagaaatctacttt

SEQ ID NO: 640161 - DNA, 120 bp, Artificial Sequence
  ENSG00000181472_18 (sequence is synthesized)
aacaaaacaaaaaggagaaaaagtaataatgtgatggcaatcttaatttttgggtacaacatgacaagctgtgagtttgtgtgtttgtaagagaaaaatgtgtgggtacttgctaataaa

SEQ ID NO: 640162 - DNA, 120 bp, Artificial Sequence
  ENSG00000181472_19 (sequence is synthesized)
caggtgaattaatgcacatccttatctcattgctggcttctttccaagttgagcaacaacaaaatgctgtatttgagtttctgacaaatttgttttaaaaatcaaatttgaatgtactat

SEQ ID NO: 640163 - DNA, 120 bp, Artificial Sequence
  ENSG00000181472_20 (sequence is synthesized)
tctataaattgcctttctgaatagaacatgacatgccattttctagcagctgccagtgataatttgttttacactaacttttaaatcagtgtgtgtactgcagggaaaaggatataggaa

SEQ ID NO: 640164 - DNA, 120 bp, Artificial Sequence
  ENSG00000181472_21 (sequence is synthesized)
tactcatcttacaggggaatttgtgaccagaagatgtagtaacttcaatgactgaaagtcaatgctgatagtttactggcaacattaattgaagcatcaaaaataaatggcaaagagaaa

SEQ ID NO: 640165 - DNA, 120 bp, Artificial Sequence
  ENSG00000181472_22 (sequence is synthesized)
tcaggacaaaaaatctaattgctgtttgggaaaaaacttgattttgatgtttattctccaggtttttggttgtttttttttctttcttctttcttaatgcctgaaattttctccattggc

SEQ ID NO: 640166 - DNA, 120 bp, Artificial Sequence
  ENSG00000181472_23 (sequence is synthesized)
ccgaaagcagtaaaaattgttcattaatcttccgttaggccaataaaagaagggcctcacaagacaaaacaggagccagaagtaaggactgaaggagaaggggagaatagctaatagcta

SEQ ID NO: 640167 - DNA, 120 bp, Artificial Sequence
  ENSG00000181472_24 (sequence is synthesized)
tagtatatgtatatgttaaaaactgaatatcccatcatcctatttcatgtatagttgagttctcaaatttgtaagtttttatacatcctttcattgaataaacgtttaattaaatgagta

SEQ ID NO: 640168 - DNA, 120 bp, Artificial Sequence
  ENSG00000181481_0 (sequence is synthesized)
aaccccgacgtccgcgccccggccgcctgttggccatggcgggcctgggcctgggctccgccgttcccgtgtggctggccgaggacgacctcggctgcatcatctgccaggggctgctgg

SEQ ID NO: 640169 - DNA, 120 bp, Artificial Sequence
  ENSG00000181481_1 (sequence is synthesized)
cagcttctgccgccactgcctggaggccctgtggggcgcccgcgacgcccgccgctgggcctgccccacttgccgccagggcgccgcgcagcagccgcacctgcggaagaacacgctact

SEQ ID NO: 640170 - DNA, 120 bp, Artificial Sequence
  ENSG00000181481_2 (sequence is synthesized)
agccgcacctgcggaagaacacgctactgcaggacctggccgacaagtaccgccgcgccgcacgcgagatacaggcgggctccgaccctgcccactgcccctgcccgggctccagttccc

SEQ ID NO: 640171 - DNA, 120 bp, Artificial Sequence
  ENSG00000181481_3 (sequence is synthesized)
tctccagcgcggccgcgaggccccggcgccgcccggaactgcagcgggtggcagtagagaagagcatcacagaagttgctcaggagctgacagagctggtggaacatcttgtagacattg

SEQ ID NO: 640172 - DNA, 120 bp, Artificial Sequence
  ENSG00000181481_4 (sequence is synthesized)
tcagaagcctgcagaatcagaggcccctatcagaatctggaccagacaacgaactgagcatcctgggcaaggctttttcttctggggtggatctttccatggcttctccaaagctggtga

SEQ ID NO: 640173 - DNA, 120 bp, Artificial Sequence
  ENSG00000181481_5 (sequence is synthesized)
cttccgacacagctgcagggaaaatcagagatattctccatgacctagaagaaattcaggaaaaattacaagaaagcgtcacctggaaagaggctcctgaagcacaaatgcagggagaac

SEQ ID NO: 640174 - DNA, 120 bp, Artificial Sequence
  ENSG00000181481_6 (sequence is synthesized)
tcctggaagccccgtcttcctcctcatgcccattgcctgaccagagccaccctgcactcaggagagcttctcggtttgctcagtgggccatccatccaacctttaacttgaagagccttt

SEQ ID NO: 640175 - DNA, 120 bp, Artificial Sequence
  ENSG00000181481_7 (sequence is synthesized)
cctgcagcctggaggtgtccaaggattcccgtacagtgactgtgtctcaccgcccacaaccctatcgctggagctgtgagaggttttctaccagccaggtcttatgttcccaggccctgt

SEQ ID NO: 640176 - DNA, 120 bp, Artificial Sequence
  ENSG00000181481_8 (sequence is synthesized)
tactgggaagtggacactaggaattgcagccactgggcagttggggtggcttcctgggagatgagccgcgaccaggtcctgggaaggactatggactcttgttgtgtggaatggaagggg

SEQ ID NO: 640177 - DNA, 120 bp, Artificial Sequence
  ENSG00000181481_9 (sequence is synthesized)
actagccagctctctgcatggcacatggtcaaggaaactgtccttggctcagacagacctggggtggtgggcatctggctgaaccttgaggagggaaagcttgccttctattcagtggac

SEQ ID NO: 640178 - DNA, 120 bp, Artificial Sequence
  ENSG00000181481_10 (sequence is synthesized)
aatcaggagaagcttctgtatgagtgtaccatctctgcctcctctcctttgtaccctgccttctggctgtatggcttacatcctggaaattacctgataataaagcaagtaaaggtgtaa

SEQ ID NO: 640179 - DNA, 120 bp, Artificial Sequence
  ENSG00000181481_11 (sequence is synthesized)
ggtttcctaagggattacaacacagtggtttcctggtctctctccctgtcatcaatcagggtagtaacttgacttaagaataccactttttagaaaaattacgatagagatgggatctca

SEQ ID NO: 640180 - DNA, 73 bp, Artificial Sequence
  ENSG00000181481_12 (sequence is synthesized)
taccactttttagaaaaattacgatagagatgggatctcactaggttgcccaggctggtgtcgaattcctggt

SEQ ID NO: 640181 - DNA, 120 bp, Artificial Sequence
  ENSG00000181481_13 (sequence is synthesized)
gttaatccttttgtgtgatacaggatgaacttgggatgtttgaaccctggacattccaaataaagaataggcccctgcctggctcctgggagataacctctaagccattagaatatcttg

SEQ ID NO: 640182 - DNA, 120 bp, Artificial Sequence
  ENSG00000181481_14 (sequence is synthesized)
cctgataagagtgtttttgtttacctgtgggccttgggccatgcagtatcagcttgaccttgcaaggtcaagctgaggagactaagttagccatgtgggcagtgaagcatgccaatgtga

SEQ ID NO: 640183 - DNA, 120 bp, Artificial Sequence
  ENSG00000181481_15 (sequence is synthesized)
tcaatccctagtaaaagccctggacacctaggcatgggtgagctactctggttggtaatactctgtgcacacatcattgtagccacacatcattgctgggagaattaagcattatcctga

SEQ ID NO: 640184 - DNA, 120 bp, Artificial Sequence
  ENSG00000181481_16 (sequence is synthesized)
agactctgccaggagaggataattggaagttctcttggaccttaccttatgtgcctttcttcattgctgattttaatctgtatcctttcactgtaataaactgtaactatgagtgcaaca

SEQ ID NO: 640185 - DNA, 120 bp, Artificial Sequence
  ENSG00000181499_0 (sequence is synthesized)
gagttctgtttcatttcccctgcaggtgactgaagatgaaccctgaaaactggactcaggtaacaagctttgtccttctgggtttccccagtagccacctcatacagttcctggtgttcc

SEQ ID NO: 640186 - DNA, 120 bp, Artificial Sequence
  ENSG00000181499_1 (sequence is synthesized)
tggggttaatggtgacctacattgtaacagccacaggcaagctgctaattattgtgctcagctggatagaccaacgcctgcacatacagatgtacttcttcctgcggaatttctccttcc

SEQ ID NO: 640187 - DNA, 120 bp, Artificial Sequence
  ENSG00000181499_2 (sequence is synthesized)
tggagctgttgctggtaactgttgtggttcccaagatgcttgtcgtcatcctcacgggggatcacaccatctcatttgtcagctgcatcatccagtcctacctctacttctttctaggca

SEQ ID NO: 640188 - DNA, 120 bp, Artificial Sequence
  ENSG00000181499_3 (sequence is synthesized)
ccactgacttcttcctcttggccgtcatgtctctggatcgttacctggcaatctgccgaccactccgctatgagaccctgatgaatggccatgtctgttcccaactagtgctggcctcct

SEQ ID NO: 640189 - DNA, 120 bp, Artificial Sequence
  ENSG00000181499_4 (sequence is synthesized)
gattcctctgggtcctttgccccactgtcctcatggccagcctgcctttctgtggccccaatggtattgaccacttctttcgtgacagttggcccttgctcaggctttcttgtggggaca

SEQ ID NO: 640190 - DNA, 120 bp, Artificial Sequence
  ENSG00000181499_5 (sequence is synthesized)
cccacctgctgaaactggtggctttcatgctctctacgttggtgttactgggctcactggctctgacctcagtttcctatgcctgcattcttgccactgttctcagggcccctacagctg

SEQ ID NO: 640191 - DNA, 120 bp, Artificial Sequence
  ENSG00000181499_6 (sequence is synthesized)
ctgagcgaaggaaagcgttttccacttgcgcctcgcatcttacagtggtggtcatcatctatggcagttccatctttctctacattcgtatgtcagaggctcagtccaaactgctcaaca

SEQ ID NO: 640192 - DNA, 120 bp, Artificial Sequence
  ENSG00000181499_7 (sequence is synthesized)
aaggtgcctccgtcctgagctgcatcatcacacccctcttgaacccattcatcttcactctccgcaatgacaaggtgcagcaagcactgagagaagccttggggtggcccaggctcactg

SEQ ID NO: 640193 - DNA, 120 bp, Artificial Sequence
  ENSG00000181499_8 (sequence is synthesized)
ctgtgatgaaactgagggtcacaagtcaaaggaaatgatcttattaaatgggagattaaatgtttattgaaaattttttaaatgtgcaagaagtttaagggatgtaggcaacactgttca

SEQ ID NO: 640194 - DNA, 120 bp, Artificial Sequence
  ENSG00000181513_0 (sequence is synthesized)
ggcgagagaggacccaggtgtcctggcagtgggcgccgcggggcacacgctgggccaaggtgcaggcggccagggtgggagactgttcgccccgccctgagtactcctatcttgtttctc

SEQ ID NO: 640195 - DNA, 120 bp, Artificial Sequence
  ENSG00000181513_1 (sequence is synthesized)
cacctgttcgggagttggagatgtgcacctaaaggaggcgcatctggggacggacacatctggcactgaggccctcgccacctgcctcgccacctggcgaccctgaccccaccacactgc

SEQ ID NO: 640196 - DNA, 120 bp, Artificial Sequence
  ENSG00000181513_2 (sequence is synthesized)
cttgagagtcgctcaaaagtagggccccagggctcgcagcagcatgggcaccgagaaagaaagcccagagcccgactgccagaaacagttccaggctgcagtgagcgtcatccagaacct

SEQ ID NO: 640197 - DNA, 120 bp, Artificial Sequence
  ENSG00000181513_3 (sequence is synthesized)
gcccaagaacggttcttaccgcccctcctatgaagagatgctgcgattctacagttactacaagcaggccaccatggggccctgcctggtcccccggcccgggttctgggaccccattgg

SEQ ID NO: 640198 - DNA, 120 bp, Artificial Sequence
  ENSG00000181513_4 (sequence is synthesized)
acgatataagtgggacgcctggaacagtctgggcaagatgagcagggaggaggccatgtctgcctacatcactgaaatgaaactggtggcacagaaggtgatcgacacagtgcccctggg

SEQ ID NO: 640199 - DNA, 120 bp, Artificial Sequence
  ENSG00000181513_5 (sequence is synthesized)
tgaggtggcagaggacatgtttggttacttcgagcccctgtaccaggtgatccctgacatgccgaggcccccagagaccttcctgagaagggtcacaggttggaaagagcaggttgtgaa

SEQ ID NO: 640200 - DNA, 120 bp, Artificial Sequence
  ENSG00000181513_6 (sequence is synthesized)
tggagatgttggggctgtttcagagcctccctgcctccccaaggaaccggcacccccaagcccagagtcccattcacccagggacctggactccgaggttttctgtgattccctggagca

SEQ ID NO: 640201 - DNA, 120 bp, Artificial Sequence
  ENSG00000181513_7 (sequence is synthesized)
gcctgagctggtttggacagagcagcgggcagcatctggaggaaagcgtgatcccaggaacagccccgtgccccccacaaagaaagaggggttgcggggcagcccgccggggccccagga

SEQ ID NO: 640202 - DNA, 120 bp, Artificial Sequence
  ENSG00000181513_8 (sequence is synthesized)
gttggacgtgtggctgctggggacagttcgagcactacaggagagcatgcaggaggtgcaggcgagggtgcagagcctggagagcatgccccggccccctgagcagaggccgcagcccag

SEQ ID NO: 640203 - DNA, 120 bp, Artificial Sequence
  ENSG00000181513_9 (sequence is synthesized)
gcccagtgctcggccatggccccttgggctcccggggcccgcgctgctcttcttcctcctgtggcccttcgtcgtccagtggctcttccgaatgtttcggacccaaaagaggtgactgtc

SEQ ID NO: 640204 - DNA, 120 bp, Artificial Sequence
  ENSG00000181513_10 (sequence is synthesized)
agtggaggggtctctgcagccaactgagactatcttgctgtgccctgagccttcctagggtttagaagaacagcattcaaaattccccgtcctgtcagtgtttgccttcgcacctcctcc

SEQ ID NO: 640205 - DNA, 120 bp, Artificial Sequence
  ENSG00000181513_11 (sequence is synthesized)
cctaaagcagcgcggggggcaaataagaccccacccctccctgcagcttcacagggacgcttccttccctccccgcaaccaccccaggctcccctgggaggctgcagttgtggtacacgt

SEQ ID NO: 640206 - DNA, 120 bp, Artificial Sequence
  ENSG00000181513_12 (sequence is synthesized)
ccccggtgctgggttggccgtgactcgggggcggggcgatcgggtctcagcccctgccttccccagtctctgggtcacccgaattttcccacccctgcttctccccgaggaggttgagct

SEQ ID NO: 640207 - DNA, 120 bp, Artificial Sequence
  ENSG00000181513_13 (sequence is synthesized)
cttgagcaagttgggacttgggccggggcctggaagaatgattggctgggaggccgcgggagggaggccaggaggcccggaccagttgggaggagtgagcaggccccgggggagggggat

SEQ ID NO: 640208 - DNA, 120 bp, Artificial Sequence
  ENSG00000181513_14 (sequence is synthesized)
gagcgcagtttgctcgctttcctcccctgccggccccctccgcccccacacacactcgggacgtcttcattgaagattcacttacaaaggaatgtttcactaaataaaagaaaaccagaa

SEQ ID NO: 640209 - DNA, 62 bp, Artificial Sequence
  ENSG00000181513_15 (sequence is synthesized)
gcatgccccggccccctgagcagtctcactctgtcggtcagactggagtgaagtggcgtgaa

SEQ ID NO: 640210 - DNA, 120 bp, Artificial Sequence
  ENSG00000181513_16 (sequence is synthesized)
gccatcccacccggtctgccacagtcattcttttttatgctcagacagtcacaactttggccattcaagaccctttcataccggatcttatgttcttataacacgacctgatgaatcttt

SEQ ID NO: 640211 - DNA, 120 bp, Artificial Sequence
  ENSG00000181513_17 (sequence is synthesized)
gcggtgcgagggcggggccaggcggtggcctggaagcccggagcctcagcgctcgcccctgctctgcctaagtgtctagagagctgagtgggttgcctcggatcggccaggcctggatat

SEQ ID NO: 640212 - DNA, 120 bp, Artificial Sequence
  ENSG00000181513_18 (sequence is synthesized)
cagcgaacagatgcggatttccaccagggggcgctaggacgccacgacctttcactatgtgcaccagggggcgctgccgcccgccttggccatcccgggctgggaagtccgacccttcga

SEQ ID NO: 640213 - DNA, 120 bp, Artificial Sequence
  ENSG00000181513_19 (sequence is synthesized)
ctgactctgaagaaagaatggtcctgatcactgcagtttttgcagacaagcccctgcctgggctgtcctgggggttccctccgcttcctatcctagtccagatgccctgggtgggaccca

SEQ ID NO: 640214 - DNA, 120 bp, Artificial Sequence
  ENSG00000181513_20 (sequence is synthesized)
ctggaagcccggagcctcagcgctcgcccctgctcgccaggtgctgccccctcggagagccacagtctcggagctgacggacctggggagcgtgaggcggagccgagcctggagtcccca

SEQ ID NO: 640215 - DNA, 120 bp, Artificial Sequence
  ENSG00000181513_21 (sequence is synthesized)
gcaactggttctgggttcgaggcttggacaggccggcaccccagcccggcacccgcggtgtagttgtccgcgacgtcaacccgtggtgcctaagtgtctagagagctgagtgggttgcct

SEQ ID NO: 640216 - DNA, 120 bp, Artificial Sequence
  ENSG00000181513_22 (sequence is synthesized)
tggttgaggtaggtaagccgaatgtgaaacaggctctctcattggcctaaattccccccctcgatctgcgtcgccatcccggccctgctggaccccggggtcagtaggaagccgcggggt

SEQ ID NO: 640217 - DNA, 120 bp, Artificial Sequence
  ENSG00000181513_23 (sequence is synthesized)
gctggatgccacgctgtgccctccacagacactgagacttcctgtgctcccaaaggtggggaccggggtctaggattcctgttccagggccttgcttctggcgcccatctgtgcctcagg

SEQ ID NO: 640218 - DNA, 120 bp, Artificial Sequence
  ENSG00000181513_24 (sequence is synthesized)
ctctggactcccccgtttggaaatctcagaagacaatgagttctgccctcttcccttctagaactcctgttgtgtgtcaggtcctgtatggacattttgaaaagtttctccttttttcct

SEQ ID NO: 640219 - DNA, 120 bp, Artificial Sequence
  ENSG00000181513_25 (sequence is synthesized)
tttttcctctgagcaagcagccctgtgagagaaatgacatcttctcctaatttttagatgacaaaatgatgcccagagaagttaatgactttggccgggcacgatggctcacgcctgtaa

SEQ ID NO: 640220 - DNA, 120 bp, Artificial Sequence
  ENSG00000181518_0 (sequence is synthesized)
ttttaagcattagttttgtctctaactctggagtaaaaggttctgtcgtttgctaagagaatttgttccactggagggtatggaaaagtgtgtttctggttcctaaaatctataggtagg

SEQ ID NO: 640221 - DNA, 120 bp, Artificial Sequence
  ENSG00000181518_1 (sequence is synthesized)
tagatgcttaccgactccatttcatctgagtgttcactttttggttttcgtaacacaaagtcagtgttttcatagagagaaaacactgatatttgttttctatagaaacaaacactgata

SEQ ID NO: 640222 - DNA, 120 bp, Artificial Sequence
  ENSG00000181518_2 (sequence is synthesized)
gaatttgactttttctctctcatctccacagatttctcagagaagaatgggtgtaaaaaaccattccacagtgactgagtttcttctttcaggattaactgaacaagcagagcttcagct

SEQ ID NO: 640223 - DNA, 120 bp, Artificial Sequence
  ENSG00000181518_3 (sequence is synthesized)
gcccctcttctgcctcttcttaggaatttacacagttactgtggtgggaaacctcagcatgatctcaattattaggctgaatcgtcaacttcatacccccatgtactatttcctgagtag

SEQ ID NO: 640224 - DNA, 120 bp, Artificial Sequence
  ENSG00000181518_4 (sequence is synthesized)
tttgtcttttttagatttctgctattcttctgtcattacccctaaaatgctatcagggtttttatgcagagatagatccatctcctattctggatgcatgattcagctgttttttttctg

SEQ ID NO: 640225 - DNA, 120 bp, Artificial Sequence
  ENSG00000181518_5 (sequence is synthesized)
tttctgaatgctacatgctggcagccatggcctgcgatcgctacgtggccatctgcagcccactgctctacagggtcatcatgtcccctagggtctgttctctgctggtggctgctgtct

SEQ ID NO: 640226 - DNA, 120 bp, Artificial Sequence
  ENSG00000181518_6 (sequence is synthesized)
tctcagtaggtttcactgatgctgtgatccatggaggttgtatactcaggttgtctttctgtggatcaaacatcattaaacattatttctgtgacattgtccctcttattaaactctcct

SEQ ID NO: 640227 - DNA, 120 bp, Artificial Sequence
  ENSG00000181518_7 (sequence is synthesized)
gctccagcacttatattgatgagcttttgatttttgtcattggtggatttaacatggtggccacaagcctaacaatcattatttcatatgcttttatcctcaccagcatcctgcgcatcc

SEQ ID NO: 640228 - DNA, 120 bp, Artificial Sequence
  ENSG00000181518_8 (sequence is synthesized)
actctaaaaagggcaggtgcaaagcgtttagcacctgtagctcccacctgacagctgttcttatgttttatgggtctctgatgtccatgtatctcaaacctgcttctagcagttcactca

SEQ ID NO: 640229 - DNA, 120 bp, Artificial Sequence
  ENSG00000181518_9 (sequence is synthesized)
cccaggagaaagtatcctcagtattttataccactgtgattctcatgttgaatcccttgatatatagtctgaggaacaatgaagtaagaaatgctctgatgaaacttttaagaagaaaaa

SEQ ID NO: 640230 - DNA, 120 bp, Artificial Sequence
  ENSG00000181518_10 (sequence is synthesized)
tatctttatctccaggataaatatgctctttattaagatctatttctgtattcataatcatgattatatgtatatatttataccttgactatttaaaagtaatttgaggtccaggtacgg

SEQ ID NO: 640231 - DNA, 120 bp, Artificial Sequence
  ENSG00000181518_11 (sequence is synthesized)
tagattagtaaatatatgcacagataattacattaataacatgtaaaacaacatatatgaaagtgaaaagtaaaaaatattttaaatttaaagttaatacctttgctgggattgaacaac

SEQ ID NO: 640232 - DNA, 120 bp, Artificial Sequence
  ENSG00000181518_12 (sequence is synthesized)
ggattgaacaacaatttttatctttagtttcctgaatccaagcccaaaaggaaatcatcatcatggtgtactgcatagtcatatcagaagaaaaccacacctaatttcaaaaaaaattga

SEQ ID NO: 640233 - DNA, 120 bp, Artificial Sequence
  ENSG00000181518_13 (sequence is synthesized)
gcagcgtgatggaaattattacaacaattttgtaataactgtgggagaatttttcttgattgtttcttataaagggcttcttgaaagccagtattgtcttacagtgtaatgcaatgaaga

SEQ ID NO: 640234 - DNA, 120 bp, Artificial Sequence
  ENSG00000181518_14 (sequence is synthesized)
agattcaacaaaggactaagctaatatggtctcagtatttggcagctgttgatccaaaaataagatttaacaatgactagatgaagagatgatgtttataaccttattaaaatgtcttgt

SEQ ID NO: 640235 - DNA, 120 bp, Artificial Sequence
  ENSG00000181518_15 (sequence is synthesized)
tttttttcagcatgaccagtatatgtgcagtattttgtaactttctgtttgtttcttttgagttggtattttctttgtaagctgtaactaggtgtctttaatttcctccacatgttttga

SEQ ID NO: 640236 - DNA, 120 bp, Artificial Sequence
  ENSG00000181518_16 (sequence is synthesized)
gataaagataatgaaaaagcttatgatttttaagaatgaacctatacagtgaaccaagatagtatgctgtatggggaatgtgatgtattagctaattcatttgttcagcatatgcttatc

SEQ ID NO: 640237 - DNA, 120 bp, Artificial Sequence
  ENSG00000181518_17 (sequence is synthesized)
atggacaccatgtgccaggcactgttctgagtgttggaatattatggtgaatatgatagacaaggtatctctttacttttagggggtgaaaaagatgatagataatacagaggtagttca

SEQ ID NO: 640238 - DNA, 120 bp, Artificial Sequence
  ENSG00000181518_18 (sequence is synthesized)
gtgaacaaacataattatagataagtcctttggaaaaaatgagttatgtaattttcagtggttcaaattctactctcaatagagctctttgaagaaaggacatttgaaatgaaacctaaa

SEQ ID NO: 640239 - DNA, 120 bp, Artificial Sequence
  ENSG00000181518_19 (sequence is synthesized)
tgaagaaaagggtacagttatgcagaaaccagaaaggcagcggcaagtacaaagtcgaaggctggaacaaacttggccatattcaagaaacggagaaggcagtatggcagacggtcagtg

SEQ ID NO: 640240 - DNA, 120 bp, Artificial Sequence
  ENSG00000181518_20 (sequence is synthesized)
agagagggagaaaaggaaccaaaggaggttggataagtaggcaaactctagatcacttagggagttttaattctatcctaagtacaatgagaagcaattggaatgtttcaaaagcagagc

SEQ ID NO: 640241 - DNA, 120 bp, Artificial Sequence
  ENSG00000181518_21 (sequence is synthesized)
gatgtaatctgttttacatttgaaaaatatcttctggttattgattagaaaatagatagatatttatgtgtgtgtatgtttgtgggaagggttagatagggaaagatagtgctattggcc

SEQ ID NO: 640242 - DNA, 120 bp, Artificial Sequence
  ENSG00000181518_22 (sequence is synthesized)
agagtggaagcagagagggtacttttgatgctgttaaacttattttggtaagaaacaatgtgattttagttccaggaatagcagtagaaataaaaaaaaatagattcaagatacatttct

SEQ ID NO: 640243 - DNA, 120 bp, Artificial Sequence
  ENSG00000181523_0 (sequence is synthesized)
gagtccgagccgccgccgccatgagctgccccgtgcccgcctgctgcgcgctgctgctagtcctggggctctgccgggcgcgtccccggaacgcactgctgctcctcgcggatgacggag

SEQ ID NO: 640244 - DNA, 120 bp, Artificial Sequence
  ENSG00000181523_1 (sequence is synthesized)
gctttgagagtggcgcgtacaacaacagcgccatcgccaccccgcacctggacgccttggcccgccgcagcctcctctttcgcaatgccttcacctcggtcagcagctgctctcccagcc

SEQ ID NO: 640245 - DNA, 120 bp, Artificial Sequence
  ENSG00000181523_2 (sequence is synthesized)
gcgccagcctcctcactggcctgccccagcatcagaatgggatgtacgggctgcaccaggacgtgcaccacttcaactccttcgacaaggtgcggagcctgccgctgctgctcagccaag

SEQ ID NO: 640246 - DNA, 120 bp, Artificial Sequence
  ENSG00000181523_3 (sequence is synthesized)
ctggtgtgcgcacaggcatcatcgggaagaagcacgtggggccggagaccgtgtacccgtttgactttgcgtacacggaggagaatggctccgtcctccaggtggggcggaacatcacta

SEQ ID NO: 640247 - DNA, 120 bp, Artificial Sequence
  ENSG00000181523_4 (sequence is synthesized)
gaattaagctgctcgtccggaaattcctgcagactcaggatgaccggcctttcttcctctacgtcgccttccacgacccccaccgctgtgggcactcccagccccagtacggaaccttct

SEQ ID NO: 640248 - DNA, 120 bp, Artificial Sequence
  ENSG00000181523_5 (sequence is synthesized)
gtgagaagtttggcaacggagagagcggcatgggtcgtatcccagactggaccccccaggcctacgacccactggacgtgctggtgccttacttcgtccccaacaccccggcagcccgag

SEQ ID NO: 640249 - DNA, 120 bp, Artificial Sequence
  ENSG00000181523_6 (sequence is synthesized)
ccgacctggccgctcagtacaccaccgtcggccgcatggaccaaggagttggactggtgctccaggagctgcgtgacgccggtgtcctgaacgacacactggtgatcttcacgtccgaca

SEQ ID NO: 640250 - DNA, 120 bp, Artificial Sequence
  ENSG00000181523_7 (sequence is synthesized)
acgggatccccttccccagcggcaggaccaacctgtactggccgggcactgctgaacccttactggtgtcatccccggagcacccaaaacgctggggccaagtcagcgaggcctacgtga

SEQ ID NO: 640251 - DNA, 120 bp, Artificial Sequence
  ENSG00000181523_8 (sequence is synthesized)
gcctcctagacctcacgcccaccatcttggattggttctcgatcccgtaccccagctacgccatctttggctcgaagaccatccacctcactggccggtccctcctgccggcgctggagg

SEQ ID NO: 640252 - DNA, 120 bp, Artificial Sequence
  ENSG00000181523_9 (sequence is synthesized)
ccgagcccctctgggccaccgtctttggcagccagagccaccacgaggtcaccatgtcctaccccatgcgctccgtgcagcaccggcacttccgcctcgtgcacaacctcaacttcaaga

SEQ ID NO: 640253 - DNA, 120 bp, Artificial Sequence
  ENSG00000181523_10 (sequence is synthesized)
tgccctttcccatcgaccaggacttctacgtctcacccaccttccaggacctcctgaaccgcaccacagctggtcagcccacgggctggtacaaggacctccgtcattactactaccggg

SEQ ID NO: 640254 - DNA, 120 bp, Artificial Sequence
  ENSG00000181523_11 (sequence is synthesized)
cgctttgctcagcttctggagatgcttcgggaccagctggccaagtggcagtgggagacccacgacccctgggtgtgcgcccccgacggcgtcctggaggagaagctctctccccagtgc

SEQ ID NO: 640255 - DNA, 120 bp, Artificial Sequence
  ENSG00000181523_12 (sequence is synthesized)
cagcccctccacaatgagctgtgaccatcccaggaggcctgtgcacacatcccaggcatgtcccagacacatcccacacgtgtccgtgtggccggccagcctggggagtagtggcaacag

SEQ ID NO: 640256 - DNA, 120 bp, Artificial Sequence
  ENSG00000181523_13 (sequence is synthesized)
cccttccgtccacactcccatccaaggagggttcttccttcctgtggggtcactcttgccattgcctggagggggaccagagcatgtgaccagagcatgtgcccagcccctccaccacca

SEQ ID NO: 640257 - DNA, 120 bp, Artificial Sequence
  ENSG00000181523_14 (sequence is synthesized)
ggggcactgccgtcatggcaggggacacagttgtccttgtgtctgaaccatgtcccagcacgggaattctagacatacgtggtctgcggacagggcagcgcccccagcccatgacaaggg

SEQ ID NO: 640258 - DNA, 120 bp, Artificial Sequence
  ENSG00000181523_15 (sequence is synthesized)
agtcttgttttctggcttggtttggggacctgcaaatgggaggcctgaggccctcttcaggctttggcagccacagatacttctgaacccttcacagagagcaggcaggggcttcggtgc

SEQ ID NO: 640259 - DNA, 120 bp, Artificial Sequence
  ENSG00000181523_16 (sequence is synthesized)
cgcgtgggcagtacgcaggtcccaccgacactcacctgggagcacggcgcctggctcttaccagcgtctggcctagaggaagcctttgagcgacctttgggcaggtttctgcttcttctg

SEQ ID NO: 640260 - DNA, 120 bp, Artificial Sequence
  ENSG00000181523_17 (sequence is synthesized)
ttttgccccatggtcaagtccctgttccccaggcaggtttcagctgattggcagcaggctccctgagtgatgagcttgaacctgtggtgtttctgggcagaagcttatcttttttgagag

SEQ ID NO: 640261 - DNA, 120 bp, Artificial Sequence
  ENSG00000181523_18 (sequence is synthesized)
tgtccgaagatgaaggcatggcgatgcccgtcctctggcttgggttaattcttcggtgacactggcattgctgggtggtgatgcccgtcctctggcttgggttaattcttcggtgacact

SEQ ID NO: 640262 - DNA, 120 bp, Artificial Sequence
  ENSG00000181523_19 (sequence is synthesized)
ggcgttgctgggtggcaatgcccatcctctgccttgggttaattcttcggtgacactggcgttgctgggtggcgatgcccgtcctctggcttgggttaattcttggatgacgtcggcgtt

SEQ ID NO: 640263 - DNA, 120 bp, Artificial Sequence
  ENSG00000181523_20 (sequence is synthesized)
gctgggagaatgtgccgttcctgccctgcctccacccacctcgggagcagaagcccggcctggacacccctcggcctggacacccctcgaaggagagggcgcttccttgagtaggtgggc

SEQ ID NO: 640264 - DNA, 120 bp, Artificial Sequence
  ENSG00000181523_21 (sequence is synthesized)
tccccttgcccttccctccctatcactccatactggggtgggctggaggaggccacaggccagctattgtaaaagctttttattttagtaaaatatacagaagttctttttctgaactca

SEQ ID NO: 640265 - DNA, 120 bp, Artificial Sequence
  ENSG00000181523_22 (sequence is synthesized)
gagaagaagtgagtcaagatcacaggcctcagaggaagcaaagggagccaacgcccaggtcagaagggccctccggacaggctgagggcagggcaggagctgggcagagctgaattttgt

SEQ ID NO: 640266 - DNA, 76 bp, Artificial Sequence
  ENSG00000181523_23 (sequence is synthesized)
gctgagggcagggcaggagctgggcagagctgaattttgtagaggagatgagggaatagagcttgccactttcttc

SEQ ID NO: 640267 - DNA, 120 bp, Artificial Sequence
  ENSG00000181523_24 (sequence is synthesized)
tgccacgtctcccatccctgggatcccggggggtgttgcccactttccctcccacctccaggaggaggcacagcctatggctgtgagtgcagactaggggctccgactcacccgccagcc

SEQ ID NO: 640268 - DNA, 120 bp, Artificial Sequence
  ENSG00000181523_25 (sequence is synthesized)
ctggctgcactgctgtgtgtggccttgagcaagtcacctacctccttgtgcctcagtttcctcatctgtaagatggtgggtgtaatgagatgccactctagttatggagattggcggggc

SEQ ID NO: 640269 - DNA, 120 bp, Artificial Sequence
  ENSG00000181523_26 (sequence is synthesized)
atcccgagtccgagccgccgccgccatgagctgccccgtgcccgcctgctgcgcgctgctgctagtcctggggctctgccgggcgcgtccccggaacgcactgctgctcctcgccgaccg

SEQ ID NO: 640270 - DNA, 120 bp, Artificial Sequence
  ENSG00000181523_27 (sequence is synthesized)
atgacctgtcagatgctgctccacacccattacctaatgtggctctcatatcatctgggtgaggaagggactgtcactcccactctacagaggaaaagaatgaggctcagagaggtgaag

SEQ ID NO: 640271 - DNA, 120 bp, Artificial Sequence
  ENSG00000181523_28 (sequence is synthesized)
taagctgctcaggattgcacagctggtaagcactaagctaggattctcgcctggatcctgctgctttcaaaaccattgccttttccccgcctacctccgatgagcttcagaatcacctgg

SEQ ID NO: 640272 - DNA, 120 bp, Artificial Sequence
  ENSG00000181523_29 (sequence is synthesized)
gatgcttgttaatatccaaattgcaaatcccagggtgtccgattcagtagatcttggcgggctcaagaatttgcatgtctgacaagttcccaggtgatgccgatactgtgggcctgggga

SEQ ID NO: 640273 - DNA, 120 bp, Artificial Sequence
  ENSG00000181523_30 (sequence is synthesized)
cccctctctgagcatccgtgcaccccatcctgccttcctgggggacccaaagcacctcatgaccctgctcattcctaaaaagacctaggacatctagtcccatgttatggatgtgcagac

SEQ ID NO: 640274 - DNA, 120 bp, Artificial Sequence
  ENSG00000181523_31 (sequence is synthesized)
gggaccctggcctcctacgagcttgcagccctggccctagatgatgaagaaagaggctctgaccaaatcggattcaggttcccaacctcggggccacagagagaaccgtagagagacggg

SEQ ID NO: 640275 - DNA, 120 bp, Artificial Sequence
  ENSG00000181523_32 (sequence is synthesized)
gtggtccggagtgaggctgttctgggctaacccatttgcaggaggccccggggagaaggctggacaccgctcccccggtctgtctgttctaagcctggctccccaccgcctgccccaggt

SEQ ID NO: 640276 - DNA, 120 bp, Artificial Sequence
  ENSG00000181523_33 (sequence is synthesized)
gccttacttcgtccccaacaccccggcagcccgagccgacctggccgctcagtacaccaccgtcggccgcatggaccaaggtgggcttgcagaaccgggcactggagggggtgccacggc

SEQ ID NO: 640277 - DNA, 120 bp, Artificial Sequence
  ENSG00000181523_34 (sequence is synthesized)
cggggtcccccatcctgggccagcgccctcttaggtcacggcataatgtgggtgagggtcccagtgtggcaggccctgtgctgcagctggcagagcccacattgagaggaggggcctgtg

SEQ ID NO: 640278 - DNA, 120 bp, Artificial Sequence
  ENSG00000181523_35 (sequence is synthesized)
ggtggcatcaggacccaaccccggggctgccctgatgtggacctgctcctgggctggggccttcgggtgccccagaggttgcgtgaagacttcagatatttccagtcacaggacctgggt

SEQ ID NO: 640279 - DNA, 120 bp, Artificial Sequence
  ENSG00000181523_36 (sequence is synthesized)
cagatttgggggtttggagttccttagcatatgcagatggagatcttgaggtctgtgagttttttgtggttgatggcttacagcaaccaaaatttgtactcccacagttcaggaggccag

SEQ ID NO: 640280 - DNA, 120 bp, Artificial Sequence
  ENSG00000181523_37 (sequence is synthesized)
aagtttgaaatcaaggtgtcagcagggccatgctcccctgaaggcctaggggagaccctgcctttcctcttccaacttctgggggctgtgccagtgctgggcgttcctgggctggcggca

SEQ ID NO: 640281 - DNA, 120 bp, Artificial Sequence
  ENSG00000181523_38 (sequence is synthesized)
gcgttcctgggctggcggcagaatcgcccccatccccgctgaagccttcacatggccttttttcctgtgtctcctctttgtgtctccacttcttctttttttttttttttgagactgagt

SEQ ID NO: 640282 - DNA, 120 bp, Artificial Sequence
  ENSG00000181523_39 (sequence is synthesized)
gtggcgcaatctcggctcactacaaccaccacctcccaggttcgagcgatttttctgtctcagcctccaaagtagctaggactgcaatcgcaccgcacgccaccatgcccagctaatttt

SEQ ID NO: 640283 - DNA, 120 bp, Artificial Sequence
  ENSG00000181523_40 (sequence is synthesized)
gcaccgcgcccggcctgtttccgcttcttataaggaccccgtcgggtttagggcctacctgagcacttcaggatgattttgtcccaagatctttattcgtgaagttcccctttccaaaca

SEQ ID NO: 640284 - DNA, 120 bp, Artificial Sequence
  ENSG00000181523_41 (sequence is synthesized)
agaaccccttcacagattccagcacacatgtcttttggggtcagggacgacaggaggtcaggacctttgccatttccctattggtgccattaattcttagtgagctgggaaggagcgggt

SEQ ID NO: 640285 - DNA, 120 bp, Artificial Sequence
  ENSG00000181523_42 (sequence is synthesized)
atagaggaagccttgtcctctggccccagctgggaaggagcgagtatagaggaagcctcgtcctctggcccctgccctatttgctccatgggacagacacgagattccggagaactcaaa

SEQ ID NO: 640286 - DNA, 120 bp, Artificial Sequence
  ENSG00000181523_43 (sequence is synthesized)
agccggcgggcaccagggagcagctgcctgggggtgacacagaagtgccaagggatggctggagtccctggaggcccattcgaggcctgctcagggaatgggagctgggcggagctgggc

SEQ ID NO: 640287 - DNA, 120 bp, Artificial Sequence
  ENSG00000181523_44 (sequence is synthesized)
aagagctgggcaagagccagggccattgggaagaactacagggtgctttcgaatccggaaagcgctggagcccagcggccggatgcagcagcaggtgggtctacacacaccacccgctgc

SEQ ID NO: 640288 - DNA, 120 bp, Artificial Sequence
  ENSG00000181523_45 (sequence is synthesized)
gagcctccaggtggggtgggcccgggacagcaggaaactcaggttccctttccctccgagctcgcggcccacatctctcttggggcccacatctctctctggccccaaatgatgagccag

SEQ ID NO: 640289 - DNA, 120 bp, Artificial Sequence
  ENSG00000181523_46 (sequence is synthesized)
gagcactgtggccacacccaccacaggggctggagtacacgagctaccaaaaaggagacttcttttccagtccatgggattttagaaggatcctaaatgtcaccgaatcagggcctcttg

SEQ ID NO: 640290 - DNA, 120 bp, Artificial Sequence
  ENSG00000181523_47 (sequence is synthesized)
ttataccattcaaggcactgaggcccagagagatgacgtggcggtgagaggtgtcggctcgacaaggcacctcccgctgctgattggattggagaagggagccgcccagagtggcgtagg

SEQ ID NO: 640291 - DNA, 120 bp, Artificial Sequence
  ENSG00000181523_48 (sequence is synthesized)
ccaggaggttcggcaccttgtaccaaggcacgctcagcccccgtggcctgcccttagctcttgtcccaaaggatctgggcctgggtctcctggctgggctgtgtgtccacgagaacccac

SEQ ID NO: 640292 - DNA, 120 bp, Artificial Sequence
  ENSG00000181541_0 (sequence is synthesized)
agatgcaacgcaagcaacgacttcgtcacactaaaacggattttgtgagggccaaaagtataaattacgaagcagaaatgattatcaaacaacttccagcggtttgcacctaaagaaaca

SEQ ID NO: 640293 - DNA, 120 bp, Artificial Sequence
  ENSG00000181541_1 (sequence is synthesized)
caaggagaacccactacaaacaaacaaacccagtccaaacaacgcctccagtaggaaaagaggaaaactgcgataacacgaccccccgagaagagacgagaccaacacgctgagactgtg

SEQ ID NO: 640294 - DNA, 120 bp, Artificial Sequence
  ENSG00000181541_2 (sequence is synthesized)
gggcgtcagcaaacctccaagtgcacggcggactgagttgtacttcgcagctctctggacattaattacctcctgcaccttccatttgggggagggtgaggaagaaggcactcacctaca

SEQ ID NO: 640295 - DNA, 120 bp, Artificial Sequence
  ENSG00000181541_3 (sequence is synthesized)
ctgagcgaagaagtcctatcagcgtggaagagaagtttaagaatgaaccactgaatgtttcgcttttatttttaaatttactttggcacttaaaaaacctcatttccagatttctggaca

SEQ ID NO: 640296 - DNA, 120 bp, Artificial Sequence
  ENSG00000181541_4 (sequence is synthesized)
atctcggctgcagacatctaagcctaaccttttggtatcctgagttttttccctctccttctccttcctcacgcccaccccgcttctctcgcacacggtcatctttacatatcaagagaa

SEQ ID NO: 640297 - DNA, 120 bp, Artificial Sequence
  ENSG00000181541_5 (sequence is synthesized)
agcaaaaaggttccaagaggtacttttctttttagaaaatcaccttttctcccctaattcttctgcagaagaaaagaggtttcgaaagagggaaaaggaaaaaacaagccggctacggta

SEQ ID NO: 640298 - DNA, 120 bp, Artificial Sequence
  ENSG00000181541_6 (sequence is synthesized)
tcagccggtcagcccaggtggaaaacgagagtgaaagtagggcttaacggggagcgcaccgcctctttcgaaagccgctgggccaccaccagtgcgtgagccttggatccctcaacgtat

SEQ ID NO: 640299 - DNA, 120 bp, Artificial Sequence
  ENSG00000181541_7 (sequence is synthesized)
tgcgagacgccggtgtatagcccggacctgtgccccaacatgatcgccgctcaggccaagctggtttaccagctcaataagtactacactgagcgctgtcaggcgcgcaaggcggccatc

SEQ ID NO: 640300 - DNA, 120 bp, Artificial Sequence
  ENSG00000181541_8 (sequence is synthesized)
gccaaaaccatccgagaggtctgtaaggtggtctcggacgtgctcaaggaagtggaggtgcaggagcctcgcttcatcagctccttgagcgagatcgatgcccgctacgaggggctcgag

SEQ ID NO: 640301 - DNA, 120 bp, Artificial Sequence
  ENSG00000181541_9 (sequence is synthesized)
gtcatttcgcccaccgaatttgaggtggtgctctacctaaaccagatgggcgtcttcaacttcgtggacgacggctcgctgcccggctgcgcagtgctcaaactgagcgatgggcggaag

SEQ ID NO: 640302 - DNA, 120 bp, Artificial Sequence
  ENSG00000181541_10 (sequence is synthesized)
gttcatcacggcgtcgggctatctctcagcgcgtaagatccgctcgcgtttccagacgctggtggcccaggcggtggacaagtgcagctatcgggatgtggtcaagatgatcgcggacac

SEQ ID NO: 640303 - DNA, 120 bp, Artificial Sequence
  ENSG00000181541_11 (sequence is synthesized)
cagcgaggtcaagttgcgcatcagggagcgctatgtggtgcaaatcactccggcgttcaagtgcaccgggatctggcctcgcagcgcggcacagtggcctatgccccacatcccttggcc

SEQ ID NO: 640304 - DNA, 120 bp, Artificial Sequence
  ENSG00000181541_12 (sequence is synthesized)
cggccccaatcgggtggccgaggtcaaggccgaagggttcaacttgctctcgaaggagtgctactcgctgaccggcaagcagagctcggcagagagcgacgcctgggtgctacagttcgg

SEQ ID NO: 640305 - DNA, 120 bp, Artificial Sequence
  ENSG00000181541_13 (sequence is synthesized)
ggaggcggagaaccgcctgctgatgggcggctgccgaaacaagtgcctctcagtgctgaagactctgcgggaccgccacctggagctacccggccagccgctcaacaactaccacatgaa

SEQ ID NO: 640306 - DNA, 120 bp, Artificial Sequence
  ENSG00000181541_14 (sequence is synthesized)
gacgctgctgctgtacgagtgcgagaaacacccacgagaaacggactgggacgagtcgtgcctgggcgaccggctcaacggcatcctgctgcagctcatctcctgcctgcagtgccgccg

SEQ ID NO: 640307 - DNA, 120 bp, Artificial Sequence
  ENSG00000181541_15 (sequence is synthesized)
ctgccctcactactttctgcccaacctcgacctctttcagggcaagccccattcggccctggagagcgctgccaagcagacctggaggttggccagggaaattctcaccaatcccaaaag

SEQ ID NO: 640308 - DNA, 120 bp, Artificial Sequence
  ENSG00000181541_16 (sequence is synthesized)
cctggacaaactatagggtgctggggactgcttgaaaagcgacacaaacgggcgtgctctctcagacacacaactctgctataaacagcagaaactctggacacaaacttttatgtaagt

SEQ ID NO: 640309 - DNA, 120 bp, Artificial Sequence
  ENSG00000181541_17 (sequence is synthesized)
cacctgaaataggaatccggcagaagaccttcattaattaagaagcaaacaaaaagagagcaacccaaccaaaacaaatcacattcttgcacaaaagtgatcgttttcttccaaacaatg

SEQ ID NO: 640310 - DNA, 120 bp, Artificial Sequence
  ENSG00000181541_18 (sequence is synthesized)
tgaatttaaaaggtcacacaaaagaagcaatcgggctccgccaccacaaaatgaaacccaaggtacattttcaaatcaatgtatagtagttccccccccttttccttctttccccctatc

SEQ ID NO: 640311 - DNA, 120 bp, Artificial Sequence
  ENSG00000181541_19 (sequence is synthesized)
ctttttctctccaccccatccccccccccatttcgttttgcttttggttgcctgaatgttgtcaccaagtgaaaaaattatttaactatatgtaaaatttctcttttaaaaaaaagtttt

SEQ ID NO: 640312 - DNA, 120 bp, Artificial Sequence
  ENSG00000181541_20 (sequence is synthesized)
actgatgttaaacgttctcagtgccaatgtcagactgtgctcctccctctcctgaacctctaccctcaccctgagctgtcttgttgaaaacagtaataaaaacattactttacattgtaa

SEQ ID NO: 640313 - DNA, 120 bp, Artificial Sequence
  ENSG00000181544_0 (sequence is synthesized)
aggatgcagcgcgctggcgggaggtttggagcagatggataccgtatcgacgtggggcctccggtatgttgccgctgcgttgaggtttagaaacatcaactggaatcaatttgcatttga

SEQ ID NO: 640314 - DNA, 120 bp, Artificial Sequence
  ENSG00000181544_1 (sequence is synthesized)
aaattagatcagcacaaagacttgatattgtggaatgactagcaaacaagcaatgtcatctaacgaacaagaaaggctcttgtgttataatggggaagtccttgttttccagttgtctaa

SEQ ID NO: 640315 - DNA, 120 bp, Artificial Sequence
  ENSG00000181544_2 (sequence is synthesized)
aggaaattttgcagataaagagcctacaaaaacacccatattacatgtcagaagaatggtatttgacagaggaacaaaagtatttgttcagaagtccactggattttttaccataaagga

SEQ ID NO: 640316 - DNA, 120 bp, Artificial Sequence
  ENSG00000181544_3 (sequence is synthesized)
agaaaactctcatttaaaaatcatgtgttgcaactgtgtgtcagatttcagaactggaattaacctcccttacattgtgatagaaaaaaataaaaagaataatgtttttgaatatttttt

SEQ ID NO: 640317 - DNA, 120 bp, Artificial Sequence
  ENSG00000181544_4 (sequence is synthesized)
actaatccttcacagtactaataaatttgaaatgcgtttgagttttaaactaggctatgagatgaaggatggcctaagggtccttaatggccctttaattttatggaggcatgtcaaagc

SEQ ID NO: 640318 - DNA, 120 bp, Artificial Sequence
  ENSG00000181544_5 (sequence is synthesized)
attcttctttatctcttctcaaactggcaaagttgttagtgtgtcaggtaacttttcctctattcagtgggcaggggagattgaaaatttaggtatggttttattgggactaaaggaatg

SEQ ID NO: 640319 - DNA, 120 bp, Artificial Sequence
  ENSG00000181544_6 (sequence is synthesized)
ttgtttatctgaggaagaatgtactcaagagccttcaaaatcagattatgcaatttggaataccaaattttgtgtatattctcttgaaagtcaagaagtattaagtgatatatacattat

SEQ ID NO: 640320 - DNA, 120 bp, Artificial Sequence
  ENSG00000181544_7 (sequence is synthesized)
tcctcctgcttacagcagtgtggtgacttatgtacatatttgtgcaactgagatcatcaaaaaccagttaagaatatctctcattgcccttactcgaaagaatcagctgatttcatttca

SEQ ID NO: 640321 - DNA, 120 bp, Artificial Sequence
  ENSG00000181544_8 (sequence is synthesized)
gaatggaactcctaaaaatgtgtgccagcttccatttggagatccttgtgcagttcaacttatggattcaggtggaggaaacctctttttcgttgtatcctttatatccaataatgcttg

SEQ ID NO: 640322 - DNA, 120 bp, Artificial Sequence
  ENSG00000181544_9 (sequence is synthesized)
tgctgtatggaaagagagctttcaggttgctgctaaatgggaaaaacttagcttagtactgatagatgactttattggaagtggaactgaacaagtactcctactttttaaggactcctt

SEQ ID NO: 640323 - DNA, 120 bp, Artificial Sequence
  ENSG00000181544_10 (sequence is synthesized)
gaactcagactgcctgacttcatttaaaataacggatcttggaaaaataaactattcgagtgaaccatcagattgcaatgaagatgacttatttgaagacaaacaagagaatcgttacct

SEQ ID NO: 640324 - DNA, 120 bp, Artificial Sequence
  ENSG00000181544_11 (sequence is synthesized)
ggtggttccacctctagaaacaggactgaaagtttgtttttcttcttttcgggaattacggcagcatctgttgcttaaggaaaaaattatttcaaaatcttacaaagctttaataaacct

SEQ ID NO: 640325 - DNA, 120 bp, Artificial Sequence
  ENSG00000181544_12 (sequence is synthesized)
atgataatacgtcaagtgcagaggagaaggaatgtcttgttcctctttgtggtgaagaagaaaattctgtccatatcttagatgaaaagttatcagacaattttcaagattcagaacagc

SEQ ID NO: 640326 - DNA, 120 bp, Artificial Sequence
  ENSG00000181544_13 (sequence is synthesized)
tagtagagaagatatggtatcgtgtaatagatgatagcttggttgttggagtgaaaactacatcttctttgaagctgtccctgaatgatgtgactttatcattgttaatggatcaagccc

SEQ ID NO: 640327 - DNA, 120 bp, Artificial Sequence
  ENSG00000181544_14 (sequence is synthesized)
atgactccagatttcggcttctaaagtgtcaaaatagggtgattaagttgagtacaaatcctttcccagcaccatacttgatgccatgtgaaataggattggaagcaaaaagggtcacgt

SEQ ID NO: 640328 - DNA, 120 bp, Artificial Sequence
  ENSG00000181544_15 (sequence is synthesized)
tgacccctgatagcaagaaagaggaaagctttgtttgtgaacacccatctaagaaagagtgtgtacagataattactgctgtaacatctctttcaccacttttaacattcagtaaatttt

SEQ ID NO: 640329 - DNA, 120 bp, Artificial Sequence
  ENSG00000181544_16 (sequence is synthesized)
gttgcactgtactgctacaaattatggagagagaaagtggtaactgtcctaaagatcgttatgttgtgtgtggcagagtttttttaagtctagaagatctttcaactgggaagtacctac

SEQ ID NO: 640330 - DNA, 120 bp, Artificial Sequence
  ENSG00000181544_17 (sequence is synthesized)
tgacatttccaaagaagaaacctatagagcacatggaagatctttttgcacttcttgcagcattccataaatcttgttttcaaatcacatcacccggctatgccctgaattcaatgaagg

SEQ ID NO: 640331 - DNA, 120 bp, Artificial Sequence
  ENSG00000181544_18 (sequence is synthesized)
tgtggctcttagaacatatgaaatgtgaaataatcaaagaatttccagaagtgtacttttgtgaaagaccgggaagtttctatgggacactcttcacttggaaacagagaacaccattcg

SEQ ID NO: 640332 - DNA, 120 bp, Artificial Sequence
  ENSG00000181544_19 (sequence is synthesized)
aagggattttaataatctattccaggaatcaaacagttatgttccagtgccttcataatctcatcagaattctccctataaactgtttcctcaaaaatctaaaatcaggaagtgagaatt

SEQ ID NO: 640333 - DNA, 120 bp, Artificial Sequence
  ENSG00000181544_20 (sequence is synthesized)
tcctaattgataatatggcatttactttggagaaggaactagtcacccttagttctctttcttctgccatagctaaacatgaaagcaattttatgcagaggtgtgaagtgagcaaaggaa

SEQ ID NO: 640334 - DNA, 120 bp, Artificial Sequence
  ENSG00000181544_21 (sequence is synthesized)
agagtagtgtcgtcgcggctgctttatcagacagaagggaaaatatccatccctacagaaaagaacttcagagagaaaagaagaaaatgttgcaaacgaacctaaaagtgagtggtgccc

SEQ ID NO: 640335 - DNA, 120 bp, Artificial Sequence
  ENSG00000181544_22 (sequence is synthesized)
tttacagagaaataactttgaaagtagctgaggttcagttgaaatcagactttgctgcacagaaactgagtaatttataattataatttcaatttgatcatattttaaaatatgttttca

SEQ ID NO: 640336 - DNA, 120 bp, Artificial Sequence
  ENSG00000181544_23 (sequence is synthesized)
ccaccatataagattttggttctacttgctatatgcctcctttgtaaaaataaacaccgaggcttactgtagtagaaactttagttttgatgatgcacaaaataaacagcagtggttctc

SEQ ID NO: 640337 - DNA, 120 bp, Artificial Sequence
  ENSG00000181544_24 (sequence is synthesized)
agcgcgctggcgggaggtttggagcagatggataccgtatcgacgtggggcctccggtatgttgccgctgcgttgagtttcataagtacaagccagacctttgatttacctaccctatct

SEQ ID NO: 640338 - DNA, 120 bp, Artificial Sequence
  ENSG00000181544_25 (sequence is synthesized)
ttgatattaagaaatctgaaaaactttgaataggtagtaaaagatgatgaattcttagagctttacctcagaatgtgtaattttcatgcttttcctttctagaaatctaggaaacctgac

SEQ ID NO: 640339 - DNA, 120 bp, Artificial Sequence
  ENSG00000181544_26 (sequence is synthesized)
atgggacctttggtaaatacattattattcatacattttgatggaatataactaatatgtttattttctctaaaccatagtttcataagtacaagccagacctttgatttacctacccta

SEQ ID NO: 640340 - DNA, 120 bp, Artificial Sequence
  ENSG00000181544_27 (sequence is synthesized)
gtgagtggaatcatagagtatttatatttttgtacctggcttattttacttagcataatgtccttgaggttcattcgtgtcatagcttgtgacactatttccttctgtttaaagctgcat

SEQ ID NO: 640341 - DNA, 120 bp, Artificial Sequence
  ENSG00000181544_28 (sequence is synthesized)
agtattccattgtatacatatatcacattttgtttatctgtccatctgttagacatctaggttgcttccacttcttggctgttgtgaataatactgcaataaacgtgggtgtgcaaataa

SEQ ID NO: 640342 - DNA, 120 bp, Artificial Sequence
  ENSG00000181552_0 (sequence is synthesized)
agatttccagggccctgaggaaaggaggactcagactctgctcttcagatccacacactgatcccaactacaaccagtgacctgaacttggagtctgagtagggcggccccggtgactga

SEQ ID NO: 640343 - DNA, 120 bp, Artificial Sequence
  ENSG00000181552_1 (sequence is synthesized)
gatggcatcgtctctaaagatctggggcacactcttggccctactttgcatcctatgcacactgcttgtacagagcaaagaagtttcttggagagaattcatgaaacagcactacttaag

SEQ ID NO: 640344 - DNA, 120 bp, Artificial Sequence
  ENSG00000181552_2 (sequence is synthesized)
tccaagtcgagaattcagagagtacaaatgtgatgtcctcatgagagaaaatgaagctctgaaagacaagagctctcacatgtttatctatatctcatggtacaaaatcgagcatatatg

SEQ ID NO: 640345 - DNA, 120 bp, Artificial Sequence
  ENSG00000181552_3 (sequence is synthesized)
caggagaattccaaaaatagctacacagagagcaggagcttcaactacattgaattccattgtagcatggacgggtatgttgatagcatagaagacctaaagatggtagaacctatcggc

SEQ ID NO: 640346 - DNA, 120 bp, Artificial Sequence
  ENSG00000181552_4 (sequence is synthesized)
aactagaaagtctatgcacatcctcaggtattggtagagtattcagtgctttctaagtagcagcccctgcctccatcaatagtcctaccactcccctcttgcatttatttgtcaatgttt

SEQ ID NO: 640347 - DNA, 120 bp, Artificial Sequence
  ENSG00000181552_5 (sequence is synthesized)
tccaaatacttagagttatgaatagcataatttcttgataccataactttgcctgtgttgtttctctgcctggaatacacttttgtcttcatttacctaatttactcttatacttttgtc

SEQ ID NO: 640348 - DNA, 120 bp, Artificial Sequence
  ENSG00000181552_6 (sequence is synthesized)
gacattcagctcatatggcatctgttcttgattaacccaagactttcctgatattgactctcttgatacatacccaagctgaacaatcttcccttccctaaataaattatatgactgcaa

SEQ ID NO: 640349 - DNA, 120 bp, Artificial Sequence
  ENSG00000181555_0 (sequence is synthesized)
gctgcggggagggggctcgcgtcgccgtctccagccgctcccgatgaagcagctgcagccgcagccgcctccgaagatgggggatttctacgacccggagcacccgacccctgaagaaga

SEQ ID NO: 640350 - DNA, 120 bp, Artificial Sequence
  ENSG00000181555_1 (sequence is synthesized)
agaaaatgaggcaaagattgaaaatgtgcagaaaacaggtttcatcaaaggaccaatgttcaaaggtgttgcttctagtcgatttttgcccaaaggcaccaaaacaaaagttaatttgga

SEQ ID NO: 640351 - DNA, 120 bp, Artificial Sequence
  ENSG00000181555_2 (sequence is synthesized)
agaacagggacgacagaaggtgtcattcagcttcagccttacaaagaaaactttgcagaataggtttctcactgcacttggcaatgaaaagcaaagtgatactccaaaccctccagctgt

SEQ ID NO: 640352 - DNA, 120 bp, Artificial Sequence
  ENSG00000181555_3 (sequence is synthesized)
acctcttcaggtagactcgactcctaaaatgaaaatggaaattggtgataccttatctactgcagaagaatcttccccaccaaagtcaagggtggaattgggcaaaattcattttaagaa

SEQ ID NO: 640353 - DNA, 120 bp, Artificial Sequence
  ENSG00000181555_4 (sequence is synthesized)
acatctgcttcatgtaacatccaggccactgctggctactaccacagcagtagcatctccacctactcatgcagcaccattaccagcagtgatagcagaatcaacaactgtagactcacc

SEQ ID NO: 640354 - DNA, 120 bp, Artificial Sequence
  ENSG00000181555_5 (sequence is synthesized)
gccctcatctccgcctccaccgcctccacctgcccaagccacaacactctcatcaccagcaccagtaacagagccagtggccttgccacatacaccaataacagttctaatggcagcacc

SEQ ID NO: 640355 - DNA, 120 bp, Artificial Sequence
  ENSG00000181555_6 (sequence is synthesized)
agtacccttaccagtagatgtagcagttagatctctgaaagaaccaccaattataattgtaccagaatctttagaagcagatactaagcaggacactatatctaatagtttagaagaaca

SEQ ID NO: 640356 - DNA, 120 bp, Artificial Sequence
  ENSG00000181555_7 (sequence is synthesized)
cgtaactcaaatattgaatgagcaagcagatatttcctcaaaaaaagaagattcccatattgggaaggatgaagaaattccagatagttctaagattagtctgagctgtaaaaaaacagg

SEQ ID NO: 640357 - DNA, 120 bp, Artificial Sequence
  ENSG00000181555_8 (sequence is synthesized)
ttctaagaagaaatcctcacaatctgaaggcatctttcttggttcagaatctgatgaagattctgtacggacttcttcaagtcaaagatcacatgatttaaaattttcagcaagcattga

SEQ ID NO: 640358 - DNA, 120 bp, Artificial Sequence
  ENSG00000181555_9 (sequence is synthesized)
aaaggaaagagattttaaaaagagctcagcacctttaaaaagtgaggatctagggaaaccttcacgatctaaaacagacagagatgataaatattttagctattcaaaacttgaaagaga

SEQ ID NO: 640359 - DNA, 120 bp, Artificial Sequence
  ENSG00000181555_10 (sequence is synthesized)
tactcggtatgtatcttcccgatgtagatcagaaagagagcgacggcggagcagatctcactctaggtctgagagaggctctagaactaatttatcctattccaggtcagaacgatctca

SEQ ID NO: 640360 - DNA, 120 bp, Artificial Sequence
  ENSG00000181555_11 (sequence is synthesized)
ttattatgactctgatcgtcgctaccataggagctccccttatcgagagaggacgcgctattctcggccatacacagataacagagcacgagagagttctgactcagaagaagagtataa

SEQ ID NO: 640361 - DNA, 120 bp, Artificial Sequence
  ENSG00000181555_12 (sequence is synthesized)
gaagacatactcaaggcgtacctcatctcattcctcttcttacagagacctaaggacatcatcctattctaaatctgatcgggactgtaaaactgagacctcttacttagagatggaaag

SEQ ID NO: 640362 - DNA, 120 bp, Artificial Sequence
  ENSG00000181555_13 (sequence is synthesized)
aagaggcaagtattcttcaaaactagaaagagaatctaaaaggacttcagaaaatgaagcaattaaaagatgttgttctccccctaatgaactgggattccgacgagggtcatcatattc

SEQ ID NO: 640363 - DNA, 120 bp, Artificial Sequence
  ENSG00000181555_14 (sequence is synthesized)
taagcatgacagtagtgcttcccgttataaatctaccctttcaaaacctatacccaagtctgataaatttaaaaattctttctgttgtacagaattaaatgaagaaatcaaacagtctca

SEQ ID NO: 640364 - DNA, 120 bp, Artificial Sequence
  ENSG00000181555_15 (sequence is synthesized)
ttcttttagtttacagacaccttgttcaaaaggtagtgaattaagaatgattaataaaaatcctgaaagagaaaaggctgggtctccagctccatcaaatcgattaaatgattcacctac

SEQ ID NO: 640365 - DNA, 120 bp, Artificial Sequence
  ENSG00000181555_16 (sequence is synthesized)
tttaaaaaagctagatgaattgcctatttttaagtccgaatttataacacatgatagccatgatagtattaaggaattagactctttatctaaagtgaagaatgatcaattaagaagttt

SEQ ID NO: 640366 - DNA, 120 bp, Artificial Sequence
  ENSG00000181555_17 (sequence is synthesized)
ttgtcccatagaattaaatataaatggatctcctggggcagaatctgatttggcaacattttgcacttctaaaactgatgctgttttaatgacttctgatgatagtgtgactggatcgga

SEQ ID NO: 640367 - DNA, 120 bp, Artificial Sequence
  ENSG00000181555_18 (sequence is synthesized)
attatcccctttggtcaaagcatgcatgctttcatcaaatggatttcagaatattagtaggtgcaaagaaaaagacttggatgatacctgcatgctgcataagaagtcagaaagcccatt

SEQ ID NO: 640368 - DNA, 120 bp, Artificial Sequence
  ENSG00000181555_19 (sequence is synthesized)
tagagaaacagaacctctggtgtcaccacaccaagataaactcatgtctatgccagttatgactgtggattattccaaaacagtagttaaagaaccagttgatacgagggtttcttgctg

SEQ ID NO: 640369 - DNA, 120 bp, Artificial Sequence
  ENSG00000181555_20 (sequence is synthesized)
caaaaccaaagattcagacatatactgtactttgaacgatagcaacccttctttgtgtaactctgaagctgaaaatattgagccttcagttatgaagatttcttcaaatagctttatgaa

SEQ ID NO: 640370 - DNA, 120 bp, Artificial Sequence
  ENSG00000181555_21 (sequence is synthesized)
tgtgcatttggaatcaaaaccagttatatgtgatagtagaaatttgacagatcactcaaaatttgcatgtgaagaatataagcagagcatcggtagcactagttcagcttctgttaatca

SEQ ID NO: 640371 - DNA, 120 bp, Artificial Sequence
  ENSG00000181555_22 (sequence is synthesized)
ttttgatgatttatatcaacctattgggagttcaggtattgcttcatctcttcagagtcttccaccaggaataaaggtggacagtctaactctcttgaaatgcggagagaacacatctcc

SEQ ID NO: 640372 - DNA, 120 bp, Artificial Sequence
  ENSG00000181555_23 (sequence is synthesized)
agttctggatgcagtgctaaagagtaaaaaaagttcagagtttttaaagcatgcagggaaagaaacaatagtagaagtaggtagtgaccttcctgattcaggaaagggatttgcttccag

SEQ ID NO: 640373 - DNA, 120 bp, Artificial Sequence
  ENSG00000181555_24 (sequence is synthesized)
ggagaacaggcgtaataatgggttatctgggaaatgtttgcaagaggctcaagaagaagggaattccatattgcctgaaagaagaggaagaccagaaatctctttagatgaaagaggaga

SEQ ID NO: 640374 - DNA, 120 bp, Artificial Sequence
  ENSG00000181555_25 (sequence is synthesized)
aggaggacatgtgcatacttctgatgactcagaagttgtattttcttcttgtgatttgaatttaaccatggaagacagtgatggtgtaacttatgcattaaagtgtgacagtagtggtca

SEQ ID NO: 640375 - DNA, 120 bp, Artificial Sequence
  ENSG00000181555_26 (sequence is synthesized)
tgccccagaaattgtgtctacagttcatgaagattattctggctcttctgaaagttcaaatgatgaaagtgattcagaagatacagattcggatgatagcagtattccaagaaaccgtct

SEQ ID NO: 640376 - DNA, 120 bp, Artificial Sequence
  ENSG00000181555_27 (sequence is synthesized)
ccagtctgttgtggttgtgccaaagaattctactttgcccatggaagaaacaagtccttgttcttctcggagcagtcaaagttatagacactattctgaccattgggaagatgagagatt

SEQ ID NO: 640377 - DNA, 120 bp, Artificial Sequence
  ENSG00000181555_28 (sequence is synthesized)
ggagtcaaggagacatttgtatgaggaaaaatttgaaagtatagcaagtaaagcctgtcctcaaactgataagtttttccttcataaaggaacagagaagaatccggaaatttcttttac

SEQ ID NO: 640378 - DNA, 120 bp, Artificial Sequence
  ENSG00000181555_29 (sequence is synthesized)
acagtccagtagaaaacaaatagataatcgcctgcctgaactttctcatcctcagagtgatggggttgatagtacaagtcatacagatgtgaaatctgaccctctgggtcacccaaattc

SEQ ID NO: 640379 - DNA, 120 bp, Artificial Sequence
  ENSG00000181555_30 (sequence is synthesized)
agaggaaaccgtgaaagccaaaataccttctaggcagcaagaagagctgccaatttattcttctgattttgaagatgtcccaaataagtcttggcaacagaccactttccaaaacaggcc

SEQ ID NO: 640380 - DNA, 120 bp, Artificial Sequence
  ENSG00000181555_31 (sequence is synthesized)
agatagtagactgggaaaaacagaattgagtttttcttcctcttgtgagataccacatgtggatggcttgcactcatcagaagagctcagaaacttaggttgggacttctctcaagaaaa

SEQ ID NO: 640381 - DNA, 120 bp, Artificial Sequence
  ENSG00000181555_32 (sequence is synthesized)
gccttctaccacgtatcagcaacctgacagtagctatggagcttgtggtggacacaagtatcagcaaaatgcagaacagtatggtgggacacgtgattactggcaaggcaatggttactg

SEQ ID NO: 640382 - DNA, 120 bp, Artificial Sequence
  ENSG00000181555_33 (sequence is synthesized)
ttgggatcaacaggatggatcccatttttcagaccagtccgataaatttcttctatcccttcagaaagacaaggggtcagtgcaagcacctgaaataagcagcaattccattaaggacac

SEQ ID NO: 640383 - DNA, 120 bp, Artificial Sequence
  ENSG00000181555_34 (sequence is synthesized)
tttagctgtgaatgaaaagaaagatttttcaaaaaacttagaaaaaaatgatatcaaagatagagggcctcttaaaaaaaggaggcaggaaatagagagtgattctgaaagtgatggtga

SEQ ID NO: 640384 - DNA, 120 bp, Artificial Sequence
  ENSG00000181555_35 (sequence is synthesized)
gcttcaggacagaaagaaagttagagtggaggtagagcagggagagacatcagtgcccccaggttcagcactggttgggccctcctgtgtcatggatgacttcagggacccacagcgatg

SEQ ID NO: 640385 - DNA, 120 bp, Artificial Sequence
  ENSG00000181555_36 (sequence is synthesized)
gaaggaatgtgccaagcaagggaaaatgccatgttactttgatcttattgaagaaaatgtttatttaacagaaagaaagaagaataaatctcatcgagatattaagcgaatgcagtgtga

SEQ ID NO: 640386 - DNA, 120 bp, Artificial Sequence
  ENSG00000181555_37 (sequence is synthesized)
gtgtacacctctttctaaagatgaaagagctcaaggtgaaatagcatgtggggaagattgtcttaatcgtcttctcatgattgaatgttcttctcggtgtccaaatggggattattgttc

SEQ ID NO: 640387 - DNA, 120 bp, Artificial Sequence
  ENSG00000181555_38 (sequence is synthesized)
caatagacggtttcagagaaaacagcatgcagatgtggaagtcatactcacagaaaagaaaggctggggcttgagagctgccaaagaccttccttcgaacacctttgtcctagaatattg

SEQ ID NO: 640388 - DNA, 120 bp, Artificial Sequence
  ENSG00000181555_39 (sequence is synthesized)
tggagaggtactcgatcataaagagtttaaagctcgagtgaaggagtatgcacgaaacaaaaacatccattactatttcatggccctgaagaatgatgagataatagatgccactcaaaa

SEQ ID NO: 640389 - DNA, 120 bp, Artificial Sequence
  ENSG00000181555_40 (sequence is synthesized)
aggaaattgctctcgtttcatgaatcacagctgtgaaccaaattgtgaaacccaaaaatggactgtgaacggacaactgagggttgggttttttaccaccaaactggttccttcaggctc

SEQ ID NO: 640390 - DNA, 120 bp, Artificial Sequence
  ENSG00000181555_41 (sequence is synthesized)
agagttaacgtttgactatcagttccagagatatggaaaagaagcccagaaatgtttctgcggatcagccaattgccggggttacctgggaggagaaaacagagtcagcatcagagcagc

SEQ ID NO: 640391 - DNA, 120 bp, Artificial Sequence
  ENSG00000181555_42 (sequence is synthesized)
aggagggaaaatgaagaaggaacgatctcgtaagaaggattcagtggatggagagctagaagctctgatggaaaatggtgagggtctctctgataaaaaccaggtgctcagcttatcccg

SEQ ID NO: 640392 - DNA, 120 bp, Artificial Sequence
  ENSG00000181555_43 (sequence is synthesized)
gctaatggttagaattgaaactttggagcagaaacttacctgtctggaactcatacagaacacacactcacagtcctgcctgaagtcctttctggaacgtcatgggctgtctttgttgtg

SEQ ID NO: 640393 - DNA, 120 bp, Artificial Sequence
  ENSG00000181555_44 (sequence is synthesized)
gatctggatggcagagctaggtgacggccgggaaagtaaccagaagcttcaggaagagattataaagactttggaacacttgcccattcctactaaaaatatgttggaggaaagcaaagt

SEQ ID NO: 640394 - DNA, 120 bp, Artificial Sequence
  ENSG00000181555_45 (sequence is synthesized)
acttccaattattcaacgctggtctcagactaagactgctgtccctccgttgagtgaaggagatgggtattctagtgagaatacatcgcgtgctcatacaccactcaacacacctgatcc

SEQ ID NO: 640395 - DNA, 120 bp, Artificial Sequence
  ENSG00000181555_46 (sequence is synthesized)
ttccaccaagctgagcacagaagctgacacagacactcccaagaaactaatgtttcgcagactgaaaattataagtgaaaatagcatggacagtgcaatctctgatgcaaccagtgagct

SEQ ID NO: 640396 - DNA, 120 bp, Artificial Sequence
  ENSG00000181555_47 (sequence is synthesized)
agaaggcaaggatggcaaagaggatcttgatcaattagaaaatgtccctgtagaggaagaggaagaattgcagtcacaacagctactcccacaacagctgcctgaatgcaaagttgatag

SEQ ID NO: 640397 - DNA, 120 bp, Artificial Sequence
  ENSG00000181555_48 (sequence is synthesized)
tgaaaccaacatagaagctagtaagctacctacatctgaaccagaagctgacgctgaaatagagcccaaagagagcaacggcacaaaactagaagaacctattaatgaagaaacaccatc

SEQ ID NO: 640398 - DNA, 120 bp, Artificial Sequence
  ENSG00000181555_49 (sequence is synthesized)
ccaagatgaagaggagggtgtgtctgatgtggagagtgaaaggagccaagaacagccagataaaacagtggatataagtgatttggccaccaaactcctggacagttggaaagacctaaa

SEQ ID NO: 640399 - DNA, 120 bp, Artificial Sequence
  ENSG00000181555_50 (sequence is synthesized)
ggaggtatatcgaattccaaagaaaagtcaaactgaaaaggaaaacacaacaactgaacgaggaagggatgctgttggcttcagagatcaaacacctgccccgaagactcctaataggtc

SEQ ID NO: 640400 - DNA, 120 bp, Artificial Sequence
  ENSG00000181555_51 (sequence is synthesized)
aagagagagagacccagacaagcaaactcaaaataaagagaaaaggaaacgaagaagctccctctcaccaccctcttctgcctatgagcggggaacaaaaaggccagatgacagatatga

SEQ ID NO: 640401 - DNA, 120 bp, Artificial Sequence
  ENSG00000181555_52 (sequence is synthesized)
tacaccaacttctaaaaagaaagtacgaattaaagaccgcaataaactttctacagaggaacgccggaagttgtttgagcaagaggtggctcaacgggaggctcagaaacaacagcaaca

SEQ ID NO: 640402 - DNA, 120 bp, Artificial Sequence
  ENSG00000181555_53 (sequence is synthesized)
gatgcagaacctgggaatgacatcaccactgccctatgactctcttggttataatgccccgcatcatccctttgctggttacccaccaggttatcccatgcaggcctatgtggatcccag

SEQ ID NO: 640403 - DNA, 120 bp, Artificial Sequence
  ENSG00000181555_54 (sequence is synthesized)
caaccctaatgctggaaaggtgctcctgcccacacccagcatggacccagtgtgttctcctgctccttatgatcatgctcagcccttggtgggacattctacagaacccctttctgcccc

SEQ ID NO: 640404 - DNA, 120 bp, Artificial Sequence
  ENSG00000181555_55 (sequence is synthesized)
tccaccagtaccagtggtgccacatgtggcagctcctgtggaagtttccagttcccagtatgtggcccagagtgatggtgtagtacaccaagactccagcgttgctgtcttgccagtgcc

SEQ ID NO: 640405 - DNA, 120 bp, Artificial Sequence
  ENSG00000181555_56 (sequence is synthesized)
ggcccccggcccagttcagggacagaattatagtgtttgggattcaaaccaacagtctgtcagtgtacagcagcagtactctcctgcacagtctcaagcaaccatatattatcaaggaca

SEQ ID NO: 640406 - DNA, 120 bp, Artificial Sequence
  ENSG00000181555_57 (sequence is synthesized)
gacatgtccaacagtctatggtgtgacatcaccttattcacagacaactccaccaattgtacagagttatgcccagccaagtcttcagtatatccaggggcaacagattttcacagctca

SEQ ID NO: 640407 - DNA, 120 bp, Artificial Sequence
  ENSG00000181555_58 (sequence is synthesized)
tccacaaggagtggtggtacagccagccgcagcagtgactacaatagttgcaccagggcagcctcagcccttgcagccatctgaaatggttgtgacaaataatctcttggatctgccgcc

SEQ ID NO: 640408 - DNA, 120 bp, Artificial Sequence
  ENSG00000181555_59 (sequence is synthesized)
cccctctcctcccaaaccaaaaaccattgtcttacctcccaactggaagacagctcgagatccagaagggaagatttattactaccatgtgatcacaaggcagactcagtgggatcctcc

SEQ ID NO: 640409 - DNA, 120 bp, Artificial Sequence
  ENSG00000181555_60 (sequence is synthesized)
tacttgggaaagcccaggagatgatgccagccttgagcatgaagctgagatggacctgggaactccaacatatgatgaaaaccccatgaaggcctcgaaaaagcccaagacagcagaagc

SEQ ID NO: 640410 - DNA, 120 bp, Artificial Sequence
  ENSG00000181555_61 (sequence is synthesized)
agacacctccagtgaactagcaaagaaaagcaaagaagtattcagaaaagagatgtcccagttcatcgtccagtgcctgaacccttaccggaaacctgactgcaaagtgggaagaattac

SEQ ID NO: 640411 - DNA, 120 bp, Artificial Sequence
  ENSG00000181555_62 (sequence is synthesized)
cacaactgaagactttaaacatctggctcgcaagctgactcacggtgttatgaataaggagctgaagtactgtaagaatcctgaggacctggagtgcaatgagaatgtgaaacacaaaac

SEQ ID NO: 640412 - DNA, 120 bp, Artificial Sequence
  ENSG00000181555_63 (sequence is synthesized)
caaggagtacattaagaagtacatgcagaagtttggggctgtttacaaacccaaagaggacactgaattagagtgactgttgggccagggtgggaggatgggtggtcaggtaagacagac

SEQ ID NO: 640413 - DNA, 120 bp, Artificial Sequence
  ENSG00000181555_64 (sequence is synthesized)
tctagggagaggaaatcctgtgggcctttctgtcccacccctgtcagcactgtgctactgatgatacatcaccctggggaattcaaccctgcagatgtcaactgaaggccacaaaaatga

SEQ ID NO: 640414 - DNA, 120 bp, Artificial Sequence
  ENSG00000181555_65 (sequence is synthesized)
actccatctacaagtgattacctagttgtgagctgttggcatgtggttagaagccatcagaggtgcaagggcttagaaaagaccctggccagacctgactccactcttaaacctgggtct

SEQ ID NO: 640415 - DNA, 120 bp, Artificial Sequence
  ENSG00000181555_66 (sequence is synthesized)
tctccttggcggtgctgtcagcgcacagacccatgcgcatccccacccacaaccctttaccctgatgatctgtattatattttaatgtatatgtgaatatattgaaaataatttgttttt

SEQ ID NO: 640416 - DNA, 120 bp, Artificial Sequence
  ENSG00000181555_67 (sequence is synthesized)
atcgaattccaaagaaaagtcaaactgaaaaggaaaacacaagtaggtattcagagatactctgtgttgatggctttacaaatattcttttgttatgtgcagaggtaactgataagaact

SEQ ID NO: 640417 - DNA, 120 bp, Artificial Sequence
  ENSG00000181555_68 (sequence is synthesized)
caaggagcttgttaacatcaccagctgaccatgtgtctccttttctcaactccatttccaacttcgtgctgaagaaaaacgagaacctagcgtgcattctgtgaagaaacaggaagatgg

SEQ ID NO: 640418 - DNA, 120 bp, Artificial Sequence
  ENSG00000181555_69 (sequence is synthesized)
atataataggtgaaaagaggacagaggtggttaactcactggcgccggcgttattttggtgcgtccattgccgacaatggatgtcgttccgggaaaatccctactcctggcgagaaagga

SEQ ID NO: 640419 - DNA, 120 bp, Artificial Sequence
  ENSG00000181555_70 (sequence is synthesized)
tatgtgccaattaaacatttacatataagtaatagttctctgaactatttaagcaattttattcttaatccaaacatgtatatgatctcttattttcatattactaggtattctcataaa

SEQ ID NO: 640420 - DNA, 120 bp, Artificial Sequence
  ENSG00000181555_71 (sequence is synthesized)
atggaagaattgtttatttcttggctagttttgtctcccaaagaaagatgattggaaaaataatgaatatttttaaagagcagttttcagacatttctattagtaatagcagacttgttg

SEQ ID NO: 640421 - DNA, 120 bp, Artificial Sequence
  ENSG00000181555_72 (sequence is synthesized)
cttcttacatggtggtggcaagagaaaaagaggaagaagcaaaagtgaaaacccttgataaacccatcagatcttgtgtgacttaatcaccatcacaagaataacacgagaaaggccggc

SEQ ID NO: 640422 - DNA, 120 bp, Artificial Sequence
  ENSG00000181555_73 (sequence is synthesized)
ttggttttcgttttgcttttagcctctacatgctaggatcacaggaagactttgtaaggacagtttaagttctcctgcaaggtttaatttgttatcatgtaaatattctaaagcaggctg

SEQ ID NO: 640423 - DNA, 120 bp, Artificial Sequence
  ENSG00000181555_74 (sequence is synthesized)
ccttgtggttttggccagccttgtgctatgttgataagattgatttactgcttaaaatcactttactttatccaatttttactgaactttttatgtaaaaaaataaaatcaattaaagaa

SEQ ID NO: 640424 - DNA, 120 bp, Artificial Sequence
  ENSG00000181555_75 (sequence is synthesized)
ggttaccgccgtgtccgcaccgacccggccatcccggggctcggcggtcctctcgggctcctcgtggctcgtccgggccccgctgctagccaaagggcagagtcggaggagctgccggtg

SEQ ID NO: 640425 - DNA, 120 bp, Artificial Sequence
  ENSG00000181555_76 (sequence is synthesized)
aaaagccttcctgaaaagagcagcgtggcattgtttcttggatatcccaggagcagcacttcattggtttttgcttatagaaactgtccacctgtttaattttcaatgtcattccaatgt

SEQ ID NO: 640426 - DNA, 120 bp, Artificial Sequence
  ENSG00000181555_77 (sequence is synthesized)
cattgaaagctaaacagttggagaatttctatgaccaaaaaaaaaaaagcttttattttcttatgataaagtaaaatcaaagtaagtaaatgaatagggaattagtaaaaaaagaaactt

SEQ ID NO: 640427 - DNA, 120 bp, Artificial Sequence
  ENSG00000181555_78 (sequence is synthesized)
tggggtttgaaacaaaaaattgttttgcacatttatgtccaaatatataaacaaaaaattttaaaatgttatgggtatatctttaagattgtgccaacttggaagtcagtctgtttatta

SEQ ID NO: 640428 - DNA, 120 bp, Artificial Sequence
  ENSG00000181562_0 (sequence is synthesized)
agatttccagggctctgagaaaaggaggaggacgcagactctgctcttcagatccacatgctgatccccactacaatcagtgacctgaactcagagtccaagtaggacacgcaggtggac

SEQ ID NO: 640429 - DNA, 120 bp, Artificial Sequence
  ENSG00000181562_1 (sequence is synthesized)
gtggtgactgagatgacatcctctctaaagatttggggcatactcttggccctgctttgcatcctttgcaggctgtgtgtatacagtaacaacatttactggagagaattcataaaactt

SEQ ID NO: 640430 - DNA, 120 bp, Artificial Sequence
  ENSG00000181562_2 (sequence is synthesized)
cattacttaagtccaagtcgagaattcaaagagtacaaatgtgatgtcctcatgagagaaaaagaggctctgaaaggcaagagctttcatatgttcatctatagcttatggttcaaaatt

SEQ ID NO: 640431 - DNA, 120 bp, Artificial Sequence
  ENSG00000181562_3 (sequence is synthesized)
ggagaagtacaacaataggtacacagagagcagaagcttcagctacattgaattccattgtggcgtagatggatatgttgataacatagaagacctgaggattatagaacctatcagcaa

SEQ ID NO: 640432 - DNA, 120 bp, Artificial Sequence
  ENSG00000181562_4 (sequence is synthesized)
ctagaaagtctatgcacatcctcagatattggtagagtattcagtgcttccaaagtggtgggccctgcctccatcaatagcccctgccactccccgcttacatttatgtgtcagtgtttt

SEQ ID NO: 640433 - DNA, 120 bp, Artificial Sequence
  ENSG00000181562_5 (sequence is synthesized)
ccaactacttagagtttatgtacctcgtgatttcttgataccaaatctttgtgtggtttctgtatctgtaatacaattttgtcctaatttgcctaatttacacccacattttttccaaga

SEQ ID NO: 640434 - DNA, 120 bp, Artificial Sequence
  ENSG00000181562_6 (sequence is synthesized)
ttcagctcatatggcatctgtcctcgactaacctaagactttcctgatattgactctctttatacctacccaagctgaacgaccctccttttcttaaataaaatatattattctaacgta

SEQ ID NO: 640435 - DNA, 120 bp, Artificial Sequence
  ENSG00000181577_0 (sequence is synthesized)
gccaacctgatgactggcggctgaggagtggggtgatgatgccactggcagaagcaggcgccctggcccaaggaggaggcccttcagcaacggagtgggcctgcattctgcggaggaaga

SEQ ID NO: 640436 - DNA, 120 bp, Artificial Sequence
  ENSG00000181577_1 (sequence is synthesized)
cccccaggcacaagcagcccaccttactgatggtcagagcatccagaagaagtggcaagacttcagctgtcctcaaagcaggaagacagagtgtttctggcagaaagaacagcacaagca

SEQ ID NO: 640437 - DNA, 120 bp, Artificial Sequence
  ENSG00000181577_2 (sequence is synthesized)
aagatctggtaaccctaggtgcctccagtttgagggaggagagaggacaccccctccaccccagacataggaaagcagtccacctgcgcaccaggggcaggacacgtggctgggtgcaga

SEQ ID NO: 640438 - DNA, 80 bp, Artificial Sequence
  ENSG00000181577_3 (sequence is synthesized)
ccggtagagcgcgcggcggcggcggcggcggcggcggcgggaggagacgcaggtcacgcccccttcccaccacctcccgc

SEQ ID NO: 640439 - DNA, 120 bp, Artificial Sequence
  ENSG00000181577_4 (sequence is synthesized)
gggcgcgcgcgccgaggagcccgggacaggtgactcctagaggactgcgtctgcgcctcccccggcgggagtcccttcttcgcggcctctgccgccccctgcgtcccctcctgggcttcc

SEQ ID NO: 640440 - DNA, 120 bp, Artificial Sequence
  ENSG00000181577_5 (sequence is synthesized)
gagagtctgactcagccaagccggcatcgcttcgcctcctacaacacaccccgagcgcgagaagaaattacaggattgcaggggcacggctaatgcgctctaattacccaccgccgctgt

SEQ ID NO: 640441 - DNA, 120 bp, Artificial Sequence
  ENSG00000181577_6 (sequence is synthesized)
catccgcggcgctccgcggcgctgggccaacgcgccgtaattaagacgccgctccccggtcccggaaccctcccttcgccaccctccacccacccacctcgcggtccccaggaccactgg

SEQ ID NO: 640442 - DNA, 120 bp, Artificial Sequence
  ENSG00000181577_7 (sequence is synthesized)
ctgccaactcctgccgccctctgggactgcccctcagtcccaggagagctatgaggcctcactgggggcagaacttggggagaccgaagccggcccttccactcccctaaacctacagtc

SEQ ID NO: 640443 - DNA, 120 bp, Artificial Sequence
  ENSG00000181577_8 (sequence is synthesized)
ctggaaggtctctgctggaagagactgggagagtggggaggggccagggacctatttcgttgacagaaacagtgaggtctattggaaagttagccttcagtgggaggagtggcaaaggca

SEQ ID NO: 640444 - DNA, 120 bp, Artificial Sequence
  ENSG00000181577_9 (sequence is synthesized)
cgcagggcagcagtacccccgtttggcacttgaggcacggagaagggaagggaagtccgcccagccagaactcccagacccgctcgtttaacagtggctttatgagcagcacgacggact

SEQ ID NO: 640445 - DNA, 120 bp, Artificial Sequence
  ENSG00000181577_10 (sequence is synthesized)
ccctcccctggcggggaaattaccttcctgcgaagaaaggtgacatccccgccacagacacggaggccccgcctgctggccagctgtggccgccataggggagctggtgaggagtgaggt

SEQ ID NO: 640446 - DNA, 120 bp, Artificial Sequence
  ENSG00000181577_11 (sequence is synthesized)
ggctctggcctcccatgtcaggtagggtgagagaggccctgaagatagaagccaggcccgaaggccagaattaaaggggtagcttggccatcagctccttcccccaaaaccaggctcaga

SEQ ID NO: 640447 - DNA, 120 bp, Artificial Sequence
  ENSG00000181577_12 (sequence is synthesized)
gctctcctctatcagcaattctttcctgaggtccagggtgttgcaaactcatggccttgggccacgttttaccttcagtgaggttttgtttggcttgcaatgagtacatgggttttaggt

SEQ ID NO: 640448 - DNA, 120 bp, Artificial Sequence
  ENSG00000181577_13 (sequence is synthesized)
tgaatgtgagagtctgcagacaatgtgggttctccgactgccctcccagtgaaggtggacctctgatttagaccggcccgctgggcccgtgcctacatccttttcctcagcgtcaggatc

SEQ ID NO: 640449 - DNA, 120 bp, Artificial Sequence
  ENSG00000181577_14 (sequence is synthesized)
ttagtccccatgattgctgcccctttgtggtctgcatgtttcttggtaagggtgcccagtcaagtgtctctgggagccccctcttctctgtcatcgtcaggctccccacttgcagtggcc

SEQ ID NO: 640450 - DNA, 120 bp, Artificial Sequence
  ENSG00000181577_15 (sequence is synthesized)
gtggtggctgcacatgctcccggatacccctccagcactcccttttgtcatcttgagtttcagtccgtgacttgggtggcaccctatcttctccatcagggatggtagctatttttctgc

SEQ ID NO: 640451 - DNA, 120 bp, Artificial Sequence
  ENSG00000181577_16 (sequence is synthesized)
catgagactagaggttgcttgagaacaggaaattggatctctcccttcaggctgggatttcactaagggctggagaaggggggaatatgggaggattatctcctatcacagggagcgctc

SEQ ID NO: 640452 - DNA, 120 bp, Artificial Sequence
  ENSG00000181577_17 (sequence is synthesized)
tgagggcaaggctgtgtctccgattcagactgacggttccctgaggatggggctgtttctcccctccgactggggctccctgaggatggggctgtttctcccctccgactggggctccct

SEQ ID NO: 640453 - DNA, 120 bp, Artificial Sequence
  ENSG00000181577_18 (sequence is synthesized)
gaggacagggctgtgtctcccctcagcctggggctccctgagtcagggctgtgtctcccctcagactggggctccctgaggacggggctgtgtctgcctcagactgggaatccctgaaga

SEQ ID NO: 640454 - DNA, 120 bp, Artificial Sequence
  ENSG00000181577_19 (sequence is synthesized)
tggggccgtgtctccctcaaagtggggctccctcaggacagcgttgtgtctcccctcagactgcggctccctgaggacggggctgtgtctccctcagactggggctccctgaagaaaggg

SEQ ID NO: 640455 - DNA, 120 bp, Artificial Sequence
  ENSG00000181577_20 (sequence is synthesized)
ctgcttctccctcagactggagctccctgaagatggggctgtgtccccctcagactggggctgcctgaggatgaggctgcatctcccctcagactggagctccctgagggcagggctgtc

SEQ ID NO: 640456 - DNA, 120 bp, Artificial Sequence
  ENSG00000181577_21 (sequence is synthesized)
cccatgaggacagggctgtctccccctccatctggagctccctgaaggcaatggcctctcccctcaaatgggacatttgcaccccaccccaccctctggctccccatggcgcccaggcat

SEQ ID NO: 640457 - DNA, 120 bp, Artificial Sequence
  ENSG00000181577_22 (sequence is synthesized)
tcctcccaggacaccatttgtcacgctttgatgaatgaaacttactaagaataactcagtccttgtagactctaaaggacagggggagggagagggaggaggctggtgattgtgggggtg

SEQ ID NO: 640458 - DNA, 120 bp, Artificial Sequence
  ENSG00000181577_23 (sequence is synthesized)
ctgggggagggaggacacaatccatttattcaatagcatttcctgagtccccagctgggcactgggggagacacagtgagtgccacagagccccctactgtgccatttctgccactgact

SEQ ID NO: 640459 - DNA, 120 bp, Artificial Sequence
  ENSG00000181577_24 (sequence is synthesized)
gccagggcagactctgagacagaaagttcaggttcctgcttcagagcctccccaccccagcagtcattacctcagggccacccagccccctccatgccagtcatgagctccctctgcccc

SEQ ID NO: 640460 - DNA, 120 bp, Artificial Sequence
  ENSG00000181577_25 (sequence is synthesized)
tcccttcagtggaggggagactttgaaatcaggtgcttggggggggggcgctgctcccagtgggggtgtgaggaacctggaggatgaatccctgtcccccgccctccccctactctattc

SEQ ID NO: 640461 - DNA, 120 bp, Artificial Sequence
  ENSG00000181577_26 (sequence is synthesized)
ttccttaccctgcccctttccactccaaaacctcaagcctctggttcacatctgagtgacctttccaaagcaactgttctcagggggtccttgggagccgggaggctgtgaccttaaccc

SEQ ID NO: 640462 - DNA, 120 bp, Artificial Sequence
  ENSG00000181577_27 (sequence is synthesized)
acttctttggacagtgccttcctggcactccacccccacctgccacctcctgagaggaacatttcggctggtcttggcaaaaacatcagtctatgatccaggcagcctggtacagtacca

SEQ ID NO: 640463 - DNA, 120 bp, Artificial Sequence
  ENSG00000181577_28 (sequence is synthesized)
gctctgccactgacaccactgtgaccttgggaagccatttacacatatgggtctcagtttctccatatgtaaaatgacttttgtttagctttcctgattttcaaacctttttttcaaaca

SEQ ID NO: 640464 - DNA, 120 bp, Artificial Sequence
  ENSG00000181577_29 (sequence is synthesized)
gtgaatcctcttgtttaaattgtaaatcatgtggcatctctgttctctgtggtaacataggaaaaaggtcgggggttctttggtcaaaataggggtgggcttcatgccccagcggttagt

SEQ ID NO: 640465 - DNA, 120 bp, Artificial Sequence
  ENSG00000181577_30 (sequence is synthesized)
ccatgacacacgaatgcacacatacgtgtgcgcacagatcagctcctgggcactgcagagtccacttcacaaacgtatgaactctgaaatcctttcctgctcaaacattctgggaccctg

SEQ ID NO: 640466 - DNA, 120 bp, Artificial Sequence
  ENSG00000181577_31 (sequence is synthesized)
acaggaccgggagctctagaaccaggggtgccgacagctctaaggaggaggctgtgatttcagacccctgggcctggggctggggcttgagccagcaggagttcctttccacacttgggt

SEQ ID NO: 640467 - DNA, 120 bp, Artificial Sequence
  ENSG00000181577_32 (sequence is synthesized)
ccaaagtcactgcctgggcaaaccctcactgctctctgccctccccacccatccaagccagaggtcagataggcttatctgatgctgagcccccttagaggggtggcgggggccaagtgg

SEQ ID NO: 640468 - DNA, 120 bp, Artificial Sequence
  ENSG00000181577_33 (sequence is synthesized)
agacagagtgtccttcatcagtggggaggggcagcaggttgggtggcaggctctgggagttcttctctggaatccctctcacatgcctcggaggagggtcagagtggtagggtgggaggg

SEQ ID NO: 640469 - DNA, 120 bp, Artificial Sequence
  ENSG00000181577_34 (sequence is synthesized)
ccagcagggccctgcagtggctgagggctgggggctgaccccaggaagcccaaggcgggcagcataggtaggggagactcagggagctgcaccactccatccacaagtgtgagaatttga

SEQ ID NO: 640470 - DNA, 120 bp, Artificial Sequence
  ENSG00000181577_35 (sequence is synthesized)
taccaacagggaacgcaggtaggacagggcccatcagacactgatgacaggaaggcaagagtgaagagaggagcaagtacagcccagggaagaaaaaagtcaccaataagaggcaggcct

SEQ ID NO: 640471 - DNA, 120 bp, Artificial Sequence
  ENSG00000181577_36 (sequence is synthesized)
aggcctgggctcccagcttggggcagcagagcagatcccttcaagggagaaaccacagatatgccccagcctctccttgatgctgtgagtcaggggtgcttagaaaggctcgtgttcagt

SEQ ID NO: 640472 - DNA, 120 bp, Artificial Sequence
  ENSG00000181577_37 (sequence is synthesized)
tccaaatgcccagggtcaccacgaaggaggtgctgccccctcccctgcaccccaagcaacctgcatctgcatggccctggagaggccattgctcctgatttccctcaggaaacatggcca

SEQ ID NO: 640473 - DNA, 120 bp, Artificial Sequence
  ENSG00000181577_38 (sequence is synthesized)
gggagctgctgtgagagttttccccgagtccccacctccctgagatgtacaatgagggaagggaagaggtatctcaccgacttctgcccttccatctcaaacaaagacacacacacactc

SEQ ID NO: 640474 - DNA, 120 bp, Artificial Sequence
  ENSG00000181577_39 (sequence is synthesized)
tctctctctgtctctctgtctctctctctttctggcatttgtccccagagagtgcctagagacttcacagccttggccctggaaacccctagacagccgctatgttgccaggcacggctc

SEQ ID NO: 640475 - DNA, 120 bp, Artificial Sequence
  ENSG00000181577_40 (sequence is synthesized)
tatgttgccaggcacggctctgggcactgaggctacagcaatgaaaaaatcagccaagttctctgccttcatggtgctcacattctaggcagagaaagacagatgatcaacaagtgaaaa

SEQ ID NO: 640476 - DNA, 120 bp, Artificial Sequence
  ENSG00000181577_41 (sequence is synthesized)
aatcataaagctcaggtcatggtgtggcaagtattagagtggagagcgatggggtggggtgggggcgctgttttatatggggtggtccaaaaatatcttggtgaggtggtgacatttgag

SEQ ID NO: 640477 - DNA, 120 bp, Artificial Sequence
  ENSG00000181577_42 (sequence is synthesized)
tggaaacctggacagcaagaagctagtcgtgctttggggtcaaaaggactccaaaatttcagttttttaaatggaaaacatgtgtttacccataaacattaaagagcagggaaattagaa

SEQ ID NO: 640478 - DNA, 120 bp, Artificial Sequence
  ENSG00000181577_43 (sequence is synthesized)
taattgccaacctgatgactggcggctgaggagtggggtgatgatgccactggcagaagcaggcgccctggcccaaggaggaggcccttcagcaacggagtgggcctgcattctgcggag

SEQ ID NO: 640479 - DNA, 120 bp, Artificial Sequence
  ENSG00000181577_44 (sequence is synthesized)
ggtgagactgaggtggctgcagtcaaaggagaagggggcaggggtttgttgaggctgtgaccgtgggaaagcgcttctccagggcttccctcagcttcaaggagaaagagttcagaggcc

SEQ ID NO: 640480 - DNA, 120 bp, Artificial Sequence
  ENSG00000181577_45 (sequence is synthesized)
ctgaggggatgaagggacttgtgaaggggcttcagggggatgggttggggggaaggaggttcctattcttactccccttctgcctatgctcccccaatgttcctgtctctcccctccccc

SEQ ID NO: 640481 - DNA, 120 bp, Artificial Sequence
  ENSG00000181577_46 (sequence is synthesized)
gtgatgatgccactggcagaagcaggcgccctggcccaaggaggaggcccttcagcaacggagtgggcctgcattctgcggaggttgttgaggaaggagggagtagatggagggctcttt

SEQ ID NO: 640482 - DNA, 80 bp, Artificial Sequence
  ENSG00000181585_0 (sequence is synthesized)
caaagcccgtggccaccgagcgccggctggcaggggcagtgaccggcggccggcccgttcgtccctgggctccgcaagcg

SEQ ID NO: 640483 - DNA, 120 bp, Artificial Sequence
  ENSG00000181585_1 (sequence is synthesized)
cccctctgcgtgctgggcggcgccgcactcggggtgtgcctcgcgggggttgccgggcagctggtggagcccagcacggccccacccaagcccaagccgcctccgctgaccaaggagaca

SEQ ID NO: 640484 - DNA, 120 bp, Artificial Sequence
  ENSG00000181585_2 (sequence is synthesized)
gtggtgttctgggacatgcgcctgtggcacgtggtgggcatcttttcgctcttcgtgttgtccatcatcatcacgctgtgctgtgtcttcaactgtcgtgtgccacggacccggaaggag

SEQ ID NO: 640485 - DNA, 120 bp, Artificial Sequence
  ENSG00000181585_3 (sequence is synthesized)
atcgaagcccggtacctgcagcgaaaggcagccaagatgtacacagacaagctggagactgtgccacccctcaatgagctcacagaagtcccaggagaggataagaagaagaagaagaag

SEQ ID NO: 640486 - DNA, 120 bp, Artificial Sequence
  ENSG00000181585_4 (sequence is synthesized)
aagaagaaggacagtgtggacacagtggccatcaaagtagaggaggatgagaagaatgaggccaagaagaagaaaggagagaaatgaagacatcctgggcagcttgggctggcgggccct

SEQ ID NO: 640487 - DNA, 120 bp, Artificial Sequence
  ENSG00000181585_5 (sequence is synthesized)
ggagctcaagccgtggccggggtccaggcatgttggactctgagctcatttggggaccacagaggctgtggtcagagagggaagctgaggcccatggccacatcctcatggcccatcagg

SEQ ID NO: 640488 - DNA, 120 bp, Artificial Sequence
  ENSG00000181585_6 (sequence is synthesized)
ggcaggaaccagacaatctcgtaggtgtcctgccccccagcctaggcttggctcctttcaccccatccacatgggtactgtctcggcagaggtggtctggtgccaccgtccctctgcaga

SEQ ID NO: 640489 - DNA, 120 bp, Artificial Sequence
  ENSG00000181585_7 (sequence is synthesized)
gggttacttcagccaccctttctggcacgaaatggctgaagtgcatgggtcagggtgtgaggccacacccagagtagccatgaggaggcagagagggtcactgggggacactgtggcagc

SEQ ID NO: 640490 - DNA, 120 bp, Artificial Sequence
  ENSG00000181585_8 (sequence is synthesized)
aggagggactctgtctggccagggaggagccccagtggtgagaagacttccccaagcctggcaggggatccagctcaagggagtaagtagaggtggcttcagaaatggaacccccagccc

SEQ ID NO: 640491 - DNA, 120 bp, Artificial Sequence
  ENSG00000181585_9 (sequence is synthesized)
agcagacatcaagctcaaggcaatgggctaccctcatttcacacgttgtgatgaagctgaggctgctgccaggcccggcatgaggccccgaggctcgagctcggggctgggggctgcagg

SEQ ID NO: 640492 - DNA, 120 bp, Artificial Sequence
  ENSG00000181585_10 (sequence is synthesized)
gctgggtcaggggtacacagagctaaggccaatgggctagagggtgccggaaagagagctggagtctgggctcctcttgggaatcagagtatatttaagaagccaagggggacctcgggc

SEQ ID NO: 640493 - DNA, 120 bp, Artificial Sequence
  ENSG00000181585_11 (sequence is synthesized)
tgttctggtggccccttctatgcccagctgtgctgggaggtcccagggccctagaagatcacagcagggccttctgcctgctgaccataacagtgccagcttctttgcagcttcctcttc

SEQ ID NO: 640494 - DNA, 120 bp, Artificial Sequence
  ENSG00000181585_12 (sequence is synthesized)
taccatttcccactacgggcacctaaaagaagcatctctgaccagaagacaaaggcccaaatagcacctgggggagggaagatgcacagaggcacttccagatggcatcgaacagactaa

SEQ ID NO: 640495 - DNA, 120 bp, Artificial Sequence
  ENSG00000181585_13 (sequence is synthesized)
ggctctgaaacctaggcctgaacactaaggtctcgagacaccagaggtttctgagccaggagagcctgctggaaaagcagcctgcagagatttgtgaataaagctgattgccttctcaga

SEQ ID NO: 640496 - DNA, 120 bp, Artificial Sequence
  ENSG00000181585_14 (sequence is synthesized)
aagggtggcccaccagccccctactcagccccctactgaggaggtgggaggcatcccccaacctgccaggctgaagagacccccagtggagcccagcacggccccacccaagcccaagcc

SEQ ID NO: 640497 - DNA, 120 bp, Artificial Sequence
  ENSG00000181585_15 (sequence is synthesized)
ctcacagaagtcccaggaggtgagttggccctggcttgagccctgctgcgccagccagttcctcagtcctgctgcctggagtcaccctgttcctctgctccaaccaaagcaggttcaggg

SEQ ID NO: 640498 - DNA, 120 bp, Artificial Sequence
  ENSG00000181585_16 (sequence is synthesized)
aggggccccagccctgcccctggagaccagagcacagaaattggttggcatgaggcaaatagaacgatgagcctattctccagtaggaagaaggaagaaaaaggcagagtgtaggaggtt

SEQ ID NO: 640499 - DNA, 80 bp, Artificial Sequence
  ENSG00000181588_0 (sequence is synthesized)
acgcggccgccgcgctccgcctggcgctggaccagctgtcggcgctcgggctggggggcgctggcgacacggacgaggag

SEQ ID NO: 640500 - DNA, 80 bp, Artificial Sequence
  ENSG00000181588_1 (sequence is synthesized)
ccgtcgccccccgacgtgttcgcgggcttcgcgccccaccccgcggccctggggcccccgacgctgctggccgaccagat

SEQ ID NO: 640501 - DNA, 120 bp, Artificial Sequence
  ENSG00000181588_2 (sequence is synthesized)
acgctgctggccgaccagatgagcgtgatcggcagccgcaagaaaagcgtcaacatgaccgagtgcgtcccggtgcccagctccgagcacgtcgccgagatcgtgggtcgccagggctgc

SEQ ID NO: 640502 - DNA, 120 bp, Artificial Sequence
  ENSG00000181588_3 (sequence is synthesized)
aagatcaaggccctgcgggccaagacaaacacctacatcaagaccccagtgcggggcgaggagccggtcttcatcgtgaccggccggaaggaggacgtggagatggccaagcgtgagatc

SEQ ID NO: 640503 - DNA, 120 bp, Artificial Sequence
  ENSG00000181588_4 (sequence is synthesized)
ctgtcggcggccgaacacttctccatcatccgcgccacgcgcagcaaggccgggggtctgcccggcgccgcccagggcccgcccaaccttcccggacagaccaccatccaggtgcgcgtg

SEQ ID NO: 640504 - DNA, 120 bp, Artificial Sequence
  ENSG00000181588_5 (sequence is synthesized)
ccctaccgggtggtggggctggtggtggggcccaagggcgccaccatcaagcgcatccagcagcggacgcacacctacatcgtgacgcccgggcgcgacaaggagccggtgttcgcggtc

SEQ ID NO: 640505 - DNA, 120 bp, Artificial Sequence
  ENSG00000181588_6 (sequence is synthesized)
actgggatgcccgagaacgtggaccgcgcgcgcgaggagatcgaggcgcacatcacgctgcgcactggcgccttcaccgacgcgggccccgacagcgacttccacgccaacggcaccgac

SEQ ID NO: 640506 - DNA, 120 bp, Artificial Sequence
  ENSG00000181588_7 (sequence is synthesized)
gacttccacgccaacggcaccgacgtctgcctggacctgctcggggcggccgccagcctctgggccaagacccccaaccagggacgacggccccccacggccacggccggcctccgcggg

SEQ ID NO: 640507 - DNA, 80 bp, Artificial Sequence
  ENSG00000181588_8 (sequence is synthesized)
gcccccgaggccttctacgcgggcagccgcggcggcccctccgtgccggacccaggccccgccagcccctacagcggctc

SEQ ID NO: 640508 - DNA, 120 bp, Artificial Sequence
  ENSG00000181588_9 (sequence is synthesized)
gctggacctgaccgtgcccgccgcggccaccatctgggcgccttttgagcgcgccgcccccttgcccgccttcagcggctgctccacggtcaacggagccccgggacctcccgccgccgg

SEQ ID NO: 640509 - DNA, 80 bp, Artificial Sequence
  ENSG00000181588_10 (sequence is synthesized)
gcctggagctcccgctgtctcgccgtggcgccccggacccggtgggcgcgctgtcctggcgacccccgcagggccccgta

SEQ ID NO: 640510 - DNA, 120 bp, Artificial Sequence
  ENSG00000181588_11 (sequence is synthesized)
cgtatccttcccaggcggcgccgccttctccacggccacctcgctgcccagcagccccgcggccgccgcctgcgcccccctggactccggcgcctccgagaacagccgcaagcccccttc

SEQ ID NO: 640511 - DNA, 120 bp, Artificial Sequence
  ENSG00000181588_12 (sequence is synthesized)
tcctcggccccggccctggcgcgagagtgcgtggtgtgcgccgagggcgaggtgatggctgcgctggtcccctgcggccacaacctcttctgcatggactgcgccgtccgcatctgcggc

SEQ ID NO: 640512 - DNA, 120 bp, Artificial Sequence
  ENSG00000181588_13 (sequence is synthesized)
aagagcgagcccgagtgtcccgcctgccgcacgccggccacccaggccattcatatcttttcctagagcgcggaccaccacgtggccggggccatctgcgggggccaggggtgggcgcgg

SEQ ID NO: 640513 - DNA, 120 bp, Artificial Sequence
  ENSG00000181588_14 (sequence is synthesized)
gagacggggcgggacccggggtgggagagggacggggagggggcgaggggcggaggccgagggggcaggggggtgggcggcggccagtgtttacagatgagctttaactgccgcctcagg

SEQ ID NO: 640514 - DNA, 120 bp, Artificial Sequence
  ENSG00000181588_15 (sequence is synthesized)
cgtggagacggagaccccgcagcccggcggcgcctcagcccttcaacgacagtattgagtggtcaggttacaataaaccggagagaaaaggtccgcttgcactttttttagttttcttat

SEQ ID NO: 640515 - DNA, 120 bp, Artificial Sequence
  ENSG00000181588_16 (sequence is synthesized)
ttttagacacccctcccctccagggtgatctttaaaaaagcaaaacaaaaaacacgacttttccagcgctcagcgttttttcctttcgtccgaagccgttttctgatttgacttttctcg

SEQ ID NO: 640516 - DNA, 120 bp, Artificial Sequence
  ENSG00000181588_17 (sequence is synthesized)
ccggccggtctcaggccgcacagacgttccagaggaggagggtgacatttttactccctttttggggctaaccatttatgcttttgtacatcaaccgtgcgcggccggagggggcagggg

SEQ ID NO: 640517 - DNA, 120 bp, Artificial Sequence
  ENSG00000181588_18 (sequence is synthesized)
ggggggcgggggcgaggggcgttccaatcaaatttctaactttctgttaattattaatcccctttttactgcggtttctgttgtcatttttaaaatttttttaattttttttttttttta

SEQ ID NO: 640518 - DNA, 120 bp, Artificial Sequence
  ENSG00000181588_19 (sequence is synthesized)
ttttacctcttgtgtatatgtagggaatttatagggaaatatgtactttatggaataaattttaagaactaaaatatattttattttaaataaagtaatggacctttaatcttacacagc

SEQ ID NO: 640519 - DNA, 120 bp, Artificial Sequence
  ENSG00000181588_20 (sequence is synthesized)
cagctaaattactgattatatatttgctgagctgatttaagggttaaaaaaattgtatcaagagttttattttttgacttcaaagccttcttaataaagcctcttttctacatgtgagca

SEQ ID NO: 640520 - DNA, 120 bp, Artificial Sequence
  ENSG00000181609_0 (sequence is synthesized)
agcccttcatttgccaggaagaatgtcagattccaacctcagtgataaccatcttccagacaccttcttcttaacagggatcccagggctggaggctgcccacttctggattgccatccc

SEQ ID NO: 640521 - DNA, 120 bp, Artificial Sequence
  ENSG00000181609_1 (sequence is synthesized)
tttctgtgccatgtatcttgtagcactggttggaaatgctgccctcatcctggtcattgccatggacaatgctcttcatgcacctatgtacctcttcctctgccttctctcactcacaga

SEQ ID NO: 640522 - DNA, 120 bp, Artificial Sequence
  ENSG00000181609_2 (sequence is synthesized)
cctggctctcagttctaccactgtgcccaagatgctggccattttgtggctccatgctggtgagatttcctttggtggatgcctggcccagatgttttgtgtccattctatctatgctct

SEQ ID NO: 640523 - DNA, 120 bp, Artificial Sequence
  ENSG00000181609_3 (sequence is synthesized)
ggagtcctcaattctacttgccatggcctttgataggtatgtggctatctgtaacccattaaggtacacaaccattctcaaccatgctgtcataggcagaattggctttgttgggctatt

SEQ ID NO: 640524 - DNA, 120 bp, Artificial Sequence
  ENSG00000181609_4 (sequence is synthesized)
ccgactggcctgtgccaacatcactgtcaatattgtctatgggctaactgtggctctgctggccatgggactggattccattctcattgccatttcctatggctttatcctccatgcagt

SEQ ID NO: 640525 - DNA, 120 bp, Artificial Sequence
  ENSG00000181609_5 (sequence is synthesized)
ctttcatcttccatctcatgatgcccagcacaaagctctgagtacctgtggctcccacattggcatcatcctggttttctacatccctgccttcttctccttcctcacccaccgctttgg

SEQ ID NO: 640526 - DNA, 120 bp, Artificial Sequence
  ENSG00000181609_6 (sequence is synthesized)
tcaccacgaagtccccaagcatgtgcacatctttctggctaatctctatgtgctggtgcctcctgtactcaatcctattctctatggagctagaaccaaggagattcggagtcgacttct

SEQ ID NO: 640527 - DNA, 120 bp, Artificial Sequence
  ENSG00000181609_7 (sequence is synthesized)
aaaactgcttcacctggggaagacttcaatatgaatgctgagcagaagttggagatttaaaaaaaagtgtaggatggctgtctagatacatttacatggacacacagtgatgatgtgaaa

SEQ ID NO: 640528 - DNA, 120 bp, Artificial Sequence
  ENSG00000181610_0 (sequence is synthesized)
agcagctagtcacgctcggtaccaggcgcagatcatggcaggcagccggctggaaaccgtagggagcatcttctctcggactcgggacctggttcgggccggggtgctgaaggagaagcc

SEQ ID NO: 640529 - DNA, 120 bp, Artificial Sequence
  ENSG00000181610_1 (sequence is synthesized)
cctgtggtttgacgtatatgacgcctttcccccgctgagggagcccgtcttccaaaggcctcgagtgcgatatggcaaagccaaagctcccatccaagacatctggtaccacgaggatcg

SEQ ID NO: 640530 - DNA, 120 bp, Artificial Sequence
  ENSG00000181610_2 (sequence is synthesized)
gattagagcgaagttttattcagtgtatgggtctggtcaaagagcttttgatctattcaatccaaacttcaagtctacctgtcaacggtttgtggagaagtacactgagctacagaaact

SEQ ID NO: 640531 - DNA, 120 bp, Artificial Sequence
  ENSG00000181610_3 (sequence is synthesized)
tggagaaacagatgaagagaagttatttgtggaaacagggaaggctttattggcagaaggtgtcattttaagacgagtaggcgaagcaaggactcaacacggaggtagtcacgtttcccg

SEQ ID NO: 640532 - DNA, 120 bp, Artificial Sequence
  ENSG00000181610_4 (sequence is synthesized)
gaaatccgaacacttgagtgtcagaccacagactgcgttggaagaaaacgagactcagaaagaagttccacaggaccagcatttggaggcacctgcagaccagtcgaaaggtctcttgcc

SEQ ID NO: 640533 - DNA, 120 bp, Artificial Sequence
  ENSG00000181610_5 (sequence is synthesized)
tccctgaaggacctgtatactgtgtatgctggcattcacactctactcactggctgaatgttgagctatttttaaacagttgaactgtgtaaatgtttcttgatctctaaggtattatgt

SEQ ID NO: 640534 - DNA, 120 bp, Artificial Sequence
  ENSG00000181610_6 (sequence is synthesized)
ttgccttctcttagttatttctgggttgtcacaaagctcagtatcatggtttgacagaagcagttatgtgaacttttatgttaggacattactaaataaagaattccctagctgcttata

SEQ ID NO: 640535 - DNA, 120 bp, Artificial Sequence
  ENSG00000181610_7 (sequence is synthesized)
aagtaaatttactttgaattgtaaataacatgaagaaacctttataaagattgttcaaatgggactcaatctgactaggcttgctttgatgtttgttagtatgtgggctggctacatctg

SEQ ID NO: 640536 - DNA, 120 bp, Artificial Sequence
  ENSG00000181610_8 (sequence is synthesized)
attcccgggtacatatttcttctgatccatcagacttatacgtgtacacatgttgtggaaccttggctagctggttttgtctgcagagaatctttgtacttcttgctatagaacgattat

SEQ ID NO: 640537 - DNA, 120 bp, Artificial Sequence
  ENSG00000181610_9 (sequence is synthesized)
ctctccacttgagaggccaagctgacttgcgctttgtggtaagagtgaggacctgtcattgctgatacacaaagaccaaaactgtaactttaatgtcatggattgagtgtgctggagaca

SEQ ID NO: 640538 - DNA, 120 bp, Artificial Sequence
  ENSG00000181610_10 (sequence is synthesized)
gttaacataggcctgcacagactaggctgttcagtaaatacttgttgaatgaatgagtgaacgaatggttatatccagctaaagactggattcatatggtgtagataacaggattgccaa

SEQ ID NO: 640539 - DNA, 120 bp, Artificial Sequence
  ENSG00000181610_11 (sequence is synthesized)
gaaaggaggcagctaatttaggtgatgctctccaccagcatccacctgcctccctggggccaaagtgtgcctacaagtccttatcaacttccctgccttcctcgtttccccaggttttac

SEQ ID NO: 640540 - DNA, 120 bp, Artificial Sequence
  ENSG00000181610_12 (sequence is synthesized)
taaatacatgaaatatccctctgagattgcagcctttgtatatgtggtcaagccagtggtttttagctgttagtagtaagctgcttcagaaattccctattttaaaactcatgtagattt

SEQ ID NO: 640541 - DNA, 120 bp, Artificial Sequence
  ENSG00000181610_13 (sequence is synthesized)
tctacccagtgattctttgtgtatgctctcatctctcctggtacactgtgaggcaggtccacatctcacagtctgtatatagtacacatccatgcacgtgggtgcttggttcatgcaggt

SEQ ID NO: 640542 - DNA, 120 bp, Artificial Sequence
  ENSG00000181610_14 (sequence is synthesized)
gaatgaatacattaggcaaaagcagctctcagccatgctgcttccccctcgacctttatcactgtttcacaactgcttgcatttggagaatgctttacttttccgtagggaagtaaattt

SEQ ID NO: 640543 - DNA, 120 bp, Artificial Sequence
  ENSG00000181610_15 (sequence is synthesized)
catccattcagagacattacacaaccattgagaccaaacatcgggccagaccttgggaagaggacttaaaaagcaggtgaaagacacagtctattctcagaggaacaattgaggggtcac

SEQ ID NO: 640544 - DNA, 120 bp, Artificial Sequence
  ENSG00000181610_16 (sequence is synthesized)
tcatctctttaaaccttaggtttctggttttttaagggcaggttttttttgccacaatgatgaatatttaaaaaatgtttttttccttcatgtctggattgatgtcccatttttgctatt

SEQ ID NO: 640545 - DNA, 71 bp, Artificial Sequence
  ENSG00000181610_17 (sequence is synthesized)
cctcctctgatcactttgtttcccaggctggagtacagtggagccatcttggcccactgcaacctccgcct

SEQ ID NO: 640546 - DNA, 120 bp, Artificial Sequence
  ENSG00000181610_18 (sequence is synthesized)
accatgttgcccaggctgatctcaaactgctggcctcaagtgatccacccatctcaacctcccaaaatgctgggattacgggtgttagccaccatgcctggccttaattttttttttttt

SEQ ID NO: 640547 - DNA, 120 bp, Artificial Sequence
  ENSG00000181610_19 (sequence is synthesized)
taattttgttttaggagatgggggtctcactgtgttacccaggctgggtgcagtggtgcataccctgccgcagtcttaactcctgggctgaagccatcctggctcacttcccgaatagct

SEQ ID NO: 640548 - DNA, 89 bp, Artificial Sequence
  ENSG00000181610_20 (sequence is synthesized)
tcctgggctgaagccatcctggctcacttcccgaatagctactttaacattttttttgtttgtttttttttgtagagatggagtcttgc

SEQ ID NO: 640549 - DNA, 120 bp, Artificial Sequence
  ENSG00000181610_21 (sequence is synthesized)
ccgcccaaagtgctgggattacaggcctgagcgaccgtactggggctgaagacttttaaagaagttatttgttgcataattctttaaaaaaattatacatgcacatggttcaaaacttaa

SEQ ID NO: 640550 - DNA, 120 bp, Artificial Sequence
  ENSG00000181610_22 (sequence is synthesized)
caccatttccttgtgcgctcttccagaaatattttgggcatggacaggacactatgcatactgttctgtaccttgcttttctagttactatgtctcagagatccactgtgatttaatcag

SEQ ID NO: 640551 - DNA, 120 bp, Artificial Sequence
  ENSG00000181610_23 (sequence is synthesized)
tgcccgattgaagaaaatgttctttgttttactgtgttgcaaatgggctgctagagttatgggatgctggatcaaggagcagatcattttgagttttgatatcttcgtccatagaaattg

SEQ ID NO: 640552 - DNA, 120 bp, Artificial Sequence
  ENSG00000181610_24 (sequence is synthesized)
tgcttaactatactctcatagcaatgtatgagaatgcgttcccctacacattctgatcttgttaaaccagactgggactctggaccagaagggaaagaccatccctgtatagcaaatatc

SEQ ID NO: 640553 - DNA, 120 bp, Artificial Sequence
  ENSG00000181610_25 (sequence is synthesized)
tggatggggagaaagctgctgtcactcattgacttctttaggttaagtcttagtgatcaaaacatagtgaaagatatgaagcttactttggaaactcagaactatttccacagtttgggc

SEQ ID NO: 640554 - DNA, 120 bp, Artificial Sequence
  ENSG00000181610_26 (sequence is synthesized)
aaaagctgtcatcagatccccatcacgttttggagagaatggaagcatgaccgcattcttggctttaaagagcttaaaatcaggccgggctccatggctcacgcctgtaatcccagcact

SEQ ID NO: 640555 - DNA, 120 bp, Artificial Sequence
  ENSG00000181610_27 (sequence is synthesized)
ctgtctcaaaaaaaaaaaaaaaaaaatcttaaaatcgagttgggactacaagagtgacttgtgaaacagcaagatgaacaggaatccttttaaactttgatataaaagtacagtagaggt

SEQ ID NO: 640556 - DNA, 120 bp, Artificial Sequence
  ENSG00000181610_28 (sequence is synthesized)
tcaggggcaaggaatcagttctggatttgtctaggaatactgcatgagagcctggaaaggcagtgggatggacatgtacatgcggtttctttgggcaggaacaccctcccttctaccatg

SEQ ID NO: 640557 - DNA, 120 bp, Artificial Sequence
  ENSG00000181610_29 (sequence is synthesized)
gtctgtaggaattgaaccttccgtgccgttttcaaatgctgtctgtgctcggaaaatacataatatcaagtcccttactgaaccccctacagattgtgttcataaggtgcttcactgctg

SEQ ID NO: 640558 - DNA, 120 bp, Artificial Sequence
  ENSG00000181610_30 (sequence is synthesized)
ttggtctacctggcctactgtttgtactcctgcctcatttactgtggccttcattcaagtagtaatgattatttacctattaagagtatagggtgggcgtggtggctcatgtaatcccag

SEQ ID NO: 640559 - DNA, 63 bp, Artificial Sequence
  ENSG00000181610_31 (sequence is synthesized)
taagagtatagggtgggcgtggtggctcatgtaatcccagcactttgggaagtcaagatgggt

SEQ ID NO: 640560 - DNA, 120 bp, Artificial Sequence
  ENSG00000181610_32 (sequence is synthesized)
cactgtctcaaaaaaaaaaaaaaaaaaagtataaaggagggcagaaattcttattcttttaacccattgaaacattaaacagcctttcaggagcagaccctcctacggatttgctgaatc

SEQ ID NO: 640561 - DNA, 120 bp, Artificial Sequence
  ENSG00000181610_33 (sequence is synthesized)
caaggcgaggaaggcatatatccaggttacagtgaagtttgccccagacaagtaatgaagatttgggttctagatctggatactccaggcagtttttactatgtgaccctgtgcctgtca

SEQ ID NO: 640562 - DNA, 120 bp, Artificial Sequence
  ENSG00000181610_34 (sequence is synthesized)
cagtatttcagcctgtaaaatatggacaatgtttgcctttttggcttccagttagctttgtgaggattaattgagatgagtgcaaagctcatttgtaatgtgtggctggtggttttatta

SEQ ID NO: 640563 - DNA, 120 bp, Artificial Sequence
  ENSG00000181610_35 (sequence is synthesized)
ctattttgagcagtagtggaaaagcccatttgaactggtaggatgagataagatcatggtggccttgacaactacatggaggagccagttgggtatgggaaagtttgagcagggaaagaa

SEQ ID NO: 640564 - DNA, 120 bp, Artificial Sequence
  ENSG00000181610_36 (sequence is synthesized)
agaatgtagtgaaagcagtgtcaggtcaaagaaaggtttgcctaggagtgatgtaaagaatgggatggaggagtgggcagggaaggaggaaagaggagacatgtcagagggaccaaaaag

SEQ ID NO: 640565 - DNA, 120 bp, Artificial Sequence
  ENSG00000181610_37 (sequence is synthesized)
gaggcagcaagtccaaggtcacaaacctgagtgactagaaaacttagcagcatcactaacacccagttggtgacgtggaactggtgctctcctgggagagagcttcaattctcaacctac

SEQ ID NO: 640566 - DNA, 120 bp, Artificial Sequence
  ENSG00000181610_38 (sequence is synthesized)
taagttgaaggtgatggtgctatatctaagtggcagacagagataagggataggtgtctacaggggcaagatttggagccaggagaagaaatgagctctccaagggtagtggggagagat

SEQ ID NO: 640567 - DNA, 120 bp, Artificial Sequence
  ENSG00000181610_39 (sequence is synthesized)
ctgggatgttgggggctggcaggtaaatgctttaagtgatagaataggaggaatgagaaagccagcaaaagaaattcacgtcccatgtcttccatcatctatatgtctgacttgtttaag

SEQ ID NO: 640568 - DNA, 120 bp, Artificial Sequence
  ENSG00000181610_40 (sequence is synthesized)
tggtcctggattcaccaaattttatagagctctgcctctgcctttattgggtaggcctgatttttgatgatgtccttaaaaggctagcctgattcttcttgtagttttgtagaacacttt

SEQ ID NO: 640569 - DNA, 120 bp, Artificial Sequence
  ENSG00000181610_41 (sequence is synthesized)
gtatcgagagttctctgataatgaaagtggtattacagaataatctgcccccgaaggactcctgattttgttaaagtgatacctttctctgtaaataaatgatggcgtgccacttaaaaa

SEQ ID NO: 640570 - DNA, 120 bp, Artificial Sequence
  ENSG00000181610_42 (sequence is synthesized)
tccggttccggtagcagctagtcacgctcggtaccaggcgcagatcatggcaggcagccggctggaaaccgtagggagcatcttctctcggtgtgtgctcccagccgtggtgggctgagg

SEQ ID NO: 640571 - DNA, 120 bp, Artificial Sequence
  ENSG00000181610_43 (sequence is synthesized)
gtgcctcccccaggctggggttctcagccggtcacgctcttccttggagcggacctgagcagggcgaggcgtattgcagggtgcgggggctgagctgggactcgggacctggttcgggcc

SEQ ID NO: 640572 - DNA, 120 bp, Artificial Sequence
  ENSG00000181610_44 (sequence is synthesized)
accccttcctcatagtgaaactgaagttctgaaaagtggaatctggagcccagcaaccgaaagatcattgcaattatagccgcatgtttctgggcatctgctttgggccaggcactgtac

SEQ ID NO: 640573 - DNA, 120 bp, Artificial Sequence
  ENSG00000181610_45 (sequence is synthesized)
taagctctttgcaagcattatctcattctctaaaggccttactctaacttgtaaggaaggcattcttgtttccattttattcaaggagactgcgaagctcaaggaaattagctaacttct

SEQ ID NO: 640574 - DNA, 120 bp, Artificial Sequence
  ENSG00000181610_46 (sequence is synthesized)
tgtaattactaaatatataggagggtggcagatctgggaatcacatctctgactccaagcttatggtgatcattatgccggccttctccacgagtggagataggaggaacgtggtctgtg

SEQ ID NO: 640575 - DNA, 120 bp, Artificial Sequence
  ENSG00000181610_47 (sequence is synthesized)
atttcattgttaaaattgttactgggtttatagttgtccctcagtatgcacaggggattggtgctagggcccctgcagataccaatattcacagatgctgaaataccttttataaagtgc

SEQ ID NO: 640576 - DNA, 120 bp, Artificial Sequence
  ENSG00000181616_0 (sequence is synthesized)
ttttggttggtgtgtctgctgtcttgtagattttgtcaacacactctttcttctttccctttggcctgatccccaagatttggggctgagatttatgccatctgcctctgccatgatcat

SEQ ID NO: 640577 - DNA, 120 bp, Artificial Sequence
  ENSG00000181616_1 (sequence is synthesized)
tttcaacctgagcagttacaatccaggacccttcattctggtagggatcccaggcctggagcaattccatgtgtggattggaattcccttctgtatcatctacattgtagctgttgtggg

SEQ ID NO: 640578 - DNA, 120 bp, Artificial Sequence
  ENSG00000181616_2 (sequence is synthesized)
aaactgcatccttctctacctcattgtggtggagcatagtcttcatgaacccatgttcttctttctctccatgctggccatgactgacctcatcttgtccacagctggtgtgcctaaagc

SEQ ID NO: 640579 - DNA, 120 bp, Artificial Sequence
  ENSG00000181616_3 (sequence is synthesized)
actcagtatcttttggctaggggctcgcgaaatcacattcccaggatgccttacacaaatgttcttccttcactataactttgtcctggattcagccattctgatggccatggcatttga

SEQ ID NO: 640580 - DNA, 120 bp, Artificial Sequence
  ENSG00000181616_4 (sequence is synthesized)
tgcatcatcctgccagatgtattcttgctgacatgcctgcctttctgcaggacacgcatcataccccacacatactgtgagcatataggtgttgcccagctcgcctgtgctgatatctcc

SEQ ID NO: 640581 - DNA, 120 bp, Artificial Sequence
  ENSG00000181616_5 (sequence is synthesized)
atcaacttctggtatggcttttgtgttcccatcatgacggtcatctcagatgtgattctcattgctgtttcctacgcacacatcctctgtgctgtctttggccttccctcccaagatgcc

SEQ ID NO: 640582 - DNA, 120 bp, Artificial Sequence
  ENSG00000181616_6 (sequence is synthesized)
tgccagaaagccctcggcacttgtggttctcatgtctgtgtcatcctcatgttttatacacctgcctttttctccatcctcgcccatcgctttggacacaatgtctctcgcaccttccac

SEQ ID NO: 640583 - DNA, 120 bp, Artificial Sequence
  ENSG00000181616_7 (sequence is synthesized)
atcatgtttgccaatctctacattgttatcccacctgcactcaaccccatggtttacggagtgaagaccaagcagatcagagataaggttatacttttgttttctaagggtacaggatga

SEQ ID NO: 640584 - DNA, 120 bp, Artificial Sequence
  ENSG00000181617_0 (sequence is synthesized)
agtcacttgccatttctcataacagcgtcagagagaaagaactgactgaaacgtttgagatgaagaaagttctcctcctgatcacagccatcttggcagtggctgttggtttcccagtct

SEQ ID NO: 640585 - DNA, 120 bp, Artificial Sequence
  ENSG00000181617_1 (sequence is synthesized)
ctcaagaccaggaacgagaaaaaagaagtatcagtgacagcgatgaattagcttcagggttttttgtgttcccttacccatatccatttcgcccacttccaccaattccatttccaagat

SEQ ID NO: 640586 - DNA, 120 bp, Artificial Sequence
  ENSG00000181617_2 (sequence is synthesized)
tacctgaatctgcccctacaactccccttcctagcgaaaagtaaacaagaaggaaaagtcacgataaacctggtcacctgaaattgaaattgagccacttccttgaagaatcaaaattcc

SEQ ID NO: 640587 - DNA, 120 bp, Artificial Sequence
  ENSG00000181617_3 (sequence is synthesized)
tgttaataaaagaaaaacaaatgtaattgaaatagcacacagcattctctagtcaatatctttagtgatcttctttaataaacttgaaagcaaagattttggtttcttaatttccacaaa

SEQ ID NO: 640588 - DNA, 120 bp, Artificial Sequence
  ENSG00000181619_0 (sequence is synthesized)
cccgagccaccactccgacctagcggccgccgcccccggtgcgggatgaggagatccgcggccgccactgggccccatggaggagccgcagccgccccgcccaccagcgagcatggcctt

SEQ ID NO: 640589 - DNA, 120 bp, Artificial Sequence
  ENSG00000181619_1 (sequence is synthesized)
cagccgccccgcccaccagcgagcatggccttactgggcagccagcactccggcgccccctccgcggccggcccacctggcgggacttcctccgcggccacggcggccgtgctctccttc

SEQ ID NO: 640590 - DNA, 120 bp, Artificial Sequence
  ENSG00000181619_2 (sequence is synthesized)
gtgctctccttcagcaccgtggcgaccgcggcgctggggaacctgagcgacgcaagcggaggcggcacagctgccgctcccggtggcggcggccttggcgggtccggggcagcgcgggag

SEQ ID NO: 640591 - DNA, 120 bp, Artificial Sequence
  ENSG00000181619_3 (sequence is synthesized)
gggcggcggtgaggcggccgctaggcccggaggcggcgccgctgctgtcgcacggagctgcagtggcggcccaggcgctcgtcctcctgctcatcttcctgctgtctagccttggcaact

SEQ ID NO: 640592 - DNA, 120 bp, Artificial Sequence
  ENSG00000181619_4 (sequence is synthesized)
gcgcggtgatgggggtgattgtgaagcaccggcagctccgcaccgtcaccaacgccttcatcctgtcgctgtccctatcggatctgctcacggcgctgctctgcctgcccgccgccttcc

SEQ ID NO: 640593 - DNA, 120 bp, Artificial Sequence
  ENSG00000181619_5 (sequence is synthesized)
tggacctcttcactccgcccgggggttcggcgcctgccgccgccgcggggccctggcgcggcttctgcgccgccagccgcttcttcagctcgtgcttcggcatcgtgtccacgctcagcg

SEQ ID NO: 640594 - DNA, 120 bp, Artificial Sequence
  ENSG00000181619_6 (sequence is synthesized)
tggcgctcatctcgttggaccgttactgcgctatcgtgcggccgccgcgggagaagatcggccgccgccgcgcgctgcagctgctggcgggcgcctggctgacggccctgggcttctcct

SEQ ID NO: 640595 - DNA, 120 bp, Artificial Sequence
  ENSG00000181619_7 (sequence is synthesized)
tccttgccctgggagctgctcggggcgccccgggaactcgcggcggcgcagagcttccacggctgcctctaccggacctccccggaccccgcgcagctgggcgcggccttcagcgtgggg

SEQ ID NO: 640596 - DNA, 120 bp, Artificial Sequence
  ENSG00000181619_8 (sequence is synthesized)
tggtggcctgctacctgctgcccttcctgctcatgtgcttctgccactaccacatctgcaagacggtgcgcctgtcggacgtgcgcgtgcggccggtgaacacctacgcgcgcgtgctgc

SEQ ID NO: 640597 - DNA, 120 bp, Artificial Sequence
  ENSG00000181619_9 (sequence is synthesized)
gcttcttcagcgaggtgcgcacggccaccaccgtcctcatcatgatcgtcttcgtcatctgctgctgggggccctactgcttcctggtgctgctggccgccgcccggcaggcccagacca

SEQ ID NO: 640598 - DNA, 120 bp, Artificial Sequence
  ENSG00000181619_10 (sequence is synthesized)
tgcaggccccctcgctcctcagcgtggtggccgtctggctgacctgggccaatggggccatcaaccctgtcatctacgccatccgcaatcccaacatttcgatgctcctagggcgcaacc

SEQ ID NO: 640599 - DNA, 120 bp, Artificial Sequence
  ENSG00000181619_11 (sequence is synthesized)
gcgaggagggctaccggactaggaatgtggacgctttcctgcccagccagggcccgggtctgcaagccagaagccgcagtcgccttcgaaaccgctatgccaaccggctgggggcctgca

SEQ ID NO: 640600 - DNA, 120 bp, Artificial Sequence
  ENSG00000181619_12 (sequence is synthesized)
acaggatgtcctcttccaacccggccagcggagtggcaggggacgtggccatgtgggcccgcaaaaatccagttgtacttttctgccgagagggaccaccagagccggtgacggcagtga

SEQ ID NO: 640601 - DNA, 120 bp, Artificial Sequence
  ENSG00000181619_13 (sequence is synthesized)
ccaaacagcctaaatccgaagctggggataccagcctctaagacggttggaatggccagcttatgaaggcaaatttccactcgcattatttaatgatggaagattctgggggagagttgt

SEQ ID NO: 640602 - DNA, 120 bp, Artificial Sequence
  ENSG00000181619_14 (sequence is synthesized)
ggatttcataaagccaaacatttaaagctagagacgggggaggcttaccactttccccaaacaacataaaagacaatgtcccttcttcaaaagtgccaaaaggaatgtaaaatgcaaaaa

SEQ ID NO: 640603 - DNA, 120 bp, Artificial Sequence
  ENSG00000181619_15 (sequence is synthesized)
ttaaaacaatcttaaaccacataaccaagcattgtgaactgtaagtgccaaaaatgacaaaaataacattcactataactgaaaagctcatattataggaccacactgtgaaacaaacaa

SEQ ID NO: 640604 - DNA, 120 bp, Artificial Sequence
  ENSG00000181619_16 (sequence is synthesized)
aacattgaatgcaaccagtattgttcaactacacagaatttcaggaatgaatggagaccttcagagctgcttgaaagcccctctaaatcgctaccatccaacaaaactttagcttctaga

SEQ ID NO: 640605 - DNA, 120 bp, Artificial Sequence
  ENSG00000181619_17 (sequence is synthesized)
gcttgcacctctgacatgctttgggtgcttagattgcaagtggaaaagtcttatccttacacacattggtgcacctcctcaccccaccccctaataacctttgtggaaaatttttaattc

SEQ ID NO: 640606 - DNA, 120 bp, Artificial Sequence
  ENSG00000181619_18 (sequence is synthesized)
ataacccatttaaaatcattttaggattttgaaaagctggttattattagataaaattcaaccatctgaaggacaaatagaagtatgaacataaagaaatgtgtcttttaaatgttttcc

SEQ ID NO: 640607 - DNA, 120 bp, Artificial Sequence
  ENSG00000181619_19 (sequence is synthesized)
taacattccttccacccgcgtcatacctccaaaatgatcttccttggaaaactttgaagttttatccttactctaacctgttacttttatttctgataaattttggaatgctgctctcag

SEQ ID NO: 640608 - DNA, 120 bp, Artificial Sequence
  ENSG00000181619_20 (sequence is synthesized)
aatgctttcacatttaaaaaaatattttcattgtagaaaatttttgtcttttgaggtaaatttgatttttggatatagccaaaaatgtaatttgaagtcaagttgattgaataaggtgag

SEQ ID NO: 640609 - DNA, 120 bp, Artificial Sequence
  ENSG00000181619_21 (sequence is synthesized)
tgatgccactttatttaaatttttattattttttaaaatgagacctctataaaacaacaaggttgggtttcctacgtggcttttagctaactgaaaacgattccaaagagaaattctaaa

SEQ ID NO: 640610 - DNA, 120 bp, Artificial Sequence
  ENSG00000181619_22 (sequence is synthesized)
actattttgagaagcagcctcttggaattagcgtagacttttccaaatagatcataccctcctacatttagaaatttggtatattttgtattttttaaaatagctgatggttgctttata

SEQ ID NO: 640611 - DNA, 120 bp, Artificial Sequence
  ENSG00000181619_23 (sequence is synthesized)
gctatgacttgtcgaagataatgtatttattaaagggagaataggtgtgggactatatgtaacggtattaaaacacaggcataaagttggagaagaacttcaagcaaactgaaaatatct

SEQ ID NO: 640612 - DNA, 120 bp, Artificial Sequence
  ENSG00000181619_24 (sequence is synthesized)
ttagaaatatgcaaatcaaagatgctttttaaatttctatcttagcagaaaagatggttttacaataattcaaaagcgtatgtgaactttctaatgttaaatacgactatacacagaatc

SEQ ID NO: 640613 - DNA, 120 bp, Artificial Sequence
  ENSG00000181619_25 (sequence is synthesized)
atttactcagaatttttttaaatattatttttccctttcttttcctccatcctgccccttttcttcagtatttcatagccttaattgaacaagttatttacagtagatatgaaaagacat

SEQ ID NO: 640614 - DNA, 120 bp, Artificial Sequence
  ENSG00000181619_26 (sequence is synthesized)
tagctgtcgtatgaagatttcaatgtgaaatagccagcattttcttcctgtaaagtatttaaatatgtttttaagtatttctttgtttgacaggtgggtacatgtcattattttgtaatc

SEQ ID NO: 640615 - DNA, 120 bp, Artificial Sequence
  ENSG00000181619_27 (sequence is synthesized)
aaaggtggaaatatatgagtcatgtcagagctaaagatgttttaattttttctgcttctcagggtatcatcacaaatcagaagtttgtaaattgtatatattttgctacactcaatgtag

SEQ ID NO: 640616 - DNA, 120 bp, Artificial Sequence
  ENSG00000181619_28 (sequence is synthesized)
tacaaagtagatgagataatccctcccctctagcccttattttataaagcatatacagacttcatgcagctggactaacaaaaacaggtgtctgcggtatttgcctgttaaaggcaaaaa

SEQ ID NO: 640617 - DNA, 120 bp, Artificial Sequence
  ENSG00000181619_29 (sequence is synthesized)
attgtgtattttttggcaccgagtcacttttgggatttagagagaaatgataaagtcttcaattataaaagacatcatagaatagaagtacagttgtgaataaagggcagagggttagag

SEQ ID NO: 640618 - DNA, 120 bp, Artificial Sequence
  ENSG00000181619_30 (sequence is synthesized)
atcttagagtaaggaggtgagcgtgttgcaaaatagtgtgttgcctgagaagaagaattgaaggaaggcattgaaaaataaatgtgatatagaataaacctacctggtgagtgaagggaa

SEQ ID NO: 640619 - DNA, 120 bp, Artificial Sequence
  ENSG00000181619_31 (sequence is synthesized)
aatctgagagattggaagtgacaaggtgatggcatgaaggactttaaggaagaaaaggaattccagccctaccttttcggtggcaggaagttttaggaaaggcatggcttgtgaaagagg

SEQ ID NO: 640620 - DNA, 120 bp, Artificial Sequence
  ENSG00000181619_32 (sequence is synthesized)
ccattctgttagtggctccgagagtcatggtaggcaagaattggaggggaaaaagagaaaattgttcataaattactgaacaatttacaatgctctaaattgtttgtttttaatccaagg

SEQ ID NO: 640621 - DNA, 120 bp, Artificial Sequence
  ENSG00000181619_33 (sequence is synthesized)
ctatccaactatttagtggtagaactaggatttgaactgcagtctgtttggcctcagaactccatgtttgtttctctctatccccacagaagtctacaggtaaggaaatcaatcatgatc

SEQ ID NO: 640622 - DNA, 120 bp, Artificial Sequence
  ENSG00000181619_34 (sequence is synthesized)
aattatggtactgtcatcattatcatcatcgtgatcatcatctaccatttttgtttcctactttatataagggcaacttcctgggagctaaggctactaaaaggtagaagccacagtact

SEQ ID NO: 640623 - DNA, 120 bp, Artificial Sequence
  ENSG00000181619_35 (sequence is synthesized)
catctgcagagggcttacagcctcagcaaggaccttgtggctttgtaacaacaatcagccataacaagtttacttgtggaaaagaaaaggtgtagcactttcagaagaggctatcaaaga

SEQ ID NO: 640624 - DNA, 120 bp, Artificial Sequence
  ENSG00000181619_36 (sequence is synthesized)
aaagagatgaacttggaagcaagagatacgcaggtataagtcagccacccatttgacccagtgtaaatacttagacaatcaatacctcaaaaggtgaagaaagaatgattctcaaaataa

SEQ ID NO: 640625 - DNA, 120 bp, Artificial Sequence
  ENSG00000181619_37 (sequence is synthesized)
tctaagacttcgacctttcgttgtgcttactatgagtatgcaattatagtgacttcatgggaaaacgagaaagaaaagctatgaaatattggaatggattaaatattgagtactatgtaa

SEQ ID NO: 640626 - DNA, 120 bp, Artificial Sequence
  ENSG00000181619_38 (sequence is synthesized)
taaccaagcattgtgaactgctatccaactatttagtggtagaactaggatttgaactgcagtctgtttggcctcagaactccatgtttgtttctctctatccccacagaagtctacagg

SEQ ID NO: 640627 - DNA, 120 bp, Artificial Sequence
  ENSG00000181619_39 (sequence is synthesized)
catggctctttcttctccgagatcccaggactatcttattttcctcagaggggcaggttacaagaacttcacatctctcaggctacatgttgcaaaggttaaattccaggttgtacgatt

SEQ ID NO: 640628 - DNA, 120 bp, Artificial Sequence
  ENSG00000181619_40 (sequence is synthesized)
tttcacttccaccatcaagttatgagtgtgattgtttccctgcagttttgccaatagagtgattttagactatttacatcgtgggttacaaccaatgtcagttattctggggaaacccaa

SEQ ID NO: 640629 - DNA, 120 bp, Artificial Sequence
  ENSG00000181619_41 (sequence is synthesized)
ctgccatgttgtgaggacactcaagcagccctatggaggagcccacatggtgagtgaataactacaagctgactctaattttaaaaaataaaaattttatctctcaccaattttaaaatg

SEQ ID NO: 640630 - DNA, 120 bp, Artificial Sequence
  ENSG00000181625_0 (sequence is synthesized)
gctgaatggtacgcgctcgccgactggacagcagtctggcttccgcggtcggacttctacacccgcctccagacaggagaggggcacgtaccggcgctacggcttcctgcaggctgcctc

SEQ ID NO: 640631 - DNA, 120 bp, Artificial Sequence
  ENSG00000181625_1 (sequence is synthesized)
cggatagtccccgagagcttgttccgaagcaagcaccctgcagccctagcgatccagccctcccctggaccctaggtcacggcaatcaaccccctgctgtggttcccgaaccccaaggcc

SEQ ID NO: 640632 - DNA, 120 bp, Artificial Sequence
  ENSG00000181625_2 (sequence is synthesized)
cgatgggtcccgcgggggtcgcggcgaggccagggcgctttttcggcgtctacctgctctactgcctgaacccccggtaccggggccgcgtctacgtggggttcactgtcaacactgctc

SEQ ID NO: 640633 - DNA, 120 bp, Artificial Sequence
  ENSG00000181625_3 (sequence is synthesized)
gtcgggtccagcagcacaatgggggccgcaaaaaaggcggggcctggcggaccagcgggcgagggccctgggagatggtgctcgtcgtgcacggcttcccgtcctccgtggccgcccttc

SEQ ID NO: 640634 - DNA, 120 bp, Artificial Sequence; identical to SEQ ID NO: 296421
  ENSG00000181625_4 (sequence is synthesized)

SEQ ID NO: 640635 - DNA, 120 bp, Artificial Sequence; identical to SEQ ID NO: 296422
  ENSG00000181625_5 (sequence is synthesized)

SEQ ID NO: 640636 - DNA, 120 bp, Artificial Sequence; identical to SEQ ID NO: 296423
  ENSG00000181625_6 (sequence is synthesized)

SEQ ID NO: 640637 - DNA, 120 bp, Artificial Sequence; identical to SEQ ID NO: 296424
  ENSG00000181625_7 (sequence is synthesized)

SEQ ID NO: 640638 - DNA, 120 bp, Artificial Sequence; identical to SEQ ID NO: 296425
  ENSG00000181625_8 (sequence is synthesized)

SEQ ID NO: 640639 - DNA, 120 bp, Artificial Sequence
  ENSG00000181625_9 (sequence is synthesized)
atctccgcggcggaactcagggaaggagctagctggggcgggggtgatgatccaggctgggttccagcatagggctcttggtgggcacgctggggtcgggtggaatgcaggagagagagg

SEQ ID NO: 640640 - DNA, 120 bp, Artificial Sequence
  ENSG00000181625_10 (sequence is synthesized)
aggcatgagccaccgtgcccggcctaaatatttaataaaataatggacgatgggtgccttctactgagctcccggtaattgtgagtgagtagaggacttgccctggggacattcagtgac

SEQ ID NO: 640641 - DNA, 120 bp, Artificial Sequence
  ENSG00000181625_11 (sequence is synthesized)
ggggacattcagtgacctgctgggtgttgctgagctgtgaggaagttcaggtctggctgcagtggtgaggctgtgactcaatcaatcactgctgatgctcccaggacctgcaccagctta

SEQ ID NO: 640642 - DNA, 120 bp, Artificial Sequence
  ENSG00000181625_12 (sequence is synthesized)
acagtcacccctgcctcatgggatggagctgtgtaatgcccgcaacagtgcctgctgcatagaggggttgctgccagctgcctctccctccttgtctcttacctgcctgctgcctgggtc

SEQ ID NO: 640643 - DNA, 120 bp, Artificial Sequence
  ENSG00000181625_13 (sequence is synthesized)
aatgcccttggtgagtgcagtcccctggccccagcctggtccacctctgggaagagggtgcccagttgtgcaatccaggcccaggcagctgagccctcatctcagcatccagggcggata

SEQ ID NO: 640644 - DNA, 120 bp, Artificial Sequence
  ENSG00000181625_14 (sequence is synthesized)
tggcggaccagcgggcgagggccctggtgagagggggaggccttctgtgccgggaggaaggcgtcccagaggaggcggaccccgcggggcacaggcctgttgagaaggaccggccaggac

SEQ ID NO: 640645 - DNA, 120 bp, Artificial Sequence
  ENSG00000181626_0 (sequence is synthesized)
ggctctgctgggctaggtgctcctccgagcagctggagactggagtgtccctgacggaggttgcggctggacctggttacgtgctggtgctgcgctccagagaggcagaaaacgagtggg

SEQ ID NO: 640646 - DNA, 120 bp, Artificial Sequence
  ENSG00000181626_1 (sequence is synthesized)
agctgaggtgtcttaaagccgttcctcagcctgggagaagatctctggcttcaggatggaggtcagggggtcgttcctggcggcctgcaggagacgcatggctacctggaggaagaatcg

SEQ ID NO: 640647 - DNA, 120 bp, Artificial Sequence
  ENSG00000181626_2 (sequence is synthesized)
tgacaaggatggcttctcaaatcccgggtaccgagtccggcagaaggatctgggcatgatccacaaagctgccatcgcaggtgatgtgaacaaggtgatggagagcatcttgctcaggct

SEQ ID NO: 640648 - DNA, 120 bp, Artificial Sequence
  ENSG00000181626_3 (sequence is synthesized)
gaatgacttgaacgacagggacaagaagaacaggactgctctacttttggcgtgtgcccatggccgtccaggagtggtagctgacctggtggccagaaaatgccagcttaacctcactga

SEQ ID NO: 640649 - DNA, 120 bp, Artificial Sequence
  ENSG00000181626_4 (sequence is synthesized)
cagtgaaaacaggacagctctgatcaaggctgtacaatgtcaagaagaagtttgtgcatccatcctgctggaacatggcgccaacccaaatgttagagatatgtatggcaacactgctct

SEQ ID NO: 640650 - DNA, 120 bp, Artificial Sequence
  ENSG00000181626_5 (sequence is synthesized)
gcactatgccattgataatgagaatatatcaatggcaagaaaactgcttgcatatggtgcagatattgaagcaagaagccaggatggacatacatcacttttactcgctgtaaataggaa

SEQ ID NO: 640651 - DNA, 120 bp, Artificial Sequence
  ENSG00000181626_6 (sequence is synthesized)
aaaagagcaaatggtggcatttttgttgaagaaaaaaccagatttaactgcaatagataattttggaagaacagccctgatacttgctgctcgtaatggatcaacaagtgtagtctacca

SEQ ID NO: 640652 - DNA, 120 bp, Artificial Sequence
  ENSG00000181626_7 (sequence is synthesized)
gcttcttcagcacaatattgatgtcttttgccaagatatatctggatggactgcagaagactacgctgttgcttctaagtttcaagccattcgtggaatgatttctgaatataaagcaaa

SEQ ID NO: 640653 - DNA, 120 bp, Artificial Sequence
  ENSG00000181626_8 (sequence is synthesized)
caagagatgtaaaagtcttcaaaatagcaattcagaacaagacttagaaatgacatcagagggagagcaagaaaggcttgaaggatgtgaaagtagccagccacaggttgaagaaaaaat

SEQ ID NO: 640654 - DNA, 120 bp, Artificial Sequence
  ENSG00000181626_9 (sequence is synthesized)
gaagaaatgcagaaataagaaaatggaagtgtcaagaaacgtacatgctgatgacagtgacaattataatgatgatgttgatgaattaattcacaaaataaagaacagaaaacctgataa

SEQ ID NO: 640655 - DNA, 120 bp, Artificial Sequence
  ENSG00000181626_10 (sequence is synthesized)
tcatcaatctcctgggaaggagaatggcgagtttgataggcttgcaaggaaaacctctaatgaaaagagcaaggttaaaagccaaatatatttcacggatgaccttaatgacataagtgg

SEQ ID NO: 640656 - DNA, 120 bp, Artificial Sequence
  ENSG00000181626_11 (sequence is synthesized)
gtcatctgaaaaaacctcagaggatgatgagttgccttactctgatgatgagaattttatgttactcattgaacaaagtggaatggagtgtaaagattttgttagcctatcgaaaagcaa

SEQ ID NO: 640657 - DNA, 120 bp, Artificial Sequence
  ENSG00000181626_12 (sequence is synthesized)
gaatgcaacagctgcatgtggaagatcaatagaggatcaaaaatgttactgtgaacgacttaaagtaaaatttcaaaaaatgaaaaataatattagcgtactacaaaaggtactatctga

SEQ ID NO: 640658 - DNA, 120 bp, Artificial Sequence
  ENSG00000181626_13 (sequence is synthesized)
aacagacaaaaccaaatcacagtcagagcatcagaatcttcaagggaaaaaaaagctctgtaatttgagatttatcttacaacaacaagaagaagaaagaataaaggctgaagagttgta

SEQ ID NO: 640659 - DNA, 120 bp, Artificial Sequence
  ENSG00000181626_14 (sequence is synthesized)
tgaaaaagatatagaagagttaaaaataatggaagagcaatataggacacaaactgaagtgaaaaaacaatctaaactgactctcaaatcattggaagtggaattgaagactgtaagaag

SEQ ID NO: 640660 - DNA, 120 bp, Artificial Sequence
  ENSG00000181626_15 (sequence is synthesized)
taactcaaatcagaattttcatactcatgaaagagaaagagacctgtggcaggaaaatcacttgatgcgggatgaaattgccagactcaggctggaaatagacacaataaaacatcagaa

SEQ ID NO: 640661 - DNA, 120 bp, Artificial Sequence
  ENSG00000181626_16 (sequence is synthesized)
ccaggaaactgaaaataaatatttcaaagatattgaaattataaaggaaaacaatgaagaccttgaaaagactctcaagcggaatgaggaagcattaacaaaaacaataacccggtatag

SEQ ID NO: 640662 - DNA, 120 bp, Artificial Sequence
  ENSG00000181626_17 (sequence is synthesized)
taaagagcttaatgttctgatggatgagaatacaatgctcaattctgagctacagaaggaaaaacaaagcatgtcaagactggaaacagaaatggaatcataccgttgtagactggctgc

SEQ ID NO: 640663 - DNA, 120 bp, Artificial Sequence
  ENSG00000181626_18 (sequence is synthesized)
tgccctatgtgatcatgatcaacgtcagtcatcaaaaagagacctacagcttgctttccagagcacagtgaatgaatggtgtcatttacaagaagacactaattctcacattcagattct

SEQ ID NO: 640664 - DNA, 120 bp, Artificial Sequence
  ENSG00000181626_19 (sequence is synthesized)
tcaaagaaaagacgttgcatatagaacacatgcaaggagtcctaagccgaacacagcgtcgattggaggacattgaacacatgtaccaaaatgaccaacctattttggaaaaatacgtga

SEQ ID NO: 640665 - DNA, 120 bp, Artificial Sequence
  ENSG00000181626_20 (sequence is synthesized)
gaaagcagcaatctgtagaggatggactatttcaactacaaagccaaaatctgttgtatcaacagcagtgtaatgatgctcgcaagaaagctgacaatcaggagaaaacaataattaata

SEQ ID NO: 640666 - DNA, 120 bp, Artificial Sequence
  ENSG00000181626_21 (sequence is synthesized)
tccaagtcaaatgtgaagatactgtagaaaaacttcaagctgagtgtagaaagctagaagagaacaataaggggttgatgaaggaatgcactcttttaaaagaaagacaatgccaatatg

SEQ ID NO: 640667 - DNA, 120 bp, Artificial Sequence
  ENSG00000181626_22 (sequence is synthesized)
aaaaagagaaagaagaaagagaagtagtcaggagacagcttcaacgagaagtggatgatgccctgaacaaacaattgctgttagaagctatgctagagatttcatcagaacgtcgtatta

SEQ ID NO: 640668 - DNA, 120 bp, Artificial Sequence
  ENSG00000181626_23 (sequence is synthesized)
atttagaagatgaggcacaaagtttaaaaaagaaattaggccagatgagaagtcaagtatgtatgaaacttagcatgtcaacagttactctgtagctggttaaataatatcaagtgtttc

SEQ ID NO: 640669 - DNA, 120 bp, Artificial Sequence
  ENSG00000181626_24 (sequence is synthesized)
aggacactagtttcagtggagagctttcttttgtattttcattataattaattttattaaaatttgattatctttataatacatccatttctcaatctctgccatgttttataattataa

SEQ ID NO: 640670 - DNA, 120 bp, Artificial Sequence
  ENSG00000181626_25 (sequence is synthesized)
atatttttcttacactatttccccttatgaaagttgagaattacacatcatttctcacagaagattagagaattcttttttctttttacagtatatttttagtgatttctttcattgcca

SEQ ID NO: 640671 - DNA, 120 bp, Artificial Sequence
  ENSG00000181626_26 (sequence is synthesized)
cgtggagacaagccagattaattcagaggataatgtctaatggaatgtttcagaaaattttctttttttaatctctacttttctgtgtgaataaagacttgtgcttacttatttcatggg

SEQ ID NO: 640672 - DNA, 120 bp, Artificial Sequence
  ENSG00000181626_27 (sequence is synthesized)
tttctggttaactggtacagaaagtccattctgcagaataaattagtattttgatgaaaatccttgctctgactttatattggtctatagtcagagtcatatgactatggacagttagca

SEQ ID NO: 640673 - DNA, 120 bp, Artificial Sequence
  ENSG00000181626_28 (sequence is synthesized)
tttgccaacatgtatgtgtctactttctcttgcttaaaacaaaaacaaaaaactttacaaatggggttatagaaggtcagcaaagggtaggtttgagatgtttgggtgggtcaagtgggc

SEQ ID NO: 640674 - DNA, 120 bp, Artificial Sequence
  ENSG00000181626_29 (sequence is synthesized)
attttgacaacgtggcttctcctttggcatgtcaatggacatccctgcattttaagatgacacttttaaataaattatctcctaatgatgacatgagccctgccactcgataggagaatc

SEQ ID NO: 640675 - DNA, 120 bp, Artificial Sequence
  ENSG00000181626_30 (sequence is synthesized)
tatctattttaattatttttctgtttgttttaaaattttcttctggtttccctggaaaggaaagatgatgcttagttttaaatgttaaaaatgggtcgggcgcggtggctcacgcctgtg

SEQ ID NO: 640676 - DNA, 64 bp, Artificial Sequence
  ENSG00000181626_31 (sequence is synthesized)
aatgttaaaaatgggtcgggcgcggtggctcacgcctgtgatccaagcactttgggaggctgaa

SEQ ID NO: 640677 - DNA, 89 bp, Artificial Sequence
  ENSG00000181626_32 (sequence is synthesized)
ccccatctctactaaaaaagataaagaaattagctgggcatggtggtggtgcacgcctgtagtcccagctcctcgggacgggtggaagt

SEQ ID NO: 640678 - DNA, 120 bp, Artificial Sequence
  ENSG00000181626_33 (sequence is synthesized)
tggctgagcaagactccgtcttaaaaaaaaaaaagtgcaagttttcttgctacagcaaaaattaaatgcaaacagacaaaaaagaaatgaaattatagttgatatagtggtgtttggaat

SEQ ID NO: 640679 - DNA, 120 bp, Artificial Sequence
  ENSG00000181626_34 (sequence is synthesized)
tgaaaaatataaatgcttactataatttcctatgtttccccattttaccaattttgtaaatttgagtatctgataaaatagaaattagaaaagaaaaatactgtgttttaatcctagagc

SEQ ID NO: 640680 - DNA, 120 bp, Artificial Sequence
  ENSG00000181626_35 (sequence is synthesized)
ataggcagtaaacttttctgtaaagggccaagtagtattatttgagactttgtgagccataagatccctgttgcaacaactcaacactacagttacagcacaaaagtagccgtaaacaat

SEQ ID NO: 640681 - DNA, 120 bp, Artificial Sequence
  ENSG00000181626_36 (sequence is synthesized)
acagttacagcacaaaagtagccgtaaacaatatgcagactgaaggggtgtggctgcattccagtaaaatttagttaaaaaacaggtaataggggccaggcacggtggctcacgcctgta

SEQ ID NO: 640682 - DNA, 120 bp, Artificial Sequence
  ENSG00000181631_0 (sequence is synthesized)
gctcatttgtaggctgaactaatgactgccgccataagaagacagagagaactgagtatcctcccaaaggtgacactggaagcaatgaacaccacagtgatgcaaggcttcaacagatct

SEQ ID NO: 640683 - DNA, 120 bp, Artificial Sequence
  ENSG00000181631_1 (sequence is synthesized)
gagcggtgccccagagacactcggatagtacagctggtattcccagccctctacacagtggttttcttgaccggcatcctgctgaatactttggctctgtgggtgtttgttcacatcccc

SEQ ID NO: 640684 - DNA, 120 bp, Artificial Sequence
  ENSG00000181631_2 (sequence is synthesized)
agctcctccaccttcatcatctacctcaaaaacactttggtggccgacttgataatgacactcatgcttcctttcaaaatcctctctgactcacacctggcaccctggcagctcagagct

SEQ ID NO: 640685 - DNA, 120 bp, Artificial Sequence
  ENSG00000181631_3 (sequence is synthesized)
tttgtgtgtcgtttttcttcggtgatattttatgagaccatgtatgtgggcatcgtgctgttagggctcatagcctttgacagattcctcaagatcatcagacctttgagaaatattttt

SEQ ID NO: 640686 - DNA, 120 bp, Artificial Sequence
  ENSG00000181631_4 (sequence is synthesized)
ctaaaaaaacctgtttttgcaaaaacggtctcaatcttcatctggttctttttgttcttcatctccctgccaaatacgatcttgagcaacaaggaagcaacaccatcgtctgtgaaaaag

SEQ ID NO: 640687 - DNA, 120 bp, Artificial Sequence
  ENSG00000181631_5 (sequence is synthesized)
tgtgcttccttaaaggggcctctggggctgaaatggcatcaaatggtaaataacatatgccagtttattttctggactgtttttatcctaatgcttgtgttttatgtggttattgcaaaa

SEQ ID NO: 640688 - DNA, 120 bp, Artificial Sequence
  ENSG00000181631_6 (sequence is synthesized)
aaagtatatgattcttatagaaagtccaaaagtaaggacagaaaaaacaacaaaaagctggaaggcaaagtatttgttgtcgtggctgtcttctttgtgtgttttgctccatttcatttt

SEQ ID NO: 640689 - DNA, 120 bp, Artificial Sequence
  ENSG00000181631_7 (sequence is synthesized)
gccagagttccatatactcacagtcaaaccaacaataagactgactgtagactgcaaaatcaactgtttattgctaaagaaacaactctctttttggcagcaactaacatttgtatggat

SEQ ID NO: 640690 - DNA, 120 bp, Artificial Sequence
  ENSG00000181631_8 (sequence is synthesized)
cccttaatatacatattcttatgtaaaaaattcacagaaaagctaccatgtatgcaagggagaaagaccacagcatcaagccaagaaaatcatagcagtcagacagacaacataacctta

SEQ ID NO: 640691 - DNA, 120 bp, Artificial Sequence
  ENSG00000181631_9 (sequence is synthesized)
ggctgacaactgtacatagggttaacttctatttattgatgagacttccgtagataatgtggaaatcaaatttaaccaagaaaaaaagattggaacaaatgctctcttacattttattat

SEQ ID NO: 640692 - DNA, 120 bp, Artificial Sequence
  ENSG00000181631_10 (sequence is synthesized)
cctcgtgtacagaaaagattatataaaatttaaatccacatagatctattcataagctgaatgaaccattactaagagaatgcaacaggatacaaatggccactagaggtcattatttct

SEQ ID NO: 640693 - DNA, 120 bp, Artificial Sequence
  ENSG00000181631_11 (sequence is synthesized)
tctttttttttttttttaatttcaagagcatttcactttaacattttggaaaagactaaggagaaacgtatatccctacaaacctcccctccaaacaccttctcacattcttttccacaa

SEQ ID NO: 640694 - DNA, 120 bp, Artificial Sequence
  ENSG00000181631_12 (sequence is synthesized)
ttcacataacactactgcttttgtgccccttaaatgtagatatgtgctgaaagaaaaaaaaaacgcccaactcttgaagtccattgctgaaaactgcagccaggggttgaaagggatgca

SEQ ID NO: 640695 - DNA, 120 bp, Artificial Sequence
  ENSG00000181631_13 (sequence is synthesized)
gacttgaagagtctgaggaactgaagtgggtcagcaagacctctgaaatcctgggtaaaggattttctccttacaattacaaacagcctctttcacattacaataatataccataggagg

SEQ ID NO: 640696 - DNA, 120 bp, Artificial Sequence
  ENSG00000181631_14 (sequence is synthesized)
cacaagcaccattattaagccactttgcttacaccttaagtgtgtacaattcaagtgtgagaatgctgtgttaactattctttggaattctccttctgtccagcaaatactctaatgatg

SEQ ID NO: 640697 - DNA, 120 bp, Artificial Sequence
  ENSG00000181631_15 (sequence is synthesized)
gttaaacatggcacctactcagcaatgccttcctggaccacaacccctatccccctgccccaccctcctcattaaaaacaaatacttctactgtttgggtgtgtgatagggttctcaatg

SEQ ID NO: 640698 - DNA, 120 bp, Artificial Sequence
  ENSG00000181631_16 (sequence is synthesized)
cagatctcccttttctagttagctatattcttgactgcatccgctaaaaatgttaaagcttcttgagagacagacatgccagattttcttggtatctcccataatacgacctacagtcca

SEQ ID NO: 640699 - DNA, 120 bp, Artificial Sequence
  ENSG00000181631_17 (sequence is synthesized)
tggtctacagatgttttaaatagaattgctattctcgatacatacaaagacgtaattgctgacccacaatcagtaacatccatattgagagatttttcaaaggatggtgaccctgcttgt

SEQ ID NO: 640700 - DNA, 120 bp, Artificial Sequence
  ENSG00000181631_18 (sequence is synthesized)
atttatttaccttggtattttttcttgcatccttctgtgattcaaaaaagtaaaatgtggctttctgaaatgatggataagagtctacatcttctagaaaaaatacataaaggagtagtt

SEQ ID NO: 640701 - DNA, 120 bp, Artificial Sequence
  ENSG00000181631_19 (sequence is synthesized)
aagctctgtaaatgtgccacgagctccaacacgaccatcgtagggtgaagcccacgttttcttccatggcctcaaaggccctagaacttgcctacctttctggccttacctcctagctac

SEQ ID NO: 640702 - DNA, 120 bp, Artificial Sequence
  ENSG00000181631_20 (sequence is synthesized)
ttatccatctcttgaactttatactcttgtataaatttctaactttcagaaaatgccatactctgttttggcaccacacatgtatatttccccctggtacacttggaagactcttatcca

SEQ ID NO: 640703 - DNA, 120 bp, Artificial Sequence
  ENSG00000181631_21 (sequence is synthesized)
tctgtgaaaccctatgttgtcatcacttggtccatgaaatattacctggccaatatcccaccatcacctcaaacccaatcaccccctcctctgtatgctgtcacacctatattattaaac

SEQ ID NO: 640704 - DNA, 120 bp, Artificial Sequence
  ENSG00000181631_22 (sequence is synthesized)
ttatcacattgcattgtaattacttcctgacctttgtatctactcttttagtaactgatgtatatatctgaaaggagagattgtttcattgtgcaatcaataaatgtttgataaaataaa

SEQ ID NO: 640705 - DNA, 120 bp, Artificial Sequence
  ENSG00000181634_0 (sequence is synthesized)
agaggtgcctccaggagcagcaggagcatggccgaggatctgggactgagctttggggaaacagccagtgtggaaatgctgccagagcacggcagctgcaggcccaaggccaggagcagc

SEQ ID NO: 640706 - DNA, 120 bp, Artificial Sequence
  ENSG00000181634_1 (sequence is synthesized)
agcgcacgctgggctctcacctgctgcctggtgttgctccccttccttgcaggactcaccacatacctgcttgtcagccagctccgggcccagggagaggcctgtgtgcagttccaggct

SEQ ID NO: 640707 - DNA, 120 bp, Artificial Sequence
  ENSG00000181634_2 (sequence is synthesized)
ctaaaaggacaggagtttgcaccttcacatcagcaagtttatgcacctcttagagcagacggagataagccaagggcacacctgacagttgtgagacaaactcccacacagcactttaaa

SEQ ID NO: 640708 - DNA, 120 bp, Artificial Sequence
  ENSG00000181634_3 (sequence is synthesized)
aatcagttcccagctctgcactgggaacatgaactaggcctggccttcaccaagaaccgaatgaactataccaacaaattcctgctgatcccagagtcgggagactacttcatttactcc

SEQ ID NO: 640709 - DNA, 120 bp, Artificial Sequence
  ENSG00000181634_4 (sequence is synthesized)
caggtcacattccgtgggatgacctctgagtgcagtgaaatcagacaagcaggccgaccaaacaagccagactccatcactgtggtcatcaccaaggtaacagacagctaccctgagcca

SEQ ID NO: 640710 - DNA, 120 bp, Artificial Sequence
  ENSG00000181634_5 (sequence is synthesized)
acccagctcctcatggggaccaagtctgtatgcgaagtaggtagcaactggttccagcccatctacctcggagccatgttctccttgcaagaaggggacaagctaatggtgaacgtcagt

SEQ ID NO: 640711 - DNA, 120 bp, Artificial Sequence
  ENSG00000181634_6 (sequence is synthesized)
gacatctctttggtggattacacaaaagaagataaaaccttctttggagccttcttactataggaggagagcaaatatcattatatgaaagtcctctgccaccgagttcctaattttctt

SEQ ID NO: 640712 - DNA, 120 bp, Artificial Sequence
  ENSG00000181634_7 (sequence is synthesized)
tgttcaaatgtaattataaccaggggttttcttggggccgggagtagggggcattccacagggacaacggtttagctatgaaatttggggcccaaaatttcacacttcatgtgccttact

SEQ ID NO: 640713 - DNA, 120 bp, Artificial Sequence
  ENSG00000181634_8 (sequence is synthesized)
gatgagagtactaactggaaaaaggctgaagagagcaaatatattattaagatgggttggaggattggcgagtttctaaatattaagacactgatcactaaatgaatggatgatctactc

SEQ ID NO: 640714 - DNA, 120 bp, Artificial Sequence
  ENSG00000181634_9 (sequence is synthesized)
gggtcaggattgaaagagaaatatttcaacaccttcctgctatacaatggtcaccagtggtccagttattgttcaatttgatcataaatttgcttcaattcaggagctttgaaggaagtc

SEQ ID NO: 640715 - DNA, 120 bp, Artificial Sequence
  ENSG00000181634_10 (sequence is synthesized)
caaggaaagctctagaaaacagtataaactttcagaggcaaaatccttcaccaatttttccacatactttcatgccttgcctaaaaaaaatgaaaagagagttggtatgtctcatgaatg

SEQ ID NO: 640716 - DNA, 120 bp, Artificial Sequence
  ENSG00000181634_11 (sequence is synthesized)
ttcacacagaaggagttggttttcatgtcatctacagcatatgagaaaagctacctttcttttgattatgtacacagatatctaaataaggaagtatgagtttcacatgtatatcaaaaa

SEQ ID NO: 640717 - DNA, 120 bp, Artificial Sequence
  ENSG00000181634_12 (sequence is synthesized)
tacaacagttgcttgtattcagtagagttttcttgcccacctattttgtgctgggttctaccttaacccagaagacactatgaaaaacaagacagactccactcaaaatttatatgaaca

SEQ ID NO: 640718 - DNA, 120 bp, Artificial Sequence
  ENSG00000181634_13 (sequence is synthesized)
aagacagactccactcaaaatttatatgaacaccactagatacttcctgatcaaacatcagtcaacatactctaaagaataactccaagtcttggccaggcgcagtggctcacacctgta

SEQ ID NO: 640719 - DNA, 64 bp, Artificial Sequence
  ENSG00000181634_14 (sequence is synthesized)
gctgtaatcctggctactcaggaggccgaggcagaagaattgcttgaactggggaggcagaggt

SEQ ID NO: 640720 - DNA, 63 bp, Artificial Sequence
  ENSG00000181634_15 (sequence is synthesized)
gcagaggttgcgcaaaaaaaaaaaaataaaataataactccaagcctttaaaaaatatcatct

SEQ ID NO: 640721 - DNA, 120 bp, Artificial Sequence
  ENSG00000181634_16 (sequence is synthesized)
taataactccaagcctttaaaaaatatcatctgaaactgttacatcagatttctggcactctactgactgtggaagatagccagctgactggaagatagccagctgattagttccctgaa

SEQ ID NO: 640722 - DNA, 120 bp, Artificial Sequence
  ENSG00000181634_17 (sequence is synthesized)
gaaacctgaagacagatacctggttaactagatcaactacactgccaacttgtttgatgctgagagacaatggacttattccatgggggaagggaaaaaagaagtcaatcaccaaatctg

SEQ ID NO: 640723 - DNA, 120 bp, Artificial Sequence
  ENSG00000181634_18 (sequence is synthesized)
aagaagttaacctagatctttgaggtttgatttgcaactttatatgcagagtattatgtgggtattttcccttaaaatattcaaagggatttacatatgggattagctaatgagcctagc

SEQ ID NO: 640724 - DNA, 120 bp, Artificial Sequence
  ENSG00000181634_19 (sequence is synthesized)
caagaccttccctggaggacaggctggtcattgcggaggtcccttctgtgcttcagtgggttcatatcctctagtccgtatgattttcctacgctaatatgtcaagggcaggagaggcag

SEQ ID NO: 640725 - DNA, 120 bp, Artificial Sequence
  ENSG00000181634_20 (sequence is synthesized)
ctctgttctcctagcctttgttgacttgtctgcaaagcaggaatctgcccatttgtttccaaggagcaaatgagctcatgagaatgaaagatgttaacttcatgcattctgtgccatctg

SEQ ID NO: 640726 - DNA, 120 bp, Artificial Sequence
  ENSG00000181634_21 (sequence is synthesized)
agcatttcggtattatatgactggtgacccttggcccgtattataaatgcttcctatcctgggagacctcatggatgagtctgagaggaaatttggcaccaaaatcactctcactctggt

SEQ ID NO: 640727 - DNA, 120 bp, Artificial Sequence
  ENSG00000181634_22 (sequence is synthesized)
ttccagtagactatagaggcagagaggcatttgagaggctcctgagcaaagtgtccagtgtagcaggagcacttcattaatatttattgagttataattaaataaaaattaatttctgat

SEQ ID NO: 640728 - DNA, 120 bp, Artificial Sequence
  ENSG00000181634_23 (sequence is synthesized)
ttctcagtttggaggttaaggctctaaatatattttctaacctctgctaggctaacttaagccaggcctttttcttgccttccctttctcaaaacagtcagcacagactcagtgggagca

SEQ ID NO: 640729 - DNA, 120 bp, Artificial Sequence
  ENSG00000181634_24 (sequence is synthesized)
cagaggagtgtggtcacctccacctggctcaccagagtcttcatagaggaagtgaagcctggaagaaactgggcgggccccagatgaccacagggaaagggcatctcagatggaggaatt

SEQ ID NO: 640730 - DNA, 120 bp, Artificial Sequence
  ENSG00000181634_25 (sequence is synthesized)
acccttgacttaaagcagaaaagaaagatttctcagtaactccaaaacttgcttgataggagaatattccctcaaccaattcctaggacaatatttattggtagatcaagaatgtttcct

SEQ ID NO: 640731 - DNA, 120 bp, Artificial Sequence
  ENSG00000181634_26 (sequence is synthesized)
caataactctagtctagctccatgatcagaactaacacccattaaaaacataaaatgttctttctgaaccggtcttcatggtgcgtgagagcaccaagcagctttggtatgcaggaggag

SEQ ID NO: 640732 - DNA, 120 bp, Artificial Sequence
  ENSG00000181634_27 (sequence is synthesized)
acatttgaggctttgggaaattctctgctgtgcatttatttggctcctgtcataagcttgttttttaaagaatgtatcatagctcaagtttttactgctgattttgttaaattctgtata

SEQ ID NO: 640733 - DNA, 120 bp, Artificial Sequence
  ENSG00000181634_28 (sequence is synthesized)
gtatattttttacggaaaggcacagtcagacattcctaatagggctcatgtcagaacttctgttcccaaggcattatctccatagcaaaaattagtgcactgttttcaaaagtgaggtgg

SEQ ID NO: 640734 - DNA, 120 bp, Artificial Sequence
  ENSG00000181634_29 (sequence is synthesized)
gaaaatgcttttaagatcatgtgatgttcccctaaaaggggttaatggggtgtattcagggtttgggagggaggaagaagcatgctttagaaaacagtaaatttagggagaaaatgcttt

SEQ ID NO: 640735 - DNA, 120 bp, Artificial Sequence
  ENSG00000181634_30 (sequence is synthesized)
gttggttaaatgtcactcaaaaggctgaattcaaatcaattccacaaacatttactgagtacctactgcccctggggacacagagataaattatttagtctcagacacactcattctaac

SEQ ID NO: 640736 - DNA, 120 bp, Artificial Sequence
  ENSG00000181634_31 (sequence is synthesized)
ttcccagcacctctactgtctgcagattctttaatttattttggttgtattagctaattaattcgtaaactttaggcacatggatctattctcattatgaaaatggatgccatttgatta

SEQ ID NO: 640737 - DNA, 120 bp, Artificial Sequence
  ENSG00000181634_32 (sequence is synthesized)
aggctgatgactaacaaaatgatttgtgtttactcgaagtgtttttttaaaaatagctactcaaggatagttttccataaatcaagaaggtaaaaaagttcccattttttattgtagaat

SEQ ID NO: 640738 - DNA, 120 bp, Artificial Sequence
  ENSG00000181634_33 (sequence is synthesized)
ccattatttaaactacatgtagagacaggttattatttgctatattcaagtttggtcatcaatacccttaaaaatattagaattttatggatgacccagaaatgctttgaaaatctgtgt

SEQ ID NO: 640739 - DNA, 120 bp, Artificial Sequence
  ENSG00000181634_34 (sequence is synthesized)
tcctcagcaaatacagagaccatgatcaaaatgcacagaatcactaacattttgatgctagcatggtttcagtctatttggcagaacagaattgattatgctactaaaatttctttttct

SEQ ID NO: 640740 - DNA, 120 bp, Artificial Sequence
  ENSG00000181634_35 (sequence is synthesized)
caggcgtgagccactgtgcccggactctgattttttttttactaaggtacagtaagaaaagggaaaagtgtacgttttcacttcctgaaatatgtcaggttgaatcaataatagagcaca

SEQ ID NO: 640741 - DNA, 120 bp, Artificial Sequence
  ENSG00000181634_36 (sequence is synthesized)
ctgaaatatgtcaggttgaatcaataatagagcacaccagaactcttggctccatttcaacctaaactattcagttctcatcaccccagaggaaattccgcctctgtgctggtcagtaat

SEQ ID NO: 640742 - DNA, 120 bp, Artificial Sequence
  ENSG00000181634_37 (sequence is synthesized)
ccccctggattataaaagtttaactaactcactgtgcacaaggcacggccattgccaacattctcttgcaaggtattttcccaagcccttacccaattctgtttccatgattgtgacatt

SEQ ID NO: 640743 - DNA, 120 bp, Artificial Sequence
  ENSG00000181634_38 (sequence is synthesized)
ggggattaattctgcaagacagaactgtttatattctgtaccttaaaaacacatgcaaacatctcttgccttaagatttctggctttcctatggcccagagtcctagaagtgttttgata

SEQ ID NO: 640744 - DNA, 120 bp, Artificial Sequence
  ENSG00000181634_39 (sequence is synthesized)
tttgtagcagaattttcaagtgtacatccttatcctggatattaacatttttgcatcatattggcagctggacctacagagaatttagtagactgttaacctaataagccttgaatcctt

SEQ ID NO: 640745 - DNA, 120 bp, Artificial Sequence
  ENSG00000181634_40 (sequence is synthesized)
ttgcaccagtggtgagagaatgtggatcagagccatcacctccatgccccgtcaccctctaacaaccacatttacaacttccccagctctgagacacacttgcctccaccccttccatca

SEQ ID NO: 640746 - DNA, 120 bp, Artificial Sequence
  ENSG00000181634_41 (sequence is synthesized)
ccccattttaagatgaaaataccacaccagcctggaaggaagaagttacttgcccagggccacatagtgagttaagggctgatctagagctaggaagctgtcttcctgaaccataatcct

SEQ ID NO: 640747 - DNA, 120 bp, Artificial Sequence
  ENSG00000181634_42 (sequence is synthesized)
ggactcttctaacctctctactcatcgcaaatagagttcattttagtgatttgaaggaagatgggacaagtattttcaaacacctgtaggacaacatggaagtgggaggagacttctact

SEQ ID NO: 640748 - DNA, 120 bp, Artificial Sequence
  ENSG00000181634_43 (sequence is synthesized)
gtagctccccagagaagagagctagggctacagagttgcagttacaaggttgccctctctggcttgatccccaaaggaattttctactccaaaatagaatttttctaggatgctatttct

SEQ ID NO: 640749 - DNA, 120 bp, Artificial Sequence
  ENSG00000181634_44 (sequence is synthesized)
cagtccctggagatactcaaacaaagggcttgtcacaagggtttttgtagaagctattcttcacagaggttgggggagagattaagccaaaggatctctgaggtctttttcaaatctata

SEQ ID NO: 640750 - DNA, 120 bp, Artificial Sequence
  ENSG00000181634_45 (sequence is synthesized)
attatgtggccttttgttcattgacttccatgtgttctagttgatcattacaaacctggcaggccttctcaagggttcagtaattagctgtcatttcccatttgtccagagagtgtccaa

SEQ ID NO: 640751 - DNA, 120 bp, Artificial Sequence
  ENSG00000181634_46 (sequence is synthesized)
cacaaaatacccctaagatcttggccaatagagaaatgtcatggaattttagaaatgacagtatctgcggagtttattccaagttatatcatttcaaagatgaagaaacccaggctcaga

SEQ ID NO: 640752 - DNA, 120 bp, Artificial Sequence
  ENSG00000181634_47 (sequence is synthesized)
gggagccatcacatccacaccctgtcacccttcgtggccagtgccagacagtagctagttggatgctaaaagtagaatttagatatcttaacaataagcccagcagtctttcaacttcat

SEQ ID NO: 640753 - DNA, 120 bp, Artificial Sequence
  ENSG00000181634_48 (sequence is synthesized)
tcgtaaatcatttttgttttgagcatctgtcacgtggcagcacttgcctggatactggagagctgagaaggaatgcgacaggcaagtcctactctcacagtgtatacattcaggaggaac

SEQ ID NO: 640754 - DNA, 120 bp, Artificial Sequence
  ENSG00000181634_49 (sequence is synthesized)
aagacacacagtgccaagtaaataaagtagctgaacttcatcaaatgattttattcttaaagtcattaaagcatgtaatgttcccctttttttgtttcaggggtgtacagattgaagaag

SEQ ID NO: 640755 - DNA, 120 bp, Artificial Sequence
  ENSG00000181634_50 (sequence is synthesized)
tgtaggtgtttatgtggttttagtgacaaaccccatgtgctttcattgattttatgttttatgttaaaacatcaaccgcaaggtaaaatgcatattgtatgttgttggatacgtacttaa

SEQ ID NO: 640756 - DNA, 120 bp, Artificial Sequence
  ENSG00000181634_51 (sequence is synthesized)
ctggtatgcatcccatgtctttgggtactagtgtatgaattctaatctctgtaaatgaaatgttgtatgtgttaatatatttaatagatgtaacttaataaactggcattgaagactgaa

SEQ ID NO: 640757 - DNA, 120 bp, Artificial Sequence
  ENSG00000181634_52 (sequence is synthesized)
agtgcaggtatctcatggagggttttttggatgtcttcttccctgtgggggggttccaaaggcccatgtctcttgggcattttctttcagattctatcagccctctctctttctctcctg

SEQ ID NO: 640758 - DNA, 120 bp, Artificial Sequence
  ENSG00000181634_53 (sequence is synthesized)
tctctctctttcattcatacactgagtcattcagaaatggcttctctccaactcggagctgcaagtaattctggatctggtcacaaacaaaaagtccccagagttgccaatttatctagt

SEQ ID NO: 640759 - DNA, 120 bp, Artificial Sequence
  ENSG00000181634_54 (sequence is synthesized)
tcatctgtgccctgttcaagatgatgtaactaaacatttaccttcagggaggtgtttccaaagaattttcatcgatatatagaaatcaagagaaattccatactatcaccaaatcaagag

SEQ ID NO: 640760 - DNA, 120 bp, Artificial Sequence
  ENSG00000181634_55 (sequence is synthesized)
aaattccatactatcaccagttggccaactttccaagtctagtgcagaaatccaaggcacctcacacctagagttcctatacctctgagactccagaggaaagaacaagacagtgcagaa

SEQ ID NO: 640761 - DNA, 120 bp, Artificial Sequence
  ENSG00000181634_56 (sequence is synthesized)
ggatatgttagaacccactgaaaacctagaaggttaaaaaggaagcataccctcctgacctataagaaaattttcagtctgcagggggatatccttgtggcccaagacattggtgttatc

SEQ ID NO: 640762 - DNA, 120 bp, Artificial Sequence
  ENSG00000181634_57 (sequence is synthesized)
atttgactaagaggaaattatttgtggtgagctctgagtgaggattaggaccagggagatgccaagtttctatcacttacctcatgcctgtaagacaagtgttttgttccaattgatgaa

SEQ ID NO: 640763 - DNA, 120 bp, Artificial Sequence
  ENSG00000181634_58 (sequence is synthesized)
tggggataaaacagttcagccaatcacttatggggcaaagaatgggaatttgaagggtctggtgcctggccttgtcatacgtaaacaagagaggcatcgatgagttttatctgagtcatt

SEQ ID NO: 640764 - DNA, 120 bp, Artificial Sequence
  ENSG00000181634_59 (sequence is synthesized)
tgggaaaggataattcttgcagcaagccattttcctaaacacagaagaatagggggattccttaaccttcattgttctccaggatcataggtctcaggtaaaattaaaaattttcaggtc

SEQ ID NO: 640765 - DNA, 120 bp, Artificial Sequence
  ENSG00000181634_60 (sequence is synthesized)
agaccactcagtctcagaaaggcaaagtaatttgccccaggtcactagtccaagatgttattctctttgaacaaatgtgtatgtccagtcacatattcttcattcattcctccccaaagc

SEQ ID NO: 640766 - DNA, 120 bp, Artificial Sequence
  ENSG00000181634_61 (sequence is synthesized)
agtttttagctgttaggtatattcgatcactttagtctattttgaaaatgatatgagacactttttaagcaaagtctacagtttcccaatgagaaaattaatcctctttcttgtctttcc

SEQ ID NO: 640767 - DNA, 120 bp, Artificial Sequence
  ENSG00000181638_0 (sequence is synthesized)
atgatggagaagcctgcaggcagaaaaaagaagacgccgaccccaagggaggaggcagacgtgcagaagagtgcgctcagagaggagaaggtgtccggggacagaaagccacctgagagg

SEQ ID NO: 640768 - DNA, 120 bp, Artificial Sequence
  ENSG00000181638_1 (sequence is synthesized)
cccactgtgcccaggaagccccgcacagagccctgcctgagtcctgaagacgaagagcacgtctttgatgccttcgacgcttcatttaaagatgactttgagggggttcccgtgttcatt

SEQ ID NO: 640769 - DNA, 120 bp, Artificial Sequence
  ENSG00000181638_2 (sequence is synthesized)
ccttttcagaggaagaaaccctatgagtgcagtgagtgtgggcggatctttaagcacaagacagaccacattcgccatcagagggtccacactggagagaagcccttcaagtgtgcgcag

SEQ ID NO: 640770 - DNA, 120 bp, Artificial Sequence
  ENSG00000181638_3 (sequence is synthesized)
tgcgggaaggccttccggcacagctctgacgtcaccaaacaccagaggactcacacgggagagaagcccttcaaatgcggggagtgcgggaaagcctttaactgcggctccaatctcctg

SEQ ID NO: 640771 - DNA, 120 bp, Artificial Sequence
  ENSG00000181638_4 (sequence is synthesized)
aaacatcagaagacgcacaccggggagaagccctacgaatgcacgcactgtgggaaagcctttgcctacagctcctgtctcatccgccatcagaaacgccaccctcggaagaagccctga

SEQ ID NO: 640772 - DNA, 120 bp, Artificial Sequence
  ENSG00000181638_5 (sequence is synthesized)
agcgggcgggcatttcctgccggtgcctagggccgacggggacgctggcactggtggggagctgttggggggtcccgcatctagggctctcctttcctgcctccggcccccgcgaggggc

SEQ ID NO: 640773 - DNA, 120 bp, Artificial Sequence
  ENSG00000181638_6 (sequence is synthesized)
gcgcgcctctccccgccctccagcagtcctggtagggcccgggcgcgtccgcgctctgcagcgggaggtcctcgtcgcctctcgtctccagccagcaccaagaggatggtggcccttggc

SEQ ID NO: 640774 - DNA, 120 bp, Artificial Sequence
  ENSG00000181638_7 (sequence is synthesized)
ctcctggtgcagagcatcagtcccacgctgggagtgtggagaggtgcgtgggaagcaagccattgaggaagtggggccaacagagaggtcagcagccccttagccctcacgcttccaagg

SEQ ID NO: 640775 - DNA, 120 bp, Artificial Sequence
  ENSG00000181638_8 (sequence is synthesized)
cgtgccctggggacccccggaaaagcagcccagtcagatgtgggaacgtgccagcgagggagagacctttccactgcagagagtctctctgatcaagacaccgcagtgatggagaagcca

SEQ ID NO: 640776 - DNA, 120 bp, Artificial Sequence
  ENSG00000181638_9 (sequence is synthesized)
ccagaggctccttgcagccacagagcattttccaagttcccgatggcgaacggggctcagcaccagagaccagggagtattcactgccatccattggacgtgtttgggtcacctcagagc

SEQ ID NO: 640777 - DNA, 120 bp, Artificial Sequence
  ENSG00000181638_10 (sequence is synthesized)
acccagcaggagaggctcctggtgtagtgggcagcccagcacttcccgctgctgcctgcctgtgatgtccactctgcttaagcctttcatctgccgctgaaggccccagtctggactctc

SEQ ID NO: 640778 - DNA, 120 bp, Artificial Sequence
  ENSG00000181638_11 (sequence is synthesized)
tgccctctgggtccccgagctctgcagcgagccctgggaccactcatccctgcccagccagcttcagtgcccggggccgcttgtccctgcccggcctctgtgccccaactgtgcttggtc

SEQ ID NO: 640779 - DNA, 120 bp, Artificial Sequence
  ENSG00000181638_12 (sequence is synthesized)
ctctggcttctctcctcctgctggagtgccagtccctgagctcagacccccgtccccggaactgggccacaccacgtgccctcttggcccagccttcctcccagagaggcggcctgactt

SEQ ID NO: 640780 - DNA, 120 bp, Artificial Sequence
  ENSG00000181638_13 (sequence is synthesized)
acctggatggacttgggacaaaggttcctcaggaccttggacaccaccacctgctgagcttcccgtcccagccatgcagtggggcccctggggtgccctcggcagcttcggtccagcctg

SEQ ID NO: 640781 - DNA, 120 bp, Artificial Sequence
  ENSG00000181638_14 (sequence is synthesized)
catctgcccctcggccttccgacgtgggcggtgggccccagccccacagaccagcccagcattcaggctggtagagcagatcacccccaaagcaagaagttccagatgaaatatgcataa

SEQ ID NO: 640782 - DNA, 120 bp, Artificial Sequence
  ENSG00000181638_15 (sequence is synthesized)
gaagcagcctcaaaactaacaaaaaagattcgcacattcctcagttagaggaggagcagagatgaagaaaaggagaagaaaagcgctggaaagagaagaaaaggaacctccttctgtgca

SEQ ID NO: 640783 - DNA, 120 bp, Artificial Sequence
  ENSG00000181638_16 (sequence is synthesized)
gcaggctcctggcccagggagtgcggtgtgcggcagagtgcgtgcagggaagcagcctctgaaatcgtgcagggaagcaccctgtgaaatcgtgcagggaagcaccctgtgaaatcgtgc

SEQ ID NO: 640784 - DNA, 120 bp, Artificial Sequence
  ENSG00000181638_17 (sequence is synthesized)
agggaagcaccctgtgaagtcgtgcagggaagcaccctctgaaatcgtgcagggaagcaccctctgaaatcgtgcagggaagcaccctgtgaagtcgtgcagggaagcaccttctgaaat

SEQ ID NO: 640785 - DNA, 120 bp, Artificial Sequence
  ENSG00000181638_18 (sequence is synthesized)
gggcaactttacaccccagtgttcactgtcctcaggccactgcagagccatcctagtggggcagtgggcgcggggcgggggctcctgactccggtgaggtcaccctggaggggagtccca

SEQ ID NO: 640786 - DNA, 120 bp, Artificial Sequence
  ENSG00000181638_19 (sequence is synthesized)
ggaatcagcctgatgttcagaatgccttcctggcatctcagaagtgtactgggggagacgtgaggacctttcagccaagtgtcagcgttcttattgcaggagaacattaaagccacaacc

SEQ ID NO: 640787 - DNA, 120 bp, Artificial Sequence
  ENSG00000181638_20 (sequence is synthesized)
cagaaacttctcaggagcatggcgcacccacaccagccccgggctccgcctggacagcacctcctgggccgccctgaccagcagacaccatccttccagcctctcttggccacccggacc

SEQ ID NO: 640788 - DNA, 120 bp, Artificial Sequence
  ENSG00000181638_21 (sequence is synthesized)
agcgggcaccaccctcccagcctcacgcggccaccctgaccagcaggcaccatccttccagccttgctcagtcaccctgacccagagggctgccctgaccagcgggcaccatcctcccag

SEQ ID NO: 640789 - DNA, 120 bp, Artificial Sequence
  ENSG00000181638_22 (sequence is synthesized)
ccccactcagctgccctgaccagcgggcaccatcctcccagcctcactcggccagccgagctctgtaggcctcagagtgcagagaacctcaaatgttgtgactttgctctgctgcaggga

SEQ ID NO: 640790 - DNA, 120 bp, Artificial Sequence
  ENSG00000181638_23 (sequence is synthesized)
cctgccatggagtgtcccttgtgcgagcattttgagagctatgccagcatccatccctgcaggtcccatccctgagccatttctcaggagagcaggaagggagcagggagaggggtgctc

SEQ ID NO: 640791 - DNA, 120 bp, Artificial Sequence
  ENSG00000181638_24 (sequence is synthesized)
ccagccagccccggaaccagaggtctggggacgcagccgaccagccctccttgtctgggcctctgtttcctcttcgacacagggaagcagggaggggccgatcagcgacttaggcctgtt

SEQ ID NO: 640792 - DNA, 120 bp, Artificial Sequence
  ENSG00000181638_25 (sequence is synthesized)
ggctgtggtggggtccacctgcgtttctggggagcccacggaccctggggtgtacctgggtttcattcccagtgacctctcctattggtccccatttggggcgctgagatgtgatcgttt

SEQ ID NO: 640793 - DNA, 120 bp, Artificial Sequence
  ENSG00000181638_26 (sequence is synthesized)
ctttcctgagaatgagctgaggtaaaaacatgctggggaggaagatgggccctgggggcagcgagctgcgcctctgcaccgggagaaaggccgtgtccccagagctgaggcggtggtggg

SEQ ID NO: 640794 - DNA, 120 bp, Artificial Sequence
  ENSG00000181638_27 (sequence is synthesized)
cagggctcctgagaagccggggcagggcagggtgtctctgaggtcaatgaggaacagctgaggtccagggacgcaggaaggatggggtgaactccgggatggggccggcagggagcctca

SEQ ID NO: 640795 - DNA, 120 bp, Artificial Sequence
  ENSG00000181638_28 (sequence is synthesized)
cgcttacagagcctggtgttggcactctcctggcttcctccgcaaacctagccacgtggtcagggagcccgggcctagcagacggcccccaccttgacagaatccccagggtcgtgcgtg

SEQ ID NO: 640796 - DNA, 120 bp, Artificial Sequence
  ENSG00000181638_29 (sequence is synthesized)
gcggtgggggcgacttcacagccgagaccgggcctaacgctgctgtctcgcagtcacccctgcaggccgctcagggcagggctctggcctgacgggggttcctggacacgcctctgagcc

SEQ ID NO: 640797 - DNA, 120 bp, Artificial Sequence
  ENSG00000181638_30 (sequence is synthesized)
gcccctacccgcacccgtgcaccttccacgcccgtctccagcagcccctgcccccacccgcacccctgcacctgccacgcctgtctccggcagcccctgcccgcacccgcacccctgcac

SEQ ID NO: 640798 - DNA, 120 bp, Artificial Sequence
  ENSG00000181638_31 (sequence is synthesized)
gcacctgccacgcccgtctccggcagcacctgccacgcccgtctccggcagcacctgccacgcccgtctccggcagcacctgccacgcccgtctccggcagcccctgcccgcacccgcac

SEQ ID NO: 640799 - DNA, 120 bp, Artificial Sequence
  ENSG00000181638_32 (sequence is synthesized)
ccctgcacctgccacgcccgtctccggcagcccctgcctgcacccgcacccctcacggctgtctccggcagcccctgcccgcgcccgcacctctgcacctcccacgcccctctccggcag

SEQ ID NO: 640800 - DNA, 120 bp, Artificial Sequence
  ENSG00000181638_33 (sequence is synthesized)
cccctgcccacacccgcacccctgcacctcccacgcccgtcttgccctggggcccaggtgcaggtctgtgaggagggcagccccgtgctcccgtggccaccgctcagccaaatggattca

SEQ ID NO: 640801 - DNA, 120 bp, Artificial Sequence
  ENSG00000181638_34 (sequence is synthesized)
gcgagggtttttagtgtttgtgcctgtgtccccgtgtgcctgtttcctggtgaggctggatgcctggcatgtctgaacactcacattccccaggcatgcatgtgcagccgccgccgccac

SEQ ID NO: 640802 - DNA, 120 bp, Artificial Sequence
  ENSG00000181638_35 (sequence is synthesized)
ccatgtactgtggcgctgacccctcctgtaacagctgtggtcttggcctctcgtgttggtggcagatgtcccatttcccagttactttctgttgtccaaaagtttaactgtcctgccagc

SEQ ID NO: 640803 - DNA, 120 bp, Artificial Sequence
  ENSG00000181638_36 (sequence is synthesized)
caaagctgctgagcattactctgatagaccatcagtccttggtaagtgtcctgtgcatctgggataagcatccgtttgttttcagctgcgctttctgtgacttgctctgcgtgagtcctc

SEQ ID NO: 640804 - DNA, 120 bp, Artificial Sequence
  ENSG00000181638_37 (sequence is synthesized)
ggtccacgtgggccgttgcgctggttcccagcctgcccgacacactcactgcgacgcctcccttgcctactgcttgctggcttctgtgttctctgcagtaaacattgatttctgactcga

SEQ ID NO: 640805 - DNA, 120 bp, Artificial Sequence
  ENSG00000181638_38 (sequence is synthesized)
acgcgcagcgtcggtatgggccccgccgcctccccgcaccccggcgctccagggatgtggcaagacccggctttgagcacctcccgggcgccggccccgaggccgacctagctctgcacg

SEQ ID NO: 640806 - DNA, 120 bp, Artificial Sequence
  ENSG00000181638_39 (sequence is synthesized)
tgggccgcggggctctgccgttgaaaggagagcctctaactaggagcacgcacgggaccctggcgggcccctccgcctggctcagatgcctggcatctcaggccttggcacagctagcag

SEQ ID NO: 640807 - DNA, 120 bp, Artificial Sequence
  ENSG00000181638_40 (sequence is synthesized)
gcccctggcaggccgtggacccagcaggctgttttagtgcagattgcccctgaatctcaagcccactaatgttccagtctctccatgagacccagatccctgaaagtagtggagggaggc

SEQ ID NO: 640808 - DNA, 120 bp, Artificial Sequence
  ENSG00000181638_41 (sequence is synthesized)
gccagggtgagtgaggttttctaggcagcccttaccgcccacggatacccagagcttcatattacaagtgaagggtcctccgcccagagaggcgacggagctacgctggagttgcacgac

SEQ ID NO: 640809 - DNA, 120 bp, Artificial Sequence
  ENSG00000181638_42 (sequence is synthesized)
ccagcccagcattcagggcaggacatcctggtgggccccctggcccggatctccttatgcagccgttcccggtatgtcctgaggctggacggcctcagccagctgtcaccaggagaggaa

SEQ ID NO: 640810 - DNA, 120 bp, Artificial Sequence
  ENSG00000181638_43 (sequence is synthesized)
tactcgcactcccagaaatggacatatcaggaggtgaattgttcagaagcaggcatcagagcacgtgtgacgtgtgatcctggatcggaagagttgctttgaaggactttgctgggacgt

SEQ ID NO: 640811 - DNA, 120 bp, Artificial Sequence
  ENSG00000181638_44 (sequence is synthesized)
ttggccgacctggattgtagactccaggcacagtcaactgcaggcacagtcaactgcaggcacagtcagcaccagcgcagcagggacggggcggtcctcactgacgtcctcctactgcag

SEQ ID NO: 640812 - DNA, 120 bp, Artificial Sequence
  ENSG00000181638_45 (sequence is synthesized)
atgcacactgaggctcttggccgcagagcgtggcgtctgcagttcatgccaacggtgtgtgcacgtccccggagagtgacagaggagagtggctaaatgtcagtcatggggaatctagag

SEQ ID NO: 640813 - DNA, 120 bp, Artificial Sequence
  ENSG00000181638_46 (sequence is synthesized)
cacaggtgggcacgcttctccgatgaagggtcaggcaggaaatattcttggcactgcagccatacagcctgtgcctcagcacccacgggggaccacagaaggttggggaccactgcttta

SEQ ID NO: 640814 - DNA, 120 bp, Artificial Sequence
  ENSG00000181638_47 (sequence is synthesized)
aacaactagctctcccgtgaagagcaggtccccaccctgctgtgtagggcaacagcagatgtcaatggcatatgaatgaacgagcgtggctgtgccaataaaactttatttacaaacgta

SEQ ID NO: 640815 - DNA, 120 bp, Artificial Sequence
  ENSG00000181638_48 (sequence is synthesized)
ccagctactcaggaagctgaggtgggaaggatgtgacatgaggggttctgctggctgctgtggtccatggcaggggggcagccctggtttcatgaactcagaacccagcctctgggggat

SEQ ID NO: 640816 - DNA, 120 bp, Artificial Sequence
  ENSG00000181638_49 (sequence is synthesized)
tcaaagcacggtgactggttccaagcccagtatggtggagaaggagactacggcaggaaccagggggattcgggggtggaggagggaagccgcagggcagttggtgggtacatcagatcc

SEQ ID NO: 640817 - DNA, 120 bp, Artificial Sequence
  ENSG00000181638_50 (sequence is synthesized)
tgtggacatggtgtgcagacccggaaccccggcagaggagcaaggattccttgcaccaagaggatggtggcccttggcctcctggtgcagagcatcagtcccacgctgggagtgtggaga

SEQ ID NO: 640818 - DNA, 120 bp, Artificial Sequence
  ENSG00000181638_51 (sequence is synthesized)
cctgaccacagtatgtgactaggatttggagataaaaaagatacgatcctcgccttcaggagaccctgtcgcataaggagactgccatgtcagtgaccagccacacgtgcagtgacaagt

SEQ ID NO: 640819 - DNA, 120 bp, Artificial Sequence
  ENSG00000181638_52 (sequence is synthesized)
gtctggaagaaggaacagtgctgtacagcatggaggacccccacacaggcctcgggcagcagccgttaggctcagtgggttcacaaaccaccccccgccccgccgtggagtggagtctgc

SEQ ID NO: 640820 - DNA, 120 bp, Artificial Sequence
  ENSG00000181649_0 (sequence is synthesized)
agagccggcgccgtcaccgcccgcattgccgctcccagtcccgcgctcggcacgacatgaaatcccccgacgaggtgctacgcgagggcgagttggagaagcgcagcgacagcctcttcc

SEQ ID NO: 640821 - DNA, 120 bp, Artificial Sequence
  ENSG00000181649_1 (sequence is synthesized)
agctatggaagaagaagcgcggggtgctcacctccgaccgcctgagcctgttccccgccagcccccgcgcgcgccccaaggagctgcgcttccactccatcctcaaggtggactgcgtgg

SEQ ID NO: 640822 - DNA, 120 bp, Artificial Sequence
  ENSG00000181649_2 (sequence is synthesized)
agcgcacgggcaagtacgtgtacttcaccatcgtcaccaccgaccacaaggagatcgacttccgctgcgcgggcgagagctgctggaacgcggccatcgcgctggcgctcatcgatttcc

SEQ ID NO: 640823 - DNA, 120 bp, Artificial Sequence
  ENSG00000181649_3 (sequence is synthesized)
gccgcggccgccgcaccctccgagccctcggagccctccaggccatccccgcagcccaaaccccgcacgccatgagcccgccgcgggccatacgctggacgagtcggaccgaggctagga

SEQ ID NO: 640824 - DNA, 120 bp, Artificial Sequence
  ENSG00000181649_4 (sequence is synthesized)
cgtggccggcgctctccagccctgcagcagaagaacttcccgtgcgcgcggatcctcgctccgttgcacgggcgccttaagttattggactatctaatatctatgtatttatttcgctgg

SEQ ID NO: 640825 - DNA, 120 bp, Artificial Sequence
  ENSG00000181649_5 (sequence is synthesized)
ttctttgtagtcacatattttatagtcttaatatcttgtttttgcatcactgtgcccattgcaaataaatcacttggccagtttgcttttctaccatccggctgtggctcagtgagactc

SEQ ID NO: 640826 - DNA, 120 bp, Artificial Sequence
  ENSG00000181649_6 (sequence is synthesized)
ctgctgggagggtggaggcccaggaatgggcgggcaggacaccctcatccagtcctgcggggctggtgtgaaaggcgctgggaaccggctttgaatgaataaatgaatcgtgtcatctgc

SEQ ID NO: 640827 - DNA, 120 bp, Artificial Sequence
  ENSG00000181652_0 (sequence is synthesized)
atggtgagccgaatgggctggggggggagaagaaggcggctggggcggtggggagatctggggcccggatcggtgcccctcctccccatgccactgccacctcctcctcctccttcatgc

SEQ ID NO: 640828 - DNA, 120 bp, Artificial Sequence
  ENSG00000181652_1 (sequence is synthesized)
cggggacctgggggagggaggatctccatcttctctctgtcccctgcccctcatacaagaagctccccctcctcattttcccctcccaccgcagggcccccttgctcagtgctacagggg

SEQ ID NO: 640829 - DNA, 120 bp, Artificial Sequence
  ENSG00000181652_2 (sequence is synthesized)
acaggggcttctcagtcttgccacagtgctctccctatcccagccacccccccaacacaggctcaacctgcaatgacacctgcctctgcatctccctcctggggatcccactccacccca

SEQ ID NO: 640830 - DNA, 120 bp, Artificial Sequence
  ENSG00000181652_3 (sequence is synthesized)
cccctggccccggcaacccccactccctcacagcagtgcccccaggactctcctgggctgcgggtaggccctttgatccctgaacaggattatgagcggctggaggactgtgaccctgag

SEQ ID NO: 640831 - DNA, 120 bp, Artificial Sequence
  ENSG00000181652_4 (sequence is synthesized)
gggtcccaagactcacccatccacggggaggagcagcaacccctgcttcatgtccctgaagggctccgaggctcctggcatcacatccagaacctggacagtttcttcaccaagatctac

SEQ ID NO: 640832 - DNA, 120 bp, Artificial Sequence
  ENSG00000181652_5 (sequence is synthesized)
agctaccaccagcggaatggctttgcctgcatcttgctggaggatgtcttccagctgggacaatttattttcattgtcaccttcacaaccttcctccttcgatgcgtggattacaatgtt

SEQ ID NO: 640833 - DNA, 120 bp, Artificial Sequence
  ENSG00000181652_6 (sequence is synthesized)
ctctttgccaaccaaccaagtaaccataccagacctgggccgttccacagcaaagtgaccctgtcagatgccatcctaccctcagcccagtgtgctgagaggatccgctccagcccgctg

SEQ ID NO: 640834 - DNA, 120 bp, Artificial Sequence
  ENSG00000181652_7 (sequence is synthesized)
ctggtcctcctcctggtcctggctgccggcttctggctggtccaactgcttcgctcagtctgcaacctcttcagctactgggacatccaggtgttttacagggaggccctgcacatcccc

SEQ ID NO: 640835 - DNA, 120 bp, Artificial Sequence
  ENSG00000181652_8 (sequence is synthesized)
ccggaggagctgagctcggttccctgggcagaggtgcagtcccgcctcttggcactgcagcggagcgggggcctgtgcgtgcagccgcggcccctgacggagctggacatccaccaccgc

SEQ ID NO: 640836 - DNA, 120 bp, Artificial Sequence
  ENSG00000181652_9 (sequence is synthesized)
atcctgcgctacaccaactaccaggtggcgctggccaacaaaggcctgctgccggcccgctgcccgctgccctggggaggcagtgcggctttcctcagccgcggcctggcgctcaatgtc

SEQ ID NO: 640837 - DNA, 120 bp, Artificial Sequence
  ENSG00000181652_10 (sequence is synthesized)
gacctgctgctcttccgcggtcccttctcgctcttccgcgggggctgggagctgccgcacgcctacaagcgcagcgaccagcggggcgccctagcagcgcgctgggggcgcacagtgctg

SEQ ID NO: 640838 - DNA, 120 bp, Artificial Sequence
  ENSG00000181652_11 (sequence is synthesized)
ctgctggccgccctgaacctggcgctgagcccgctggtgctggcctggcaggttctgcacgtcttctatagccacgtggagctgctgcggcgcgagcctggcgcgctgggggcgcgcggc

SEQ ID NO: 640839 - DNA, 80 bp, Artificial Sequence
  ENSG00000181652_12 (sequence is synthesized)
tggtcccgcctggcgcgcttgcagctgcgccacttcaacgagctgccgcacgagctgcgcgcgcgcctggcccgcgccta

SEQ ID NO: 640840 - DNA, 120 bp, Artificial Sequence
  ENSG00000181652_13 (sequence is synthesized)
gcgcccctgcgcacgctgctggcccgccagctcgttttcttcgcgggtgcactcttcgccgcgctgcttgtgctcaccgtctacgacgaggacgtgctagccgtggagcacgtgctcacc

SEQ ID NO: 640841 - DNA, 120 bp, Artificial Sequence
  ENSG00000181652_14 (sequence is synthesized)
gcgctcggggtcaccgccaccgtcgccaggtctttcattccggaagagcagtgccagggtcgtgcgccgcagctcctgctgcagacagccctggcccacatgcactacctcccggaggag

SEQ ID NO: 640842 - DNA, 120 bp, Artificial Sequence
  ENSG00000181652_15 (sequence is synthesized)
cccggccccggcggcagggaccgcgcctaccggcagatggcgcagctgctgcagtaccgagcggtctccctcctggaggagctcctgtccccgctcctcaccccgctgtttctgcttttc

SEQ ID NO: 640843 - DNA, 120 bp, Artificial Sequence
  ENSG00000181652_16 (sequence is synthesized)
tggttccgccctcgtgccctggagattatcgacttttttcatcacttcactgtggatgtggctggggttggggacatctgttcctttgcccttatggatgtgaagcgccacggacaccct

SEQ ID NO: 640844 - DNA, 120 bp, Artificial Sequence
  ENSG00000181652_17 (sequence is synthesized)
cagtggctctcggcgggacagactgaggcctcgctgtctcagcgtgcggaggacggcaagactgagctttctttgatgcggttctccctggcgcatccactctggcgccccccagggcac

SEQ ID NO: 640845 - DNA, 120 bp, Artificial Sequence
  ENSG00000181652_18 (sequence is synthesized)
agctctaagtttcttgggcacctctggggccgagtacaacaagatgcagctgcctggggtgccacctcggctcgcggcccctccaccccgggggtgctcagcaactgcacctcgcccctg

SEQ ID NO: 640846 - DNA, 120 bp, Artificial Sequence
  ENSG00000181652_19 (sequence is synthesized)
cctgaggccttcctggccaacctcttcgtgcaccctctcctgcctccgagagatctgagcccgacagccccctgtccagctgcggccacagccagcctccttgcctccatttcccgaatt

SEQ ID NO: 640847 - DNA, 120 bp, Artificial Sequence
  ENSG00000181652_20 (sequence is synthesized)
gcccaggaccccagctctgtgtccccaggaggcactgggggccagaagctggcccagctcccagaacttgcttctgccgagatgagtctccatgtcatctacctgcaccagcttcaccag

SEQ ID NO: 640848 - DNA, 120 bp, Artificial Sequence
  ENSG00000181652_21 (sequence is synthesized)
cagcagcagcagcaggagccgtggggtgaggctgcagcctccatcctgtccaggccctgctccagcccctcacagccaccctcgcctgatgaggagaagccatcctggtcaagtgacggc

SEQ ID NO: 640849 - DNA, 120 bp, Artificial Sequence
  ENSG00000181652_22 (sequence is synthesized)
tccagtcctgcctctagccccagacaacagtggggaacccagaaggcccggaatctgttccccggagggtttcaggtgaccacagacacccagaaggagcctgaccgggcctcttgcact

SEQ ID NO: 640850 - DNA, 120 bp, Artificial Sequence
  ENSG00000181652_23 (sequence is synthesized)
gactgagacgactcctcagggtcagtattgcctcctgtgaggggagggagaaaggacggcataggtagttggtttggagtccgacttgaagcgatgggagcagtggtgggaatttggggt

SEQ ID NO: 640851 - DNA, 120 bp, Artificial Sequence
  ENSG00000181652_24 (sequence is synthesized)
gatgggaggtggtcatctctggaatctagacccctggactgcttgccaagagccgtctcctcccacaggtaccctggcttcggcagccacaggagattggagggtggagtagaaaaacac

SEQ ID NO: 640852 - DNA, 120 bp, Artificial Sequence
  ENSG00000181652_25 (sequence is synthesized)
aaggagtcattgttagaggccccatagatgacaggcccaggtgctttagttgggcaggacctgggagtcagtgaggaactcgccccgagaacagagaaaaggtaggcaaggagaggagat

SEQ ID NO: 640853 - DNA, 120 bp, Artificial Sequence
  ENSG00000181652_26 (sequence is synthesized)
gctgatggcatctggaaacaagtcttagagatggtctgcacccagagggaataaggggagacatccccaactggaatgtgtcctggagcagctgcctgggaagaagtcctcgagtttcct

SEQ ID NO: 640854 - DNA, 120 bp, Artificial Sequence
  ENSG00000181652_27 (sequence is synthesized)
caaggtgggggacagaggtcaaggatgaggccgagctaaatggaagggcgacagtgaggcaggtgggctttaaggctgtggattcgtcatgctggcggctgccagcagcactttcaggtt

SEQ ID NO: 640855 - DNA, 120 bp, Artificial Sequence
  ENSG00000181652_28 (sequence is synthesized)
ccttggggcttgtaggggatggggacttgtcagtggaaagacgggagggatgatgtttttggacttcagtacgggtgtgatgtcccaggaagtgggtgtggctccccatcctgtatgaaa

SEQ ID NO: 640856 - DNA, 120 bp, Artificial Sequence
  ENSG00000181652_29 (sequence is synthesized)
ctcagggccccactcctggcagctgagtgctgcacctgccttctcgatcacgagcctgagaactgcacgggggagcagcccagactggctggaaaccatgttttcagagtgcagggtcaa

SEQ ID NO: 640857 - DNA, 120 bp, Artificial Sequence
  ENSG00000181652_30 (sequence is synthesized)
gtggcgtcctctggacagatgtgagaaggcaccacctcaagaggggaggagcggggctgatcctggtcgggcggacctgagtcgggcagccgctctcccggaactggaagggaaagccag

SEQ ID NO: 640858 - DNA, 120 bp, Artificial Sequence
  ENSG00000181652_31 (sequence is synthesized)
gcggctctcaggggctgttggtgtctgagccgggagggtcgaacgcccagggcactgcgccccgcaactgacgctcctgcaaggaaaagctctggcacgccgatgacgtcgccggcctcg

SEQ ID NO: 640859 - DNA, 120 bp, Artificial Sequence
  ENSG00000181652_32 (sequence is synthesized)
tccagctccatgtcgccctccgtcgccaggatgcgctgcacggtctgcaggacgttggttgccatggtaacatcgccgcagacaaacatgtggccccgctcgaggcacagcacgcggtgc

SEQ ID NO: 640860 - DNA, 120 bp, Artificial Sequence
  ENSG00000181652_33 (sequence is synthesized)
acctccgcagccagctccgtcctcaggatgtcctgcacgttaccattgcgccctcagggtctcacaccttggggttgtcaggttcccgggagaaggcggtgaggactcggccaaacaccc

SEQ ID NO: 640861 - DNA, 120 bp, Artificial Sequence
  ENSG00000181652_34 (sequence is synthesized)
cgcgctgctgggcgttctgcacctcgtcgcggtagagatggtcaagttgggagcatcggcagccgaacaccaaagtcatgggagtgggctgcagccctgcaagcaaccccgcgcttggga

SEQ ID NO: 640862 - DNA, 120 bp, Artificial Sequence
  ENSG00000181652_35 (sequence is synthesized)
aggctcttctccggggcacagtgctagtggggcctccccacaggccaccgtcgcccagcctggcagcccagcgttttgggctgaaaccaccattactttggctgtttcatctctaagaga

SEQ ID NO: 640863 - DNA, 120 bp, Artificial Sequence
  ENSG00000181652_36 (sequence is synthesized)
gtgtagaatgctttcacagagaccctgcacagccctgatttacagagggaagggaagcgcgggtgaggtggtggcccctggtggagctgcgctagaatgcgcggcttcggactcagaatt

SEQ ID NO: 640864 - DNA, 120 bp, Artificial Sequence
  ENSG00000181652_37 (sequence is synthesized)
ccatgccctttgcattgtgtgacatcgcagtccccttccccgctcccacttcatattctcccatacttataactctcctcccagtcacagccctcttcttttgattgacagaccaccctg

SEQ ID NO: 640865 - DNA, 120 bp, Artificial Sequence
  ENSG00000181652_38 (sequence is synthesized)
ggcaccccatgctcaatatgaacaccttgtagcatccttaggtcttggacagacctcggtcagctctggcacagtcaagaatccaccttgggcagttcttctttgagtcttagccctaat

SEQ ID NO: 640866 - DNA, 120 bp, Artificial Sequence
  ENSG00000181652_39 (sequence is synthesized)
ccctttgaaaattctattttcctttgtcctcaatccagtcaacacctactatgtaccaggcaccaggaagccagaagctcagggcccagcccttgcctttggtacctgccctccccttgg

SEQ ID NO: 640867 - DNA, 120 bp, Artificial Sequence
  ENSG00000181652_40 (sequence is synthesized)
tctcatgagcgtcttttcagctttgtggactttgtttcctgccctctctttcctatttcctgccttccagccccacccctctgtccctagattgtgtgactcccttcaggcagtccttta

SEQ ID NO: 640868 - DNA, 120 bp, Artificial Sequence
  ENSG00000181652_41 (sequence is synthesized)
gtccccagcctcacctttgctctcaatgtcatgcagccgctcctgccagaatccccggaagggggcaatgccagtgcctggacccaccaggatgcagggcaagctgggatcgggtggcag

SEQ ID NO: 640869 - DNA, 120 bp, Artificial Sequence
  ENSG00000181652_42 (sequence is synthesized)
ccggaaggagggagccctggcaggagagacactccatcaggtcccctttgcctttcctgctccaccattctcaccatgcagggtgggtggagcaaggaggacccaagttcttcccatctc

SEQ ID NO: 640870 - DNA, 120 bp, Artificial Sequence
  ENSG00000181652_43 (sequence is synthesized)
ggagaggccagcctgggggacttgactaacctggactgggaaagctgagtgaaactgggctgaagtgaggtttgcagccttcaaatgagatctgacagtgccccactgccagatgtggac

SEQ ID NO: 640871 - DNA, 120 bp, Artificial Sequence
  ENSG00000181652_44 (sequence is synthesized)
atagcccaggtcctgggaaggcttctggtgacagagccgaagatggcctggagtcgggtggggctgggagtgtaaagcatgcccaggcagaaggtggggaggattctgttccagagttgg

SEQ ID NO: 640872 - DNA, 120 bp, Artificial Sequence
  ENSG00000181652_45 (sequence is synthesized)
aggcagaaggtggggaggattctgttccagagttggtgggtgcactagaaatgggaaggagagattctcccacgaactgccagacattctggttttttgtttttttgtttgttttgtttc

SEQ ID NO: 640873 - DNA, 120 bp, Artificial Sequence
  ENSG00000181652_46 (sequence is synthesized)
agtgcagtgctgtgatattggctcactgcagcctctgctccccagtagctgcaaccacaggtgcacaccaccacgccctgctattttttgtatttttagtagagacagtgtctcaccatg

SEQ ID NO: 640874 - DNA, 120 bp, Artificial Sequence
  ENSG00000181652_47 (sequence is synthesized)
ctgtcaaaagaatgacccctttccccaccacatacccacaactgcacaggttaaaacagaaatcttgtcattttataattgtaatccacgccgggtgcagtagctcacacctgtaatccc

SEQ ID NO: 640875 - DNA, 120 bp, Artificial Sequence
  ENSG00000181652_48 (sequence is synthesized)
gtgccgtgagagggtgggcagaggagaggggaagaagtgggactgtacaggtggaagggccaactggaaagagggcagaaagagcgaggtcttattgacacctgccctaggcccagaata

SEQ ID NO: 640876 - DNA, 120 bp, Artificial Sequence
  ENSG00000181652_49 (sequence is synthesized)
atgtcaggagggggctaccaccacctagagagcatggcccttaccctaagggagtttagtttatttagatggctcatataagatgacatatagttacatgtttgtgctaaaaacattgat

SEQ ID NO: 640877 - DNA, 120 bp, Artificial Sequence
  ENSG00000181652_50 (sequence is synthesized)
agtgtcacagacctttgtggaagcaacaacagctcccatccttccaacctttctggagaagccgtggcctgatggccctttgatccctgaacaggattatgagcggctggaggactgtga

SEQ ID NO: 640878 - DNA, 120 bp, Artificial Sequence
  ENSG00000181656_0 (sequence is synthesized)
gttcaccacatcagccaccactcctgcttctgagcacagggtgctctcctcttgagctcagcttctgcttttgcagccaagcattcttgctgctgctgcctgcctgcccacccgcctggg

SEQ ID NO: 640879 - DNA, 120 bp, Artificial Sequence
  ENSG00000181656_1 (sequence is synthesized)
cttgcagcccgccactttactttctccagccctgataccagctgagaagtctccctgcagctgctagttcctgcccaggaccatgtgtgtggatgctgcttgggagaagcgggcacttgc

SEQ ID NO: 640880 - DNA, 120 bp, Artificial Sequence
  ENSG00000181656_2 (sequence is synthesized)
tcctggcactgatcccagctgagtttctcctgttgatttctggaccactgatgctgttgctgaggaggtatttcccggcatccctccccctgagacaccggctaaggaccagcctaaacg

SEQ ID NO: 640881 - DNA, 120 bp, Artificial Sequence
  ENSG00000181656_3 (sequence is synthesized)
caaggcaggacagtgtcaggatggaccgcgctgccagaagccgacgctagcgagggaggtgtgaagagttggccagaatgaccaactcctcctccacatccacctcctccaccaccggtg

SEQ ID NO: 640882 - DNA, 120 bp, Artificial Sequence
  ENSG00000181656_4 (sequence is synthesized)
gctcgctgctgctgctctgcgaggaagaggagtcgtgggcgggccggcgcatcccggtgtcactcctgtattcgggcctggccatcgggggcacgctggccaacggcatggtcatctatc

SEQ ID NO: 640883 - DNA, 120 bp, Artificial Sequence
  ENSG00000181656_5 (sequence is synthesized)
tcgtgtcgtccttccgaaagctgcagaccaccagcaacgccttcatcgtgaacggctgcgccgccgacctcagcgtctgcgccctctggatgccgcaggaggcggtgctcgggctcctgc

SEQ ID NO: 640884 - DNA, 120 bp, Artificial Sequence
  ENSG00000181656_6 (sequence is synthesized)
ccaccggctctgcggagccccccgcagactgggacggcgctgggggcagctaccgcctgctacggggtgggctgctgggcctcggactcacggtgtccctcctctcccactgcctcgtgg

SEQ ID NO: 640885 - DNA, 120 bp, Artificial Sequence
  ENSG00000181656_7 (sequence is synthesized)
ccctgaaccgctacctgctcatcacccgggcgcccgccacctaccaggcgctgtaccagaggcgccacacggcgggcatgctggcgctgtcctgggcgctcgccctgggcctcgtgctgc

SEQ ID NO: 640886 - DNA, 120 bp, Artificial Sequence
  ENSG00000181656_8 (sequence is synthesized)
ctgctgctcccgccctgggcaccgcggcccggcgccgcgccaccgcgagtccactacccggcgctgctggccgccgcggcgctgctggcgcagacagctctgctgctgcactgctacctg

SEQ ID NO: 640887 - DNA, 120 bp, Artificial Sequence
  ENSG00000181656_9 (sequence is synthesized)
tcgtgcgccgcgtgcgtgtcagcgtcaagcgggtcagcgtgctcaacttccacctgctgcaccagttgcccggctgcgccgccgccgccgccgccttcccgggcgcccagcacgcgccgg

SEQ ID NO: 640888 - DNA, 120 bp, Artificial Sequence
  ENSG00000181656_10 (sequence is synthesized)
ccggcgcaggcccagcccctgccgcccgcgctgcacccgcggcgggcacagcggcgtctcagcggcctgtcggtgctgctgctctgctgcgtcttcctgctggccacgcagccactggtg

SEQ ID NO: 640889 - DNA, 120 bp, Artificial Sequence
  ENSG00000181656_11 (sequence is synthesized)
tggccacgcagccactggtgtgggtgagcctggccagcggcttctcgctgccggtgccctggggagtgcaggcggccagctggctcctgtgctgcgccctgtccgcgctcaatccgctgc

SEQ ID NO: 640890 - DNA, 120 bp, Artificial Sequence
  ENSG00000181656_12 (sequence is synthesized)
tctacacgtggaggaacgaggagttccgccgctccgtgcgctcagtcctgccgggcgtcggcgacgcggcggccgctgccgttgccgccacagccgtgcccgcagtgtcccaggcgcaac

SEQ ID NO: 640891 - DNA, 120 bp, Artificial Sequence
  ENSG00000181656_13 (sequence is synthesized)
tgggcacccgcgccgcgggccagcactggtaacctagccggggcccgagggaagcggagatccccggcttccgacgtccttgggcaccgtcgcctccttccctcctagggcatcccctgc

SEQ ID NO: 640892 - DNA, 120 bp, Artificial Sequence
  ENSG00000181656_14 (sequence is synthesized)
ttccgccgcgaagcccgatagatcgggggaaaatggggccttcgaccccagcgggctacctgaaccaaggcgtctctttaagtggggcgcccgaagtcattttggacggccacctgattt

SEQ ID NO: 640893 - DNA, 120 bp, Artificial Sequence
  ENSG00000181656_15 (sequence is synthesized)
ttaccctttgtttctgtgttttagaggaatcctaaagtcaaaacaccagagacttgaagaacttgcaaactggcgttttaaaataaccggttaatttatttccacacagtttgtttttga

SEQ ID NO: 640894 - DNA, 120 bp, Artificial Sequence
  ENSG00000181656_16 (sequence is synthesized)
aaaagagctttcataatgtataaccctttccactttcatcgtcttatatatgaagcgccttgagtgtgcatgaaccaaaggaaataacattgaagaaggaaaacaatatgtagaaagtat

SEQ ID NO: 640895 - DNA, 120 bp, Artificial Sequence
  ENSG00000181656_17 (sequence is synthesized)
tttagaaagtaacctgtctttgatgatgcttctcttaccatttagtttttgtatattaccctggggcagtgaagccctaggtgtgcccaccagtatgagttgccattaagacctcaagcc

SEQ ID NO: 640896 - DNA, 120 bp, Artificial Sequence
  ENSG00000181656_18 (sequence is synthesized)
ctttattcttaaaagggtttttaataaagtctttctcaaatgaggtagaatcttagccagtgagaaaaaaaattattttatgctccttttttttcgcactcttaagactgaaaattggcg

SEQ ID NO: 640897 - DNA, 120 bp, Artificial Sequence
  ENSG00000181656_19 (sequence is synthesized)
ttgagtgttatagtgaaaattttccagtttgataattgatggtcagagccagcactggaattttgaaaacaaataaggtgattatctattttaggtaccgtttcacattttctatagcat

SEQ ID NO: 640898 - DNA, 120 bp, Artificial Sequence
  ENSG00000181656_20 (sequence is synthesized)
gcacacttgttgctaccctcattttgtaaccaatttatttgccttatgaatgtgattgcagctttgaacattctgtactataatggttgctaagaagaataagtccttctgttttctctt

SEQ ID NO: 640899 - DNA, 120 bp, Artificial Sequence
  ENSG00000181656_21 (sequence is synthesized)
taacatttaaaatatctcaatgcacatgatataattaaacactaataataccatgactgcatagctaatattagctgctattgcatgctcctagatgctagaacttattgggcatgtggt

SEQ ID NO: 640900 - DNA, 120 bp, Artificial Sequence
  ENSG00000181656_22 (sequence is synthesized)
atactgaagcaatacccgttagacaaggatattttacttcttccagacaccagaagaaatggccttcaattatttgaaaagagacacagagacacctctggctacctagagttcttcctg

SEQ ID NO: 640901 - DNA, 120 bp, Artificial Sequence
  ENSG00000181656_23 (sequence is synthesized)
tcttgacccaatttatgagaaagctcccagttgggactttatctcacaagtggaatcacagtcaagacggatcaataatatggtttggctcagcaaagccagctgtgctcttttagggtt

SEQ ID NO: 640902 - DNA, 120 bp, Artificial Sequence
  ENSG00000181656_24 (sequence is synthesized)
taaacaagccacacgttagaaagcaacactgtttttatgtagttcatatatattaccatgacatttaacatcaatatcgtatatgttgaaggaggtataataaactcagtcatatatagt

SEQ ID NO: 640903 - DNA, 120 bp, Artificial Sequence
  ENSG00000181656_25 (sequence is synthesized)
gaacagttcaaatgggaaagtgttctaaaacatattatttgagatttgtcatattcatctttggtttactaaatttacttagaaatatttgaaatgcaaaattgtgtgaaatcaccttat

SEQ ID NO: 640904 - DNA, 120 bp, Artificial Sequence
  ENSG00000181656_26 (sequence is synthesized)
caaattaaaatgggaagaaagtaattttaataatttttaataatcatatgtcagcattctgactacttaccacatcaaatctgggcccaaacagcctcagttaactgcataattcaggaa

SEQ ID NO: 640905 - DNA, 120 bp, Artificial Sequence
  ENSG00000181656_27 (sequence is synthesized)
caaaaccagcttgctttgttgcacgcctgggcaatttcagccaggacattaggaccacttgttgtacatctgaataattatggaagttgggacatgttaaggaaaacaaatatgttcatc

SEQ ID NO: 640906 - DNA, 120 bp, Artificial Sequence
  ENSG00000181656_28 (sequence is synthesized)
accaacaatcagctgtcattttattaatctatcccttttgtgcatgcaccatttctctcttactaacagtttcatctgttcacattttccttgattcaaatattaaagttcagacaacta

SEQ ID NO: 640907 - DNA, 120 bp, Artificial Sequence
  ENSG00000181666_0 (sequence is synthesized)
gctggttgggacccgggaaggcctccctcttaaggtctttcccacacctctgcaccttgttacctgactttcggcttcaggatccgcagcgtgcacccgcgttccatctgtcttctgaga

SEQ ID NO: 640908 - DNA, 120 bp, Artificial Sequence
  ENSG00000181666_1 (sequence is synthesized)
ctttgcccttctccaggaagagcactcaggagaccaggaaaatggccacagggctcctgagagccaaaaaagagctggcaagcagatgaattaactcccccaagcttctagctgtgtttc

SEQ ID NO: 640909 - DNA, 120 bp, Artificial Sequence
  ENSG00000181666_2 (sequence is synthesized)
tactcagtgggagagatttggagtgaatcatgagggtcaaccacacagtgtctacaatgctccctacatgcatggttcacagacaaaccatgagttgttccggggctggaggaataacgg

SEQ ID NO: 640910 - DNA, 120 bp, Artificial Sequence
  ENSG00000181666_3 (sequence is synthesized)
cgttcgtggcattcagggatgtggctgtgtacttcacccaggaggagtggaggttgttgagccctgctcagaggaccctgcacagggaggtgatgctggagacttataaccatctggtct

SEQ ID NO: 640911 - DNA, 120 bp, Artificial Sequence
  ENSG00000181666_4 (sequence is synthesized)
cactggaaattccatcttctaaaccaaaactcattgctcagctggagcgaggggaagcgccctggagagaggagagaaaatgtccactggacctctgtccagaatcgaagccagaaattc

SEQ ID NO: 640912 - DNA, 120 bp, Artificial Sequence
  ENSG00000181666_5 (sequence is synthesized)
aacttagtccctcctgccctctgattttctccagtcagcaagctctcagccaacatgtgtggctgagtcatctctctcagctgttttcaagtttatgggcaggaaatcctctccacctgg

SEQ ID NO: 640913 - DNA, 120 bp, Artificial Sequence
  ENSG00000181666_6 (sequence is synthesized)
gaaaacactatccagaagatcagaaacaacagcaggatccattctgctttagtggcaaagcagaatggattcaagagggagaagactccagactcctgtttgggagagtaagcaaaaatg

SEQ ID NO: 640914 - DNA, 120 bp, Artificial Sequence
  ENSG00000181666_7 (sequence is synthesized)
gcacttcaaaggcactttccagcccacctgaagaacaacagccagcacagtccaaggaagacaacacagtggtggatatagggtccagccctgaacggagggcagatctagaggaaacag

SEQ ID NO: 640915 - DNA, 120 bp, Artificial Sequence
  ENSG00000181666_8 (sequence is synthesized)
acaaagtattgcatggtttagaagtctcaggatttggagaaatcaaatatgaagagtttgggccaggctttatcaaggagtcaaacctccttagcctccagaagacacaaactggggaga

SEQ ID NO: 640916 - DNA, 120 bp, Artificial Sequence
  ENSG00000181666_9 (sequence is synthesized)
caccttacatgtacactgagtggggagacagctttggcagtatgtcagtcctcatcaaaaacccaaggacacactctgggggaaagccttatgtgtgcagggaatgtgggcgaggcttta

SEQ ID NO: 640917 - DNA, 120 bp, Artificial Sequence
  ENSG00000181666_10 (sequence is synthesized)
cgtggaagtcaaacctgatcacacatcagaggacacactcaggggagaaaccttatgtgtgcaaggattgtggacgaggctttacttggaagtcgaacctctttacacatcagcggacac

SEQ ID NO: 640918 - DNA, 120 bp, Artificial Sequence
  ENSG00000181666_11 (sequence is synthesized)
actcagggctcaagccttatgtgtgcaaggaatgtgggcagagctttagcctgaagtcaaacctcattacccaccagagggcgcacactggggagaagccttatgtttgcagggaatgtg

SEQ ID NO: 640919 - DNA, 120 bp, Artificial Sequence
  ENSG00000181666_12 (sequence is synthesized)
ttcaggagagaagccttacatttgcagggagtgtgagcaaggctttagccagaagtcacacctcatcagacacttaaggacacacacaggagagaagccttatgtatgcacagaatgtgg

SEQ ID NO: 640920 - DNA, 120 bp, Artificial Sequence
  ENSG00000181666_13 (sequence is synthesized)
gcgtcactttagctggaaatcaaacctcaaaacacaccagaggacacactcaggggttaaaccttatgtctgcctggagtgcgggcagtgctttagcctgaagtcaaaccttaacaaaca

SEQ ID NO: 640921 - DNA, 120 bp, Artificial Sequence
  ENSG00000181666_14 (sequence is synthesized)
ccagaggtcacacacgggggagaagccatttgtatgtacggagtgtgggcgaggctttacccggaaatcaaccctgagcacgcaccagaggacacactcaggggagaagccatttgtatg

SEQ ID NO: 640922 - DNA, 120 bp, Artificial Sequence
  ENSG00000181666_15 (sequence is synthesized)
tgctgagtgtggacgaggctttaatgataagtccaccctcatttcacaccagaggacacattcaggggaaaagccttttatgtgcagggagtgtggcagaaggtttcggcagaagcctaa

SEQ ID NO: 640923 - DNA, 120 bp, Artificial Sequence
  ENSG00000181666_16 (sequence is synthesized)
cctgtttaggcacaagagggcacactcaggtgcctttgtgtgcagggagtgtgggcaaggcttttgtgctaagttaactctcattaaacaccagagagcacacgcaggggggaagcctca

SEQ ID NO: 640924 - DNA, 120 bp, Artificial Sequence
  ENSG00000181666_17 (sequence is synthesized)
tgtgtgcagggagtgtgggcaaggctttagccggcagtcacacctcattagacaccagaggacacattcaggagagaagccttatatttgcagaaagtgtggacggggctttagtcggaa

SEQ ID NO: 640925 - DNA, 120 bp, Artificial Sequence
  ENSG00000181666_18 (sequence is synthesized)
gtccaaccttatcagacatcagaggacacactcaggatagaaactttatgtgtatagggaatgtggtacagcctttagccaggagtcatacttcatcagacaccagaggacacacacagt

SEQ ID NO: 640926 - DNA, 120 bp, Artificial Sequence
  ENSG00000181666_19 (sequence is synthesized)
gctgtggctttttcagccattgctagataccaaagtggagacattctgtgtgtgattatgcatgagactgtactggtaagacttgtatctccatccacctgaaggagaattgctggctca

SEQ ID NO: 640927 - DNA, 120 bp, Artificial Sequence
  ENSG00000181666_20 (sequence is synthesized)
ttttcaggagccctgcccttcctcactgtggatggtgggttgtggaaacccggtcaggtaatgatagtggcaggaggcagtcaaatgcccaggcagataggggtgggtacctggtgaaac

SEQ ID NO: 640928 - DNA, 120 bp, Artificial Sequence
  ENSG00000181666_21 (sequence is synthesized)
ccaaccttaaagctgaagacagtcccggctaaatcctcatactgaattgagaacctgtcttcccatttggtgtgctttcctccgattgatcccaacccttcacctattttacgtatacct

SEQ ID NO: 640929 - DNA, 120 bp, Artificial Sequence
  ENSG00000181666_22 (sequence is synthesized)
gccctttcctaattggtttttacactgctgtgcccaccttttgagtggtgcctttgcatacttacaaatcagtcaacgtgtattcccctattctgagcccataaaagacccagactcagc

SEQ ID NO: 640930 - DNA, 120 bp, Artificial Sequence
  ENSG00000181666_23 (sequence is synthesized)
tgcagtgaggagagaaatcaccctgctgtgggggttggggaccactccctgcatcccctctccactgagagctgttcttttgctcaataaaattcttttctacccatcctcacccttcaa

SEQ ID NO: 640931 - DNA, 120 bp, Artificial Sequence
  ENSG00000181666_24 (sequence is synthesized)
gcgttaagctggttgggacccgggaaggcctccctcttaaggtctttcccacacctctgcaccttgttacctgactttcggcttcaggatccgcagcgtgcacccgcgttccgaagagca

SEQ ID NO: 640932 - DNA, 120 bp, Artificial Sequence
  ENSG00000181666_25 (sequence is synthesized)
atagatgctgggaaggatgtctaactgggagatagcttgtgatgtaaatatgtaaatatattatgaatgaccagtgggcaaggcaaaattgcctacacagccctacctatggcccctctg

SEQ ID NO: 640933 - DNA, 120 bp, Artificial Sequence
  ENSG00000181666_26 (sequence is synthesized)
cgtggcagcatttggtagaggaaggagtgagccctgctgtaggaactatatatattggtgagttatttgcccccaagccccagaggcaccactgcttcaagtagaacaaatagtgagacc

SEQ ID NO: 640934 - DNA, 120 bp, Artificial Sequence
  ENSG00000181666_27 (sequence is synthesized)
aagtagtctcagaaaattttcaaactcagcaagataattctttactatttagttgtacttgtgtggtgtcttcttctccctgcctagttttgaaacgccctctaggtaagggctttggtt

SEQ ID NO: 640935 - DNA, 120 bp, Artificial Sequence
  ENSG00000181666_28 (sequence is synthesized)
acaggctgggtctgcagatggcgtccgagtgcacagtggccagtgtgattccgcagtcttgggctgttcggccaagcgcccaccggacgtgggacgctggagggtcagcagcgtggagtc

SEQ ID NO: 640936 - DNA, 120 bp, Artificial Sequence
  ENSG00000181666_29 (sequence is synthesized)
ctggccttcagcgtccgcggctgggaaatcggccatcgccacggcgggaactaggactggctgcgtcccggcccttccccatccgtccaccggactcgtgggcgcccgcactgactgtga

SEQ ID NO: 640937 - DNA, 120 bp, Artificial Sequence
  ENSG00000181666_30 (sequence is synthesized)
gtccagatttggaacaagtctctctagagattgaacagagctgcgcctggaacccgccgcagggaggagacctgaagaccagaggaaacacagcaaacagagtctcgctctgttgcccag

SEQ ID NO: 640938 - DNA, 120 bp, Artificial Sequence
  ENSG00000181666_31 (sequence is synthesized)
aactgacgtgctgagcagctaattcagtgcctgaggttacactagttgtggacagagatgggttccaaatccagatagtatgggttgaatccacgctcttcatcaccacccactttccct

SEQ ID NO: 640939 - DNA, 120 bp, Artificial Sequence
  ENSG00000181666_32 (sequence is synthesized)
tcccagtgttcagaaccataaaccaagtgaacccttataaatcacccagtctgtggtattctgttatagcaacacaaacagactaagacagggacactcagtgagctcttctctctactt

SEQ ID NO: 640940 - DNA, 120 bp, Artificial Sequence
  ENSG00000181666_33 (sequence is synthesized)
gatggagcactccctgcgtggtgccttgtatttgtagacatgatgctgtaaatgctctttgagtgtctcgaaggcttttatgtttgaggagtttacagagaagcccgtacagggttcagg

SEQ ID NO: 640941 - DNA, 120 bp, Artificial Sequence
  ENSG00000181666_34 (sequence is synthesized)
tccattctgttgcttctttgctccttagttcctcccctaatctgatgttaaattagatcatagtgtggtccttggaccaatagtatcagtagcacctgaaaatcatgctggaaatacaga

SEQ ID NO: 640942 - DNA, 120 bp, Artificial Sequence
  ENSG00000181666_35 (sequence is synthesized)
ttcacaggctgctccccagaatactgaagaagaaactctaggagtgagacccaacaatctgtgtttaacaagtccccaggtgagtctgatgcacaaagaaacgtgagctgctgtattaga

SEQ ID NO: 640943 - DNA, 90 bp, Artificial Sequence
  ENSG00000181666_36 (sequence is synthesized)
tggtctttcactccttggtgccaaggtcacaatccaaagtagggtctagaaatctttcctacttccctcagggaagccttttgacctctc

SEQ ID NO: 640944 - DNA, 120 bp, Artificial Sequence
  ENSG00000181666_37 (sequence is synthesized)
actgccaatacattgaggactgcagagcaggaggaaggattcttgctacaattggtcacctgctaagccaactgaacttcttgctaagtggggaaataaatatctttactgtataagcta

SEQ ID NO: 640945 - DNA, 120 bp, Artificial Sequence
  ENSG00000181666_38 (sequence is synthesized)
tgcaccttgttacctgactttcggcttcaggatccgcagcgtgcacccgcgttccgtgagtgccctataggcagtcagcatgcccctctgcgtgtccctgtgttacggggacgccggctg

SEQ ID NO: 640946 - DNA, 120 bp, Artificial Sequence
  ENSG00000181666_39 (sequence is synthesized)
ggagccgcagagctatctcagaactagggcgctctcctttgggcacctccaggccattttcctttcattcgagcccacagggttagagataaaccctcactccgttgcttggggacaagg

SEQ ID NO: 640947 - DNA, 120 bp, Artificial Sequence
  ENSG00000181666_40 (sequence is synthesized)
ccagaccccaactgtggggctctggagcggactgcgcttcacttcgtggggagggtgtttccacctaggccactcttatttctcttcacatccccagatctgtcttctgagactttgccc

SEQ ID NO: 640948 - DNA, 67 bp, Artificial Sequence
  ENSG00000181666_41 (sequence is synthesized)
cctcagcccctggagtagttgggactacaggctcatgctaccacacctggttaattttgtttttgtg

SEQ ID NO: 640949 - DNA, 120 bp, Artificial Sequence
  ENSG00000181666_42 (sequence is synthesized)
cccattggcgcctgacgggttggttagggcggcttttcttccggctgtgacaaatccagcctgaggagcgctcctgtgtctttcttagttgtttcttcccgcccacctgcccctcaaagc

SEQ ID NO: 640950 - DNA, 120 bp, Artificial Sequence
  ENSG00000181666_43 (sequence is synthesized)
cacaacccacttgcacaccaccgtgtggacacctaaaagcgaccgtctagatctgaaccgcgctgagggaatggtcagcttctctcccattagatggcttggcccaaaggacctagcgac

SEQ ID NO: 640951 - DNA, 120 bp, Artificial Sequence
  ENSG00000181666_44 (sequence is synthesized)
aacaacaacaacaacaacaacaaacaccaccaccaacccacctttcacgagaggagtccttgagaagagcctctccagccagaaccagacggagtttcggtcttgccgcccaggctggag

SEQ ID NO: 640952 - DNA, 61 bp, Artificial Sequence
  ENSG00000181666_45 (sequence is synthesized)
agccagaaccagacggagtttcggtcttgccgcccaggctggaggggatcagcctccggag

SEQ ID NO: 640953 - DNA, 120 bp, Artificial Sequence
  ENSG00000181666_46 (sequence is synthesized)
tgccttccgggttcacaccattctcccacctcagcccctggagtagttgggactacaggctcatgctaccacacctgctgaatagttctgtatgtcagctcagcacccctagtgtcagcc

SEQ ID NO: 640954 - DNA, 74 bp, Artificial Sequence
  ENSG00000181666_47 (sequence is synthesized)
cctggtatggagccttgctctgttgccaggctggaatacagtggtgttatatcggctcactgcaacctctgcct

SEQ ID NO: 640955 - DNA, 120 bp, Artificial Sequence
  ENSG00000181666_48 (sequence is synthesized)
aaacccaggaaatttttcatacaccaagtgttcataatatgccatctttctgactggagtcacctttccttagtcaacccttctacttcagagagagaactattcataggtcttttttat

SEQ ID NO: 640956 - DNA, 120 bp, Artificial Sequence
  ENSG00000181666_49 (sequence is synthesized)
cctctgggtttcctcacccatttcagctctgagttctagaatgccctcttgagcccataaccaacaatgtcctcattttcttccctatgaacagaaattccatcttctaaaccaaaactc

SEQ ID NO: 640957 - DNA, 120 bp, Artificial Sequence
  ENSG00000181666_50 (sequence is synthesized)
ccaggaagccttgtacattgaacactcacatacccatcacctagattctcagcgttcgtggcattcagggatgtggctgtgtacttcacccaggaggagtggaggttgttgagccctgct

SEQ ID NO: 640958 - DNA, 120 bp, Artificial Sequence
  ENSG00000181666_51 (sequence is synthesized)
acctctgtccagggggaatggtttcagctttcgcccattcagtatgaagttggctgtaggtctgtcacagataactcttcttattttgagatgaagtctcactctgttgcctaggctgga

SEQ ID NO: 640959 - DNA, 120 bp, Artificial Sequence
  ENSG00000181690_0 (sequence is synthesized)
gcatacactacaatggctgctggaaagaggcgtaaggaaacaatttccaggcccgccgcgtccagcccgaaatatgagaaaaaaattattagaaattccgcgggcggtgtagaggcggcg

SEQ ID NO: 640960 - DNA, 120 bp, Artificial Sequence
  ENSG00000181690_1 (sequence is synthesized)
gacgggccggagggaggatgttaaagccccgcggttgcctcttggtgctgccttggccgtatttggcacccagaatgcttcattctgtgacggtctattaataaggttgccttgctagag

SEQ ID NO: 640961 - DNA, 120 bp, Artificial Sequence
  ENSG00000181690_2 (sequence is synthesized)
tttggagcagggcctcagattggccaaaatgggaaggattggattccactctcttccacgaagagtcaatgggactggctaagatcaaagtctgaggctttttccatcagtaatcagtcc

SEQ ID NO: 640962 - DNA, 120 bp, Artificial Sequence
  ENSG00000181690_3 (sequence is synthesized)
ctttttgctttcttttacgaccacatgaaacttgagaagccacctaaagctatatcatttagtggagttgggcagttcccaagtgtccaacaagaaggcctggtttaggctgcgatggcc

SEQ ID NO: 640963 - DNA, 120 bp, Artificial Sequence
  ENSG00000181690_4 (sequence is synthesized)
actgtcattcctggtgatttgtcagaagtaagagatacccagaaagtcccttcagggaaacgtaagcgtggtgaaaccaaaccaagaaaaaactttccttgccaactgtgtgacaaggcc

SEQ ID NO: 640964 - DNA, 120 bp, Artificial Sequence
  ENSG00000181690_5 (sequence is synthesized)
tttaacagtgttgagaaattaaaggttcactcctactctcacacaggagagaggccctacaagtgcatacaacaagactgcaccaaggcctttgtttctaagtacaaattacaaaggcac

SEQ ID NO: 640965 - DNA, 120 bp, Artificial Sequence
  ENSG00000181690_6 (sequence is synthesized)
atggctactcattctcctgagaaaacccacaagtgtaattattgtgagaaaatgtttcaccggaaagatcatctgaagaatcacctccatacacacgaccctaacaaagagacgtttaag

SEQ ID NO: 640966 - DNA, 120 bp, Artificial Sequence
  ENSG00000181690_7 (sequence is synthesized)
tgcgaagaatgtggcaagaactacaataccaagcttggatttaaacgtcacttggccttgcatgccgcaacaagtggtgacctcacctgtaaggtatgtttgcaaacttttgaaagcacg

SEQ ID NO: 640967 - DNA, 120 bp, Artificial Sequence
  ENSG00000181690_8 (sequence is synthesized)
ggagtgcttctggagcaccttaaatctcatgcaggcaagtcgtctggtggggttaaagaaaaaaagcaccagtgcgaacattgtgatcgccggttctacacccgaaaggatgtccggaga

SEQ ID NO: 640968 - DNA, 120 bp, Artificial Sequence
  ENSG00000181690_9 (sequence is synthesized)
cacatggtggtgcacactggaagaaaggacttcctctgtcagtattgtgcacagagatttgggcgaaaggatcacctgactcgacatatgaagaagagtcacaatcaagagcttctgaag

SEQ ID NO: 640969 - DNA, 120 bp, Artificial Sequence
  ENSG00000181690_10 (sequence is synthesized)
gtcaaaacagaaccagtggatttccttgacccatttacctgcaatgtgtctgtgcctataaaagacgagctccttccggtgatgtccttaccttccagtgaactgttatcaaagccattc

SEQ ID NO: 640970 - DNA, 120 bp, Artificial Sequence
  ENSG00000181690_11 (sequence is synthesized)
acaaacactttgcagttaaacctctacaacactccatttcagtccatgcagagctcgggatctgcccaccaaatgatcacaactttacctttgggaatgacatgcccaatagatatggac

SEQ ID NO: 640971 - DNA, 120 bp, Artificial Sequence
  ENSG00000181690_12 (sequence is synthesized)
actgttcatccctctcaccacctttctttcaaatatccgttcagttctacctcatatgcaatttctattcctgaaaaagaacagccattaaagggggaaattgagagttacctgatggag

SEQ ID NO: 640972 - DNA, 120 bp, Artificial Sequence
  ENSG00000181690_13 (sequence is synthesized)
ttacaaggtggcgtgccctcttcatcccaagattctcaagcatcgtcatcatctaagctagggttggatcctcagattgggtccctagatgatggtgcaggagacctctccctatccaaa

SEQ ID NO: 640973 - DNA, 120 bp, Artificial Sequence
  ENSG00000181690_14 (sequence is synthesized)
agctctatctccatcagtgaccccctaaacacaccagcattggatttttctcagttgtttaatttcatacctttaaatggtcctccctataatcctctatcagtggggagccttggaatg

SEQ ID NO: 640974 - DNA, 120 bp, Artificial Sequence
  ENSG00000181690_15 (sequence is synthesized)
agctattcccaggaagaagcacattcttctgtttcccagctccccccacaaacacaggatcttcaggatcctgcaaacactatagggcttgggtctctgcactcactgtcagcagctttc

SEQ ID NO: 640975 - DNA, 120 bp, Artificial Sequence
  ENSG00000181690_16 (sequence is synthesized)
accagcagtttaagcacaagtaccaccctcccacgtttccatcaagcttttcagtaggattctgggacatggattcattacagaaatgtatgtgtagctgtgccctagatgaccattttt

SEQ ID NO: 640976 - DNA, 120 bp, Artificial Sequence
  ENSG00000181690_17 (sequence is synthesized)
attttagtgcctactttaaaacagtataaaaatttctgcttttgtataatacaaattttcattaagccagtataaaatagaaactagcttttaaactgagctttggaaccatttgtgttc

SEQ ID NO: 640977 - DNA, 120 bp, Artificial Sequence
  ENSG00000181690_18 (sequence is synthesized)
agttaagtttacctgggtattttgtcctgattcactgccaattgtcacattttaagacttttttttttccatataggaaagccattattagtagtaaacttttacaaatcccattttcaa

SEQ ID NO: 640978 - DNA, 120 bp, Artificial Sequence
  ENSG00000181690_19 (sequence is synthesized)
attacttttagatcttaaaattttcatttttgtctaataacagtggctctaccttttgacatctggctcattaaaaaatttagcaatagaatgtaaattgtataaaaagtttgtgaataa

SEQ ID NO: 640979 - DNA, 120 bp, Artificial Sequence
  ENSG00000181690_20 (sequence is synthesized)
ctcaagggtttaaattttcttactagcttctaaatggattaataatcaagtgcttcaaatgaattaagagtccagtttcggaagataataaatgtttgttagatacaccataatttcaga

SEQ ID NO: 640980 - DNA, 120 bp, Artificial Sequence
  ENSG00000181690_21 (sequence is synthesized)
tcagtatattctgaagactccctgttgtctggctaaaatatttgccatctttattatgagcctttaaggaaaacaaaccctaaacacaaagcatcagtatttatagcaaaaagagactct

SEQ ID NO: 640981 - DNA, 120 bp, Artificial Sequence
  ENSG00000181690_22 (sequence is synthesized)
gttaggtgacatggcatttcgtgtcacttaatagttggccctaaattagtacacaggatattttgtcgtgtttcatccttcttaacatgctatcttttcatttaataatagtaatagtgt

SEQ ID NO: 640982 - DNA, 120 bp, Artificial Sequence
  ENSG00000181690_23 (sequence is synthesized)
atggcattggggtcttcagagtcgatatataggtagatctctttagtcttttccacctttcacatccaaggggtgggtcaagtgcagccagcaatttattttcattgttggcccacggtt

SEQ ID NO: 640983 - DNA, 120 bp, Artificial Sequence
  ENSG00000181690_24 (sequence is synthesized)
agtccataatctagagccattgtggaactgcagccatgaggtgtgtttatcccacagtggattgactcagcctctgtgggtgacagacttctaagcaggaagatagacgtgaagcacatg

SEQ ID NO: 640984 - DNA, 120 bp, Artificial Sequence
  ENSG00000181690_25 (sequence is synthesized)
gttacatttgggaacttgtgtagggatcatggcccctgtagccagggttaaaaactggactttttagaagtaaagtaaaagcatatcgcttatatcatttcttgctgaatttgatatgtt

SEQ ID NO: 640985 - DNA, 120 bp, Artificial Sequence
  ENSG00000181690_26 (sequence is synthesized)
tttctttcccttaagaatcaaaagcagaaaacaaaaacaacagtcctactccgatgttatctttctgattcaatgtgaatccatctttccttgcaatattttggatggagaatttgaagt

SEQ ID NO: 640986 - DNA, 120 bp, Artificial Sequence
  ENSG00000181690_27 (sequence is synthesized)
taaatgcattagaaaactacctgatgaactaccacaaagttttaagtgactagaaatatatacagtaaaatcccactttcatgcatctctgggaaatgataggagtattgcaaataagtt

SEQ ID NO: 640987 - DNA, 120 bp, Artificial Sequence
  ENSG00000181690_28 (sequence is synthesized)
gagtttgtagagggtaacaaagtaaagtaaaacaaacctatcttggttaacatgaaaataacaattgagaatatattatattcactgaataattataggcttttcctcacattagacaac

SEQ ID NO: 640988 - DNA, 120 bp, Artificial Sequence
  ENSG00000181690_29 (sequence is synthesized)
caacataatcttcttaaaggtctaattaatatatttttctaagggtcagttgggacattaacctaagaaacatatctattaagcacttgttaacaccttattttaggaccctttccgttg

SEQ ID NO: 640989 - DNA, 120 bp, Artificial Sequence
  ENSG00000181690_30 (sequence is synthesized)
tttttgtagggccagttatcactgcagattgcaatgtttaccaagaatttctaaaaatgagtgcagattactgaatataatacattatttaaaatatttgggagtagtataatttgtgga

SEQ ID NO: 640990 - DNA, 120 bp, Artificial Sequence
  ENSG00000181690_31 (sequence is synthesized)
gaaatgtaaattgtaataatgtaaatgggggcttcaatatatatatataatacacacacacacacacatgcacacataccgcacttcatagaatcaaagttgctctctgaaggagctttg

SEQ ID NO: 640991 - DNA, 120 bp, Artificial Sequence
  ENSG00000181690_32 (sequence is synthesized)
gctcctgatattttatcatgctcctatatttttttaatccttggagcagtagtttttatacttatgtatttaaattttattatgaaaaattacatttattaaaaaagtgtgttccaaagg

SEQ ID NO: 640992 - DNA, 120 bp, Artificial Sequence
  ENSG00000181690_33 (sequence is synthesized)
cattaaaattatatatgttaataaggaagtacatttttaaatttttcaaactgctcctagcttttgattaggagaatattttttctgaaagtaggcttttcgctctgcttcattactgct

SEQ ID NO: 640993 - DNA, 120 bp, Artificial Sequence
  ENSG00000181690_34 (sequence is synthesized)
tcctttagtttctatgaaacagattgcttacctaaatctttagttgaatgattagtgttcaatattgctttaatcaccatataaaaggaaaaaaattggtgacagagcacaaatagaaaa

SEQ ID NO: 640994 - DNA, 120 bp, Artificial Sequence
  ENSG00000181690_35 (sequence is synthesized)
cctatttttaaatagaaatcacaaatagcaagtgtggaagcactactttattctgtttaaaatgtacttaagaagtcatcaaattagtgaactgagacattggccttagtaggctgtatt

SEQ ID NO: 640995 - DNA, 120 bp, Artificial Sequence
  ENSG00000181690_36 (sequence is synthesized)
gctgtattcactgctaatttaaaaaagggagtaccaggatttattaagtaaagcattttggaaatggggaatagcgccatatatgtatgtatgtgtatgtgtgtgtgtgtgtgtgtatat

SEQ ID NO: 640996 - DNA, 120 bp, Artificial Sequence
  ENSG00000181690_37 (sequence is synthesized)
acacacacatacttaaatcttgccctgcatgaaattcaaatacatggaggcacatcttcagggcaccagtgttaaaattttggagtcttaattttcatgtgtacacctctttgcctgttc

SEQ ID NO: 640997 - DNA, 120 bp, Artificial Sequence
  ENSG00000181690_38 (sequence is synthesized)
ccacccccagacttgaaataacacttcagagtaagagggaattcagctaatttgtttttaaaattgactgtagtggtcactaaaccctttttgagagaatttctattaaagatgaggcag

SEQ ID NO: 640998 - DNA, 120 bp, Artificial Sequence
  ENSG00000181690_39 (sequence is synthesized)
actcgcttatttgaattgcacaatgttctaacaaggatgtaacacagaattggcttttttttccctagaaaaagattgtttgtttctatgtcaactagatatgattaaaaataagtattg

SEQ ID NO: 640999 - DNA, 120 bp, Artificial Sequence
  ENSG00000181690_40 (sequence is synthesized)
agatatgattaaaaataagtattgccaatgctgttttcattctctagtggccagaatcattatccttgaaatttctggtagtgccttagcttggttaaaaaaaaaaaaaaaaaaaaaaaa

SEQ ID NO: 641000 - DNA, 120 bp, Artificial Sequence
  ENSG00000181690_41 (sequence is synthesized)
agtttagaatttgggcctcagacaagatattgaacctcattcagtttcacttccacatgtatgtacaagttaggtcaccaaacacggaagtgtgagtgtggaaggatcttggcactgtaa

SEQ ID NO: 641001 - DNA, 120 bp, Artificial Sequence
  ENSG00000181690_42 (sequence is synthesized)
gcaatgctatccattgatgtatacaagtacctttatagttatcgatcactgttaaaactttcattttaaaatcctattaccaagttcagttttttaaaacttcaattgtcctggctgatt

SEQ ID NO: 641002 - DNA, 120 bp, Artificial Sequence
  ENSG00000181690_43 (sequence is synthesized)
atgcatcactctgtgtgcaacttttttatttcatttagtgtttctttcaagctgtgtatttttgcctatttgttgcttgtgctttatttttcttagtcatttgtggaatatagtgatata

SEQ ID NO: 641003 - DNA, 120 bp, Artificial Sequence
  ENSG00000181690_44 (sequence is synthesized)
ttgtgttaatttggacagtagcggtttttaaaaaccatatactgactgaaacatgagccagagccgattgctttattaagctaataatgaatgttaaagagtacatattttcaggatcgt

SEQ ID NO: 641004 - DNA, 120 bp, Artificial Sequence
  ENSG00000181690_45 (sequence is synthesized)
tcatctagtgagcaatacacatattataggccaatatttttttaaaaaatagagcttggtcaacctctatactacacatattacaagatatagcactttcaaaatgaatctaaaccttta

SEQ ID NO: 641005 - DNA, 120 bp, Artificial Sequence
  ENSG00000181690_46 (sequence is synthesized)
cagaaactttcttataggttatgccttttattttaagacttattataattcaagtgccattagatgatatatatgtaggcctttgatatataatgctttgtgtacaaaaatggtagatgg

SEQ ID NO: 641006 - DNA, 120 bp, Artificial Sequence
  ENSG00000181690_47 (sequence is synthesized)
tattttaaacaggtacatttttacagtgttttcttatcaatttgctatattgcacagaatcagtgtgtgtcttttcataaggttttacaatggtttatttttttacaaggtttacgtgtc

SEQ ID NO: 641007 - DNA, 120 bp, Artificial Sequence
  ENSG00000181690_48 (sequence is synthesized)
tcaaagcacactgtcttcccagtacgtaagttaaaaaataccagttcacccaagttgcttctagcctactgagatccatgtgacattggaggagatcttttaaatgtttagtattcgtca

SEQ ID NO: 641008 - DNA, 120 bp, Artificial Sequence
  ENSG00000181690_49 (sequence is synthesized)
ttagcaatggctggctgttagttctggtaaatgtgtgcctaagttgaatttgtcttgtttttctcacactgtgtcagcagccatgtctacaacacagataagtctgttgtgatcacatag

SEQ ID NO: 641009 - DNA, 120 bp, Artificial Sequence
  ENSG00000181690_50 (sequence is synthesized)
atctacataagttgtgcagttttgtgctaaaaacccatagggagctcctttgggatcatagaaaagaagatcatgcaaccagcattggtgaaggcacactcagattgcacttagggcctt

SEQ ID NO: 641010 - DNA, 120 bp, Artificial Sequence
  ENSG00000181690_51 (sequence is synthesized)
tctatgatgttgtcaaccctctgaggatggaaggcagtgtcttttgatgttatctagcctagaaatgacacagaactattgctaatgtataaaacacttcattatataagcttcagtggt

SEQ ID NO: 641011 - DNA, 120 bp, Artificial Sequence
  ENSG00000181690_52 (sequence is synthesized)
acagatgaaccagaatgaatgtttatcttctcagaaacactccttcaatattatattggatcatgctgctaatgtaacttgggctacaactcttcatggtgctacaaacttctctgtctc

SEQ ID NO: 641012 - DNA, 120 bp, Artificial Sequence
  ENSG00000181690_53 (sequence is synthesized)
attcagtcgtatttttttatccatagaaaaaggactacattaggtgtaaaagtgtacaatatatttttatactgtgacttaatttgtcattaacaaacttttacaccaccacaatgtatt

SEQ ID NO: 641013 - DNA, 120 bp, Artificial Sequence
  ENSG00000181690_54 (sequence is synthesized)
catgtgcacttgcaaaaggagatctcggacatgcaaatgttaccagaacaaacccagcttttgtccacaaggtgactgtaactcagaatggaaagtgggctttataatagggtgtggagt

SEQ ID NO: 641014 - DNA, 120 bp, Artificial Sequence
  ENSG00000181690_55 (sequence is synthesized)
gaagaacatgctgtatgttactaacagccctttgaatttaacaaaaactgggaatccattaggaaacggattgcatcatacctgaacataagctggactgctgaaattgtatttttagct

SEQ ID NO: 641015 - DNA, 120 bp, Artificial Sequence
  ENSG00000181690_56 (sequence is synthesized)
aatgaaaaagtgtttggactagtactctaaaaatgttctaatgataaagttttgagtcaaaatagaaaagaaaaaaatctgcattccaggccgaattttgtatatttttattgcatttaa

SEQ ID NO: 641016 - DNA, 120 bp, Artificial Sequence
  ENSG00000181690_57 (sequence is synthesized)
aattgctattctgtaatattgggaaatcaagtggcttatcatgtatatcgtgtacttaaaatgtattcacaaactactgttgtatttgtataaaatatagacaaagatcatattttttgt

SEQ ID NO: 641017 - DNA, 120 bp, Artificial Sequence
  ENSG00000181690_58 (sequence is synthesized)
gtgtgtataagctctgtaaaatagcaatcacattatgaagctgcagtgatactacattttaaacattcacatccaaagaagcagactatttattgtccatataccagatttaaaatatta

SEQ ID NO: 641018 - DNA, 120 bp, Artificial Sequence
  ENSG00000181690_59 (sequence is synthesized)
atttgctgctaattaaataatagtactgcagcttcttgtggcctacagtgttatgtttgctgtaagaataagatatgtgaattccacaaaatatatgaataaaattatagaatggcttta

SEQ ID NO: 641019 - DNA, 120 bp, Artificial Sequence
  ENSG00000181690_60 (sequence is synthesized)
atcacaaattgctatttatctaggtaatactttttatttatgcatttatttggtcacgtaaatgtgcttagacctaataaacatatgtagttggtgaaaattaatgcatgactcgtaagc

SEQ ID NO: 641020 - DNA, 120 bp, Artificial Sequence
  ENSG00000181690_61 (sequence is synthesized)
agagtatggaatgtaagcatgtgccatgaaactgcaattcttttatcctgtattttccatcatttacataccggttccatttagaggatagtccattttcacttttttttcatagattgg

SEQ ID NO: 641021 - DNA, 120 bp, Artificial Sequence
  ENSG00000181690_62 (sequence is synthesized)
agccccgcgaatcactgtctgaggaccaaaagcagaggtgctgggagggtgtggtgatggaagagccttccctttctgttactccagtgcacccacccataggagtgatggagggacagg

SEQ ID NO: 641022 - DNA, 120 bp, Artificial Sequence
  ENSG00000181690_63 (sequence is synthesized)
agggataaacagcctcaaccgaagatggatatgtgtatagtttgtatccaaactgttcctttgtgtaacaagccctcccaggaacttttcatgttacattgctttgctttggaagctgat

SEQ ID NO: 641023 - DNA, 120 bp, Artificial Sequence
  ENSG00000181693_0 (sequence is synthesized)
tctcagcagtttaaagcaattgaacatcatgggtagaagaaataacacaaatgtgcctgacttcatccttacgggactgtcagattctgaagaggtccagatggccctctttatactatt

SEQ ID NO: 641024 - DNA, 120 bp, Artificial Sequence
  ENSG00000181693_1 (sequence is synthesized)
tctcctgatatacctaattactatgctgggcaatgtggggatgatattgataatccgcctggacctccagcttcacactcccatgtattttttccttactcacttgtcatttattgacct

SEQ ID NO: 641025 - DNA, 120 bp, Artificial Sequence
  ENSG00000181693_2 (sequence is synthesized)
cagttactcaactgtcatcacacctaaaaccttagcgaacttactgacttccaactatatttccttcatgggctgctttgcccagatgttcttttttgtcttcttgggagctgctgaatg

SEQ ID NO: 641026 - DNA, 120 bp, Artificial Sequence
  ENSG00000181693_3 (sequence is synthesized)
ttttcttctctcatcaatggcctatgatcgctacgtagctatctgcagtcctctacgttacccagttattatgtccaaaaggctgtgttgcgctcttgtcactgggccctatgtgattag

SEQ ID NO: 641027 - DNA, 120 bp, Artificial Sequence
  ENSG00000181693_4 (sequence is synthesized)
ctgcgacacgtctccaattttagctctgtcctgcatggacacatacgacattgaaatcatgatacacattttagctggttccaccctgatggtgtcccttatcacaatatctgcatccta

SEQ ID NO: 641028 - DNA, 120 bp, Artificial Sequence
  ENSG00000181693_5 (sequence is synthesized)
tgtgtccattctctctaccatcctgaaaattaattccacttcaggaaagcagaaagctttgtctacttgtgcctctcatctcttgggagtcaccatcttttatggaactatgatttttac

SEQ ID NO: 641029 - DNA, 120 bp, Artificial Sequence
  ENSG00000181693_6 (sequence is synthesized)
ttatttaaaaccaagaaagtcttattctttgggaagggatcaagtggcttctgttttttatactattgtgattcccatgctgaatccactcatttatagtcttagaaacaaagaagttaa

SEQ ID NO: 641030 - DNA, 120 bp, Artificial Sequence
  ENSG00000181693_7 (sequence is synthesized)
aaatgctctcattagagtcatgcagagaagacaggactccaggtaattaaaatagcaggaatgctgaacatttaaactcatcttttctttcttttctatttggtatgtccttggtctccc

SEQ ID NO: 641031 - DNA, 120 bp, Artificial Sequence
  ENSG00000181693_8 (sequence is synthesized)
aataatctacctatagtcacagagattcccagtgttcttttgacacacaacttcctggtaatctttccatttgaccaggacctaaacgaaatttctaggttggttttttgacacagaata

SEQ ID NO: 641032 - DNA, 120 bp, Artificial Sequence
  ENSG00000181693_9 (sequence is synthesized)
aaacaaaatgaatgcacaaaaatgtaaaaacaacttatctcaaggaaaacaaatattatatcggagaaaattttatctccttaaatggttttcatattttatttataagaaaaattgagg

SEQ ID NO: 641033 - DNA, 69 bp, Artificial Sequence
  ENSG00000181693_10 (sequence is synthesized)
ccgaggtgggtggatcacatgaggtcagaagttcaagaccagcctagccatgatgaaatgtggtctgta

SEQ ID NO: 641034 - DNA, 75 bp, Artificial Sequence
  ENSG00000181693_11 (sequence is synthesized)
ggtgcatgcctgtaatcccagctacttgcggggctgaggtaggagaatcgcttgactccagcctgggcaacaaga

SEQ ID NO: 641035 - DNA, 120 bp, Artificial Sequence
  ENSG00000181693_12 (sequence is synthesized)
gcgaaactccgtctcaaaacaaaacagaacaaaacaaaacaaaacaaaaaataataatatgtgtgtcatatttacagtctaaatatatgtttttagaagcaactgatgtggaaaataaga

SEQ ID NO: 641036 - DNA, 120 bp, Artificial Sequence
  ENSG00000181693_13 (sequence is synthesized)
aaataagaaaatatggttgtcctttaaaattatattacacaaattcctatgcatacttcagttgtaggtaaatttattatggaaaacaacgatttggggcacagtgataacagtctcaga

SEQ ID NO: 641037 - DNA, 120 bp, Artificial Sequence
  ENSG00000181693_14 (sequence is synthesized)
agttatttcatttattatatggggaagaattataacagagtctttaggagtactgttttgaaataaagttttccaagagttagattctaaatatgctacattttcagctatacaacccag

SEQ ID NO: 641038 - DNA, 120 bp, Artificial Sequence
  ENSG00000181693_15 (sequence is synthesized)
aatatgttacctaaaatttaaaactctctttccttaagtgcacaagataaataataactccaaatttgatcagagagtagctgtaaagtatttaaggtgacaataatcaatgctgcctat

SEQ ID NO: 641039 - DNA, 120 bp, Artificial Sequence
  ENSG00000181693_16 (sequence is synthesized)
tctcattagaagacttgcattccagcacaatgccttttgtgaaggatattcacttgtgttttacaaattacttttggttaatttaatttacaggcacacaagcaactaaaaaggaaaaaa

SEQ ID NO: 641040 - DNA, 120 bp, Artificial Sequence
  ENSG00000181693_17 (sequence is synthesized)
ggcacacaagcaactaaaaaggaaaaaaaaagataatatcagtagttcacaatttggactttaggaaataaaatattttgataaaattaagttataataaaatagcatatattgttagag

SEQ ID NO: 641041 - DNA, 120 bp, Artificial Sequence
  ENSG00000181693_18 (sequence is synthesized)
aggaaaatagaaaccctcaaaatattgagttttggctgttttgcttatggcatagccattcttttgtttctttatttttctaataaacttgttttcagtttaagaaaaacaaatatcgag

SEQ ID NO: 641042 - DNA, 120 bp, Artificial Sequence
  ENSG00000181693_19 (sequence is synthesized)
ttttgtgcatgttcttcgagatcaatagttttgaatatgtgcatgtgtataacatatgtaaactaaatatcactttctgtgtactgattttcagctttctgtatccatttacaagtttaa

SEQ ID NO: 641043 - DNA, 120 bp, Artificial Sequence
  ENSG00000181693_20 (sequence is synthesized)
cattggataatctctttgtcattgacaacgctaatataaattttttcttggtacataggcaaaatcaagactcatttcacaatgttttggacttgaaatattaactcaccacattaaaaa

SEQ ID NO: 641044 - DNA, 120 bp, Artificial Sequence
  ENSG00000181693_21 (sequence is synthesized)
tctacatgcagtgatatctcttttgtgtgttaaacatttgaaaacttgacttctgtaaagagtcaaactgtttctttgttaaaattctgtgtgtttttaaaaatcattgccttgctcctg

SEQ ID NO: 641045 - DNA, 120 bp, Artificial Sequence
  ENSG00000181698_0 (sequence is synthesized)
tttccaagaaacgaacatgaggatataattggataaacttaattttcacaggctgttgcatttagtacatataaacaatagctaaaatgtcagggttgccttcagatatggatctataca

SEQ ID NO: 641046 - DNA, 120 bp, Artificial Sequence
  ENSG00000181698_1 (sequence is synthesized)
agcttcaattaaacaattttactgaagtcaccatgtttatattaataagcttcacagaagaatttgatgtgcaagtcttcctatttttattatttttagcaatctatctattcactctaa

SEQ ID NO: 641047 - DNA, 120 bp, Artificial Sequence
  ENSG00000181698_2 (sequence is synthesized)
taggcaatttagggctggttgtaccgatcattggggatttctggcttcacagcccaatgtactattttcttggtgttttatcattcttggatgtctgctattctacagttgtcactccaa

SEQ ID NO: 641048 - DNA, 120 bp, Artificial Sequence
  ENSG00000181698_3 (sequence is synthesized)
aaatgttggtcaatttcctggcaaaaaataaatctatttcatttcttggatgtgcaacacagatgtttcttgcttgtacttttggaaccacagaatgctttctcttggctgcaatggctt

SEQ ID NO: 641049 - DNA, 120 bp, Artificial Sequence
  ENSG00000181698_4 (sequence is synthesized)
tcagtgagcatgtcacccagagtctatgtgccactcatcactgcttcctatgttgctagcattttacatgctactatacatacagtggctacatttagcctgtccttctgtggatccaat

SEQ ID NO: 641050 - DNA, 120 bp, Artificial Sequence
  ENSG00000181698_5 (sequence is synthesized)
gaaattaggcatgtcttttgtaatatgcctcctctgcttgctatttcttgttctgacactcacgtaatccagcttctattcttctactttgtgggctctattgagatagtcactatcctg

SEQ ID NO: 641051 - DNA, 120 bp, Artificial Sequence
  ENSG00000181698_6 (sequence is synthesized)
attgtcctgatctcctatggttttattctgttggccattctgaagatgcagtctgctgaagggaggagaaaagtcttctctacatgtggagctcacctaactggagtgacaatttatcat

SEQ ID NO: 641052 - DNA, 120 bp, Artificial Sequence
  ENSG00000181698_7 (sequence is synthesized)
gggacaatcctcttcatgtatgtgagaccaagttccagctacacttcggacaatgacatgatagtgtcaatattttataccattgtgattcccatgctgaatcccatcatctacagtttg

SEQ ID NO: 641053 - DNA, 120 bp, Artificial Sequence
  ENSG00000181698_8 (sequence is synthesized)
cggaacaaagatgtaaaggaggcaatcaaaagattgcttgtgagaaattggttcataaataagttatagttttaaaattgagtaaagttgcaaataatattgggtgtcagtccacatctc

SEQ ID NO: 641054 - DNA, 120 bp, Artificial Sequence
  ENSG00000181698_9 (sequence is synthesized)
gagcagttcatttccaaaggaaagaaaagtgaaacacaaaaggaaaaataaatgaaaaatgaacaccaaattcttttggtttgcaaacaaggtgcatctatctccagaatcaaatctctt

SEQ ID NO: 641055 - DNA, 120 bp, Artificial Sequence
  ENSG00000181698_10 (sequence is synthesized)
tttcttttagttaacagtgcttgtaacttctagaatattttcaaataaagcatcaatcagcctactaattcaccattttagaaatatcaatatattgtatcatgtataaaatatggcttg

SEQ ID NO: 641056 - DNA, 120 bp, Artificial Sequence
  ENSG00000181704_0 (sequence is synthesized)
gagaaggagggccaagatggcggaagcggaggagtctccaggagacccggggacagcatcgcccaggcccctgtttgcaggcctttcagatatatccatctcacaagacatccccgtaga

SEQ ID NO: 641057 - DNA, 120 bp, Artificial Sequence
  ENSG00000181704_1 (sequence is synthesized)
aggagaaatcaccattcctatgagatctcgcatccgggagtttgacagctccacattaaatgaatctgttcgcaataccatcatgcgtgatctaaaagctgttgggaaaaaattcatgca

SEQ ID NO: 641058 - DNA, 120 bp, Artificial Sequence
  ENSG00000181704_2 (sequence is synthesized)
tgttttgtacccaaggaaaagtaatactcttttgagagattgggatttgtggggccctttgatcctttgtgtgacactcgcattaatgctgcaaagagactctgcagatagtgaaaaaga

SEQ ID NO: 641059 - DNA, 120 bp, Artificial Sequence
  ENSG00000181704_3 (sequence is synthesized)
tggagggccccaatttgcagaggtgtttgtcattgtctggtttggtgcagttaccatcaccctcaactcaaaacttcttggagggaacatatctttttttcagagcctctgtgtgctggg

SEQ ID NO: 641060 - DNA, 120 bp, Artificial Sequence
  ENSG00000181704_4 (sequence is synthesized)
ttactgtatacttcccttgacagtagcaatgctgatttgccggctggtacttttggctgatccaggacctgtaaacttcatggttcggctttttgtggtgattgtgatgtttgcctggtc

SEQ ID NO: 641061 - DNA, 120 bp, Artificial Sequence
  ENSG00000181704_5 (sequence is synthesized)
tatagttgcctccacagctttccttgctgatagccagcctccaaaccgcagagccctagctgtttatcctgttttcctgttttactttgtcatcagttggatgattctcacctttactcc

SEQ ID NO: 641062 - DNA, 120 bp, Artificial Sequence
  ENSG00000181704_6 (sequence is synthesized)
tcagtaaatcaggaatgggaaattaaaaaccagtgaattgaaagcacatctgaaagatgcaattcaccatggagctttgtctctggcccttatttgtctaattttggaggtatttgataa

SEQ ID NO: 641063 - DNA, 120 bp, Artificial Sequence
  ENSG00000181704_7 (sequence is synthesized)
ctgagtaggtgaggagattaaaagggagccatatagcactgtcaccccttatttgaggaactgatgtttgaaaggctgttcttttctctcttaatgtcatttctttaaaaatacatgtgc

SEQ ID NO: 641064 - DNA, 120 bp, Artificial Sequence
  ENSG00000181704_8 (sequence is synthesized)
atactacacacagtatataatgcctccttaaggcatgatggagtcaccgtggtccatttgggtgacaaccagtgacttgggaagcacatagatacatcttacaagttgaatagagttgat

SEQ ID NO: 641065 - DNA, 120 bp, Artificial Sequence
  ENSG00000181704_9 (sequence is synthesized)
aactattttcagttttgagaataccagttcaggtgcagctcttaaacacattgccttatgactattagaatatgcctctcttttcataaataaaaatacatggtctatatccattttctt

SEQ ID NO: 641066 - DNA, 120 bp, Artificial Sequence
  ENSG00000181704_10 (sequence is synthesized)
ttatttctctctcttaagcttaaaaaggcaatgagagaggttaggagtgggttcatacacggagaatgagaaaacatgcattaaccaatattcagattttgatcaggggaaattctacac

SEQ ID NO: 641067 - DNA, 120 bp, Artificial Sequence
  ENSG00000181704_11 (sequence is synthesized)
ttgttgcaaaaaaaaaaaaaaaaaaagcaaagggcctctaaagaatcagcctctttggtccctttgtgctgtcacctttttgccatgtttaacagcatcttggttggcactctagtctta

SEQ ID NO: 641068 - DNA, 120 bp, Artificial Sequence
  ENSG00000181704_12 (sequence is synthesized)
atcttgctccttaactttgaatatgcagtctaaaatgtcagtagtcaacatgtaattttcctttgaaattctgaatattccagtgctggaacttatccaaaaagaagacctcagaaactt

SEQ ID NO: 641069 - DNA, 120 bp, Artificial Sequence
  ENSG00000181704_13 (sequence is synthesized)
agattggtagatctctagtgcatattatcatgtgggcaccttctcttagggtggaatgaggcagtctggatgcagcatagttaaaaggagctgtttaatattctctgtagtctggcctct

SEQ ID NO: 641070 - DNA, 120 bp, Artificial Sequence
  ENSG00000181704_14 (sequence is synthesized)
taactagaaagtaaagctaaatcagaagcctgtatttaaccatgtgaacagggagggatttagtgttctgatggctgattaatagaacagctagatacttagagcatgacgtgggatggg

SEQ ID NO: 641071 - DNA, 120 bp, Artificial Sequence
  ENSG00000181704_15 (sequence is synthesized)
atgagtttacagctgctgccttttcatggtgagcttagcagttttctcattagatgtgtttttttgggttggggaatagcaatttattttattgattttagactttatcaagctaattag

SEQ ID NO: 641072 - DNA, 120 bp, Artificial Sequence
  ENSG00000181704_16 (sequence is synthesized)
ctcccctttagataagtacatgttgcacatgtgcacctacttgtaatctcagatatttatgcacacaagtgtgaaggtttttcagggagcagagcatctgggacaggctgattctgagct

SEQ ID NO: 641073 - DNA, 120 bp, Artificial Sequence
  ENSG00000181704_17 (sequence is synthesized)
aaacagggctcctttaaggcaatatgaactgttgccttctataaattgcacattgaggaactctaatagacaaagattaggtgtcaggcagaaaacactcattgtaaatatactattagt

SEQ ID NO: 641074 - DNA, 120 bp, Artificial Sequence
  ENSG00000181704_18 (sequence is synthesized)
tgataaacataggactttcttattccccagtttttctttatcatataatttaaatatttattcattttgtatttaaagactacctacacatagatatatgattccaaagtcatactttct

SEQ ID NO: 641075 - DNA, 120 bp, Artificial Sequence
  ENSG00000181704_19 (sequence is synthesized)
ccatccccacattagccaagtgaatacagggccaaatgggttcttggaatgataataacaaagcattacaaagtgggtccccttggttccagccttgtccagagtttttggttatatatt

SEQ ID NO: 641076 - DNA, 120 bp, Artificial Sequence
  ENSG00000181704_20 (sequence is synthesized)
tctatttattacaatttaccttttaaattgtaaaataaacctttgtgtggacagagccaatgtttcaatcttgaatgagtaaagaaaatactttggaactgatcctcattttgaaattgg

SEQ ID NO: 641077 - DNA, 120 bp, Artificial Sequence
  ENSG00000181704_21 (sequence is synthesized)
ttctaaattattatccatttccaatgtctgaaattctcttacttcctgctaaaactctctttctgccaaagttgtttcgtaatctgtctcaatgactataatgtaaaattaaagaagtaa

SEQ ID NO: 641078 - DNA, 120 bp, Artificial Sequence
  ENSG00000181704_22 (sequence is synthesized)
ccatgcttctcaagggggaattaaaagtgtttattgaattttactcaggctaattgtttggtcagaaattcctaaggccacagctttggggggttcgtgtagatgtacatggtgggtggg

SEQ ID NO: 641079 - DNA, 120 bp, Artificial Sequence
  ENSG00000181704_23 (sequence is synthesized)
ttataaatattgggacttaaggcagcttgttctatgtatttatctttgctcttgggtgacttagggaatgattttatttgatttaaccttctttctgtttgccccgagaatactcgccag

SEQ ID NO: 641080 - DNA, 120 bp, Artificial Sequence
  ENSG00000181704_24 (sequence is synthesized)
tggcgcttgcagttgtagcatttaccccaagataactttgcctacgaaatatttcgcttttattattttcacatcattctagtatatggactttggaaacaaaagacattgttctattta

SEQ ID NO: 641081 - DNA, 120 bp, Artificial Sequence
  ENSG00000181704_25 (sequence is synthesized)
ttttttttttagtagcggtatttccatttacaaaatatagtaactcttgattactgaaaatgtcaaatcctagaaaacgtagcatgcctatacatgatgttaacatcattctcgaacagt

SEQ ID NO: 641082 - DNA, 120 bp, Artificial Sequence
  ENSG00000181704_26 (sequence is synthesized)
tgttggccgaagattcatttgatgaatccaatttttttgaaatagacaattctgatgttctctttagaaataactcagtttttatcttttttcacattgaaaatcagttagatttgctta

SEQ ID NO: 641083 - DNA, 120 bp, Artificial Sequence
  ENSG00000181704_27 (sequence is synthesized)
agcctcaaagagaatgtttatgtaaattagcgctggcaatttttttttttctaaacaggaaaagggttaaatgaaggttgataaaatggatgttcaattgtctttctgaaagtgagtggc

SEQ ID NO: 641084 - DNA, 120 bp, Artificial Sequence
  ENSG00000181704_28 (sequence is synthesized)
ttgaagggatgaataaatattttcttaatatattcaaaaaagtgcattgctttctgtgatggaagttaagacctaaatgtctggaagttgtaaccctcaacacagcttttcctgatttgc

SEQ ID NO: 641085 - DNA, 120 bp, Artificial Sequence
  ENSG00000181704_29 (sequence is synthesized)
tgcaaaggcacatagctgattatagaagtgaagacggcaaggacggggactccaacaaaggaaaccctgttgcaggatttgggaactttcatgcttcagatgaaattcaggcatgtgagc

SEQ ID NO: 641086 - DNA, 120 bp, Artificial Sequence
  ENSG00000181704_30 (sequence is synthesized)
atcactgcagaatgtggtgcatcattgccatcatgagtaatcacttgctgctcctacttctgagaccaagactcttttgtcatattctttagcaataggacgggtaaagactggatttaa

SEQ ID NO: 641087 - DNA, 120 bp, Artificial Sequence
  ENSG00000181704_31 (sequence is synthesized)
ttgctgttcagagtataaaaactcaattgattccaacatatctgaatgtgcagtaaagtcttaaaagtcaaccgttaatcattaagtcttttgcctctaaagtcttttgcctctgaagag

SEQ ID NO: 641088 - DNA, 120 bp, Artificial Sequence
  ENSG00000181704_32 (sequence is synthesized)
gtttattacatgagttgattttcatattttcattttggtggggttttcctgttgttgggcaaggtggggtcacaggacatgggactagtaagcattttactgtttactatatttgtcttt

SEQ ID NO: 641089 - DNA, 120 bp, Artificial Sequence
  ENSG00000181704_33 (sequence is synthesized)
ttataaacagtatctcccaaaatgtgattagaaggctaccaagcctgtatttggacatttaattgtgtgctttatataatgtaactactaacagtatttggactgcctgttcattcctgg

SEQ ID NO: 641090 - DNA, 120 bp, Artificial Sequence
  ENSG00000181704_34 (sequence is synthesized)
agacaaaaatgaaaatctgtcagttcaagttcttgggtaacatcaagtcattagaatttatctaaagcttatcatgatttgataagacatccattgcatgcagctgttttagctcagtgc

SEQ ID NO: 641091 - DNA, 120 bp, Artificial Sequence
  ENSG00000181704_35 (sequence is synthesized)
aaaacactgaaattgtgattcttagactgtttctgagacatttggatggaaataaatgtataaatgttaattcatgtatataaattagaaacacttttctagattctgtaggcttttgtt

SEQ ID NO: 641092 - DNA, 120 bp, Artificial Sequence
  ENSG00000181704_36 (sequence is synthesized)
aaaaatagagaatttcttggggtttacttaggccacagaatggccaaataataataatgacaatgatattactaataataatagctaacctttatttggcacttactgtgtgccaggcac

SEQ ID NO: 641093 - DNA, 120 bp, Artificial Sequence
  ENSG00000181704_37 (sequence is synthesized)
tattctatttttttaagaatttttaaaataacagctttattgaaatacactttaccataaacttcacctttttattttttatttttatgagacagggactcacccaggctggagtgcagt

SEQ ID NO: 641094 - DNA, 120 bp, Artificial Sequence
  ENSG00000181704_38 (sequence is synthesized)
gggctcaagcaatcctcccacttcagtgtcccgagtagttgggactacaggcatgcgtcactacacctaattggctaatttttgtagtttttgtagagatagggtttcgccatgttgcct

SEQ ID NO: 641095 - DNA, 86 bp, Artificial Sequence
  ENSG00000181704_39 (sequence is synthesized)
ctacaggcatgcgtcactacacctaattggctaatttttgtagtttttgtagagatagggtttcgccatgttgcctacctgctttg

SEQ ID NO: 641096 - DNA, 120 bp, Artificial Sequence
  ENSG00000181704_40 (sequence is synthesized)
cctggctgaaattcaccttttaagatgtacaattcagtggtttttagtatattcacacacaaaattgcacaactatcactaacatctaattttagatcattttgtaacttcaccaagaaa

SEQ ID NO: 641097 - DNA, 120 bp, Artificial Sequence
  ENSG00000181704_41 (sequence is synthesized)
ccccaggtctgtcagcagtcagttccattcccccttcatcccagcctctggcaaccactaatctgctttctgtcactattgatttggccagacactattcttctgtgcttctcatgcatc

SEQ ID NO: 641098 - DNA, 120 bp, Artificial Sequence
  ENSG00000181704_42 (sequence is synthesized)
tcctgtaataccagtgctacaattctcattttatgtggaaaattgaggcactgagaggttaagtaaattgcccacggtcacacagtaatttgatttacaacagtaataacacattagatg

SEQ ID NO: 641099 - DNA, 120 bp, Artificial Sequence
  ENSG00000181704_43 (sequence is synthesized)
agaacacagtaggacacaattttgaattccatttttatgtacctgaaatgaatacacccctcccccaaggtattttccctattgttagcctttgtaccctaggtacaaatataggtattt

SEQ ID NO: 641100 - DNA, 120 bp, Artificial Sequence
  ENSG00000181704_44 (sequence is synthesized)
tccctattgtgttatgtacctgaaatgaatacacccttcccccaaggtattttccctattgttagcctttgtaccctagaactgactggatgtagataacatttgttttcagagtaatgg

SEQ ID NO: 641101 - DNA, 120 bp, Artificial Sequence
  ENSG00000181704_45 (sequence is synthesized)
aacactgtatcagcagcatctgagaacataagaacagttggacattggaaagaggtttgttgccctcatccctccttgaacctcttttctctcccgcttccaccaccaccacacatatat

SEQ ID NO: 641102 - DNA, 120 bp, Artificial Sequence
  ENSG00000181704_46 (sequence is synthesized)
acccctttttctcagtcttaagcatcaaacaatttctgcctctttctttttaattctcccagagggatggttaatgcatcacaatttaacttgtctattcaggtattaatagtcaaggga

SEQ ID NO: 641103 - DNA, 120 bp, Artificial Sequence
  ENSG00000181704_47 (sequence is synthesized)
tgcatctgtttgcttatagtaccagttatattcctaggaccttagagagcagtagtgtgagaatagaatgcctttctatttgggttaaactatgtgggaggaaaaagtaacagagtaaag

SEQ ID NO: 641104 - DNA, 120 bp, Artificial Sequence
  ENSG00000181704_48 (sequence is synthesized)
gctttgccttaatgaagtcaagtgttctgcctggtgggaagtggccacacgctgcactgcgctgctcttgtttactctgttctttcagagcctttgtactttgccatcactgctagtaat

SEQ ID NO: 641105 - DNA, 120 bp, Artificial Sequence
  ENSG00000181704_49 (sequence is synthesized)
ttcttggtccttttcaatactccattttaatcttgatttttttctataaataataaatctgtgaaaaatctgtaaaaagatttgtgactattaaatgtgcaactaaaaacactggaaaaa

SEQ ID NO: 641106 - DNA, 120 bp, Artificial Sequence
  ENSG00000181704_50 (sequence is synthesized)
gggagaaggagggccaagatggcggaagcggaggagtctccaggagacccggggacagcatcgcccaggcccctggtgagcttgggatctgcgacaaaagggaccgaggtttgcaggcct

SEQ ID NO: 641107 - DNA, 120 bp, Artificial Sequence
  ENSG00000181704_51 (sequence is synthesized)
gattgtaagtatatgaggtttttaagggtttgcttaatctatctcactgtaccttatcgtaagtactttataaggcaaagtctctgtggtaataaaactgacatcattttgtaggataaa

SEQ ID NO: 641108 - DNA, 120 bp, Artificial Sequence
  ENSG00000181704_52 (sequence is synthesized)
tctctgtggtaataaaactgacatcattttgtaggataaaaaaatatgtaaacgaatatgtaaatcaaacttctggcagaaattaaaaattgattttattttatttttattttcattttt

SEQ ID NO: 641109 - DNA, 120 bp, Artificial Sequence
  ENSG00000181704_53 (sequence is synthesized)
gccgtggtcgcgagagcgaaggagcggtctgagaatccggcttgagtgttaaaggctaagcgtgtctagctggacccgtggccccgaagaagcgagacaaggcgacgcggagctgtccct

SEQ ID NO: 641110 - DNA, 120 bp, Artificial Sequence
  ENSG00000181704_54 (sequence is synthesized)
gacaccccgaggaccgagggacagcgaagggccggggccgccggccattgccaggcgccattaggtgacgcggccgtcacgcgatgacgcgctgaccggcagtggcctccacgtcgcagg

SEQ ID NO: 641111 - DNA, 120 bp, Artificial Sequence
  ENSG00000181704_55 (sequence is synthesized)
ttccgcaaagacctgtgggagcgacccgggagaaggagggccaagatggcggaagcggaggagtctccaggagacccggggacagcatcgcccaggcccctgatgcgtgatctaaaagct

SEQ ID NO: 641112 - DNA, 120 bp, Artificial Sequence
  ENSG00000181704_56 (sequence is synthesized)
ggcgcagagtcagaggggcaggggcggcggcggagggagcaggaggttggggcttgagcccgtcattccggcgcacgaaaacttgaagtcgctcggtagccggggaagggaaggaagaga

SEQ ID NO: 641113 - DNA, 79 bp, Artificial Sequence
  ENSG00000181704_57 (sequence is synthesized)
ggagtctccaggagacccggggacagcatcgcccaggcccctggtgagcttgggatctgcgacaaaagggaccgatcac

SEQ ID NO: 641114 - DNA, 66 bp, Artificial Sequence
  ENSG00000181704_58 (sequence is synthesized)
agtagctgggattatttcaccaggttggccaggctggtttccaactcccgatctcaggtgatccac

SEQ ID NO: 641115 - DNA, 83 bp, Artificial Sequence
  ENSG00000181704_59 (sequence is synthesized)
acattaaaaatttagattggaatctcagagattgaaacattttgcttattatattgtcctcatcagtaaatgtacactggcca

SEQ ID NO: 641116 - DNA, 120 bp, Artificial Sequence
  ENSG00000181704_60 (sequence is synthesized)
aaatttagattggaatctcagagattgaaacattttgcttattatattgtcctcatcagtaaatgtacactggccaggcatggtggctcatacatgtaataccagcactttgggaggccg

SEQ ID NO: 641117 - DNA, 73 bp, Artificial Sequence
  ENSG00000181704_61 (sequence is synthesized)
agaccagcctgggcaacatggcgagacctcatttctactaaaaataaaaaaactagccaggcctggtagcaca

SEQ ID NO: 641118 - DNA, 120 bp, Artificial Sequence
  ENSG00000181704_62 (sequence is synthesized)
tattttaaaaaatgctctagtggttactacaaaatacatttctggaggctgctaatttacaatatttacatttattacataatattcctggaagctgctgacacataaagagttaatgat

SEQ ID NO: 641119 - DNA, 78 bp, Artificial Sequence
  ENSG00000181704_63 (sequence is synthesized)
aatattcctggaagctgctgacacataaagagttaatgatctccaagggaaaggcaaatgtttaaatttttgtttgtt

SEQ ID NO: 641120 - DNA, 120 bp, Artificial Sequence
  ENSG00000181704_64 (sequence is synthesized)
ctgcctccagggttcaggagattcttctgcctcagcctctggaacagctgggattacaggtgccccaccaccacatccagctaatttttgtgttgttagtagagacgggttttgccatgt

SEQ ID NO: 641121 - DNA, 90 bp, Artificial Sequence
  ENSG00000181704_65 (sequence is synthesized)
ggcctcccagcccggcctaaatgttaaattaatatgatagtaaatacccgtaaacatttaacaaattaatagtacctttattgacagttt

SEQ ID NO: 641122 - DNA, 120 bp, Artificial Sequence
  ENSG00000181704_66 (sequence is synthesized)
taaacatttaacaaattaatagtacctttattgacagtttgattttcaagcctatcatttagtctgatgactgctttctttattagagttctgtcaaaacagacagcgtctcattctgtt

SEQ ID NO: 641123 - DNA, 90 bp, Artificial Sequence
  ENSG00000181704_67 (sequence is synthesized)
tctgccagtctcctgagtagctgggactgtaggcacacatggctagtttttaaatattttgtagagatgggggtctccctatgttgccca

SEQ ID NO: 641124 - DNA, 90 bp, Artificial Sequence
  ENSG00000181704_68 (sequence is synthesized)
tcctgagtagctgggactgtaggcacacatggctagtttttaaatattttgtagtgtctaaaactcctggccttggccgggcgcggtggc

SEQ ID NO: 641125 - DNA, 120 bp, Artificial Sequence
  ENSG00000181718_0 (sequence is synthesized)
gtggcatgaacacatggctgaccagtttgtcactgtcttctgattcactactagagaattatgcactgctgaatatatgtcgtacagtatatacaagagcacagttaacatccccttgag

SEQ ID NO: 641126 - DNA, 120 bp, Artificial Sequence
  ENSG00000181718_1 (sequence is synthesized)
tcatggtgttgttcattctttttgtcataatatgaactgtaactttatgcatatcttcaagtttgttctagatttcaacatgaagaatgtcactgaagttaccttatttgtactgaaggg

SEQ ID NO: 641127 - DNA, 120 bp, Artificial Sequence
  ENSG00000181718_2 (sequence is synthesized)
cttcacagacaatcttgaactgcagactatcttcttcttcctgtttctagcaatctacctcttcactctcatgggaaatttaggactgattttagtggtcattagggattcccagctcca

SEQ ID NO: 641128 - DNA, 120 bp, Artificial Sequence
  ENSG00000181718_3 (sequence is synthesized)
caaacccatgtactattttctgagtatgttgtcttctgtggatgcctgctattcctcagttattaccccaaatatgttagtagattttacgacaaagaataaagtcatttcattccttgg

SEQ ID NO: 641129 - DNA, 120 bp, Artificial Sequence
  ENSG00000181718_4 (sequence is synthesized)
atgtgtagcacaggtgtttcttgcttgtagttttggaaccacagaatgctttctcttggctgcaatggcttatgatcgctatgtagccatctacaaccctctcctgtattcagtgagcat

SEQ ID NO: 641130 - DNA, 120 bp, Artificial Sequence
  ENSG00000181718_5 (sequence is synthesized)
cattttacatgctactatacatacagtggctacatttagcctatccttctgtggagccaatgaaattaggcgtgtcttttgtgatatccctcctctccttgctatttcttattctgacac

SEQ ID NO: 641131 - DNA, 120 bp, Artificial Sequence
  ENSG00000181718_6 (sequence is synthesized)
tcacacaaaccagcttctactcttctactttgtgggctctatcgagctggtcactatcctgattgttctgatctcctatggtttgattctgttggccattctgaagatgtattctgctga

SEQ ID NO: 641132 - DNA, 120 bp, Artificial Sequence
  ENSG00000181718_7 (sequence is synthesized)
agggaggagaaaagtcttctccacatgtggagctcacctaactggagtgtcaatttattatgggacaatcctcttcatgtatgtgagaccaagttccagctatgcttcggaccatgacat

SEQ ID NO: 641133 - DNA, 120 bp, Artificial Sequence
  ENSG00000181718_8 (sequence is synthesized)
gatagtgtcaatattttacaccattgtgattcccttgctgaatcccgtcatctacagtttgaggaacaaagatgtaaaagactcaatgaaaaaaatgtttgggaaaaatcaggttatcaa

SEQ ID NO: 641134 - DNA, 120 bp, Artificial Sequence
  ENSG00000181718_9 (sequence is synthesized)
taaagtatattttcatactaaaaaataaattataaaaggtgagggtgatactctgcacctcaataccaagaatgtgtcattgtggtgttatgatatatgttggtttccatccagggttcc

SEQ ID NO: 641135 - DNA, 120 bp, Artificial Sequence
  ENSG00000181718_10 (sequence is synthesized)
cccatagcctttgttacagtcttttgttataatgttgggtgttatacctcaggggcaggccttttaccttctcctgccctcctttcacttgcaccaaggctgggttccaatgtctgcctt

SEQ ID NO: 641136 - DNA, 120 bp, Artificial Sequence
  ENSG00000181718_11 (sequence is synthesized)
actgattgtgaatcttaagactctcccatgagagagtcccaccctataccttcggggagggaatgctgatgccttgaagcttccatagaacctaggaggatagggttcagtgagcttctg

SEQ ID NO: 641137 - DNA, 120 bp, Artificial Sequence
  ENSG00000181718_12 (sequence is synthesized)
gggagcagaacaaatggaagttcctagagggtggcatggtcagggagggcatggaaactctgcacccctttccttatactttgccctacacatcccttcaccagtgtcctttgcaatatc

SEQ ID NO: 641138 - DNA, 120 bp, Artificial Sequence
  ENSG00000181718_13 (sequence is synthesized)
cttttcaataagccagtaatatgtttccctgagttttgtgagctgcttcagtaatttaatgaaacccaaagagggggtcatgggagatccaacttgaagcaggttggtcaaagtttcaga

SEQ ID NO: 641139 - DNA, 120 bp, Artificial Sequence
  ENSG00000181718_14 (sequence is synthesized)
gacccgaatttgtgactggtgttgtcagggggcagttttggggactgaaccctcaacctatgggatctgacactatctctgggtagatagtgttgcaactgaattagaggatacccagtt

SEQ ID NO: 641140 - DNA, 120 bp, Artificial Sequence
  ENSG00000181718_15 (sequence is synthesized)
ggtgattaccacgtggtgtgggaggaagaaatccctacccatttgatcacagaagtcttctgtgttgatgattgttgtggtatgacagtagaggaaaaacctggttagcaagagttttcc

SEQ ID NO: 641141 - DNA, 120 bp, Artificial Sequence
  ENSG00000181722_0 (sequence is synthesized)
ggggcggggggaagtttaggagttgaggaaagaagattaaagagcgcgaggagacaaataaaaagaagtgttaagaattgcctttgggactctgaaggctgaagaattgatgaattgcaa

SEQ ID NO: 641142 - DNA, 120 bp, Artificial Sequence
  ENSG00000181722_1 (sequence is synthesized)
gtttgtgccccatagctgcacagactgcctgaagttacatttagagactgaaatcactgcaccttaaaaacaaaagattgagctgcactgtattcctaatgtttcatcattactaacagg

SEQ ID NO: 641143 - DNA, 120 bp, Artificial Sequence
  ENSG00000181722_2 (sequence is synthesized)
atattcctcatgacattgctgtctgatctttgaccatcagtctgtgacctgccccttctctttacatgcagccgctctctgctccctgccccaatgaacatctgcactaggcccaagcct

SEQ ID NO: 641144 - DNA, 120 bp, Artificial Sequence
  ENSG00000181722_3 (sequence is synthesized)
tggagtaatttacctgaagagtgacaccattgattttgaaactactgaagaaacccaagacagctgaaaaccagaaggcatctgaggagaatgagattactcagccgggtggatccagcg

SEQ ID NO: 641145 - DNA, 120 bp, Artificial Sequence
  ENSG00000181722_4 (sequence is synthesized)
ccaagccgggccttccctgcctgaactttgaagctgttttgtctccagacccagccctcatccactcaacacattcactgacaaactctcacgctcacaccgggtcatctgattgtgaca

SEQ ID NO: 641146 - DNA, 120 bp, Artificial Sequence
  ENSG00000181722_5 (sequence is synthesized)
tcagttgcaaggggatgaccgagcgcattcacagcatcaaccttcacaacttcagcaattccgtgctcgagaccctcaacgagcagcgcaaccgtggccacttctgtgacgtaacggtgc

SEQ ID NO: 641147 - DNA, 120 bp, Artificial Sequence
  ENSG00000181722_6 (sequence is synthesized)
gcatccacgggagcatgctgcgcgcacaccgctgcgtgctggcagccggcagccccttcttccaggacaaactgctgcttggctacagcgacatcgagatcccgtcggtggtgtcagtgc

SEQ ID NO: 641148 - DNA, 120 bp, Artificial Sequence
  ENSG00000181722_7 (sequence is synthesized)
agtcagtgcaaaagctcattgacttcatgtacagcggcgtgctacgggtctcgcagtcggaagctctgcagatcctcacggccgccagcatcctgcagatcaaaacagtcatcgacgagt

SEQ ID NO: 641149 - DNA, 120 bp, Artificial Sequence
  ENSG00000181722_8 (sequence is synthesized)
gcacgcgcatcgtgtcacagaacgtgggcgatgtgttcccggggatccaggactcgggccaggacacgccgcggggcactcccgagtcaggcacgtcaggccagagcagcgacacggagt

SEQ ID NO: 641150 - DNA, 120 bp, Artificial Sequence
  ENSG00000181722_9 (sequence is synthesized)
cgggctacctgcagagccacccacagcacagcgtggacaggatctactcggcactctacgcgtgctccatgcagaatggcagcggcgagcgctctttttacagcggcgcagtggtcagcc

SEQ ID NO: 641151 - DNA, 120 bp, Artificial Sequence
  ENSG00000181722_10 (sequence is synthesized)
accacgagactgcgctcggcctgccccgcgaccaccacatggaagaccccagctggatcacacgcatccatgagcgctcgcagcagatggagcgctacctgtccaccacccccgagacca

SEQ ID NO: 641152 - DNA, 120 bp, Artificial Sequence
  ENSG00000181722_11 (sequence is synthesized)
cgcactgccgcaagcagccccggcctgtgcgcatccagaccctagtgggcaacatccacatcaagcaggagatggaggacgattacgactactacgggcagcaaagggtgcagatcctgg

SEQ ID NO: 641153 - DNA, 120 bp, Artificial Sequence
  ENSG00000181722_12 (sequence is synthesized)
aacgcaacgaatccgaggagtgcacggaagacacagaccaggccgagggcaccgagagtgagcccaaaggtgaaagcttcgactcgggcgtcagctcctccataggcaccgagcctgact

SEQ ID NO: 641154 - DNA, 120 bp, Artificial Sequence
  ENSG00000181722_13 (sequence is synthesized)
cggtggagcagcagtttgggcctggggcggcgcgggacagccaggctgaacccacccaacccgagcaggctgcagaagcccccgctgagggtggtccgcagacaaaccagctagaaacag

SEQ ID NO: 641155 - DNA, 120 bp, Artificial Sequence
  ENSG00000181722_14 (sequence is synthesized)
gtgcttcctctccggagagaagcaatgaagtggagatggacagcactgttatcactgtcagcaacagctccgacaagagcgtcctacaacagccttcggtcaacacgtccatcgggcagc

SEQ ID NO: 641156 - DNA, 120 bp, Artificial Sequence
  ENSG00000181722_15 (sequence is synthesized)
cattgccaagtacccagctctacttacgccagacagaaaccctcaccagcaacctgaggatgcctctgaccttgaccagcaacacgcaggtcattggcacagctggcaacacctacctgc

SEQ ID NO: 641157 - DNA, 120 bp, Artificial Sequence
  ENSG00000181722_16 (sequence is synthesized)
cagccctcttcactacccagcccgcgggcagtggccccaagcctttcctcttcagcctgccacagcccctggcaggccagcagacccagtttgtgacagtgtcccagcccggtctgtcga

SEQ ID NO: 641158 - DNA, 120 bp, Artificial Sequence
  ENSG00000181722_17 (sequence is synthesized)
cctttactgcacagctgccagcgccacagcccctggcctcatccgcaggccacagcacagccagtgggcaaggcgaaaaaaagccttatgagtgcactctctgcaacaagactttcaccg

SEQ ID NO: 641159 - DNA, 120 bp, Artificial Sequence
  ENSG00000181722_18 (sequence is synthesized)
ccaaacagaactacgtcaagcacatgttcgtacacacaggtgagaagccccaccaatgcagcatctgttggcgctccttctccttaaaggattaccttatcaagcacatggtgacacaca

SEQ ID NO: 641160 - DNA, 120 bp, Artificial Sequence
  ENSG00000181722_19 (sequence is synthesized)
caggagtgagggcataccagtgtagtatctgcaacaagcgcttcacccagaagagctccctcaacgtgcacatgcgcctccaccggggagagaagtcctacgagtgctacatctgcaaaa

SEQ ID NO: 641161 - DNA, 120 bp, Artificial Sequence
  ENSG00000181722_20 (sequence is synthesized)
agaagttctctcacaagaccctcctggagcgacacgtggccctgcacagtgccagcaatgggaccccccctgcaggcacacccccaggtgcccgcgctggccccccaggcgtggtggcct

SEQ ID NO: 641162 - DNA, 120 bp, Artificial Sequence
  ENSG00000181722_21 (sequence is synthesized)
gcacggaggggaccacttacgtctgctccgtctgcccagcaaagtttgaccaaatcgagcagttcaacgaccacatgaggatgcatgtgtctgacggataagtagtatctttctctcttt

SEQ ID NO: 641163 - DNA, 120 bp, Artificial Sequence
  ENSG00000181722_22 (sequence is synthesized)
cttatgaacaaaacaaaacaacaacaaaaaacaaacaaacaaaaaagctatggcactagaatttaagaaatgttttggtttcatttttactttctgtttttgtttttgtttcgtttcatt

SEQ ID NO: 641164 - DNA, 120 bp, Artificial Sequence
  ENSG00000181722_23 (sequence is synthesized)
ttgtactacatgaagaactgttttttgcctgctggtacattacatttccggaggcttgggtgaataatagttttcccagtctccctcggatggtggccttaaggcctggtagtgcttcaa

SEQ ID NO: 641165 - DNA, 120 bp, Artificial Sequence
  ENSG00000181722_24 (sequence is synthesized)
gaggtccactggttggatctctagctactggcctctaaatacaacccttctttacaaaaaaatcttttaaaaaaaagtaaaaaaaaaaaaaaaatttccacttgtgaagagcactacaaa

SEQ ID NO: 641166 - DNA, 120 bp, Artificial Sequence
  ENSG00000181722_25 (sequence is synthesized)
aaatatataacaaaatctaaaaggcctactgtctttaagtacaccgcttgcagtgtttcagtggacattttcacaattctggccgcttggacttcacagtaaccagttaaaactgtggaa

SEQ ID NO: 641167 - DNA, 120 bp, Artificial Sequence
  ENSG00000181722_26 (sequence is synthesized)
tatcacttctggttgaaaacccagaggaaaggccctgctgttttccacctaccacgttgtctgatttcataaaagggctgtgggggtgggaagggcagtgggttcggtggtgtgggaaag

SEQ ID NO: 641168 - DNA, 120 bp, Artificial Sequence
  ENSG00000181722_27 (sequence is synthesized)
aaagacgaatggcaggcttcttccccagattctgcccgggtccacacaccctggcccaccttctccatatccccctcttgcagcagaagccaggaagacttggacaagcaacaagcaaca

SEQ ID NO: 641169 - DNA, 120 bp, Artificial Sequence
  ENSG00000181722_28 (sequence is synthesized)
gtggctatcgtatttattcagtgtcttcgctgagccacagcctcagcacaatcaagagggactttcatgaaaggcaggaatgcagataaaacaaagatatcagaaatttgcacctatgtt

SEQ ID NO: 641170 - DNA, 120 bp, Artificial Sequence
  ENSG00000181722_29 (sequence is synthesized)
tctaggtacaagagaaggattatttccaacaatctttgcaaaaaaaaaaaaagtgtcaggatatattcttgtggaagagaaaaagaaaaagaaatggagggtggggggaacaataaaaag

SEQ ID NO: 641171 - DNA, 120 bp, Artificial Sequence
  ENSG00000181722_30 (sequence is synthesized)
ttcttgaggcttttttaattcaaaattttatagaggggcaaaagtgacgtttaccagatagaatgctgatttttttaatatatttacaacagtatttgtgtaaaaaaaaaaacaaaaaaa

SEQ ID NO: 641172 - DNA, 120 bp, Artificial Sequence
  ENSG00000181722_31 (sequence is synthesized)
gtgaaattgttaaaagtaatttttttcattttggttttgcatacactgccaccaattccttctcttttattttatttcacacacatatatatattttttggtaagtcaagactgttaagg

SEQ ID NO: 641173 - DNA, 120 bp, Artificial Sequence
  ENSG00000181722_32 (sequence is synthesized)
ttagcgatactgcttccagatagaaagaataaaaggcaactaaagttatatttgaaagagaggaaggatattttcttcatattttttttaatttttcttaatttttattattttaagtat

SEQ ID NO: 641174 - DNA, 120 bp, Artificial Sequence
  ENSG00000181722_33 (sequence is synthesized)
tgcctgggttgatgagggcctctgtggccagcccatccctgctgtaatttgaattgctgctttgtattttgatatgtagttctttgactttagcaagcttaagttgccccactgaataat

SEQ ID NO: 641175 - DNA, 120 bp, Artificial Sequence
  ENSG00000181722_34 (sequence is synthesized)
tttttcaactgattcatctagaattctgttctttttcatggaagagactttatctttcagaaagagattgcttgcttctccaaaatttcattgagatcttacaattctagaatttctatt

SEQ ID NO: 641176 - DNA, 120 bp, Artificial Sequence
  ENSG00000181722_35 (sequence is synthesized)
gactttactttttttcttagtgaaacactaatagtctagaagtcttgataaatggggtcttttcttttgtgatcagccaggaagaggagttcacaaaactctgccatagctcctcaccct

SEQ ID NO: 641177 - DNA, 120 bp, Artificial Sequence
  ENSG00000181722_36 (sequence is synthesized)
tcccaactacaaagagcatcattatgagaagcctgttatagatcaagatgcattgatgccaaaattacttttttccttccaaatatcaccttctgactgtttccaccatggttaagaggg

SEQ ID NO: 641178 - DNA, 120 bp, Artificial Sequence
  ENSG00000181722_37 (sequence is synthesized)
ctgaataagatgatcattctttagatgacgaattaacccttgcttcttcgaaaggttttagggaaattaacaaaaaaattcccagatgccaacagccaccattcaaaagaccaccaatct

SEQ ID NO: 641179 - DNA, 120 bp, Artificial Sequence
  ENSG00000181722_38 (sequence is synthesized)
attgcatcataccagatgccactctctcttcctagtagggatttctctcctcggtcctgatcaaggtgttataatagagacattttcattatagacagtgtcctgaagggattccagctc

SEQ ID NO: 641180 - DNA, 120 bp, Artificial Sequence
  ENSG00000181722_39 (sequence is synthesized)
aaatataggaattcttaaacctagctgaaactcccaaagtgatttcattgctgggcatattttaacatacttaggggaaagcaaatctttaaacaaagcaaaacaccaaactacagtttt

SEQ ID NO: 641181 - DNA, 120 bp, Artificial Sequence
  ENSG00000181722_40 (sequence is synthesized)
aaaaagaagaaaggagagcgtattttagtttcaaaattacattacattttaatttaattttccttctaattttcctgtcagcattttatttacaaaaactgtgcagcaaacgagggaaaa

SEQ ID NO: 641182 - DNA, 120 bp, Artificial Sequence
  ENSG00000181722_41 (sequence is synthesized)
tcttccaacacaaacaactctgtaatgactaaattggttttattcatatattttagacatttggttaacttggatctttttcataagttctttgtgatgctttgtaaggttagtgtaact

SEQ ID NO: 641183 - DNA, 120 bp, Artificial Sequence
  ENSG00000181722_42 (sequence is synthesized)
gaagtgtttgtgagtttgatttggtcccacagtgcttaattcagtggatattttgctagaagttttaatgtaaacttgggtggttaactgactattaagtgtaacctattgtgatttcta

SEQ ID NO: 641184 - DNA, 120 bp, Artificial Sequence
  ENSG00000181722_43 (sequence is synthesized)
agaggagtcctgccaagaactgtatgtccaaaactgatctgttttaacagttagtgaggaacagcttccgagataaagtaagttcatttttctattgctaattttgctttttaaaatagc

SEQ ID NO: 641185 - DNA, 120 bp, Artificial Sequence
  ENSG00000181722_44 (sequence is synthesized)
agtgttgtaagactaatatttccacttaccaccaatagagggagcattaattaactatgtcatggaattgttttgatattttggaaaacaagtgattccacccataaaatgaaaagagaa

SEQ ID NO: 641186 - DNA, 120 bp, Artificial Sequence
  ENSG00000181722_45 (sequence is synthesized)
gattgaccttaagaaaaaaactcttaaagctaggagacaatgacatgaaatcactcaatacatgttacaaatgaaagaaggccaaaagccactttaaaatattttaaactgtttcacagt

SEQ ID NO: 641187 - DNA, 120 bp, Artificial Sequence
  ENSG00000181722_46 (sequence is synthesized)
agatttgaaagtgtctttgttcaaatttagcaaagtaggaagaattttcactaataccgcctgaaaagttgatcttaggtgccattatgggccacgtgtagctttctgtttctcaaatct

SEQ ID NO: 641188 - DNA, 120 bp, Artificial Sequence
  ENSG00000181722_47 (sequence is synthesized)
gagagagacccatttgccttaatgctgatttgccatgtaaaatgctaagcaattgggttagaatccaccttttcttttggtagaacatgtagagaaaaagctgcaggtgacttgaaaccc

SEQ ID NO: 641189 - DNA, 120 bp, Artificial Sequence
  ENSG00000181722_48 (sequence is synthesized)
tgaggagtctatcatcctttccctgtaaaggaagtgtctcttaaaaaaaagggagtgggggaggaggtggaggatccctaaagaattcttaatgaggtgatataatcattgtagtccatg

SEQ ID NO: 641190 - DNA, 120 bp, Artificial Sequence
  ENSG00000181722_49 (sequence is synthesized)
acaaaatggaccagccaggtttgcatagcagtagacatattcctactgtacatttatccttcccaaatatgtcacattctaaaatagttgacaaattattttgtggaaagaggaagaagc

SEQ ID NO: 641191 - DNA, 120 bp, Artificial Sequence
  ENSG00000181722_50 (sequence is synthesized)
tggattggagtgggagatctaatctggaggagcaaagaggtagttgtttattgctatgttcctggcccatcaaatggccactttccaaactgacccacattttaggaaataaaccaatct

SEQ ID NO: 641192 - DNA, 120 bp, Artificial Sequence
  ENSG00000181722_51 (sequence is synthesized)
ggacctgtttcaaaaggatagagatgcttttagattgtcaattctcacttttaagttaaacaatcacaaatatctttagaaatagggaaagacatttgcttcaaaatcaaagaatgagtg

SEQ ID NO: 641193 - DNA, 120 bp, Artificial Sequence
  ENSG00000181722_52 (sequence is synthesized)
tggatctttttaatttttttttgtttcaagtcctacagtcatcttacatttagaccttcatggtagggtgatatgagtgctaaaaaaatttctttctagtagccaggaaacagatagata

SEQ ID NO: 641194 - DNA, 120 bp, Artificial Sequence
  ENSG00000181722_53 (sequence is synthesized)
agataaaagcaaatgttccagatttaagacttcttaggatgagtacaaggaagagagaaatagtatggaaaggacattttttagcaatttataattttaaaatggaatttgccaaacaag

SEQ ID NO: 641195 - DNA, 120 bp, Artificial Sequence
  ENSG00000181722_54 (sequence is synthesized)
ggagaggaaaaaaagtcaaaggggaatttttatctcaagatatttagatatggtttataaaaaaataatattttctaccactaaaaacactggtattatctcagcatcatgggcaatttt

SEQ ID NO: 641196 - DNA, 120 bp, Artificial Sequence
  ENSG00000181722_55 (sequence is synthesized)
tccttattacatgccaatatttgtacaaaaaaggcccccaaatgtgtgaaatataatcctaaaaaagaaaataattggaacacatggatctgttacaattctacacagggggaaacaagc

SEQ ID NO: 641197 - DNA, 120 bp, Artificial Sequence
  ENSG00000181722_56 (sequence is synthesized)
taagcaaagaaaaaaaatctgaaatgaaaatctctgtatcaaaatggtttcctgtatcttttaattgagaggtaaactttagctcctaataacagttttatagaccgttctcttcccaaa

SEQ ID NO: 641198 - DNA, 120 bp, Artificial Sequence
  ENSG00000181722_57 (sequence is synthesized)
ttcctaatgctttgaatctatttgtgccatgattaagtgtgctggataatttcctgctcatattctagcctcagttcattcctagtcatcttagagatcatagtagctcttggccttaga

SEQ ID NO: 641199 - DNA, 120 bp, Artificial Sequence
  ENSG00000181722_58 (sequence is synthesized)
aagacttgggtttgctgtgtttaaaagtcataagggttttattttgtatcatcaaaatattctataaggtcccaaatactctttttcaacccatgaacagtaagaatttgtgaattctga

SEQ ID NO: 641200 - DNA, 120 bp, Artificial Sequence
  ENSG00000181722_59 (sequence is synthesized)
taatgaaaaaagttttcctccaggtatgtttgtttcacattcagtcctaaagccttgagctatgtgtacttccctcacacaggaacaccagctgtcctgtctgtgctctgcctgcgccca

SEQ ID NO: 641201 - DNA, 120 bp, Artificial Sequence
  ENSG00000181722_60 (sequence is synthesized)
aaactcaatattttctctcagcacagaagtcaaaaatgagatatgccccttataaaaccccttcgattcctgagaaaacataataaagccatatgttgcttccttgttggggctcctcca

SEQ ID NO: 641202 - DNA, 120 bp, Artificial Sequence
  ENSG00000181722_61 (sequence is synthesized)
caatgctcccaacacctgtgacccctaggaagacagggagcaaggtggatctggccaggagtcacaggatatacacccattctggagctttcctctgttgttctagaagatgttatttga

SEQ ID NO: 641203 - DNA, 120 bp, Artificial Sequence
  ENSG00000181722_62 (sequence is synthesized)
ttagttggggctgggagcaggggatatatgattttgtggaaaaggtatcagataatcaaatcaggtctgcctctgctatagccagtgtgctgctgcattaaaagggaacaaaaggaaggt

SEQ ID NO: 641204 - DNA, 120 bp, Artificial Sequence
  ENSG00000181722_63 (sequence is synthesized)
gcaacgtaagagcagacacaacctgagatgcccttgagatttaggagaacaggagggcgccctttctgttgtgacctgactcttaaaagaaatcttctaaaagaattctttaatttggta

SEQ ID NO: 641205 - DNA, 120 bp, Artificial Sequence
  ENSG00000181722_64 (sequence is synthesized)
atgagttgaagtccagggtaatggaagctctagggcagagaacaaaagaattgcaaaatgtattcagcaccaaacaatgctaaaccaagaaacatccaatcacaaaactaggaagtttgg

SEQ ID NO: 641206 - DNA, 120 bp, Artificial Sequence
  ENSG00000181722_65 (sequence is synthesized)
caagaagtggttagagaaatctctgggcttttccatgggcagggtcgacagactctcttttcagtgatttctggctctgagaaacctctttactcactagaaaagaactttatttaaatg

SEQ ID NO: 641207 - DNA, 120 bp, Artificial Sequence
  ENSG00000181722_66 (sequence is synthesized)
gccaattttgttcctcagaaaaagaaattaaaaaaaaagaaaaataggatactgaagacagaaccatgtgacttggtgacaaacaaaaggaggggtgcactagaatttcaataggctccc

SEQ ID NO: 641208 - DNA, 120 bp, Artificial Sequence
  ENSG00000181722_67 (sequence is synthesized)
taattccatagaaaaagcaaagcaacccaatgcctcctgagcctgcagtgcatgaagagagtgcttgagctgacccagccaccaggccttctggggctagacataacttcccactggaac

SEQ ID NO: 641209 - DNA, 120 bp, Artificial Sequence
  ENSG00000181722_68 (sequence is synthesized)
agcagcagcctctttcccctctttgtgttttcatgaagaaaacggctgttctcttaggtagccaggaaatagattacatggggcaaactttcaaaagcaatctctaccctggtgctcagg

SEQ ID NO: 641210 - DNA, 120 bp, Artificial Sequence
  ENSG00000181722_69 (sequence is synthesized)
ctacatacagaggcagaaaaggggcacggaagagcccttgctcttgagagagagtattttcatattcccaagggctttccgtgtagagttgctatttctgatatcacttaaacctttaca

SEQ ID NO: 641211 - DNA, 120 bp, Artificial Sequence
  ENSG00000181722_70 (sequence is synthesized)
agaaaaaaggctgtggtgactcagtgttcctataaattcagaatgtggaaactactaatccaaagcatcatttctagcactgagtatcaagacgatcagcctgaccaaaatattgcaaag

SEQ ID NO: 641212 - DNA, 120 bp, Artificial Sequence
  ENSG00000181722_71 (sequence is synthesized)
agttttctaagtctctgaagatttttttctccttgaacactgagtctatagcagtcagcaatgtaccttagccgatccctgggaatggttatggaacagtagggcttgtttccatccttt

SEQ ID NO: 641213 - DNA, 120 bp, Artificial Sequence
  ENSG00000181722_72 (sequence is synthesized)
ttagagtgaagagatagaaaattagggctacctagtgtgggttctttttcagaactatgtattttctcctcactgcatgatgggtaaaaatgccctgggttgaaacaagaaacattatct

SEQ ID NO: 641214 - DNA, 120 bp, Artificial Sequence
  ENSG00000181722_73 (sequence is synthesized)
ttccacaccactgactaaaacacctgccagtggtttctttaggctccaccttttgctccgtaaactgtagactttcagactgaaatctaatcttaagtgacctcaattaaggtattttca

SEQ ID NO: 641215 - DNA, 120 bp, Artificial Sequence
  ENSG00000181722_74 (sequence is synthesized)
caaaaggctacttatagtgtagcattattgccttaaatcagaaagccctgggaagaggataaaagatatagaaatgagaaggctctgaagttataggcatttcttgctgtttaatagtta

SEQ ID NO: 641216 - DNA, 120 bp, Artificial Sequence
  ENSG00000181722_75 (sequence is synthesized)
cattatcacaaaaacaagccctattcatgattgaggactatggaaatagtgacttcttgaggaggcaccaaactttcctagaactgggtactctcagatagtggctgctatttcctattc

SEQ ID NO: 641217 - DNA, 120 bp, Artificial Sequence
  ENSG00000181722_76 (sequence is synthesized)
tatttcagtgacgtaggttggggctgaatgtaaaatagacatcatattactaaatagaatcctataaaatgcaatcacaggtgcccgggagtactagttttaaacatttccttaacaagg

SEQ ID NO: 641218 - DNA, 120 bp, Artificial Sequence
  ENSG00000181722_77 (sequence is synthesized)
agaacaatccagcaaaaagctttctttctctatacagtgtatatctctaaactttttttcctcagttttagagaacatctgttttatctggtggttctttgtttgaatgcaaactcataa

SEQ ID NO: 641219 - DNA, 120 bp, Artificial Sequence
  ENSG00000181722_78 (sequence is synthesized)
ctttcaagtctccggtgcaagagcataatctacagatcatgggcaaaatctagccacagtcctgagagtccaggcttctgggatgcccagctgggtataaaagtccctactaaccctgtt

SEQ ID NO: 641220 - DNA, 120 bp, Artificial Sequence
  ENSG00000181722_79 (sequence is synthesized)
ggatgcccagctgggtataaaagtccctactaaccctgtttcaaattcagaggtttctttggtttagaatgcctcaatgagattttgatacatccaagagagaaaaaaaaaaaaaaaaaa

SEQ ID NO: 641221 - DNA, 120 bp, Artificial Sequence
  ENSG00000181722_80 (sequence is synthesized)
cagttgtttttacccagcaaactcattgcaatttatatgtagattctaataatgaaagagtcttaacccatccagtatgtcaccgctgctgtccaaaatgtctataaatgagtatacatt

SEQ ID NO: 641222 - DNA, 120 bp, Artificial Sequence
  ENSG00000181722_81 (sequence is synthesized)
atttatacatgtgcacacacagtgtgagcttccctcagcacaaaactgtttcacattcatattgcccagtgacaacaagatacatttttgaacttctggttagaagtcgaaggtctgaca

SEQ ID NO: 641223 - DNA, 120 bp, Artificial Sequence
  ENSG00000181722_82 (sequence is synthesized)
tatctcacgtatctgcttatgctttgttgccttagttgggtgcatcagtatctgtgatgagactttagggcattctgaaggagcccaaccatcagtaatttctatgtatccgtttcatga

SEQ ID NO: 641224 - DNA, 120 bp, Artificial Sequence
  ENSG00000181722_83 (sequence is synthesized)
gaaacttgaatatgcttatgtggagtagagtgcatttaacaaactctacagttctattggatttattgacatgtgtgcacatgtgtgtgtttgtgtatatacttattgtcatctggaagt

SEQ ID NO: 641225 - DNA, 120 bp, Artificial Sequence
  ENSG00000181722_84 (sequence is synthesized)
gtgtgtgccccccaaaggaagcacacacaggcagaggtcctcgtgcatagatacagttgcctcttcccaccattgtgtttaagacttgtggctcccttcccaggaagcagtcacctgccc

SEQ ID NO: 641226 - DNA, 120 bp, Artificial Sequence
  ENSG00000181722_85 (sequence is synthesized)
actctgttgctttttgtaatgtttcagaattgggagaaacaaatgcagcttgttgaatccacagcaaacccacagggacaggctgttttcctccataataaggtataacagaagtcttca

SEQ ID NO: 641227 - DNA, 120 bp, Artificial Sequence
  ENSG00000181722_86 (sequence is synthesized)
actggtgagcagacaagagggagcagcagtccagggcgtctccccaggtctcctggaggtggcaggggtggggaccaatgccaggcaggcaaagcccacacaaactttggcctgagccat

SEQ ID NO: 641228 - DNA, 84 bp, Artificial Sequence
  ENSG00000181722_87 (sequence is synthesized)
ccaggcaggcaaagcccacacaaactttggcctgagccatcccatagctcaaaggtcttcattcctttcctctatgcaatgcag

SEQ ID NO: 641229 - DNA, 120 bp, Artificial Sequence
  ENSG00000181722_88 (sequence is synthesized)
tactcacaagatatcatcgtaattcacaaactgtgtctcctgaaaccaatgtggcctttgccaaagtctttccaggagtgggttgtttaccatgtctagcaaaccaatagactgttgggg

SEQ ID NO: 641230 - DNA, 120 bp, Artificial Sequence
  ENSG00000181722_89 (sequence is synthesized)
ggaatgttttttggtaatctgtaggaattgattgctcttgcccatctcaagcattgaagtagaatgccactctagtataatatactgaatgaatggactctgagggtttggtggcctgga

SEQ ID NO: 641231 - DNA, 120 bp, Artificial Sequence
  ENSG00000181722_90 (sequence is synthesized)
attcaggattcagttttctcactcccatgcccttcttttactagatggtttgttattttttatgatttgtacattatttctgttttacagaagtcagaggacattttctttcctcttcta

SEQ ID NO: 641232 - DNA, 120 bp, Artificial Sequence
  ENSG00000181722_91 (sequence is synthesized)
ttctggtgacttttccccttcccctgttaagtaaggctacttacagttgcaacttttttgtcgttattactttttaaaatgtatattgtctttctatatccaaaagaagtctgtaactgt

SEQ ID NO: 641233 - DNA, 120 bp, Artificial Sequence
  ENSG00000181722_92 (sequence is synthesized)
aaccataggtatttctttttactggaaaaacaattagttgtttcggttttattttttcctttaattaacagtactagtgactttgtgaaagaatatgagttactatttaggtatgcttac

SEQ ID NO: 641234 - DNA, 120 bp, Artificial Sequence
  ENSG00000181722_93 (sequence is synthesized)
ttaactacaatacactacattgcagtatttctgaaacctaggacatacacattatatataacaactctatattgaaatatatattacattatattcattttaacttttgaatctgcctat

SEQ ID NO: 641235 - DNA, 120 bp, Artificial Sequence
  ENSG00000181722_94 (sequence is synthesized)
gatcatgagttgattgaaatattatgtctttgcttatatcacccatcaccaacctgctgcagttaatctggtgcatctagtaataatcattagtgctctaatttgctttttatattatca

SEQ ID NO: 641236 - DNA, 120 bp, Artificial Sequence
  ENSG00000181722_95 (sequence is synthesized)
gcttcagtattgtctttagaggattttagaattttttaaagctcagacttagcaaatgtaggaaagtgaaaactttttttgaaacttttttgttggtgtgactaatacaaagaggttcat

SEQ ID NO: 641237 - DNA, 120 bp, Artificial Sequence
  ENSG00000181722_96 (sequence is synthesized)
attcaaagtgatcttgtttagctgacccactcaatatctgaagaacaaaagaggtgcatatgaatgtatctgtgattttcccctgtaggactgtcactgtctatatttgcttttaaaaat

SEQ ID NO: 641238 - DNA, 120 bp, Artificial Sequence
  ENSG00000181722_97 (sequence is synthesized)
atgaccaaggggctacttaagtgccacatgatctgaccaacaataacaggctgcgtttcaaagggccagtcttctgaaaagcgtaagacagtgaattacctagttgtccccactgtattc

SEQ ID NO: 641239 - DNA, 120 bp, Artificial Sequence
  ENSG00000181722_98 (sequence is synthesized)
tcaaacattcattttaatactggatctttacactttcttttttcaatacgcttagaattattttaactagtcttcaacctttccctggaggcagcttggcaatatagtgttcattttcct

SEQ ID NO: 641240 - DNA, 120 bp, Artificial Sequence
  ENSG00000181722_99 (sequence is synthesized)
ttttttttttttttttttttttttccaaaaaaagtaaaaccagagtttcaggaactctttatccacagaggctaatagaaatagaatttggaaatatctatctgagacatttttaaatct

SEQ ID NO: 641241 - DNA, 120 bp, Artificial Sequence
  ENSG00000181722_100 (sequence is synthesized)
atttttaaatctgaggaatccgtaaaatggtggctcttgggtatccagccctcaggatctccatttacctgttaaagtgaggatttggtgcctttcttctttagttgggccatcaagaaa

SEQ ID NO: 641242 - DNA, 120 bp, Artificial Sequence
  ENSG00000181722_101 (sequence is synthesized)
acttcagaaatcaggcattctgtcttcctatacaataaatattttcagatcatattttcagataagagtcttcagcttccctcagctattcaacccaatgcatggaaagcctcagttgaa

SEQ ID NO: 641243 - DNA, 120 bp, Artificial Sequence
  ENSG00000181722_102 (sequence is synthesized)
taaacttttccaccatcccaggtgcctgaaactagtgtccttcttcacttctacattcaggacaaaatgaagtcaggtttttaaaacctcagtataaaagaccccctcacactggtccaa

SEQ ID NO: 641244 - DNA, 120 bp, Artificial Sequence
  ENSG00000181722_103 (sequence is synthesized)
tatgaagacttctcagcgtgaacactggggaattccttcctttcatctttcctaatagattgttgttttctaatcccatcccattctgctgtacctctccagcaagtcccttttcacctt

SEQ ID NO: 641245 - DNA, 120 bp, Artificial Sequence
  ENSG00000181722_104 (sequence is synthesized)
agccaagctccctgcaatgctcttcagttgtgaagccttgtattcactaaggaactacgtactcttagtctgctttgaaagggctaatgtctagtgtaatggcaaaattaccaatctgtt

SEQ ID NO: 641246 - DNA, 120 bp, Artificial Sequence
  ENSG00000181722_105 (sequence is synthesized)
ctccaaagtgttccagcagatatatttctactagacaaacataattgtgaattgactgttagtgaggctgtttcttctctaatgatcacataatatccaaattatatcaacttcattatt

SEQ ID NO: 641247 - DNA, 120 bp, Artificial Sequence
  ENSG00000181722_106 (sequence is synthesized)
tccctctttccttttcctaaccctttccctttatttcttgtttctcttgaagactacttcaaattacctatttgtcttcattactgcccccaaaactctaataattgtgacccctaactg

SEQ ID NO: 641248 - DNA, 120 bp, Artificial Sequence
  ENSG00000181722_107 (sequence is synthesized)
ttcatttctcttcctttctccaccccattctgaacatccttctttaagttttatttaatgaaagaacactaaagtgagtgagttcataaacttgagactcgtaggcagagtgaagcatgt

SEQ ID NO: 641249 - DNA, 120 bp, Artificial Sequence
  ENSG00000181722_108 (sequence is synthesized)
cttcattttagcttcagagtttaaaagttatcaatattcttttgagagtgggaggacctgagtcacagttttaaatgtcaactgtactagctgaggtcattaattccccttaccttcacg

SEQ ID NO: 641250 - DNA, 120 bp, Artificial Sequence
  ENSG00000181722_109 (sequence is synthesized)
tttggccaaaaatgaagagaaaaatattttctgttttttttttaaataccacagtgttcaggttcttcatatgagtaaatcacttttgacggagaaaaaaagaatcattaatgttgactg

SEQ ID NO: 641251 - DNA, 120 bp, Artificial Sequence
  ENSG00000181722_110 (sequence is synthesized)
tttccactagtcaaattacttgtttatcagactttagattataggaatctaaagaaaagagtaacatttcaaaataattttgataactgttcaagccttagtgagctcttctcaaacaag

SEQ ID NO: 641252 - DNA, 120 bp, Artificial Sequence
  ENSG00000181722_111 (sequence is synthesized)
aaaagccacatccacttgaacacattgtaggaaaaattaggaagagtttttttatttattgcctttttgaaaaaaaaatcattgatttgtttagaactttgagcagtaacttactaatgg

SEQ ID NO: 641253 - DNA, 120 bp, Artificial Sequence
  ENSG00000181722_112 (sequence is synthesized)
atgaaaagatccataaagttttgaaagtgtctgtttttgcaaccagagattgcctaaacataaacttaatatatacttaaataaaataataacagagctaaatggatacctaaagagcca

SEQ ID NO: 641254 - DNA, 120 bp, Artificial Sequence
  ENSG00000181722_113 (sequence is synthesized)
tgcactccccagcacctaaatacgccccatataatttggttgtcatgctagatctccctgcagtggattacaactgtctggtcaccagagcattgcccaaaagactgactgataccattc

SEQ ID NO: 641255 - DNA, 120 bp, Artificial Sequence
  ENSG00000181722_114 (sequence is synthesized)
tgggtgtatccttttcaggatgcttataatatcacattcacaacaacttcgtaacacagtctttcctgacttctggtccaatattcttgccatgataccacatcgcctctcagctttaat

SEQ ID NO: 641256 - DNA, 120 bp, Artificial Sequence
  ENSG00000181722_115 (sequence is synthesized)
gaagacaagtcctgtgacatttagagtactatgtggttttgagtgcataggcggtatgctttcagttcttgctttaccctttgacaaaaagaatcaacatttaatatcagaaatgtattt

SEQ ID NO: 641257 - DNA, 120 bp, Artificial Sequence
  ENSG00000181722_116 (sequence is synthesized)
ttatttgacttgagatttgacccagcttttatcttaatcaaaccagtttataacatcaactcacaccatagagaacaatgaaataaatagcagttttgaaagcctttatgaggcatgcat

SEQ ID NO: 641258 - DNA, 120 bp, Artificial Sequence
  ENSG00000181722_117 (sequence is synthesized)
ctagtaggaaaacaacatctcttaaaggcaatatttacattgcttaggactatgatcttcacttggaatgttctcccaatcaatcctatatccttctttttctttgtccattctaactcc

SEQ ID NO: 641259 - DNA, 120 bp, Artificial Sequence
  ENSG00000181722_118 (sequence is synthesized)
tggtattttttttttcttaaagtactctttatctaaagtaatcctctccttaggcactggcttccaaaggaagaaagactcttttaaatcctaaaatgctgtcatttaaagtataatatg

SEQ ID NO: 641260 - DNA, 120 bp, Artificial Sequence
  ENSG00000181722_119 (sequence is synthesized)
gaggaggagaggctctggttctgatagatcttacttggtcctcaatctgggatgccttcttgatgctgttctttctagttccccaagaagtattccaaccccaagacccagaatttctca

SEQ ID NO: 641261 - DNA, 120 bp, Artificial Sequence
  ENSG00000181722_120 (sequence is synthesized)
ccacaacctctgtgttagtctcagattaatgtctaaatcctgtttgatattctagagactccagggtgtgaatttattattgcttatgagcctcctgtctttccaagctgacacctgtca

SEQ ID NO: 641262 - DNA, 120 bp, Artificial Sequence
  ENSG00000181722_121 (sequence is synthesized)
ggagcatcaatagccctaacagtaactaatgcatcaaaataatagacagaaacactatagtatatattcgtgaggataggaagatttttttttcttcttttctccaggaaaagcttgctt

SEQ ID NO: 641263 - DNA, 120 bp, Artificial Sequence
  ENSG00000181722_122 (sequence is synthesized)
tgctcccctctccctctgcaacacacacacatacaatgcatttcagaaagtctgcatcttattttacagatatgtagctctagaatttacaaatatagcttaggaaatgttctgagattg

SEQ ID NO: 641264 - DNA, 120 bp, Artificial Sequence
  ENSG00000181722_123 (sequence is synthesized)
aggctggtagcaaacaagtttattttctgcactggacttcaggataagtgtgcatagatgcaattccttcaaagaaagtgaaacatggtagagcaaagggataatactttcacacattca

SEQ ID NO: 641265 - DNA, 120 bp, Artificial Sequence
  ENSG00000181722_124 (sequence is synthesized)
aacagttgtttgctatctataaaccttgatttaagcataattattactttttagaaatctgaaactggaggaatgtgtattttagtaaggtttttttgttgatttatttgtttccctttc

SEQ ID NO: 641266 - DNA, 120 bp, Artificial Sequence
  ENSG00000181722_125 (sequence is synthesized)
tttcttctcaagatagtaaaggatttttatttcttaatttgttactgtccatggacagtcaaataactgctcacccttactgtattattttccccttagaaagaaaagccttccatccta

SEQ ID NO: 641267 - DNA, 120 bp, Artificial Sequence
  ENSG00000181722_126 (sequence is synthesized)
ccatgaaggaatttttcctccaaaaaatcttatcttccatttcaaatagcactcatgagcttttaagagagaaattctctctttactttgaggatagaacagttaaaacaaaaacctgtt

SEQ ID NO: 641268 - DNA, 120 bp, Artificial Sequence
  ENSG00000181722_127 (sequence is synthesized)
ccttgagaaagaaaccgtatttacctaaactaacaggtctggggccaaagaatagatttttttattgattgcagatgaagaccatgcattttgtactacaaatccttattgcctcctcaa

SEQ ID NO: 641269 - DNA, 120 bp, Artificial Sequence
  ENSG00000181722_128 (sequence is synthesized)
atcctttttggaataaggctgggaataaattagtttaattaaattctttgggtatttctaattaatatctactgcaagatacccaggaaagaaaaggaaggggtgctgccgaaatgccaa

SEQ ID NO: 641270 - DNA, 120 bp, Artificial Sequence
  ENSG00000181722_129 (sequence is synthesized)
aatcaattgatctgttgatttttatcattgtagttgttgcttttctagccatttcaagactgtatgtgttcatgaagtcttaagtagagaaacacctgtttccccattgcttctctctcc

SEQ ID NO: 641271 - DNA, 120 bp, Artificial Sequence
  ENSG00000181722_130 (sequence is synthesized)
ttccccacacccctgcacctgccccaaccccaggcactagagggaacagtaacagagggagattggcactgcattgccagtacttcacccatctatacccctccaccacaaaagaaggaa

SEQ ID NO: 641272 - DNA, 120 bp, Artificial Sequence
  ENSG00000181722_131 (sequence is synthesized)
aaaacaaattagaaactatttttttaaaaaaggaaattgtagtacttcatttgaaagcatactgttttcaactcaactcgattaacagatagcctgacaacgtttttgtaacctttcttt

SEQ ID NO: 641273 - DNA, 120 bp, Artificial Sequence
  ENSG00000181722_132 (sequence is synthesized)
tgtgctataattgacattcttggctcaatctttaaaataattgcaatttcaattaagtgaacagagaaaaacaaagagagggaacaggacaatgtgatgggaccaaatttgatacaggtc

SEQ ID NO: 641274 - DNA, 120 bp, Artificial Sequence
  ENSG00000181722_133 (sequence is synthesized)
tggattcctaaagccagttgtcaaggttaccggagaaagttagcactactcaccccttgttgttcttgcctatctctcattattacaattcaaagaattagtaagttaactatacttctt

SEQ ID NO: 641275 - DNA, 120 bp, Artificial Sequence
  ENSG00000181722_134 (sequence is synthesized)
tgtgattaaagatttctcttcatgctgccaaacacttctagagaaattgtagaaactcctgacttctatacctaatgtgctatccgggcccgagaggagtgtacagagagatcactgaaa

SEQ ID NO: 641276 - DNA, 120 bp, Artificial Sequence
  ENSG00000181722_135 (sequence is synthesized)
ataaaataatagttcaaatttgagataagattttcctgtagttcaaagtgctttatgcatgttcacaactaggggaatctttgaaaacaaaggctagttactctgctcttgctctccttg

SEQ ID NO: 641277 - DNA, 120 bp, Artificial Sequence
  ENSG00000181722_136 (sequence is synthesized)
ggacaaactttaatttggaaccagctgtagatttacaggagaaaattctcaaaggtattttcagctgctaaacttcttctttaggcccgttgatttgaacctcagttttcctgaggagcc

SEQ ID NO: 641278 - DNA, 120 bp, Artificial Sequence
  ENSG00000181722_137 (sequence is synthesized)
tattgagatataaattaagggtaatttgcatatatctaattaaaattgttcctacactattgttgaaagaattatggttttcagagtagatgaaagcagggtgtcttagtaatcttcatc

SEQ ID NO: 641279 - DNA, 120 bp, Artificial Sequence
  ENSG00000181722_138 (sequence is synthesized)
atggcaaacaaaggtgagaagctgatatgatagagaaaatctatggtaacttgatattttaaggtaatttgagtgtgctgaccccactatgcttaattcctttcccacaatctattttaa

SEQ ID NO: 641280 - DNA, 120 bp, Artificial Sequence
  ENSG00000181722_139 (sequence is synthesized)
actacactttgattctcttgagacttacagcatgcatgtgtgggtatgagcagacaagcagacttacctttggagggtgaagacccagacaaactgaagaaacggattcctgaggatgat

SEQ ID NO: 641281 - DNA, 120 bp, Artificial Sequence
  ENSG00000181722_140 (sequence is synthesized)
caaatacaaatcatttttccagaatcactcaatattgccacatcccaaactaattctagactaatctttagaaagaagtaagctccttaagaaatcctactatgaatgttttttcttctt

SEQ ID NO: 641282 - DNA, 120 bp, Artificial Sequence
  ENSG00000181722_141 (sequence is synthesized)
atggaataacacaagaagaggtacaatgcagactcttaattttgctgtaataattcacttttgtatttaataattgtacttctgtgtgagtgtgtcactgagctatttgtaccaattttc

SEQ ID NO: 641283 - DNA, 120 bp, Artificial Sequence
  ENSG00000181722_142 (sequence is synthesized)
aattgatcattctgagaggggccttgagaatttctgtgtatgtgtatgtatatctgtatttatgtgtagtcagaaaaaaaaaagaataggagactaatgaggtgagggaaaaagtgatca

SEQ ID NO: 641284 - DNA, 120 bp, Artificial Sequence
  ENSG00000181722_143 (sequence is synthesized)
atgtagaaaagtgagtgctcctagtgtacctatttatgttatgttaggtggctgctgcctgtagcccttgaggaatagctgattgcactattcaaaaataaaagcccagcactgttaaat

SEQ ID NO: 641285 - DNA, 120 bp, Artificial Sequence
  ENSG00000181722_144 (sequence is synthesized)
ttaggaccgtgtttcaagaaacaggaaagctttatctttttctgaacccattccccttagcattagagccatctgacatgatgaaaactattaagtaaaaaccactactgacctttacat

SEQ ID NO: 641286 - DNA, 120 bp, Artificial Sequence
  ENSG00000181722_145 (sequence is synthesized)
taaatagctgttttcctcttctaaataatacccttgattttaactagactacttccttttattttctgcctattggcttaatgttttacagaaaatacataggtgcatgctagtttctct

SEQ ID NO: 641287 - DNA, 120 bp, Artificial Sequence
  ENSG00000181722_146 (sequence is synthesized)
actttgagctgaaacaaacaggagcaacaaaagagatgactcacataagtgtgagatagactgaatttcccaccttcgtagcactggtaacctttgtaagagctgtttagagttgagctt

SEQ ID NO: 641288 - DNA, 120 bp, Artificial Sequence
  ENSG00000181722_147 (sequence is synthesized)
tgggttataatagggcttttttttgcactaaatatgactgcactgcattgcactactgaaatgtacttacttgtgctgggagagagtgtgttacgtatgggaaagaaaaaggcaaattat

SEQ ID NO: 641289 - DNA, 120 bp, Artificial Sequence
  ENSG00000181722_148 (sequence is synthesized)
ggaagtaggagcatcactaaaatgcagagttattttcatcatgcttgatcttagcagggttggcgagaatctgtggaatctctgtcaactcttgatcaggcctaggaaccaccatgctga

SEQ ID NO: 641290 - DNA, 120 bp, Artificial Sequence
  ENSG00000181722_149 (sequence is synthesized)
taggatctgttttcttactgtaaagaagctgagttagtacagcaattaagaacatttaagaaaaagtttacccaatcttgtttctgactgagctctcagtaagagttttaacagtgaaga

SEQ ID NO: 641291 - DNA, 120 bp, Artificial Sequence
  ENSG00000181722_150 (sequence is synthesized)
agccaattgatatgatgtagaagtctttgccttggcctcctccacaaagccccttgcttgtgcacattttagtgtggcagagggcagtaggatgtgctcctttcaaaaacacatagcctt

SEQ ID NO: 641292 - DNA, 120 bp, Artificial Sequence
  ENSG00000181722_151 (sequence is synthesized)
gtccatattggaattacttttcagcctgattatgcttctccatccctgggtgaaacctagatcaggctaaccaaagaggaaggctatgcatgtggtaaagtcctttaagatgacagatag

SEQ ID NO: 641293 - DNA, 120 bp, Artificial Sequence
  ENSG00000181722_152 (sequence is synthesized)
ggaacagtgcaataaacactgaaaaccagtgaagtgaaaggtttattttgaaacaagctaggccaacttggacattggaggatggattagaacatactagctgctccatcatagactatc

SEQ ID NO: 641294 - DNA, 120 bp, Artificial Sequence
  ENSG00000181722_153 (sequence is synthesized)
cttactaagcagaagaccttaatagtgcctaaaagtttagttttgaaattggttttttcctaacttttctttgttaaatttatttttattatcttttttaatcttagaagtaatcagagt

SEQ ID NO: 641295 - DNA, 120 bp, Artificial Sequence
  ENSG00000181722_154 (sequence is synthesized)
ttgacagctctttagtaactgttaataaaagaatctttcatcacaggataagcaatagattgtgtgggaaataataacacaagagtaaagatgctgaaggactcttctggaactcaaagt

SEQ ID NO: 641296 - DNA, 120 bp, Artificial Sequence
  ENSG00000181722_155 (sequence is synthesized)
gacagttttgaaggttctggcacagtaggaaaggatcacaacccatataaatggctaatgttgaatttctctgaacactgtcacatatggggcatcaatttggaaaattctcaattgagg

SEQ ID NO: 641297 - DNA, 120 bp, Artificial Sequence
  ENSG00000181722_156 (sequence is synthesized)
ccccttccctaagattacaacattgataacctgtctttttctctctcttctttactatccgtccaagtctactattccaagtttaaatattgttcagaaagttgtcagccttgttagtca

SEQ ID NO: 641298 - DNA, 120 bp, Artificial Sequence
  ENSG00000181722_157 (sequence is synthesized)
gaaaaactccatttagagccatccaaactagcataagaaattccttaagcactcaaagcattatctctgttttaagtaagaaactaaatccagagcttttaacaggtacttagaaataag

SEQ ID NO: 641299 - DNA, 120 bp, Artificial Sequence
  ENSG00000181722_158 (sequence is synthesized)
tattgggtaatcactaagaggacattgactgcaccaaaccaaagctatagaaagaaatgattgactttttaaaatatattcacattaactgtcctaggatacttctcttgaggctttgga

SEQ ID NO: 641300 - DNA, 120 bp, Artificial Sequence
  ENSG00000181722_159 (sequence is synthesized)
aaacttcttccttgaaatttgcatatccactccagttctgtcaccaaagattttaatcttcagatcgcaatttcctctctcccagaaaaaagtactacaacaggctcaagggatatgctt

SEQ ID NO: 641301 - DNA, 120 bp, Artificial Sequence
  ENSG00000181722_160 (sequence is synthesized)
tggtggtcaagggattacactatggttttccttctgttcacaatggtatttacaggagaccttgtcatcagaggacgtactgaactatctttatgactttggatttgatcagaggtttaa

SEQ ID NO: 641302 - DNA, 120 bp, Artificial Sequence
  ENSG00000181722_161 (sequence is synthesized)
aaaatagaaaaaaataaacaacactacttgacactgtaaatgatctttaatagagtcatgacctggagactgatggagagaaagaaacttccatggaagagagtgagctaaatcatttag

SEQ ID NO: 641303 - DNA, 120 bp, Artificial Sequence
  ENSG00000181722_162 (sequence is synthesized)
aaccaaacaaaggtcactggtgaaacatagggcagcatgtacacagtgcagatcagggttctgtatggccagagccaacagcagtgaccggtgggagagtcagacaactggccaatgaat

SEQ ID NO: 641304 - DNA, 120 bp, Artificial Sequence
  ENSG00000181722_163 (sequence is synthesized)
tcaagtgttgaaaaagccacagtctggattttgttgtgatttctggagtggttgaaacgcccatgcccatggcaaggaaaatgcttggaggctgatctgttgtgatagtgcctttcttgt

SEQ ID NO: 641305 - DNA, 120 bp, Artificial Sequence
  ENSG00000181722_164 (sequence is synthesized)
cgtagtgagtactagattaataatttattcagttacgcttttctgtaccattgcctccagtcttctgaggaggtttgaagggacagtatccacttaggatgaagggacaggatattgctc

SEQ ID NO: 641306 - DNA, 120 bp, Artificial Sequence
  ENSG00000181722_165 (sequence is synthesized)
tggaatgctgtgatttgatgatatttgcactagattctaaactctcctttaaactggagcaactgactgagagaaaaaccaaggacagctcaaagttaaaagaaaccaaaagcagtattt

SEQ ID NO: 641307 - DNA, 120 bp, Artificial Sequence
  ENSG00000181722_166 (sequence is synthesized)
tctgacagataccatttctttttctccttctttttttcctggaagaaaacttcacactagttggctaccgagctcaactcttaccagttctttctctttattttttgtttccatatggaa

SEQ ID NO: 641308 - DNA, 120 bp, Artificial Sequence
  ENSG00000181722_167 (sequence is synthesized)
ccatctgtgtgaattagtcatcagttaggtatagttaacgtaaagagcccctgccattgaaactttgcacaccttctctgctttattgaaggcaagggccagtgggcagtgatagcaggg

SEQ ID NO: 641309 - DNA, 120 bp, Artificial Sequence
  ENSG00000181722_168 (sequence is synthesized)
gagggaccctccagaaccacccagccctccaggaggccaataagcatggatatcatgtcaggagctgagctgacatatatttactcagaggacattggggtctgtagctaatcctaaaga

SEQ ID NO: 641310 - DNA, 120 bp, Artificial Sequence
  ENSG00000181722_169 (sequence is synthesized)
atgctccgcaacagaaggaaaccaatgcattgtagaaaacaaagggagatggtgcccgaagtctgcctgtttctcttctcttttctttcccatctcaccaccatgtcctctctaacagaa

SEQ ID NO: 641311 - DNA, 120 bp, Artificial Sequence
  ENSG00000181722_170 (sequence is synthesized)
ttatatttcatctcatatattatatgttactagaaaagtcatttggttccttggtttctctctttatcagtgggctggaaattcctccaaattaaatataaataccagtagcagctcccc

SEQ ID NO: 641312 - DNA, 120 bp, Artificial Sequence
  ENSG00000181722_171 (sequence is synthesized)
tgtgtccagccagtttctcaaatgctgtccacctggtcttactgtccacctaacataacttggaggctttggctggctcaaccacctgttcactttattttgttttcatttccatttgaa

SEQ ID NO: 641313 - DNA, 120 bp, Artificial Sequence
  ENSG00000181722_172 (sequence is synthesized)
cttgaagtgaggctatggaaaggtggaaatcatgggcaaggtttggaggctgcaattctagggcatagcttgtcaggagtttatattatctaaaatatatctttctataccccttttcat

SEQ ID NO: 641314 - DNA, 120 bp, Artificial Sequence
  ENSG00000181722_173 (sequence is synthesized)
tttaatctgttgccctgattataatttctttatatttgtggttatttttataagaatagagtccatttgctatgtctatttgagtactttttttctattgtccccacatggatgcagtac

SEQ ID NO: 641315 - DNA, 120 bp, Artificial Sequence
  ENSG00000181722_174 (sequence is synthesized)
tgcagtaccaacctgttaatgaaatatctttttattatattattaatatgtaattctactgtagaccaaaaatataaaaacaaatttgttcattttaaagatataaagaactagggagta

SEQ ID NO: 641316 - DNA, 120 bp, Artificial Sequence
  ENSG00000181722_175 (sequence is synthesized)
aaagttgaaggaaaagacagaagagcagtggttaactatgttgagttagaaatctaagagtagccttacctgttttttaaccagtgcttgccaatcataccatagttggaattatgtaat

SEQ ID NO: 641317 - DNA, 120 bp, Artificial Sequence
  ENSG00000181722_176 (sequence is synthesized)
cttggctccttcatacttatgttctataattcttgtttgtctatttgttttctttgatataattgaggttgcacatcatgctattcttggcaatgcctgattctattgtattgtactttt

SEQ ID NO: 641318 - DNA, 120 bp, Artificial Sequence
  ENSG00000181722_177 (sequence is synthesized)
gttagtcatttcctttagaaagatggggggaaacgtttatttcttcttttaatttaaaatttgtttaatgcactggaaataaaattggacatatttcactgtttaaaaaatcagaaacaa

SEQ ID NO: 641319 - DNA, 120 bp, Artificial Sequence
  ENSG00000181722_178 (sequence is synthesized)
aacaaagcaaaaccatgagggaaaaaaacagcaaataagcaacaggggaaaacagctatgaaaaaaatatatttgtactgaatacacatacaaactacatcccacatgaaagattaatat

SEQ ID NO: 641320 - DNA, 120 bp, Artificial Sequence
  ENSG00000181722_179 (sequence is synthesized)
catcaagtaagaaaaatacatagtttaaactacaatgctgaaaatataaaaggaacctggtagttcaatggggatggagaaaacagagcattcctctgagagcagagatcttgtcattat

SEQ ID NO: 641321 - DNA, 120 bp, Artificial Sequence
  ENSG00000181722_180 (sequence is synthesized)
tgcaattaatgcccaaacaggttaaatgtggaagaaagtatggaggaaataaccccagccttcctcataccactggatttccacatcaccttttaacttatgcttgagctcccttttgag

SEQ ID NO: 641322 - DNA, 120 bp, Artificial Sequence
  ENSG00000181722_181 (sequence is synthesized)
tgagaaaaaatatttaaaaacaaattggctatgtaacaaatttgtgtgtgtgtgtgtatatatatatgtatatgcttatatatatatatatatgtatatgcttgagaaagtggtttttca

SEQ ID NO: 641323 - DNA, 120 bp, Artificial Sequence
  ENSG00000181722_182 (sequence is synthesized)
gtatgtgtacagtacacacatggacacgcttcagtcctctgacttcccatgtgctacctcatgtgtttctcttctcatgaggatttgcaatggatagttgtacaacctggggactgtcag

SEQ ID NO: 641324 - DNA, 120 bp, Artificial Sequence
  ENSG00000181722_183 (sequence is synthesized)
tgactcattggtatcagcatatgctaaagaagctcttgaatccaatcttgaaacctgatctcccttcgtcaacattccccaataccaaactggcccgtttacccatacaaatgcacagta

SEQ ID NO: 641325 - DNA, 120 bp, Artificial Sequence
  ENSG00000181722_184 (sequence is synthesized)
aagggaagaacagcggtatttttcctagccaactgactctatcatttgtttaatgtttgctggtttttttctggttttgttttgttttagagcaggggtgggagtggctgtaacttcaca

SEQ ID NO: 641326 - DNA, 120 bp, Artificial Sequence
  ENSG00000181722_185 (sequence is synthesized)
atcctaatacagtaaatgttttgcatcttccatgttttatgcaaaaacagacatttaaatcaataaataattgtgccctagactgaaggttaatgtttaggagaggaaaaaaattgttgg

SEQ ID NO: 641327 - DNA, 120 bp, Artificial Sequence
  ENSG00000181722_186 (sequence is synthesized)
aattttttctacatttttttgtgaagaatcttttttggaaaggaaggatacatatttttgttgtgtaatattttctatttttgaatgcattttattggtacaagactgtttttttggtga

SEQ ID NO: 641328 - DNA, 120 bp, Artificial Sequence
  ENSG00000181722_187 (sequence is synthesized)
agacattatttaaaaaaaaaaaaagaaaaaaactaatcgaaaagtttgcccttaaggatatgctgcagttttgaggttaaaaaaaaattactgattcaagatgcgtgttaaaagttggga

SEQ ID NO: 641329 - DNA, 120 bp, Artificial Sequence
  ENSG00000181722_188 (sequence is synthesized)
ttatattgttgttttttgtaattgttacaagaagaagtttgtacccactgctgtttattttgtttcagatgagtaagtaaagggattgttcttgttttattctttttttagagaaaaaaa

SEQ ID NO: 641330 - DNA, 120 bp, Artificial Sequence
  ENSG00000181722_189 (sequence is synthesized)
gctatttatgaaatgtcaaaaacactggactgtgagtttaagtgtggaagcattttaccaccctgtgtcttcaaccaattatgggaaaccccttttctcttccccctaccccctgcctta

SEQ ID NO: 641331 - DNA, 120 bp, Artificial Sequence
  ENSG00000181722_190 (sequence is synthesized)
gccttgccaaatgagaaaaatataacagctgtcagattatcaaagccaccgaagccctgctttaatttttatggtttgaaaaagttggaaaaccaaagttaaatttgtttctgaaatcct

SEQ ID NO: 641332 - DNA, 120 bp, Artificial Sequence
  ENSG00000181722_191 (sequence is synthesized)
gctgtgcgttgcccttttttgtatgacacagccgggctctgcctctctatctcaaatcattgccttcttagggactgggggccaacctgatgcaaagagaggcataaaggtggtgagcct

SEQ ID NO: 641333 - DNA, 120 bp, Artificial Sequence
  ENSG00000181722_192 (sequence is synthesized)
gagagttgaggtctcacgaagtaaaatgtgagtgggacttcaccctctcagtgggcaaccacactttcccatcctgagatgaggctgccaagagagcacactgctaacactgcctgagga

SEQ ID NO: 641334 - DNA, 120 bp, Artificial Sequence
  ENSG00000181722_193 (sequence is synthesized)
gagcacgcctcctgtctccttcaccctctgcttctgagaccctcctgttactgttatcatcgttccctagcctggctctgcctttctcagcagcccacattccatggatgggagcagggg

SEQ ID NO: 641335 - DNA, 120 bp, Artificial Sequence
  ENSG00000181722_194 (sequence is synthesized)
ggcagggacccaaaggagggaaatggctgtgggtggtgtgaaggccccccagccctcaggaaggtggggcaagagaccactgagcacaagggatcttgcccacctcctctttgactctgt

SEQ ID NO: 641336 - DNA, 120 bp, Artificial Sequence
  ENSG00000181722_195 (sequence is synthesized)
ggattatccatccatctgctcactgtgaagatggagaggcagtgccctaaggctgttcaatagcttttccatattttttcaacattgaaaaaataatttttaaaaactgtgattttttta

SEQ ID NO: 641337 - DNA, 120 bp, Artificial Sequence
  ENSG00000181722_196 (sequence is synthesized)
aaaaatcatttggctggagggaagggaaaagggaaacaccaaaagctgtaccatgatgaactggagatatttaactggggcactttccagaccaagacaaacaaattcctttctggactc

SEQ ID NO: 641338 - DNA, 120 bp, Artificial Sequence
  ENSG00000181722_197 (sequence is synthesized)
taaagcagccgaatcttgagactgtcaatgacagaaagctgaagagaggcctctatttcttcctttttcctttcttctgtctaaaaactctctcttgttccccttttccagcttcccttg

SEQ ID NO: 641339 - DNA, 120 bp, Artificial Sequence
  ENSG00000181722_198 (sequence is synthesized)
gactactgccccaatggccccttggactcgcgtttcatgtatgcgagcacacacacacacaaacttgcaaaataccgtttttcttaaggattgtgggaccgaataatatcacgtgccttc

SEQ ID NO: 641340 - DNA, 120 bp, Artificial Sequence
  ENSG00000181722_199 (sequence is synthesized)
atcttttccttttatagttagatgaacctcttcctctttacaatttttttaaaaagtgataggggaggttgatgtgttagtggaagatttgggcatcgtttgagaagtaacttttgttta

SEQ ID NO: 641341 - DNA, 120 bp, Artificial Sequence
  ENSG00000181722_200 (sequence is synthesized)
acacattccccctaaacattgaacacaaacatttcaaccccttcatgacactctttggacatttaaagcattgagtaaccatgtacatgacagcctaaatccgtttgatttcagagcatt

SEQ ID NO: 641342 - DNA, 120 bp, Artificial Sequence
  ENSG00000181722_201 (sequence is synthesized)
tcctgaacattgtatttcatagacttctctgattttttcaaaaatgaggtgagcaatggcaagcagccttgttctcccaatttggtgcttttgcttttggtgtggggtgggcatgggggg

SEQ ID NO: 641343 - DNA, 120 bp, Artificial Sequence
  ENSG00000181722_202 (sequence is synthesized)
ttgggggtggtgtgggtgtgtttagaaaaaagatgcattcctgaagatctctggtgctgaagggcctcgagttcctttcagagactgtatttgacacactttaggtacacacaaacgaat

SEQ ID NO: 641344 - DNA, 120 bp, Artificial Sequence
  ENSG00000181722_203 (sequence is synthesized)
ggtatcacatgcaatattttaatggagcaatgggagaggctctttgaaatggggtttgcatctttttgtaacattttgatttctctggtgccttattcctacttgatgctggcactcaca

SEQ ID NO: 641345 - DNA, 120 bp, Artificial Sequence
  ENSG00000181722_204 (sequence is synthesized)
tacccacaagaagctgacacagaagtcagccttaggcgtggggacatatgggtgatgtttgagcatgcaggggccatggggagtttggtgtcagttggtggagaagggactagatggcat

SEQ ID NO: 641346 - DNA, 120 bp, Artificial Sequence
  ENSG00000181722_205 (sequence is synthesized)
ctcttagccgaggccaacaggaactgcacaagtccattatagtcaaagttagcaattttgatacgtaaacacaatacttcattcttcctcatctgagctttccttccttcttccttttct

SEQ ID NO: 641347 - DNA, 120 bp, Artificial Sequence
  ENSG00000181722_206 (sequence is synthesized)
atctctaccttctcataaaggtgctgctgctgctgctaaggtgcccggagtccagaatgtccattaatcactcaggcacgagcctggcactgccacgtcagcccccagcatgaccaaacc

SEQ ID NO: 641348 - DNA, 120 bp, Artificial Sequence
  ENSG00000181722_207 (sequence is synthesized)
caggtttctcttgcttggggctgagaactgtcagatttttctcatcaaaaatgttttccaaggaatcagtggattacagtttttctgcattgaaaatgcactttaaaaaataaattaaag

SEQ ID NO: 641349 - DNA, 120 bp, Artificial Sequence
  ENSG00000181722_208 (sequence is synthesized)
ctccagactgtttaaaatatacagagggagcaggggaaagttaagcatgtgctagtgtctgaacccagttcagtttatctccagttgaaacgatatacactatattatgtataaatgtat

SEQ ID NO: 641350 - DNA, 120 bp, Artificial Sequence
  ENSG00000181722_209 (sequence is synthesized)
acacacttcctatatgtatccacatatatatagtgtatatattatacatgtataggtgtgtatatgtgcatatatacacacatgcacataacaaaatcagatgctcattacaaatccaga

SEQ ID NO: 641351 - DNA, 120 bp, Artificial Sequence
  ENSG00000181722_210 (sequence is synthesized)
tgctcattacaaaaccagatgctacacaaacagcagcagaggaaacaaggttggactcttgcaacagatcacaaaaaataaaaacagctacttgcagtgactttggtcatttctgtatgt

SEQ ID NO: 641352 - DNA, 120 bp, Artificial Sequence
  ENSG00000181722_211 (sequence is synthesized)
tcataaagaatggattgtaacaaggaaaaaaaggaacagtgttagtgaaaaaggaaaaatgggcgaaaccatcttgatccgatgcgaatgcagtaatgttctatataccatttcatcagt

SEQ ID NO: 641353 - DNA, 120 bp, Artificial Sequence
  ENSG00000181722_212 (sequence is synthesized)
tatttcttttagtcatgttgatttgatttcagtttctggctatgaaaaacatttttaaactcgtcacccacaacaaactgaacaaaactactacagtgaaagcccttttcagtgaaagat

SEQ ID NO: 641354 - DNA, 120 bp, Artificial Sequence
  ENSG00000181722_213 (sequence is synthesized)
tgaaagcccttttcagtgaaagatgtcagaaacctcaaaacctttggcctgactcagaactaccatgtgaaaatcagtactctcttaatgtttgaaataaaaactgaaaaaaaaaacaaa

SEQ ID NO: 641355 - DNA, 120 bp, Artificial Sequence
  ENSG00000181722_214 (sequence is synthesized)
accttaacgtggccatccatttgagaagtgggtgccacttttttctttgagcaccttattgatgtgtttgctatctgctgtctttctgttacctgttggctgaatggctagctgttaaca

SEQ ID NO: 641356 - DNA, 120 bp, Artificial Sequence
  ENSG00000181722_215 (sequence is synthesized)
tatacatgtgcacagaagagatatctgggcatgtatgttctcaatgaagtttactgtggtgactgctgaaaggtgaacccatttcctgattttcccgccgcagtgttgtgataagattcg

SEQ ID NO: 641357 - DNA, 120 bp, Artificial Sequence
  ENSG00000181722_216 (sequence is synthesized)
ttcgaagaaacctttttccctgcacagaaatgtttcttatcacattgtatcttagtatggaaaggaatatggtcccttttttgcaattgctactgtgtacacacacacacacacacacac

SEQ ID NO: 641358 - DNA, 120 bp, Artificial Sequence
  ENSG00000181722_217 (sequence is synthesized)
acacacacacactgtatgtttagacctaaaatacacacacccacgcacacactgtatgtttatgtgacctaaaacatacacacatgcacacacacatacatatccattcattcattcatt

SEQ ID NO: 641359 - DNA, 120 bp, Artificial Sequence
  ENSG00000181722_218 (sequence is synthesized)
caagtggtgtttccagtgtctgtgtgtcactgtttatgcagtttccatttcccagtgaattatgagtggagggcaacttttctaaccagattgtcttttcagaacaaagacctgggaatt

SEQ ID NO: 641360 - DNA, 120 bp, Artificial Sequence
  ENSG00000181722_219 (sequence is synthesized)
gaggaagagtttggaaagagggagaggcaaggaaagagagctttaaattgaaaggttaatttcctaagaggaacctgggctgaatgactgcagtgttataccctccaatctttgcaggtg

SEQ ID NO: 641361 - DNA, 120 bp, Artificial Sequence
  ENSG00000181722_220 (sequence is synthesized)
ggcatggaacactgcttgtatcactctgtgcacggtataaatccatatatccacaaaaacacacatccatccatcaacatatacatggtttgggatgagcaggtcaatagttttgagagg

SEQ ID NO: 641362 - DNA, 120 bp, Artificial Sequence
  ENSG00000181722_221 (sequence is synthesized)
gagtttgttcctttttttttctcattatactcttaaattgttgtcagttatcaaacaaacaaacagaaaaattgtttggaaaaaccttgcatacgccttttctatcaagtgctttaaaat

SEQ ID NO: 641363 - DNA, 120 bp, Artificial Sequence
  ENSG00000181722_222 (sequence is synthesized)
atagactaaatacacacatcctgccagttttttcttacagtgacagtatccttacctgccatttaatattagcctcgtatttttctcacgtatatttacctgtgacttgtatttgttatt

SEQ ID NO: 641364 - DNA, 120 bp, Artificial Sequence
  ENSG00000181722_223 (sequence is synthesized)
taaacaggaaaaaaaacattcaaaaaaagaaaaattaactgtagcgcttcattatactattatattattattattattgtgacattttggaatactgtgaagttttatctcttgcatata

SEQ ID NO: 641365 - DNA, 120 bp, Artificial Sequence
  ENSG00000181722_224 (sequence is synthesized)
ctttatacggaagtattacgccttaaaaatacgaaaataaattttacaaggtttctgttttgtgtggaagagtaattgatgttgctaagaatgatgtttgtttttttggggtttttgttg

SEQ ID NO: 641366 - DNA, 120 bp, Artificial Sequence
  ENSG00000181722_225 (sequence is synthesized)
ttttttttttaaatgttaccagcactttttttgtaagtttcactttccgaggtattgtacaagttcacactgtttgtgaagtttgaatatgaaggaataattaaaaaaaaaaaaactctt

SEQ ID NO: 641367 - DNA, 120 bp, Artificial Sequence
  ENSG00000181722_226 (sequence is synthesized)
ggaattttatctctgctcacagtctacattacaacattagttcattctgggcactttagcttccttgaatctccagttgatctcacacccatgcctatgatattcttctcctggttaatc

SEQ ID NO: 641368 - DNA, 120 bp, Artificial Sequence
  ENSG00000181722_227 (sequence is synthesized)
aagaattctctatttctgctccgtcatccatgccactacaaataaaaagaagtgttaagaattgcctttgggactctgaaggctgaagaattgatgaattgcaagtttgtgccccatagc

SEQ ID NO: 641369 - DNA, 120 bp, Artificial Sequence
  ENSG00000181722_228 (sequence is synthesized)
tgcacagcctatgtctaagcacagctcatcttcacaaactgaagtggatcttgatttctggaaatgtccaaataatgacaacaaccccatggaggtggatacatcagagtcagctggagg

SEQ ID NO: 641370 - DNA, 120 bp, Artificial Sequence
  ENSG00000181722_229 (sequence is synthesized)
atctagcctcccagcctcactgcattatttgtgaaaatggccagtgtgaggaattattaattaaagctaacaaatcaccctgacaagctgtgccctggcatggctgaaggttgattggcg

SEQ ID NO: 641371 - DNA, 120 bp, Artificial Sequence
  ENSG00000181722_230 (sequence is synthesized)
aaagtcttctcctttggagaaaagactttttgtgctcgtgacgcagtcagggacggattattgaatatgcaagttagaagaaaaatcacaggacaagcaaattgagtatttactggcaaa

SEQ ID NO: 641372 - DNA, 120 bp, Artificial Sequence
  ENSG00000181722_231 (sequence is synthesized)
taattgcactcttaagctgtggctctcttcctaaattcttaacattctcgagggttagaaagaaacacagaaaaatgcatcggtacagagtacatttcaaaaaaaatacatagactgatg

SEQ ID NO: 641373 - DNA, 120 bp, Artificial Sequence
  ENSG00000181722_232 (sequence is synthesized)
ttgggaaacagcccagtggtataaggatgaggaaactgaagcccagagaggtgaagtgaggtgcccaaggccacacagcaagttagaggcacagctagtacggtagctcaagtctcctga

SEQ ID NO: 641374 - DNA, 120 bp, Artificial Sequence
  ENSG00000181722_233 (sequence is synthesized)
aaggtttttcaaagaggcagtggaggaggttctaataaatttggaaggaaacagttccctgtcttgggaaaaggagaactcctgactgattagcattcacaccagatgcagccgctctct

SEQ ID NO: 641375 - DNA, 120 bp, Artificial Sequence
  ENSG00000181722_234 (sequence is synthesized)
actcagaagagacacagacaggagagaggaggaggggtggggggagagagagagaatcaatatcaagaatagaaggagctccgaagccattttttttttaaagaagtatcgggacttggg

SEQ ID NO: 641376 - DNA, 120 bp, Artificial Sequence
  ENSG00000181722_235 (sequence is synthesized)
cttcctattacctatttcacagcataagcctacagggtacgaagaatgaactctgagaatgtttggagaatgtttcatcattactaacaggatattcctcatgacattgctgtctggata

SEQ ID NO: 641377 - DNA, 120 bp, Artificial Sequence
  ENSG00000181722_236 (sequence is synthesized)
attggtctggtggaagggtagatggttccagattaaacatgggaagagatgaatgtctagaagaaatgaatttgaaactgagatctaaaggacaagaatgatggacagaagtgaacaggc

SEQ ID NO: 641378 - DNA, 120 bp, Artificial Sequence
  ENSG00000181722_237 (sequence is synthesized)
ctattcactgcttcaattgttattctccattttatggctgctccatgaaaatgaacaagaaaggcacggagatgatagagagcaagtttacatgatagaggaagaaagttgttaacatgg

SEQ ID NO: 641379 - DNA, 120 bp, Artificial Sequence
  ENSG00000181722_238 (sequence is synthesized)
gagatgggaaagaacattaataggtgatgtatattcttagaaaaaatgatgactgctgtggatgagttttatctcaattctgagcaggtagttagagggaatggttggaatttaactctg

SEQ ID NO: 641380 - DNA, 120 bp, Artificial Sequence
  ENSG00000181722_239 (sequence is synthesized)
gagtctgatggcctgggatactttgtagttttgtgatctacaaaataatgttacaatactatttttaaaaattgttatgaaaattatataagttcatatatataaactacttagcaaatg

SEQ ID NO: 641381 - DNA, 120 bp, Artificial Sequence
  ENSG00000181722_240 (sequence is synthesized)
cagactgcctgaagttacatttagagactgaaatcactgcaccttaaaaacaaaagattgagctgcactgtattcctgaattttgaatgaagaaaaagcttttgtaagagggaggaagct

SEQ ID NO: 641382 - DNA, 120 bp, Artificial Sequence
  ENSG00000181722_241 (sequence is synthesized)
tatctaatctcttcaagactgatgagaagcaatcaggagcttgtgactctttgaaacagtaaatttctagggaattgggcacacgtttctcaggaacaataaagagtgttacacttcagg

SEQ ID NO: 641383 - DNA, 120 bp, Artificial Sequence
  ENSG00000181722_242 (sequence is synthesized)
gagctgagattctttcagggggtcaagagacactgaatacagaatgaagatcactcttctgattactgtcgaattctcagttataaccttttttaataaaatgtcttcaaagatgtagga

SEQ ID NO: 641384 - DNA, 120 bp, Artificial Sequence
  ENSG00000181722_243 (sequence is synthesized)
aaataaattggctcagacaagagagttactggatattagaagatttagatttttgacaaggtcttctacttgtttgcaaatgtactatcttgaccatataaaatttgcctaacctttgct

SEQ ID NO: 641385 - DNA, 120 bp, Artificial Sequence
  ENSG00000181722_244 (sequence is synthesized)
agattttatagaccagtggaatacaggccttgtgcatatgaagatcaggtgacaagtttgctgcctaccagcctccacagcaatatgccctttcacgaatccaaaggactgcatgacaca

SEQ ID NO: 641386 - DNA, 120 bp, Artificial Sequence
  ENSG00000181722_245 (sequence is synthesized)
cataggatatagtcaagaagcctttggacatgggagtttcaagctcaaaggagaattcatacctgaagagaaatttggaagccatcaatacattgacaaataaaaagaagtgttaagaat

SEQ ID NO: 641387 - DNA, 120 bp, Artificial Sequence
  ENSG00000181722_246 (sequence is synthesized)
ctatttcacagcataagcctacagggtacgaagaatgaactctgagaatgtttggagaatgtttcatcattactaacaggatattcctcatgacattgctgtctgattcagaggatacat

SEQ ID NO: 641388 - DNA, 120 bp, Artificial Sequence
  ENSG00000181722_247 (sequence is synthesized)
ttgtgtgatgctgaggtttggggtatgtatgatcccatcacccaagtactgagcatgtactgaacagttagtttggttttttgttgttgttgttttgttgttgttttgagatggagtctc

SEQ ID NO: 641389 - DNA, 73 bp, Artificial Sequence
  ENSG00000181722_248 (sequence is synthesized)
gtactgaacagttagtttggttttttgttgttgttgttttgttgttgttttgagatggagtctcattttgtca

SEQ ID NO: 641390 - DNA, 120 bp, Artificial Sequence
  ENSG00000181722_249 (sequence is synthesized)
taagaagactttgatttctcgtcacatcttttgataataaggatctggagccaaaggagaaacagaaactacttttaagaactttggagatccaagtttagtggactcttaagagcctgt

SEQ ID NO: 641391 - DNA, 120 bp, Artificial Sequence
  ENSG00000181722_250 (sequence is synthesized)
attatttcttggatgacttatccagccctttgtagaatcagaactctcacaattttctttaaatcaaataaaacccaaggggttaagtggatctttaaaattatttccaggtcattcttt

SEQ ID NO: 641392 - DNA, 120 bp, Artificial Sequence
  ENSG00000181722_251 (sequence is synthesized)
ctttaaaattatttccaggtcattctttcaataaacatttattggtttatttgttattatttcaacaaactatgtgacaggcaaacatgaactcatttctttctttcttttttttttttt

SEQ ID NO: 641393 - DNA, 120 bp, Artificial Sequence
  ENSG00000181722_252 (sequence is synthesized)
tacctatttattttccttaagcaagtaaatctccctatggattgttaagggccctgtgcatatttgcatgtagccaaagattcagtctcttgcaggaactctggttgtcaactggtgatc

SEQ ID NO: 641394 - DNA, 120 bp, Artificial Sequence
  ENSG00000181722_253 (sequence is synthesized)
ttgcctttgtcttttctcatagttctgcctgtggcgcctgtcactagcagtcaaataaggacaattttaccattctctcctgctgctctaatttttttttagtgccggtacatgaatttg

SEQ ID NO: 641395 - DNA, 120 bp, Artificial Sequence
  ENSG00000181722_254 (sequence is synthesized)
ttattctttataattccctttgaagttggaaatccaaggggaatctaaaaccgaccagatgtttctgctgctggaaaggaaagagagtaaggattaagtttaacaaaaacttggtctcca

SEQ ID NO: 641396 - DNA, 120 bp, Artificial Sequence
  ENSG00000181722_255 (sequence is synthesized)
gagcaaagtggcaatgcactccaattacaagaactgcctgaagttacatttagagactgaaatcactgcaccttaaaaacaaaagattgagctgcactgtattcctcataagcctacagg

SEQ ID NO: 641397 - DNA, 120 bp, Artificial Sequence
  ENSG00000181722_256 (sequence is synthesized)
gtacgaagaatgaactctgagaatgtttggagaatgtttcatcattactaacaggatattcctcatgacattgctgtctggttacatacagtgaattagacaaattaagtgtataccttg

SEQ ID NO: 641398 - DNA, 120 bp, Artificial Sequence
  ENSG00000181722_257 (sequence is synthesized)
aatttacctgaagagtgacaccattgattttgaaactactgtaatgggatggtgttttacagacttctatgttactggaaaacgctaaacctgggagactaacatccctcttaggcttca

SEQ ID NO: 641399 - DNA, 120 bp, Artificial Sequence
  ENSG00000181722_258 (sequence is synthesized)
atacacaacatcaagagcaggaaaatggactcattagggaggcaggcagtcattaccactcacactgtacttccagggagacaccgattataagaagagaaactcagcgctggggaagaa

SEQ ID NO: 641400 - DNA, 120 bp, Artificial Sequence
  ENSG00000181722_259 (sequence is synthesized)
ctctgtgcattcagaagagaagaacatttctgagtcctcacgaaactatttcagttacatacagtgaattagacaaattaagtgtataccttgatgagtatacatgtgacaacacccaac

SEQ ID NO: 641401 - DNA, 120 bp, Artificial Sequence
  ENSG00000181722_260 (sequence is synthesized)
tccaaagttttaacaaaaggttagagaagacagcaagttcaaaaaaggagagggaaagaaagaaagagaaatagagagagaggaatatctttgaccatcagtctgtgacctgccccttct

SEQ ID NO: 641402 - DNA, 120 bp, Artificial Sequence
  ENSG00000181722_261 (sequence is synthesized)
ctttacggaactggtgtttttaatgtcatgtgaggacaacattacacaatggatctttggcagggatacacagaaatgaataccgtgtgcgaacaaacattaaatggcagtcttaattac

SEQ ID NO: 641403 - DNA, 120 bp, Artificial Sequence
  ENSG00000181722_262 (sequence is synthesized)
cacaacatcaagagcaggaaaatggactcattagggaggcaggcagtcattaccactcacactgtacttccagggagacaccgattataagaagagaaactcagcgctggggaagaagaa

SEQ ID NO: 641404 - DNA, 120 bp, Artificial Sequence
  ENSG00000181722_263 (sequence is synthesized)
gtcctcacgaaactatttcaatctttgaccatcagtctgtgacctgccccttctctttacatgcagccgctctctgctccctgccccaatgaacatctgcactaggcccaagccttggag

SEQ ID NO: 641405 - DNA, 120 bp, Artificial Sequence
  ENSG00000181722_264 (sequence is synthesized)
aattgatgaattgcaagtttgtgccccatagctgcacagactgcctgaagttacatttagagactgaaatcactgcaccttaaaaacaaaagattgagctgcactgtattcctatctttg

SEQ ID NO: 641406 - DNA, 120 bp, Artificial Sequence
  ENSG00000181722_265 (sequence is synthesized)
accattgattttgaaactactacttctatgttactggaaaacgctaaacctgggagactaacatccctcttaggcttcagagaacccagatccagacctagaaatcaggagctgatgttg

SEQ ID NO: 641407 - DNA, 120 bp, Artificial Sequence
  ENSG00000181722_266 (sequence is synthesized)
acagagaagtccacaagtgagcatgtattcctgtcgtaggaagtatttcatctgtgcagaatgccagtgcctgcttttacttctcatgggccctagagaatggacagactgggttataat

SEQ ID NO: 641408 - DNA, 120 bp, Artificial Sequence
  ENSG00000181722_267 (sequence is synthesized)
ctttgcagtctttgctattcagaaacttggctttccaatgcataaaagagaaataataataataaaacagaaacttgctaggtgcaaaaatcaataaagaggataaaaaattaaaatgtg

SEQ ID NO: 641409 - DNA, 120 bp, Artificial Sequence
  ENSG00000181733_0 (sequence is synthesized)
ttatttgccaccccatgcaggcttcttgccatagttcagctgttcttcctgcagctaaagtgcattgtgtaaaacatgggggatgtgaatcagtcggtggcctcagacttcattctggtg

SEQ ID NO: 641410 - DNA, 120 bp, Artificial Sequence
  ENSG00000181733_1 (sequence is synthesized)
ggcctcttcagtcactcaggatcacgccagctcctcttctccctggtggctgtcatgtttgtcataggccttctgggcaacaccgttcttctcttcttgatccgtgtggactcccggctc

SEQ ID NO: 641411 - DNA, 120 bp, Artificial Sequence
  ENSG00000181733_2 (sequence is synthesized)
cacacacccatgtacttcctgctcagccagctctccctgtttgacattggctgtcccatggtcaccatccccaagatggcatcagactttctgcggggagaaggtgccacctcctatgga

SEQ ID NO: 641412 - DNA, 120 bp, Artificial Sequence
  ENSG00000181733_3 (sequence is synthesized)
ggtggtgcagctcaaatattcttcctcacactgatgggtgtggctgagggcgtcctgttggtcctcatgtcttatgaccgttatgttgctgtgtgccagcccctgcagtatcctgtactt

SEQ ID NO: 641413 - DNA, 120 bp, Artificial Sequence
  ENSG00000181733_4 (sequence is synthesized)
tactgtgcctcccgtattgtggatcacttcttctgtgaggtgccagccctactgaagctctcctgtgcagatacctgtgcctacgagatggcgctgtccacctcaggggtgctgatccta

SEQ ID NO: 641414 - DNA, 120 bp, Artificial Sequence
  ENSG00000181733_5 (sequence is synthesized)
atgctccctctttccctcatcgccacctcctacggccacgtgttgcaggctgttctaagcatgcgctcagaggaggccagacacaaggctgtcaccacctgctcctcgcacatcacggta

SEQ ID NO: 641415 - DNA, 120 bp, Artificial Sequence
  ENSG00000181733_6 (sequence is synthesized)
gtggggctcttttatggtgccgccgtgttcatgtacatggtgccttgcgcctaccacagtccacagcaggataacgtggtttccctcttctatagccttgtcacccctacactcaacccc

SEQ ID NO: 641416 - DNA, 120 bp, Artificial Sequence
  ENSG00000181733_7 (sequence is synthesized)
cttatctacagtctgaggaatccggaggtgtggatggctttggtcaaagtgcttagcagagctggactcaggcaaatgtgctgactacatagaaactgctggtgagattccagcggtcct

SEQ ID NO: 641417 - DNA, 120 bp, Artificial Sequence
  ENSG00000181733_8 (sequence is synthesized)
tgccaacctgcacgctggatgcatcttaccttgtctgttattgctgctgtgaatccaagcaggctggacctctagatagcagaaggtcacccatgttgacgttcattccaaaccttccat

SEQ ID NO: 641418 - DNA, 120 bp, Artificial Sequence
  ENSG00000181733_9 (sequence is synthesized)
aaaatgtgctggaagcagcaaggggtgggcacctcaccttggccatggggccgggactagaacaacccatctggcatgggctggaagcaccttcagctcactttctggagactgtgacca

SEQ ID NO: 641419 - DNA, 120 bp, Artificial Sequence
  ENSG00000181733_10 (sequence is synthesized)
tcctacaacagtgatgctctggaggaattctcagctcagaattccagggaagatgagttgagtgttaagtccaagaaagagacagtgtccagaatagagacagctcaggatctgaaatca

SEQ ID NO: 641420 - DNA, 120 bp, Artificial Sequence
  ENSG00000181733_11 (sequence is synthesized)
aactgggttcaaatcccagtctaccctcttcttagctgtgtgactttagatgcatcaaagacagtgggaccacctgggcaccctgaaaggaaagcctactgattctagctgcagcctcat

SEQ ID NO: 641421 - DNA, 120 bp, Artificial Sequence
  ENSG00000181733_12 (sequence is synthesized)
tggcattcaattgccaatttgtgcaactggccaaatatccagccattgcccaaggtgcaactttttgagaaaatgtctgccttttaaattgaggtagaatacacgtaacataaaatgagc

SEQ ID NO: 641422 - DNA, 120 bp, Artificial Sequence
  ENSG00000181744_0 (sequence is synthesized)
cttggtctcaggagagccagcgcgcacaagcaagggtgtgcggctctgagacgtgcgttgctgcttgtgggtgtgagacatcctagctcctcttccccttccgtgagtccctcctttcct

SEQ ID NO: 641423 - DNA, 120 bp, Artificial Sequence
  ENSG00000181744_1 (sequence is synthesized)
cgcagaccccacttgtcgtggctggctgccgccgcagctcttgtgcgaagccagcagtgcgcgtgcgcgcgggcacgggcgcgcgaccgtcgggtccccgcgctccctccccctcccgct

SEQ ID NO: 641424 - DNA, 120 bp, Artificial Sequence
  ENSG00000181744_2 (sequence is synthesized)
cctctataacttggctggcgtggaggaggcgccgccggagtcggagggcggggagctaggaggagggagctcgagagttgtggagactagtgactgggagaagtcgcagcccgctcaggc

SEQ ID NO: 641425 - DNA, 120 bp, Artificial Sequence
  ENSG00000181744_3 (sequence is synthesized)
ccgcgccttcccgctccccgtcttcctctctcacacacctactccgccctccgccccagcccgcgcgctagctccttctctcgcccggggttcctgccggtagctctccgggtcttggcg

SEQ ID NO: 641426 - DNA, 120 bp, Artificial Sequence
  ENSG00000181744_4 (sequence is synthesized)
ggggtgccctcgccctcccgttgcgggcgggcgggcggtatgtggcgcctggtgcccccgaagctgggccgcctgtcccgctcgctgaagctggcggcgctgggcagcctgttggtgctg

SEQ ID NO: 641427 - DNA, 120 bp, Artificial Sequence
  ENSG00000181744_5 (sequence is synthesized)
cagcctgttggtgctgatggtgctgcactcgccgtcgctgctcgcctcttggcagcgcaacgaactgaccgaccggcgcttcctgcagctcaataagtgcccggcgtgcttcggcacgag

SEQ ID NO: 641428 - DNA, 120 bp, Artificial Sequence
  ENSG00000181744_6 (sequence is synthesized)
ctggtgccgccgcttcctcaacgggcaggtggtattcgaggcgtggggccgcttgcgcctgctggacttcctcaacgtgaagaacgtgtacttcgcgcagtacggcgagccccgcgaggg

SEQ ID NO: 641429 - DNA, 120 bp, Artificial Sequence
  ENSG00000181744_7 (sequence is synthesized)
cggccgccgccgagtggtgctcaagcgcctcggctcgcagcgcgagctggcgcagctcgaccagagcatctgcaagcgggccaccggccggccccgctgcgacctgctgcaggccatgcc

SEQ ID NO: 641430 - DNA, 120 bp, Artificial Sequence
  ENSG00000181744_8 (sequence is synthesized)
ccggaccgagttcgcgcgcctcaacggcgacgtgcgtctgctcacgcccgaggcggtggagggctggtcggacctggtgcactgcccctcgcagcgccttctcgaccgcctggtgcgccg

SEQ ID NO: 641431 - DNA, 120 bp, Artificial Sequence
  ENSG00000181744_9 (sequence is synthesized)
ctacgcggagaccaaggactcgggcagcttcctgcttcgcaacctcaaggactcggagcgcatgcagctgctgctgaccctggccttcaaccccgagccgctggtgctacagagttttcc

SEQ ID NO: 641432 - DNA, 120 bp, Artificial Sequence
  ENSG00000181744_10 (sequence is synthesized)
gtctgatgaaggttggccatttgcaaagtatcttggagcttgtggaagaatggtggctgtaaattatgttggagaagaactgtggagttactttaatgcgccatgggaaaaacgagttga

SEQ ID NO: 641433 - DNA, 120 bp, Artificial Sequence
  ENSG00000181744_11 (sequence is synthesized)
cctcgcttggcaattaatggaaatagcagaacagcttacaaacaatgactttgaatttgcactctacctcctggacgtcagctttgacaattttgcagttggtcctagagatgggaaggt

SEQ ID NO: 641434 - DNA, 120 bp, Artificial Sequence
  ENSG00000181744_12 (sequence is synthesized)
aatcattgtggatgctgaaaatgttttggttgctgacaaaagattaattagacaaaataaacctgaaaattgggatgtatggtatgaaagcaagtttgatgactgtgataaggaggcttg

SEQ ID NO: 641435 - DNA, 120 bp, Artificial Sequence
  ENSG00000181744_13 (sequence is synthesized)
cttatcattttcaaaagaaattctttgtgctcgtgccactgtggaccacaattactatgctgtttgtcagaacctcttatccagacatgccacctggcgtggcacttctggaggactcct

SEQ ID NO: 641436 - DNA, 120 bp, Artificial Sequence
  ENSG00000181744_14 (sequence is synthesized)
tcatgatccaccaagtgaaattgccaaagatggccggctcgaggccttgctggatgagtgtgccaacccaaagaagcgctatggcagattccaggctgcaaaagaactgcgtgaatacct

SEQ ID NO: 641437 - DNA, 120 bp, Artificial Sequence
  ENSG00000181744_15 (sequence is synthesized)
agcacaattaagtaacaacgtgaggtagtctatggtgaacttttctttttttctccatttaaacagcactggctaaaactaaaccaccaaaaaacgatctgaaaaaatgaaatttggaag

SEQ ID NO: 641438 - DNA, 120 bp, Artificial Sequence
  ENSG00000181744_16 (sequence is synthesized)
tgttacattcagaggatgataaacttgcactgatagatcttaatgttaacatccatcaaaataagacattacttcaaaaatcacatgatgcttctgcaaataagtatgttcttatacttt

SEQ ID NO: 641439 - DNA, 120 bp, Artificial Sequence
  ENSG00000181744_17 (sequence is synthesized)
ggaggcttgagctgtcatcagctgctccccactaccccggaatgcttgagtggattaatgaatattgttaagctattggaaatgagtctgatagtacattggcttgtgtatcaaagggta

SEQ ID NO: 641440 - DNA, 120 bp, Artificial Sequence
  ENSG00000181744_18 (sequence is synthesized)
catgattttgtgaatctcttgcatttactttgaatgtcaagtcagattggtctgttttataggccgctttttccttctgatgtgtagggttttttccccctttttttttttaattaaatt

SEQ ID NO: 641441 - DNA, 120 bp, Artificial Sequence
  ENSG00000181744_19 (sequence is synthesized)
ttgaaaattcaggttactgtaggtgttcatttaaatttttaatagttgtcattcagtgctatttggtacatatttactgttagggcaggattcccaggtttactgtgttttttttttttt

SEQ ID NO: 641442 - DNA, 120 bp, Artificial Sequence
  ENSG00000181744_20 (sequence is synthesized)
tttttaaagaaagctaaatattacattatgtaaatacttcttttcaccaacttctgtagtttcaccattgcatggtgtcatttcaggttatttaacagttatatccctctatgccaataa

SEQ ID NO: 641443 - DNA, 120 bp, Artificial Sequence
  ENSG00000181744_21 (sequence is synthesized)
ttagaagtgtacactaaacatgaagtttggcatatgttgcaaaatgtcattttatcttttctaaaggctttaagaagaatatactagaatctatatattgatgttaattttgattcagaa

SEQ ID NO: 641444 - DNA, 120 bp, Artificial Sequence
  ENSG00000181744_22 (sequence is synthesized)
aaaaaatacaacccagtatctaaaaagtgttaactagtccaagatagtaatgcatatgccaaagaaatattacacctaatctcatgtttagaatttaaaatagaattggtcagctactta

SEQ ID NO: 641445 - DNA, 120 bp, Artificial Sequence
  ENSG00000181744_23 (sequence is synthesized)
ttcttaccaccctacttccagtattttagctctgtcattattaaattcagatcttcctgattattttttctgttgaaagttaaactactgctttcaagtaatttaaagttatcctacctt

SEQ ID NO: 641446 - DNA, 120 bp, Artificial Sequence
  ENSG00000181744_24 (sequence is synthesized)
ttattcatgggtagttttgcaaaattaacatggtagccattgtttgaatttaatcgggcatcataacttttcatttattgaggaactaatcattattactataaagcatacaaattagcc

SEQ ID NO: 641447 - DNA, 120 bp, Artificial Sequence
  ENSG00000181744_25 (sequence is synthesized)
agtcagcacactttggtcttctttacctaagggttaaacatcagaacatcaaatttaattatttgcatagaaatgtgtgggctctttatataagttgactatcactaacaggtaatattt

SEQ ID NO: 641448 - DNA, 120 bp, Artificial Sequence
  ENSG00000181744_26 (sequence is synthesized)
ttctgtttgaagttgttacttttgtttacagcaaagtttgatgtagtgtgcagtagtgagctctagactgatctttttctaaatcagaaagtgattaaagtatgcacaaccaaaggcagg

SEQ ID NO: 641449 - DNA, 120 bp, Artificial Sequence
  ENSG00000181744_27 (sequence is synthesized)
tttttctttttcatttattcagcaactatttattaagcatcaactctgtgccaggcacgttactagctgctacatactgtctgaacatgacatacggttaagtaactttacaattattat

SEQ ID NO: 641450 - DNA, 120 bp, Artificial Sequence
  ENSG00000181744_28 (sequence is synthesized)
caaatacttcaatgtagatatttcttaagttgaaatagcattaactaggataatgctttcatgttattttattgtcttgtgatagaaattcaacttgtaccatctaaaactaggttgcta

SEQ ID NO: 641451 - DNA, 120 bp, Artificial Sequence
  ENSG00000181744_29 (sequence is synthesized)
taaaaataggaggatgaagtcaataaagtttatgccagtttaaaaactggaaggaaaaggtaagagctctccattataaaatagttgcattcggttaatttttacacattagtgcattgc

SEQ ID NO: 641452 - DNA, 120 bp, Artificial Sequence
  ENSG00000181744_30 (sequence is synthesized)
gtatatcaactggccctcaatgaagcatttaagtgcttggaattttactaaactgacttttttgcaactttgggagatttttgaggggagtgttgaaaattgccaaacactcacctctta

SEQ ID NO: 641453 - DNA, 120 bp, Artificial Sequence
  ENSG00000181744_31 (sequence is synthesized)
ctcaaaacttcaaataaaatacacattttcaagagggagcaccttttatatttgataagttttcattataaaccttataataccagtcacaaagaggttgtctgtctatggtttagcaaa

SEQ ID NO: 641454 - DNA, 120 bp, Artificial Sequence
  ENSG00000181744_32 (sequence is synthesized)
catttgcttttctttttggaagtgtgattgcaattgcagaacagaaagtgagaaaacactgccagcggtgattgctacttgaggtagttttttacaactaccatttcccctccatgaaat

SEQ ID NO: 641455 - DNA, 120 bp, Artificial Sequence
  ENSG00000181744_33 (sequence is synthesized)
tatgtgaaatttattttatctttgggaaaagttgagaagatagtaaaagaattaggaatttaaaattacagggaaaaatatgtaagtgaaaagcaataaatattttgttcactttgctat

SEQ ID NO: 641456 - DNA, 120 bp, Artificial Sequence
  ENSG00000181744_34 (sequence is synthesized)
caagatgttcactatcagatatttattatatggcagcaatttatatttttaatcattgcccattaatagacgcagtaaaatatttttgaatcagacatttggggtttgtatgtgcattaa

SEQ ID NO: 641457 - DNA, 120 bp, Artificial Sequence
  ENSG00000181744_35 (sequence is synthesized)
aattgtcttttgtactgtaagttactgttaatttgaatattttattgaactgtctccctgtgcctttataatataaagttgtttctacaacttttaatgatcttaataaagaatacttta

SEQ ID NO: 641458 - DNA, 120 bp, Artificial Sequence
  ENSG00000181744_36 (sequence is synthesized)
tcggccgggctgggccaggctgcaggcgtgggaaggggcgtctccgggggagccccggggctgtgcagggaggccgagggcgaccccgctgatggagagtctgctcttgttacctagatt

SEQ ID NO: 641459 - DNA, 120 bp, Artificial Sequence
  ENSG00000181744_37 (sequence is synthesized)
agctacatcaaactgtgtccatcatttgagtgtcttactgaaacctatgctgccctgcccttcaacagaaattatgacaagtggtggagacagataacagagaagaagcaagtcagaaga

SEQ ID NO: 641460 - DNA, 120 bp, Artificial Sequence
  ENSG00000181744_38 (sequence is synthesized)
ttctgcttttatctgccggggcttgcaggtccgcggcgcagactgttcacgagcccttggacctttcctagttcttctgaagtgttctacaccgcgttcgctcttccttttctggcgctg

SEQ ID NO: 641461 - DNA, 120 bp, Artificial Sequence
  ENSG00000181744_39 (sequence is synthesized)
gtggctggcctaacttcggtctcagagtctttgttttcgctcatttacctggcagtcatttggacacctaattcgaggacaagttggggaggatgaagtcggagaacgggacagtggtcg

SEQ ID NO: 641462 - DNA, 120 bp, Artificial Sequence
  ENSG00000181744_40 (sequence is synthesized)
ttgtggatgctgaaaatgttttggttgctgacaaaagattaattagacaaagtaagtatataattttagatttttttctactcattttttcctatgtcaaaataatgtttatacttgtat

SEQ ID NO: 641463 - DNA, 120 bp, Artificial Sequence
  ENSG00000181744_41 (sequence is synthesized)
gaaatgagccttgaatttcctccttagatggcaactttaagcgtctttctttgctttatatgaccactgtcaataaacaaatacagatactctttgacttactgggggttacatcttgat

SEQ ID NO: 641464 - DNA, 120 bp, Artificial Sequence
  ENSG00000181744_42 (sequence is synthesized)
aaacccggtgtcagttgaaaatattgttatttgaaatatatctaacctacgggacatcatagcttagtcttgcctaccttagacatactcagaacacttacattagtctaaagttggggg

SEQ ID NO: 641465 - DNA, 120 bp, Artificial Sequence
  ENSG00000181751_0 (sequence is synthesized)
aggagagggtacccggctggctcggctggcggcctctgcctggatctcggcgccgcagtcctgcgcctctcccgcccctgtctcccgctccgcagccccgggcacggcggaggcagcgga

SEQ ID NO: 641466 - DNA, 120 bp, Artificial Sequence
  ENSG00000181751_1 (sequence is synthesized)
gccctgggccatcgtacctggagtagaacagaaaaattattatgtctgtgttcccttgggactcattggaaattgtacagtgacatcttctgggatttagtctggattgtgcagactggt

SEQ ID NO: 641467 - DNA, 120 bp, Artificial Sequence
  ENSG00000181751_2 (sequence is synthesized)
gcttaaaatggaagtcgatattaatggagagtctagaagtaccctgaccaccttgcccttccctggggctgaggccaactccccgggaaaggcggaggcagagaagccccgctgctccag

SEQ ID NO: 641468 - DNA, 120 bp, Artificial Sequence
  ENSG00000181751_3 (sequence is synthesized)
cacaccctgctccccgatgcggaggaccgtgtcaggctaccagatcctacacatggactctaactatttggttggcttcacgactggcgaggaactcctgaagttagctcagaagtgcac

SEQ ID NO: 641469 - DNA, 120 bp, Artificial Sequence
  ENSG00000181751_4 (sequence is synthesized)
aggaggtgaagagagcaaagcagaagccatgccatccttacgctccaaacagctagatgcaggacttgcccgttcctctcgtttgtataaaaccagaagtaggtactaccagccatacga

SEQ ID NO: 641470 - DNA, 120 bp, Artificial Sequence
  ENSG00000181751_5 (sequence is synthesized)
gattccagctgtcaatggcaggaggcgaaggcggatgccaagctcaggagacaagtgcactaaatctttaccttatgaaccttacaaggccctccatgggcctctgcctctttgtcttct

SEQ ID NO: 641471 - DNA, 120 bp, Artificial Sequence
  ENSG00000181751_6 (sequence is synthesized)
taaaggtaagagggctcactccaaatctctggactacctcaatctagataaaatgatcaaggagccagctgatacagaagtgctacagtaccagcttcaacacctaaccctccgagggga

SEQ ID NO: 641472 - DNA, 120 bp, Artificial Sequence
  ENSG00000181751_7 (sequence is synthesized)
ccgtgtgtttgctaggaataatacatgaatgacttggagagagcttaaaccaatttaggtcagcctacgcttggctagaaaaaacccactgctgtactctgtacatgactcttcacacta

SEQ ID NO: 641473 - DNA, 120 bp, Artificial Sequence
  ENSG00000181751_8 (sequence is synthesized)
tagatggttatatcagctaagtgttcctggaacataaaaattgtttgggtcaaatttgaatacaggaatgaaatcacaggtacttgggggggggatatcattctagagcacgcaactgca

SEQ ID NO: 641474 - DNA, 120 bp, Artificial Sequence
  ENSG00000181751_9 (sequence is synthesized)
aagaaaacagaatgttgactgttagtttgtatagctttttagctaggaaaaaaaggctttggtacagtaatttcatctttatgattctgacactcaaattgggaatgttacctgcttggt

SEQ ID NO: 641475 - DNA, 120 bp, Artificial Sequence
  ENSG00000181751_10 (sequence is synthesized)
tgttgctgacttgatatgattcattagaaatttatatcttcagtactcaagtacttcttgaatctctgtattttactataaaatgtatgtaatgatttgttttatgaaatttagaacttg

SEQ ID NO: 641476 - DNA, 120 bp, Artificial Sequence
  ENSG00000181751_11 (sequence is synthesized)
aacattgctgaattggaccactttttatttttaaatattgagtttaaatattttataactggttttgcactgaaaaaattaacatttcagattgacaagagagtaatctttcttcacttg

SEQ ID NO: 641477 - DNA, 120 bp, Artificial Sequence
  ENSG00000181751_12 (sequence is synthesized)
aaattaaatttgggatacaaagtatttattttacaatgggtgggcgggggaaacttttccagaaagtttccaatatgacgttttcataagttgaaaaaactctccttagtgcttattttc

SEQ ID NO: 641478 - DNA, 120 bp, Artificial Sequence
  ENSG00000181751_13 (sequence is synthesized)
taacttaaaattcacctggaactttaaatgggaaaggattcttttaattgtggattataggcataatactgtttgcatctgaattttctgtaagtgaataatagtttaatagaggaactc

SEQ ID NO: 641479 - DNA, 120 bp, Artificial Sequence
  ENSG00000181751_14 (sequence is synthesized)
atgatttgtactattgaatgattaaactaagtatgaagtgataccattcagcatggcatcaggtcattgcagttttagttctgtgtaacacaagcactcactgaaattccagtttctagg

SEQ ID NO: 641480 - DNA, 120 bp, Artificial Sequence
  ENSG00000181751_15 (sequence is synthesized)
attagtgtaggagcctaacgtgcttctactgttttaatgggttaatcctggattacttaacaatttatgtcaattgcactggtttaatttgttgctaaagaaataatgccctgggtttag

SEQ ID NO: 641481 - DNA, 120 bp, Artificial Sequence
  ENSG00000181751_16 (sequence is synthesized)
taacaaatacagctcaactattcttgaatatattttgaaaaaaaaatgtatgtaacttaccttttgtaaacgttccatttcttttttccctcatttttgactcttaaaggtgcaatttat

SEQ ID NO: 641482 - DNA, 120 bp, Artificial Sequence
  ENSG00000181751_17 (sequence is synthesized)
tactgaattgggatttctggcagcacagaactgctttttattttggggtctgtgagtttcttaggtattagcaatcttgcttataaaataagaacaccttttaattaatgagtgggtcat

SEQ ID NO: 641483 - DNA, 120 bp, Artificial Sequence
  ENSG00000181751_18 (sequence is synthesized)
tcctggtgcaattgtgatttttctttagccagaatgaatggcaaactctatttagagcaaagtaagtattagaaaaccctaggaactcttaatcaacgtttattacactttcattaaggc

SEQ ID NO: 641484 - DNA, 120 bp, Artificial Sequence
  ENSG00000181751_19 (sequence is synthesized)
aaactacgtgaaagagccttggggaagttggcccatatcttactaagttgatcagatttctcgttgggctggaaatgtttcgctgttgtatattttaaagtaaattgcacctttgtaaca

SEQ ID NO: 641485 - DNA, 120 bp, Artificial Sequence
  ENSG00000181751_20 (sequence is synthesized)
tattgtattgacgaatgatcactaagattagctatatctatacagtcattagtttgacaagaaatagaatcctgtcagatgccaaagagtgggatttttatgtttaatgattaaacacca

SEQ ID NO: 641486 - DNA, 120 bp, Artificial Sequence
  ENSG00000181751_21 (sequence is synthesized)
ttatttattgacaatttaccctgtggaactgtattatttctaactatgaaataaaggggtgatgtaaacacacattgttgtgtggtgctttaaactaggtccactatcaacaggctactt

SEQ ID NO: 641487 - DNA, 120 bp, Artificial Sequence
  ENSG00000181751_22 (sequence is synthesized)
actgttcaagaattccactgaagcacttattttaaggccctatttttcttaaacaaaacagtgacaacaacaatcaaaccatttacttttgatgctcattggcattttatgataaaagat

SEQ ID NO: 641488 - DNA, 120 bp, Artificial Sequence
  ENSG00000181751_23 (sequence is synthesized)
gtattcatggcaatgatatgtattcaccctattaggaaacacaactggttacctatgagacctgttctgtccgtgtgcctacgttccttaataatagctaaataaaaatttgtagctttt

SEQ ID NO: 641489 - DNA, 120 bp, Artificial Sequence
  ENSG00000181751_24 (sequence is synthesized)
cccttggccgctgttcccgcaccgcggggcagcgggcctggaggcccctttgagaagtagctttccccggccggcggcacctttggctgcgtgcccggccgcgctcagggtgcgactgcc

SEQ ID NO: 641490 - DNA, 120 bp, Artificial Sequence
  ENSG00000181751_25 (sequence is synthesized)
cgggtcagatagcacctcagggcgagccccggcggtctgatctcgccgaccctcctcgtcctggttgcaacccgcgtgcgaggccgcccgcgccctccgagtgtctgccggtgcagtggg

SEQ ID NO: 641491 - DNA, 120 bp, Artificial Sequence
  ENSG00000181751_26 (sequence is synthesized)
ggtggactggccggctgtggccgtgtgtgcgcgtgtggattggggcccggtccgagccagaagcttaagcggcagatgtcgggcattgccaccctcgccccacctgtcgcgggtggactt

SEQ ID NO: 641492 - DNA, 120 bp, Artificial Sequence
  ENSG00000181751_27 (sequence is synthesized)
ctctccgcctcgtgtctgggccgggcgcacgatgcccgcggtgctggggaaacccggccggaccagcttctgcgatgggcggcggggcggccccagcgtcccttggccttggtggaccgg

SEQ ID NO: 641493 - DNA, 120 bp, Artificial Sequence
  ENSG00000181752_0 (sequence is synthesized)
atgggccaacacaatctaacagtgctaactgaattcattctgatggaactcacaaggcggcctgagctgcagattcccctttttggagtcttcctcgtcatctacctaatcacagtggtg

SEQ ID NO: 641494 - DNA, 120 bp, Artificial Sequence
  ENSG00000181752_1 (sequence is synthesized)
ggcaacctaactatgatcattttgaccaaactggactcccacttacatacacctatgtacttttctatcagacatttggcttttgttgatcttggtaattctactgtcatttgtcccaag

SEQ ID NO: 641495 - DNA, 120 bp, Artificial Sequence
  ENSG00000181752_2 (sequence is synthesized)
gtgctggcaaattttgttgtggatcgaaatactatttcctattatgcatgtgctgcacagctggcattcttccttatgttcattatcagtgaatttttcatcctgtcagccatggcctat

SEQ ID NO: 641496 - DNA, 120 bp, Artificial Sequence
  ENSG00000181752_3 (sequence is synthesized)
tatctctacagcacatttcaggctctgatgttcactattaagatttttacattgaccttctgtggctctaatgtcatcagtcatttttactgtgatgatgttcctttgctacctatgctt

SEQ ID NO: 641497 - DNA, 120 bp, Artificial Sequence
  ENSG00000181752_4 (sequence is synthesized)
tgctcaaatgcacaggaaatagaattgttgagcatactattttctgtatttaatttgatctcctcctttctgatagtcttagtgtcctacatgttgattttgttagctatatgtcaaatg

SEQ ID NO: 641498 - DNA, 120 bp, Artificial Sequence
  ENSG00000181752_5 (sequence is synthesized)
cattctgcagagggcaggaaaaaggctttctccacatgtggttcccatttgacagtggtggttgtgttctatgggtctctactcttcatgtacatgcagcccaattccactcacttcttt

SEQ ID NO: 641499 - DNA, 120 bp, Artificial Sequence
  ENSG00000181752_6 (sequence is synthesized)
gatactgataaaatggcttctgtgttttacactttagtaatccccatgcttaaccctttgatttacagcttaagaaacgaagaggtgaaaaatgccttctataagctctttgagaattga

SEQ ID NO: 641500 - DNA, 120 bp, Artificial Sequence
  ENSG00000181754_0 (sequence is synthesized)
tgggatcgctgcgcctccggctccccgcaccgatccgcgccaggcctgcggacctggaggcagcgaccgcggtcggtgggctccggcgggctcagcggtcgaggcggtggcagggtgagc

SEQ ID NO: 641501 - DNA, 80 bp, Artificial Sequence
  ENSG00000181754_1 (sequence is synthesized)
ctccggcgggctcagcggtcgaggcggtggcagggtgagcggagcggggccccgcaagtccccgggaggcgacggtgccg

SEQ ID NO: 641502 - DNA, 120 bp, Artificial Sequence
  ENSG00000181754_2 (sequence is synthesized)
gccggtgaggcgccgccgggagaggccgcgacggagctcccagaccggccatgggctgagacacgtcctcgccgagcagaacatgcccgggtgacctcctcccagatcttccttgtggcc

SEQ ID NO: 641503 - DNA, 120 bp, Artificial Sequence
  ENSG00000181754_3 (sequence is synthesized)
ttcctcgcccactccagtgacactatgcacccccaccgtgacccgagaggcctctggctcctgctgccgtccttgtccctgctgctttttgaggtggccagagctggccgagccgtggtt

SEQ ID NO: 641504 - DNA, 120 bp, Artificial Sequence
  ENSG00000181754_4 (sequence is synthesized)
agctgtcctgccgcctgcttgtgcgccagcaacatcctcagctgctccaagcagcagctgcccaatgtgccccattccttgcccagttacacagcactactggacctcagtcacaacaac

SEQ ID NO: 641505 - DNA, 120 bp, Artificial Sequence
  ENSG00000181754_5 (sequence is synthesized)
ctgagccgcctgcgggccgagtggacccccacgcgcctgacccaactgcactccctgctgctgagccacaaccacctgaacttcatctcctctgaggccttttccccggtacccaacctg

SEQ ID NO: 641506 - DNA, 120 bp, Artificial Sequence
  ENSG00000181754_6 (sequence is synthesized)
cgctacctggacctctcctccaaccagctgcgtacactggatgagttcctgttcagtgacctgcaagtactggaggtgctgctgctctacaataaccacatcatggcggtggaccggtgc

SEQ ID NO: 641507 - DNA, 120 bp, Artificial Sequence
  ENSG00000181754_7 (sequence is synthesized)
gccttcgatgacatggcccagctgcagaaactctacttgagccagaaccagatctctcgcttccctctggaactggtcaaggaaggagccaagctacccaaactaacgctcctggatctc

SEQ ID NO: 641508 - DNA, 120 bp, Artificial Sequence
  ENSG00000181754_8 (sequence is synthesized)
tcttctaacaagctgaagaacttgccattgcctgacctgcagaagctgccggcctggatcaagaatgggctgtacctacataacaaccccctgaactgcgactgtgagctctaccagctg

SEQ ID NO: 641509 - DNA, 120 bp, Artificial Sequence
  ENSG00000181754_9 (sequence is synthesized)
tccaagaagctgcacaatgtcttcaacctgagtttcctcaactgtggcgagtacaaggagcgtgcctgggaggcccacctgggtgacaccttgatcatcaagtgtgacaccaagcagcaa

SEQ ID NO: 641510 - DNA, 120 bp, Artificial Sequence
  ENSG00000181754_10 (sequence is synthesized)
gggatgaccaaggtgtgggtgacaccaagtaatgaacgggtgctagatgaggtgaccaatggcacagtgagtgtgtctaaggatggcagtcttcttttccagcaggtgcaggtcgaggac

SEQ ID NO: 641511 - DNA, 120 bp, Artificial Sequence
  ENSG00000181754_11 (sequence is synthesized)
ggtggtgtgtatacctgctatgccatgggagagactttcaatgagacactgtctgtggaattgaaagtgcacaatttcaccttgcacggacaccatgacaccctcaacacagcctatacc

SEQ ID NO: 641512 - DNA, 120 bp, Artificial Sequence
  ENSG00000181754_12 (sequence is synthesized)
accctagtgggctgtatccttagtgtggtcctggtcctcatatacctatacctcaccccttgccgctgctggtgccggggtgtagagaagccttccagccatcaaggagacagcctcagc

SEQ ID NO: 641513 - DNA, 120 bp, Artificial Sequence
  ENSG00000181754_13 (sequence is synthesized)
tcttccatgcttagtaccacacccaaccatgatcctatggctggtggggacaaagatgatggttttgaccggcgggtggctttcctggaacctgctggacctgggcagggtcaaaacggc

SEQ ID NO: 641514 - DNA, 120 bp, Artificial Sequence
  ENSG00000181754_14 (sequence is synthesized)
aagctcaagccaggcaacaccctgccagtgcctgaggccacaggcaagggccaacggaggatgtcggatccagaatcagtcagctcggtcttctctgatacgcccattgtggtgtgagca

SEQ ID NO: 641515 - DNA, 120 bp, Artificial Sequence
  ENSG00000181754_15 (sequence is synthesized)
ggatgggttggtggggagattctgccccaggagaggtaatgcacccctgaaggatatgaggggatggaagagagggctggctgcccaagggaatggattcctcctgacctcaagggaatt

SEQ ID NO: 641516 - DNA, 120 bp, Artificial Sequence
  ENSG00000181754_16 (sequence is synthesized)
ggtcccaggtacaacagagagcaagaccccaaacagggcgtggctgccacgattttcaaatgggggtatattaatcctcaggcaaatgctacacccgtacccaaagccctgccaattctc

SEQ ID NO: 641517 - DNA, 120 bp, Artificial Sequence
  ENSG00000181754_17 (sequence is synthesized)
agtgtggtagaggaagagaagcatgtctgagttggatgggaatgaggaaggagtgaggggaagaacagattccctaaactttcatgaggtcatccctagctccttaagagaaaaacattt

SEQ ID NO: 641518 - DNA, 120 bp, Artificial Sequence
  ENSG00000181754_18 (sequence is synthesized)
tgatgttgtgtgtgttgggggagcttccacaggagccacactggggaaaagctgtagtatcttctttgtttagcaagtcaaacttcacagctggggaagttgaaaacctttggaaaatga

SEQ ID NO: 641519 - DNA, 120 bp, Artificial Sequence
  ENSG00000181754_19 (sequence is synthesized)
gtcaggaaaaggctgagacctcaatcggtaacaattccccaaagctgttgtaagactttgcattaaagccttcctttttcctgatgtgccctgggtggatggatctttgcaggagcctgg

SEQ ID NO: 641520 - DNA, 120 bp, Artificial Sequence
  ENSG00000181754_20 (sequence is synthesized)
gaagggtccatgtcacagcataggtgccagcacgaaacttgtagatggggggtgaattccagataggctaattccctggttggtgaaacccttggttagtatttgattcccagcatctgt

SEQ ID NO: 641521 - DNA, 120 bp, Artificial Sequence
  ENSG00000181754_21 (sequence is synthesized)
gtgtcaggccagagtgggggctgctgaaggcagagcttttatggatgcctgccacagacgtggtacatgggcccacttcacgatagaaggatgaaggtaaatcagcctctattatgtagc

SEQ ID NO: 641522 - DNA, 120 bp, Artificial Sequence
  ENSG00000181754_22 (sequence is synthesized)
atccagctggacctagctgattctcaatgtatgccatctcttcatccagtctccttatcaagctcaggtgggattctgaattttccctaatatgctgctctgtaaagggaggagtccaag

SEQ ID NO: 641523 - DNA, 120 bp, Artificial Sequence
  ENSG00000181754_23 (sequence is synthesized)
aaagcctggccccagctggcttagagtaggcttggcgatagtgaaaatccagtatatatctcctctgtgtggacaaggttgccttgctcctctcagagataccacctctgctgcaaagtc

SEQ ID NO: 641524 - DNA, 120 bp, Artificial Sequence
  ENSG00000181754_24 (sequence is synthesized)
aaagcatggggttttgacatcagaagggttggaattgggtggtctctaccccagaatggcaatttggagtgcagcttcaagttctgccctctccacagattccaggcaatcctgaagcag

SEQ ID NO: 641525 - DNA, 120 bp, Artificial Sequence
  ENSG00000181754_25 (sequence is synthesized)
agataatcagtagtactaaactttcagaaggggagttctgccaccccattcctccatcgagaggtctttgcagttgtggttgtgaggccagaggaacttaagaagaatgagctcaacatt

SEQ ID NO: 641526 - DNA, 120 bp, Artificial Sequence
  ENSG00000181754_26 (sequence is synthesized)
ccattccatccaaggttgcagaatactttgagtatggagatgaccgatccctttaacctttccctttgactacactgcatgccctgtgagtggctgctctgagctttggcgggggatgag

SEQ ID NO: 641527 - DNA, 120 bp, Artificial Sequence
  ENSG00000181754_27 (sequence is synthesized)
cagggtgaaggtgaaaatgttctctgatgttggtttttcttagggtctcttctctcccacgtttctagtccattggaagttctccagatcctctagatttctgacctctttttacattct

SEQ ID NO: 641528 - DNA, 120 bp, Artificial Sequence
  ENSG00000181754_28 (sequence is synthesized)
aagaggtgtcatttacctgtgggtgaggggcttggagggcctgactattaagcttcctattatgattggggaaggggactcaacatcttccccttgtctggtcctgggaactcaagactg

SEQ ID NO: 641529 - DNA, 120 bp, Artificial Sequence
  ENSG00000181754_29 (sequence is synthesized)
ctgtccatcctttattagtaacctagttttgttgagagagaggtgcagcatttccctcaagtacctgcatgctcataggtatgcatgcttataggtatgcatgcacaccagcaccttgac

SEQ ID NO: 641530 - DNA, 120 bp, Artificial Sequence
  ENSG00000181754_30 (sequence is synthesized)
ttccaccaggacagtgaatctgtagtccccattaatgatactctcagaatggtctccaccaatgtgcacaacttcatgcacacaattgtattcctctttaggagagacagtgaccatgcc

SEQ ID NO: 641531 - DNA, 120 bp, Artificial Sequence
  ENSG00000181754_31 (sequence is synthesized)
aggctcttcaaatacacactcctgtattttcatttctgaactccctgaagcttcacccacatctccatggcactgaatcacttttctgcccaggctggagttagaagaaccatgggttga

SEQ ID NO: 641532 - DNA, 120 bp, Artificial Sequence
  ENSG00000181754_32 (sequence is synthesized)
aggccttgggagaagaggtggtaaggagctacctggttctttggactcctcagaaacctcccgtgaagactatatatatgagcaatatatgagcaattaagatagaactaggtcattgaa

SEQ ID NO: 641533 - DNA, 120 bp, Artificial Sequence
  ENSG00000181754_33 (sequence is synthesized)
ggactcagaaggaaactggcaaggggctaagtagctgtgagctgctcttcctgttaactgtcctcaggagagaaaagttgtcttgatttattccagagactcctgagaattttgttactg

SEQ ID NO: 641534 - DNA, 120 bp, Artificial Sequence
  ENSG00000181754_34 (sequence is synthesized)
gagctataggaactaggactccctcctcagactcatcaggaaatctgggaaaatctcatctccatgctgcagtctccccgcttggcaccatctagggctctgaagatctttaaagtgagc

SEQ ID NO: 641535 - DNA, 120 bp, Artificial Sequence
  ENSG00000181754_35 (sequence is synthesized)
gttaaatgaagcaggccttctggggcatcgtgatggagctcctgaggactgggagggccgttttcttcataattcctacccagtttagggaatgagaaaaggccctgtggctcttaagtc

SEQ ID NO: 641536 - DNA, 120 bp, Artificial Sequence
  ENSG00000181754_36 (sequence is synthesized)
tcctgactatatccactagtttggccttgagtttgagacacctggtagatgtacctggctgccctaccaagagatttgatttgtttcttcccgtggtttcaggtgatagaacccaaaggt

SEQ ID NO: 641537 - DNA, 120 bp, Artificial Sequence
  ENSG00000181754_37 (sequence is synthesized)
agctttttaattggagaattgaataatcagcatatgtaagcgcactagaaccctgtgttgaaaactgccaggtgtgggtataagaaaaggccgagagatcaccacctcctcttaccctac

SEQ ID NO: 641538 - DNA, 120 bp, Artificial Sequence
  ENSG00000181754_38 (sequence is synthesized)
cccacacccataaaccagacatgtctcccaggaagcaggtgtccctggagacagaggatgacagggctctacaatctgtgtaattattattattattattattttgtatttatggggccc

SEQ ID NO: 641539 - DNA, 120 bp, Artificial Sequence
  ENSG00000181754_39 (sequence is synthesized)
aagaaaggggccaggagagggtacaccccagctggggagagcaaagcagatggatccagttttctgtgtgttcttacctctgtacttcctcgtagctctgctgacaaagcaagcaggcct

SEQ ID NO: 641540 - DNA, 120 bp, Artificial Sequence
  ENSG00000181754_40 (sequence is synthesized)
cccgtgtccaagaccccattcctcccacttgtgtacacctaggctggcaaatcttggagcctctgggctctgaaaactagacaatgatcattaaacctggcttgagtctctgttctggca

SEQ ID NO: 641541 - DNA, 120 bp, Artificial Sequence
  ENSG00000181761_0 (sequence is synthesized)
atgatgggtagaaggaatgacacaaatgtggctgacttcatccttacgggactgtcagactctgaagaggtccagatggctctgtttatgctatttctcctcatatacctaattactatg

SEQ ID NO: 641542 - DNA, 120 bp, Artificial Sequence
  ENSG00000181761_1 (sequence is synthesized)
ctggggaatgtggggatgctattgataatccgcctggacctccagcttcacactcccatgtattttttccttactcacctgtcatttattgacctcagttactcaactgtcgtcacacct

SEQ ID NO: 641543 - DNA, 120 bp, Artificial Sequence
  ENSG00000181761_2 (sequence is synthesized)
aaaaccttagcgaacttactgacttccaactatatttccttcacgggctgctttgcccagatgttctgttttgtcttcttgggtactgctgaatgttatcttctctcctcaatggcctat

SEQ ID NO: 641544 - DNA, 120 bp, Artificial Sequence
  ENSG00000181761_3 (sequence is synthesized)
atggactcctttgtcaatgtggtttccatgagcagattgcatttctgtgactcaaacataattcatcactttttctgtgacacttccccaattttagctctgtcctgcactgacacagac

SEQ ID NO: 641545 - DNA, 120 bp, Artificial Sequence
  ENSG00000181761_4 (sequence is synthesized)
aacactgaaatgctgatattcattatcgctggttccaccctgatggtgtcccttatcacaatatctgcatcctatgtgtccattctctctaccatcctgaaaattaattccacttcagga

SEQ ID NO: 641546 - DNA, 120 bp, Artificial Sequence
  ENSG00000181761_5 (sequence is synthesized)
aagcagaaagctttctctacttgcgtctctcatctcttgggagtcaccatcttctatggaactatgatttttacttacttaaagccaagaaagtcttattccttgggaagagatcaagtg

SEQ ID NO: 641547 - DNA, 120 bp, Artificial Sequence
  ENSG00000181761_6 (sequence is synthesized)
gctcctgtgttttatactattgtgattcccatgctgaatccactcatttatagtcttagaaacagagaagtgaaaaatgctctcattagagtcatgcagagaagacaggactccaggtag

SEQ ID NO: 641548 - DNA, 120 bp, Artificial Sequence
  ENSG00000181767_0 (sequence is synthesized)
gaaagaataatctccttgtggtcacagtagctgctggtcttctttgacaaataacttcttggtaatctttccattagaccagaacctaaacaaaatttctagattggtttattttaactc

SEQ ID NO: 641549 - DNA, 120 bp, Artificial Sequence
  ENSG00000181767_1 (sequence is synthesized)
aatgaatacaccaaaatgtaaaaacaacttatctcaagtaaaataaatattataaaaaattcatttcctcagttttcatattttatttataacaaaaatttgaggttgacaaatttccag

SEQ ID NO: 641550 - DNA, 120 bp, Artificial Sequence
  ENSG00000181767_2 (sequence is synthesized)
acaaatttccagacagataatataagaagaaacctttttaatgaatgttgactcacacacaagtctggcacagtcgccagggctggaatgcaatggtgcgatcccggctcactgcaacct

SEQ ID NO: 641551 - DNA, 120 bp, Artificial Sequence
  ENSG00000181767_3 (sequence is synthesized)
cgcgttcaagcaattctcctgcctcagcttctccagtagctgggattacaggcgcccctgctacgtatcagctttgatttctcagcagtttagagcaggtgaacatgatgggtagaagga

SEQ ID NO: 641552 - DNA, 120 bp, Artificial Sequence
  ENSG00000181767_4 (sequence is synthesized)
tagaaggaataacacaaatgtggctgacttcatccttatgggactgacactttctgaagagatccagatggctctgtttatgctatttctcctgatatacctaattactatgctggggaa

SEQ ID NO: 641553 - DNA, 120 bp, Artificial Sequence
  ENSG00000181767_5 (sequence is synthesized)
tgtggggatgatattgataatccgcctggacctccagcttcacactcccatgtattttttccttactcacctgtcatttattgacctcagttactcaactgtcgtcacacctaaaacctt

SEQ ID NO: 641554 - DNA, 120 bp, Artificial Sequence
  ENSG00000181767_6 (sequence is synthesized)
agcgaacttactgacttccaactatatttcctttacgggctgctttgcccagatgttcttttttgccttcttgggtactgctgaatgttaccttctctcctcaatggcccatgatcgcta

SEQ ID NO: 641555 - DNA, 120 bp, Artificial Sequence
  ENSG00000181767_7 (sequence is synthesized)
tgcagcgatctgcagtcctctacactacacagttattatgtccaaaaggctctgcctcgctctcatcactgggccttatgtgattggctttatagactcctttgtcaacgtggtttccat

SEQ ID NO: 641556 - DNA, 120 bp, Artificial Sequence
  ENSG00000181767_8 (sequence is synthesized)
gagcagattgcatttctacgactcaaacgtaattcatcactttttctgtgacacttccccaattttagctctgtcctgcactgatacatacaacaccgaaatcctgatattcattattgt

SEQ ID NO: 641557 - DNA, 120 bp, Artificial Sequence
  ENSG00000181767_9 (sequence is synthesized)
tggttccaccctgatggtgtcccttttcacaatatctgcatcctatgtgttcattctctttaccatcctgaaaattaattccacttcaggaaagcagaaagctttctctacttgcgtctc

SEQ ID NO: 641558 - DNA, 120 bp, Artificial Sequence
  ENSG00000181767_10 (sequence is synthesized)
tcatctcttgggagtcaccatcttttatagcactctgatttttacttatttaaaaccaagaaagtcttattccttgggaagagatcaagtggcttctgttttttatactattgtgattcc

SEQ ID NO: 641559 - DNA, 120 bp, Artificial Sequence
  ENSG00000181767_11 (sequence is synthesized)
cgtgctgaatccactcatttatagtcttagaaacaaagaggtgaaaaatgctgtcatcagagtcatgcagagaagacaggactccaggtaattaatatagcaggaatgctgaacatttaa

SEQ ID NO: 641560 - DNA, 120 bp, Artificial Sequence
  ENSG00000181767_12 (sequence is synthesized)
tgctaccctttgcttcactaaacatgattttaaacatttcaaggcatatgtttttagaaatccaaatggtaattagaaatcataatatgtgtgtcatgttttcagtctacatatatgtgt

SEQ ID NO: 641561 - DNA, 120 bp, Artificial Sequence
  ENSG00000181767_13 (sequence is synthesized)
ttgaagcaactgatgtggaaaataagaaaatatggttgtcatttttaattatattattcaaattcttatgtatacttcaattgtagataaatttattatggaaagaactatttgggacac

SEQ ID NO: 641562 - DNA, 120 bp, Artificial Sequence
  ENSG00000181767_14 (sequence is synthesized)
aatgataatagttttagatgttattccatttattatatggggaagaattatagcagagtgggtaggagtacctattttggaataaaacttcccaagaattagattctaaatatgctacat

SEQ ID NO: 641563 - DNA, 120 bp, Artificial Sequence
  ENSG00000181767_15 (sequence is synthesized)
ttttagctgtatagccagtaatacgttacctaaagcttaagcctcccttccctaagtgcacaagataaataataactccaaatctgatcagagggtagttgtagagtatttaaagcaata

SEQ ID NO: 641564 - DNA, 120 bp, Artificial Sequence
  ENSG00000181767_16 (sequence is synthesized)
ataattaatgcttcccattatcattagaagacctacattactgcacaaagccttttttcaagaatgtaaacttgtgtttaacaaattatttttggttaatttaattgacagaactaaaaa

SEQ ID NO: 641565 - DNA, 120 bp, Artificial Sequence
  ENSG00000181767_17 (sequence is synthesized)
gaacaaaaatcagcagctcacaattttggatttcagaagcaaaatatttcagtagaattaagttatagaaaaatagcctatattaagataatgttggagaaaatttgaaaaatattacaa

SEQ ID NO: 641566 - DNA, 120 bp, Artificial Sequence
  ENSG00000181767_18 (sequence is synthesized)
aatattgaagaaaatagaaatcctctacaaatattgagttttggctgctcttgatgtgggggtagccattattcttttctttacttctctaataaacccattttcagttttagaaaaaca

SEQ ID NO: 641567 - DNA, 120 bp, Artificial Sequence
  ENSG00000181767_19 (sequence is synthesized)
aatattgagttttgtgcatgttcttctagatcaatagtttcaaatatgtgcatgtatataacacatataaacaaaatttgtatcactttccatgtactgattttcagctttctgtatcca

SEQ ID NO: 641568 - DNA, 120 bp, Artificial Sequence
  ENSG00000181767_20 (sequence is synthesized)
tttacaagtttaatgttgtcatcgacaactctaatataaattttttcttggtacatggacaaaatcaagactcacttcacaatgttttggacttgaaatataaactcaccaacttacaaa

SEQ ID NO: 641569 - DNA, 120 bp, Artificial Sequence
  ENSG00000181767_21 (sequence is synthesized)
tctacatgcagtgatatctcttttgcgtgcaaaacttcaaaaactggatttctgtaatgtgtcaaatgtgtcaaattgcttctttgttaaaatcctgtgtgtttttaaaaatcattgcct

SEQ ID NO: 641570 - DNA, 120 bp, Artificial Sequence
  ENSG00000181767_22 (sequence is synthesized)
ttctcctgatttctacaggtttgtttcagttgtaaaaataactccttgacttaaatgctttattcattgattttaaatttcttaatacagaaaagttgtaaagcaaagaattgataatga

SEQ ID NO: 641571 - DNA, 120 bp, Artificial Sequence
  ENSG00000181767_23 (sequence is synthesized)
attcagatgttgtaacagcccacaaatttagtcaggcagagtgctaaaatgtcttttatttttaaatttttctcttccatatctggaatcacagttttgtttttctctgctatttaatgg

SEQ ID NO: 641572 - DNA, 120 bp, Artificial Sequence
  ENSG00000181767_24 (sequence is synthesized)
atattttagaagctagtttttattttccaagtatttgtcttttctgtttacacttttgtaacagttattagttttcattcaagcaatacttttttaatcttgtgaaatttgttatcttcg

SEQ ID NO: 641573 - DNA, 120 bp, Artificial Sequence
  ENSG00000181773_0 (sequence is synthesized)
cgggggcttctcggggtccacgcacgccctgcgccgccaggacccgagcggagcctccccgcggcccggccgcgcctggtcctgagcggtaccatgatgtggggtgcaggcagccctctg

SEQ ID NO: 641574 - DNA, 120 bp, Artificial Sequence
  ENSG00000181773_1 (sequence is synthesized)
catgatgtggggtgcaggcagccctctggcctggctctcagctggctcaggcaacgtgaatgtaagcagcgtgggcccagcagaggggcccacaggtccagccgcaccactgccctcgcc

SEQ ID NO: 641575 - DNA, 120 bp, Artificial Sequence
  ENSG00000181773_2 (sequence is synthesized)
taaggcctgggatgtggtgctctgcatctcaggcaccctggtgtcctgcgagaatgcgctagtggtggccatcatcgtgggcactcctgccttccgtgcccccatgttcctgctggtggg

SEQ ID NO: 641576 - DNA, 120 bp, Artificial Sequence
  ENSG00000181773_3 (sequence is synthesized)
cagcctggccgtggcagacctgctggcaggcctgggcctggtcctgcactttgctgctgtcttctgcatcggctcagcggagatgagcctggtgctggttggcgtgctggcaatggcctt

SEQ ID NO: 641577 - DNA, 120 bp, Artificial Sequence
  ENSG00000181773_4 (sequence is synthesized)
taccgccagcatcggcagtctactggccatcactgtcgaccgctacctttctctgtacaatgccctcacctactattcagagacaacagtgacacggacctatgtgatgctggccttagt

SEQ ID NO: 641578 - DNA, 120 bp, Artificial Sequence
  ENSG00000181773_5 (sequence is synthesized)
gtggggaggtgccctgggcctggggctgctgcctgtgctggcctggaactgcctggatggcctgaccacatgtggcgtggtttatccactctccaagaaccatctggtagttctggccat

SEQ ID NO: 641579 - DNA, 120 bp, Artificial Sequence
  ENSG00000181773_6 (sequence is synthesized)
tgccttcttcatggtgtttggcatcatgctgcagctctacgcccaaatctgccgcatcgtctgccgccatgcccagcagattgcccttcagcggcacctgctgcctgcctcccactatgt

SEQ ID NO: 641580 - DNA, 120 bp, Artificial Sequence
  ENSG00000181773_7 (sequence is synthesized)
ggccacccgcaagggcattgccacactggccgtggtgcttggagcctttgccgcctgctggttgcccttcactgtctactgcctgctgggtgatgcccactctccacctctctacaccta

SEQ ID NO: 641581 - DNA, 120 bp, Artificial Sequence
  ENSG00000181773_8 (sequence is synthesized)
tgctgctgttcctcttccaagatccccttccgatcccgctcccccagtgatgtctagctgagtcttcatgacccttcaaccctgattactacagaattccagaatgttaggctctccagg

SEQ ID NO: 641582 - DNA, 120 bp, Artificial Sequence
  ENSG00000181773_9 (sequence is synthesized)
gcttctttccaaacccccagctccacaccccccagacccagctggttctggagttctaggacattgggtgtttcaaggttctgttcagatccctatgggggcccagctggctccacggtt

SEQ ID NO: 641583 - DNA, 120 bp, Artificial Sequence
  ENSG00000181773_10 (sequence is synthesized)
ccagaatgttcaggtggtcagtgttctactcagaaatgtctcacagcccagctgggttgcaattccagaatgctgggagttttacagtgccattccaagtcccagatgtccctcttcccc

SEQ ID NO: 641584 - DNA, 120 bp, Artificial Sequence
  ENSG00000181773_11 (sequence is synthesized)
caaacttgaccttgaccatgtcactttatgtttgaatttctgagctaaagagtcagagagattagtcacatagttgcctaaataggagagagaaagattatatatgcacatatacaaaga

SEQ ID NO: 641585 - DNA, 120 bp, Artificial Sequence
  ENSG00000181773_12 (sequence is synthesized)
cagtgtctatttatgattgatttatttatttataaatttacttatgggtggtaaggggcaaaaaagaggcccacaccttgatatccaggccataccagggtatcccttgtcccttcaccc

SEQ ID NO: 641586 - DNA, 120 bp, Artificial Sequence
  ENSG00000181773_13 (sequence is synthesized)
ccatttctgacctcagttcctggaggggggaaagggtgaaagagaaaccacgtattttgttattattttggattattttttatcgaagagatcatagaaaccagagccttctccccaggc

SEQ ID NO: 641587 - DNA, 120 bp, Artificial Sequence
  ENSG00000181773_14 (sequence is synthesized)
ctgccctcctcgggtttggaaggggaacacaccagcctctggttttttatttttttaagaagccatcacctgagcaaccaaaaattcctctgcgctggggtccgactgccctctggtggc

SEQ ID NO: 641588 - DNA, 120 bp, Artificial Sequence
  ENSG00000181773_15 (sequence is synthesized)
catttggggaaaactgcagcccggccaggcagctgggaccagaatgcaaccccagctccactccagcctggcgtccagggccacagccatggcctgggggccaagcctcaccctgcggtg

SEQ ID NO: 641589 - DNA, 120 bp, Artificial Sequence
  ENSG00000181773_16 (sequence is synthesized)
ccctaaaggagggggggcacgagccaacaccccacccctctgccaaccggggtatggcccccagtgcattccctgttcccgtctccaacccaactcaataaaaaatgattttgtcataaa

SEQ ID NO: 641590 - DNA, 120 bp, Artificial Sequence
  ENSG00000181778_0 (sequence is synthesized)
cagggaagcagaggagcagcagggtcagggtgctgggttcctaaggtgcaaggatgcagaacagaactggcctcattctctgtgctcttgccctcctgatgggtttcctgatggtctgcc

SEQ ID NO: 641591 - DNA, 120 bp, Artificial Sequence
  ENSG00000181778_1 (sequence is synthesized)
tgggggccttcttcatttcctggggctccatattcgactgtcaggggagcctgattgcggcctatttgcttctgcctctggggtttgtgatccttctgagtggaattttctggagcaact

SEQ ID NO: 641592 - DNA, 120 bp, Artificial Sequence
  ENSG00000181778_2 (sequence is synthesized)
atcgccaggtgactgaaagcaaaggagtgttgaggcacatgctccgacaacaccttgctcatggggccctgcccgtggccacagtagacaggccagacttttaccctccagcttatgaag

SEQ ID NO: 641593 - DNA, 120 bp, Artificial Sequence
  ENSG00000181778_3 (sequence is synthesized)
agagccttgaggtggaaaagcagagctgtcctgcagagagagaggcctctggcattcctccacctctatatacagagacgggcctggaattccaggatggaaatgactcccacccagagg

SEQ ID NO: 641594 - DNA, 120 bp, Artificial Sequence
  ENSG00000181778_4 (sequence is synthesized)
ccccaccatcttatagagagtccatagccggcctggtggtgacagcaatctcagaggacgcccagaggcgaggccaagagtgctgaggcagagaaagctctccagcactcatgatgccac

SEQ ID NO: 641595 - DNA, 120 bp, Artificial Sequence
  ENSG00000181778_5 (sequence is synthesized)
tgggaggaaaagccacaccagggaccccacaagagagcttggggaggggatgacagccctgaattccagacataactggccatgccagggcagggcaggccaggggccctggaagggtgt

SEQ ID NO: 641596 - DNA, 120 bp, Artificial Sequence
  ENSG00000181778_6 (sequence is synthesized)
ggccaacaccaagcagacatttcagagcattcacactaatcttaaccccggctggccttgggtccccaaaggtgtcactctgagagctctgcttacagagattctttctgctgtcactca

SEQ ID NO: 641597 - DNA, 120 bp, Artificial Sequence
  ENSG00000181778_7 (sequence is synthesized)
atttccctcccatcacctcaactccagccagggaggaatagatgctggttgtcaggacagccacatgccttcctgttctatatcacctagtaatctcaaagcgaaggtttgttgtttaat

SEQ ID NO: 641598 - DNA, 120 bp, Artificial Sequence
  ENSG00000181778_8 (sequence is synthesized)
ttattgattgttcagccttttgttttgttagcttgtttcctagttacctccagctgaccatactaccagagtgaggcagtacttcacatcctgggagatatgccctcggaacccatgaat

SEQ ID NO: 641599 - DNA, 120 bp, Artificial Sequence
  ENSG00000181778_9 (sequence is synthesized)
gttattttgtattattttattttcatgatatgtattttttctatgtaaaaggaaaatgactgtaatatttgccttcaagatggttcaaacacaaaatattaaatgagctgtttcttaaaa

SEQ ID NO: 641600 - DNA, 120 bp, Artificial Sequence
  ENSG00000181781_0 (sequence is synthesized)
actcgatcccggccccacttccaggccagtgtccggccgaccagcctgccttgggccagggccccacgactccctgctgcgggacaagaggccgtctgtgcggctgtggtcgtgggaggg

SEQ ID NO: 641601 - DNA, 120 bp, Artificial Sequence
  ENSG00000181781_1 (sequence is synthesized)
tgtggtgaggccgtgaaggtggggacggtgcctgggcctgtggccgccagagctgctgcggctcagaaggtagcaccaggccccgtgggtgctgtgggggccatcgcctgcccaccatgg

SEQ ID NO: 641602 - DNA, 120 bp, Artificial Sequence
  ENSG00000181781_2 (sequence is synthesized)
ggaccctcagctgcgactccaccccacggctggccacagccccccttggccggcgagtgacggagggccagattccggagaccggcctgaggaagtcctgtgggacggccaccctggaga

SEQ ID NO: 641603 - DNA, 120 bp, Artificial Sequence
  ENSG00000181781_3 (sequence is synthesized)
acggctcggggccaggcttgtatgtcctgccgtccaccgtgggcttcatcaaccacgactgcaccagggtggccagtcccgcctactcgctcgtccggaggcccagtgaggcaccacctc

SEQ ID NO: 641604 - DNA, 120 bp, Artificial Sequence
  ENSG00000181781_4 (sequence is synthesized)
aggacaccagcccgggccccatctacttcttggaccccaaagtcacacgctttggccgcagctgcacccctgcctactccatgcagggccgggccaagtctcggggtccggaggtgacgc

SEQ ID NO: 641605 - DNA, 120 bp, Artificial Sequence
  ENSG00000181781_5 (sequence is synthesized)
caggccctggggcctacagcccagagaaggtgccccctgtgcgccatcggacaccgccggctttcaccctgggctgccgcctccccctgaagcccctggacacctcagcccctgccccta

SEQ ID NO: 641606 - DNA, 120 bp, Artificial Sequence
  ENSG00000181781_6 (sequence is synthesized)
aagcccagcagccccagctacacggtggtgggccgcaccccccccgcccgccccccgcaggatcctgctgagataccaggcccgggccagtacgacagcccggacgcaaacacctaccgc

SEQ ID NO: 641607 - DNA, 120 bp, Artificial Sequence
  ENSG00000181781_7 (sequence is synthesized)
cagcgcctgcctgccttcaccatgctggggcggccccgggccccgcgacccctggaggagacccccggccctggcgcccactgcccagagcaggtcaccgtgaacaaagccagggctcca

SEQ ID NO: 641608 - DNA, 120 bp, Artificial Sequence
  ENSG00000181781_8 (sequence is synthesized)
gcgttctctatgggcatccgccactcgaaacgggccagcaccatggccgccaccacgccctcccggcctgcggggcacaggctgcccggccgctgctgctaggccaggcctgtttcccac

SEQ ID NO: 641609 - DNA, 120 bp, Artificial Sequence
  ENSG00000181781_9 (sequence is synthesized)
acagtgaacggggggctggcgggcctctcctggggcctggctttggctggaggggctagaaggcgagaggggctgggaaaggagtcttccctcccctttcctgaactgtccaggtccttc

SEQ ID NO: 641610 - DNA, 120 bp, Artificial Sequence
  ENSG00000181781_10 (sequence is synthesized)
taggacacctgatccttccagtccctgggggctgtgacccatggccctgtgcagggtgcagggtgagtctccttccagtgccccagtttcttccaggtcacgccaggccaggccaggcca

SEQ ID NO: 641611 - DNA, 120 bp, Artificial Sequence
  ENSG00000181781_11 (sequence is synthesized)
ggtggggaaagggacaccttccggccctccccagtagctggctggagatggagcttcctgtgtcccagaactcggcgtccagctccactagggcctggatccccatcacagcttgggtta

SEQ ID NO: 641612 - DNA, 120 bp, Artificial Sequence
  ENSG00000181781_12 (sequence is synthesized)
gccccggtcccagcccaaactcaggctggaggcagccccgaggcctgtgcctttcccactccaccttctacagttgcttagccaataaacctttcctgggctggagagctgtcagcatca

SEQ ID NO: 641613 - DNA, 120 bp, Artificial Sequence
  ENSG00000181785_0 (sequence is synthesized)
atgttggagagtaattacaccatgccaactgagttcctatttgttggattcacagattatctacctctcagagtcacactgttcttggtattccttctggtatatacattaactatggtc

SEQ ID NO: 641614 - DNA, 120 bp, Artificial Sequence
  ENSG00000181785_1 (sequence is synthesized)
ggaaatatactcttaataattctagttaatattaattcaagccttcaaattcccatgtattattttcttagcaacttatctttcttagacatcagctgttctacagcaatcactcctaaa

SEQ ID NO: 641615 - DNA, 120 bp, Artificial Sequence
  ENSG00000181785_2 (sequence is synthesized)
atgctggcaaacttcttggcatccaggaaaagcatctctccttatgggtgtgcactacaaatgtttttcttcgcttcttttgctgatgctgagtgccttatcctggcagcaatggcttat

SEQ ID NO: 641616 - DNA, 120 bp, Artificial Sequence
  ENSG00000181785_3 (sequence is synthesized)
gaccgctatgcagccatctgcaacccactgctctatactacactgatgtctaggagagtctgtgtctgcttcattgtgttggcatatttcagtggaagtacaacatcactggtccatgtg

SEQ ID NO: 641617 - DNA, 120 bp, Artificial Sequence
  ENSG00000181785_4 (sequence is synthesized)
ctgtcattttgtggctccaatatcgtcaatcattttttctgtgatatcccacctcttctggctttatcatgtacagacactcagatcaaccagcttctgctctttgctttgtgcagcttc

SEQ ID NO: 641618 - DNA, 120 bp, Artificial Sequence
  ENSG00000181785_5 (sequence is synthesized)
atccagaccagcacttttgtggtaatatttatttcttacttctgcatcctcatcactgtgttgagcatcaagtcctcaggtggcagaagcaaaacattctccacttgtgcttcccacctc

SEQ ID NO: 641619 - DNA, 120 bp, Artificial Sequence
  ENSG00000181785_6 (sequence is synthesized)
atagcagtcaccttattctatggagcgctcctgtttatgtacttacagcccaccactagctattccctagacactgataaggtggtggcagtgttttatactgttgtatttcccatgttt

SEQ ID NO: 641620 - DNA, 120 bp, Artificial Sequence
  ENSG00000181785_7 (sequence is synthesized)
aatccaataatttatagtttcagaaacaaggatgtgaaaaatgctctcaaaaagctattagaaagaattggatattcaaatgaatggtatttaaatcgtttaagaatagtcaatatctaa

SEQ ID NO: 641621 - DNA, 120 bp, Artificial Sequence
  ENSG00000181785_8 (sequence is synthesized)
taaacagcaattatgccatgaacatcttatgtgttaactattttaaatttatcacattttcagaaataaagataacttgttatactcagtgcattaaaatgcttcatcctctcttccaaa

SEQ ID NO: 641622 - DNA, 120 bp, Artificial Sequence
  ENSG00000181785_9 (sequence is synthesized)
aatgttctctccacaattctactctataaaacattacctaattaaacatagtcattatttatatccaattagtgtttctaaaatgctttgtacattgattctgttctttacgatgttgta

SEQ ID NO: 641623 - DNA, 120 bp, Artificial Sequence
  ENSG00000181785_10 (sequence is synthesized)
ttgaaggtaaatattgacttttcagtcaatcaatcggtattagaagctacttggcagcagagcatgtgtatattggcttgttttttccaccacctgtttggcacctggtatactgcatgt

SEQ ID NO: 641624 - DNA, 120 bp, Artificial Sequence
  ENSG00000181785_11 (sequence is synthesized)
accacctgtttggcacctggtatactgcatgtcttccttatctgtgtgtttaggccatttatgcatagagttccattattggaacactaagcatcctactgctcaaggtcatcgccaagg

SEQ ID NO: 641625 - DNA, 120 bp, Artificial Sequence
  ENSG00000181785_12 (sequence is synthesized)
cagacataaatttaagtatggatggagggatggatagatggatagatagatgaatgactgggaaaatacagccttattttatttggacagtgagtctatatttgtactcacaaagcattt

SEQ ID NO: 641626 - DNA, 120 bp, Artificial Sequence
  ENSG00000181785_13 (sequence is synthesized)
gtcaatagagatattttataataccaataatctgttagggatactgatggtggtttcactggttctcaagaaattagaagacatgtagcaatagtctcattattattaagtcagaatgaa

SEQ ID NO: 641627 - DNA, 120 bp, Artificial Sequence
  ENSG00000181785_14 (sequence is synthesized)
gatacatcacattgtctttgggctaagttgattactgcaagaaattccctactttttcattcagagtgggtaattgtgaaaaacaagtttgtgaatactatcaagattataaactgtaga

SEQ ID NO: 641628 - DNA, 120 bp, Artificial Sequence
  ENSG00000181785_15 (sequence is synthesized)
atttcctaattatttatattcatgttgctaacatagtctttgaggctctatcttcaagaagaggtgaaaattacactgatcttttattctgtaaatttacaatgcaaggcaattaaagta

SEQ ID NO: 641629 - DNA, 120 bp, Artificial Sequence
  ENSG00000181785_16 (sequence is synthesized)
taaacaatttttactctgtaatcgattttgataattaaattatcagattttttgtggtttattctgatctttcagtctgaagtctctatttactttttgtcttattttgacaaagttaaa

SEQ ID NO: 641630 - DNA, 120 bp, Artificial Sequence
  ENSG00000181785_17 (sequence is synthesized)
gtgatacaccatgtacatgtgaaataaaaaagtgtgcattttgtaataattatgaaaatataaatggttggattagttatattgaatttaaccttggacatggagacaataagatagcac

SEQ ID NO: 641631 - DNA, 120 bp, Artificial Sequence
  ENSG00000181785_18 (sequence is synthesized)
atggattgttttgagtattaagtaaagttatatatgtaaaattactggtatatgtatatgatttgaaaattaaataatctaatatttatagacataccatgaagatactgtgggttctct

SEQ ID NO: 641632 - DNA, 120 bp, Artificial Sequence
  ENSG00000181785_19 (sequence is synthesized)
ggttctcttctagatcactacaataaagcaactgacgcagtaaagtgtcacacaaatttttagatttctcagtgcatatcatagttatgtttggtggctggcaagatggtcaaataggag

SEQ ID NO: 641633 - DNA, 74 bp, Artificial Sequence
  ENSG00000181785_20 (sequence is synthesized)
atagttatgtttggtggctggcaagatggtcaaataggagatgctccagtctgctgctcccagcaagatcaaca

SEQ ID NO: 641634 - DNA, 120 bp, Artificial Sequence
  ENSG00000181785_21 (sequence is synthesized)
gggtgagcagaagcagggtggggtgttgcttcacccgggaagcacaaagggttggcaaactccctccactagccaagggaagccatgaaggactgtgccatgaggaacgggtgcactctg

SEQ ID NO: 641635 - DNA, 120 bp, Artificial Sequence
  ENSG00000181785_22 (sequence is synthesized)
gcccagatactatgcttttcccatcgtcttcacaacacacggaccaggagattcccttgggtgcctacatcaccagctccctgggattgaagcacaaaactcggtggctgtttgggcagg

SEQ ID NO: 641636 - DNA, 64 bp, Artificial Sequence
  ENSG00000181785_23 (sequence is synthesized)
ctgggattgaagcacaaaactcggtggctgtttgggcaggcactgagctagctgcaggagtttt

SEQ ID NO: 641637 - DNA, 120 bp, Artificial Sequence
  ENSG00000181785_24 (sequence is synthesized)
agctaagatccactggcttgaaattcttcctgcaagcatagcagtctgaagttgacctgggatgctcgagcttggttggaggaggagagtccgccattgctgaggcttcagtaggcagtt

SEQ ID NO: 641638 - DNA, 120 bp, Artificial Sequence
  ENSG00000181785_25 (sequence is synthesized)
gccattgctgaggcttcagtaggcagttttcccctcatagtgtaaacaaagctgccaggaagtttgaactgggtggagcccaccgcagcactgcaaaacctctgtagccagactgcctct

SEQ ID NO: 641639 - DNA, 120 bp, Artificial Sequence
  ENSG00000181785_26 (sequence is synthesized)
ctagattcctcctctctgggcaggggatctctaaaaaaaaggcagcagccccagttaggggcctagagataaaacccccatccccctgagacagagcaccttaaggaagggatggctgtg

SEQ ID NO: 641640 - DNA, 120 bp, Artificial Sequence
  ENSG00000181785_27 (sequence is synthesized)
ggtgcagcttcagcagatttaaatgtccctgcctgctggctctaaggagagcagcatacctcccagcacatcgttcaagctctcctaagagatagactcctgcatcaagtgggtccttga

SEQ ID NO: 641641 - DNA, 120 bp, Artificial Sequence
  ENSG00000181785_28 (sequence is synthesized)
ccccgtgactcttgactgggagacaccttccagtaggggttgacagatacctcataggagagagctccagctggcatctcacaggtgtgcctctaggatgaagcttccaaaggaaggaac

SEQ ID NO: 641642 - DNA, 79 bp, Artificial Sequence
  ENSG00000181785_29 (sequence is synthesized)
acaggtgtgcctctaggatgaagcttccaaaggaaggaacgggcagcaatctttactgttctgcagccttcgcagacct

SEQ ID NO: 641643 - DNA, 90 bp, Artificial Sequence
  ENSG00000181785_30 (sequence is synthesized)
ccactgcatgatggtgaggaaaaaccaatgcaaaaaggctgaaaatttctaaaaccagacatctcttctcccacaaaggatcacaattcc

SEQ ID NO: 641644 - DNA, 120 bp, Artificial Sequence
  ENSG00000181785_31 (sequence is synthesized)
ctggacagagaatgagtttgatgaattgatggaagtaattgggtaataacaaatagaagaattgggtaatatcaaactcctctgagctaaaggagcatgtcctaactcaatgcaaagaag

SEQ ID NO: 641645 - DNA, 120 bp, Artificial Sequence
  ENSG00000181785_32 (sequence is synthesized)
agctaaaggagcatgtcctaactcaatgcaaagaagctaagaacctcgaaaaatggttagaggaattgctaattagaataactggtttgaagagaacataaataacctgatggagctgaa

SEQ ID NO: 641646 - DNA, 89 bp, Artificial Sequence
  ENSG00000181785_33 (sequence is synthesized)
ttgaagacaagattagagaaaaaagaatgcaaagaaatgaacaaagcccccagggattatgggactatgtgaaaagagcaaacatatat

SEQ ID NO: 641647 - DNA, 80 bp, Artificial Sequence
  ENSG00000181785_34 (sequence is synthesized)
agattagagaaaaaagaatgcaaagaaatgaacaaagcccccagggattatgggactatgtgaaaagagcaaacatatat

SEQ ID NO: 641648 - DNA, 81 bp, Artificial Sequence
  ENSG00000181785_35 (sequence is synthesized)
caggccaacattcaaattcaggaaatacatgtaacaccacaaagatacacctcaagaagagcaacccccagacacataatc

SEQ ID NO: 641649 - DNA, 84 bp, Artificial Sequence
  ENSG00000181785_36 (sequence is synthesized)
aagctcacactgtctcagcagaaaccctataagccagaagtgagtgggggccaatatccaacagtcttaaagaaaagaatttta

SEQ ID NO: 641650 - DNA, 120 bp, Artificial Sequence
  ENSG00000181785_37 (sequence is synthesized)
gaagtgagtgggggccaatatccaacagtcttaaagaaaagaattttaaatgcagagtttcatattcagccaaactaagcttcatgagtggagggaaataaaatcctttacagaaaagca

SEQ ID NO: 641651 - DNA, 120 bp, Artificial Sequence
  ENSG00000181785_38 (sequence is synthesized)
tcctgaaggaagcactaaacatggaaaggtacaactggtaacagccactgcaaaaaaaacaaattttaaagaacattgacactacgaagaaaccacatcagctaatgggcaaaataacca

SEQ ID NO: 641652 - DNA, 120 bp, Artificial Sequence
  ENSG00000181785_39 (sequence is synthesized)
gactggcaaattggatagagtcaagaccgattggtgtgctgtattcaggagaccgatctcatgtgcaaagcatacataggctcaaaataacgggatggaggaatatttaccaagcaaatg

SEQ ID NO: 641653 - DNA, 120 bp, Artificial Sequence
  ENSG00000181785_40 (sequence is synthesized)
agaaaaaagaaaaaaaaaacaacaaagcacaggggttgtaatcctagtctctgataaaacagactataaccaaaaaagatcaaaagagataaagaaggcaatacataatggtaaaaggat

SEQ ID NO: 641654 - DNA, 120 bp, Artificial Sequence
  ENSG00000181785_41 (sequence is synthesized)
caagaagagctaactatactaaatatatatgtacccaatacaagagcacccaaattcataaagccagttcttagagatctatgaagagacttagactaacacacaaaaatagtgggagac

SEQ ID NO: 641655 - DNA, 120 bp, Artificial Sequence
  ENSG00000181785_42 (sequence is synthesized)
cataaagccagttcttagagatctatgaagagacttagactaacacacaaaaatagtgggagactttaacaccccacagtcaacattagacagaccaagacagaaaattaacaaggatat

SEQ ID NO: 641656 - DNA, 120 bp, Artificial Sequence
  ENSG00000181785_43 (sequence is synthesized)
gacctctacagaactctacaccccaaatcaatagaatatacattattctcagcaccacattgcatttattctaaaattgaccacaatattgcaagtaaaatactcctcagcaaatgcaaa

SEQ ID NO: 641657 - DNA, 73 bp, Artificial Sequence
  ENSG00000181785_44 (sequence is synthesized)
caacctgctcatgaatgactactgggtaaataatgaaaataaggtatcagaatctctgggacatagctaaagc

SEQ ID NO: 641658 - DNA, 70 bp, Artificial Sequence
  ENSG00000181785_45 (sequence is synthesized)
aaaaattataaaggggatatcaccactgacaaataaactagaaaacctggaagaaatggttaaattcctg

SEQ ID NO: 641659 - DNA, 120 bp, Artificial Sequence
  ENSG00000181785_46 (sequence is synthesized)
aaataaactagaaaacctggaagaaatggttaaattcctggaaacacacaccctcccaagtctaatccaggaagaagtcaaatccatgaatagaccaaaaacaagtcccaaaattgaggc

SEQ ID NO: 641660 - DNA, 89 bp, Artificial Sequence
  ENSG00000181785_47 (sequence is synthesized)
catgaatagaccaaaaacaagtcccaaaaaaatagtccaggaccagccaaattctaccagacatacaaagaggagctggtactattcct

SEQ ID NO: 641661 - DNA, 120 bp, Artificial Sequence
  ENSG00000181785_48 (sequence is synthesized)
cctccctaactcattttatgcggccagcatcatcctgatatgaaaacctggcagagacacagcaaaaaaagaacatgccaggccaatatccctgatgaacatgatgcaaaaatcctcaaa

SEQ ID NO: 641662 - DNA, 120 bp, Artificial Sequence
  ENSG00000181785_49 (sequence is synthesized)
aaatactggcaaactgaattcagcggcacatcaaaaagcttatccaccaatcaaattggctttatccctgggatgcaaggctggcttaacatacgcaaatcaataaacgtaacccatctc

SEQ ID NO: 641663 - DNA, 120 bp, Artificial Sequence
  ENSG00000181785_50 (sequence is synthesized)
gtaacccatctcataaacagaaccaatgacaaaagcacatgtttatctcaacagatgccgaaaaggcctttgataaaattcaacacccttcgtgctaaaaactctcaataaactaggtat

SEQ ID NO: 641664 - DNA, 120 bp, Artificial Sequence
  ENSG00000181785_51 (sequence is synthesized)
tattcaacatagtattgaaagtgctggccagggcaatcaggcaagataaagaaataaaggatattcaaataggaaaagaggaagtcaaatcgtctctgtttgcagatgacatgattgtat

SEQ ID NO: 641665 - DNA, 120 bp, Artificial Sequence
  ENSG00000181785_52 (sequence is synthesized)
gacaaacagagccaaatcgaatgaactgccattcacaattgctacaaaagagtgtaaaatacctagaaatacaacttacgagggatatgaatgacctcttcaaggagaactacaaattag

SEQ ID NO: 641666 - DNA, 120 bp, Artificial Sequence
  ENSG00000181785_53 (sequence is synthesized)
tggaaaaacattccatgctcatggatatgaagaatcaatatcatgaaaatggccatctactgccctaagtaatttttagattcaatactatccccgtcaagctatcattgaatttcttca

SEQ ID NO: 641667 - DNA, 120 bp, Artificial Sequence
  ENSG00000181785_54 (sequence is synthesized)
tatccccgtcaagctatcattgaatttcttcacagaattagaaaaaaaaaaaaactactttaaatttcatgtggaaccagaaaacagcccatgtagcccaggcaatcctaagcaaaaaga

SEQ ID NO: 641668 - DNA, 90 bp, Artificial Sequence
  ENSG00000181785_55 (sequence is synthesized)
aaaaacagtatggtcctggtaccaaagcagatatatagaccaatggaacagaatagaggcctcacaaataacaccacacatctacaacca

SEQ ID NO: 641669 - DNA, 68 bp, Artificial Sequence
  ENSG00000181785_56 (sequence is synthesized)
aaactggctagccatatgcagaaagcagaaactggaccccttccttaatcaacacgctgaaccatgca

SEQ ID NO: 641670 - DNA, 120 bp, Artificial Sequence
  ENSG00000181786_0 (sequence is synthesized)
gtctgcctgccctccccactggccgggcctcaacctcttctccccgcaaccccaaccccagaggaaaagccccctcacctggcgtcccgcaaccatggatgcaagtcgccccaagtcctc

SEQ ID NO: 641671 - DNA, 120 bp, Artificial Sequence
  ENSG00000181786_1 (sequence is synthesized)
ggaatcccagtcctccctggaggcccccaggcccggcccaaaccccagtcccaacgtggtgaacaagcccctgcagcgggactcccccggcatggtggccgacaggctgccaccaaagac

SEQ ID NO: 641672 - DNA, 120 bp, Artificial Sequence
  ENSG00000181786_2 (sequence is synthesized)
cggcgcggtggttattgacatgggcacaggcacctgtaaggtaggttttgctgggcaggccagccccacctacaccgtggccaccatcctgggctgccagcccaagaaacccgccacctc

SEQ ID NO: 641673 - DNA, 120 bp, Artificial Sequence
  ENSG00000181786_3 (sequence is synthesized)
ggggcagtccgggctgcagacgttcatcggcgaggcagcccgcgtgctcccagagctgacgctggtgcaacccctgcgcagcggcatcgtcgtggactgggatgccgccgagctcatctg

SEQ ID NO: 641674 - DNA, 120 bp, Artificial Sequence
  ENSG00000181786_4 (sequence is synthesized)
gcgccacctgctggagcacgacctccgagtggccacccacgaccacccgctgctgttctccgacccacccttcagcccggccaccaaccgcgagaagctagtggaggtggccttcgagtc

SEQ ID NO: 641675 - DNA, 120 bp, Artificial Sequence
  ENSG00000181786_5 (sequence is synthesized)
gtggtggacacgggacacggggtcacctacacagtgcccgtcttccagggctacaacctgctccacgccacggagcgtctggacctggcgggcaacaacctgaccgccttcctggcggag

SEQ ID NO: 641676 - DNA, 120 bp, Artificial Sequence
  ENSG00000181786_6 (sequence is synthesized)
atgctgctccaggccggcctgcccctgggacagcaggacctggacctagtggagaacattaagcaccactattgctacgtggcctccgacttccagaaggagcaggcccggccggagcag

SEQ ID NO: 641677 - DNA, 120 bp, Artificial Sequence
  ENSG00000181786_7 (sequence is synthesized)
gagtacaagcggactctgaagctgcccgatgggcgcacggtcaccctgggcaaggagctgttccagtgtccggagctgctgttcaaccccccagaggtcccggggctgtcacccgtcggc

SEQ ID NO: 641678 - DNA, 120 bp, Artificial Sequence
  ENSG00000181786_8 (sequence is synthesized)
ctctccaccatggccaagcagagtctccgcaagttgtcactggagatgcgcgcggacttggcccaaaacgtgcttctctgcggtgggtcctcgctcttcaccggcttcgagggtcgcttc

SEQ ID NO: 641679 - DNA, 120 bp, Artificial Sequence
  ENSG00000181786_9 (sequence is synthesized)
cgggcagagctgctgcgcgctctgccagccgagacccacgtggtggtggctgcccagcccaccaggaatttctccgtatggatcgggggctccatcctggcctccctgcgcgccttccag

SEQ ID NO: 641680 - DNA, 120 bp, Artificial Sequence
  ENSG00000181786_10 (sequence is synthesized)
tcctgctgggtcctgcgggagcagtacgaggaacagggtccctatatcgtgtaccgcaaatgctactgaccagggcagagctggggagggcgtgggggcagtaaagcctctgctacagcc

SEQ ID NO: 641681 - DNA, 80 bp, Artificial Sequence
  ENSG00000181788_0 (sequence is synthesized)
gcttgcgtcagcggctgttccagaagcgggtgggccagggctctgcgcaccgctggggttcggggcccgggacgccgccg

SEQ ID NO: 641682 - DNA, 80 bp, Artificial Sequence
  ENSG00000181788_1 (sequence is synthesized)
cggaacgccgggggctgcggagtgcatcagcgcggtccagccctccgcctgccgggcgccgagcgtctccgccgcccgga

SEQ ID NO: 641683 - DNA, 120 bp, Artificial Sequence
  ENSG00000181788_2 (sequence is synthesized)
ccgcggggcgcgcaccgccttgacccgggcggccccgcggcaggcaggcgcccgcagttccatggttggttcggagcgcgatgagccgcccgtcctccaccggccccagcgctaataaac

SEQ ID NO: 641684 - DNA, 120 bp, Artificial Sequence
  ENSG00000181788_3 (sequence is synthesized)
cccagcgctaataaaccctgcagcaagcagccgccgccgcagccccagcacactccgtccccggctgcgcccccggccgccgccaccatctcggctgcgggccccggctcgtccgcggtg

SEQ ID NO: 641685 - DNA, 120 bp, Artificial Sequence
  ENSG00000181788_4 (sequence is synthesized)
tgatctcgggccccggcggcggcggcggggccggcccggtgtccccgcagcaccacgagctgacctcgctcttcgagtgtccggtctgctttgactatgtcctgcctcctattctgcagt

SEQ ID NO: 641686 - DNA, 120 bp, Artificial Sequence
  ENSG00000181788_5 (sequence is synthesized)
gccaggccgggcacctggtgtgtaaccaatgccgccagaagttgagctgctgcccgacgtgcaggggcgccctgacgcccagcatcaggaacctggctatggagaaggtggcctcggcag

SEQ ID NO: 641687 - DNA, 120 bp, Artificial Sequence
  ENSG00000181788_6 (sequence is synthesized)
tcctgtttccctgtaagtatgccaccacgggctgttccctgaccctgcaccatacggagaaaccagaacatgaagacatatgtgaataccgtccctactcctgcccatgtcctggtgctt

SEQ ID NO: 641688 - DNA, 120 bp, Artificial Sequence
  ENSG00000181788_7 (sequence is synthesized)
cctgcaagtggcaggggtccctggaagctgtgatgtcccatctcatgcacgcccacaagagcattaccacccttcagggagaagacatcgtctttctagctacagacattaacttgccag

SEQ ID NO: 641689 - DNA, 120 bp, Artificial Sequence
  ENSG00000181788_8 (sequence is synthesized)
gggctgtcgactgggtgatgatgcagtcatgttttggccatcacttcatgctggtgctggagaaacaagagaagtacgaaggccaccagcagttttttgccatcgtcctgctcattggca

SEQ ID NO: 641690 - DNA, 120 bp, Artificial Sequence
  ENSG00000181788_9 (sequence is synthesized)
actggagttgaatgggaaccggcggagattgacctgggaggccacgccccgttcgattcatgacggtgtggctgcggccatcatgaacagcgactgccttgttttcgacacagccatagc

SEQ ID NO: 641691 - DNA, 120 bp, Artificial Sequence
  ENSG00000181788_10 (sequence is synthesized)
acatctttttgcagataatgggaaccttggaatcaatgttactatttctacatgttgtccatgatgtgactttcgtaaaccttcaaaattatttgggcatagtgctctatgtttaataaa

SEQ ID NO: 641692 - DNA, 120 bp, Artificial Sequence
  ENSG00000181788_11 (sequence is synthesized)
ggtttttatagatgttttattccatatgtcttcacaagtcaggacccacaattacccgtgttttgtttgaacagcagtgtcccatctggcttcgacccaacaaagttcattaacctggga

SEQ ID NO: 641693 - DNA, 120 bp, Artificial Sequence
  ENSG00000181788_12 (sequence is synthesized)
tgaatggggttggcctgttggtgatttggatgctgttctgtgatctaaaacaactcttattgaattgtatttactccctaaacaacacttgacaggctgttgcacagggcttctatagat

SEQ ID NO: 641694 - DNA, 120 bp, Artificial Sequence
  ENSG00000181788_13 (sequence is synthesized)
cagtgtgttaggaatgggaggccccttcctgcctgccttcccatattggtcccttgacattgacaaaagcacagtgactgtcagcagattcctttacttttgtttgtgggaggtaggaat

SEQ ID NO: 641695 - DNA, 120 bp, Artificial Sequence
  ENSG00000181788_14 (sequence is synthesized)
tgttttaatgcattttaaacagtgtttctgaaattggatggctggctaatagacactgaatcacccggagtgcttatcttaaaattgcagatttagggagcctgccaatttaacagtctc

SEQ ID NO: 641696 - DNA, 120 bp, Artificial Sequence
  ENSG00000181788_15 (sequence is synthesized)
atcaggtgattcttttcaacagtaatgtttgagaattactgggttaaattgtgggaaagggtccagattttaaaggtgctttaaggttgccctctgccgatactgtttgtctttctactg

SEQ ID NO: 641697 - DNA, 120 bp, Artificial Sequence
  ENSG00000181788_16 (sequence is synthesized)
tttcatcccctaacttcccccaaccctcaaattaaaactagaactatagatccacatgaacgcacgcctgagatttggccactcacctatgttttgggtggattgcctaggaaagcaagt

SEQ ID NO: 641698 - DNA, 120 bp, Artificial Sequence
  ENSG00000181788_17 (sequence is synthesized)
catatggccattgatagttctcatgtaattagttttgctcaccactagtacagatgacccgtttacacgtggcttccctcggaagccctcctcaacagtagctggtgtgaaagactaaat

SEQ ID NO: 641699 - DNA, 120 bp, Artificial Sequence
  ENSG00000181788_18 (sequence is synthesized)
cagtagagttggaaaagctttataaccggtgtgtcatatgcttgctatttaaagctgtgtgttggttttgtttttctgccacattcactagttttttaataaatattttccaaaaatgga

SEQ ID NO: 641700 - DNA, 120 bp, Artificial Sequence
  ENSG00000181788_19 (sequence is synthesized)
gagctgagggacgcgtcagccaggcaccccggggtgtggccagaggacttcggcgacgcttccccgagagtagcccccctcctcaacccagaaaagacaaccccgcggggctgcagcgag

SEQ ID NO: 641701 - DNA, 120 bp, Artificial Sequence
  ENSG00000181788_20 (sequence is synthesized)
ccggcgcagggtggctctgccagtccccgcgcgcctgggcggccgcacacgtgtccaggcgtcacgtccgcgcgcgcccccggggcttgcgtcagcggctgttccagaagcggtgccagg

SEQ ID NO: 641702 - DNA, 120 bp, Artificial Sequence
  ENSG00000181788_21 (sequence is synthesized)
agcggtgccaggccgggcacctggtgtgtaaccaatgccgccagaagttgagctgctgcccgacgtgcaggggcgccctgacgcccagcatcaggaacctggctatggagaaggtggcct

SEQ ID NO: 641703 - DNA, 120 bp, Artificial Sequence
  ENSG00000181789_0 (sequence is synthesized)
agtcggggcccggaagtggtccctgtagaaccactgtggcaccgctactccgtgccgcgcccgtcgagcattgcgttgctgcattgcgccccaccgactccactatgttgaagaaattcg

SEQ ID NO: 641704 - DNA, 120 bp, Artificial Sequence
  ENSG00000181789_1 (sequence is synthesized)
acaagaaggatgaggagtcaggtggaggctccaacccattccagcaccttgagaagagtgcggtactccaggaggcccgtgtatttaatgaaactcccatcaaccctcggaaatgtgccc

SEQ ID NO: 641705 - DNA, 120 bp, Artificial Sequence
  ENSG00000181789_2 (sequence is synthesized)
acatcctcaccaagattctttatctcataaaccagggggagcacctggggaccacggaagcgaccgaggccttctttgccatgaccaagctctttcagtccaatgatcccacactccgtc

SEQ ID NO: 641706 - DNA, 120 bp, Artificial Sequence
  ENSG00000181789_3 (sequence is synthesized)
ggatgtgctacttgaccatcaaggagatgtcttgcattgcagaggatgtcatcattgtcaccagcagcctaacaaaagacatgactgggaaagaagacaactaccggggcccggccgtgc

SEQ ID NO: 641707 - DNA, 120 bp, Artificial Sequence
  ENSG00000181789_4 (sequence is synthesized)
gagccctctgccagatcactgatagcaccatgctgcaggctattgagcgctacatgaaacaagccattgtggacaaggtgcccagtgtctccagctctgccctcgtgtcttccttgcacc

SEQ ID NO: 641708 - DNA, 120 bp, Artificial Sequence
  ENSG00000181789_5 (sequence is synthesized)
tgctgaagtgcagctttgacgtggtcaagcgctgggtgaatgaggctcaggaggcagcatccagtgataacatcatggtccagtaccacgcactagggctcctgtaccatgtgcgtaaga

SEQ ID NO: 641709 - DNA, 120 bp, Artificial Sequence
  ENSG00000181789_6 (sequence is synthesized)
atgaccgcctagccgtcaataagatgatcagcaaggtcacacggcatggccttaagtctccctttgcctactgcatgatgatccgggtggccagcaagcagctggaagaggaggatggca

SEQ ID NO: 641710 - DNA, 120 bp, Artificial Sequence
  ENSG00000181789_7 (sequence is synthesized)
gccgtgacagcccactgtttgacttcatcgagagctgcttgcgcaacaagcacgagatggtggtgtatgaagccgcctcggccatcgtcaatctgccaggctgcagtgccaaagagctgg

SEQ ID NO: 641711 - DNA, 120 bp, Artificial Sequence
  ENSG00000181789_8 (sequence is synthesized)
ccccggctgtgtcagtgctccagcttttctgcagctcacccaaggctgctctccgctatgctgctgttcgtaccctcaataaggttgccatgaagcatccgtcagctgtgacagcttgta

SEQ ID NO: 641712 - DNA, 120 bp, Artificial Sequence
  ENSG00000181789_9 (sequence is synthesized)
atctggatctggagaacctggtcacagattcaaaccgcagcattgccacgctggccatcaccaccctccttaagacgggcagcgagagcagcatcgaccgcctcatgaagcagatctcct

SEQ ID NO: 641713 - DNA, 120 bp, Artificial Sequence
  ENSG00000181789_10 (sequence is synthesized)
ccttcatgtcagaaatctcggatgaattcaaggtggtggttgtccaggccatcagtgccctgtgtcagaaatatcctcgcaaacacgccgtccttatgaacttcctgttcaccatgctgc

SEQ ID NO: 641714 - DNA, 120 bp, Artificial Sequence
  ENSG00000181789_11 (sequence is synthesized)
gggaagagggtggctttgagtataagcgcgctatcgtggactgcatcatcagcatcattgaagagaactcagagagcaaggagacagggctgtcacatctgtgcgagttcatcgaggact

SEQ ID NO: 641715 - DNA, 120 bp, Artificial Sequence
  ENSG00000181789_12 (sequence is synthesized)
acatccgcttcatctataaccgagtggtcttggagcatgaggaggtccgggcaggtgctgtgagtgctctggcgaagtttggagcccagaatgaagagatgttacccagtatcttggtgt

SEQ ID NO: 641716 - DNA, 120 bp, Artificial Sequence
  ENSG00000181789_13 (sequence is synthesized)
tgctgaagaggtgtgtgatggatgatgacaatgaagtaagggaccgagccaccttctacctaaatgtcctggagcagaagcagaaggcccttaatgcaggctatatcctaaatggtctga

SEQ ID NO: 641717 - DNA, 120 bp, Artificial Sequence
  ENSG00000181789_14 (sequence is synthesized)
ctgtgtccatccctggtctggagagggctctgcagcagtacactctagaaccatcagaaaaaccttttgacctcaagtctgtgcccctggccacggcgcccatggcagagcagagaacag

SEQ ID NO: 641718 - DNA, 120 bp, Artificial Sequence
  ENSG00000181789_15 (sequence is synthesized)
aaagtacccccatcacagcagtcaaacagcctgagaaagtggcagctaccaggcaggagatcttccaggagcagttggcagcagtgccagagttccgcggtcttgggcccctcttcaagt

SEQ ID NO: 641719 - DNA, 120 bp, Artificial Sequence
  ENSG00000181789_16 (sequence is synthesized)
cctcgcctgagcccgtggccctcaccgagtcagagacggagtatgtcatccgctgcaccaaacacaccttcaccaaccacatggtttttcagtttgactgcacaaacacactcaatgacc

SEQ ID NO: 641720 - DNA, 120 bp, Artificial Sequence
  ENSG00000181789_17 (sequence is synthesized)
agaccttggagaatgtcacagtgcagatggagcccactgaggcctatgaggtgctctgttacgtgcctgcccggagcctgccctacaaccagcccgggacctgctacacactggtggcac

SEQ ID NO: 641721 - DNA, 120 bp, Artificial Sequence
  ENSG00000181789_18 (sequence is synthesized)
tgcccaaagaagaccccacagctgtggcctgcacattcagctgcatgatgaagttcactgtcaaggactgtgatcccaccactggggagactgatgacgaaggctatgaggatgagtatg

SEQ ID NO: 641722 - DNA, 120 bp, Artificial Sequence
  ENSG00000181789_19 (sequence is synthesized)
tgctggaagatctggaagttactgtagctgatcacattcaaaaggtcatgaaactgaacttcgaagcagcctgggatgaggtaggggatgaatttgagaaggaggaaacgttcaccttgt

SEQ ID NO: 641723 - DNA, 120 bp, Artificial Sequence
  ENSG00000181789_20 (sequence is synthesized)
ctaccatcaagacacttgaagaggctgtgggtaatattgtgaagttcttgggaatgcacccttgtgagaggtcagacaaagtgccggataacaagaacacccacacgttgctcctggctg

SEQ ID NO: 641724 - DNA, 120 bp, Artificial Sequence
  ENSG00000181789_21 (sequence is synthesized)
gtgtgttccggggtggtcatgacatcctggtgcgctcccggctgctgcttttggacacagtgacaatgcaggtgacagccagaagtttggaggagctgccagtagacatcatcttggcat

SEQ ID NO: 641725 - DNA, 120 bp, Artificial Sequence
  ENSG00000181789_22 (sequence is synthesized)
ctgtgggataagaggccagcctgcataggacctcatacccttccccaacactacctggaagttgtgccttcctcatgaaactggcagaaaccccttcccaagcttctgtattgaaaaaca

SEQ ID NO: 641726 - DNA, 120 bp, Artificial Sequence
  ENSG00000181789_23 (sequence is synthesized)
attaggaatcattgcagatttttttttattctgctcccacctcccacccgggactacttgctggtgactttttttttttttttttttaaataggggatgattttagcttgtcctaaatct

SEQ ID NO: 641727 - DNA, 120 bp, Artificial Sequence
  ENSG00000181789_24 (sequence is synthesized)
tgctgtccacccttccaggaaagggacattgtaaatgaataaaacattctcaactcctcttgaatctatcccccaagaaaccatcttatccctgtaataaatcagcatgtatttattgaa

SEQ ID NO: 641728 - DNA, 120 bp, Artificial Sequence
  ENSG00000181789_25 (sequence is synthesized)
tgtaacaaggtggtgggagggccaaagagagctggccccaccagtcagtgtgggctgcctttgtggagacaggaggtatcttctcccaactctggcccttggtgagcccgggctgatagg

SEQ ID NO: 641729 - DNA, 120 bp, Artificial Sequence
  ENSG00000181789_26 (sequence is synthesized)
cttgagaagagtgcggtactccaggaggcaagtgacatttgctcccctctagcttccatcataaatattcaccaccaatgcaactgaaataccaacacattcaaagtgttgttttaaaga

SEQ ID NO: 641730 - DNA, 120 bp, Artificial Sequence
  ENSG00000181789_27 (sequence is synthesized)
gaggggtgaggaatgctacaggctgaggaaacagcacatgcaaaggctggagaggagtgagcatagccagttagggaagttcaaggagttacattcaggtcactggcagtaggaagctat

SEQ ID NO: 641731 - DNA, 120 bp, Artificial Sequence
  ENSG00000181789_28 (sequence is synthesized)
actggttaggaggctcgtgtagtaatctgggcaagggtggtgttgggagctggagaggagtaaacaggcccaggctctctgcatgctgacaatgccttcttccctgcagcctaacaaaag

SEQ ID NO: 641732 - DNA, 120 bp, Artificial Sequence
  ENSG00000181789_29 (sequence is synthesized)
ctcttctgatgggttccattgacagaccatttttttcttgtgtgtaccagacagtgagacttggttgcatattgccagctgcccaccccgtggcagcttccctgttaccactgcccaccc

SEQ ID NO: 641733 - DNA, 120 bp, Artificial Sequence
  ENSG00000181789_30 (sequence is synthesized)
gatccagggccatgtctggagcacatatgtcaaatgccacttcattaaaagcccttcagaacatgggggagtggtggtggcacaaagggcagataagatggcttaacaatattgggattt

SEQ ID NO: 641734 - DNA, 120 bp, Artificial Sequence
  ENSG00000181789_31 (sequence is synthesized)
gggccctaatggggacagtgttcccttggacccaagcagctttcctttgtctttatttttttttaactgaaaagggagagaaaagttatacagctactgattgtagaaaaaaaagagaaa

SEQ ID NO: 641735 - DNA, 120 bp, Artificial Sequence
  ENSG00000181790_0 (sequence is synthesized)
ggactttagaagccgttgctgccctctctgtcacctgaagcggggccctctcccatcccacccttgccccgcctccctgcccccaccgggccggccctgcccgccgccggaccctggcat

SEQ ID NO: 641736 - DNA, 120 bp, Artificial Sequence
  ENSG00000181790_1 (sequence is synthesized)
gtcaagacctggtccgcgcctgcctgcccagcccgcggaaccccggcggccccgcgagctaggatgaggggccaggccgccgccccgggccccgtctggatcctcgccccgctgctactg

SEQ ID NO: 641737 - DNA, 120 bp, Artificial Sequence
  ENSG00000181790_2 (sequence is synthesized)
ctgctgctgctgctgggacgccgcgcgcgggcggccgccggagcagacgcggggcccgggcccgagccgtgcgccacgctggtgcagggaaagttcttcggctacttctccgcggccgcc

SEQ ID NO: 641738 - DNA, 120 bp, Artificial Sequence
  ENSG00000181790_3 (sequence is synthesized)
gtgttcccggccaacgcctcgcgctgctcctggacgctacgcaacccggacccgcggcgctacactctctacatgaaggtggccaaggcgcccgtgccctgcagcggccccggccgcgtg

SEQ ID NO: 641739 - DNA, 120 bp, Artificial Sequence
  ENSG00000181790_4 (sequence is synthesized)
cgcacctaccagttcgactccttcctcgagtccacgcgcacctacctgggcgtggagagcttcgacgaggtgctgcggctctgcgacccctccgcacccctggccttcctgcaggccagc

SEQ ID NO: 641740 - DNA, 120 bp, Artificial Sequence
  ENSG00000181790_5 (sequence is synthesized)
aagcagttcctgcagatgcggcgccagcagccgccccagcacgacgggctccggccccgggccgggccgccgggccccaccgacgacttctccgtggagtacctggtggtggggaaccgc

SEQ ID NO: 641741 - DNA, 120 bp, Artificial Sequence
  ENSG00000181790_6 (sequence is synthesized)
aaccccagccgtgccgcctgccagatgctgtgccgctggctggacgcgtgtctggccggtagtcgcagctcgcacccctgcgggatcatgcagaccccctgcgcctgcctgggcggcgag

SEQ ID NO: 641742 - DNA, 120 bp, Artificial Sequence
  ENSG00000181790_7 (sequence is synthesized)
gcgggcggccctgccgcgggacccctggccccccgcggggatgtctgcttgagagatgcggtggctggtggccctgaaaactgcctcaccagcctgacccaggaccggggcgggcacggc

SEQ ID NO: 641743 - DNA, 120 bp, Artificial Sequence
  ENSG00000181790_8 (sequence is synthesized)
gccacaggcggctggaagctgtggtccctgtggggcgaatgcacgcgggactgcgggggaggcctccagacgcggacgcgcacctgcctgcccgcgccgggcgtggagggcggcggctgc

SEQ ID NO: 641744 - DNA, 120 bp, Artificial Sequence
  ENSG00000181790_9 (sequence is synthesized)
gagggggtgctggaggagggtcgccagtgcaaccgcgaggcctgcggccccgctgggcgcaccagctcccggagccagtccctgcggtccacagatgcccggcggcgcgaggagctgggg

SEQ ID NO: 641745 - DNA, 120 bp, Artificial Sequence
  ENSG00000181790_10 (sequence is synthesized)
gacgagctgcagcagtttgggttcccagccccccagaccggtgacccagcagccgaggagtggtccccgtggagcgtgtgctccagcacctgcggcgagggctggcagacccgcacgcgc

SEQ ID NO: 641746 - DNA, 120 bp, Artificial Sequence
  ENSG00000181790_11 (sequence is synthesized)
ttctgcgtgtcctcctcctacagcacgcagtgcagcggacccctgcgcgagcagcggctgtgcaacaactctgccgtgtgcccagtgcatggtgcctgggatgagtggtcgccctggagc

SEQ ID NO: 641747 - DNA, 120 bp, Artificial Sequence
  ENSG00000181790_12 (sequence is synthesized)
ctctgctccagcacctgtggccgtggctttcgggatcgcacgcgcacctgcaggcccccccagtttgggggcaacccctgtgagggccctgagaagcaaaccaagttctgcaacattgcc

SEQ ID NO: 641748 - DNA, 120 bp, Artificial Sequence
  ENSG00000181790_13 (sequence is synthesized)
ctgtgccctggccgggcagtggatggaaactggaatgagtggtcgagctggagcgcctgctccgccagctgctcccagggccgacagcagcgcacgcgtgaatgcaacgggccttcctac

SEQ ID NO: 641749 - DNA, 120 bp, Artificial Sequence
  ENSG00000181790_14 (sequence is synthesized)
gggggtgcggagtgccagggccactgggtggagacccgagactgcttcctgcagcagtgcccagtggatggcaagtggcaggcctgggcgtcatggggcagttgcagcgtcacgtgtggg

SEQ ID NO: 641750 - DNA, 120 bp, Artificial Sequence
  ENSG00000181790_15 (sequence is synthesized)
gctggcagccagcgacgggagcgtgtctgctctgggcccttcttcgggggagcagcctgccagggcccccaggatgagtaccggcagtgcggcacccagcggtgtcccgagccccatgag

SEQ ID NO: 641751 - DNA, 120 bp, Artificial Sequence
  ENSG00000181790_16 (sequence is synthesized)
atctgtgatgaggacaactttggtgctgtgatctggaaggagaccccagcgggagaggtggctgctgtccggtgtccccgcaacgccacaggactcatcctgcgacggtgtgagctggac

SEQ ID NO: 641752 - DNA, 120 bp, Artificial Sequence
  ENSG00000181790_17 (sequence is synthesized)
gaggaaggcatcgcctactgggagccccccacctacatccgctgtgtttccattgactacagaaacatccagatgatgacccgggagcacctggccaaggctcagcgagggctgcctggg

SEQ ID NO: 641753 - DNA, 120 bp, Artificial Sequence
  ENSG00000181790_18 (sequence is synthesized)
gagggggtctcggaggtcatccagacactggtggagatctctcaggacgggaccagctacagtggggacctgctgtccaccatcgatgtcctgaggaacatgacagagattttccggaga

SEQ ID NO: 641754 - DNA, 120 bp, Artificial Sequence
  ENSG00000181790_19 (sequence is synthesized)
gcgtactacagccccacccctggggacgtacagaactttgtccagatccttagcaacctgttggcagaggagaatcgggacaagtgggaggaggcccagctggcgggccccaacgccaag

SEQ ID NO: 641755 - DNA, 120 bp, Artificial Sequence
  ENSG00000181790_20 (sequence is synthesized)
gagctgttccggctggtggaggactttgtggacgtcatcggcttccgcatgaaggacctgagggatgcataccaggtgacagacaacctggttctcagcatccataagctcccagccagc

SEQ ID NO: 641756 - DNA, 120 bp, Artificial Sequence
  ENSG00000181790_21 (sequence is synthesized)
ggagccactgacatcagcttccccatgaagggctggcgggccacgggtgactgggccaaggtgccagaggacagggtcactgtgtccaagagtgtcttctccacggggctgacagaggcc

SEQ ID NO: 641757 - DNA, 120 bp, Artificial Sequence
  ENSG00000181790_22 (sequence is synthesized)
gatgaagcatccgtgtttgtggtgggcaccgtgctctacaggaacctgggcagcttcctggccctgcagaggaacacgaccgtcctgaattctaaggtgatctccgtgactgtgaaaccc

SEQ ID NO: 641758 - DNA, 120 bp, Artificial Sequence
  ENSG00000181790_23 (sequence is synthesized)
gctccctgcgcacacccttggagatcgagtttgcccacatgtataatggcaccaccaaccagacctgtatcctgtgggatgagacggatgtaccctcctcctccgcccccccgcagctcg

SEQ ID NO: 641759 - DNA, 120 bp, Artificial Sequence
  ENSG00000181790_24 (sequence is synthesized)
ggccctggtcgtggcgcggctgccgcacggtgcccctcgacgccctccggacgcgctgcctctgtgaccggctctccaccttcgccatcttagcccagctcagcgccgacgcgaacatgg

SEQ ID NO: 641760 - DNA, 120 bp, Artificial Sequence
  ENSG00000181790_25 (sequence is synthesized)
agaaggcgactctgccgtcggtgacgctcatcgtgggctgtggcgtgtcctctctcaccctgctcatgctggtcatcatctacgtgtccgtgtggaggtacattcgctcagagcgttctg

SEQ ID NO: 641761 - DNA, 120 bp, Artificial Sequence
  ENSG00000181790_26 (sequence is synthesized)
tcatcctcatcaacttctgcctgtccatcatctcctccaatgccctcatcctcatcgggcagacccagacccgcaacaaggtggtgtgcacgctggtggccgccttcctgcacttcttct

SEQ ID NO: 641762 - DNA, 120 bp, Artificial Sequence
  ENSG00000181790_27 (sequence is synthesized)
tcctgtcctccttctgctgggtgctcaccgaggcctggcagtcctacatggcggtgacgggccacctccggaaccgcctcatccgcaagcgcttcctctgcctgggctgggggctccctg

SEQ ID NO: 641763 - DNA, 120 bp, Artificial Sequence
  ENSG00000181790_28 (sequence is synthesized)
cactggttgtggccatttctgtgggattcaccaaggccaaagggtacagcaccatgaactactgctggctctccctggaggggggactgctctatgccttcgtgggacctgccgctgccg

SEQ ID NO: 641764 - DNA, 120 bp, Artificial Sequence
  ENSG00000181790_29 (sequence is synthesized)
ttgtgctggtgaacatggtcattgggatcctggtgttcaacaagctcgtgtccaaagacggcatcacggacaagaagctgaaggagcgggcaggggcctccctgtggagctcctgcgtgg

SEQ ID NO: 641765 - DNA, 120 bp, Artificial Sequence
  ENSG00000181790_30 (sequence is synthesized)
tgctgccgctgctggcgctgacctggatgtcggctgtgctcgccgtcaccgaccgccgctccgccctcttccagatcctcttcgctgtcttcgactcgctggagggcttcgtcatcgtca

SEQ ID NO: 641766 - DNA, 120 bp, Artificial Sequence
  ENSG00000181790_31 (sequence is synthesized)
tggtgcactgtatcctccgtagagaggtccaggacgctgtgaaatgccgtgtggttgaccggcaggaggagggcaacggggactcagggggctccttccagaacggccacgcccagctca

SEQ ID NO: 641767 - DNA, 120 bp, Artificial Sequence
  ENSG00000181790_32 (sequence is synthesized)
tgaccgacttcgagaaggacgtggatctggcctgtagatcagtgctgaacaaggacatcgcggcctgccgcactgccaccatcacgggcacactgaagcggccgtctctgcccgaggagg

SEQ ID NO: 641768 - DNA, 120 bp, Artificial Sequence
  ENSG00000181790_33 (sequence is synthesized)
agaagctgaagctggcccatgccaaggggccgcccaccaatttcaacagcctgccggccaacgtgtccaagctgcacctgcacggctcaccccgctatcccggcgggcccctgcccgact

SEQ ID NO: 641769 - DNA, 120 bp, Artificial Sequence
  ENSG00000181790_34 (sequence is synthesized)
tccccaaccactcactgaccctcaagagggacaaggcgcccaagtcctccttcgtcggtgacggggacatcttcaagaagctggactcggagctgagccgggcccaggagaaggctctgg

SEQ ID NO: 641770 - DNA, 120 bp, Artificial Sequence
  ENSG00000181790_35 (sequence is synthesized)
acacgagctacgtgatcctgcccacggccacggccacgctgcggcccaagcccaaggaggagcccaagtacagcatccacattgaccagatgccgcagacccgcctcatccacctcagca

SEQ ID NO: 641771 - DNA, 80 bp, Artificial Sequence
  ENSG00000181790_36 (sequence is synthesized)
agacccgcctcatccacctcagcacggcccccgaggccagcctccccgcccgcagcccgccctcccgccagccccccagc

SEQ ID NO: 641772 - DNA, 120 bp, Artificial Sequence
  ENSG00000181790_37 (sequence is synthesized)
cccagcagcccctgcccccaccgcccaatctggagccggcaccccccagcctgggggatcccggggagcctgccgcccatccgggacccagcacggggcccagcaccaagaacgagaatg

SEQ ID NO: 641773 - DNA, 120 bp, Artificial Sequence
  ENSG00000181790_38 (sequence is synthesized)
tcgccaccttgtctgtgagctccctggagcggcggaagtcgcggtatgcagaactggactttgagaagatcatgcacacccggaagcggcaccaagacatgttccaggacctgaaccgga

SEQ ID NO: 641774 - DNA, 120 bp, Artificial Sequence
  ENSG00000181790_39 (sequence is synthesized)
agctgcagcacgcagcggagaaggacaaggaggtgctggggccggacagcaagccggaaaagcagcagacgcccaacaagaggccctgggagagcctccggaaagcccacgggacgccca

SEQ ID NO: 641775 - DNA, 120 bp, Artificial Sequence
  ENSG00000181790_40 (sequence is synthesized)
cgtgggtgaagaaggagctggagccgctgcagccgtcgccgctggagcttcgcagcgtggagtgggagaggtcgggcgccacgatcccgctggtgggccaggacatcatcgacctccaga

SEQ ID NO: 641776 - DNA, 120 bp, Artificial Sequence
  ENSG00000181790_41 (sequence is synthesized)
ccgaggtctgagcgggtgggcggcggccacgcactgggccacggaggagggatgctgctccgcccgctcctgccgcagacgggcacagacacgctcgcgggcagcgggccaggcccgcac

SEQ ID NO: 641777 - DNA, 120 bp, Artificial Sequence
  ENSG00000181790_42 (sequence is synthesized)
cccggcctcagggcgctcagacggcggccaggcacagggcccgcagtgctgggaccagagccagatgcaggacaggaggcggcccggccagcgggcacagggcaccagaggccgaaggtg

SEQ ID NO: 641778 - DNA, 120 bp, Artificial Sequence
  ENSG00000181790_43 (sequence is synthesized)
cctcagactccgccctcctcgggccgaggcccagcgggcagatgggcggacggctgtggaccgtggacaggcccagcgcggccagcgtcccagggtacccgcctgagctcctgctgcgga

SEQ ID NO: 641779 - DNA, 120 bp, Artificial Sequence
  ENSG00000181790_44 (sequence is synthesized)
ggagctgcctgcttggcccggccggcctggcaccgttttttaaacacccccatccctcgggaagcagccagctccccacaccttccagggccctaggcccctcctagacccaggtggagg

SEQ ID NO: 641780 - DNA, 120 bp, Artificial Sequence
  ENSG00000181790_45 (sequence is synthesized)
gcacagccctccgaccctcatggcccccaggggcaggactgagtcccctccaggaagaagcaggggggaatctattttttctctccttttcttttcttcaataaaaagaattaaaaaccc

SEQ ID NO: 641781 - DNA, 120 bp, Artificial Sequence
  ENSG00000181790_46 (sequence is synthesized)
gatgtaatccgtaatgcagtctctggctcccgattcgggatccagtttcagagagcgagagattggggagcgccggcagccgggtggggggaagcagctctcgcctctctcctcctcctt

SEQ ID NO: 641782 - DNA, 120 bp, Artificial Sequence
  ENSG00000181790_47 (sequence is synthesized)
ctcctcgtcctcggcctcctcctcctccccgcgccgccccgcccccggctcggcttggctcgcccccccccccccctcgccaggaaggggaaaaaaggcgagaagagccgggcaggcgag

SEQ ID NO: 641783 - DNA, 80 bp, Artificial Sequence
  ENSG00000181790_48 (sequence is synthesized)
aaaaggcgagaagagccgggcaggcgagaggagcggagcggcggcggcggccggagagggagcggcgggcgcaggcggcg

SEQ ID NO: 641784 - DNA, 80 bp, Artificial Sequence
  ENSG00000181790_49 (sequence is synthesized)
cgccagcatcgtccgcagcgcgggcatccggaccctccgggcgcccggggggctccagcaggcgcgggggaacgggaggg

SEQ ID NO: 641785 - DNA, 80 bp, Artificial Sequence
  ENSG00000181790_50 (sequence is synthesized)
ggctggaggagccccccccacctccggtcgggcgcccggctcagccgccggcgacgcgaggcgctcgcggggatttgcaa

SEQ ID NO: 641786 - DNA, 120 bp, Artificial Sequence
  ENSG00000181790_51 (sequence is synthesized)
ggccaggcagctccccggcagccaggggacgggcggggcaggcaggatgggccatgccctcctcctggcccaggactcactgcccagaccccgcctgcagaagatcatgcacacccggaa

SEQ ID NO: 641787 - DNA, 120 bp, Artificial Sequence
  ENSG00000181790_52 (sequence is synthesized)
attttgtatcaggctgatgactgatttctcctctcctggtctgaatttcccttctttgacctcctgccccacattcctgggtccctatgtttcactgccgcatggctctgtgtgggtccc

SEQ ID NO: 641788 - DNA, 120 bp, Artificial Sequence
  ENSG00000181790_53 (sequence is synthesized)
tgtctttgtgtcctcctgtcactgtggctcctggaccctgcccttcttgtcgcctgtgccctgtgtctggccacgccccgcagtggatggcaagtggcaggcctgggcgtcatggggcag

SEQ ID NO: 641789 - DNA, 120 bp, Artificial Sequence
  ENSG00000181790_54 (sequence is synthesized)
gtgtcccggtgaggcccctcctacctgggctgggctctggggagggctgatggcgattgggcgggcttgggctcagctgtcacccacgtggtgtgttgggggctcccgtcctgtcctcat

SEQ ID NO: 641790 - DNA, 120 bp, Artificial Sequence
  ENSG00000181790_55 (sequence is synthesized)
cccgacaggtgagaggacagtgccagcccggccccctgcatggccccactccacgcctccgcctgtgcctcccccacatcacccatccctgtccactcctgctgcccccacccacaccca

SEQ ID NO: 641791 - DNA, 120 bp, Artificial Sequence
  ENSG00000181790_56 (sequence is synthesized)
gccacaccgtcaggcccacctggacccaggggacctgccctgggggcccagccttccacccccgtccacttcctgaggccgaaggagggtccatggggcatgatcagaagcttccagaac

SEQ ID NO: 641792 - DNA, 120 bp, Artificial Sequence
  ENSG00000181790_57 (sequence is synthesized)
actgccctggcactcctgctgagcaggtgcctgtggagcgcctggctgcgtcccctgcccacctgacatctcttcctctgtcgtggccccagcgaggagcacagcctcaccctagtgccg

SEQ ID NO: 641793 - DNA, 120 bp, Artificial Sequence
  ENSG00000181790_58 (sequence is synthesized)
ctccccccccctgcctcctgcccaccgccctctagcacctgtgttctgtgccaccttcatttcctcattgccagtcccagcaggggcagaagtgagtggggctttcaggctagggggaca

SEQ ID NO: 641794 - DNA, 120 bp, Artificial Sequence
  ENSG00000181790_59 (sequence is synthesized)
acggggagcaagaggaaggcggggagaaggacccaccatggagcccccggccggtgctgagcttcctggaaccaagtgcaaaaaacgaacgactgcccaataaaggaagctccgccgccc

SEQ ID NO: 641795 - DNA, 120 bp, Artificial Sequence
  ENSG00000181803_0 (sequence is synthesized)
atgagtcctgatgggaaccacagtagtgatccaacagagttcgtcctggcagggctcccaaatctcaacagcgcaagagtggaattattttctgtgtttcttcttgtctatctcctgaat

SEQ ID NO: 641796 - DNA, 120 bp, Artificial Sequence
  ENSG00000181803_1 (sequence is synthesized)
ctgacaggcaatgtgttgattgtgggggtggtaagggctgatactcgactacagacccctatgtacttctttctgggtaacctgtcctgcctagagatactgctcacttctgtcatcatt

SEQ ID NO: 641797 - DNA, 120 bp, Artificial Sequence
  ENSG00000181803_2 (sequence is synthesized)
ccaaagatgctgagcaatttcctctcaaggcaacacactatttcctttgctgcatgtatcacccaattctatttctacttctttctcggggcctccgagttcttactgttggctgtcatg

SEQ ID NO: 641798 - DNA, 120 bp, Artificial Sequence
  ENSG00000181803_3 (sequence is synthesized)
tctgcggatcgctacctggccatctgtcatcctctgcgctaccccttgctcatgagtggggctgtgtgctttcgtgtggccttggcctgctgggtggggggactcgtccctgtgcttggt

SEQ ID NO: 641799 - DNA, 120 bp, Artificial Sequence
  ENSG00000181803_4 (sequence is synthesized)
cagggtgctgtggtacagcacttcttctgcgacagtggcccactgctccgcctggcttgcaccaacaccaagaagctggaggagactgactttgtcctggcctccctcgtcattgtatct

SEQ ID NO: 641800 - DNA, 120 bp, Artificial Sequence
  ENSG00000181803_5 (sequence is synthesized)
tccttgctgatcactgctgtgtcctacggcctcattgtgctggcagtcctgagcatcccctctgcttcaggccgtcagaaggccttctctacctgtacctcccacttgatagtggtgacc

SEQ ID NO: 641801 - DNA, 120 bp, Artificial Sequence
  ENSG00000181803_6 (sequence is synthesized)
ctcttctatggaagtgccatttttctctatgtgcggccatcgcagagtggttctgtggacactaactgggcagtgacagtaataacgacatttgtgacaccactgttgaatccattcatc

SEQ ID NO: 641802 - DNA, 120 bp, Artificial Sequence
  ENSG00000181803_7 (sequence is synthesized)
tatgccttacgtaatgagcaagtcaaggaagctttgaaggacatgtttaggaaggtagtggcaggcgttttagggaatcttttacttgataaatgtctcagtgagaaagcagtaaagtaa

SEQ ID NO: 641803 - DNA, 120 bp, Artificial Sequence
  ENSG00000181804_0 (sequence is synthesized)
aagccagggcagaatgcttgtgaagtagcaactaaagtggcagtgtttcttctgaaattctcaggcagtcagactgtcttaggcaaatcttgataaaatagcctttatccaggtttttat

SEQ ID NO: 641804 - DNA, 120 bp, Artificial Sequence
  ENSG00000181804_1 (sequence is synthesized)
ctaaggaatcccaagaagactggggaatggagagacagtcaagggttatgtcagaaaaggatgagtatcagtttcaacatcagggagcggtggagctgcttgtcttcaattttttgctca

SEQ ID NO: 641805 - DNA, 120 bp, Artificial Sequence
  ENSG00000181804_2 (sequence is synthesized)
tccttaccattttgacaatctggttatttaaaaatcatcgattccgcttcttgcatgaaactggaggagcaatggtgtatggccttataatgggactaattttacgatatgctacagcac

SEQ ID NO: 641806 - DNA, 120 bp, Artificial Sequence
  ENSG00000181804_3 (sequence is synthesized)
caactgatattgaaagtggaactgtctatgactgtgtaaaactaactttcagtccatcaactctgctggttaatatcactgaccaagtttatgaatataaatacaaaagagaaataagtc

SEQ ID NO: 641807 - DNA, 120 bp, Artificial Sequence
  ENSG00000181804_4 (sequence is synthesized)
agcacaacatcaatcctcatcaaggaaatgctatacttgaaaagatgacatttgatccagaaatcttcttcaatgttttactgccaccaattatatttcatgcaggatatagtctaaaga

SEQ ID NO: 641808 - DNA, 120 bp, Artificial Sequence
  ENSG00000181804_5 (sequence is synthesized)
agagacacttttttcaaaacttaggatctattttaacgtatgccttcttgggaactgccatctcctgcatcgtcatagggttaattatgtatggttttgtgaaggctatgatacatgctg

SEQ ID NO: 641809 - DNA, 120 bp, Artificial Sequence
  ENSG00000181804_6 (sequence is synthesized)
gccagctgaaaaatggagactttcatttcactgactgtttattttttggttcactgatgtctgctacagatccagtgacagtgctggccattttccatgaactgcacgtcgaccctgacc

SEQ ID NO: 641810 - DNA, 120 bp, Artificial Sequence
  ENSG00000181804_7 (sequence is synthesized)
tgtacacactcttgtttggagagagtgtgttgaatgatgcagtggccatagtccttacatattctatatccatttacagtcccaaggagaatccaaatgcatttgatgccgcagcattct

SEQ ID NO: 641811 - DNA, 120 bp, Artificial Sequence
  ENSG00000181804_8 (sequence is synthesized)
tccagtctgtggggaatttcctgggaatcttcgctggctcatttgcaatggggtctgcgtatgccatcatcacagcactgttgaccaaatttaccaagctgtgtgagttcccgatgctgg

SEQ ID NO: 641812 - DNA, 120 bp, Artificial Sequence
  ENSG00000181804_9 (sequence is synthesized)
aaaccggcctgtttttcctgctttcttggagtgccttcctgtctgccgaggctgccggcctaacagggatagttgctgttctcttctgtggagtcacacaagcacattatacctacaaca

SEQ ID NO: 641813 - DNA, 120 bp, Artificial Sequence
  ENSG00000181804_10 (sequence is synthesized)
atctgtcttcggattccaaaataagaactaaacagttgtttgaatttatgaactttttggcggagaacgtcatcttctgttacatgggcctggcactgttcacgttccagaatcatatct

SEQ ID NO: 641814 - DNA, 120 bp, Artificial Sequence
  ENSG00000181804_11 (sequence is synthesized)
ttaatgctctttttatacttggagcctttctagcaatttttgttgccagagcctgcaacatatatcccctctccttcctcctgaatctaggccgaaaacagaagatcccctggaactttc

SEQ ID NO: 641815 - DNA, 120 bp, Artificial Sequence
  ENSG00000181804_12 (sequence is synthesized)
agcacatgatgatgttttcaggtttgcgaggagcgatcgcatttgccttagctattcggaacacagaatctcagcccaaacaaatgatgtttaccactacgctgctcctcgtgttcttca

SEQ ID NO: 641816 - DNA, 120 bp, Artificial Sequence
  ENSG00000181804_13 (sequence is synthesized)
ctgtctgggtatttggaggaggaacaacccccatgttgacttggcttcagatcagagttggcgtggacctggatgaaaatctgaaggaggacccctcctcacaacaccaggaagcaaata

SEQ ID NO: 641817 - DNA, 120 bp, Artificial Sequence
  ENSG00000181804_14 (sequence is synthesized)
ttttaacccactctggtcctccgctgactacaacattacctgaatggtgtggtccgatttccaggctgcttaccagtcctcaagcctatggggaacagctaaaagaggatgatgtggaat

SEQ ID NO: 641818 - DNA, 120 bp, Artificial Sequence
  ENSG00000181804_15 (sequence is synthesized)
gcattgtaaaccaggatgaactagccataaattaccaggagcaagcctcctcaccctgcagtcctcctgcaaggctaggtctggaccagaaagcttcaccccagacgccaggcaaggaaa

SEQ ID NO: 641819 - DNA, 120 bp, Artificial Sequence
  ENSG00000181804_16 (sequence is synthesized)
acatttatgagggagacctcggcctgggaggctatgaactcaagcttgagcaaactttgggtcaatcccagttgaattaattggcatgaagagtacagatgtaatcacaagtaatgcaag

SEQ ID NO: 641820 - DNA, 120 bp, Artificial Sequence
  ENSG00000181804_17 (sequence is synthesized)
actcactgaggaatacaagccaagctgatgaggcagtacaggggagaggctggaaaacatattaagagcataaattggagagaatcaaagccttgtcacatggatcctctggtgcctgaa

SEQ ID NO: 641821 - DNA, 120 bp, Artificial Sequence
  ENSG00000181804_18 (sequence is synthesized)
gaaatgagattttattatccctctctattatgcaaatgaatttagttttttgacagcagccattctgattactggattggctggggtggggatggaggtatcaggagtctagctgctgga

SEQ ID NO: 641822 - DNA, 120 bp, Artificial Sequence
  ENSG00000181804_19 (sequence is synthesized)
ggatgggacagctgtgctgggtcttcagggcatttctgctgcgaatgcggctctccaggcccttcacttctattctggattttattccctccattaaggagagtttaaaaataaaagaaa

SEQ ID NO: 641823 - DNA, 120 bp, Artificial Sequence
  ENSG00000181804_20 (sequence is synthesized)
gcttctgagagtaaacattttgctcctaagctgaagggaatgcccagctatttagtaagtgataagtttcttattttgaggacttgactcccatttgctctcagtgaccccagggcagag

SEQ ID NO: 641824 - DNA, 120 bp, Artificial Sequence
  ENSG00000181804_21 (sequence is synthesized)
cccagagaagtgttccgtacccactgctgatggtttcccagagcccacactgagttgaagaacctattgttcttcttggcatccttcttatgctacttctcccatcgctcaaaggggttg

SEQ ID NO: 641825 - DNA, 120 bp, Artificial Sequence
  ENSG00000181804_22 (sequence is synthesized)
cctatggctgggtgtgccctgccctaaatgcagcaccactttcaagcttagtaggaccattccaagaaaaccaggtttcttctccccataccacgttgtgcctgaagaacaagccttccc

SEQ ID NO: 641826 - DNA, 120 bp, Artificial Sequence
  ENSG00000181804_23 (sequence is synthesized)
gtccttgcctgcatgtgagtcacttcttggctgtgcagcaggtccccccctccccgcgatatgctggagggtaggattctgcagcctgtgttgctctctacctggcagcagactgtgcag

SEQ ID NO: 641827 - DNA, 120 bp, Artificial Sequence
  ENSG00000181804_24 (sequence is synthesized)
gagccccaacctgtcctccaattccagcattcacagctgatgagcagtgcaggagcagggcgagaggaacagagccaatgatgtgtgggttacactgaggagccaaggacagggcctcag

SEQ ID NO: 641828 - DNA, 120 bp, Artificial Sequence
  ENSG00000181804_25 (sequence is synthesized)
gtctcccccttacaaggcgtggctcatggcctgcattccagagaccaacatgatagcttttaattcagctgcatgacctgtgccttttaagccataaagatacctcaagcctagcacctc

SEQ ID NO: 641829 - DNA, 120 bp, Artificial Sequence
  ENSG00000181804_26 (sequence is synthesized)
ttgaaatccagatgttcatattagactcgaaaaaataggctccaggcctaggtgcccaggctatgatgagtctgcttttgaaggaggtagggaatgacatcttccttggacccaaagctt

SEQ ID NO: 641830 - DNA, 120 bp, Artificial Sequence
  ENSG00000181804_27 (sequence is synthesized)
aaaagtaatgtatgctttgctgaccactgtttgttaggccttaaacaacattcactgtggtggtatcaggcacactgctatgtgcatcaattatttttttgctttccaaacagaatctct

SEQ ID NO: 641831 - DNA, 120 bp, Artificial Sequence
  ENSG00000181804_28 (sequence is synthesized)
ggggcacaagttttacactcaagctaagtataactttgtcatttcaggtaaatatgacaagtggtggagcatgaagttttctaatttgacttaatcctaataaatttttgttacaaagta

SEQ ID NO: 641832 - DNA, 120 bp, Artificial Sequence
  ENSG00000181804_29 (sequence is synthesized)
agcaaatgtcacagtcatgttctcacacggcacataatgcaagtctgttgacagatgcgggtccattgtcatgtggggagtcgagggcgagctgtttgtttttgtaatgatgttgggaag

SEQ ID NO: 641833 - DNA, 120 bp, Artificial Sequence
  ENSG00000181804_30 (sequence is synthesized)
tgatggctctgcagtcacaaagagcagccttctctcactggctgcaccgatgaacattacgaagttctagaaaaaacatcacttcaaaatgcctggagtaattcctcttatatcaactaa

SEQ ID NO: 641834 - DNA, 120 bp, Artificial Sequence
  ENSG00000181804_31 (sequence is synthesized)
tttcaagaagaaaacttgcagaaactaaccccacccctcttaagagaatattgtgtccaagtcctttttatttatacgaacagtgtcttattttcttataataaaaagttataaataaac

SEQ ID NO: 641835 - DNA, 120 bp, Artificial Sequence
  ENSG00000181817_0 (sequence is synthesized)
gcactctgcgcccggaggacagagcggcccggtcgccggcatggtttctccgtcctgctgcagccggcgggaggcagccagtccaggcgcccgctagcttcggcggcgacccagacgggg

SEQ ID NO: 641836 - DNA, 120 bp, Artificial Sequence
  ENSG00000181817_1 (sequence is synthesized)
aaagcggaaggaatgtcgcgtgcaagcaggcagctggtgtggaagaatggcggtgagccattcagtgaaggagcggaccatctctgagaacagcctgatcatcctactgcagggcctcca

SEQ ID NO: 641837 - DNA, 120 bp, Artificial Sequence
  ENSG00000181817_2 (sequence is synthesized)
gggccgggtaaccactgtggacctgcgggatgagagcgtggcccacggacgcatagacaatgtcgatgctttcatgaacatccgcctggccaaagtcacctacacggaccgttgggggca

SEQ ID NO: 641838 - DNA, 120 bp, Artificial Sequence
  ENSG00000181817_3 (sequence is synthesized)
tctttgtgacaggccgcaatgtccgctacgtccacatcccagatgacgtgaacatcacctcgaccattgagcagcagctgcagattatccatcgggtgcgaaactttggtggcaagggcc

SEQ ID NO: 641839 - DNA, 120 bp, Artificial Sequence
  ENSG00000181817_4 (sequence is synthesized)
aaggccggtgggaatttcccccaaaaaactgtaagtgaggccctcagcaagccctggccccaactcggagtcctccagtgatctccggagctagttccctgccctcacaccctgtctggt

SEQ ID NO: 641840 - DNA, 120 bp, Artificial Sequence
  ENSG00000181817_5 (sequence is synthesized)
acccgagaagaaagcagggccaggccagaagctggtgtccaacagacaccacctgtcaaagctgcctttcacagggttccacctcccagactcactctgggacccagaatcctatatgtg

SEQ ID NO: 641841 - DNA, 120 bp, Artificial Sequence
  ENSG00000181817_6 (sequence is synthesized)
gccttggggtaggtgacaatccccctttttgatgatctgaatctctgacttattgattatggaacctgtcaagtagttttcaactctcccagtgaggataattaaacatgctcagcctga

SEQ ID NO: 641842 - DNA, 120 bp, Artificial Sequence
  ENSG00000181817_7 (sequence is synthesized)
ggtcgccggcatggtttctccgtcctgctgcagccggcgggaggcagccagtccaggcgcccgctagcttcggcggcgacccagacggggaaagcggaaggaatgtcgcgtggtgggtcc

SEQ ID NO: 641843 - DNA, 120 bp, Artificial Sequence
  ENSG00000181817_8 (sequence is synthesized)
tgccaggacctccggaaggaggtgccggagcccaggaagcgttttcttccccatttaccgagtatagctcctttccccagacccgctcccgctgctctgacaagcaggcagctggtgtgg

SEQ ID NO: 641844 - DNA, 120 bp, Artificial Sequence
  ENSG00000181817_9 (sequence is synthesized)
gttgcccatgctgtcttgaattcctggtctcaagccatcctcctgcctcagcctccctgagtggtaggattacaggcatgagccaccgggtctggccaagcacacattatcagggagaac

SEQ ID NO: 641845 - DNA, 120 bp, Artificial Sequence
  ENSG00000181817_10 (sequence is synthesized)
ggagggtcctagcagagaaaacttctgaattttccggcccctctgacaactggagttaagaggactgactgacaccacaaagtgactgctggaaagagaaaccagagggcaggtgcagag

SEQ ID NO: 641846 - DNA, 120 bp, Artificial Sequence
  ENSG00000181817_11 (sequence is synthesized)
ggaaggccttcgctgtgggaacgtcaccataccctcgcaagtggggagagagatgaggaactggtgggagtcccacagcagcttcccttgcagacctctcccacatgtgtgcccgtgtgt

SEQ ID NO: 641847 - DNA, 120 bp, Artificial Sequence
  ENSG00000181817_12 (sequence is synthesized)
gagaaatggaagagggcttagctgggggttcggcttagggatgcaggaaaggtcgagctctgaggctgtgatggcacaccaagggcttctccgtcctcagcagagcagcaagggaagcag

SEQ ID NO: 641848 - DNA, 120 bp, Artificial Sequence
  ENSG00000181826_0 (sequence is synthesized)
ccggagcggctctgccttcccgagcgcgggacgcggcgccctgggggaggagggcgaagcgacgcggcgatggctccgcgggcactcccggggtccgccgtcctagccgctgctgtcttc

SEQ ID NO: 641849 - DNA, 120 bp, Artificial Sequence
  ENSG00000181826_1 (sequence is synthesized)
tcctagccgctgctgtcttcgtgggaggcgccgtgagttcgccgctggtggctccggacaatgggagcagccgcacattgcactccagaacagagacgaccccgtcgcccagcaacgata

SEQ ID NO: 641850 - DNA, 120 bp, Artificial Sequence
  ENSG00000181826_2 (sequence is synthesized)
ctgggaatggacacccagaatatattgcatacgcgcttgtccctgtgttctttatcatgggtctctttggcgtcctcatttgccacctgcttaagaagaaaggctatcgttgtacaacag

SEQ ID NO: 641851 - DNA, 120 bp, Artificial Sequence
  ENSG00000181826_3 (sequence is synthesized)
aagcagagcaagatatcgaagaggaaaaggttgaaaagatagaattgaatgacagtgtgaatgaaaacagtgacactgttgggcaaatcgtccactacatcatgaaaaatgaagcgaatg

SEQ ID NO: 641852 - DNA, 120 bp, Artificial Sequence
  ENSG00000181826_4 (sequence is synthesized)
ctgatgtcttaaaggcgatggtagcagataacagcctgtatgatcctgaaagccccgtgacccccagcacaccagggagcccgccagtgagtcctgggcctttgtcaccaggggggacgc

SEQ ID NO: 641853 - DNA, 120 bp, Artificial Sequence
  ENSG00000181826_5 (sequence is synthesized)
agcacgtctgtggccatcatctgcatacggtgggcggtgttgtcgagagggatgtgtgtcatcggtgtaggcacaagcggtggcactttataaagcccactaacaagtccagagagagca

SEQ ID NO: 641854 - DNA, 120 bp, Artificial Sequence
  ENSG00000181826_6 (sequence is synthesized)
gaccacggcgccaaggcgaggtcacggtcctttctgttggcagatttagagttacaaaagtggagcacaagtcaaaccagaaggaacggagaagcctgatgtctgttagtggggctgaaa

SEQ ID NO: 641855 - DNA, 120 bp, Artificial Sequence
  ENSG00000181826_7 (sequence is synthesized)
ccgtcaatggggaggtgccggcaacacctgtgaagagagaacgcagtggcacagagtagcagtgtcctgaatgacagctcatctacacagagtgaaactccagatatgtgacaagcagca

SEQ ID NO: 641856 - DNA, 120 bp, Artificial Sequence
  ENSG00000181826_8 (sequence is synthesized)
tgggacagatgctgacaatcagaacagatgctggatgtaaacaactggtaaggctgcactggtgcatgctggcagaatcacctgctatgcatccagggagcaaatgcatctgcatgctca

SEQ ID NO: 641857 - DNA, 120 bp, Artificial Sequence
  ENSG00000181826_9 (sequence is synthesized)
gcatgacaccagcttacctccctgtgcaaatcccctcccctaatcagtctcatccaaatcttctcctgcagtagcagcttctaaagctgcaagggcctccgccaccgctgcatcctcgtc

SEQ ID NO: 641858 - DNA, 120 bp, Artificial Sequence
  ENSG00000181826_10 (sequence is synthesized)
cacaatctccccatccccatctccatcggagccatgggtatcctcctgcctgtttcctgagtcaaccacaggcatggcatgaacaggacccttctcattaaagcagatgcttagaacttc

SEQ ID NO: 641859 - DNA, 120 bp, Artificial Sequence
  ENSG00000181826_11 (sequence is synthesized)
cttgggaatatttttatatattttatacagtttctatcatggagtcagcaggcacgtggataaaacctaaaagggaatattattgctgtgccatatacagaattcagtttgctttgaaac

SEQ ID NO: 641860 - DNA, 120 bp, Artificial Sequence
  ENSG00000181826_12 (sequence is synthesized)
aagttttggttgaaagagtctgttgaaaattttattatacttccagggaaggaaagagctgtttttatcttcttaaccactcccagcctctactcttcccagcccctaatcccaggcctt

SEQ ID NO: 641861 - DNA, 120 bp, Artificial Sequence
  ENSG00000181826_13 (sequence is synthesized)
ggtgtacacactgtagtttttccattatgatgagtatgtgcagtgatactattcatgtacagtctgagcttatgctcaggggtgtgtgtgtatatgtgtatgcatgtgtgcacgtgagtg

SEQ ID NO: 641862 - DNA, 120 bp, Artificial Sequence
  ENSG00000181826_14 (sequence is synthesized)
tgtgtttctttttccagttcctgcatcctattttgacactggttgtaagaagatcttgatacatacaggttagctgttacaaaagataaaagatgaatcttcagtggtaaaagctcagtg

SEQ ID NO: 641863 - DNA, 120 bp, Artificial Sequence
  ENSG00000181826_15 (sequence is synthesized)
gaaataatctagttagccctgaggagttgattccccaagggaccatggagtcagatgggaccagatgctagactttggattccttgaccacaaattcagcattaactcctgccaccacca

SEQ ID NO: 641864 - DNA, 85 bp, Artificial Sequence
  ENSG00000181826_16 (sequence is synthesized)
gagaagggtgtcccctaggctggagtgcagtggcacaatctccactcacctcaatctccacctccccaggttcaagcgattctcc

SEQ ID NO: 641865 - DNA, 77 bp, Artificial Sequence
  ENSG00000181826_17 (sequence is synthesized)
cctcggcctcccaaagtgctgggaatataggcgtgggccactgcaccagctgagcgattcttggttaatccattgaa

SEQ ID NO: 641866 - DNA, 120 bp, Artificial Sequence
  ENSG00000181826_18 (sequence is synthesized)
ctgagcgattcttggttaatccattgaataaaggagaaaatggttgaaagtcacacacacacaaatttgtttggacaacccaaggccaaaacaaaagaaccctgcttctctctttttttt

SEQ ID NO: 641867 - DNA, 120 bp, Artificial Sequence
  ENSG00000181826_19 (sequence is synthesized)
ttacaggcttgagccactgcgcccggcctagaaccctgcttctcatataagatgggcctgcacctacctctggcatgtttttctttgtgtatttcctgtttttcatcctgtaactaatgc

SEQ ID NO: 641868 - DNA, 120 bp, Artificial Sequence
  ENSG00000181826_20 (sequence is synthesized)
gtatttcctgtttttcatcctgtaactaatgctcattatttaaaacactccagttacttttccctttaggcctggcaaacttttctttttcttttttttttttataactgtacattttac

SEQ ID NO: 641869 - DNA, 120 bp, Artificial Sequence
  ENSG00000181826_21 (sequence is synthesized)
aaaacacctgaaaggacccagaggcataaatagtattacatgatttatggtagctctggggtgagctgtgggggaggccagttacaaggtctccaagacccgcctccatgtcagtgttgg

SEQ ID NO: 641870 - DNA, 120 bp, Artificial Sequence
  ENSG00000181826_22 (sequence is synthesized)
ggggtgccttgagcacttcttttatttcatataggaaaatgcacatctttcatttgtctcccaaaagatgatttccataaaaatatacttcaaagtatttactgtacatagacttcaatg

SEQ ID NO: 641871 - DNA, 120 bp, Artificial Sequence
  ENSG00000181826_23 (sequence is synthesized)
attttatttccagcatcaaactaaacatttctaaccttttaaataaatggggaatttagtttcatgagaatttttactgacaactaataaacactgtatgtgtacatattcatatacact

SEQ ID NO: 641872 - DNA, 120 bp, Artificial Sequence
  ENSG00000181826_24 (sequence is synthesized)
gtggactggagaaagtcagtatggaaataaatttcactgagatccagaaagtagcaatataggacttttaggggtatgtattagtgtaaataatatatgtgcagtctaggctaatcattt

SEQ ID NO: 641873 - DNA, 120 bp, Artificial Sequence
  ENSG00000181826_25 (sequence is synthesized)
taattaaaaacaaataagcatacttttttgctttaaaaatatgccctcaaaatggtgggggataaaatgtaagatattctttagctttaattatttttccatcttattcaagtcagagca

SEQ ID NO: 641874 - DNA, 120 bp, Artificial Sequence
  ENSG00000181826_26 (sequence is synthesized)
cttttttttaaatagcaatacaacaggcaagagaatactcaaaaatatttaaaactgtattgataccaagagtatgttttaaatattttctaataaatacttgagcggtttttgtctggc

SEQ ID NO: 641875 - DNA, 120 bp, Artificial Sequence
  ENSG00000181826_27 (sequence is synthesized)
aggcttccaaatttgccaaaattaagcgttcagtattttcaacacatacgctttttactggtttatactgaactatctgatgagaattcctgtgttcccaaagcaactgatgtttacagg

SEQ ID NO: 641876 - DNA, 120 bp, Artificial Sequence
  ENSG00000181826_28 (sequence is synthesized)
tcttgtgttactcctcctcctttctaaggatgagggaatccacaacagactttctctagaaaacactaatgatggacaactttttggtgtcatcaatgagttggctactaccttgatgta

SEQ ID NO: 641877 - DNA, 120 bp, Artificial Sequence
  ENSG00000181826_29 (sequence is synthesized)
aaaatttgtaaggaaaattttcaccatttcgagtgtcaagtgtatttttaactgtctggtttgtacttttatgacttttgtactaccaaagcggagttaaaaataaaaatgttaaacgca

SEQ ID NO: 641878 - DNA, 120 bp, Artificial Sequence
  ENSG00000181826_30 (sequence is synthesized)
tgcaaactggaaacttctgttgatttcgatgaacccaggagcatgctggtatatttacatccttcagaaaggacttacccaacaagggggtgaagcagtggggtgtatcagttgtccagc

SEQ ID NO: 641879 - DNA, 120 bp, Artificial Sequence
  ENSG00000181827_0 (sequence is synthesized)
agccgccaccacagcagcctgatgcccatcagcagcttccccccagcgcccccaactcgggggtggccctgccagcccttgtgcccgggctgccagggacagaggccagcgcgctgcaac

SEQ ID NO: 641880 - DNA, 120 bp, Artificial Sequence
  ENSG00000181827_1 (sequence is synthesized)
acaagatcaagaactccatctgcaaaactgtacaatctaaagtggactgcattttgcaagaagttgagaagtttacagacctagagaaactctacctctaccttcagctgccttctggtc

SEQ ID NO: 641881 - DNA, 120 bp, Artificial Sequence
  ENSG00000181827_2 (sequence is synthesized)
tcagcaatggagagaaaagtgatcagaatgccatgtcatctagtcgggcacaacaaatgcatgccttttcctggattcggaataccctagaggaacatccggagacttcactgcccaaac

SEQ ID NO: 641882 - DNA, 120 bp, Artificial Sequence
  ENSG00000181827_3 (sequence is synthesized)
aggaagtctatgatgagtacaagagctattgtgacaatcttggttaccatccattaagtgctgctgattttggaaagatcatgaaaaacgtctttccaaacatgaaggcacgtcgtttgg

SEQ ID NO: 641883 - DNA, 120 bp, Artificial Sequence
  ENSG00000181827_4 (sequence is synthesized)
gcacaagaggcaaatctaaatattgctacagtggactaagaaaaaaagcttttgttcatatgccaacactgcccaaccttgactttcacaaaactggagatgggttggaaggagctgaac

SEQ ID NO: 641884 - DNA, 120 bp, Artificial Sequence
  ENSG00000181827_5 (sequence is synthesized)
cttctgggcagcttcaaaatattgatgaagaagttatctcttctgcttgccgtcttgtgtgtgagtgggcccagaaagtgttaagccaaccatttgacaccgtcttggaattagcccgct

SEQ ID NO: 641885 - DNA, 120 bp, Artificial Sequence
  ENSG00000181827_6 (sequence is synthesized)
tccttgtaaaaagtcactatataggcaccaagtcaatggcagctctaactgtaatggcagcagcaccagcaggaatgaaaggaattacccagccttctgcttttatacctacagctgaaa

SEQ ID NO: 641886 - DNA, 120 bp, Artificial Sequence
  ENSG00000181827_7 (sequence is synthesized)
gtaattcctttcagcctcaggtgaagactttgccatctccaattgatgctaaacagcagttgcaacggaaaatccagaagaagcagcaagaacagaaactacaatcccctttgccaggag

SEQ ID NO: 641887 - DNA, 120 bp, Artificial Sequence
  ENSG00000181827_8 (sequence is synthesized)
aatctgcagcaaaaaagtcagaaagtgctacaagcaatggagtgactaatcttcctaatggaaatccttcaatcctttctcctcaacctattggtatcgttgtggcagctgtccctagtc

SEQ ID NO: 641888 - DNA, 120 bp, Artificial Sequence
  ENSG00000181827_9 (sequence is synthesized)
ccattccggtccagcggactaggcaattggtaacttcaccgagtccaatgagttcttctgacggcaaagttcttcccctcaatgtacaggtggtcactcagcacatgcagtctgtgaaac

SEQ ID NO: 641889 - DNA, 120 bp, Artificial Sequence
  ENSG00000181827_10 (sequence is synthesized)
aggcaccaaagactccccagaacgttccagccagtcctggtggggatcgttctgcccggcaccgttaccctcagatcttacccaaaccagcgaacaccagtgcactcaccattcgctctc

SEQ ID NO: 641890 - DNA, 120 bp, Artificial Sequence
  ENSG00000181827_11 (sequence is synthesized)
caactactgtcctctttactagtagtcccatcaaaactgctgttgtacccgcttcacacatgagttctctaaatgtggtgaaaatgacaacaatatccctcacacccagcaacagtaaca

SEQ ID NO: 641891 - DNA, 120 bp, Artificial Sequence
  ENSG00000181827_12 (sequence is synthesized)
cccctcttaaacattctgcctcagtcagcagtgctacaggaacaacagaagaatcaaggagtgttccacagatcaagaatggttctgtcgtgtcgcttcagtctcctgggtccaggagca

SEQ ID NO: 641892 - DNA, 120 bp, Artificial Sequence
  ENSG00000181827_13 (sequence is synthesized)
gcagtgcggggggaacatctgctgtggaagtcaaagtggaacccgaaacatcatcagatgagcatcctgtacagtgccaagagaactctgatgaggctaaagctccccagacacctagtg

SEQ ID NO: 641893 - DNA, 120 bp, Artificial Sequence
  ENSG00000181827_14 (sequence is synthesized)
cccttttggggcagaaaagtaatacagacggagcactgcagaaaccttcaaatgaaggtgtcattgaaataaaagcaactaaggtctgtgaccagaggaccaaatgtaaaagtcgctgta

SEQ ID NO: 641894 - DNA, 120 bp, Artificial Sequence
  ENSG00000181827_15 (sequence is synthesized)
atgaaatgctgccaggcacgtcaacaggcaataatcaaagcactatcactctatcagttgcttctcagaacttaactttcaccagcagcagctcaccacctaatggtgactcaatcaata

SEQ ID NO: 641895 - DNA, 120 bp, Artificial Sequence
  ENSG00000181827_16 (sequence is synthesized)
aagaccctaaattatgcactaaaagcccaagaaaacgactgtcttctacattgcaggagacccaggtgcctcctgtaaagaaaccaattgtggaacagctttcagcagctaccatagaag

SEQ ID NO: 641896 - DNA, 120 bp, Artificial Sequence
  ENSG00000181827_17 (sequence is synthesized)
ggcagaaacaaggcagtgttaagaaggaccaaaaggttccacattcagggaaaacagaaggttcaacagcaggtgctcagattcctagcaaggtatcagtaaatgtcagttcacacatag

SEQ ID NO: 641897 - DNA, 120 bp, Artificial Sequence
  ENSG00000181827_18 (sequence is synthesized)
gagcaaatcaacccttgaattcctctgcccttgttatcagtgattcagctttggaacagcaaacaaccccatcatcatctccagatataaaagtaaaacttgaaggaagtgtctttctct

SEQ ID NO: 641898 - DNA, 120 bp, Artificial Sequence
  ENSG00000181827_19 (sequence is synthesized)
tggacagtgattcaaagtcagttggcagctttaatccaaatggatggcaacaaatcactaaagattctgagtttatatctgccagttgtgaacaacagcaagatatcagtgttatgacaa

SEQ ID NO: 641899 - DNA, 120 bp, Artificial Sequence
  ENSG00000181827_20 (sequence is synthesized)
ttcctgagcactctgatatcaatgacttagagaaatctgtttgggaattagaaggaatgccacaggacacatatagccagcagctacatagccagatacaggaatcttctttaaatcaaa

SEQ ID NO: 641900 - DNA, 120 bp, Artificial Sequence
  ENSG00000181827_21 (sequence is synthesized)
tacaagcacattcttcagatcagttacctctgcaatctgaactgaaggagtttgagccttctgtttcccagacaaatgaaagctactttccttttgatgatgaacttacacaagatagta

SEQ ID NO: 641901 - DNA, 120 bp, Artificial Sequence
  ENSG00000181827_22 (sequence is synthesized)
ttgtggaagagctggtgcttatggagcagcaaatgtcaatgaacaattctcattcttacggcaactgtttgggaatgacccttcagagtcagtcagtaactccaggagctccaatgtcat

SEQ ID NO: 641902 - DNA, 120 bp, Artificial Sequence
  ENSG00000181827_23 (sequence is synthesized)
ctcacacttccagcacccacttctatcatccaatccacagcaatggcactccaatccacacacccacacccacacccacacccactcctactccaaccccaaccccaaccccgacatctg

SEQ ID NO: 641903 - DNA, 120 bp, Artificial Sequence
  ENSG00000181827_24 (sequence is synthesized)
aaatgattgctggatctcagagtctgtcacgggagagcccttgctccaggctagcccagactacacctgtggatagtgctttaggaagtagccgacatacacccattggtactccacatt

SEQ ID NO: 641904 - DNA, 120 bp, Artificial Sequence
  ENSG00000181827_25 (sequence is synthesized)
ctaactgcagcagtagtgtcccccccagccctgttgaatgcaggaatccgtttgcattcactccaataagctccagtatggcatatcatgacgccagcattgtctcaagtagtcctgtga

SEQ ID NO: 641905 - DNA, 120 bp, Artificial Sequence
  ENSG00000181827_26 (sequence is synthesized)
aaccgatgcaaagacccatggccacacaccctgacaaaaccaagcttgaatggatgaataatgggtatagtggggttggtaattcatcagtttctggccatggtattctcccaagctatc

SEQ ID NO: 641906 - DNA, 120 bp, Artificial Sequence
  ENSG00000181827_27 (sequence is synthesized)
aggaactagtggaagaccgtttcaggaaacctcatgcttttgctgtgcctggacagtcttatcagtctcaatccagacatcatgacactcattttggtcgtttgactcctgtctctcctg

SEQ ID NO: 641907 - DNA, 120 bp, Artificial Sequence
  ENSG00000181827_28 (sequence is synthesized)
tgcagcatcaaggtgccactgtaaataacaccaacaaacaggagggttttgcagtccctgcccctcttgataataaaggaactaattcatctgccagcagcaacttcagatgccggagtg

SEQ ID NO: 641908 - DNA, 120 bp, Artificial Sequence
  ENSG00000181827_29 (sequence is synthesized)
tgagccctgctgttcatcgccaacgtaatcttagtggaagcaccctctatccagtatctaatatcccacgatctaatgtgaccccctttggaagtccagttaccccagaagttcatgttt

SEQ ID NO: 641909 - DNA, 120 bp, Artificial Sequence
  ENSG00000181827_30 (sequence is synthesized)
tcacaaatgttcacacagacgcatgtgccaacaacatagctcaaagaagccaatcagttccattgacagtcatgatgcagacagccttcccaaacgctcttcagaagcaagcaaacagta

SEQ ID NO: 641910 - DNA, 120 bp, Artificial Sequence
  ENSG00000181827_31 (sequence is synthesized)
aaaaaataaccaatgttttgttgagtaaacttgattccgacaatgatgatgcagtgagaggtttgggaatgaacaacctgccctctaattatacagcccggatgaatctcactcagattt

SEQ ID NO: 641911 - DNA, 120 bp, Artificial Sequence
  ENSG00000181827_32 (sequence is synthesized)
tggaaccttccactgtttttcctagtgccaacccacaaaatatgatcgattccagcacttctgtttatgagttccaaacaccatcttacctcaccaaaagtaatagcaccggtcagatca

SEQ ID NO: 641912 - DNA, 120 bp, Artificial Sequence
  ENSG00000181827_33 (sequence is synthesized)
atttttctcctggagataatcaagcacaatcagaaattggagagcaacaattagatttcaatagcactgttaaagacctgttgagtggagacagcttgcaaaccaaccagcagctggtag

SEQ ID NO: 641913 - DNA, 120 bp, Artificial Sequence
  ENSG00000181827_34 (sequence is synthesized)
gtcagggagcatctgatctcactaatactgcatctgatttctctagcgatatcaggttgtcttctgagctctcaggcagcatcaatgatttgaacactttagacccaaatctactgtttg

SEQ ID NO: 641914 - DNA, 120 bp, Artificial Sequence
  ENSG00000181827_35 (sequence is synthesized)
atccaggtcgtcagcagggacaagatgatgaagctacactggaagaattaaagaatgacccattatttcaacaaatttgcagtgaatccatgaattctatgacttcatcaggttttgaat

SEQ ID NO: 641915 - DNA, 120 bp, Artificial Sequence
  ENSG00000181827_36 (sequence is synthesized)
ggatagaaagcaaggaccatcctactgttgaaatgttgggttaaattgtgttttataacatgtagcacactgtatctaaagacatatgtattgtatttgtcttaatggaagtgcctcccg

SEQ ID NO: 641916 - DNA, 120 bp, Artificial Sequence
  ENSG00000181827_37 (sequence is synthesized)
cagcagaaatactattaattgtgacattttaaaagcgtttgctgcagaagtggtttcttcagtaggaaatggttagacttgcctcagttcttaacaagtgtctaaagacagtaggctgta

SEQ ID NO: 641917 - DNA, 120 bp, Artificial Sequence
  ENSG00000181827_38 (sequence is synthesized)
gaagaacaagtattaggttttaaattttataatgtgccccatttattcacattgattgactatccagctgttacaagagcagtcgatctttattttgtgtaagttagtttcatttcatca

SEQ ID NO: 641918 - DNA, 120 bp, Artificial Sequence
  ENSG00000181827_39 (sequence is synthesized)
gatgatctgcacagaactcagaataaaccatcaattttaggtataggctgttttgttgttggcattatcttttagatataaaatcatagctagggtgaactgtagacaagaaagtcttcc

SEQ ID NO: 641919 - DNA, 120 bp, Artificial Sequence
  ENSG00000181827_40 (sequence is synthesized)
ttgaaacagggataatattcaggttattataaatatttaggcttgaagcatagagctactgtagggtgaaaaatctctgtaggactttctggggcttcagtaccatttacacccacgatg

SEQ ID NO: 641920 - DNA, 120 bp, Artificial Sequence
  ENSG00000181827_41 (sequence is synthesized)
aagggcttaaatagaaaataatggaaaattaaatattactttaaggaaagcaaagctgcactaaaatttttaagggaaaaaaaacaagtagccatttatatttgtgaccttgcattaata

SEQ ID NO: 641921 - DNA, 120 bp, Artificial Sequence
  ENSG00000181827_42 (sequence is synthesized)
tttaaatgttgattttaatatggagctagcacacatagatgcgcaggcacgcacacacaaaacaagcaaatgtaactccaggcatttgtaatttaatataataaatacaagcatgttaga

SEQ ID NO: 641922 - DNA, 120 bp, Artificial Sequence
  ENSG00000181827_43 (sequence is synthesized)
actgagatttactttgaaatttttcattaaaatattccacaataatcagtttttttcctcttcaattgagtgactgactccctcactcctcctgaatatagtaatgtagtttgatcatag

SEQ ID NO: 641923 - DNA, 120 bp, Artificial Sequence
  ENSG00000181827_44 (sequence is synthesized)
gatccctttgaaaaacaggaaggaggataacataaaaaacaacaaaaaacatttcaccacctaaggtctgaagccacaaatctttatatctctgatgaaacaaaggggatatcaatagta

SEQ ID NO: 641924 - DNA, 120 bp, Artificial Sequence
  ENSG00000181827_45 (sequence is synthesized)
cttgaagaagaagagcattttattacttgcttaatttatttattgtgataaccacaattgcaaaagaagaactcaggatttgttttaaaatgtttctctctatggctcccattttgtttt

SEQ ID NO: 641925 - DNA, 120 bp, Artificial Sequence
  ENSG00000181827_46 (sequence is synthesized)
gtgaataattatttatgagttgcatgttgacacaaacctactcactggttgaaagctccatttaagtgagtttcaagatcactttcaaagagatttttaaattgccattgtttttaaagc

SEQ ID NO: 641926 - DNA, 120 bp, Artificial Sequence
  ENSG00000181827_47 (sequence is synthesized)
taacataaaaccatttgctatgctaccttgaacctagctaagctttcctttaccttagtaagccaatcagaagactacaatcaatgaatatttagcaaatgtgctgaagggtttaataag

SEQ ID NO: 641927 - DNA, 120 bp, Artificial Sequence
  ENSG00000181827_48 (sequence is synthesized)
gttttgttgttcaataaatttgcaaggtagggtattaacatattttgataaataaatggtgctagagttggcgcagaggtttatatattgatatgtcttagttattggcatttgtgtgtg

SEQ ID NO: 641928 - DNA, 120 bp, Artificial Sequence
  ENSG00000181827_49 (sequence is synthesized)
tttgctgttatcttgatttcatgatttgttaggtatttttttcttgatgctagttatttcttcactgtacattgagacacagcactactgcacaccaaagtatgcaatacccaaaggaaa

SEQ ID NO: 641929 - DNA, 120 bp, Artificial Sequence
  ENSG00000181827_50 (sequence is synthesized)
ctgtgtgatttctcctgacaaatgatgggagcctttctttatgagatactctgaaaaggagattttgaggccattctaatcccttgtttacattattagcttcctactaatataaaaata

SEQ ID NO: 641930 - DNA, 120 bp, Artificial Sequence
  ENSG00000181827_51 (sequence is synthesized)
atggaaatcttttttgataaaaatattaagactggaggatttttaaccccttgtacagtattgcagcaaactctttaaatttggttgaattcgtccagcaaactttctggggttcatata

SEQ ID NO: 641931 - DNA, 120 bp, Artificial Sequence
  ENSG00000181827_52 (sequence is synthesized)
ttgcactaaatttgttgaacctgtggtaggcacatctcttaggataaatgcaaccaatacagtccacagattaaactttttaaatgtgtttcattatgaaaagacaaaatgtcatcaaag

SEQ ID NO: 641932 - DNA, 120 bp, Artificial Sequence
  ENSG00000181827_53 (sequence is synthesized)
tgacagataaaattgtcttatgtagcaatgtgcattgatctcaatgagatatttctattattctcttacatgagaatattacagcaggaagaattaagtttagtttgcttcaccatgtta

SEQ ID NO: 641933 - DNA, 120 bp, Artificial Sequence
  ENSG00000181827_54 (sequence is synthesized)
atacatgatcacaaaatgtgcatgagtgttattgacttatcttgtacagtactaggattcctgtaaccactcttttttttcttcgctgtattgaaactggttcagtgttaaccaggcaag

SEQ ID NO: 641934 - DNA, 120 bp, Artificial Sequence
  ENSG00000181827_55 (sequence is synthesized)
catagttattcacaggttatttactttatgtttactaattctgcttagttattgttgaatatgttctgttccagattatttttattgttttgatgtttaaaacattttgcatactgttta

SEQ ID NO: 641935 - DNA, 120 bp, Artificial Sequence
  ENSG00000181827_56 (sequence is synthesized)
tcataaaacttcatgaagtaaataattttgcatataattgcaataagcactgacttttgaactgaaaagaaggaaagtgtttttttgtgcagtgcttctgaggttcatataatagtcttg

SEQ ID NO: 641936 - DNA, 120 bp, Artificial Sequence
  ENSG00000181827_57 (sequence is synthesized)
tactataatgtgctttactacacgataaatgacaaaaacaagccctgtttcatgtttcatttagtgcaaaaagtcagatttccccagtgttttgttgtctgttgtacctgctgaaactac

SEQ ID NO: 641937 - DNA, 120 bp, Artificial Sequence
  ENSG00000181827_58 (sequence is synthesized)
agtagttgaatattgcggtagcatttcagttctctttttttattaaagtgctcaaaaattgttttttaaatgttttcaaaaacaattaaaaacattttatattaaactgactggatctga

SEQ ID NO: 641938 - DNA, 120 bp, Artificial Sequence
  ENSG00000181827_59 (sequence is synthesized)
aggtgttttatgggacatattttatataggcaacacattttgtaaacagacccaatgttattcttcctttgatgtcattaactttagggagtgaataaaaatgagcagaaggcagaacag

SEQ ID NO: 641939 - DNA, 120 bp, Artificial Sequence
  ENSG00000181827_60 (sequence is synthesized)
tgctgctgatctgctgtgtgctattaatccagaagaatacacagatcttagttcattcatcaaaactctgttgttcacttaagattattaccaatgaatggtgcatggcatagaacttta

SEQ ID NO: 641940 - DNA, 120 bp, Artificial Sequence
  ENSG00000181827_61 (sequence is synthesized)
tgttgtccaaaaagccatctttttctctttcacatagtgtttaaatgttagcctatggagtacctaggtaagtatatttctggagctctgaatagaaaatgagaaaattttaagcatagc

SEQ ID NO: 641941 - DNA, 120 bp, Artificial Sequence
  ENSG00000181827_62 (sequence is synthesized)
tgtgttcaaaagcagtatagacatttccaggtaccagaaataacaaactgataagtgtaatgaatttgtaagccagaagctgggctacaggtctggaagcaggccgaagtagccagaaat

SEQ ID NO: 641942 - DNA, 120 bp, Artificial Sequence
  ENSG00000181827_63 (sequence is synthesized)
gtcagctcctgcaaagtaatgaaaccagggtcttgaatggagtttcctcactcttgaaactgagaagcaacaacaaccagtgccagggactatatattgtagacagatcttctcaaacag

SEQ ID NO: 641943 - DNA, 120 bp, Artificial Sequence
  ENSG00000181827_64 (sequence is synthesized)
cctactcctctgtttacatagatctttgtagatctgtgatagttccactatcaccatagatctggagccctcagtttgaacaggtggtagaagcaattacaaaaggaaaggagtggagat

SEQ ID NO: 641944 - DNA, 120 bp, Artificial Sequence
  ENSG00000181827_65 (sequence is synthesized)
taggaagggagaggtaaagagcaggaaggctcccatgaaagctgagcctgcagatcaaaattcaaaagtacttgaagaaaaactaatcccaagaaaggcaatcagtcactcaagagaaaa

SEQ ID NO: 641945 - DNA, 120 bp, Artificial Sequence
  ENSG00000181827_66 (sequence is synthesized)
tgaaagtaatgaactacctagataatactataaaattagtatgttaggatcctcagtgctcaatgacatggaagggtaaaatgtcagagcaggcaaacataagaaccagtgcatagagtc

SEQ ID NO: 641946 - DNA, 120 bp, Artificial Sequence
  ENSG00000181827_67 (sequence is synthesized)
aaccagtaagaaattctgggggtgaaaatactgtgtaacacctgaggtgattttggtttcaagtaattgaaaacccaacactggcttaaaccataaggacacttacttttagcttaataa

SEQ ID NO: 641947 - DNA, 120 bp, Artificial Sequence
  ENSG00000181827_68 (sequence is synthesized)
tagtggagataggaggttcaagggttcattcaatggttcattgtttacaggcaccagatcctgtttgtgtttctgttccatcatcttcagctttgctttgctgtgtctattacctcatag

SEQ ID NO: 641948 - DNA, 120 bp, Artificial Sequence
  ENSG00000181827_69 (sequence is synthesized)
tcacaagatggctgccacagctcagatgttataccctcataacatcccaagcaggatagtaagagcagttcttagccttttatcagagagaaaaaaaaatctcagaatcttccattaagc

SEQ ID NO: 641949 - DNA, 120 bp, Artificial Sequence
  ENSG00000181827_70 (sequence is synthesized)
actccatacacacacactgttagtctcattgtattaaacaaaggctcatcctaaggccaattacttagcttagatccttaattaatgctttataggtaggagggggggcccatttcctgg

SEQ ID NO: 641950 - DNA, 120 bp, Artificial Sequence
  ENSG00000181827_71 (sequence is synthesized)
agcatgtggtcattcatcttaaatgagttccatcacctagggaagatattagggacttgctctttgggaggcaaccagtagtggtcactgcaaaaaatagctaggtaagatgagtaagat

SEQ ID NO: 641951 - DNA, 120 bp, Artificial Sequence
  ENSG00000181827_72 (sequence is synthesized)
cttgtacccacctttgaggggcttacaatcataaagagttaagtacatgttctttgttaagtgccaacagtatgtatactacactatgtagaagaaaaaataagaatttgaaatctgccg

SEQ ID NO: 641952 - DNA, 120 bp, Artificial Sequence
  ENSG00000181827_73 (sequence is synthesized)
aactaagtttactggtgctaactgttaactggtatcttgccttccccctatgagctgaaaaatcaggtattattgagtatcacaaatgcaagttgcctcagctcctacagcataagaaaa

SEQ ID NO: 641953 - DNA, 120 bp, Artificial Sequence
  ENSG00000181827_74 (sequence is synthesized)
taagaaaagaccaaactttttattttgttaaatctgaagtacagatttattttgacatgcattgttataaatgaatttttaaataattaaagttataaatttatggatgggatcacttat

SEQ ID NO: 641954 - DNA, 120 bp, Artificial Sequence
  ENSG00000181827_75 (sequence is synthesized)
catcatctgaaattttaaaaatatgtatgccagtcttgttgctataatctgcttagaaaaaagaacaaaacaaaaagactacatttttcaagatttgatttttaagaagtacttaattct

SEQ ID NO: 641955 - DNA, 120 bp, Artificial Sequence
  ENSG00000181827_76 (sequence is synthesized)
tggagaggagaagagagtcatataaataaaatatatcatgagagtgatattactgtggtatatagagtatttctttgcattagacccagtgttagtttgcatatattctcatgtcctcat

SEQ ID NO: 641956 - DNA, 120 bp, Artificial Sequence
  ENSG00000181827_77 (sequence is synthesized)
tgtaacaatttttagcgagtattatttttcaggtgagaaaattttacttcagagattaactggtggaggtaacataataacaggaagagccaggattatcttaatttcaaatcccacttc

SEQ ID NO: 641957 - DNA, 120 bp, Artificial Sequence
  ENSG00000181827_78 (sequence is synthesized)
ataccattatgctatacttaagatatgtgttcacagtgtacctactgcagttgtatgatctggttgcttctttgaaattttcattctggttttaaatttagaattgagtttgatttttgt

SEQ ID NO: 641958 - DNA, 120 bp, Artificial Sequence
  ENSG00000181827_79 (sequence is synthesized)
ggagttctttatttaacctcccatccttatatgtcaacaattctttttcatttttattgcttttagatttacctgtagtttgtaattttcctccaaattacttgaatccttttccctccc

SEQ ID NO: 641959 - DNA, 120 bp, Artificial Sequence
  ENSG00000181827_80 (sequence is synthesized)
ttctctccatagaaataccctgatgtattaggagaatgaagatttaaaaacaaaattttgttttccacacagcttttcaagcatatttcatacaggtatactctagtcatatttatgttt

SEQ ID NO: 641960 - DNA, 120 bp, Artificial Sequence
  ENSG00000181827_81 (sequence is synthesized)
aaatcacttaaaatgtcatcaaaataaaaatgggactttttttttaacagatgataaagtgcctaaaatatgtcagtctctgtacaaggtgctagagaagacacctgccattttgaaatt

SEQ ID NO: 641961 - DNA, 120 bp, Artificial Sequence
  ENSG00000181827_82 (sequence is synthesized)
ttgcaatataatgaaaaagacacagtgaatgtctttgcaggatgcaatgaggtcactatagcagaggcggatacttaccagtagtatgcattctccccttcttctttactgtaaaagtcc

SEQ ID NO: 641962 - DNA, 120 bp, Artificial Sequence
  ENSG00000181827_83 (sequence is synthesized)
ttgatttttagctgagcacacagccatctgaccaaaaggctgcatctgccaacttcccttgcagttaagtggagacacttaccaagtactcaaagagatgtaaccaaaaggtttgggtgc

SEQ ID NO: 641963 - DNA, 120 bp, Artificial Sequence
  ENSG00000181827_84 (sequence is synthesized)
tacttctttgcagtgttcttgtccttcctctctgctggctggaatgcaaatgtgatggctagaactcaagcagccctcctggacttcatgttaaagacacatgctgaggatgattgagca

SEQ ID NO: 641964 - DNA, 120 bp, Artificial Sequence
  ENSG00000181827_85 (sequence is synthesized)
acaagatacaaggagcccagggcatgatgactttggaagggaagatgcccaactagtcctgactgcttacctctggatgtgttttacatgagagaaataaatgtctttctggtttaactc

SEQ ID NO: 641965 - DNA, 120 bp, Artificial Sequence
  ENSG00000181827_86 (sequence is synthesized)
aacatctgttttgtggacatctagtttgattcctgttggataaatacttatgcaaaactgtacaatctaaagtggactgcattttgccccctcgggtgaattgtttataagctacctaga

SEQ ID NO: 641966 - DNA, 120 bp, Artificial Sequence
  ENSG00000181827_87 (sequence is synthesized)
tacttacctgtatctcatcaataataaaatcacaatctgagaactgctggggcctgagagaatataatatcagcaagaagttgagaagtttacagacctagagaaactctacctctacct

SEQ ID NO: 641967 - DNA, 120 bp, Artificial Sequence
  ENSG00000181830_0 (sequence is synthesized)
agtgcaccggaggaggtgagcgccaggtcgccttcgcggcccggggacacaggcagggacgcgggagctgatgcggctggaccggccggggaaacagtattttctggaaggggtaagaga

SEQ ID NO: 641968 - DNA, 120 bp, Artificial Sequence
  ENSG00000181830_1 (sequence is synthesized)
tgctgtcttgagcctttggaatctcggatccgggccgcccagaggacctcgacaggagcacagggaggacaaactgaagtccgagagaggcggcgtggcctccggcctcggggagcgctg

SEQ ID NO: 641969 - DNA, 120 bp, Artificial Sequence
  ENSG00000181830_2 (sequence is synthesized)
ccgggggtctcgggcttgggagagggcctgggggcggtgaaaatggggggaaaggaggggaccacaacattgttatggaagagtgagctcggattggcagagggacgcggggctgcaacg

SEQ ID NO: 641970 - DNA, 120 bp, Artificial Sequence
  ENSG00000181830_3 (sequence is synthesized)
cgagtctccggaggtggaggggtccaggctgatgtagcgccgcccgggtcctgggtcggggttccgggaagtggacctgcgagccaagcctagccaagtcgggggacggaggctccgggg

SEQ ID NO: 641971 - DNA, 120 bp, Artificial Sequence
  ENSG00000181830_4 (sequence is synthesized)
cggacggagctgagggtgggcaggcgaggttgatggagcccttccaggaagcagggcgaggctcaagcacccagaaaaacctgtggctgccgaggtcccccgccagcagcgggcagcgga

SEQ ID NO: 641972 - DNA, 120 bp, Artificial Sequence
  ENSG00000181830_5 (sequence is synthesized)
gcgcaggggcggggctggggactggcgaactccgcctctctggggctgtcgctttaagggcaaggcggggcgtgcgggccctttaaggccacgtgggggcgtgtcaggaagtgagtccag

SEQ ID NO: 641973 - DNA, 120 bp, Artificial Sequence
  ENSG00000181830_6 (sequence is synthesized)
ggcccgcctcccggggagtcggcctcggatgtccggaggctcctgggctgagccggcgacagagcccgggaaggcagcgagacgtgggcgccggcccagccccctcccgcgtccttcagc

SEQ ID NO: 641974 - DNA, 120 bp, Artificial Sequence
  ENSG00000181830_7 (sequence is synthesized)
cccaagccccgagcccctctgacccttccgcagccctccctccagccgcgcccggcctccggcagctccctgtacgcctccctccccctgcccgcccctccctcccacagccgcccatga

SEQ ID NO: 641975 - DNA, 120 bp, Artificial Sequence
  ENSG00000181830_8 (sequence is synthesized)
cgccctctcggcacctcttcccactctgccacgcgtccttttcctgcaccttcgccccgcgtacctactcctgccccgccctgccattcctctcccctcccttctctctgcgacccctcc

SEQ ID NO: 641976 - DNA, 120 bp, Artificial Sequence
  ENSG00000181830_9 (sequence is synthesized)
ctgttaggccccagcctcttctcccctcacaggtcttctctgtcctggcctcaccgccttatcctattcctctcccttgccctgtgtcttgtctcagagccccctcggggtgggagtagg

SEQ ID NO: 641977 - DNA, 120 bp, Artificial Sequence
  ENSG00000181830_10 (sequence is synthesized)
ttgtggagcagcacaactgggctcaccccaaagcagaacttctcaatccatgaggacaatggggaggcctttaggccagcccacatgtgacaatggagggctgcggcttccttgcggaga

SEQ ID NO: 641978 - DNA, 120 bp, Artificial Sequence
  ENSG00000181830_11 (sequence is synthesized)
gcacaagtgagctcactgccctggactccagggaatcagagttctggccgcggggtgacccagctcctctgctaccatgaatagggcccctctgaagcggtccaggatcctgcacatggc

SEQ ID NO: 641979 - DNA, 120 bp, Artificial Sequence
  ENSG00000181830_12 (sequence is synthesized)
gctgaccggggcctcagacccctctgcagaggcagaggccaacggggagaagccctttctgctgcgggcattgcagatcgcgctggtggtctccctctactgggtcacctccatctccat

SEQ ID NO: 641980 - DNA, 120 bp, Artificial Sequence
  ENSG00000181830_13 (sequence is synthesized)
ggtgttccttaataagtacctgctggacagcccctccctgcggctggacacccccatcttcgtcaccttctaccagtgcctggtgaccacgctgctgtgcaaaggcctcagcgctctggc

SEQ ID NO: 641981 - DNA, 120 bp, Artificial Sequence
  ENSG00000181830_14 (sequence is synthesized)
cgcctgctgccctggtgccgtggacttccccagcttgcgcctggacctcagggtggcccgcagcgtcctgcccctgtcggtggtcttcatcggcatgatcaccttcaataacctctgcct

SEQ ID NO: 641982 - DNA, 120 bp, Artificial Sequence
  ENSG00000181830_15 (sequence is synthesized)
caagtacgtcggtgtggccttctacaatgtgggccgctcactcaccaccgtcttcaacgtgctgctctcctacctgctgctcaagcagaccacctccttctatgccctgctcacctgcgg

SEQ ID NO: 641983 - DNA, 120 bp, Artificial Sequence
  ENSG00000181830_16 (sequence is synthesized)
tatcatcatcgggggcttctggcttggtgtggaccaggagggggcagaaggcaccctgtcgtggctgggcaccgtcttcggcgtgctggctagcctctgtgtctcgctcaacgccatcta

SEQ ID NO: 641984 - DNA, 120 bp, Artificial Sequence
  ENSG00000181830_17 (sequence is synthesized)
ctcctgctgctcggggagcttcaggccctgcgtgactttgcccagctgggcagtgcccacttctgggggatgatgacgctgggcggcctgtttggctttgccatcggctacgtgacagga

SEQ ID NO: 641985 - DNA, 120 bp, Artificial Sequence
  ENSG00000181830_18 (sequence is synthesized)
ctgcagatcaagttcaccagtccgctgacccacaatgtgtcgggcacggccaaggcctgtgcccagacagtgctggccgtgctctactacgaggagaccaagagcttcctctggtggacg

SEQ ID NO: 641986 - DNA, 120 bp, Artificial Sequence
  ENSG00000181830_19 (sequence is synthesized)
agcaacatgatggtgctgggcggctcctccgcctacacctgggtcaggggctgggagatgaagaagactccggaggagcccagccccaaagacagcgagaagagcgccatgggggtgtga

SEQ ID NO: 641987 - DNA, 120 bp, Artificial Sequence
  ENSG00000181830_20 (sequence is synthesized)
gcaccacaggcaccctggatggcccggccccggggcccgtacacaggcggggccagcacagtagtgaaggcggtctcctggaccccagaagcgtgctgtggtgtggactgggtgctactt

SEQ ID NO: 641988 - DNA, 120 bp, Artificial Sequence
  ENSG00000181830_21 (sequence is synthesized)
atagacccaatcagaatacggtggttgagaaggaaccagtgtttacaagtaatatcagaaagttgaaggaaccagtgtttacaagtaataccagaaagttgccaaacccttctctatcct

SEQ ID NO: 641989 - DNA, 120 bp, Artificial Sequence
  ENSG00000181830_22 (sequence is synthesized)
ctcgtatttctgagtttttgtccttcccgagggagcaccctagtgagagttgaaccccttccttctgcctccagggcctgtctgcctccacatcactctgaggacagggacaggcaacaa

SEQ ID NO: 641990 - DNA, 120 bp, Artificial Sequence
  ENSG00000181830_23 (sequence is synthesized)
ccttgaagggacagcaatggcaaagccacaaaggcttcactgtactcaggggagatggccctaccacagccacctggagagggttgggaagccttccgtctgcggtgggcaggcagcctc

SEQ ID NO: 641991 - DNA, 120 bp, Artificial Sequence
  ENSG00000181830_24 (sequence is synthesized)
accctgggcccacagaccggccttcctttggaggaaagtgtggcctggactgagggaggaaatgagcgagttccctctgacaccagcagatccccaggggctgctgggcagtggcctggg

SEQ ID NO: 641992 - DNA, 120 bp, Artificial Sequence
  ENSG00000181830_25 (sequence is synthesized)
aatggggtggattgtgagaaagtgctcaccatctatacaccctgtatgtccagcttttgaacacaagggaaccatgcttctcttagaggttaagcagggtcattaacatcctcccccagt

SEQ ID NO: 641993 - DNA, 120 bp, Artificial Sequence
  ENSG00000181830_26 (sequence is synthesized)
ccctaacatcacattgtcctgcgtggctcctctggccctgagtggcacctgtccctctggtctcccagcacctggcccaggtaacagccttctgaaagcagagccaaggagctgcttctc

SEQ ID NO: 641994 - DNA, 120 bp, Artificial Sequence
  ENSG00000181830_27 (sequence is synthesized)
tcttctcccagttctacctccccagaagccttcctccccaggtggggctgatggagcaagggtccagactaggagccttccaccccagctgtgtctggcgcccctagatctctgcaaggg

SEQ ID NO: 641995 - DNA, 120 bp, Artificial Sequence
  ENSG00000181830_28 (sequence is synthesized)
aggtgttacagctggttctgagccgcttgccttgtgatggtaagacaccaacctttacattcttccctgaggttgtggctgacagagcctgcttggccccactgttagtccagcgagctc

SEQ ID NO: 641996 - DNA, 120 bp, Artificial Sequence
  ENSG00000181830_29 (sequence is synthesized)
ctatatcaaaatgccgtaggccgggtggcttacaaacaacagaaacgtattgctcacagtcctggggggctgggacgcccaagatcaagaggccagcagattcggactccgctgagggct

SEQ ID NO: 641997 - DNA, 120 bp, Artificial Sequence
  ENSG00000181830_30 (sequence is synthesized)
gtttcccgatccatagatggtgccttctcgctgtatcctcaatggtagaagcacaaacaagcaagctccttcctgcctcttttataaggactccaaccctgttcatgagggttccgcccc

SEQ ID NO: 641998 - DNA, 120 bp, Artificial Sequence
  ENSG00000181830_31 (sequence is synthesized)
catgacccaatcagctccaaaggccccacctcctaatactgtcaccttgggggtgagaattccaatgtgaatttgcagggggagtgggggacacacacaaatttcggggccataccaccc

SEQ ID NO: 641999 - DNA, 120 bp, Artificial Sequence
  ENSG00000181830_32 (sequence is synthesized)
ttcaccacaccctcctgcgctcagggtggcttgcagtccctggcccttctggtgggcatttggtatgtcctttctcttggggtgatttctgatgtttttactctatatagtgaaaagcta

SEQ ID NO: 642000 - DNA, 120 bp, Artificial Sequence
  ENSG00000181830_33 (sequence is synthesized)
gggagagcgggtcttctcccccctccctctccagtcccctcacaatcccagatgggttctaatgcagctgctggggcctgatgccctgagttgtttgtgattcaataaagaatccataag

SEQ ID NO: 642001 - DNA, 120 bp, Artificial Sequence
  ENSG00000181830_34 (sequence is synthesized)
tccccgcacgcacttctggaagtgcaagccggtagcgcggcgggccagggatacagccaagtcccgggacgtgccagctgcggtaactgaagccgggtcccgggcgggcgggggtaccag

SEQ ID NO: 642002 - DNA, 120 bp, Artificial Sequence
  ENSG00000181830_35 (sequence is synthesized)
ggacaggagtagccttggaaagaggagagggcctcctcccacgaccgtccggatcaccgcctctccgccggcacccccggggcccatgccgcgaacaggccggcgaggctggcaaggtgc

SEQ ID NO: 642003 - DNA, 120 bp, Artificial Sequence
  ENSG00000181830_36 (sequence is synthesized)
gcccggggcggaaagcaggaagtcgatcccgcgggcgcggcccagggtgcggcgctgcagatgcagcacggggtcgcggggcgggcgcccagtgcaccggaggaggtgagcgccaggtcg

SEQ ID NO: 642004 - DNA, 120 bp, Artificial Sequence
  ENSG00000181830_37 (sequence is synthesized)
gtcgccttcgcggcccggggacacaggcagggacgcgggagctgatgcggctggaccggccggggaaacagtattttctggaagggggcccctctgaagcggtccaggatcctgcacatg

SEQ ID NO: 642005 - DNA, 120 bp, Artificial Sequence
  ENSG00000181847_0 (sequence is synthesized)
acatctgcttcctgtaggccctctgggcagaagcatgcgctggtgtctcctcctgatctgggcccaggggctgaggcaggctcccctcgcctcaggaatgatgacaggcacaatagaaac

SEQ ID NO: 642006 - DNA, 120 bp, Artificial Sequence
  ENSG00000181847_1 (sequence is synthesized)
aacggggaacatttctgcagagaaaggtggctctatcatcttacaatgtcacctctcctccaccacggcacaagtgacccaggtcaactgggagcagcaggaccagcttctggccatttg

SEQ ID NO: 642007 - DNA, 120 bp, Artificial Sequence
  ENSG00000181847_2 (sequence is synthesized)
taatgctgacttggggtggcacatctccccatccttcaaggatcgagtggccccaggtcccggcctgggcctcaccctccagtcgctgaccgtgaacgatacaggggagtacttctgcat

SEQ ID NO: 642008 - DNA, 120 bp, Artificial Sequence
  ENSG00000181847_3 (sequence is synthesized)
ctatcacacctaccctgatgggacgtacactgggagaatcttcctggaggtcctagaaagctcagtggctgagcacggtgccaggttccagattccattgcttggagccatggccgcgac

SEQ ID NO: 642009 - DNA, 120 bp, Artificial Sequence
  ENSG00000181847_4 (sequence is synthesized)
gctggtggtcatctgcacagcagtcatcgtggtggtcgcgttgactagaaagaagaaagccctcagaatccattctgtggaaggtgacctcaggagaaaatcagctggacaggaggaatg

SEQ ID NO: 642010 - DNA, 120 bp, Artificial Sequence
  ENSG00000181847_5 (sequence is synthesized)
gagccccagtgctccctcacccccaggaagctgtgtccaggcagaagctgcacctgctgggctctgtggagagcagcggggagaggactgtgccgagctgcatgactacttcaatgtcct

SEQ ID NO: 642011 - DNA, 120 bp, Artificial Sequence
  ENSG00000181847_6 (sequence is synthesized)
gagttacagaagcctgggtaactgcagcttcttcacagagactggttagcaaccagaggcatcttctggaagatacacttttgtctttgctattatagatgaatatataagcagctgtac

SEQ ID NO: 642012 - DNA, 120 bp, Artificial Sequence
  ENSG00000181847_7 (sequence is synthesized)
gtgtgtgtgtgtgtatgtgtgtgtgtgttcagttgagtgaataaatgtcatcctcttctccatcttcatttccttggccttttcgttctattccattttgcattatggcaggcctagggt

SEQ ID NO: 642013 - DNA, 120 bp, Artificial Sequence
  ENSG00000181847_8 (sequence is synthesized)
cattatggcaggcctagggtgagtaacgtggatcttgatcataaatgcaaaattaaaaaatatcttgacctggttttaaatctggcagtttgagcagatcctatgtctctgagagacaca

SEQ ID NO: 642014 - DNA, 120 bp, Artificial Sequence
  ENSG00000181847_9 (sequence is synthesized)
ttcctcataatggccagcattttgggctacaaggttttgtggttgatgatgaggatggcatgactgcagagccatcctcatctcattttttcacgtcattttcagtaactttcactcatt

SEQ ID NO: 642015 - DNA, 120 bp, Artificial Sequence
  ENSG00000181847_10 (sequence is synthesized)
caaaggcaggttataagtaagtcctggtagcagcctctatggggagatttgagagtgactaaatcttggtatctgccctcaagaacttacagttaaatggggagacaatgttgtcatgaa

SEQ ID NO: 642016 - DNA, 120 bp, Artificial Sequence
  ENSG00000181847_11 (sequence is synthesized)
aaggtattatagtaaggagagaaggagacatacacaggccttcaggaagagacgacagtttggggtgaggtagttggcataggcttatctgtgatgaagtggcctgggagcaccaagggg

SEQ ID NO: 642017 - DNA, 120 bp, Artificial Sequence
  ENSG00000181847_12 (sequence is synthesized)
tgtaggaaattcttggagctgaaagtcccacaaagaaggccctggcaccaagggagtcagcaaacttcagattttattctctgggcaggcatttcaagtttccttttgctgtgacatact

SEQ ID NO: 642018 - DNA, 120 bp, Artificial Sequence
  ENSG00000181847_13 (sequence is synthesized)
catccattagacagcctgatacaggcctgtagcctcttccggccgtgtgtgctggggaagccccaggaaacgcacatgcccacacagggagccaagtcgtagcatttgggccttgatcta

SEQ ID NO: 642019 - DNA, 120 bp, Artificial Sequence
  ENSG00000181847_14 (sequence is synthesized)
ccttttctgcatcaatacactcttgagcctttgaaaaaagaacgtttcccactaaaaagaaaatgtggatttttaaaatagggactcttcctaggggaaaaaggggggctgggagtgata

SEQ ID NO: 642020 - DNA, 120 bp, Artificial Sequence
  ENSG00000181847_15 (sequence is synthesized)
gagggtttaaaaaataaacaccttcaaactaacttcttcgaacccttttattcactccctgacgactttgtgctggggttggggtaactgaaccgcttatttctgtttaattgcattcag

SEQ ID NO: 642021 - DNA, 120 bp, Artificial Sequence
  ENSG00000181847_16 (sequence is synthesized)
gctggatcttagaagacttttatccttccaccatctctctcagaggaatgagcggggaggttggatttactggtgactgattttctttcatgggccaaggaactgaaagagaatgtgaag

SEQ ID NO: 642022 - DNA, 120 bp, Artificial Sequence
  ENSG00000181847_17 (sequence is synthesized)
caaggttgtgtcttgcgcatggttaaaaataaagcattgtcctgcttcctaagacttagactggggttgacaattgttttagcaacaagacaattcaactatttctcctaggatttttat

SEQ ID NO: 642023 - DNA, 120 bp, Artificial Sequence
  ENSG00000181847_18 (sequence is synthesized)
tattattattttttcacttttctaccaaatgggttacataggaagaatgaactgaaatctgtccagagctccaagtcctttggaagaaagattagatgaacgtaaaaatgttgttgtttg

SEQ ID NO: 642024 - DNA, 120 bp, Artificial Sequence
  ENSG00000181847_19 (sequence is synthesized)
ctgtggcagtttacagcatttttcttgcaaaattagtgcaaatctgttggaaatagaacacaattcacaaattggaagtgaactaaaatgtaatgacgaaaagggagtagtgttttgatt

SEQ ID NO: 642025 - DNA, 120 bp, Artificial Sequence
  ENSG00000181847_20 (sequence is synthesized)
tggaggaggtgtatattcggcagaggttggactgagagttgggtgttatttaacataattatggtaattgggaaacatttataaacactattgggatggtgataaaatacaaaagggcct

SEQ ID NO: 642026 - DNA, 120 bp, Artificial Sequence
  ENSG00000181847_21 (sequence is synthesized)
atagatgttagaaatgggtcaggttactgaaatgggattcaatttgaaaaaaatttttttaaatagaactcactgaactagattctcctctgagaaccagagaagaccatttcatagttg

SEQ ID NO: 642027 - DNA, 120 bp, Artificial Sequence
  ENSG00000181847_22 (sequence is synthesized)
gattcctggagacatgcgctatccaccacgtagccactttccacatgtggccatcaaccacttaagatggggttagtttaaatcaagatgtgctgttataattggtataagcataaaatc

SEQ ID NO: 642028 - DNA, 120 bp, Artificial Sequence
  ENSG00000181847_23 (sequence is synthesized)
acactagattctggagatttaatatgaataataagaatactatttcagtagttttggtatattgtgtgtcaaaaatgataatattttggatgtattgggtgaaataaaatattaacatta

SEQ ID NO: 642029 - DNA, 120 bp, Artificial Sequence
  ENSG00000181847_24 (sequence is synthesized)
atgttgcccttgattctaggcagagacaggaggcatcagacagctgtgacagccatggagctcccctaccacttctgagccagagggaagactttggagaagcagaagcccaaagacact

SEQ ID NO: 642030 - DNA, 120 bp, Artificial Sequence
  ENSG00000181847_25 (sequence is synthesized)
accaccactcccagccccgcttggctgagggctgcgggccacaggttttcaggaccgtgcttgtggttggaggctgtggactcaagtgcggctggcccgggactttcacagggcgcaggg

SEQ ID NO: 642031 - DNA, 120 bp, Artificial Sequence
  ENSG00000181847_26 (sequence is synthesized)
cgggctaggggaaggcccagctgtgaactgataagggggttttacagtctaggccagcacttcttcccctttcacgggcaaacgtgacattctttttcagcacctgtactcacccagctg

SEQ ID NO: 642032 - DNA, 120 bp, Artificial Sequence
  ENSG00000181847_27 (sequence is synthesized)
catcaaggcggaccagacttgtccaactcacagccccaaaagtcagggcagaataaagcacagtggctgattttagcatttttaaaatagaaatgtgagtcagcacctgatggacctcac

SEQ ID NO: 642033 - DNA, 120 bp, Artificial Sequence
  ENSG00000181847_28 (sequence is synthesized)
agatccctgctatgccacgagggctgctgactggccttaaaagctcagggtggcccggggagctctcagagcaggcctgcttctcacagctgagccgctcagtgctgggggctggtgttg

SEQ ID NO: 642034 - DNA, 120 bp, Artificial Sequence
  ENSG00000181847_29 (sequence is synthesized)
agtgggtgggaaccagccaggttccccgtggagtctgtgcaggaggctctggagggtctggggtagattccctggggagagacttctgtcatttgctttcctccaaggcagcctcagggt

SEQ ID NO: 642035 - DNA, 120 bp, Artificial Sequence
  ENSG00000181847_30 (sequence is synthesized)
ctagctggcaagtggtcactttcctgcagaaacatgctatcctcctgttctatcagataaggagggcagaatgaagaggttgggtggaaccctggccttggagtctggagactaggattt

SEQ ID NO: 642036 - DNA, 120 bp, Artificial Sequence
  ENSG00000181847_31 (sequence is synthesized)
tactcttgacaaagcacattatatagatagggatattgtcctccaattttcctttcacttccttaattaatattgttatcaatactactgttgatgtattgaactcctgccatcttccag

SEQ ID NO: 642037 - DNA, 120 bp, Artificial Sequence
  ENSG00000181847_32 (sequence is synthesized)
gcactgtgctgaacacttcaccaaacactagagaattaaatcctcacaaccctatgaaagaggtactcttattcctatatgcacatggggaaactgagccttcaggaggttgagaaagtt

SEQ ID NO: 642038 - DNA, 120 bp, Artificial Sequence
  ENSG00000181847_33 (sequence is synthesized)
ttccaaggtcaccaaacaggatgactttggacccagtctgttaatcatccccctctagagcaccattgatcaaaatggacttgaccatattcctctttggactggttacttagcaaaaaa

SEQ ID NO: 642039 - DNA, 120 bp, Artificial Sequence
  ENSG00000181847_34 (sequence is synthesized)
cagaaaaattatttaacaattgtttaaaaccacctctaagtttctctggatatctcattatataagagaggtctcacctctttggctcccacccagctcaactatggaaacacaggctgt

SEQ ID NO: 642040 - DNA, 120 bp, Artificial Sequence
  ENSG00000181847_35 (sequence is synthesized)
aaatttttatagcccaaatcctagtgtccaccactttctgtgctctagtcccactagctgctcttggccctgccactcctggctccccggccttagtgagtttgggaaacatccctccag

SEQ ID NO: 642041 - DNA, 120 bp, Artificial Sequence
  ENSG00000181847_36 (sequence is synthesized)
ttcaaccttggcaccttcccttggacacacattaggtattatttctccttcagctgaaggctttgtagctattgaaaggcaaggcatctcttgatgtgagccttgaaggacaggttgctt

SEQ ID NO: 642042 - DNA, 120 bp, Artificial Sequence
  ENSG00000181847_37 (sequence is synthesized)
tgggtaggcagagagaagctggtaaggcgtatattgtctaagggtctggaggtggggtataaggggtatacaagtcatagagttggggataggcagaacccagagaggggagaaaactgg

SEQ ID NO: 642043 - DNA, 120 bp, Artificial Sequence
  ENSG00000181847_38 (sequence is synthesized)
ttctgggtgcagatgcagattttcaggatgtacaacatggagcatccccaaggcaactgtgttgagagcctgcgaggcaggtgaatgtggatcttctaccccctctcctgactgagttca

SEQ ID NO: 642044 - DNA, 120 bp, Artificial Sequence
  ENSG00000181847_39 (sequence is synthesized)
ccaaggaacaagctttgtaaactatttgaggctcccaggggctcacccttctttgcatttccagctctcatgaggtcattgtgcacaggaaagctctctcctctaatctcctctgatcct

SEQ ID NO: 642045 - DNA, 120 bp, Artificial Sequence
  ENSG00000181847_40 (sequence is synthesized)
actgcaccagagaaatcaagccagaattcaataaagtctcagtccagataaacaagacaaaagaaataagattcgagtagaagatctccttcaagggaaagttgctgtgtttgtccaaga

SEQ ID NO: 642046 - DNA, 120 bp, Artificial Sequence
  ENSG00000181847_41 (sequence is synthesized)
cctttgtcccatccatgtatcatcccccaagtaaacacttcttgttcacctgttcattagatttcaagtgcagtccctggcctgtaagtccctacaatgataagcttctcttatcattgc

SEQ ID NO: 642047 - DNA, 120 bp, Artificial Sequence
  ENSG00000181847_42 (sequence is synthesized)
acattcttcatcaggaggatgccagaggagctcagccaacagttcctcatcagtagcagattcttcagaatcttgggcactacacagatgcccttgagctctttgaataaaggctgattt

SEQ ID NO: 642048 - DNA, 120 bp, Artificial Sequence
  ENSG00000181847_43 (sequence is synthesized)
ttagaaaaaacattaagacagaacttaaaaacaatagattgactataatccaaagacgagtgtacctctaaccacaattttcatttatttttaaatgtttccttcatggcctttcttgtg

SEQ ID NO: 642049 - DNA, 120 bp, Artificial Sequence
  ENSG00000181847_44 (sequence is synthesized)
gctcaccctatgcagtttgtgtatttgttgacaactttatgtgtttttaatatggtttttgccaaacttggtttttccgagaccgtcttttctcagaggctcagttttaccgtcctatct

SEQ ID NO: 642050 - DNA, 120 bp, Artificial Sequence
  ENSG00000181847_45 (sequence is synthesized)
ataaacctctccctctagcatagaaaatgcaatcctgaaacactgcacagcagggcttctcaattcgggatcacatttgaatcacctgaggagattttaaatcatactgatgccgaggcc

SEQ ID NO: 642051 - DNA, 120 bp, Artificial Sequence
  ENSG00000181847_46 (sequence is synthesized)
taagaggtcgacagagtcaagtgcagtaaacagtacaagaaaatagagaatggaaagctgcctcactaagcttagtgaacaggaagtaacaagaagaaagccctcagaatccattctgtg

SEQ ID NO: 642052 - DNA, 120 bp, Artificial Sequence
  ENSG00000181852_0 (sequence is synthesized)
gtctgaggcggcgacgagtggtaggagtcttctttcccctccttcccctttcccttcccttcccgggagaggctgggacccggcaccagggcagtactgtggccgctgcggcctcagctc

SEQ ID NO: 642053 - DNA, 120 bp, Artificial Sequence
  ENSG00000181852_1 (sequence is synthesized)
cgactgggtcaggttgcggagactccaggccgcttccagggcgagtactcctgattgtgacatcacattcatcccctgggcgatggagcttgtcactgggaaggaatactcagtcggaga

SEQ ID NO: 642054 - DNA, 120 bp, Artificial Sequence
  ENSG00000181852_2 (sequence is synthesized)
atagccaacaagatgggttactgggagaatctcttcagtggcactgagtggaggcatcagggggttggagccttgtgaacagggaacctgccccccaacacttggaaggacctgggtttc

SEQ ID NO: 642055 - DNA, 120 bp, Artificial Sequence
  ENSG00000181852_3 (sequence is synthesized)
agtgatgagacatggggtatgatgtaacccgtttccagggggatgttgacgaagatcttatctgccctatttgcagtggagtcttggaggagccagtacaggcacctcattgtgaacatg

SEQ ID NO: 642056 - DNA, 120 bp, Artificial Sequence
  ENSG00000181852_4 (sequence is synthesized)
ctttctgcaacgcctgcatcacccagtggttctctcagcaacagacatgtccagtggaccgtagtgttgtgacggtcgcccatctgcgcccagtacctcggatcatgcggaacatgttgt

SEQ ID NO: 642057 - DNA, 120 bp, Artificial Sequence
  ENSG00000181852_5 (sequence is synthesized)
caaagctgcagattgcctgtgacaacgctgtgttcggctgtagtgccgttgtccggcttgacaacctcatgtctcacctcagcgactgtgagcacaacccgaagcggcctgtgacctgtg

SEQ ID NO: 642058 - DNA, 120 bp, Artificial Sequence
  ENSG00000181852_6 (sequence is synthesized)
aacagggctgtggcctggagatgcccaaagatgagctgcccaaccataactgcattaagcacctgcgctcagtggtacagcagcagcagacacgcatcgcagagctggagaagacgtcag
